United States Patent Application Publication US 2005/0228172 A9 - sequence listing, part 201

SEQ ID NO: 910253 - DNA, 444 bp, Homo sapiens
aagtttaattggctcatggttctgtaggttgtacaggaagcataacactggtatctgcttctggtgaggactcagaaagtttataatcatagtggaaggctgagggggagcagctgtctcacatggtgggattaggaagaagcaagagagagagaaagtgaggtaccacacacttttaaacaagcagattttgaaagaagtcactggctttcaagcagacagcaagaagggagtggtgctaaaccattcccattcctgagaatccaccttcatgattctatcacctcccaccaagccccacctccaatactggggattataattcaacaygagatttgggcagggacatatagtcaaactatatcagagatgtccgggtcatggggatggatccctcatgaacagattaatgccttccctgagggaggggaagtgagtgagttc

SEQ ID NO: 910254 - DNA, 683 bp, Homo sapiens
ttgtgaatattgatacatagctttgcaaaacagtagggacagatcrtatttctgttatcaatatctgtcattacacaatgtatgcatatgtgaatagataggcaataactttaccatcaacattgtatattatgtttagaaaaaggctttgctaatttgatagacaaagcttccataatattggaatattatgaagttatagcctttcccatgttctgtaatccaggtgtattgcctttttcatgaattatctattcatatcttttttcatttatcttttggaagttttgatggtttaaatatcaaattttattactttttaatagaacaaagacaaaagccgtttgtctattttatttattatagacaataattttgtcttgttatttgcctttttacttcacccggttttaactctatcttctctatcaagcagaaaaacattgtcactggaaagactgaaactaacatgagtggaaaagaattgaagctcaagaaggtgagaagcactttgcttcttcaaatgagagaaactattcattctttgatcaagtattttgtaaggtaatgaaaaaatatgaaaataagtgaaatcaatatgtcgaagagatatctaacatctgtgttcactgcagcagaattcacaataactaagacagagaatcaacctaagtgtccatcag

SEQ ID NO: 910255 - DNA, 683 bp, Homo sapiens
ttgtgaatattgatacatagctttgcaaaacagtagggacagatcatatttctgttatcaatatctgtcattacacaatgtatgcatatgtgaatagataggcaataactttaccatcaacattgtatattatgtttagaaaaaggctttgctaatttgatagacaaagcttccataatattggaatattatgaagttatagcctttcccatgttctgtaatccaggtgtattgcctttttcatgaattatctattcatatcttttttcatttatcttttggaagttttgatggtttaaatatcaaattttattactttttaatagaacaaagacaaaagccgtttgtctattttatttattatagacaataattttgtcttgttatttgcctttttacttcacccggttttaactctatcttctctatcaagcagaaaaacattgtcactggaaagactgaaactaacatgagtggaaaagaattgaagctcaagaaggtgagaagcactttgcttcttcaaatgagagaaactattcattctttgatcaagtattttgtaaggtaatgaaaaaatatgaaaataagtgaaatcaatatgtcgaagagatatctaacatcygtgttcactgcagcagaattcacaataactaagacagagaatcaacctaagtgtccatcag

SEQ ID NO: 910256 - DNA, 683 bp, Homo sapiens
ttgtgaatattgatacatagctttgcaaaacagtagggacagatcatatttctgttatcaatatctgtcattacacaatgtatgcatatgtgaatagataggcaataactttaccatcaacattgtatattatgtttagaaaaaggctttgctaatttgatagacaaagcttccataatattggaatattatgaagttatagcctttcccatgttctgtaatccaggtgtattgcctttttcatgaattatctattcatatcttttttcatttatcttttggaagttttgatggtttaaatatcaaattttattactttttaatagaacaaagacaaaagccgtttgtctattttatttattatagacaataattttgtcttgttatttgcctttttacttcacccggttttaactctatcttctctatcaagcagaaaaacattgtcactggaaagactgaaactaacatgagtggaaaagaattgaagctcaagaaggtgagaagcactttgcttcttcaaatgagagaaactattcattctttgatcaagtattttgtaaggtaatgaaaaaatatgaaaataagtgaaatcaatatgtcgaagagatatctaacatctgtgttcactgcagcagaattcacaataacyaagacagagaatcaacctaagtgtccatcag

SEQ ID NO: 910257 - DNA, 624 bp, Homo sapiens
aaggaggtgaggatgcagcagctgtggtgggagtctcagaaaacacagcagtgttcacttccagagcagagggccccatctggggtggcagctcccgtgaacagagatgaaatcagagtgaccaactcttcctagttgcctggaactttactggttttagcactgaaagtcctatgtcctaggaacctccccaaacctgggcaaactgggacgcagctcaccccagatgaactggaacagagtgggccaccaaagggagatggcaaaggcctgggaccgcacgggtggcagagtataaaaagtacaagtgaaaatagatcaacaaaaagtgaggatactcccgtggaaggtaagagatgtgttccaggtggcagtggcttataaagatactgtgatgtcacatgggaagaagccattctgagccttttaaaattttttctgtcttttaaaaaatttccaatttttaattcttatgggtatatagtaggagtatgtatttatggggtacatgaaatattttgatacaggyatgcaatgtgtaataatcacatcatggagaatggggtattcatctactgaagcatttatgctttgtgttacgaacaatccaattatactctttta

SEQ ID NO: 910258 - DNA, 612 bp, Homo sapiens
ctgcagacacaggattgaactaaatgacaacctccctgccctatctatacagcactttccctccagagctccttaccccactttatttttattcatagcatttatcactacctgaccttttactatgtatatgcttgatttttttattatctgttgatccaaatagaaagtcagctccatgaaaacagagctctctctgtgttattgccagtactagcgcagtgactcacatatagtgtatgatcaataaatatttgctggaaagacaaattctagctctaagacctaggattataaaacagaaaacagaatccggtatagtctggtggttaagctcagttgtcaagatgccatagttcaaatctcagctccatcatttctggttgtgtgaccttgggtaagttacttagctctttagggcttcaattttagcttttgtcacaggtaatatggacctaataatatgcctcataactcaaagttgttaaataaatacaataattcatgtaaagtaatcagcacargatctgagtttaggtcacttgttgctatgcgtgtctgggttcacaaagcatcgactcaccttttccaagctaggatgaaaaaattcag

SEQ ID NO: 910259 - DNA, 612 bp, Homo sapiens
ctgcagacacaggattgaactaaatgacaacctccctgccctatctatacagcactttccctccagagctccttaccccactttatttttattcatagcatttatcactacctgaccttttactatgtatatgcttgatttttttattatctgttgatccaaatagaaagtcagctccatgaaaacagagctctctctgtgttattgccagtactagcgcagtgactcacatatagtgtatgatcaataaatatttgctggaaagacaaattctagctctaagacctaggattataaaacagaaaacagaatccggtatagtctggtggttaagctcagttgtcaagatgccatagttcaaatctcagctccatcatttctggttgtgtgaccttgggtaagttacttagctctttagggcttcaattttagcttttgtcacaggtaatatggacctaataatatgcctcataactcaaagttgttaaataaatacaataattcatgtaaagtaatcagcacaggatctgagtttargtcacttgttgctatgcgtgtctgggttcacaaagcatcgactcaccttttccaagctaggatgaaaaaattcag

SEQ ID NO: 910260 - DNA, 636 bp, Homo sapiens
tttcccttgctctgtcacttacgcctgtrccattatcattggcatttaggtccagccgtgaagaaatgagtaggcactgccaggcaagtctaagaaaacagaccacaaccacttgctttttgaaccttgtctttcccataaagaaatttacaaaaagaaaaagaggatcacaaaatataaaatactcccagaagtctagtccaaaaatgtctatcaaaattaaacttttttttcccttcagacttgtaagggcaaaagtaaagcagataatccatgtgagttctagatcataataaacaaaaattcaaatgggcaatttatttttctaagtgacaagtaagtatagatctactaaatataggatttgtggtcattgctatatgtaggtagggaccagatgcttggtcacaagggataccgaatgagagtgaaaagccacttctactattcagacactcaaaagcatgtggcatttgctgtttataaaatgtttttcccttgtgtgaaatatttctgaaccgtggtctccagggcacgcacgttgcgctgttttttcctggagtcgtgtttcgtttgcacaaactaacccacattttcttctgtgattcttcatatgactaatgaagcacagctctg

SEQ ID NO: 910261 - DNA, 680 bp, Homo sapiens
aattggttgaagtactttccagatttcaaagatgtaagcagagtttattatcatctttagaaagtgttcttaaaattaaatctaattttgtccaacttccttcttaggttatggattccagagctatggaamggagggttttgtaccttgtaagcagtaggtcgtgaatatgctagtgttggtgaagtgggtttttagcaatactctttcctgtccttcagcctcctagcctctttataaccacttgataccctgctgctggaattacaaagaggaattgcagtggtcagcaagataagggaatgcaattttggccagccccatactgttaaccaagttgaaaacggatagaaatgggaggagagaagataagaaaagaattgcttcttcaaggccattatatacaggaatttatctaagttatgggctatatccacctgtttccttggaaaaataaaacctaatctctttgcattgtgcttaggcctgcaaacttcaagagaaagaactgcatcttccaaacagaaaagagccatgaaggcaggtgcttctcttcaccaaataggaaaggtccaaagtaagccctagtctcttggctgtgccatgtttgctgacatcatggtctgtttgtaccagagcaaggcagcattctggtggaggtgacacaacatgagatctct

SEQ ID NO: 910262 - DNA, 588 bp, Homo sapiens
tcaaataaattaggtgctttggaattttacagtcaatgtcaagaacatgccatgaggattacatatgaattcagagctattttttttctgaagcatattgcattaaaaacattttgaaatgatttgaagcaatacaatacaacataatacaaataaatgtggaaagagaaataataactgggcaggggcttcatttggaaggggaaaacatccatgcaaggcttggtcctgctaaatttcaaatgtggtatcagggcttgagtttttagaagaaacatcaaatagattcaagtctgctaaagcctgcaggtggctttgttgtacagtgtgggggaaaacctttgctacatagttctcagtctgagaattcattatacactcaatcattctctcctcctcatcagttctaaggttggttcctgcattaaagcccagagtcaatgtaccatggacttagctgtcattgtgaatatagtgtttgtgcccctrtgttgtgtctatcttgcgatgcaactacaaatagtccctgacttatcatggtttgacttcaatttttcaaatttaagatgggttcatcaaggcattaaa

SEQ ID NO: 910263 - DNA, 588 bp, Homo sapiens
actggaaggtgtcccagatagcatcagagcaccgagatgttgaaccaacattgtcctccaagagggtggtagaatattacaatgtgctcmtaaaaataaatggttaaattaaacctatgggcagtgactaaaataactacttccattatataaattcacctatcgtgggcagatgcaccatggctccttcaaagagctattatgacccctgtggacttcagtgtctgaagataacaggttctcagaaatttctgacaaattaataatctaacaagtgaaaatgtttgtataacttggatcaatggttccccatttcccagcgttagtttaaagggatattatgcttttgaactataaaaatcatgacatccttttaaagttatctacatatcttactcaataattagaaaaagcactgaacctgcagtcagagagaaacacaagtcttaaactctgacctgcctctactgagacttcaatttctttatctgcaaattgaaatacttgaacattctactcttctgtatatcatataatctgatgcaaatacgtacaaacaaacagatcctgactgatggtcaagggaaa

SEQ ID NO: 910264 - DNA, 516 bp, Homo sapiens
cctcaaatgaaggattttaccaagtgccctcctgtccacagatcccaagtcttcttgctgaactcatgggagatttgtcctaccagggatatgggggttttacttttctctgctatgkggccagctcatcctggagagctgtgactttctaggtggtcacacacatacacacatacataccatgaggtcattgcagcaatgcccactgggcctggggttctcccatagctcccagctgataaaagcctcctttctactcatttgggacttggggtcatcggcctccttctgtctcatttcacccaacatttgtcctagtccctgccaaagtgctgtttattttaatgctttgtaataaaattccacagtcagaggcttgtgtgagagctggggtccagagcatcaggtctaatgtttactatgtttattttcactgcacaatctgttattccaaagaaattttacaaataaaatagaaacacacgatctgccagcattactctgataccaaaacca

SEQ ID NO: 910265 - DNA, 472 bp, Homo sapiens
tcttccaaacaccaaggagggaggggtcatggagaccactgacttattaattttcttccattgctccactgaatcccagaaccaccggacagtgccactgaggatcctgaaagccaagctctacctctttgaagaaaaatttcttgtcacttaccaccctaaagcaatgagaatgagagtgtcctgtggccccagacagcctccattctcagtttacaccataaacatgctgggggaacactaaagggactccctaaaatcgatgccattattttttattttgaaaattttctaccagaaatggaccaggtgctgtggctcatgtctgtaatcccaacactgctggacaccaaggaggcagatcacttgaggtccgtaatttgagaacagcctggcctacrtaatgaaaccatgtctctactaaatataaaaaaattaagaatcatttgactccagaaggcagaagttgcaa

SEQ ID NO: 910266 - DNA, 666 bp, Homo sapiens
tttgtcaagattgagtttatttattgattstttgattttcagactgggcctacatctgtcactcaggctggagtacagtggcacgatttcagctcactgcagcctcaaccttctgggttcaagcaattctctcacttctgcctcccaagtagctgggaattacgggtgcactccaacaagccctactaatttttgtattttagtcgagatggggtttcaccatgttggcccggctggtctcaaactcctgacctcaagtgatctcctcacctcagcctcccaaaatgctgggataacatgcatcagccatctcacccaccctagattgagttcagaaattaaaaggagaatcatcaaaagagatagggcagacttaaaccataacattcactttgaaaacacagggggcaggtatagtcttggccctactagaaggtaaagggtgtttacccacaaaaatgatgggctcctctcagaaaaccagcttgcaaagatggaatctgagaatgtgagctggagcagaggccagagagaagattgtggctacacctgggaagggtggctgtcccaagctggaagccacccaggtagaaactgtgggctctacaggatgtgagagagaaatgaacgagggtccatatgtccgtcattgttctatcatctgga

SEQ ID NO: 910267 - DNA, 666 bp, Homo sapiens
tttgtcaagattgagtttatttattgattgtttgattttcagactgggcctacatctgtcactcaggctggagtrcagtggcacgatttcagctcactgcagcctcaaccttctgggttcaagcaattctctcacttctgcctcccaagtagctgggaattacgggtgcactccaacaagccctactaatttttgtattttagtcgagatggggtttcaccatgttggcccggctggtctcaaactcctgacctcaagtgatctcctcacctcagcctcccaaaatgctgggataacatgcatcagccatctcacccaccctagattgagttcagaaattaaaaggagaatcatcaaaagagatagggcagacttaaaccataacattcactttgaaaacacagggggcaggtatagtcttggccctactagaaggtaaagggtgtttacccacaaaaatgatgggctcctctcagaaaaccagcttgcaaagatggaatctgagaatgtgagctggagcagaggccagagagaagattgtggctacacctgggaagggtggctgtcccaagctggaagccacccaggtagaaactgtgggctctacaggatgtgagagagaaatgaacgagggtccatatgtccgtcattgttctatcatctgga

SEQ ID NO: 910268 - DNA, 576 bp, Homo sapiens
taggccaataatagagtgtttatcaacactctgtaataaaccagattgtcagtatggttttttccacaattgaaatagctttataattttcctccttattaaaataatgcattctctttgcaaacatattctgttataacaagaaaatgtaaggaagaaaataaacatcaccgatcctatcaccactagtgatagcttctccttttagctagttttctgtaattgcagctggctgagaaagaatggagcctaagacatgttcattcatcagagccaaaaggaaatgagagacctaaatcacagagcactgctgtggaaaggcatccatgagtttaacactcaatggatatgagaaaagcacaaggtgactggttgctgaagaaagagtaccaggtggaataggacagcaaagctatggtgacagaatgaagagattgacttctttgctgccttcagagaacaaaaccaatacacagagaaaatctgccaggaagtcagcctttgattcaatttaaacaagttcctrataatcagagagatctctaggaagaatatattgctctctaagatagttaa

SEQ ID NO: 910269 - DNA, 660 bp, Homo sapiens
ggctggcactcctggtggctgttccactccaactactcaggcttagcagaaatcctgatttcagataaccctcctytttccttcttttccagtctttcttcaattccagaacatatccacattaccctcccactccaaatttttgttttattattttctttcattaaacttttaagtgtaattttaatgctatcctaaataattagtgtgtatacacaggcaaacacacaaacacacacacacacacaataaggaggtttgctttaggggaaggatggcttggtcttcaaaattacaatggctagcagggaaaatgtctgtatttcattctaaggaaggtcacctccctgtctataagagaaattgacttctcctaatgcagcaaagaaaaaggcaaaaagtaagttgaattgttgacattaaaaaaaaatagattggacataaatattcggctgcatgtctgtgaaggctccagccaaagtggtttaatgatgctggctcagagaagggctgggagcactccaagactggtcagggagacagtagaagccaccagaaaaaatggtagaagacaccagcagaggtggcacctgggtggcccttacttgactgtcaacttcagagcatttcccccaacctctgccattttgttctggtttc

SEQ ID NO: 910270 - DNA, 660 bp, Homo sapiens
ggctggcactcctggtggctgttccactccaactactcaggcttagcagaaatcctgatttcagataaccctcctttttccttcttttccagtctytcttcaattccagaacatatccacattaccctcccactccaaatttttgttttattattttctttcattaaacttttaagtgtaattttaatgctatcctaaataattagtgtgtatacacaggcaaacacacaaacacacacacacacacaataaggaggtttgctttaggggaaggatggcttggtcttcaaaattacaatggctagcagggaaaatgtctgtatttcattctaaggaaggtcacctccctgtctataagagaaattgacttctcctaatgcagcaaagaaaaaggcaaaaagtaagttgaattgttgacattaaaaaaaaatagattggacataaatattcggctgcatgtctgtgaaggctccagccaaagtggtttaatgatgctggctcagagaagggctgggagcactccaagactggtcagggagacagtagaagccaccagaaaaaatggtagaagacaccagcagaggtggcacctgggtggcccttacttgactgtcaacttcagagcatttcccccaacctctgccattttgttctggtttc

SEQ ID NO: 910271 - DNA, 564 bp, Homo sapiens
aatgggccagaagacccaaacacaagctaccagatgtatattcaactaggtcaatcatgaaggagtttctcacatgcattttttaataataaatagccaccaattattatatagccaggttgcaagttgacayattattaaaatgtacaccaaaaaaatgcagcttcctatttcttataaatctttctcatgaactcccatcccatcaggcagcaaaaaggggaatggggaactttaagtttgaatttgtccattgtagcgtataaatctccctttgggtttcaagagtctcgtttagctgaccttatgcctttcaggaaaacatagccttgagatggcctttcctcttcctgctctacttcaaagtggcattttatgttgtaaggtatttactaaaccttgttgtcatatgggagaagggggcctcagacttcttagacttatcagggaccctggattccacagtcctctggatctcatcagaagctaactagtgacctctgaagtatgactggtcccactggttcacagggatcatactgacatactctactaaaggccctg

SEQ ID NO: 910272 - DNA, 618 bp, Homo sapiens
tcatcaaccagggaaggttggctcttatcacaggagaggaggctatagacgatccttgacttaggatggtttgatttatgatttctcgactttagggtgatgcaaaggtgatataggcattcagtagtattttgagtacccatacaaccattctgtgctttcactttcagtatggtatttagcaaattacatgagatactcaacactttattataaaacaggctttgtattagatgatttgacccaactgtaggctaatgtaagctgagcgcatgtaatgcaggctaggctaagctatgatgttcagtagcttcagtaggttaggcaaactgaacgcattttcaacttatgatacatttatcaggatgtaaccccatcttaagtcaaagagcatctgtagaagttgacactaaacccagacaaactttgtcacaaaatatcatatcctatttattcttttaaaagcccattcatcttttataaaaatcacttactttccctcaggtggcctayatccctctccccctcccctattaagatggatatacagctttttaaatatcaccacttttgggggtatttgcttttccccccaggatgcccctgtgcatctaacat

SEQ ID NO: 910273 - DNA, 589 bp, Homo sapiens
gagacatcatatcagcctttgaggtcccaccaagtaaccgtcttctgtccttgtctatcctaatcccctaagcagkttcagaccctaagtcatgaaaaactttgcaacaccttaaaataccacattctgctttctcttacatgtgttgcaccattatctccctttggagattttaaacttcctgatggctgggacagtatcttacatatctttgttgctcaatggtttgcacttggtaccatctccgtgtgtctgcctgagttgagaatttttcctcaaataagtccccctacaggcaaggagagttgtccttgattagaaaaaactttaatggctatattttgaagaagggttaaggggacttctcctgggaggagtgtaattggaaagatggaaagattatttccagaacattagggattgcagtatttgaagaatcaaagactgtctgctctgtcaactcaagtatgctcctttgcatttaaaagcaatgccatttacttacaaattatagtggctttgatgcaaatgaaccactccaggacagtttcctctcccccagattagctaagaaatgctggggaaattg

SEQ ID NO: 910274 - DNA, 606 bp, Homo sapiens
ccatatgctaattcatttattcttcccaacaactcattgaggtaggcatatttaccaatgaggaaactgagacacagagaagccaagatcacacagttaataggtagtgaagcagagatttaaatttaaaaaaactggttctagaatacacgttcttaagccctggtaattatttcaattattttacctatttcctatggcacagcaggagaatgaacagggcttagtagttacctgcacagcactatttgaaggatgaaagaatatccgtcttatccatccccaacccagaaaatctttcctattaaccaccgtgttatcagacattttaccattaaacaattaaaggtctgggctgggtgcagtggctcattcctgtgatcccagcactttgggaggctgaggtgggtgggtcacctgaggtcaggagttccagaccagcttggccaacatgtgaaaccctgtctctactaaaaatacaaaaattagctgggcatgatggtgcatgcctgcaatcccagctactmgggaggctgagataggagaatcgcttgaacctgggaagcggaggttgcagtgaggtgagaccgtgccactacactccag

SEQ ID NO: 910275 - DNA, 625 bp, Homo sapiens
taatcaagtcagggcagaaatatcattatgacagaaggttcaacaagattgtctagttattacattgtttattttcttctaaaaatgtaatactgtagtttaaaagttcacttagctgtaatttggagttgtgttaaagaaacatttcatattcaagttaaatcagtcttgaattttaactaaaagaccacaaaattttgtaaaatacagcatcaaaagtcttggctaatgaaaaaagttaatataaagaaaatttatgaaatagatgggttatgtaacattctacaaagtattaattctgatagttgctgaacataaaatttgcatttcatataaacttataaatgctttctgacatggtagatatatattttatcggaggcagggaaagaggatataccctttgggaaagaactatacaaagatttttatttgactatatagtttgagaatgagtttctgagtaattccaccttttgctcataaagaacctcggcatttgtgttgttgctcaagtttgatgtggcttctccacaggaactttctagatctatgacagtaasagaccagagcagtgagaatatccaggggctttgctgtgccactgacctcactgagtctgtta

SEQ ID NO: 910276 - DNA, 638 bp, Homo sapiens
tgcaggcatgtacatgggcataagctttcagctcatttgaataaacacaaagaaatgtgattgctgggaaagaggtacgtggaggagagtgtggaactcatcttgatggcattgctgcacccctgaatccagccatttttgtgtatgcagccagaagcactcctggacatttcagtactatcaagctacgaatccccctttttaacctaggacatttaaagtgagttgtctgccatcttatattgaggagttgtgactaatgcactagtactcctttattgattatcaaatgagctatatttttcctgatgttatatttttatcctatacctgtgtgatcacagagctaaaagcagaactaccatagacccagcaatcccattactgagtatatacccagaggactataaatcattctaccataaagacacatgaatataaatgttcattgcagtagtattcacaatagcaaagacatgaaatcaacctaaatgtcctttaataatagattggataaagaaaatgtggtacacgtrtaccgtggaatatgatatatccataaagaagaatgagatcatgtatttagcaggaactaggatgaagctggaggctattactagcaaacttacgcagggaca

SEQ ID NO: 910277 - DNA, 687 bp, Homo sapiens
gtgggaaagattgcctcttgtggtttgagtgccagtccagccwctgtacaatagaacaccaggtagaattctaaagtttttgattccattccctgactccggaaagcacttttggatctgcctgtggctggggaacttgctgccctgaaaaaaaggacataagcctggctggctttggcacctgctgattgtagagacttagagctttaagcaaacataggcagtggccaggtagtggttactgtgggtgttgtgtaagacccatgctgtgcaggtttcaagtctgatcaagtaccattccagtagtggtggccacaggggtgtttgtgccacctttccctcagttccaggaggctcagaatagagacagaaagatactttggttgtttaggatattgtaaggaagaaaaacaagagtctgtgcctagtaatccagagaattattccagatcttcttcaaggcaatacttctatgagtcttcaagaaccacagagttgctgggcttggggtgtcccctaatgcagatatggcctagatcataatactcaagtccttttgaatacctgaaatctttaacaagaaggatgagtacaaagaagcccagactacaaagactacaataaatatctaactattcaatgtccagacactgacaaacatccacaagaatcaagaccacataggaa

SEQ ID NO: 910278 - DNA, 584 bp, Homo sapiens
ccttctggaagctgtgaccatgggaagcctagagtacagtggttggatgtcagggcccaacaccctgagggcatgagsaagaaagaaagctcagtggacaggactctgggattacattctttagttcaagtgtgctgctctatcttccttatattgaaaaattggatttctttccaaggattcaactgaaatacgagatgccatatctaaaatttttgcaaccactgtctaccacttaggtataggatacatcatggaaatttgccctctgagtacctaggcgcaagattgcctccaacaccttgctgtgtttgctatgcaaaatttgagatactgaagagctgttagctgcctaaaaaaaaaaaaaacactaggatagaagagataagtatctgggcattggtgcttataagctcagttttggagagcctgaaaagtactgagatagcagatgtggaattaaaaactcatgctatataactttataatgtgagcaacaacaactgcaagcatgggtatatatatatatatctctctctctccatggctattgttcactcacaaagctccagcctccatgaaag

SEQ ID NO: 910279 - DNA, 584 bp, Homo sapiens
ccttctggaagctgtgaccatgggaagcctagagtacagtggttggatgtcagggcccaacaccctgagggcatgagcaagaaagaaagctcagtggacaggactctgggattacrttctttagttcaagtgtgctgctctatcttccttatattgaaaaattggatttctttccaaggattcaactgaaatacgagatgccatatctaaaatttttgcaaccactgtctaccacttaggtataggatacatcatggaaatttgccctctgagtacctaggcgcaagattgcctccaacaccttgctgtgtttgctatgcaaaatttgagatactgaagagctgttagctgcctaaaaaaaaaaaaaacactaggatagaagagataagtatctgggcattggtgcttataagctcagttttggagagcctgaaaagtactgagatagcagatgtggaattaaaaactcatgctatataactttataatgtgagcaacaacaactgcaagcatgggtatatatatatatatctctctctctccatggctattgttcactcacaaagctccagcctccatgaaag

SEQ ID NO: 910280 - DNA, 617 bp, Homo sapiens
ggcattggatttgcaagcagagctgttcttacgtccccraagaaagcagatatctaaagtgtctgtaatttggagtaagttttcatacctcctgcgccaacccatctcttaccacccctgcatcaaatacgtcctttgcctgccaatggatagctaaattaccttactgaaaagactgtcaccccgtaatagcagccaaatcttacaatggcaatatcccagaaaaaagaataccagtgaattaaaggtacatgaagcagagaattcaacacctacgataatcttcaaagattaaaaagaataatttgataacattttagacagtttctgattttaaaatattaagtaggtaaaaattaagaaatattcataatatgataaacaacccctatctttactcacttaatactgtcccattaaatcaggaacaaagcagggattctcactagtcccgttaagaatttgtgttaacgaggaattgaactggagtaaaacatcctgaaatagttcttcaatatgtactgtgttataaagggagagatatgtacgattcaatacaacatgtgggaaagttggctatgggtaaagaagctcctcccttcatagtgtactcgaaa

SEQ ID NO: 910281 - DNA, 617 bp, Homo sapiens
ggcattggatttgcaagcagagctgttcttacgtccccaaagaaagcagatatctaaagtgtctgtaatttggagtaagttttcatacctcctgcgccaacccatctcttaccacccctgcatcaaatacgtcctttgcctgccaatggatagctaaattaccttactgaaaagactgtcaccccgtaatagcagccaaatcttacaatggcaatatcccagaaaaaagaataccagtgaattaaaggtacatgaagcagagaattcaacacctacgataatcttcaaagattaaaaagaataatttgataacattttagacagtttctgattttaaaatattaagtaggtaaaaattaagaaatattcataatatgataaacaacccctatctttactcacttaatactgtcccattaaatcaggaacaaagcagggattctcactagtcccgttaagaatttgtgttaacgaggaattgaactggagtaaaacatcctgaaatagttcttcaatatgtackgtgttataaagggagagatatgtacgattcaatacaacatgtgggaaagttggctatgggtaaagaagctcctcccttcatagtgtactcgaaa

SEQ ID NO: 910282 - DNA, 556 bp, Homo sapiens
ttattagtaagaaatccagggagacatctgtacttttctgggaagagaaggtgattgatggcagcacttagtagcctgtctaaatgctgattgccatgtcgattccgtcttctcgtgtctgattcaataactgtgtgggcctggctctgctggacctaaatctctgggatgagttaagtcgatgggaattattcacctccttaaaaacattattagggccaggcagggcggctcacgcctgtaatcccagcactttgggaggctgaggcgggcggattacatgaggccagaagttggagaccagcctggccaacatggtgaaaccctgtctctactaaacatacaaaaattagtcgggcatggtggcacatgcctgtaatcccagctacttgggaggctgaggcacgagaattgcttgaacccaggaggtggaggttgcagtgagccaagatcatgccactacactccagcctgggagacagaacgagactccctctgaacaacaacagaaaatcatkaggagagaaaaatggaataatgggcaatgcctagtggc

SEQ ID NO: 910283 - DNA, 609 bp, Homo sapiens
tggtacttgccacctactaacttgggctgtcagacttatttgctatgcagttatctgacctcccctattatattgcatatgccatgagagcaaggagaacataaaccaaacacaatctttttcggttttagacagtctcactatgttgcccaggctagtcttgaattcctgggctcaagaagtacttccgcctcagcctactgagtagcaaaatataatcttcatggttagtgttttgcttactgaaagtcctatttaatttgtcttctttgtcctatttctaagcatcctatttgaatgtttaaaaaagcagtgtagttaactggaaaattatttctattctactatctaatagcttttagtgtggtcccaatcagctagctatgcctcagtttcatcatctgaaaaatggggacagtaatactgcactcatatgtacacttaacaaatacttgttgagcagctacactcagccaggcagtgggctaggagactgacttgaactgttyaaataataggcaactgtaaatttttcttccattaagtcttcagtgtataaagagacttaaacattaagcaaacaatgtaggagttgataagaaagtccca

SEQ ID NO: 910284 - DNA, 600 bp, Homo sapiens
atagtttgtaaatgatagagataaaaytcaaacccaaatagactagctcctatgtctatgtgcctggaaatgtaccaatggtaggattgtttgtttttaattttttgccctataagagcaatggagttcagctccatctccatgtctgatcatggtaattacgactaaagcagcactttgaactcatctatcacaatttctttcattttgctcatgagaacactgaggactaagccaggtctaagatcgaacaatgagtgaatagcagagccaggaattgaaactatgtgccattacctcacacttccccagcctgaatttcttccactacactatgcacttgccctctactgggcttcagcagcagcatgtattaccccaacatgggaggaaggagggtacattttcccacaaaatggcaacattttaaaaattgttttaaagacggggtcttactatgttgcctaggctgaatttgaactcctgggctcaagcaatccttttgcctcagcctcacaggtagctgggagttcaggggcacagcactgcatccagctggaaacattttttaaagagtaggctgacataccaactaaataa

SEQ ID NO: 910285 - DNA, 639 bp, Homo sapiens
aaataaccagaaaggcttccatggtcaccttcctggacacctggctgtgagccaaacaacttcttcaatctcttgccaggtctcyagtctgtgagtcaaagaataccatatttatgagtgatgttttgagatagtgggtgctctgtgaatttcaggtagtgtttttttgtttgtttgttttttcctcaccagggagcatcataatttttcagcatgtttgttaacaatgtacattttattttaaaaaaaatcatgacaataaattcatacattgccaaataacaggtgtctgctatctgattctgtcagataaactttataccttttctggaatatatgagttagaaaacttcaggtatcagactcagctgcctcaagtactgacataccaggcatttctctgtttaatcatcactcaactcatggatgaaagtattaggaaacagaagggattatgaagataactaaagttattactggcacttgaactgaatttctcttaaaatatcagtttactttgatatgtgctacaaagaccttaaccatgtttctgtctgattcttttgtgaaatgaaggtatcaatacagaatgaactgttttgataagctccctcacaattttaaagtatagagttaatc

SEQ ID NO: 910286 - DNA, 620 bp, Homo sapiens
tttccttttattcaaactctccatatatttttaaaaaataacatggatattatgaaccctacttgcaacttcaaactcagtgttctttattgatgattaataaggttatatagtttaattatgattcctgggtaggatcaagaaaattagacaaatctcaagaaatttccagtctaatatatagatcaagtatgctacctagaatgtaccaagtgcccatttatgccacctcaatgagttttccaaaaaaaaacaaatattttttagatgaattatttgttgatttccatactatcatggaaagatcagtgaataccacccatattttcatttgaaaagatggactcatttttggccttattcacagacagcctttcttccagacaaatttcagcatattttgatgactcattgtagaaattggtttattatttgcagcaggagaaagcattgctagccaacagctgagaaaaagaaaaggttacaayattctgttttaggtctctaaaggccttattgggcagaatgtaatttccagctgtggattcatccagcctttgaggacttacccctgcctgttttctgaagtgttctatgattgttcattacctcaagttgtc

SEQ ID NO: 910287 - DNA, 620 bp, Homo sapiens
tttccttttattcaaactctccatatatttttaaaaaataacatggatattatgaaccctacttgcaacttcaaactcagtgttctttattgatgattaataaggttatatagtttaattatgattcctgggtaggatcaagaaaattagacaaatctcaagaaatttccagtctaatatatagatcaagtatgctacctagaatgtaccaagtgcccatttatgccacctcaatgagttttccaaaaaaaaacaaatattttttagatgaattatttgttgatttccatactatcatggaaagatcagtgaataccacccatattttcatttgaaaagatggactcatttttggccttattcacagacagcctttcttccagacaaatttcagcatattttgatgactcattgtagaaattggtttattatttgcagcaggagaaagcattgctagccaacagctgagaaaaagaaaaggttacaacattctgttttaggtctctaaaggccttattgggcagaatgtaatttccagctgtggattcatccagcctttgaggacttacccctgcctsttttctgaagtgttctatgattgttcattacctcaagttgtc

SEQ ID NO: 910288 - DNA, 486 bp, Homo sapiens
gggcccaaatggtgcgagtctctttgcatagcaagagtgacctttactccagttcacaagaagttcctcatctccatctgagaccacctcagtctggacttcactgtccatatcactatgagcattttggtcaaagccattcaacaagtctctgggaagttccaaactttcccacatcttcctgtcttctgagccctccaaactgttccagcctctgcctattatcctgttccaaagtcactttcacattttaaagtatctttatagcagcaccccactctactgataccaatttactatattagtctgttcccatgctgctaataaagatatacctgagactcagtaatttataacaaaaggaaggaagtttaactgactcacagttccgcatggctgaggacgcctcacaatcatggcggaaggcaaaagaagggcaaaatcacgtcttacatgrcagcagacaagagaacatgtacaagggta

SEQ ID NO: 910289 - DNA, 569 bp, Homo sapiens
ggcatgagccacgccgcctggcaactgtactgttttctagtgttcccccgctccccccatttactctataatctcatcaaactgaacccttgctaagacacctagaatattttcatttaagtactttkgctaacaaaatcacctctattagaaatggcccacatccctgcctgtcagtcttccctgtctttgaagaccctttccagatcctctctcttcttgaccaccacatccccatccctgtgcctgcattcagctttgatcgctctgttctgtgagttcttgtgccattttgtttgtacctcttaaagcacttacataaatatatatttcaaaagtcacgtaaaacttatttttctctgataattgtgtatatttttaatagcaacctttttttgttcatcctaaattctagccatactatgtcaatacctgagattattgagctgctagatttgttgcaatatggaaatcccattgcatcctttaaaatacctttttgtttgtttatcaaaatcattgatacatttcccccaaaatatgttcctccaagaaaattctgttatcaa

SEQ ID NO: 910290 - DNA, 517 bp, Homo sapiens
acctcagaacagggaactgaggcacagagaggtctctataactttgtcaggtttgtgcatcttctaagtaggacttgaacccccatytttatgcaccaggcccagtgttcttggtcactccaatatttctatattgtctcatctcaatacaggtatttgcctacatagtcagtctgttggttatgagtgcaactcacactgcaggttcttgttaaaatccaactgagattcagggggtttcgctatgcagatggtgaacaatgggtcaaacatttaaactgtcaataaatgattactcatttctctatggtctttggcaggaagatgtcaaaaactgtctttttcatagtacatttcccagcatcttgcctccagggtatgacagtagatcttcagggatcaagggaatctactgtccacaccaagctgaggaagagaatactctgccactggcctcataactaggcgcaccccggaaagcagtcaactgaaagtactgtggaaattaaattgttaa

SEQ ID NO: 910291 - DNA, 607 bp, Homo sapiens
tcctatggagttatattcccagggggattatggctgcctctgctgagttatataggtcaccaaagaagtgagaaaaaagctggcagtcaccagtctcacccctctcccattcctaaagaccagtcttactcccaccatgcccccgcccccctcaacagcaccaagtctatttccaggcagctggtgaccagggctgagaacttgccccagaccacgagcctctccattgagaaagcaagcagactcacagtttttcagcatctcagggagcctgcagtggcgatccagttccttcagagggtctgtggattctctcagctttccttgtatgttcctgtggtagctcttgaagcaaaagttcaaaatgagagtctccacacgctgatctatctgtccaagtggggctgcaggctggtcctgcctcctatctgtcatcctaatcccttcctagaaatttcgtttttatagctttactgagatataatttaaataataaaatttacttacttcagtgtgcaattgaatrgtttttagtaaacttagagttctgcagccatcacctctatctaattccagaacatttttatcaccccagaaagaaacacct

SEQ ID NO: 910292 - DNA, 606 bp, Homo sapiens
aggttattcacatattccctgaagaacaggcagtcaggttaaaatctaaaatacaagcaggaatatgtcagcaataatcttcctttttcatttgtctaccttcactcttccattgccctctttgttcttggctaagaaatatgtaagtgtgaaggtcatgagacaggagtatggttctttcgaggagctgagagaaggtcaatatggctgaagcttttcaggctgagttttgaggaactagcatgtaaagacaagaaagaaaaggaggagccatgaaaataaccaagaaggagtggccaaggagaatctggtgttctagaaaccaagcgagtggaatattttaagaaggatgaaggaaaggctgtattgaatactgctaagaggtcaacagagataggattgaaaatgtttattgtgcttagcaatacacaggacatcggtgaccttatcaaaagcaattttggttgatggyagtcagaaaaaatgctaaagcagagtaaattaaagagtgaattagtcactataaggtaggtattattataaaaatgaactgcaaaatttcagtggtttaacacacaaaaccttattttttgctactgtaacatg

SEQ ID NO: 910293 - DNA, 714 bp, Homo sapiens
agatcattgggtcctgtttttcttttaaatccattcagcccctctatgttctttcttttctgagacagygtcttgctctgccacccatgctagagtgcagtggcacaaatacagcttactgcagcctaacctcctgggctcaagcaatcttcccacctcagcctcctgagtagctgggaaaactctatgtctttatagagtttagaacatttatgttcagtgtcattattgataagtaaggacatactcttgccattttgtcatttgttttcttgttgttttgcagttttctcttcattctttctttcctgttttccttttagtgaaggtgattttctcttgtggtatgttttaatttattattttttattttgtgtgtgtgtgtatctgttgtaggttcttgatttgaggttaccatgaggcttgcaaataatatctcataacccattgttttagaccgatgacaatttaataaagattgtataaacaaacaaattaacaaataatcaaacaggaaactaataagaactccaactttgttcccccaattttaaaattcttgttgtttctatttagaccttattgtgttttctatgtcttgaaaagttgttgtagttaatattttggagaggtttatcttttagtctttctactcaagacaagggtagtttctacactacaattacagtgttgtaatactctgtgttttcctgt

SEQ ID NO: 910294 - DNA, 661 bp, Homo sapiens
ctaatttatttaacaaatttagtttagacattagagtatttcttatatttcactgttgcaaatagtgtccttgacattctcattgaaataccttgtattagttttctactgctgcatagtaaatcataacaaacttagcagcttaaaacaagaaggatttattatctcacaattttcatgtagccttgactaggggaggatctgcttccgtgcttcttcaggataatgatggaatcattattttgcagttctatgactgagttccttgctttcttactggttgttggccaggcaccatgctcagctcctagaggccactcttaggttcctgctgcatagtgccttccataggtcctctcacactctgaagctctttgatttcaggaaaggctcagtctctttacagggttcacctaataatgtcagatctatctgtagaatcttcctttaggttaactctaaagtcagctgattaataatataaatatagtaaagggagtgattcccattatatgcacaggtcttgctcacattcaagggagagaattatggaagacatgtacaccaacaggtgggaacattggaggttatcttataattctacttattacatayccttagatcctgtgtgagtttatctgcaagatagattcaccgaagt

SEQ ID NO: 910295 - DNA, 649 bp, Homo sapiens
ttgtagggacatggatgaagctggaaaccatcattctcagcaaactatcgcaaggacaaaaaaccaaacatcgcatgttctcactcataggtgggaactgaacaatgagaacacttggacacaggaagggggacatcactcaccctgttgtggggtggggggaggggggagggataactttaggagatatacctaatgtaaatgacaagttaatgggtgcagcacaccaacatggcacatgtatacatatgtaactaacctgcacattgtgcacatgtaccctagaacttaaagtataataaaaaaaataataatagaattacttatcttggaaatattcaataaatgagattggccttaccctctgattaattcaagcttgagagactttacttaattgtatgtcaatattctacctgacattacttccatcctcgcttaccattttctcccaactaagcttttctaacgaggaaaaaagtaacttacataaagagaaacttctgctatctggtgttataacagatatgccaggcttccattctacctmatttctacatgagaaaattgttatccatttccatgatgccaaatgacaataatacttgaaaaccagtgatgcctacctgagtgatgtccattcctgagt

SEQ ID NO: 910296 - DNA, 633 bp, Homo sapiens
atcatcaatcactcccttaaaaattaaataaagtccacgtgagccatgaataagagaaactcaagggaaaataatcattattgtcacatctctcycttggtttcacattaagatggcgttttatttaaccactggccactttataatagtgttgtaatatgataaaatatgtcatttttcagtgtgacaaaactgcctagatattagtcatcaacttatactgactggaaaatctgtacggaagcatgtggctgccttcaggactgacttaattctcaagtcctgaagactaatgtgaaactctactggactttctcacgtgacaaaggatccttttattccactctctaagcctgataagtattataatacacagaaagtacgacaacggatgaggctttcaatatcaataagaaagtgtaagtattttgctggaaatacttcttattgttgcaagagaaaagctaaactccagttcattgtgactaatagctccattcattttcatatttgtttttgaaagccagactacagtaacacatcactgtccataagagcttcacaaactcctgtgctgacggagccctgctggccaaggagagccaaagcaaaggcttggggctctggacatga

SEQ ID NO: 910297 - DNA, 373 bp, Homo sapiens
tcagtccccttaggttctaagcccattgtctatatcctaaaagacaggagcctgtagatccataggtgatacttctagaattgaaaaagcaaacaaatttcctttttctctttcacatttatcattaggttaaaaagaaaataattgcttaaaatcttagcactctagctcagaaaagccttaatatctagcatggacaacccataggcccggtggctcttgtacttttacaaccccattccaaaaccccacagaccaaaacctgaaggctagtaaggaggaacatgagtmaacaaatgacctcattctccatttgtttacaaactccactgatgtctgtggtttccaactgatcattattttaaaaatgggt

SEQ ID NO: 910298 - DNA, 614 bp, Homo sapiens
gcaaagtactttaggcaaaaaatactaatttctacataagcctaattggtatgttcatctttactaacagcataatgcagatattattaataatattgagkgcactcaggaaagagttcaacagtgactgctgtaaagaaacaatctaactttcttcccaatactgtgggaatgttggtcttctgtgaacctatggctccatgacttcaggaaggcagagagaatcttcaatcatttcccagactcaatctcctacctcagaaaaagtgaaaccttggccaagccacccaaaccagtcacaaagaggttgtttatttcaaatccactgaaatataattataaactcaaccataaaatttcctaaactctgccctagaacgttgattgggtatttctaaaattaccctgtgatctgtatttactacatttctaatgacatcttattatgtattgaaagtgtagtgctaatttgagaaccacatcctcatcctgtacaggaatccaaatctattgctgccacagagaaataaatagccttttacaaaatcaatgaaggaagccacaaagggtcatttggtctagcccagtgacctcagcaggaatctaattgatac

SEQ ID NO: 910299 - DNA, 590 bp, Homo sapiens
acccgtggtgatatgtgggagcagccatgttgccaggaacatgtggggaaaagggcaagaaggcagcgggaatctccatktttgggtggacccagtttctaatggctggcatttgcatatcaaaggttgctggccttgctctaagagcctgggctttacaacaaactttattggagatgctttaaaaaatgaaaacttcccaaggaccccttttcctacaacattcccccctgtggagatgccacactaactgctgttagggagttttgagtgacgactccttctggctacttcctgctgaaaaggggcattgaatggggaacagctgctagggctccttttggggtcaatctaatggtcctcagaagaatggcatgtccatgtgtggttcaatttacaccaccatttgaagtttgattgcttctaggcaagaagaaacaatttgagttatagtattgagtatacagggtccaaatatcaatacaagacttataagcaagaaagtgcttaataatgggggttaaccaattccataaagaagacctgagttcaacctatgcaaatcaataaacataacccatcacataaac

SEQ ID NO: 910300 - DNA, 590 bp, Homo sapiens
acccgtggtgatatgtgggagcagccatgttgccaggaacatgtggggaaaagggcaagaaggcagcgggaatctccatgtttgggtggacccagtttctaatggcyggcatttgcatatcaaaggttgctggccttgctctaagagcctgggctttacaacaaactttattggagatgctttaaaaaatgaaaacttcccaaggaccccttttcctacaacattcccccctgtggagatgccacactaactgctgttagggagttttgagtgacgactccttctggctacttcctgctgaaaaggggcattgaatggggaacagctgctagggctccttttggggtcaatctaatggtcctcagaagaatggcatgtccatgtgtggttcaatttacaccaccatttgaagtttgattgcttctaggcaagaagaaacaatttgagttatagtattgagtatacagggtccaaatatcaatacaagacttataagcaagaaagtgcttaataatgggggttaaccaattccataaagaagacctgagttcaacctatgcaaatcaataaacataacccatcacataaac

SEQ ID NO: 910301 - DNA, 716 bp, Homo sapiens
ttatttcgggaagatgaactagaaatagcctgaagaggcaagggagagctgagtttgtaaacagcctctgtcctccaatccttcagaaaccattgttatttaaaagcttctttttatacttttttctctagttcctttttttttttggacagagtcttgctccaggctggagtgcagtggtgccatctcggctcactgcaacctctgcctcccggcttcaagcgattctcctgcctctgcctcccgagtagctaggactataggcaccggccaccacacccggataagctttgtatcttttgtagagacagggttttaccgtgttggccaggctgatctcgaactcttgttcttttttaactaataatggcagttctcctcattctcttccgtgttaccattttgtcaaaattgcttgactctatcttctttggtgttccttttccttttcttcctcttcatgctaaactatctggttcattgcctctgggtctttaggattaaaagaaacaaaaccaaaaacaaaccaaaaaacacctttcctgatattattatctgtcatccaaaaccttagatctactaccaatatttagaatatttatatattaatatttccatctactcttgagttcatcttatttgtcctctaaattattctagaacagaggcttttaaaratttctttctctctctctctctcttttttttttgcctct

SEQ ID NO: 910302 - DNA, 644 bp, Homo sapiens
ccattttgtaactgctaaggaataaacaattccattcaactttgggttgccaggaacttaataagtgtgtcctttaatctgtcagctaagtggatgattgcaaaatattyaataattcctgtaagatattcaataaaactggagggggcaagcttgtaacattcaattcttctcccagattcaatttaatcttggagcaacctgaaaatataattgttcctgcaaacaggatttttgcatctttgagttctttttcacaatgctctgttgagctctcgatttcagtgtgtgactcatcattgcttttccttgtaaatttccactccttccatcctgactcttagattgttcactgttcagacaaaaggagacaaaatcaaagatacggttgagattcccagattcggggaccctcataactattaatgggctttagcacccttcaggtccagtactcctatggcaataacctcttagttcatctacccagggaggtgagctagagccttcctctcccagagaggccataattctactatcatgaaagacagctttgcaaataaagaagaagggcttgagtctgacagtcctgggcattactttgagctagtgattctctgaatcacctggaaggcttgttaaaa

SEQ ID NO: 910303 - DNA, 557 bp, Homo sapiens
ctgcaatgtcctcttaacttgctttcacccttgccttcctaagttccattctcaacacagtagctagaaggaagtaaggtcagatcattagcacytgtcttctcaaagctctgaggtggctttccattttagtcagagtaaaagccaaagtccttataacggcttgtaatgcatagcatggtcaggtccctctttatttctccagtcgaatctcctattactcttatcccttgctcactcttcctctgccaccctggcctctttgcaactgcttgtacatgccagatatattactctctggatctggaactctcttcctccagatatcttccaccatgtctatattccaagtttcgtcatctaattaaggactatccttttatcctttttactattggaacctcctctacttcatgtccctggaacaaatctcccttccttgctctattctttctttttccatggtacttgtggcagactgtattattatccaaagattttctttttctttttttttttttggagatggagtctcactctgtcccacaggctggagt

SEQ ID NO: 910304 - DNA, 658 bp, Homo sapiens
gtgaggaaagaggcagcaaaaatgctgataccagtgttccacagcataggttgtataaacaatacatttggaaaaaaaatgaaaggtcgttgagtttkccagagcaacagatgtttagtagtgatagggattctctgtggctggccttaaccacttagtgatcaaactaggaagtgagggaataaagctgaggggcgtgcatggaatcctggaagtattttgttgcaccacaaagaagaagggatataattatggactttttaagtcttttaactcactggaaatataagccctttttggtaacatgtaggttgattatttaattcttgcatattcaccatccatttatactttcagagacacttgttgttgaaaataatggccttaaaaaatgctgaactttgaccggtagaagaataacccataaatagacattgaaatatacgcctaaagaattttataaactgatgataaagtagagtacaaatattggttggcaaagaatggattcccagagagtgtattatttttcagaagagaatgaagtatattaaagtagatgaaactgtaaggtggcttagtgttagaaagattaatattattggaaagttacttcatgctttcagtaagaagttctgcatgtgactatggcttgtta

SEQ ID NO: 910305 - DNA, 678 bp, Homo sapiens
tttaaggattaaatgatataacrtatgcacagcatctagcatagtccttggcacacagttagggctcaataaatattagtttcttgtactttcccatttaaatacaatatgatacatcccttaatacataagagtaaattgacttttcagattatgccagatattgggaaggctcacaagggcatgaaattggagaagagtaagctgtgactggggaagtgtaaaaggctagaagcctagagccctctggaggagagaggggagatcacaagggtaggggcagtaggggacacaaagtgggtctgaagagtgttccctctgttttccagggctacactgagtggtagagagtccaaggaagccagtatttggtgatggggcctttagaactgatgactaggacaaagatacaaggattaggactttctaagaaatggaggtgcaaagtgcaccatatatctctcccagactagtgcaatggtcccctcccttgtcctcctccctcaaccttcctctatgggattaaaatctaagagtaaccctagtcatcgctatgtctgcaggtcctcattgtcccagcaatgcataagatcagttgactgaatactgaatagtgaaagtgaaccattgtgatctatcctgacttaaaattagcataatgattcattcaacaaatac

SEQ ID NO: 910306 - DNA, 678 bp, Homo sapiens
tttaaggattaaatgatataacgtatgcacagcatctagcatagtccttggcacacagttagggctcaataaatattagtttcttgtactttcccatttaaatacaatatgatacatcccttaatacrtaagagtaaattgacttttcagattatgccagatattgggaaggctcacaagggcatgaaattggagaagagtaagctgtgactggggaagtgtaaaaggctagaagcctagagccctctggaggagagaggggagatcacaagggtaggggcagtaggggacacaaagtgggtctgaagagtgttccctctgttttccagggctacactgagtggtagagagtccaaggaagccagtatttggtgatggggcctttagaactgatgactaggacaaagatacaaggattaggactttctaagaaatggaggtgcaaagtgcaccatatatctctcccagactagtgcaatggtcccctcccttgtcctcctccctcaaccttcctctatgggattaaaatctaagagtaaccctagtcatcgctatgtctgcaggtcctcattgtcccagcaatgcataagatcagttgactgaatactgaatagtgaaagtgaaccattgtgatctatcctgacttaaaattagcataatgattcattcaacaaatac

SEQ ID NO: 910307 - DNA, 564 bp, Homo sapiens
cacaatggctcatgcttgtaatcccagcactttgggagcccgaggcgggcagatcacctgaggtcaggagttcaggccaggagcctggccaatgtggtgaaacatcgtctctactaaaaatacaaaaattagctgggtgtggtggtgggtgcctgaaatcccagctacttgggaggctgaggcaagagaatcgcttgaacccgggaggcgggggttgcagtgagctgagattgcgccactgcacttcagcccgggcatcagggcgagactctgtttaaaaaaaaaatagatctctatctctatcactatctctctgtctatctatgtatcatctatctatctatctatctatctatctatcatctatctatctatcgatctctatctttatccagctgtatcatcattttcactagatgctaacaataatataactgagataaaccaaagtttyaaaacaagcttgaaaatgtgaaatgaataatttggaggcgggactggccatttaggcatctatgaaggcccagatgactcatgtctggaaattgccactgctcaggaaac

SEQ ID NO: 910308 - DNA, 564 bp, Homo sapiens
cacaatggctcatgcttgtaatcccagcactttgggagcccgaggcgggcagatcacctgaggtcaggagttcaggccaggagcctggccaatgtggtgaaacatcgtctctactaaaaatacaaaaattagctgggtgtggtggtgggtgcctgaaatcccagctacttgggaggctgaggcaagagaatcgcttgaacccgggaggcgggggttgcagtgagctgagattgcgccactgcacttcagcccgggcatcagggcgagactctgtttaaaaaaaaaatagatctctatctctatcactatctctctgtctatctatgtatcatctatctatctatctatctatctatctatcatctatctatctatcgatctctatctttatccagctgtatcatcattttcactagatgctaacaataatataactgagataaaccaaagtttcaaaacaagcttgaaaatgtgaaatgaataatttggaggcgggactggccatttaggcayctatgaaggcccagatgactcatgtctggaaattgccactgctcaggaaac

SEQ ID NO: 910309 - DNA, 635 bp, Homo sapiens
cataatttttactttctaatggtcactgcatgctgtgtggggaatgccttgcattggtgtgacagtggaacagggaacaaattaagaagctatttgctatggtactggtctacgctaaagtagatgttactttacctggatggatgaatgaattaataagtgaatgaataaataaacaagttaacaacaaaatgaatagattaaaaagaaattgacaattaaattaatgaaggaacaaatgagagaaagaaaacaacaaaggaggaacaagagaaaagaagagagacacataactgatgatatgcagttcctttaaacttgtcattcttagtgattcaaaacaggcaaatatcccaatcactgtcagctgcggctttagttgctgctttagtgaaacattgaatataacaactgtgccggaataaaaacagtttcatgcactttttttgtaatttgctggcattttccctaaacaattctgtcactaagaaatgtatttatcatttctctgtrgtataaagcaatcccaatagcaccataattattaaaatagaaaattgttatgccattttaatgttttttcagttcaaaattacctgaaaaaatgttttaaaactttttaaaaaattatttga

SEQ ID NO: 910310 - DNA, 652 bp, Homo sapiens
tacatgcatagattgtattgtgatcatcaaggcttttagggtatccatccttcaagtaatgtacattgcacccattaagtaattttctcatcatctatcccccgctyaccccctcatcctttcaaatctccattgtctatcattccacttgctatgtctatgtgtacatatcttttaactcccacttatgagtgataaatgcaatatttgtctaactgtgcctgactccacttagataatgagctctagttccatccatgttcctgcaaaagatataattttattcttttttatgcctgaatagtattccattgtgtatgaacattacattttcttcatccaatcctccagtgacagacgcttaggttaattccatatcttcgctatagtgaatagcgctgcaatacacatatgagtgcaggtatcttttttatatactgatttcttttcctttgggtagataccaagtagtgggactgcaggattaaatggtagctctatgttgagttctttgagaagtctccatgctgtgctccatgcttgtactaatctacatcctttataggccagtggtttttgcataagtcagtttctgctccatatcaaactaccccaaaacttagtggcctgaaacagcaatcgcttctttggt

SEQ ID NO: 910311 - DNA, 647 bp, Homo sapiens
ttatggctctagtttctcatcttctgatatagcttcacctgagacattatttccttattaaatactaaatgcattatgattttattaaatatggctttacttttatttctttattatagttagggaacattttaaaaagtttttttggtgtgttgaggtaggtatattatctataaatttcatttaaagaaaacataatatctgtaatatttgtatcttaagcccggtttctcagtaaacaaactctgagatggaagtctatacgcagaaagcatactggagggtgcccctgggatcaaccgtgggggaccaaggaggtaggatgggtctgagggagaggctgagctggaacagttacaacagagacagcccttcccacagggagctctggtcctgggatgatcattggataaaggacgcccctggggaaaggacataaacttaagtgaggacatgaacttctggtgagggcaatttttgaagagaaactcagctgagctctttcaacattcttggcagctggctaattgatggactcagtctygaaaaaggccctgggcagcacaccacagtatccactacagtccacccttgctctggtcagatacaggtgcttagtaaaacaagttctggaaacagcttctgca

SEQ ID NO: 910312 - DNA, 371 bp, Homo sapiens
aatagtgggaaagacaaaatgcaacagtttaacctttattttgaagaggtgtccttcacgcaccagatcattaagttcctaaagagttccctgatgtaggaatgccctgaaacttagttggggtaatcccaacctctagggtgcatttgtcttgacatagcctccaacatacatgccactttttgctcatctgttctgcttagaatcaagattttttcatatggaggatatgtgtgatatcctgaagactttcccattccagtcttggtgtctcactctttctcagtcagggcctgacyttggtaaaacagccttgcctggactgagaagacattcttccctggggctctgtttttctaataattaagccc

SEQ ID NO: 910313 - DNA, 371 bp, Homo sapiens
aatagtgggaaagacaaaatgcaacagtttaacctttattttgaagaggtgtccttcacgcaccagatcattaagttcctaaagagttccctgatgtaggaatgccctgaaacttagttggggtaatcccaacctctagggtgcatttgtcttgacatagcctccaacatacatgccactttttgctcatctgttctgcttagaatcaagattttttcatatggaggatatgtgtgatatcctgaagactttcccattccagtcttggtgtctcactctttctcagtcagggcctgactttggtaaaacrgccttgcctggactgagaagacattcttccctggggctctgtttttctaataattaagccc

SEQ ID NO: 910314 - DNA, 636 bp, Homo sapiens
gattatctgagaggcagcttggcagtcatagaaaatgcagactttgggcaagacatccctggtgaaaattccttgctagctatgggaccttaatcaaatgattcacctctcaggcttgcatttgactttcagaggcattttgggttttagaaacagtgcatgtggttgggagtatatagggtgtttctttcccacaccaggtgtctcctgcaagtagaagaaacttcctggcccctctcctccccttgtttgtctttcctagggaagaagagcgtgttttatctgatggtgcattaaaacataagtgtgtgtgtgtgtgtgtagatgatagagatggatgatagaaagataaataatatagagatgagagagagagagcgagagagagagcaagagatagtaaagctagatagacccttctactctttctaacatgtgagctaactaaaggaaattcatccttcccctgctacctggtgcttcagtttttatagggggcctaatcctgcaagtcacaytgcccctataagaggtctgccattggttgagattcccaacaccttgtgcattgaggtatgaatgttgggagagagacaaaaagagaaatttaggggagcaaaaaaacatgtagagagc

SEQ ID NO: 910315 - DNA, 664 bp, Homo sapiens
ctgaaggagaagaacatggtaccctgtggccttatgacagtggggctggactagttggctggataggraaggcttccttaaagcactgagcttcttcaggagtttggcagccactccacttaaaggtctgtccctagcaatctctcctttcatatcacagtttgtagatgcctgacctatgaaatcaagctctaagtctctatactagtgaaatgaataaccattaagttgtctctaattagagaaggggagagtgctgcaacgggcgcaaaacatctggaagatgatttgaaatgatgtaggtaagcaaaggtgggaggggaaaggagaaactgaaagggaaggagagtcccagcctctgtggagagaggcaagtagcagtggtgaatgcagacctcctaacaagcagcagctcatgcacaccgagcagaagcagaaggacgtgggcggagcatgctaggcactgtgggccacatcaagagttgtaaacagagattatacatgaaaaagtatgaaatgaaagaaaagcaaaagcatcaagaataaaacctagggagctgaagacagtgaggcaaaggttaaataaacacggtatgaatgaagaaatgccactgtgaggcccttcctccttttggttgtagcctattccttttccttaatgggt

SEQ ID NO: 910316 - DNA, 613 bp, Homo sapiens
aagtatgagactcttgcttgtggcatcagggtccttagatcattttttaatgttcctgatagtttccaagttcgcaggttgactggcagggaaatcataaagaagagagctcttgtagataagaatagtatttaaattaaatttaaagagaatatgtagaatcttttatacattttggttataaaaatgtgaacatagtaaaaattatgattaatttacttttcataaatattccgggatattagttcatgattcattaattcaggatacaaaatcaatgtacataaatcagtagcaccactatacaccaacaacaaacaagcagaggatcaaatcaagactcaaccccttttacaacagctgaagaaaaaatataaaactcaggaatatacttaaccaaggaggcaaaaatctctacaagaagaactccaaaaccctactgaaagatcattgatatggtttggttttgtccccacccaaattgcaacttgaattgtatctcccmgaattcccacatgttgtgggagggatgcagggggaagtaattgaatcatgggggctggtctttcctgtgctattcttgtgatagtgaataataagtctcatgaaatct

SEQ ID NO: 910317 - DNA, 607 bp, Homo sapiens
ttctttgcccacttcgtgatggggttgtttgtttttttgcttgtaaatgtgtttaagttctacatatattctggatattagacctttgttggatgaatagttagcaaatatttccccccaatctgtaggttgtttactctattgatagtttattttgctgtggaaaagctctttagtataattaggtcccatttgtcaatttttgtttttgttgcaattgcttttcccattttcatcatgaaatctttgccaggtcctatgtccagaatgatatttcctaagttatcttccagagattttataattttaggttttacctttaagtctttaatccatcttgagttggtttttgtaaatggtgtaaggaagtggtccagtttcaatcttctgcaaatggctagccagtttttccagctccatttactaaatagggggttcttttcccatttcttgtttttgtcagctttgtcaaagatcacatggctgtaggtgtgcagcattatatctggactctctattctgttctattggtctatatgtctgtttttgtaccagacccatgctgttttggttactgtagycttgcagtatagttcgtagttgggta

SEQ ID NO: 910318 - DNA, 561 bp, Homo sapiens
tggtcatttggttatgtttaattatgttccaggctaggtcacaattgcctcactgcctttcctacccctacttgtttaaactctctggatgatggtctcccttctttaaactcaagctgctctaaagtasaaagaaacatcctgatatcatcacaaaagaagattcaacttaccactttcctgagaaatgctattttaaaacctcttcttattcttcagactaccctctttgatttatcctgtttttcaccttcaaagtttctgtgtctttttcctcatctgtctctgtgtcagcacagcgctatcactagaatctgtatcatcattctcttttccaacccatgtgtctgggtctgacctctgcttccctcatgtcttggtctttgttaagcatttcaggatcaaattaaattttatgacagcacccttctggtattttttaaaaaagactatctggttaggaggtacatagtttttagcaacatttcaacttgacagcaatctgtatatgatttatgtagcttgttatttccctgtgaagaaaagaaaatctcttcataa

SEQ ID NO: 910319 - DNA, 620 bp, Homo sapiens
atgctctgcttcccttataaaactgaatgcctttaacagcacccaagttacatcttgaatgcgttgttgcttaraaatttcttctgctagatacactaaatcatcactctcaagttcaaaattccacaaatctctagggcaggagcaaaatgctgccagttctctttgctaaaacataacattacctttgctccagttcccaacaagttcctcatttccatttgagaccacctcagcctggactttattgttcatatcactatcaccattttgagcaaaagcattcaacaagtctctaggaagtttcaaactttaccacattttcctgtcttcttctgagccctccaaactgttccatcctctgcctgttagcctgttccaaatttgcttccacattttggggtatcttctcagcagcgcaccactctactggtacaaatttgctgtattagttcattttcacactgctgataaaggcatacccaagacttggtaatttacaaaagaaaaacgtttaattgaactcacagttccacttggctggggaggcctcacaatcatggaagaaggcaaaaggcacatcttacatctcagcagggaagagagagaatgagaatcaa

SEQ ID NO: 910320 - DNA, 619 bp, Homo sapiens
agaaataatcgattttgtaatttattcggctccttattacttttccattcttgcagatccattgcccatatccttaagatgttttctttaagccttaccctagtcagagactattttctaaatagaactaaaagagaaatttgattgagcatctgaatctgaccttctccccaattaacccagttgggcagaccttcatttagagtgtcatttatttttcaagccacgtggtaaggaagcagagggttctccttacttctaaagtcaatttccattaaaaccttcagtgttcagtgtgtagcttaatgccttttaaaatgattgctatttttgaaccagtgtttttgtcacaacgttttgagtgtagaatattccttatttgacaaccctgagcttgtaggagtttataaatggctaagaacaatctgattagaatgtattgcttttggttggaggccaagaatattggatcattggtttagggtatgacacttaaagagaccaaagagcagagtacataatgcccagataggccaattcatgtagctttgttccataatgtragattgaaccccaaaccctggccacctatctttgagatatatgctgttggccacag

SEQ ID NO: 910321 - DNA, 634 bp, Homo sapiens
tggtgcatttttacagagtgctgattgatgcatttacaatcctttagctagacacagggcgctgattggtgcgtttacaattctctacctagacagaaaagttctccaagtccccactcgacmcaggaagttcagctggcttcacctctcacaagtgatctgcctgcctgggcctcccaaagtgctgggattacaggcatgagccacaatgcctggccttatatttcttattatatcataaaatcacagtggagttggatgggggtgagggagggcagtctgtgaaagagagaggttctgaagtccaaatgagggcagaatgtggacttctctggccctgaggagtgggttgggttgagtactatggggtgatttgattggacaggttctgatgagtctggtagtgggtacctcaggagccatgaggacatttaaatgtcacagtgtcacagaaaacatagaagattgttccctaacttgggtagtggcatgagaaagtgggtctgttgttgggaataaggtaggctcggatggtggtttttgagggtgccaagaaatgtctttataaggtttcaaatgtacatagatgtagaaggaagaatggtgccattctaaagtttttttgaagtgaaaa

SEQ ID NO: 910322 - DNA, 596 bp, Homo sapiens
ctactcaatactctccaccccccaccatccctatgggctattttcaagcaaatctcaggtctcatataatttcatttgtaaatactttaaaggagtattgtttaatagccatttaccttccaccgtcttctagtcagagataaactaagttttcttagaggtgtttgcaagcttagttcacattgcctaccctcctgaaagatctttattaaccaagttgaaaaatacaccttcttaagaaggccccttccccaatggttactgggggtggaaggtaatcttaaaatcattacttggggagtaaaatgctggtggttcccacatttctgaatacctttccattttaaaaccagttcttaatgcagtagacgagatcagaaactgacctacgtaagtttgtgatttttttttttgttagagtgctgatttcttcttaacttttttgtttgctttatctccatgggtttaatcattacatgatatggttctaatgatagcatgttgtgtcattttagggacactatyttctgcaaacttttttactcagagtgttttctgaccataatgcattacaaaatgtactatatagatgtgaa

SEQ ID NO: 910323 - DNA, 647 bp, Homo sapiens
aaagactcagttcaacacacccctggtggctgttgtagctcagggttgagtagtgatcctggtattaaagatgagaaatttgttaggtagccgctatgagctgcaagrtttcctgaggcagaggtatccggaacagagtcagggaggccatggggccagaggccttcctgattctggacacacagagtaccttggtttccccaccctaccttaaaaatatattcggattcacttataccgattaattacttagagagagtgaatgtattatagttatgtgaacttgtactccctggctgtctctcttcttatgccttggtgatttgtctagaggataaattgctttttggcttttataaattctgttttcttctaccaactgctaaccattaacatctcaatcaaatgggggaatttgcagttatcagcttaactaatctccatgcccacatttcttgcttctctccctgttactgacccagatccttgatgataactcattgtagattttgttatcatttaaaaccttttcaactaggtacttgatataatagttcttattaatttttaattaattttatattatttagtcatttgctgagttggtagatatttatcttgtgatttcttttaaaaaagtcttagtt

SEQ ID NO: 910324 - DNA, 661 bp, Homo sapiens
cttgtgtgatttattacattgattgtaaacttaaaatttttggaaattgtgggacatttttgaaacctgtgaagaagagtggaaccatcttttcttttgaacacctatagaggtttattcctctgttattgaacttatggcatttcactgtaaggtgtttacatatctctttcatttagaattaagattgcctgcacagaaaactccaagttatgtatggtagcttaaagaagattggatcttatttttcaccacataaaagcactttagagaaagatagtttaggtctgttatgttactccacttcatcataaatatggcttcattttttattgttgtatactcatgtctgtattttcctctgcattgcctaagatagttgcttcagctctagccatcacacatgcattccagcaaatagagaggaagaaagaaacgagagggtatgtcccctctatttatattcatgtcatgatcgccctccagacactatgtaccattgctcaaaacttatttacatgggcacacctgcttcgaaggagctcagaaatgcaattttaattcrggacgaccagatgcccagctaaaaattgggaatttattagtaaataagataggcataatctatactaggagggaattaatattccctcctactttg

SEQ ID NO: 910325 - DNA, 628 bp, Homo sapiens
tactacttactttgtaattttrcttataagaacttcgaaagcaggcaaaaccaatacatagtgatgaaaggcagataagtggctgtctttggttgagcgtgttggggaggagtgtgagtgatacttgtggtgataggaatgttttgtattttaattgtgatggtgattacatgggtgttattttttgaaattccttgaactgtatacttaaaataggcgtatttactttttgtatattattccttaataaattttatttaaaaagttaaaaaaatcattatgacaaagctataaataaatgaaaataaaaacaaaacaaaacaaaacaaagaaaagccagatgtagtacttagccatggagactaatgataattttatatatcataaactatgacagttactatgtataaaaactgctgttagcaagcatcatcaataagactgtaaaacaagaagactgctttaccctggagctttaaagaagactttgtcaggaagtgacatttgtgacaagatatgaatgatgagcagagattaactatgtaaagggggaatgatgaagggcaggggaagaatattcccaactgcaagaagagcacgtgctctgtcgtggtggaaagtgaagtca

SEQ ID NO: 910326 - DNA, 688 bp, Homo sapiens
attctagttcgtatctctagccttgygggagaatgggtctgagagacaggagggcaggagaaagtcagagagaaacttgcttctgaggccttcattttggtgtatcattttctgagccccaatagccagatcacagagagcctgcaatgcccatggaatagcacaaaattatgcccagaatgattcagatgttttaaaaattgaaattgccttgattttctattactgagcacatcttgctctgaagtacccataccagctgatatggacttgccagttaaaggtaatccaaactcttctaatttatacaacaatctattttaagtaaatatcctgtcatttctaggtgaaatctgcctgtcagggtatatttgccctttcaaagggtattctttcttctctgccttctcaggatgatatctgaatggataggcaagtgtatatctccttatagcatgggaaaagcctcaattccacatgctgtcctctgggtcttctttggtctctgccaaaatgctcctaatcttgattggtcactagtaagcctttggtggtgtctgctgaagtgttacttgccaatgccacaatttatgaagtctctatattatatagcctcctcatccagaccccaagcctctagctctttcaggagttctgccacccttctctaaggtgtgtggagatttct

SEQ ID NO: 910327 - DNA, 580 bp, Homo sapiens
aactgccttttcccaggtgcctaggtctcacttttctgtttccttcaatgtctactaatttttgttttaaaattagacattatagacaaygttataataaatctggattctgatgtgttcttatgattactgggattttgttcaagtaggcagttaacatacctgaatccaaactgaatactttatgtcccttgaggtatgtagcaactgatatgtctgctccgttcttatggcctacctctggctttagcctggcctatctgcatggaaggcacatgtggtatctcctatgtgcctgtataatttgacagtcagccaagaatttgggcagagatgaaactcagtctctctgcagtttccttgcttctaaggtttcccacctagtttactatttgtcctgccagccttgggctctgttgtctgatacttcaagcctataggcttcagctttcttctgctccatctgagtgcaaataagaatatacattcagacttcttttttttctttaaaaaaaaagcatttctacatatatacccaagataattaaaaaacaagtactccaataaatacatgtacaca

SEQ ID NO: 910328 - DNA, 610 bp, Homo sapiens
cggacgccgccacacccagcttattttttgtwttttagtagagatggggtttcatcttgttgcccaggctggtttctgagctcaggcaatccacctgcctcagcctcccaaagtgctaggattacaggcgtgagccactgcacctggcccaaccttctatattctttacagcagatttccatagtgataaaaaatatttaaaatacaaacactccattttctaagctataaatcggaattggtatagcagatttctctaaagcaagacctctctgtttcaactaaagtagcacaagaaggaaatctccaatcaatgtctccatgtagatatctaagtcaattagtagagcattttaattagattagactcattttgaatgttgtttatgaaatgtatttaattttttttctgttttggttttgcatgttggtttctgtagctgtccatgtagttatggcagttttgcaacacacacagggcagaaaaaaaaacaaacaaaaaaaaaaaacagttgtttagtctaaaggcaagacagagattctgtgtctacattgtatataaagcctcctggctgtgaatattaacctctagtataatgaataccttgta

SEQ ID NO: 910329 - DNA, 633 bp, Homo sapiens
gcccattttttgcttagatcataatcatgcttctgtaggttaatgattttttggttagctcttaaggtactataattgatatacttgtatacagggtccttataaaatacarctcatacctaaatccagatatttaataattgggcccattaagtccaatcacacatcactatgacagagcaaaagcttttcaaagggtataatttttctatgtaataatttacagtaccctaaaaaaagtaaatctggcatcagatttactgatagaatataccatatgcatttatcataatgattttatgtattttggtgctatttatgtattttttatatattttaaaattaaatattgtacattgatacataggagagcttatcattaaggtgggtgtacaggtagttttctcctgactagactataattgttttcgtaaaaataagatgttatgctacattataactttcatatgcccccattgcaccacatattaaccaaccttataactgacaatactaatactacactaggatttcatacggacattatattaaaacataaaaattgcttatgtcagcattctgaagcagatattacatattttcaatagtggtatggttgatgtcataactagg

SEQ ID NO: 910330 - DNA, 626 bp, Homo sapiens
tgcattcattcattgcaacctgacttacaatattcaaaaatactgaaaaaaacctacatgtccaagcaatagaggaaaaagtaaataaatttygacaaatccttgagataaagtgttttatagtcattaaaatgtttgtagcattttaatggcatagaaaaacaaacacaatacaatggtaactgagaatagtaggatgcaaaactgtacaaaccatatgatcacatatctctatatatagacttgtataagcacataaaaatatttaaaggtatatcaaaatttatatgacaatctataaatgatgcttatttactttgtaattgtctgcttttcagagttctataataaacttatttttaaaattaggatatatttaaatatatttaaaagaaattttctcttattattgaagcccagctctgttttactattatattattcattcattcaacaacatccacatatggcaaataattctgcctacttcatcctctccatctcccatttatttgttttctagagacacatggtaccacctagagcccacatttactagaaaccctgttggctcaccatcattgtacacagtgccttcatagtctttctcataaaagaccccatgg

SEQ ID NO: 910331 - DNA, 667 bp, Homo sapiens
ttttgtgacaagttcattattactacaactggtatttgagaaagccaatgcactaaggctatttataaccaagaaatctcacagtctgtgtcactccsctgtcaccccaatcagagctggtactggtagccactgctgggaatgtagaggacaattaacatcactggaccacttgcagacattccacagcaccagcctgaagtgtagcaacctcacttggtggctagacttagaggggcgctagcattcatagtagtctgtccctaagggattattaaacctgagggaaggagtgtgcaccacatcaaggaagtattccatgggacaaaattatccagatggcaggacttgagtcccagaacattccacatgtgggtcgtttctttcagcagaggcataggtacagtgctgggttaagtggggaaattctggctccaccctaatagtcaggcagtcctggtgttcatgaagtacattgtataagggtacttatttttcctctcatccatcactgaagacaaagatgggacttctttcctcagggatagacatgggtgcacctctagacagacttttaaaaacacatcagggtgaccgcatctccataggagaagtgcccttcaggttcaggcttaaatgaagagtagattcacaatacctttctata

SEQ ID NO: 910332 - DNA, 624 bp, Homo sapiens
ctgatgattagtgatgatgagcatttgttcatgtttgttgaacacttgaatatcttctcttgagaagtgtctgttcatgttctttgcccactttttaatggggttatttgttttctgtatgttgatttaagttccctatagattcttgatattaggcttttgtcagatacatcatttgtgaatattttctcctatctgtagggcatctgtttactcccttgatagtttcttttgctgtgcataaacaatttcatttaattaggtccaacctgtcaatttttatttttgttgcaattacttttgaggtcgtagccatacagccaacttacagaaacaacaaaaatcctcagagactattatgaaacacctctatgcatacaaactagataatctagaagaaatggataaattcctgaaaatacacaatcttccaaactgaaccaggaagaaactgaaacttggaagagactgataaaggggtctgaaattgaatcagtaacaaaaawcctaccaatcaaaaaagctctgggccagatggattcagagtcaaattttaccagacatacagagaagagctggcacccatcgtattaaaactactccaaaaaattgaggagggactca

SEQ ID NO: 910333 - DNA, 624 bp, Homo sapiens
gctaaattctaccatatgtataaagaagagatggtactatttctactgaaattatttcaaaatttgagaagaaagtactcctctgtaacccattctactgagaccaaaatcattctgataccaaaacctgtcagagacacaacaaagaaagaaaacttcaggataatatccttgatgaacctcagtgcaaaagttcgcaataaaatactggcaaactgaatccagcagcacccaaaaaccttatccaccacaatcatgttggcttcatccccaggatacaagattggttcaacatacataaatcaataaatggggtttatcacataaaccaaactaaacacaaaaccctcataaccatctcaataaatgcagaaaatgttttaaataaaatttaacatcacttcatgttaaaagccctcagtaaactaggcatagaaggaacatacttcaaaataataagtgccatctatggcaaacccagagacaacatcttgctgaatgggcaaaagctgaaagcatttcccttgaaaactagaacaagacagggatgccctttaacattactcctagtcaacatarcactgacagtcctgccaagagcaatcaagcaatataaataaataa

SEQ ID NO: 910334 - DNA, 626 bp, Homo sapiens
cttctgaattcacttcttgaattttactttctctgagcacctgaaaggatacgtttagtgaagttcaaaagccagacatatttgctgtttgttcaggctagcatctggtaataaatatttggttaaaagttagcttaattaaaagcagacagatattcaagctacaggtatatttaaaaggtatttatggatttttatcttcttgaatcttgtatttttgaagtgttttttcttttcagtcaactgaattgtttttctttattttttcttcttgtcacttttgatgcacacataagagaaccttaaataacctctaacagcttgggactccgtggcaaaaacagaggaggagccactgaccctgttttgggaaaaacctctgttttagtcatgaaaccccaggaactgaaaacagacagatctctcttagaatctaaggctaaacatacttttggggatagcaaagggcagttgtggaggatacttggctctttgcacatttaaatcatagaagcatgctcttggccacctaaaaagaatggaaatgtccccacccctcactgaaattagactcccatgggggatgggctaawcacagaatcaactaatcagcttcgggatgcttt

SEQ ID NO: 910335 - DNA, 445 bp, Homo sapiens
aaatcctcaagactttttcaaatgacctgctgttaccctgctgctcttggctagttgctttttgaagtttatatttctccatattaaatctcattttaaaaattttagtctataattccascttgttataatcttttggattcacctcaccatgccagctttatgtcagttacaaattagaaagatgtttttattgatgtttgatcaattccttattatgaaccatgtggaaagcctcctctccagataagcatctattctaggaggcagcaccatccagcagcaatgacagaatagctgttcacttgtctgcctactattacattgaaatcttactgtccatgttaaatactagtcacttaataaatatttgtttaattgaattgaataatttccctttcaaatgtcagcctagagctttgttgatgtcccttgataaaaatcc

SEQ ID NO: 910336 - DNA, 587 bp, Homo sapiens
gctaacaattcacttcctaatatatcctccttcatctttcaagttctcataaaaatcacttacattttttcaagcttttttatgtgccatgagttatgccaagcattttatgtaaattaactcatttcatccttacatcgaacctgtaagttccatttttattttcattctaggtatgagaaaactgaggcacagggaatttaagtaaatcatccagggtcacatggtcaattgcttagcagagtcagaatctgaacccaagtccgttccaagctagagctagaaagcctttcatgaagttgtgaccatcccctaaaaaaggagagaaactcctattggtgatatcctactgacagcattcacttttttagccacatcccaaagatttctgccagtaattgacatctttcattcaaaagtgacccacaggggagtggttgcctcagaaagaggagggaatgaattgaaactgaggtaggaggcaagactttactccaaactgggttgaaggctggctgaaatagggaggargtgaaaacacctctccgtaagacatgtattactcagggttctctagagggacagaa

SEQ ID NO: 910337 - DNA, 604 bp, Homo sapiens
aggggcttgatgtgtctgaatgtggcaggttgacaataaattatacttattttgtaaacacttacatagactttatgccagttctgctctataaccttcgcagttattaatgcattttgtcctcataactmtttatttatttatttatttatttatttatttatttattttgagaacagagtctcactctgttttcccaggctggagtgcagtggcatgatctcagttcattgcaacctccgcctcccaggttcaagcaattctcctgcctcagccccccaagtagctgggattataggctcccgccaccacgccctgccaatttttatatttttagtagagacgaggtttcatcatgttggccaggctggtctcaaactcctgacctcaggtgatccacctgcctcagcctcccaaagttctgggattacaggtgtgagccaccgtgcccagccctttatctagtttagaggtaagaaaactgaggcagagagaagataagttgtccaaggtcacacacagcgagcactggagtcaggattacaaatgcaggcagctgggctccagaattgtcacctttcaacactgtgccatgcagccttcc

SEQ ID NO: 910338 - DNA, 643 bp, Homo sapiens
tatacatgttaaataaatctgtatgcctttccttctattaatctgtctcttgtcagttcattttcagtgaaccttcagagggcagaggagaaatttcttttcatatttcgctagcaggagcagttttggcccaaactgtatacttttagttagaaggaagtagatgtgaagggggagtggtaatacaccttatcagctttctagcaatcagtcccttggtccctacaatcgctttaatgccaaggaatccgttaattgtgccataattaggtttagccagccaagtaattctaggtcacttctatcttttcacatttagcatggaagtgtttttctggttacatctccaaatacattgctttagtgtttttacagttctactacacagtctttgcaaatggaccactattttctaatcaagaaaccaaggacaatttgtgtcacatcatccttgttcccttcttgcaattttggaagccttgaggagtgatgttactaaggaggagggtgatgyagattttgaaggtgaggatgggagccacttcagggctcagcatctgccccgacaatgcctctttcccagctgcttcaccattgctgtgctccctacctgggcctctcagtcatcccacttcctgtgagg

SEQ ID NO: 910339 - DNA, 607 bp, Homo sapiens
gtctgactgcttattcaacatctccttagggtgacttcaaattcaacatgatcaaaactgcrtgatcttctgctgagcctggttcctctactaaggtttcctaccttactgaatgactctctttcatccatacaagctggaagaatagagccttcttgtccttaccactaattcctatccacccacctgtatctcacaaaactttccacacctctttgtctccatagtcaccacttcaatccaagccaccatactgtctcactggagttcaatggcctcttttttttttttttttttttttgaaatggagtctcactctgtcacccaggctggagtgcagtggtgcgatctcagctcacttgcaagctccgcctcccgggttcacgccattctcctgcctcagcctcccaagtagcctgggagctgccagctactgaaacataaaacagattcaaacgggactcaatctaatacaaaaagcatgttccatagatggaaacattaaactccatccaaattaaaaggttctgaaattttaagagatgctgttaagaaaatgaaaaggcaagccacaaattgaaaaaatatttgcaaaatcacagatctg

SEQ ID NO: 910340 - DNA, 553 bp, Homo sapiens
ttttaagctgtatatttttgtgcttactgtggctttgtactatgtataatgtaaaagaaggaacgcagaaacttttttcttccaaattatagtgagtataatgcacatcatttagagactattttaattagagagttacataagaggttaataaagccatcccagtcacatttttgaatattaattttttaaattgtaaagatctgcacagaaaaaaacagtcataaacatcaaattagagccgtgttctaacagtcaaataaaccatttattgaatttaatgaagatcctttaaagcagtatcacagaagcttctatactgagaaatatgatgttgctcttttttaaaaaggaagttaaccatcctttttttctagaagcagtggcaactcagaacattacaccatttccttggcaccttgctgagcctctactatatgcagaacactgtattactgaggaaaacaaatagaacatgragtctatgccataatttctttttttttaaatcaactttaattttacattaaggagtaaatgtgcagatttttac

SEQ ID NO: 910341 - DNA, 689 bp, Homo sapiens
ctcctggtttgacaggttgggttgttggttaccgagatatgatccccaaagcttcctcttcagcaaaataaatattacatggatccttaagctgatcaatagaatttcaatatctaaagcaataaagagattaaaaaaataaaacctccaagttacctcttgacggtgaataacatgctttgtttgttttttgattagattgatagaagcccacatgactatagaatctctgatgtcacatagtgttaggcgcgccagaagtaactataaagtgagtatttctctttttgacttttcaaaagccaaagctagacctaatgccaaacagtgattattgtctggatactattgttataggaccaacagattcgtatacccactgtgcagtaacagacccattacaccgaaacagcagagatgaagcagggaaagagtttaatgatcacagagacatctagagcccaggtcctagaatgaaaaacctggaatagatctgaaccctaccagtagcctgaaccagggctgctccagccaactcacatctcagaaagcgagaaagaaacactaattaagagcctgggaggccaggtgcagtggctcatgcctgtwatctcagtttgggaggccgaggtggacagatcacttggggccaggagttcaagaccagcctggacaacaagatgaaacac

SEQ ID NO: 910342 - DNA, 590 bp, Homo sapiens
attagctccaaatttattttgccaggtgacaactctagcatatgagattttttttttttttttagaccgagtttcactctgtygcccaggctggagtgcagtggcaccatcttggctcactgcaacctccgcctcctgggttcaagtggttctcttgcctcagcctcccaagtagctgggattacaggcacccaccaccacgcccagctactttttgtatttttagtagagacggggtttcaccatgttggccaggctggtctcaaactcctgatctcaagtgatcctcccgccagggcctcccaaagtgttgggattacaggcatgagccatcatgcccggcagcatttgagatttgtatgtagaaaagcagatcttgaaattactgactttgatgcttggtataggagtgtggctatcattgagagcctcatcatcttctttgctttacactatgtaaaacttctctgctaaaagttcaggcaccctaaacatccacacatttccactagatctatttcccttaactcacaattccctggtaaacatgtcatttcttcaagaagtagggattttgctgagcttgaact

SEQ ID NO: 910343 - DNA, 254 bp, Homo sapiens
gctgcccaagcctattcccaggtggggttgaaagagatcccaatttctgcagatagcgcccataaactagattataaaccaatgtaacatactataagtgcctcacaactacaggcttaaaccaaggcatcaaaatgggaawgaagggctatcacattaaatgattacaaaacaaatgcacttagctaggcattaggtacttagttttatcctatgtgaaaggaaatgaggagtttttccaacagcagagacag

SEQ ID NO: 910344 - DNA, 627 bp, Homo sapiens
tctgtttctctaggattggtccctgggtgtcttatttagtttatttgctgaggtcatgttttcatagatggttgtgatgcttatggatgttcatctgtgtctgggcactgaagagttagatatttattacagtctttgcagtctaggcttgtctgtatccatcattcctgggaaggctttacagatatttgaaagaactggggttttgtgatctaggccatatctgcattaggtgcaccccaaggccagtagcactggggtttttgcagactcttaggggtatcatctttctcccgaccaaatgaagtctctctgtgtggagctgcctggagctgggggtgggtgacacaagctcccctctggccaccatcactaggactgtgctgggtctgatctgaagctagcacagcactgggtcttgcccaaggcccactctaaccacaccaggctattgcctatattttctcaaagccctgtggtctacaatcagcaggtagcaaagccagccagacttgtgtccttccctttamggtggtgagttcccacaggaccagggcaggtccagacgtgccacctgggatccaggaactaaaagcaaataccttagaaatcttcctggtgttttat

SEQ ID NO: 910345 - DNA, 615 bp, Homo sapiens
gcaatataaggatctgagcccatttgactataaaactcccaartacacttcctttccgttgtagcacttataaacgaatgacacagaggtttcccccaggtaattctgtttcttcaaaattgcttggttgacatgttattcttccctccttctcctcagagttcttgtgaatttctcaactggaagacagggactctttacgtagttaaatctgaatacttattagacacttgggaggggcaatgaaagagcttttgggaaactggtaatattttatgtcctgattcatcttctcattgtatgagttatgcttagcttgtgaaaaaaatcactgagtttttcacttatatgcatatcttactgtgctttctgttgcttatcacagaatacctgaaactgggtgatatggtttggctctgtgtccctactcaaatctcacctttaattgtattaatcctcatgtgtcataggagggacccagtgagaggtaattgaatcatgggggcaggtttttcccatgctgttcttgtgatagggaataagtttcacgagatgtgatggttttataagggggggttcccctgtatacactctcttgcctgccaccatgtaaga

SEQ ID NO: 910346 - DNA, 573 bp, Homo sapiens
tactcttgataagaagtgaaggaaaacaagattaggatttgctgtacaattctaatgccaaatctaaatttttrttgaaaagtacaggtatttctattttattggtagatgtgtgatatggcttggctctgtgtccccacccaaatctcaccttgaattgtaataatccctacgtgtcttgggaaggacctggtgggaagtaattgaatcataggggtgggtttttccgtgctgttctcatgacagtgaataagtctcacgagatctgatggttttataaaggggagtttccctgcacatattctcttgcctgccaccacgtaagacgtgcctttgcttcccctttgccttctgccatggtgtgaggtctctccagccatgtggaactgtgagttcattaaggctctttgtctttataaattacccagtcttggatatgtctttattaggagcgtgagaacagactaatacaatgtgctacataaaagctgtgtgcatatcaagctgttcatgaaatatcatcccattttgaatgtgctagagttcactaagagaaaccgaagtaaattattt

SEQ ID NO: 910347 - DNA, 628 bp, Homo sapiens
tcacacacagtgttggcatttgggtttgacgagatgacatttagatttatttatctaagccccaaacacataatatctctggtatgattaagtattttggcttaataaacatgtttaaaatctgatctaaggaaaactaatcatactacttctaaatgtcttaaatatcatcatgatcctttttgtcactaatgataacacaaaaattatgggtaggttggcatttattaaaggatagcaatatcattaagatcaaagcctttggagtcagaggggtctgaattaagtgttaaatcaattgcttctactaactagccttgtgacattgactaagttacttgacctcactgaacttcagttactttatctgaagagtgaaattaacaatattgcttctatgtggaggagtgagtattcaatgagattaagcacgtggagtgcctggcaaacaatattctttataattcatattattgtagttgaaatttaacatcaccttgttcagacttgatatttctgtttagaaataagatggaaggtgtatcaaggaatggattttccttccttcctaaaccaatcaaaaaatcagaaatatttattagrcaatgttttcaagacattagacatc

SEQ ID NO: 910348 - DNA, 589 bp, Homo sapiens
attatttctgggtttgtctgtgaggttgttccaggggagaatggtgtgtgtgagtcagtgaactgagtgggggaagatctattctcaaggtgaacagggaccatccaatcagctaggggttgggataagacaaaaaggcagagggaaggaaaattctcactctcttttctggagacaacaactttttttctcctactcttgatcatcagaactccaggttctctggctttcggacttctggacttgcaccagcagcccctgggttctcaggccttgtaccttggactgagagttacaccattggctttcctggttctgaggattttggacttggactgagccatgctaccagcacgtctgggtcttctgcttgcagatggcctattgtgggtcttctcagccttcataaatgcatgaaccaatttcttgaagagatcctctctccatatatatatatatatatatatatatatatatatacacacayacacacacatatatgtgtgtatatatatatatgtatacatatatatacatatacacatatatatgtgtatacatatatatgtatatatatgtgtatgtatac

SEQ ID NO: 910349 - DNA, 644 bp, Homo sapiens
aaagatgttggaaagtcacaaattctcaacaggttatctcttgtccctagagagcatattcagataacagcattgaaatttgcctgtttggggagaaaggtattctgacaatgrtgtaagcttttctattattttctaagattagactaaaatataagctcttaatattatctttacaaatttccaataaaaatattttaactcctccagttccctaaaggtgtgctaaattatttacaatgcttaagaatgctagagaacaatgaaatgagatagattctataatatagtatatgtgcttcagcactgtattagtctgttttcacactgctgataaagacatacctgagactggacaatttacaaaagaaagcggcttattggacttacagttccacatggctggggaggcctcaaaatcatggtggaaggcaaggaggagcaagtcacatcttatgtggatggcagcaggcaaaaagggagcttgtgcggggcaactcccgttttaaaaaccattagatctcatgagacccattcactatcatgacagcagcccagaaaagacctgcccctataattcaataatctccccccaggtccttcccacaacacgtgggaattatgagagctatatgatgagattt

SEQ ID NO: 910350 - DNA, 542 bp, Homo sapiens
gcctatagcaaaattattcatgtgtgctactcataggtgatagaaatgaaacaatcattagctatatggaactgcagtagtcctgttgtactatcttctgattaaaaaagagaacaaacatgcaaaaacataaaccttgataggaatatgaatattgtactgataatgtcctagctatatgtaatatgtaaattacatatatccaggacaagattaatgagacatgaatatgtttggcagttaagtgttcagattctgaagtgatgatattagtaggagaacaattggttggatttctattggagaaagacacttcacatcccttataaatatcttagccatttcttggttactattatacaaagacatattgtcaggattgtgtcattattccaaccaaaccagataattccgttttaaaaaataccaaactaacctaataaacacaaaatgtctgtttgagtgactgatatgttacttttcggacatgtgtatggtgcatgaaratactaccttatcattcaatactagatactgtattt

SEQ ID NO: 910351 - DNA, 645 bp, Homo sapiens
taagtatattgaaaaaaaagttcaacatcactaataatcaaagaaatggaaattgaactcacaatgagataccaactcatgccagtcagaataatgattattaaaaagtcaaaaaataatagatattgtcaagggtgcagggaacacataatgtgtctggaattgattccttctggttggttcttggtctcgctgacaagaacgaagctgcggaccctcgcagtgagtgttacagttcttaaagatggtgtgtccagagtgtgttccttcagatgttcagatgtgtccagagtttcttccttctggtgggttcatggtcttgctgactttaggagtgaagccgcagaccttcgcagtgagcgttacagctcataaaggtagtgtggacccacagagtgagcagcaccaagatttattgtgaagactgaaagaacaaagcttccacagcaggaagttgccactgctggcttaggtggccagcttttattcccttatttggccccacccatatcctgccgattggcccatattacagagtgttgattggyccgtttttacagagtgctgattggtgtgtttacaaacctttagctagacacagagcactgattggtgtgtttttacagagtgctgattggtgcattt

SEQ ID NO: 910352 - DNA, 660 bp, Homo sapiens
actttaaaatggtaactttaatgttgtgcatagtttaccacagtttgaaagtgtttttaatttttaaaaataggaaatgataaaattagactttatctaattctttccagctttataatttggatcctgctcctttgtacttcatggctcatgctttatacttacttgatgtttctatggtacttgtgcacagctgtcatgtatcagacctgcagttttgcacatgctttccactcttctagttcctcaactatttgtaaggttgccctcctttatgttttccattaaatcttccattagtcaaaccactccagtgtccctcgttccataagtttcccctgctctgaactcccagggcacattgtgcaacttcattaccttatattaaaattatctggaattttaaaaaatctactagattagggtagtgtcctgattttattcatttttttcttttggtgaaatttgagacatgtcttgcatttaacagtatttaagcaactagattgtgcaacggagccagtttctccagacaggctggagagaccacttgcatcagaatcatctggggtsccccttgaaaatgcaatgttccgggccaacgagtcaatctcggagtgtaaatcttgtgaagctgtattttaacaagctcacttggtg

SEQ ID NO: 910353 - DNA, 660 bp, Homo sapiens
actttaaaatggtaactttaatgttgtgcatagtttaccacagtttgaaagtgtttttaatttttaaaaataggaaatgataaaattagactttatctaattctttccagctttataatttggatcctgctcctttgtacttcatggctcatgctttatacttacttgatgtttctatggtacttgtgcacagctgtcatgtatcagacctgcagttttgcacatgctttccactcttctagttcctcaactatttgtaaggttgccctcctttatgttttccattaaatcttccattagtcaaaccactccagtgtccctcgttccataagtttcccctgctctgaactcccagggcacattgtgcaacttcattaccttatattaaaattatctggaattttaaaaaatctactagattagggtagtgtcctgattttattcatttttttcttttggtgaaatttgagacatgtcttgcatttaacagtatttaagcaactagattgtgcaacggagccagtttctccagacaggctggagagaccacttgcatcagaatcatctggggtgccccttgaaaatgcaatgttccrggccaacgagtcaatctcggagtgtaaatcttgtgaagctgtattttaacaagctcacttggtg

SEQ ID NO: 910354 - DNA, 659 bp, Homo sapiens
ataaagtagaaacagagtgattctgttagtcaggttccctggaaatgggctctgagttggagattcttgcacagaaataacgcctataagagactgagaatgctatccttatcaaaattccartggcatttttcacagaaataggaaaactatcctaacatgtatatggaaccacaaacaccctgaatagccaaagcaacgttgagcaaaaagaacaaagctgggaccaggcgtggtggctcatgcctgtaatcctagcactttaggaggccaaggtgggaagatcacctgaggtcaggagttcaagaccagcctggccaatatggcacaaccccatctctactaaaaatacaaaaattagccaggcacagtgacaggcacctgtaatcccagctactcaggaggctaaggcaggagaataacttgaacctgggatatggagcttgtggtgagccaagatcatgccactgcactgtagcctgggcaacagagtgagactccatctcaaaaaaaaaaaaaaaaaaaaaaaaaagaacaaagctggagtcaccacactgcctgatttccaaatacactacaaagatataataatcaaaacagcatggtgctggcataaaaacagacatgtagaccaaatagaacagaatagagaggccaaa

SEQ ID NO: 910355 - DNA, 670 bp, Homo sapiens
taccctcatgaaagggactagggcccttttaaacgggcttgaaagrgtgggtttgctttcttccatcccttgcaccaagtgaggacacagcaagaaggcaccatcttggaagcagagagcaggccctcactagacaccaagtgccagcactttcctcttggacttcccagcctccagaactgtgagaaataagtttctgttctttgtcaattacccagtatgtggtatttttgtgtccagagttggttcttgctggtgggtttggggtctcgctgacttcaagaattaagccgtggaccttcgtggtgagtgttacagttcttaaagatggcacggacccaaagagtgagcagtagcaaggtttactgtgaagagcaaaaggataaagcttccacagcgtggaaggggaccccagcagcctgccaccgctgactgggggtggccagcttttattcccttattgtcccctcccgtgttccgtttctgtcctatcagagttaccttttttcaaacctccccacgattggctacttttagaatcctgttgattggtgcatttcatagagtgctgattggtgcgttttacaatcctcttgtaagacaggaaagttccccaagtcctcactcaacccagaagtccagctggctttacctctcattttgttataac

SEQ ID NO: 910356 - DNA, 584 bp, Homo sapiens
gctgggattacaggcgtgagccaccatgccaggcctgcgactgtgagatttatgtgtgttcacaacattggagaacaatttatgtctctgtcatttctctcttctcattttagatgcttgtatgtgctcttcttaaagaaaagaagtttacccaaagtgttaggtgctaagacgtcttccctaaactccacctgattggccttcaaaccacaagctgactttcatgtctttcagggttagagcctctgttacccagagctgcaacctcagtataaaactcttcatagagtactaggaaggtgaaaagtgactttcctgacaactaggccatggtgttccttactgaacataaataatgctcacagctcaaacaagatgggataagaccacttggcacccaggaaaaatgattaaccatggccttctattgttcaacaagtgacagatgattctttacgaaatgtgcatccagccctgctttaaccttcccacawcctagagaaaattattcagatatcccagcttctagacaatgtccaatccagcatggcccctgttttattaaaccctccctagagtcatct

SEQ ID NO: 910357 - DNA, 609 bp, Homo sapiens
atgactttcaagtctctctcagggcatatgcttttggagttctgggctaccatataagaaacctggctacctgaagctgccattctagagagatcacgtagatatagagcccccgctgctycagcccacagctgcttgtgtcttcctagcccaggcaccaggcatgaaagtgaagaagtttccaagatgacccaactctgtcctgtgcctgattacacagccaccatcaagctgcaagtgcaggagaagctgcaaccaagagcctgccaatagagcccatttgactttcagaaccatgagaggtaatgataataaacggttgttgttttgtgacactgaggtcaaattggtttgatatagagctatttgtaaataatcatattaatgagttacatggtagatggtcagtaaatggtaattttaaagcataaactttaaaccacaaactaccatctcagagtacaggatatatcacatatcaaacaagcaaatgaagtaaatgatgttaggactagctgtcacttgtaataatctcaactgctgtaaataaactagaactgacttagtacgctgcatatttgatttaaaaaataatgtgtgagacaatgt

SEQ ID NO: 910358 - DNA, 668 bp, Homo sapiens
ttcataaagtgcaataaaatgttagcagcataaataaagagaaatctgcacctaaacataatttagtaaccaaaaaagagaaggtcttaaaagcagctggggagaaaagatatattgcataaaaagtagtaaaacttagactgatagcttatttcttctaaaaacaatggaagacagaaacaagtggaatgatatgttcaaagagaaaatacaggcacaccttggatatattgcatgtcaacttccagaccacttcaataaagcaagtcgtacacattttttggtttcttagtgtatataaaagttattctgagttattcacttaatagactacactattttatagtctattaagtatgtaatagcattatgtctaaaaatatgtatataccttaatttaaaaaaaatgcttgattgctaaaaattgctaataatcatctaagtcttcagcaagttgtaatattcttgctagtggaagttctcacttcaatgttgatggctgcaaactgatcagggcggtggttgctgaaggttggagtggctgtggcaattgaaaaaaataagacaacaattaagtttgccacattgatrgactctttcttttgtgaaagatatctctgtagcatttggtgctttttgatagtgttttacccatagcagaacttctt

SEQ ID NO: 910359 - DNA, 603 bp, Homo sapiens
taacataatgaggagcaggatactttaagataatactagtctttaatgccttttctcaggtttgtttctatatcagcagcattacccagcacccagcaggatccctaaggagggagatgtaggacaggtaaactttgttaagaaaaagagaggatgtggaccttggggcaatggttccagttgctataactgaattagcctattatttcattctcttttctgtcttttcagtgcctagtctcactcatctagacagctagcagacagccctgtggcaatcactgaaacggaaatgggttgacaattaggaggtggcatgatgatgcttggtggctgggagggaaaaggagttctgttgggaggaaggagggtgcatccaaagtaaaggaggctctctcaagccttaacctagagaagtaagtaatgtgaaatgctgcttttttactgtcacaggctgtaaagaagaggcatttgaagggcaatcggctttttttcaaggccattcagtaacacagaggtaactgatgcctaggccagctgtgcctattagacrtcatagttcctaaggagtaaagaagcacagtcaagaatcaatgaggtccc

SEQ ID NO: 910360 - DNA, 643 bp, Homo sapiens
aggaaggctctgggccaccaatttctaaactacagctaatttttcttgttaaggacatgtcacttatccatattttaatccaggtataaataacaaawaaaattttttaaactatacaaagttttccttgtcagttatattaatttcccacagctgctccaaaaattttcacaaagttggtggctgaaaatagcagaaatttattctctcaggtttctggaggtcagaagtctgaaaccagtattcctgagttgaagcaaaggtgctggcacttcctccagaggctctagagggaatccattctttgtctcttccagcttctggtggttgcaagcactccttggcttgtgaccacatcaccccagtctctgcctctatgatcacattttcttgtcttctgtttttaaatcttcctctgtctctagcttataaggacttgtgttttcatttaaggcctaccaagatactgcaggataatctctccatttccgattttttgattcaatcacatctgcaaggtccattgtgtcatataaagtaacactcacaggttccaaggattagaacctggtatctttgcaggctattatttagcctatcactccctagcaaaacatcccaaagacttatacaatcatctaaa

SEQ ID NO: 910361 - DNA, 642 bp, Homo sapiens
cattaatttttttaaatgtccatactaaaaccaatctatggattcagtgcaacccctaccaaaatttaaacagcattttcacacaaataggaaaaacaacactaaaattcattgggaaccatgaaagaccctaaatagccaaagcaatcttgagaaacaagaacaaagatgaaaatatcatgctactgatttcagattatattacaaagctatagtaatcaaaacagtatagtactggcataaaaacagacacatagaccaatggaacagaacgagtctagaaacaaaccctcatatatgtagtaagctaatctttgacaagatcttaatgaatacacaatgggaaaaggatggtctcttcaataaatggttctagaaaaactgagtatccacatgcaaaaaagtaaaattggatccttatcttacaccatacaccatacacagaaatgaacttgaaattgattaaaaactgaaacataataaaagaccaaaactataaagctcctagaaggaaaaatatttttggcattggtcttggcwttattttttggacatgacacctaaagcacaggcaacaaaaccaaaaatagggaaatgggattaggtcaaatgaaaaacacttctgcacagtaaaggcaacaa

SEQ ID NO: 910362 - DNA, 607 bp, Homo sapiens
ctcaggctcaaggcccatctcagcaccaggctggctcttatggacccaggatccaggcccratccccatacactcagctttaagcaggtccctgtggacccaggtaccagacctgcacacattctgacccagacaccaggccagcctgccctaggactctagcagcaaacccaccactgggacttacaaaatggtcaactcagaatctcagaactcaacccagactggagagttttccctgccaaagccaatctgtaaaaactggaataggtgcctacttctttgaacttgcaatcataagacatggccagaagggtaaaaaaattatctgtgaaacatgacaccaccaaatgaacaagataaagcactagtaactaaccctaaagaaagggagatatgactgcctgacacagaattcaaaataactgtcttgaagtccagtgagctacaagaaaacacagacaactaaacataatcataaaaacactacctgaacaaaatttgaagttcaacaaatagaaaccataaaagtgaaccaaacaaaaattatggtgctgaagcatacaataccttaacaggaaaattccacagacagcttcaacagcaa

SEQ ID NO: 910363 - DNA, 575 bp, Homo sapiens
tccatacagatggacatttaggttttgttttgttttggggtgctatttaaatgagtactcactggtgagtctagagcatccctttgcatacttggataagtatattaacaagatggatttctagcaatagaattggtgagagtggtgtgtatttaaatttttaataaataccaccaaattgcccatctaacaggttaatcagtttatactgtttccacaacctcaccagcatttagttagttaggcatttttagccagtataattggttgaaatagtctctttttgagatttggatttctgagtaacatagaggctcttatgtttatggtgacttaatgtctcttttttctgtgacttgtctgttcatagaagttacccatctttcctttatgttattgctttccttatttgtaagaatttttatagaattaaaattagactttggggktagatgctactaatatattttcttagggttttaaaaagctattcttaaatttccctgtagaattttatgtagtcaaatttatgaaatttttctgtgtggcccttggattgtgttgtttaaatctac

SEQ ID NO: 910364 - DNA, 639 bp, Homo sapiens
gtgtgaataataaagcagtcctctatcttttttttccattgccctaagacagttttcagctcttttacctgtatttcctggtacttacctccattttccaaaactctgtatttgtactgcactcttttgagatatcttttggtgttttgttctggtagatgatggttcttagctcttttgtgtcctcttcctcattagcatcctcctttaacacattacacttttggtaacatagacctttaatgtttttattatgaccagatagatattgatctttgttgcgccaagtagcatgcattaatattttctttcttgtgtaactcgtttttatttttttcttaagttaactatctctaattggctcagatttctttaaactttttgtcagttccttgtacattctctgagtacaattcatctggttgtcagacctcacatactaggtggatcccttttccccttgctccaggatggaccactgccatcctgagattcccccacatcctgtgttctcctctttcttgatttatttccttattttagaggcttacctcctaaaagatttctgaaaaaaacaaaaygggacctttttgagactttgcttttaggatcttttctttaccctggtgttctgaaatt

SEQ ID NO: 910365 - DNA, 599 bp, Homo sapiens
aaattatcagtaagtggaggctgctatgtgacatgagctggagggcatcaggagcgccacaaacattcttatttaatgacagatactaatgtgccctcttcccagatgaggaaacctgggcttagagaaattcgtgtcctttgcccaagattacccggcagaaagttatacagccattcgtagtaatctataggatgaatgggcctacaggttggtcctctgctttgaaactagctattatctatgtccttgggaagttgtgctattaactcatatcccacaaatgtttccagattgatccaaggctcctagcaagtcacaatgaatgtctttatttttttttaatgcttaagcagctttattgggatacaattcacatgtcatacggttcacccacttgaagtgtacaagtcagtgatctttagtatatgcaaatacatgcacgaccatcaccacagtcaatgttagaacgctttcaccacctcagaaagatacccgtacactttagctctcacctctactccacgacaccctctcaacyctaatcaaccactaatctactttctgtatccattcatctccatattctggattttcct

SEQ ID NO: 910366 - DNA, 599 bp, Homo sapiens
aaattatcagtaagtggaggctgctatgtgacatgagctggagggcatcaggagcgccacaaacattcttatttaatgacagatactaatgtgccctcttcccagatgaggaaacctgggcttagagaaattcgtgtcctttgcccaagattacccggcagaaagttatacagccattcgtagtaatctataggatgaatgggcctacaggttggtcctctgctttgaaactagctattatctatgtccttgggaagttgtgctattaactcatatcccacaaatgtttccagattgatccaaggctcctagcaagtcacaatgaatgtctttatttttttttaatgcttaagcagctttattgggatacaattcacatgtcatacggttcacccacttgaagtgtacaagtcagtgatctttagtatatgcaaatacatgcacgaccatcaccacagtcaatgttagaacgctttcaccacctcagaaagatacccgtacactttagctctcacctctactccacgacaccctctcaactctaawcaaccactaatctactttctgtatccattcatctccatattctggattttcct

SEQ ID NO: 910367 - DNA, 492 bp, Homo sapiens
aacctacaactatttatggagaaaaagcagcccaaggatgatctttttgatagactcaatactggtattctgaataagcatctccaggatctcatggagagcttgacagccaaggtattccatacatacaatgcctccatcacgctacagcagcagctagaagaactcacagccccggatgagaacatcccagcgaagatcctttcttataaccgtgccaatcgagctgttgcaattctttgtaaccatcagagggcaccaccaaaaacttttgagaagtctatgatgaacttgcaaactaagattgatgccaagaaggaacagctagcagatgcccggagaaacctgaaaagtgctaaggctgatgccaaggtcatgaargatgcaaagatgaagaaggtagtagagtcaaagaagaaggctgttcagagactggaggaacagttgatgaagctggaagttcaagccacagaccgagaggaaaataaacag

SEQ ID NO: 910368 - DNA, 590 bp, Homo sapiens
aatgcttagataagcaacagcagtctcctcttgatttattcatttaactcacatacaaatttctaaatctcactgctttatscccagaacttgagttttaaaaagtaataacattttacttattctttagagtaagttctttcttaagtcccccaatttttctccacagagagatcaaaaacagccttgtttaacaaaggtaagaggttttgggaaggctttttgagggagaagttggttcatttctcaagtgggggcctcccaggacagttgggacatgagccctgagtcacctgtggcagagcacagaaggaagaggagctacctaacttgtatgtaagaaggcagctatgttgttgttgttgttgttgttgttatggagtttcactcttgttgcccaggctgcagtgcaatggtgtgacctcggctcactgcaacctccacctcctgagttcaagcagttctcctgccttagccttgtgagtagctgggattacaggcacccaccaccatgcctggctacttttttgtatttttagtagagatggggtttcaccatgttggccaggctggtcttgaactcctgacct

SEQ ID NO: 910369 - DNA, 652 bp, Homo sapiens
atttttgtaaggcagaggatgagaaaagtgtgggccagggcagggcaggtaagtggtgacactaaggaggaattgccagcttgggtgyacaataaagtttaatgggaagggtgccccaaaataatttcattgcaggatctggtccaagaccagttctgactctcatcaccctttctctagcatgctttcactctgcagccctcagctcccagccccttacactggtttccctcttgagcattatctgctcagtgatgacctctgatccattctgccaatagttatcccagactctttctgtctctctacagagagaaggtgtgggtggacaaagcaaagcagagccctgacctcacaccagctggctgagctgtcttggcttgcatttgctgttccagcatttgtggagtttgaaatctgcatgcttggagtgcggagagctggatcttgcaccacagtctccctgtgggctcttgagtaagtgcttttagcagctagggaaggtggacacagaaagggaggggaagaagaggagttaagagtatttgtgtagtgtgatctgagggacagttaatagccctctctcctcacaatcataaaataaaagtatctttcccaagaggcaccatcgtgttaaaaatgcaactattag

SEQ ID NO: 910370 - DNA, 601 bp, Homo sapiens
ctggcttgctctgtaggaccccagtcctatggagtggggattattgccccgcattttttttttttttttgagatggagttttgctcttgtcacccaggctggagtgcactggcacagtcttggctcaytgcaacctccgcctccctggttcaagcaattctcctgcctcagccttccgagtaggtgggattacaggtacctgccaccacacccagctaatttttgtagttttagtagagacagggtttcaccatgttggtcaggctggtcttgaactcctgaccttaggtgatccacctgcctcagcctcccaaagtgttggaattacaggtgtgagccaccatgcccggcctgttgcccctcatttaacagcactggaagctgaggctcagagacaggggatggcttcccaaggtcacacagcaggtgagtggttgagtctgtaactcatgcatgtgaaatgcttaatacagtacaaacccaggcctgtctgtctttaaaacacacattcttcttctccatggttctctttccctgcctttatcttctccattaaggctctaagaaatgagtggcgggtttagagaggcttggggaaccc

SEQ ID NO: 910371 - DNA, 601 bp, Homo sapiens
ctggcttgctctgtaggaccccagtcctatggagtggggattattgccccgcattttttttttttttttgagatggagttttgctcttgtcacccaggctggagtgcactggcacagtcttggctcactgcaacctccgcctccctggttcaagcaattctcctgcctcagccttccgagtaggtgggattacaggtacctgccaccacacccagctaatttttgtagttttagtagagacagggtttcaccatgttggtcaggctggtcttgaactcctgaccttaggtgatccacctgcctcagcctcccaaagtgttggaattacaggtgtgagccaccatgcccggcctgttgcccctcatttaacagcactggaagctgaggctcagagacaggggatggcttcccaaggtcacacagcaggtgagtggttgagtctgtaactcatgcatgtgaaatgcttaatacagtacaaacccaggcctgtctstctttaaaacacacattcttcttctccatggttctctttccctgcctttatcttctccattaaggctctaagaaatgagtggcgggtttagagaggcttggggaaccc

SEQ ID NO: 910372 - DNA, 388 bp, Homo sapiens
gactgggggacaaactactggcatttggtgctgggagggatgacaaatgttctgcaatacccagaagtcccacacaatactgtaatytcccccattaagaaacatcggggccaggcgcagtggctcatatctgtaatcccagcactttgggaggccgagatgggcagattgtttgagccccagagttcgtgaccatcctggacaacatggcaaggccctatctctatttttaaaaatgcaaaaattagctaggtgtgaaggcgtgtgcctgtagtcccagctactcgggaggctgaggtgagaggatcacctgagcctggggggtggaggctgcagtgagtcaagattgcatcattgcactctagcctgagtgagtgacagagtgtaa

SEQ ID NO: 910373 - DNA, 538 bp, Homo sapiens
atgtatccatccatccaaccattcatccatccatctatccatccatccatcatccacccatcatctcccagatcctgggtctcaggcacagttcgaggccctggaggtccagagatgattycccagacttaattccagtcgcccccattccctgaaggggctgcatatctctggcggttgctgtgaggtgaccagacaacatgggaatgggtgggctggctcttgtggctagtagcccctgattcccaaccctgggatgtctgggttcatggtcccccagctcctcagaggcttccagagatagctggtactgctgtcattccaggaagcccctcagaggaaacacagtccccattcatgggctggctgcttggaaccgcagaccctgtgctgtcacagggattcacgcaggctttacctgccctcctgtcccagtgccagggccggtctgaggacatccagtgagtctttgctgagcagctttggaagttggggcagtgccatggatgctaccagaaccaagttccctactattctt

SEQ ID NO: 910374 - DNA, 608 bp, Homo sapiens
attgtttcctttcaaagaacaaatagagcgagggrttctgctttgcttaaagtcaatcagcattgaacaagcctctaagctccttaagcaacttccgtgagtgtggaagccggcttagagcaagggctcagagaggtttagtgacacgtcccccgtcacacagtggtgaagggctgctcctgtaggtgaagggtagcatgatcctaagccagggctccagagactcagattctggccttgttgagaggtttggggcaggtgacatctccctctgggcctcagtttcctttgaagctgacagtgtgccaggcagagtttagaaagagggtctgctggaagggatgatgggagagagcctggtgggagaacaagggagtcgggtgcctgggtgggtcagggtgtgtgcacacagccttccctgaccccagcaaaatatgccatcagtggcaacttcttctttgccctcttctctgccctcttacttcccaaaagactgccagggaggctgggtgcagtggctaaagcttgtaatcgcagcactttgggaggccaaggcaggcgggtcacctgaggtcaggagttgaagaccagcttgtccaacatggtga

SEQ ID NO: 910375 - DNA, 608 bp, Homo sapiens
attgtttcctttcaaagaacaaatagagcgaggggttctgctttgcttaaagtcaatcagcattgaacaagcctctaagctccttaagcaacttccgtgagtgtggaagccggcttagagcaagggctcagagaggtttagtgacacgtcccccgtcacacagtggtgaagggctgctcctgtaggtgaagggtagcatgatcctaagccagggctccagagactcagattctggccttgttgagaggtttggggcaggtgacatctccctctgggcctcagtttcctttgaagctgacagtgtgccaggcagagtttagaaagagggtctgctggaagggatgatgggagagagcctggtgggagaacaagggagtcgggtgcctgggtgggtcagggtgtgtgcacacagccttccctgaccccagcaaaatatgccatcagtggcaacttcttctttgccctcttctctgccctcttacttcccaaaagactgccagggaggctgggtgcagtggctaamgcttgtaatcgcagcactttgggaggccaaggcaggcgggtcacctgaggtcaggagttgaagaccagcttgtccaacatggtga

SEQ ID NO: 910376 - DNA, 522 bp, Homo sapiens
ggacaggggtacagtttcttttggtgcatagttctcatgttgattggttccractgtcatgttcttgcacctgtcctgagtatctcttgctgtagctctggccctttccccagtcagctactgcactgccctggcccatgtttcttagagacatggttatctctgtgctattagtgtctgtgtcctggccgaggcaagtcccttccctttctgagtctatattcttataaaatgtggctttgagaatagatgatgtttctggtcttaaaattctctttgactctggagttctggatctgtgcttctgtttgatgttgtttctcttgctgggtgaccttctctctgactccctgctgtaaagacctcctttttttttttttttttttttttttttaatcaaaacctaacttggtccgacctaccccatggctgaccacccaggcacttgcttttgacttaagggtagcaccatacgatgtcttctttttgtttttcattttaacaacctgtatttttcacatc

SEQ ID NO: 910377 - DNA, 680 bp, Homo sapiens
tttcttcatagataaaagtatttttaatgataatcaaacctgggcaacatcccaaaacaaactttcacatgtactctgaatgagccagtgttataaaatataaagaatttttggccaggtgcagtggctcacgcttgttaatcccagcactttgggaggccgaggcgggtggatcacgaggtcaggacattaagaccatcctggctaacacggagagaccccatctctactaaaaatacaaaaaattagcttggcatgttggtgagcccctgtagtcccagctactcaggaagctgaggtaggagaatggtgtgaacctggccctgggcgacagtgcgagattccgtctcaaaaacaaaaaaaaagctaacaaagtgagcacatgctattggaaaaatactcaaagcagagttgctacaaacctttaatttggaaaaatttcaatatctgtgaagcataataaagtgaagtgcaaggtatgcctgtactcactaacatcccaaatgatgctacaaatcttagcaaaagaggtactttgccaatgcctcttaccaaattactaaaaaggtttcctgagtacattaccatgcaaaccaagaaagaygtaaaatatttatattaatttcaaggcaagttcccactatattaaaaatacttagagatagtattatgaatatact

SEQ ID NO: 910378 - DNA, 648 bp, Homo sapiens
tttttgctgttcttcctcaaccccaccttcctcaggaattttttttttaactaaaacgttctgtggttgctttcaaccaaagaaatggtataaattattgaagtttatatgttttttgtttktctttttatgaatagaaaaatatttgttattttttaatcagttgagtgggggctgtgtgtgtgtgtgtgtgtgtgtgtgtgtgcatgcacctgtaatttcttactttaaataaatgttttcctattttaaaggctttgtggtacattgatgaaacaaaatggacaaactttcagagacgctaattagtcatttggcaactcttctcacagccgaaaatatagttttttttccaaagaggaagcaataaagtattataagtaaatatttttaaacttctactaaaatgcttgttgaaatgtaactgatgtatcttatggaaaaaatgcacacttttatgacacttagtaaattactagagttctggaatttcattgtctgatgttaatcaatatatgtttacacaaatctcagtttatttttaaggaattgagagataaatgcatttatattttttaggaaaggcaattaaacccttataagaaaataatgtaatgataatggttaatacctagtttaaaatgttag

SEQ ID NO: 910379 - DNA, 596 bp, Homo sapiens
ttctgtacatatttttccccattatctacctggattcaggaaaaaatgcagcaatttacttggtaaatcttccctttcacaatagaagccaagggatatgatttgaatacctagctgaagaacccatattctctatggttacaattctgtggtctgaatccttaagcagcacaagaaattcttaagaattatagtcttccattttatacactctaaacacccagaaatcaaagtagatgatccacttggaaatacaaaattatctggaagtttcattagtcaggtttatgttgatagctgatgtagcagataaaattacaggctttggcatcaggcaaccagggtttgaattctagctcaaccacttactgagtgacaccagacaagctacttaaactctctgatcctcagtttcctcatctgcaatatggggacgataatgcctacctattggagttaaaatatgccccaaaatagcaattctcttccyctgctacttatcaattcccttctccagaaaatgtagttgcattcacataaaactaaatttgaaaaccctaggagtttcttgaaattggtatgaaaacagaagagta

SEQ ID NO: 910380 - DNA, 642 bp, Homo sapiens
ttaagagcagaaaagaaggagcttttagaaataattcccaggctatagcaaaggaagtccagtgggrcctggaggtcacttagatcattattgctcttttcaacatatgttctctaatgttcttgagattagaagcgacccttgttgaagactttagaaagaaaaattccttgggatcctttactaacccattcaaatatttagattgttcttatgaaaagaaagatatctttagatatacctttaatttccattatgaagaccagacttatacatgtaagaaaagtattttgggtgctccttcgatttttatagacaattacatggaaaaaaaagaaggaacttactaggttttgccaatgagtcagtcagggttggagcaaaagtaacagatgtagtgctagatgaataagatacactccaaacacttgaaagagaaaaatgaaactctggggaaactccgtagatgtatccagtcatcctgcaagaacccaagagcatctataggtgttaaggatgcactagttatctttgactttgattatttggctgcagttcgggacctgagtcttgattctacagttattccaagttctctagagccagaataactggttccagcattaaagacaaatgctcatt

SEQ ID NO: 910381 - DNA, 605 bp, Homo sapiens
cagtgtaggttaaatttcagtgagctcagagatgggaggagttctggagtttctatttctacctatgccaataaacacatatcaccaggagccttgaaagtgcacaggcccagagccatagttgcrcctcctccatggcagggactgcctctgtgctaatgacccggatgcagcagcaaggctgggaaatataaaaaagattgctatgtcttgtttgttggaaggcttccagttttgctgtatgcaagaactgtgtgcattgcccccctcctcctagattacaaaacaaacaaaaaaagcatttaatcaaattttgctgttagttcagttcactcaccatgttgaactaatgtagaaaggaaggtgatttcagtgagcaacatggcagcattgcagagtggtacaaaggggatatcctagcctcccatgcttaacgggagctcccagctgtatggtcttagaccagttaatctaagtctgacaaaaaggaactgaagtttgcaacatcttatctgtaacatgtagatagtggtagtatcttttcatagggttgttcggtgatttagacaagagatactatgcaaaagtgcttatatggtgcttgg

SEQ ID NO: 910382 - DNA, 577 bp, Homo sapiens
tttctgtgttacatttggtaagccatttaatctctgaatacacacagmcactggtttccagacatatattcaactgcctgctggacatatacactttattgtctaataggcatcttagacttcatatggccaaaacagaatttttgatatatcattctcaaaatctgcttctcccacagccttctccatttcagtaactgacacgacacaaccattcactccgttgctcaggtcaaaagcctatgagtcattttttatttcttctttctctcaaactccacctaagcaagtcatgttgacgcaaccataaaatatattcaaaacctgttcacttctattattatcactcttatccaagctaccatttctcatctggaccactgcaactgtttcctaactggtcttttaatcttttctgtatataattcattctctacacactaatcagggtggtttttctgtaaacataagtcaaattgtgttatttcactgcttaagacactctaatgatttcctaacacacgtagaataaaatctgaacttttttttttctttttttttgagatggagtctcgct

SEQ ID NO: 910383 - DNA, 609 bp, Homo sapiens
tttaaaaatcattttgtacaacaatcactgaatcatcagagaatacagaagtatctactgtgttacatgagaaatagaatctgtttagggtttaaattagacatcatacattatgtgtatgataggtttaggtttagacataaaaacatatgtttaactagctacatctttaatatacaagtataaagaaaccattcattcatgaacatctaagttaaattcacagtatatacttagtgcagccatgattctctttgctagattactgacatcacagtaggtttctatgattctctcttgaataaagcaatgatgtgaaaagctccaggacacaagctgctattatagcctcctgaaatcagatttccaactacaaatggtcctgacagatccttaaggcattattcttctattgataacagggtaattgtcactaagttgtcttcctttgttcttaggctgaggtcttttctggttccctgttccttccacttgcattatastgatacagacattaaattcataaactcatttattttctcattctaatgtttaataaaggactaagacctatcagatactatgttttatactgggaattcagtggtg

SEQ ID NO: 910384 - DNA, 547 bp, Homo sapiens
attttttattacaacctaagccagtgatagaattattttcttcatactgtcattgtttcatcatttgtaatgcatactttcccatcttgtagtcattgagccagttttctatatagtattctaaaagtgttgcaattttgattttcacatccagttcttttatccacctggatttagttttgatctgctgtgatgcacaatctaattttatttttttacacgaataaccaattttccggtatcatttatactttccccctcatatttgaattgccatctatttcatattttcagttttcacacatagatataccagtttctaggatgtctgttctacttgtccgtttgtaatcatttcaacaagaccactctgtcttaattgccatttttggataaatgttgatatataataggacaagtccccatactttgttcttcaaaatagtattattggtctttgyagataaatggcagaaaatgacattgtggatattgatttgtaattttcctttgtttaaacgtatcagtttcatagtctttacatatt

SEQ ID NO: 910385 - DNA, 595 bp, Homo sapiens
tcagaaggagagggtttgggtaagcaggtggttatactacctgaagcttaggagaaattgctgcacaggaaatagagacttttaagactcatccatcaacacaaaggttgtaattataaccatgagagagaagggaattacgcagggaatacagacaaaaaatgagaaccgaatcaaggccaactccaacattcaaggaatccagaagaaaagataagcctataaagaaaactgagaagcagtgagagaaacagaaagaaaagcctggtgactatgaattgacagaagccaagggaggaggatatttggggaggttaaagtggcaagtgatacttaatgagaaggatcaaagagaaaaaaagcatggtagaaaaatccagctggttatagggcagcccaataacattgctgggcatagctccaggggctgcaagccctcagggtcaaggccatacccagcacagcctggcaggragagtgaagtgctgatggagggtgtgaagctggattgaagagctgaaagagtgcagaagattcagaattttttgcataaggcaatgaggggatacaaagagccaggggatagagttctggg

SEQ ID NO: 910386 - DNA, 524 bp, Homo sapiens
aatccagtcattctgattcttggtcattagtacctgacttactttttaaaattttgtgaaatctatttcccatatttctagcatctgaaatttcacaatcgtgtgctattggtgaaaaaaaaaatcttcagttttccttctttttctgttgttcccttttaaggaaatgttacctacatttcaaacattggacctactggagtagttatccacttttcttacctttgcacttcccttctttttgctgtattttaggaaagctcttcaatcaagcttaccactccttccatgattaaaggggatttttaaaatgaccactgtcatgttttaatttctaaagttctttattgacttcttagtattcctattttgattcatcctgttcttgtttcatgaatacaattgctttttctatttcttgaatgatgtaagtagaggttttttttttkttttttttttaaagttgtcttccctctgtattatgtctgtcttctttctgaaagtcacttttttcctatttgctt

SEQ ID NO: 910387 - DNA, 614 bp, Homo sapiens
tgcatgagtacattatcactaaacatggagtcaaattcaatagacttagtgaaattgcacatatttataggtatggacaaaatttakcaatataaagttcctaactttagagagaggaaatagtttgaaaaagttaacttgctgaaggactcataatgcttttcccgtactacatggcacatggcctttgatttgttccccattaattcctttatccagtctgctcccttcataaaagatgcctaacattactctgtaattatataatatgataaactagtttttactcaatattccattagccaaaagcttttatttttccttcagaacacaaaacagtcctctctctctcttttttttaaatgaccatgacattgtcctgcttctttgactgcggctcaagccgtgtgggcagtgaagtaaagacatgcagaattctctctctctcttttttttttatatcaagacatgattcctctttgtggcccaggctagagtgcagtggtgtgatgttggctcactgaagcctcaacctcccacctcaagtgatgctcccatgtcagcctcccaaggagctaggactacaggcttgtgccaccaccatgcccgtttaa

SEQ ID NO: 910388 - DNA, 535 bp, Homo sapiens
atgttttagacatttctgtttccatttacagagcaaatgctatagactgggcactgctcttttcattcagaaaataaagttgctgtaagagctaaagtctattggacyatctacagaaacacaaaatggtattgtcacactagcaagtcagacatggtgcaatgggatcagaaaggaagataatacccaggttttggagcagggtcagtgaaggtttcagagaagggttattttagagatgaaccttgtaaaatgagtaggattttataaaaaaaaaagaaatgtttttttggtggcggtaggaactccaataaaggtattatttctagagatgacctcaggctacttatcagccagtgttttttaaacagagcccttgaaggcccagattttctctgaagacttcagaggctaccaaaagggcaatgcctaaagggaaagagagttaaaaagagagtttgaaaactgaataaaggtgatatagaccaaccatttacatttcaaaaaaagtctactacatcttaagttccaaaga

SEQ ID NO: 910389 - DNA, 638 bp, Homo sapiens
gacttctaatatagactccacttaatcaagacatattctacttgtatagatttttggattagattttctaaaatttgtttagaatttttacatccatgcttatgagggatattattctgtggcttactttttaaataatgtcttcatttggtttatgtctcagggtaatgtaagcatcatagaatgaggtgggaaatataaatttcagtttttctgagagtttgtatgcaattggtagcatttcttcctttaatgtttgtttacccggaaagccatctggacctgcagcttctctgtggaaagaattttaaacacaaattaaaattctttagaatatatagatagggctattcaggttacttgtttcttcttgagtaagctttagtagtttctttctttcaaggaatttgtgcatttcatctaagatgtcaaattcataagtataaatttgttcatttttttattcttttaaatccatatactgtagagatgacacctctctcagttcttttttttttattatactttaagtttyagggtacatgtgcacattgtgcaggttagttacatatgtatacatgtgccatgctggtgcgctgcacctctctcagttctgatattggtaatttgtctatttt

SEQ ID NO: 910390 - DNA, 548 bp, Homo sapiens
tttgtcactaggccactctcatatagccccatcctctttccccacaacactagaaactgtgacacgtggagttgtagaggaaactggacaggcaaarttagcaatcagtcatctgagttcacaacaacaatgatagtgatggtgacaaccacaatttaaaaagcaattttacatttaatatggttgaattttgtgagagattggcatattgttataataacgtcagtagttatttaatattaataagccttacattcaaattttgaaattgtgcaaatctctccagattaaaaattccataagcatcaggaaatctcaaagatttggaccaagtgaattttaaactacgttttatgcaatcacaacatgttagcaaatcagtagagtaacagaaatagagaacacatttgtcagtattagtcttacattacctgagatatgaaggaggcaaggtcctcagtaatgggtatcttgcatagaatgctataactttgttacactgtctcaactatctttgaatgctaagatgggttcatcttgcagataag

SEQ ID NO: 910391 - DNA, 668 bp, Homo sapiens
tcacaggctaggctgcaaattggaggcacagcatgcagcagtaaagaaaagctcatagaaaagggggaaaaaagagctcaggtattttactctaaattgacaaatgggatgttcctgaactcaaaggaattctttagctcactattgaattgctattaaaaaatgtattaccgagaaaacagacccaaattgagaccctataggaaatagaatttcagtgtattttctattattcacagtaagaattagcaccagactgtgcatatcactgagttaaatgtaatgcaaaatgaattaagtaaagggggaaaaaaagcctgtctgctctggaaacttacaatgaagaacattgaggcagaaagaaagaggaaagatagcatgtcacttgttatgtgcatactcaagggagagagcaagttgtagtaatgtgtttgactgaatggttcttgagagattgccaaatctcttcttgataagatttgattttgaagcaactcaggtgatacctagatgtataaggatatgaatttaatgcatggtggagagtagggcattgcaggattatggtggaagcagaagggaagctcgagatattttgcaaagactgaaaaatgagtgaragggaacagaatggatttgcacaaaaatataatggtacccagttttct

SEQ ID NO: 910392 - DNA, 626 bp, Homo sapiens
gagtctaatatttaataagcctctggtctcccatatatctggctccacatgaattactctttctctattgcaattctcctgtcttgataaattggctttgtctaggcaatgggcaaaaagaacccattgggcagttacactaccccataagttctttttgtattgtccggggaggtgggttgtgccagccccagtcttctggttgagatactgcactgtggttattctagatgtttccctcttgctcctccggagagtctacagagtgtcaaggtcagcagagtctaaactcttagtggcacattctactctgttcagagttattcagtgatcaagaagactaaaactgagtctgcattttttttctgttcacttattagttgaaagcttcactttaaaagtcagtaaccaggagagctgtgccaagaatctgtgtgtttcttccttacccattctcttctccccacagttgtcctagaaaaggatgagagggttagatctcaaaggtcccaaagaatgtttaaatatggtagcagtggtaatagccctgtggagcaaccaaaggarcattgctttatattcactgcagaatcttcacactggaagaaagagctttttacatatgt

SEQ ID NO: 910393 - DNA, 577 bp, Homo sapiens
ttatagtgacagccaattccctcagagttacacagcagttgctggcaagtataatctcacatttggcaaatgcttgcatttctgaagctcactttttcattggttcttctcaacaatgctgtgaagtaggcagggaagttatgatatccattatataactaaggaaaattagaatcaggaaagtgttgccttgacctagagtagtatttcttaacgtgtggtcctggacaaactgcctcagcattacctgggaacctgttagagacaaaaattctgaaaccctaccccaaacctactgacttagaaactgcaggataggcccagtaatttgtgtttttataagccttctagtgattctgttgcatggtcaagcttgaaaacccctgccttcaggggtatgtggtcccagctcaaacattactaatactaatgtttatttatttaatttatagtttatttgtccccctggagtttaaaggctgtgaggtcagggatggtgtcacactgcctaggtatataatagatatgcagcaaatattgcaaaataarttaatgaagactagaacgagtgaatgca

SEQ ID NO: 910394 - DNA, 710 bp, Homo sapiens
gctgaatccaacacacattcaactctccttcccttttccctttgccagatacatttgcatttacttctataaatcacagctatcattgtttttcctaataattatcttatgattcaatacactcagtccagtgagcccaggaatacatagtacatggttctaaattttattgaaaatatttataactttgaaatgtaaataattgaactaaattcatcttctataaatcatattttgggaagaaaccctgattgctctaaccaacagagatgttattagaaatgtaatataataataaaagcaattaacctttactgaggccatcctgtgtccctgaactgatggtaggcactttcacatcctttttcatcctcccaggaacctattagtagaagatatggtttctattttacaaacgaaccaattacagttctgagaagttaatctctttgaccaagcagttgtactttaggccttgagccaagttttgaactcagacctctctgactttaaaagtcctctaagccattctacttggaatcaattactcacattttcaagactactcaagggcagctgtgctacctaatacgtgtaatgttgggaacaatatttaactacccgttgacttagtttcttcrtctgaaatgtaaaggcaatcagaacttccttagaggattattgtgaagattaaataaattaatacatgt

SEQ ID NO: 910395 - DNA, 710 bp, Homo sapiens
gctgaatccaacacacattcaactctccttcccttttccctttgccagatacatttgcatttacttctataaatcacagctatcattgtttttcctaataattatcttatgattcaatacactcagtccagtgagcccaggaatacatagtacatggttctaaattttattgaaaatatttataactttgaaatgtaaataattgaactaaattcatcttctataaatcatattttgggaagaaaccctgattgctctaaccaacagagatgttattagaaatgtaatataataataaaagcaattaacctttactgaggccatcctgtgtccctgaactgatggtaggcactttcacatcctttttcatcctcccaggaacctattagtagaagatatggtttctattttacaaacgaaccaattacagttctgagaagttaatctctttgaccaagcagttgtactttaggccttgagccaagttttgaactcagacctctctgactttaaaagtcctctaagccattctacttggaatcaattactcacattttcaagactactcaagggcagctgtgctacctaatacgtgtaatgttgggaacaatatttaactacccgttgacttagtttcttcatctgaaatgtaaaggcaatcagaacttccttaraggattattgtgaagattaaataaattaatacatgt

SEQ ID NO: 910396 - DNA, 607 bp, Homo sapiens
attcctgggatctgttgacaagaccaccttggaggggatgtttatgtcatttcctccggaggcactgcctgatccctttcaarggatcaattttgccaaccaaaataagactggctactctttgactgcctggcttgtattcaggacaatttctcccatccttcctcccctactaggatggtacaattctgaagcagcaacaaccatctaattatcaagaattctctccacatatttatcggtatttatctctgaggaatccattgtgttcttgggctcttttcagtatctcttctcttctttatcgtgtttgctttttttttttttaaatcttgctttcttattctctcttccatggaaactttggccctgaaacactttgctccctccacatatccttggaaatcacaagattctaaggtaaacattaaggcatctccacatactcctgctcccttgttctctaacatgtcccaaaataatcacaattctagcagccactactaaaggcatccacatactttcatattctcccactggcctctgatgactttgttgattctttgtgactgtttctgtcctaaggaaaccccaatgcatcttcatt

SEQ ID NO: 910397 - DNA, 597 bp, Homo sapiens
ctgataacaagccaaggttgtgaattactgggatacatgtttacttatttactctataaacttcgtagaattcttaaaagaaatgcattttaaaaagtggtctgtaattctgacatctcactaaatcaaacatgcttccacaccaaggagttcgatttagggaatatttagaaccaattatccagctgtgtgatactgagataatcactttccctctctgaagcctcagtttcttcagttataaaatgaaaggagttgaattagatgatctggaaggtcctttccagccatagcaccgtatgttctatgcattttgctgcttagcaatgtatgaaaattctctgccaggcagcctgtgcagctacattttactggctggttttggctcattttcctaagagggttgaaggcatatgttcactctaactctgtttttagagaggggccatttttaccattaactgcactgtcttcttcttgccagtgtctagcaggcatctctaaagtggggtagcrgcataggcagcatttacagccaaccattgagtggcaatttcaattgtttgattttccttcctatgactacatgcttaattg

SEQ ID NO: 910398 - DNA, 651 bp, Homo sapiens
ggattaccggcggcgcgcgggataatttcgagagcaggactcccctgatgggggcgggcaggacacgccccgccacggtgggcgtgggcactttggcgggtgcacagccgtgttgggtttgtagggcccctgctgtgtcgaggacagagatacccctggggcttcccgagtgttcatgggtctaggagcgcgggacctgttcattttattgaaaaagccaagtgaagtgacaactatggcagttattcaagggtcgtggcattgagcatctgtgtggccaccgaaagaacagaactccgatgtattcacggaataaataatgatatgacagggtttatgttttgtgcgtcgctgcctaacccgaggcgcctcccagaagcaccaggagagcttttcagaacacacctattgggcccaccccagatgtcctgaatcacgtgaggggataaagccctggcgtgagactttttgtaaaagctgccccggggatatggctggggacgcctagttaggcatcaggaaggagaagaactgggttccactcatgtgaccttaaacacattttcagcccagttttatcatctgtaaagtggccccagaraacttgtaatagaggtgaaatagggtgtatggaagtgtgtggaaagggga

SEQ ID NO: 910399 - DNA, 572 bp, Homo sapiens
tataactagttatatgaactttgacaaatcactggtccacaatttacccatgtgtaaaatcgagaaytggattaaacgttaagtacattatcttccagctttaaacttgtttaaatagttatatatttaggggttacaagtgcagatttcttatacacatatattgcgtagtggtgaagtctgggcttataatgtacacatcatttgaatagtgaacattgcacccaataggtaacttttcagccctcaaacctcccctcccattttcccagcttttatagtctccaatgtctattattccactctgtatattcacatgtaccctttgtttagctcccacttataggtgtaaacatacagtatctgcctttctgtgtctgagttgtttcacttaaaataattgcctccagttccttctgtgttgctgcagaaggcatgattttattctcttttttatggctgagtagtattccatagtatacatatatgtacaccacattttctttatccagtctttcattgatggacacttaggttgattctatgtctttgctttgtggaatagtgccatg

SEQ ID NO: 910400 - DNA, 613 bp, Homo sapiens
tacaggtcccagtgacttatgaacatacagaagtcctgagttcatccaggaactcttcactcaagagaaagcaaagctacataccaagccttgagaactgaactaagatttaagccacagctcaagtctgagactaacacctgagtgacaaatgtaagcagggcagtgaaggctttgaacactgcacaaagactgaacccaccactcgagtctctaatccctaaatggcacatgcacacgacagatcaaaaggctttgaaaactgaactggttggaactgacacccatagaaggtgagacagacctagtggtttattacctgataaagatgaaaagcaataatggactgggcgcggtggctcttgcctgtaatcccagcactttgggaggccaaggcgggtggatcacttgaggtcaggagttcaggaccaacctggccaacatggcgaaacccgtctctactaaaaacacaaaaaattagccgggcatggtggcaggcacctgtaatcttagctactcgggagactgaggcaggagaattgcttgaaccygggaggcagaggttacagattgcagtgagctgagattgtgccactgcactccagcctgggca

SEQ ID NO: 910401 - DNA, 600 bp, Homo sapiens
aagccactttcttttacagtcacaaagctagcttgcagcaaagtcctatctggaatctagcttyctctttctgctctatcactaggcccaataatagatttgtagatttaatccacgcataaataccctagaacataccttattcatcaaatgcttgtttcttaaagaaatgaaagtatagataactgagcagggttaaaagactaaaacatgtgagctagccaattatactactcagtgagccccacaagagcagagattttcacgtttctgtttgttgatggaccctcagtgagtaaaccagagtcagccacaacgtggtttaattactatgtggtgtttgaatgaatgatttcttctacattttttatatgcaatgtctataagtgagtagatattatttctattttataggtgaaaaaaaaaaaagctgagtgaagttgacttgctcaaatctagacctagaaccagaactagaaaccaggcttctggtgcctaattcattatttagctgtaaaaagattgctttcataaaaaaattaattgttattctgtacagagaatacagacagatttgtcacttcagcaaaattctgagga

SEQ ID NO: 910402 - DNA, 565 bp, Homo sapiens
aagctttgaagaataaaaaaaggaggctccccagactgattagaagcacagtagagagagkacagccacctagagaaacagatcagagagagcctgaagggaactgtggaaatgcaaaaccatagcccagagagagacctgtcaggtgacagccagaacctaatgactccctggaatcatcagagtgctcgagagggactgcatttcatgaagtcacccaggatgtgcttgagttttttaattaatctgaaaaaaaaaacaacggaactttctatggctagaattggggatatttggaaacatccagagtcagttattgaatatcagtaccacttgattatcagttccattgaggcagggttcaaatctaccttgtttctgctctatgcccacatatcacagtgcctctcctatagtatgaactcattaaatatttagcgaatgaatggataatattttcaacaagactcaagctctttgaaatcacagactgtatcataaatgttctgtaactctaaagaacccagcacaatgcctgacactgagtgacactagttatgatttg

SEQ ID NO: 910403 - DNA, 683 bp, Homo sapiens
atatgcttgtttaaaagtgtgtaacactttcctctctgctctctttcctgctccaccatgtgaagatgtgtctgcttccccttcaccttccaccatgatcacaagtttcttgaggcctccccagccatgcttcctgtacagccagcagaacctgtgcttttgagacagtcttgctctgttccccaggctggaatgcagtggtgcaatcttggctcactgcaaccttcacttcctgtgttcaagccattcttgtgcctcagactcccaagtagctgggatcacaggcacgtgccaccaggcctggctaatttatgtatttttagtagagatggggtttcaccatattggccaggctggtctcaaactcctgggctcagggaatccacccgtctcgaccttccaaagtgctgggattacaggcgtgagtcaccaccacctggccccaggtagttctttacagcaagtctcaggtggactaatacagccaccaagattacaataatttgctacagcagcagtagaaaacaaatatgcccacacactgagctctcaaccaatgttaagaggaatagaaggaatgagcttgaaaacgattttytcattctcatagataaaatagcctaggaagcttctttaaatttttttactttcctaggaaacttaaaaataaatgaataaagtaa

SEQ ID NO: 910404 - DNA, 619 bp, Homo sapiens
tgtgtccttagtggaaatgtggcactgataaggttatttttttttcctaattgattgtgccacctttgaaggacacttcacagaacacaatggagacagtctggaggagtaattatcatcaagaggctggaagtcaggcttagatgctaaaaataggactcatagtaacacccatctcatagtgttgtttgtggccctaagagaagggtgcacagaaagggcttagcacaccatgtgctccatcaataccagcctttattatcatagtaactatcggggatcagaaaaccatacctgaaaaagaaagcctcagaagcaaaagttcctctctgaccttttcttgctctcctttctctggccccgcttctccaccaggctagccatagaatctacaatccctcttccccagggcaggtcatagaaaccacaacccctgcaggcactgaggtggctcatgcttgtaatcccagaactctggaaggccgaggcagcctttgagcccrggagttcgagaccagcctgggcaacatggtgaaacaccgtctctactaaaaatacaaaaattagctgggtgcaatggcatgcacctgtagtcccagctactcaggaggctgaggtg

SEQ ID NO: 910405 - DNA, 590 bp, Homo sapiens
taatataataatttaaatgtaatccatcacatcaacaggctaaagaagaaaaatcacatgatcatatcartagatgcagaaaaagcattagacaaaatccaataccaattcatgatttaaaaaaataagtaaaaactctcagcaaactaggaatagagaggaactgcctcaacttcacaaaaagcatctaccaaataaacccacaggtaacatcatacttcacttgatcttagccaaaaggccgtgaggctatagataacatcatacttaatggtgagaaactagaagcttttctaagatcaggaaaaaggcaaggatgtcccttcacacaactccttttcaacatactggaagtcctagctaatgcaataagaaaagaaaagacatacaggttgggatggaagaaataaaactgtctttgttcacagatgacaggaatatctatgtagaaaatctgaaagaatcaagaaaaaagaaacttctggaatgaatagcaattacagcaatgccacagaatacaaggttaatatacaaaagtcaatcactttcctacgtaccagcaatgaacaagtggaatgtgacattagaaa

SEQ ID NO: 910406 - DNA, 614 bp, Homo sapiens
gcttttcatgaatgaagtttttaatcctttcaaagcctaatctaaatttaagaattcaaacaaaaaatccctaatattttaatttgcaatcaggagaggttcaatcagactaagactttttaatttgmcagtctcctttttaacacatagagctacttctttgatctgccttggttaatgaaatggatgagttccaataaatttggatgcaaagtaataatcaacagaattccatttcccattgattttcattgtaaacttgtatcacttttttgacataaaataagcactctctggaatgaataatttaatttgaaatatgaataaaaaataaattatggtgcagaatattgctaagtccttcatacatttgcagcactttgcatctaccactgcttacttcctagacagagaaccatttcctataataatagctaaaacccatgaaggatttcctatctggaaatagtttctataacctttacatctattcatcttcatgattacattgtttaatgggtactatagagatcgtcagcatccccattttacataaattgtaagtgccagagttttggtttaaaccaggttgtctgactccaaactcttcactt

SEQ ID NO: 910407 - DNA, 603 bp, Homo sapiens
aaggaaacttttggaggtgataggtaagtttatcatcttgaatgtggtaataagtctcatgggtatacgcttatccccaaactaatcaagttgtataaattaaatatgtacagcttttggtatgtcagtcatacctcaacaaagtggtttaaacaaaaatagattctcttccatctctaagagtttacgaattatccaatttgaccaagcattttagggatgggagcatggggaaatcttctcaataggcaagaaacagtatcttatatacatgttatctttatttttatgtacctcgtttatatgcccagtttgaaaagtgtacttgacttccagatacatgtctgattgtctttttctccgaaataaatatggctaagatggaaccgctagtcactctagtaagctattccattttgttcttctcttagtacccactctttctttaaaatcacaatgacctacaatgtagctcataacaraaatatatctgaaaacactttgattcttccctcattcttcctctagactatcaacaaacactctccttcagcaagtactgccagatctaatgggatctgttaaaaagaataaaggaatgtg

SEQ ID NO: 910408 - DNA, 593 bp, Homo sapiens
caggggagtgggacttgtggctttataagaagaggaagaatgacctgagctaaaatgcccatcatcatatgatgctctatgctgccttgggactctgcagagagtccccaccagagagaagaccctcaccagatgcagactcttgacgttggacttctcagcttccataactgtaagaaataaattccttttctttataaattaaccagtttcagatattctattataagcaatagaaagcagactaagatagaatctttgaaacaaaatggtaattcttgaactattaataaatactctttttgctacatgtccctattacttgatagtaatcgtgttcttgagtttccttatgtatagattatgtgtcagaggacctaactcactggaagcgtggtgtgggcactaaaattattattacttttttgagacggagtctcactctgttgcccaggctgtagtgcaatggtgcgatctcagctcactgcagcctccgcctcctgggttcaagcrattctcctgcctcagcctcccgagtagctgggattacaggcgtgcaccaccacacccagctaatttttgtatttttagta

SEQ ID NO: 910409 - DNA, 593 bp, Homo sapiens
caggggagtgggacttgtggctttataagaagaggaagaatgacctgagctaaaatgcccatcatcatatgatgctctatgctgccttgggactctgcagagagtccccaccagagagaagaccctcaccagatgcagactcttgacgttggacttctcagcttccataactgtaagaaataaattccttttctttataaattaaccagtttcagatattctattataagcaatagaaagcagactaagatagaatctttgaaacaaaatggtaattcttgaactattaataaatactctttttgctacatgtccctattacttgatagtaatcgtgttcttgagtttccttatgtatagattatgtgtcagaggacctaactcactggaagcgtggtgtgggcactaaaattattattacttttttgagacggagtctcactctgttgcccaggctgtagtgcaatggtgcgatctcagctcactgcagcctccgcctcctgggttcaagcaattctcctgcctcagcctcccgagtagctgggattacaggcrtgcaccaccacacccagctaatttttgtatttttagta

SEQ ID NO: 910410 - DNA, 632 bp, Homo sapiens
caagtgcttatagaatcaggctgttgaagcgagttaaactgttgaactgttcctaggattggttgttgttatgtgcttttgaattcttgcatttgtaagtgagcagtttccctatttatgtastctgcagttcttagtgcttaataaatgttaatattctatagctactttgggtttctagagcatgtggcattatcaagtttaaagcctatgtgaagagtttttatggcatttaatgaatactaaggttttctgtgtgttggagttaatgaaaaattcatttttcttcatgtactctaaatacctcatgctttaaaaatagactggtcttggccgcatttggtttttgtgacctttcctccattattatttgagaatgttacaaaatagggcctgtgctggtactttaacttgattatactttgcatatatcataaaaatatatgtgattctcccctcatcaatattaaatgaaagcacttttttaagcctcggattttccttgtctgtatcatacactcttcactatgagctgagcaggggtgttgaatagcatatagcaccaggcccatgtggccttctcaccatcctcagtgtgggcctttcaactcgataccatgctcatctgatgt

SEQ ID NO: 910411 - DNA, 586 bp, Homo sapiens
cctaggatttacacctaacttacttgaggaaataaagaccctgtcactccaaacaggcagctccactaggtagtatgttctctgggcagccaccaggggcccgaccacccctgacaggmctcctaggctaggcttcacttctcaggtgctccaagcccttctaatagtactttggtggttgacttggagtcatctttcaaggcttgctttgtatctctggtgagtcaggactatatcaatggcactgatcaggaagaaattcaaactggtgttaatcagtgtatccagaagtttccggatactgcaagagagacaatgtttgctttgttttgtttttcctaaaaaaagattgcaattatctgtccagaaaccagagcaagttatcaaagaggatatctcagaactatggaatgaattacaacattaagatgcactggtccagaagcatttgacaaagctgaggcattggcagcaggtgctaaaggacatcaacatgcagaacaaaagccagccgacatccctcagggctccttggcctaccttgagcaggcatctgccaatatccctccacctctgaagccaacct

SEQ ID NO: 910412 - DNA, 586 bp, Homo sapiens
cctaggatttacacctaacttacttgaggaaataaagaccctgtcactccaaacaggcagctccactaggtagtatgttctctgggcagccaccaggggcccgaccacccctgacaggactcctaggctaggcttcacttctcaggtgctccaagcccttctaatagtactttggtggttgacttggagtcatctttcaaggcttgctttgtatctctggtgagtcaggactatatcaatggcactgatcaggaagaaattcaaactggtgttaatcagtgtatccagaagtttccggatactgcaagagagacaatgtttgctttgttttgtttttcctaaaaaaagattgcaattatctgtccagaaaccagagcaagttatcaaagaggatatctcagaactatggaatgaattacaacattaagatgcactggtccagaagcatttgacaaagctgaggcattggcagcaggtgctaaaggayatcaacatgcagaacaaaagccagccgacatccctcagggctccttggcctaccttgagcaggcatctgccaatatccctccacctctgaagccaacct

SEQ ID NO: 910413 - DNA, 513 bp, Homo sapiens
ctgtaccctgcaaagccacaggggcagagctgctcaagaccatgggaacccacctcttgcatcaacatgacctgaatgtgagacatggagtcaatggagatcatyttggagctgtaagatttgactaccctgctggattttggacatgcatgttgcctgtagcctctttgttttggccaatttctcccatttggaatggctgcatttacccaatgcctgtactacccttttatataggaagtaactaacttgcttttgattttacaggctcatagatggaagggacttgccttgtctcagatgagactttggattgtggacttttgagttaatgctgaaatgaattaagactttgggggattgttggaaaggcatgattggttttgaaatgtgaggacatgagatttgggaggagccaggtaagggatgatatggtttggctgtgtccccatcctaatcttatcttgaattgcagctcccataattcccatgtattgtggaaggtacctcgtg

SEQ ID NO: 910414 - DNA, 541 bp, Homo sapiens
gtgttacaactggggcattactctttcaagtcagcaaggagaaactcttgttccagtctactaagatgaagtcttctataacccaatgtaatcatgagaatgacatcccatcaactttaccatrttgtattggttgaaaacaagtcatgagtcctacctgcagtcaaatggaggagattacataagggcatggacaccaggaggtaggaatcatggggggctactttgtggtctgaacagtacagttggtattttatttaccaacttgttccttattttctattatcctctgtgcatgtgtgtttgtgtgtgtgttcctgtgttcctgcttaccttcctgctatagttcagatatttgtccccatccaaaactcatgttgaattgtcatccccaatgctggagttgggacctagtgagatgtatttggttaatggggacgtatctcctggcttggtactgtctttgtaatagtgagtgagttcttgtgaagtatggtcatttaaaagtatatggagctacccccttctcaactctcgctct

SEQ ID NO: 910415 - DNA, 449 bp, Homo sapiens
gtagatttctaggttagcaagcatgtagmgttttcttttcttttttctttttcttttttttttgaaatggagtctcactctgtctcccaggttggagtgcagtggcgtgaactctgctcactgcaacctctgcctcccaggttcaagggattctcctacctcagcctcccgagtagctgagattacaggtgtgtgccaccacgcccagctaatttttgtatttttagtagagacaggttttcaccatgttggccaggctggtctccaactcctgacctcaggtgacccacccgcctcgatctcccaaagtgctggtatttcaggtgtgagccaccgcgcccagcctcatgtagcattttctagtaaatcattttggtattgtttttagcataattgcaggtcaaagaatgtataccatgtggtttcagagctttgaaatgtggtttaca

SEQ ID NO: 910416 - DNA, 661 bp, Homo sapiens
tcctgcaagtttcacaatcctgaattattttagattaagctatcatttcaaaattaatacatgtccctggctgggcgtggtggctcacacctgtaatcccagtactttgggaggccaaggcaggcagattgcttgaggccaggagtttgagacctccctggccaaaatggcgaaaccccatctctactaaaaatataaaaattagccaggcatcatggtgcgtgcctgtaatcccagctacttgggaggctgaggcccaagagtcatttgaacccaggaggcagagggtgcagtgagccgagatcacgccactgcactccagcctgggtgacagagcaagactctcaaaagcaaacaaaagtaacacatgtctctgtcctgaggtcataaagatattccatattctaaaagttttaagtttcacattttatatttgggtctttatctggatttactttttgtgttttttcccccacacatataacaaatagtcttagcactacttattgaacagtctatcctctgacataatatactaacttgacatatatcaattttttccaggttctctgtgatatttttataaatattcctatttttgaaaaaatctgttttctctcayttttgaatgcagtactccatctataactgctaggtcaag

SEQ ID NO: 910417 - DNA, 650 bp, Homo sapiens
accagtgcatcgagtgccaccatgtgcctctggcttaagcccaggctttgatcaccagtgagctggagaagttccaggaccacctggtccggtgcaccaygcattgcaacgacaaagccaaagattcaatagatgctgggagtaaggagcttcagttgaagcagaagctggaaggtggtgtgaccaagtgtgtggatgaccacatgcacctgctcccaactatgaccgagaaggtgaaggaggctctctcatccattgggaaataaaagtctttgccagtggccatcggggctgagggcaataatgtattttttataaggaattgggaattttagtcttttttttttttgagacatggtcttgttctttcgcgcaggctggaaggctggagtgcagtggcacgatctcagctcactgcaacctccacctcccaggttcaagccatttttctgcctcagcctcctgagtagctgggactacaggcatgcaccaccatgcccaagtaatttttgtatttttagtagagacagggtttcaccatgttggtcagactggtctcaaactcctgaccttgtgatccacccgcctcagcctcccaaagtgctgggattacaggcgtgagccaccggacccggccggaattttagtct

SEQ ID NO: 910418 - DNA, 629 bp, Homo sapiens
ttgccttatatatttaggagctctgatgtatgatgcatatttatttataaatgttatatttttggtaaattaaccctcctatcattatacaatgcccttctttgtttattgaacagtttttagcttaaagtctgttttgtctaattttagtataaccacctttgttcttcttaactatttgcttagaatatatttttccattttttcacttttaacatatgtgtgtcctatagagttacactgagtctcttgtatacagtacatacttggatcttgttacattacccattctgccaatatatgtgttttgatcagagcgtttagcccatttacttagtaattactgataaaaaagaacttactattgatatttcgttgttttctgtatatcttataactttttttgccccttgtttcctcccttactgccttcttttgtgtttagttgggttttttttgttgttcattttgtttttgtttttgttttttttgtggtgatgctactggggcttgttgcctgatgtgttagaagttaatattatgacactggatttttkggggaaaaaaagttttttattattagttgactttgaaggagacagaagtctagtttaaatttgtctctccat

SEQ ID NO: 910419 - DNA, 629 bp, Homo sapiens
ttgccttatatatttaggagctctgatgtatgatgcatatttatttataaatgttatatttttggtaaattaaccctcctatcattatacaatgcccttctttgtttattgaacagtttttagcttaaagtctgttttgtctaattttagtataaccacctttgttcttcttaactatttgcttagaatatatttttccattttttcacttttaacatatgtgtgtcctatagagttacactgagtctcttgtatacagtacatacttggatcttgttacattacccattctgccaatatatgtgttttgatcagagcgtttagcccatttacttagtaattactgataaaaaagaacttactattgatatttcgttgttttctgtatatcttataactttttttgccccttgtttcctcccttactgccttcttttgtgtttagttgggttttttttgttgttcattttgtttttgtttttgttttttttgtggtgatgctactggggcttgttgcctgatgtgttagaagttaatattatgacactggatttttgggggaaaaaaagttttttattaytagttgactttgaaggagacagaagtctagtttaaatttgtctctccat

SEQ ID NO: 910420 - DNA, 653 bp, Homo sapiens
caatgcaacccagaaaacattgttgagcattgtctataagtaaggttagggctaggcaccctgtgggatgctggttcaaaaagaacatccagaattccttgctaatgctgcaacatagtacgggacagaagtggagtaggaccagatggaaagtcagagtgaataagttgtttgtggtctggtaaagggctttgaaatgaagttgagtttttggatgaccactttaaatcactccaggactttgtcaaagttctgggattaagaaaactgcattagctgcagtgttaagggtgatttggagaaagttattgctagaggtgagcaggaatgaaaagacttaggttttaacttgggccttgtgttagccaaatggccccaaactgctggtgagaaaatttgtctaagtttttgtcatttaacagcaataaaaatattgatctcagttgttaatggaaaagaccataatgtaaaaagctatgatgacttgaaactgttccattacttttcatttcatttagttatgctttatgagacatgtcaaaaaaggaagcaacattgctttctagrgaaatatttatttcctgaactgatgtcaccaaatgaagtcatatgggagggcttttcctccaaaaggaggactaatggtgacataa

SEQ ID NO: 910421 - DNA, 613 bp, Homo sapiens
acccttaacaaattaggtatagaaggagtgtaccacaacacaatgaaaaccatatatgaaaaactcacagctaacattacagtcactggtaaaaagttgaaagcttttcctttaagatcaggaagaagataatgatctctactctcacctcttctagtcagtgtagtccattgacttcatatgtaagtcctagctagagcagtttagcaagagaaagaaatgaagggcatcaaaattagaaagaaagaaattaaattgtctctgcagacaaaatgatctcagaaaagaacaccttgaagacttccaaaaaactgttagaactaataaatgaattcagtgaagttgcaggacacaaaattaacatatggagcagagagcaaaatgttgaaataaaagcctacattgtttgttccccctgctggaacaccagactataacaactatctgcacacagaaaagcactgtcagaagaaccaaaamtcaaggaagcaatcacagtacctcgttttaactttgtattgtggaaagaggcattgaggagggcaggagagatggtcctcaatcaccaatgccacccatcccccatcccgagcagcagctgtgtggtatggat

SEQ ID NO: 910422 - DNA, 613 bp, Homo sapiens
acccttaacaaattaggtatagaaggagtgtaccacaacacaatgaaaaccatatatgaaaaactcacagctaacattacagtcactggtaaaaagttgaaagcttttcctttaagatcaggaagaagataatgatctctactctcacctcttctagtcagtgtagtccattgacttcatatgtaagtcctagctagagcagtttagcaagagaaagaaatgaagggcatcaaaattagaaagaaagaaattaaattgtctctgcagacaaaatgatctcagaaaagaacaccttgaagacttccaaaaaactgttagaactaataaatgaattcagtgaagttgcaggacacaaaattaacatatggagcagagagcaaaatgttgaaataaaagcctacattgtttgttccccctgctggaacaccagactataacaactatctgcacacagaaaagcactgtcagaagaaccaaaaatcaaggragcaatcacagtacctcgttttaactttgtattgtggaaagaggcattgaggagggcaggagagatggtcctcaatcaccaatgccacccatcccccatcccgagcagcagctgtgtggtatggat

SEQ ID NO: 910423 - DNA, 526 bp, Homo sapiens
aattaattttaaaaatgacccaatgatctgttgtctataagaaacacacttcasttataaagatacaaatagactgaaagtaaagggatagaaaaatatattccatgccaatggaaaccaaagaatagcaggagtagccatgtgtatattagacaaaatagatttaaagaaaaaactataagaagagacagagatggtcattatatgatgaaaaaggggtcaattcagtaagaggatataatgaatgtaaatgtatttgaacccaacacttgagcatccagatataaaaaccaaatcaaattagagctaaagagataggccccagtacaataatagcaggagacttcaacactctactttcagcatcggacagatctcccagacagaaaatcaataacaacaaaaattgtattcaatctgcactatagaacaaatggacctaatagatttcttgaagcaaatgataatggaaatacaacataccaaaagctatgggatacagctaaagcagtactaagagggaagt

SEQ ID NO: 910424 - DNA, 652 bp, Homo sapiens
ggtgcatagtgatgtttcaaaacatattatgtgtagtgatcagatttggtaactagcatatctatcatctcatacctttattatttcttcatgtggtgaatatacaatatcttccttctagctatttgaaactatatattattgttcaaaactacaaagaagtttaaagaatagtacaatgaacccttgtatacttttcacccagattcaccaatttttaatattgtgtcactacatttataaatatataattctttctttctacttaatattttaatatgagaaattttaagcataaagttgaaagagttttacagtggccactcctgtagctgctgcctggattttactgttaaattttgctatagttttatcagtgtcagtttatccattccattatctatatattaatacatattgatgcattcagaaataaattgcagaaagacattcatgatcatgcatcagaaaaattaatattgttaatatgactgtacttccccaaattgatctaagcattcagtgcagtcttcctyaaagtctcagctggtttctttgcagaaatatgagaagctgacctaaaattcatatcgtatggaaatgtaagagatccggaatagtcaaaacagtcttgaaaaagaacaaagttgga

SEQ ID NO: 910425 - DNA, 609 bp, Homo sapiens
ggtaaaaatagtgaataaaaagagaaagattagaaacaagctttagtcacttgctcttccttgcggtaggcccttggaatattgacaaatcctaaaataatttaaaaaaaaacagtggattttaatcaccatgagggtaaaaatagtcttgtttaccactgtatttccaacacatagcgtggtatctgaccctccctaaataattattgaattattgattgcacattttagactactatattagcatatcccacctctaagcattaccctgagatgtaactgtgcaatacagcaataaagggtgtcactgtgtcctcagtccaggcctaacacacagttgagctctgaacaacaatgtaacatcaaacagtgaccctgttgtaacatgttctggacttgtctaagctaaagttcaaatatgatacttccaaccctggttataatctctgaatgatgcattttatacatagcaatgacttttttatttttwaaaaaagaagcatttaccatgcaagaaaaaggacaacattgcttcaagaatagtaatcagtcagtggcacccatcttaatgagaggatttacatcccattgttttcattttaaatgtca

SEQ ID NO: 910426 - DNA, 646 bp, Homo sapiens
tattgcccaggctggagtgtagtagcataatcgcagatcactgcagccttgatctgctgggcctaagtgatcctcgcacctcagccatctgarcagctgagactacaagcacgtgccaccacacctggctaattttgtttatttatttattttaatagagatgagatctcactatgttctgcaggctggtcttgaactcctgagctcgagtaattttcctgctttggcctcccaaagtgctgggattacaggcatgaaccaccatgcctggactccttcagtgctttaaatatgttatgccactctctcctggcataagcctataaggtttctactgaaaagtctgctgccagacatattggagctccattgtgtgttatttgtttattttctcttattggttttagaatgttttctttagccttgatctatggaagttttattattatatgccttgaggtagtcttctttggggtaaatctacttagtgttctataaccatcttgtacttgcacattgatatcttcctctgggtttgggaagttctctgttattttcccttttaataaactctctacccctatctctctttctctacctcctctttaagacaactcttaaatttgcccttttgaagctattttct

SEQ ID NO: 910427 - DNA, 420 bp, Homo sapiens
ccctcctgttctaattcactgcccacagccctgctgataaaagcaaagctcatctctgccgtgctgcagggaaccctatttccttcccctgcagctcagccacctcctcctctcargtctgccagccatgaaacttctttacctgtttcttgccatccttctggccatagaagaaccagtgatatcaggtaacgtgaacctctctcgggggtctgggttcctggtcatgggcttcccgtctttcccttccctctcactgtgggcatcatctgaagcctttccttctctcctgcagcttcgggaggtttgcccaggatcatctcaagttaatatctctctctgattcttttttgccagagtggtgggatgatagatgtttggagcatctggtgcttgagggccagggtggtatcctggtgg

SEQ ID NO: 910428 - DNA, 660 bp, Homo sapiens
cgtcacaaactgtcactcttaagaagttatgacacgtattatgttattgtgtaattatttgaattattgtcccctttccatcaatcccccaaacacacacatattagktggaaatccttaggggctgagatgatgttttatttacatctgcatgcctgatgttaagcccagtgctgggcacgaatgcgatttagtgagtgtttcttgaacatgaataatgaattcaccagtgaaagcatgagtggatctggtgggggcacaaaaggctgactccaggttccaggaatctgggtggagaaacttctgggctggagggagcagaggaccactgtgttaggtctacgtggttctggctggcagggttagcaaggatgcagaggagtttctgggtcttgctcaaatgataatttaaaacaacaataataattaacattcatttagttcttactatgtgtcagtcccttattgccttctatgtattcagccactaatcctcaaaattctaggggttagatatttttccggtctatactatacatatgagaaaaagggtagaacagggaggtgcagaaacttgccccaggatacacagcaagtaaaatgggaactgggattggtcacctagggattcttgttttttagattttgtttttttaatct

SEQ ID NO: 910429 - DNA, 627 bp, Homo sapiens
agcctaagcaacagagcaagacttgtctaaaaaaaaaaaaaaaagtgtccacttttcatctgccaggtatttgttccaaattacctattttattattgctagaagcaacagtatacaaaaatctttatttagtccattgtatttttaaatgttcctgtcattttattgaaaatttcacctattatcaggttgttcctcttcaatttataaacgatagggattttcaaaaacatttccttttggggagaagttgttaaataaagaaacacatggtcttaaagaaaaaaatccccaactcctaatagacctggaaacaaccaaaatggccctcagcagacacatggttaaatagactgtactacatttatactgtggaatattactcagaagtaaaaggaatgaactatagatacacacaacttgggttgctctcagttctgttgattgtcttttttttcattaaagttaagattttcctggttctcagtatgatgagtaatttttgctggaacgyggatgtttttgatattattatgttatgagatgctggatcatatttcaatgatctttgttggcttgtctcctctgatacagctctggtgaggacagtgggatgctgcctggata

SEQ ID NO: 910430 - DNA, 632 bp, Homo sapiens
cccccatagcccaattcctctatcaaagttatgggagtgaacagccagggagcacctcctcctttagtcttaccatgctgaggctgctgatacctggggcatgacaaacatttaattatctattgctgtattataatcaaccccaatatcttagtggcttaaaatgataatataaatccattatctctaacagtttctgtgagtctggaattcaggagtggcttggcagggtactttcggctgtgggtctcttatgaggttgcagttagatgttagtcctctgaaggctcaactagagctgcaggttctcttcctcatggttgacgagttggtgttggttcttggtagaagatctcacagttcctgtccacaggaaaatccagaaaaagtgactttcagggagtgaaaatctcaagaaccaagaccatgaggtggaaatgacctcagtgagtttgcggaacagaaacatggctactctctttaaacaggtctatctcccttcttcatkaatgaattcccattgccttcagggaaagggtttcattcatacctcagctccttcctcagtgcctaacacacagctttgtcatggtgccacatgttcccttagattaaaattcttcttcaggctc

SEQ ID NO: 910431 - DNA, 520 bp, Homo sapiens
caggcaagagaccacgctggtttggacttgggtggggtgaagtcaacagattctgaatacaatttaatgggagagttgacagttaacaaattgaatgtgggrtgtaagagaaagagcaatcaaggatgatgtggtcatcttttactgccatgaggaaagactggaaggttgggaagtgtggggtgaggggatgtgaagtcaggagtccatatttgggcatgctaagttagagatgtctgtgagacctccacgcagagacatcaagtagtaaacagctggatggataagtctggagttcatggccagggcccaggctggaaaaatcagtgtcggggttgtcagcctggagagagcatttacagaaaatattccacctccaggatgagatcgcctaggaagtgagtgtggatggagaggagaaagggaccaaggactgggctttgggggccctccaggatttacaggttgtggagatgaggagacaggaaaggaggctgcaaaattgtggccagtgaggtga

SEQ ID NO: 910432 - DNA, 609 bp, Homo sapiens
gtccgccaggacagtactttacagtttacaacaccccgtcgcgttccattgcctcacctgatccagggaggcaagggttaatggttatgcagtgtggatggggaaactgaggctccaagcagcattgagacgcctcctcacccagcccggtctgcctgttgctctccaaatcaggacttagggattcagctcccaccgggtcctgacccccaatgccccggggcccctgagtggcggctgcggtgactctgatactcaccctcggccatggtcgggcgggggcggtggctccttccactggcggcgagaccctccaagtgcgaccactggcggctggcactgccgaggcggagagcggcgctaacttatagcccgctttggggcgggccgggggcggggccccgcgggaaggcggcgacctgggaggccacccattgcccagtcccgggcccacgccgccagcgctggggctcacccaggggaccggagcccgagggagggacggcggccggacgagggcgccccctgggggagcggacagggacacacaactagcccaggawacagacacacctggacccacagactcagaccttggagaacagacac

SEQ ID NO: 910433 - DNA, 658 bp, Homo sapiens
cagggagccgagatcacgccactgcactccagccagggtgacagagtgaagctgtgtctcaaaacaaaagcctggatgcagtggatcgtgtctgtaattgcagcaatttgggaggctgaggtgggcagattacttgagatcaggagttcgagaccagcctggccaacatggtgaaacccccatgtctaccaaaaaatacaaaaattagccaggctttgtggcatgacctgcaatcccagcttcttggggaggctgagatgggagaatcgcttgaacctggaaggtggaggttgcagtgagtggagaaccactgcactccagcctggacaacagagtgagaccttgtcaaataaaaccaaaaaacaaaaaaccaacaaacagaagaaatagagagaaaacaaattataaagcaaaataatagacttaagcttagcattaagtataagtggtcttaatataattatgaggtagagattggctgattagataaaaaacatgaaccagctatatgatgtttataagaaactctcttaaacttcaacaacataagtggacttaagataaaagcatgggaaagttatatcatgatgataaytatttttaaaagagaaagtggctatattaatatcagataaggtagattttagaacaaagaaag

SEQ ID NO: 910434 - DNA, 566 bp, Homo sapiens
acaaaaggctgtttgttttttaaaaaactataaaattggtaaacttcagcaacagtgacaaaagtaaaaagagggaacacataaaccaccaaaattaaaaataaaacggaggatgccactacagatcctgcagctagcagcaggatattacggccttcacactcaaagtcaacagcgtggaataaacagacaaacttctcaaaaaccacaaactactaaagcctaattaagaagaaatggataatgggaatggttccataatgattcaagaaataaatttgtagtttaaaaggttctgaataaaatttcttggcctagatcatttcactggagaactagaccaaacacttaaagaagaattcatctaccaagtgtatacaatctcttccagaaaactgaatatactccacctgattttatgaagccaatattacttgaacatgaaaacaagaaaaaaatgatcaaatgaaaaaaagaaaactacagacaaatatctctcaatgaatttaaacaaaaatyctcagtcgaattaatatttgattctacagggcagttctacagggcaa

SEQ ID NO: 910435 - DNA, 634 bp, Homo sapiens
acacaaaactcttaagaaaatgaccagtgaaaagaaaaagcacaagtcaacaaaattttgaattatacagcataaatgaaaagagaagagcaggaatgaatcaaaaatttcatcaaacttgctgaaaatttagaggacctgagtcaatttctatgaaaaatatacctttcagaaattgactcaaaaatcaagaaaaaaacccttgatctaaacctagtatagaaatgcaagccactaaaaaattctttgcccatgccaccctccgtagcccagcagtaaatgtgacgatatgtacacaaacatcagttttaaataattatgcaggtaataatacttatgcaggcatgatccaaaattgacaaattgaacctcataaaaataaaaaaattttgccatgttgagaactctgttaagagaatgaaaagataagctatggactgtgagaaaatatttgcaaagcacgtatctgactaagagtttgaatcaacagtatataaatgactcataaaccrtatcaataagaaattcaaatatgaaatggacagaaaacatgagcagttatttcacaaagaggaaatacagaggaaatacagtgcatgaaaaatattcaaccctattgatcactagggaaata

SEQ ID NO: 910436 - DNA, 569 bp, Homo sapiens
tttcagaatgagatcagaaaagttctgtgtctgtgggggggaaatgaactacaactgcggtagaggatgttctcatgcaagcattttaattacttcatcccaactaactgtaactaacctcaacagtgtgtgttttcttaacaattctacttcaaaaagtcaatgtttcagtaagaccaaaaaggaaatattcccccaattttcttaaagtgtagatatttccaaaacgatgtcttaaaatattcttctctttgttacataaccaccagttaacatttcctgacttgactaccaataaaatgatttactcccatgggggcatttggcttaaatttttttttcttcttcttctatcccttttcttaaaattgcctcaaacatttgatttcacattactctatagcaagtttactacctaaagaaaactgaaaatatctggatatatctttycattaatttaaagtgtaaaatgtttcataaaaattaaacaagaatatacactatcctaacataaaaacctcacctaatagggtgatattttaagcatgtgggtagacgacttttattta

SEQ ID NO: 910437 - DNA, 681 bp, Homo sapiens
tggaacatttgagcttattctggatctttcagttaccatttattgacttcctcctggcatattatcgtcttaaaggattatacagtggagaaggcaccattctagcmcaggacttctgttttgttgtgtcaatctttctaatcttgggcaaatcataggggctgagtttacacagctgttgattagacatagagtcacctactctgctgagttcacaggatgattgtgagaattaaatgttataaactatttgctttgggaaaaagtgcaaagtgcttcagagtacaatgattttactccattggaaagtctccccacaggtctttaaaagctttcattttttcaggccatatgttgtatggagagtaccaacagaaatgacaacattcacttccacttaagagtctatttactccattcaaagttgcccaaaggagctctacttccatcagaaattaatgagccagatatatgaagaggtttgttgcttattttgtgaaaattaatagggctatggttagtgtagggctatggttagtgtagggctatggttagtgtagggctatggtttgtgtagggctatggtagctattagaacaacagctgcagtggaaaaaaatctttgtatcgcaacagtcaattatgttttgatttaaaagcaaagcaggcataagtctgggt

SEQ ID NO: 910438 - DNA, 631 bp, Homo sapiens
gtggtgaaatgcaccaacttttgccacatttgatttacacctttctctctctctctatttctttctctctttctttctgtctctttctgttagagtctatttctcacgttaaaaatattcagtgcatcctgatcagagagaaactgtgattttatttttattcattcatgttaatgatgattatactccctgcaatagatttaggaatgaagcatacccctcaccttctccctcaacactccaatttcctgtgactcccaggttctcagaaagagaagcttaaatctcattgaaatacttcataatgaaatgtgagtgaagtctaaccacccgagagagcatttgcacttaataagattagactgttaatcaacttaaacctgtaattgtggagaagatgggggtttgttagataacatatttgagtgacaaactcctggtgatccttgccttctccagtccaaaattatgtcttctgggtctttcccacatggagtatccattttaactgcacactaatattccccgaatcyccaacttatccttgagagtagctttttgtcttcatgtggcaaatcaaaaatggaacatggactttaaaaatccgaactgacaggaaatccatcttgtg

SEQ ID NO: 910439 - DNA, 605 bp, Homo sapiens
catgattctgtacttccctttctactttttgctttctaggcattatcctcagatagctcacccactcacacagcactaactgccactgctgggggagaccmtttaacagtccaccctagagctctagtggctggtctggatgacagctacatccatataatacctcacaatggtccagaaacttattactacattgtgcaataagaaatacatgggcttttgaaactaggcaggcctgagtataaatactggatctaagcataatgaactatgagcatatcttagagatcttgcaggtttggttccagaccactgcaatgaagaaaatatggcaataaaggaaatgttttaatgaagttaatatcacaatgaagtgagtcacacacatttgttggtttccaggggttaaaaaagttatatttacactatactgtagtctgtgaagtatgtaatagcattatgtctaaaaatgtacgtacgtaattaaaatacttttttgccaaaaaatgctaatggtcatctgagacttcagcaagttgtaatcttttttgttggtgggaagtcttgccttgatgttgatggctgctgactgatcaaggcgctgg

SEQ ID NO: 910440 - DNA, 546 bp, Homo sapiens
tctctgcacatacctgctcctcttcaccttccatcatgagtagaagcagcctgaggctttcacaagatgcccagtctttcagccagcagaatcatgaacsgaataaaccttttttcttaacaaattaaccagtctcagatattcctttgtagcaatgcaaaatggactaagacagccatgttattattgactaggcttgggtccccaaacctaaagcaaggaatggttggtgaactgggttgaaccgtgtagaatatccctttccctaaactagttaaattacattgaagtaggtcatcactgctgtccttattggcaatcgttttttagtctccacccatcttgttttatgcccaaaactaagccttacatctctttgcatgagggttgcatgcaggaaagaggcagaagagaccagtagactggcagacatgacaagttctgaccaattaagccctgcctagcagagcaccttgttgcccaagacacacaaatggaagagagaggaggcaaggctagttgagtgttgctctgggagactgtgcc

SEQ ID NO: 910441 - DNA, 622 bp, Homo sapiens
gctttcagtttctctttcataagccacagaaattaaamtccctttaaatagaaaggcctatgtatttgacatcactgtaattaaagcagttaaacttgcagcacacaggttttctaaatcatcaagaacaatagctcaagaagagaacaattaagcaaaattttgaacacttttaagcactcactctgcttgccctttaaatgacagaggcttttctgttaatattctttgacctgaatgcattcctcaattaggattctgaagaatttgattgggtttcagctagaatctgtaacctctggttaatcatcgtgtattacacagcttgtggataaaatatatttggacagggatagataagtctattcatgttaattcaccattgacattcagggcttaattcaattttcagaagtgatgatatccctggcatttcagcaagcctattttaattaatatctctacacctctttaaataccattttgtattttatacacctgctttaaattaaggcagtttaaggtctgttataaaagcctctattctaggaataccaagagtcaaccttgcttttgattaaaaaaaaaacttggtgttggtgtcatatactcttctttattt

SEQ ID NO: 910442 - DNA, 522 bp, Homo sapiens
tcgttccatatcctagtttatcaccactttttctccttgagcagtttaattctgctgactaggaaggtccttccagttacaagcctaaattatcctgctgagatcaagtttattcttgttatctttcctcagtgaacatggagaaaatccgacaatgccacccattttacttattatttttaaaaggttattctgtggcttaaagaaattttttggcagaatctcaaattacacatatatgatccatataaaaatacacacatatggtcaaagactggataggaaaaatgtatgattataatagacatactatagtggtaggttatgggagacttggttttccatttatgttcctgtctgcttcttgataatttaaaaggacaaacaaaaaaagatgacatttaaaattacctctctccttcactcwttgtatgttacctttgcttagatggagttcagctctggttaaactttcaaattagttgaacaacactagacgtttttcaacaatactagtgctgg

SEQ ID NO: 910443 - DNA, 629 bp, Homo sapiens
tggtgagaaaggaaaaaaagagaaagagagaaagaaagaaggagagaatggaaaaaaagaaaaggaaggaagaagggaagggaggaagaaagggaggaagggagggaggaaggkaggaagggaggtccctggaccaggagtgtgtgggtggtgaggaaggcttctctgaggaactagcacttgagatatgaaggtggaggaaaagtataactaagggaagagatgggagaagagaagcattctcagtagaggggatctcttcctcccagagaagaggagacttagaacaaatggtctgtagaagtgagtggggctagagcatgtagagccttcaaggtcctgcataaggattttgatatttatactaaaagcaatgaaagtgattgcaggtttttaaacctaggactcacttgatatactagttaatctggaaacattgctctcaatgtaggtggagaaaacactggagaggagcatgaatgaaggatggagagaacagtgaggaggccactgtggaatgtcaaggtggactgacaagtggggtagttgagaaagagaaaaatggatggatccaaaaatacaacaggacagaatgaatccagaagtactatttcagaacatagaacggg

SEQ ID NO: 910444 - DNA, 571 bp, Homo sapiens
gcaggaaggcaagaagttagctctatagccgtggtccttgggcaagttatttctcccctctgagcctcatttttttcagctccaatgtgggaatgttayagctaaagagtattgttaaaggctattgtgagaagtaaataagacaatgcatatgaagtgtttagcaaatagtgaaaggtctatggtcatggtgacctatagaaactatgagcaaatcaagcagggtgttctttctcaggatgagagagatagggatatgtttagagaccaaacagaagagccagtgtataaacgtcactggatacccagagaagaagcagaaagggcagccccacgtccccaggtagatggaaacacctgccactctgacacagggtaagaacggatgtggagaaagacacatctgacaaagaagtggtagatgaagcaacgaaaggggtcattcctaccaaaggcctccgccatgaactcacatgcatttgggcaagacccctaggtgtgggacaatcggtgcagatactagagatattgtaagaaataacaagtttcatttaactcacttactcatcat

SEQ ID NO: 910445 - DNA, 571 bp, Homo sapiens
gcaggaaggcaagaagttagctctatagccgtggtccttgggcaagttatttctcccctctgagcctcatttttttcagctccaatgtgggaatgttacagctaaagagtattgttaaaggctattgtgagaagtaaataagacaatgcatatgaagtgtttagcaaatagtgaaaggtctatggtcatggtgacctatagaaactatgagcaaatcaagcagggtgttctttctcaggatgagagagatagggatatgtttagagaccaaacagaagagccagtgtataaacgtcactggatacccagagaagaagcagaaagggcagccccacgtccccaggtagatggaaacacctgccactctgacacagggtaagaacggatgtggagaaagacacatctgacaaagaagtggtagatgaagcaacgaaaggggtcattcctaccaaaggcctccrccatgaactcacatgcatttgggcaagacccctaggtgtgggacaatcggtgcagatactagagatattgtaagaaataacaagtttcatttaactcacttactcatcat

SEQ ID NO: 910446 - DNA, 632 bp, Homo sapiens
aacaaagtcaggagtttcttctctgaggtaagctttgctggaaatttctcgtccctactcaagatggcaaccaaggacactttggagayagcagcttagaaatggccctgaagtgggtctttccttagactttaggtgaaaacactttcccctgatcctctggggaaacggctcccctgaggttgtctggggtttttacagagctcttctaaagaccctgggccttggggcatgctgtttaatttactgggttattggctgtcatattgaagacaaatgcatccaaggaaaaaatggctcaagaagaacagactcctccatcacttcaatcaaggggtccttcacgaacatgcttcattaacagcaaaaagggctgttggggtgctttgtccttactctacatccccctctcagctctgcaagactactgctgtcctcccagcaaaccaagcccggcagagagagaagccatcacaggaacacagttggcctcagcagcctgatgctctcaaggaatgtgttgaatcactacacagataatcagaaggcagctgctaaggttcagaagagaaacagcaggttctatcattaagtgagaagctgcccacatgaagagttgccctaggcccccg

SEQ ID NO: 910447 - DNA, 632 bp, Homo sapiens
aacaaagtcaggagtttcttctctgaggtaagctttgctggaaatttctcgtccctactcaagatggcaaccaaggacactttggagatagcagcttagaaatggccctgaagtgggtctttccttagactttaggtgaaaacactttcccctgatcctctggggaaacggctcccctgaggttgtctggggtttttacagagctcttctaaagaccctgggccttggggcatgctgtttaatttactgggttattggctgtcatattgaagacaaatgcatccaaggaaaaaatggctcaagaagaacagactcctccatcacttcaatcaaggggtccttcacgaacatgcttcattaacagcaaaaagggctgttggggtgctttgtccttactctacatccccctctcagctctgcaagactactgctgtcctcccagcaaaccaagcccggcagagagagaagccatcacaggaacacagttggcctcagcagcctgatgctctcaaggaatgtgttgaatcactacacagataatcrgaaggcagctgctaaggttcagaagagaaacagcaggttctatcattaagtgagaagctgcccacatgaagagttgccctaggcccccg

SEQ ID NO: 910448 - DNA, 601 bp, Homo sapiens
tttttatagttctgagggctggmaagtccaatatcaaggtgccagcagattaagtgtctagtgagggcccatttcctgggtcctcacatggcagaagacatgaaggagcattttggggcctcttttgtaagggcattgatctcattcatcagtattctgccctgatgacataattagtacccaaatgccccacctcctaatatcatcatttcgagggttagaatttcaacatatgaattttaaaggaacacaagtattcagtctatagcaatactgatgctgctggtcgagggaccacactttgagaaccaccgcccaagatgattctaagaccatttctctttccatgctgacgctgtttttcctccatgaagcatgctatttcaatgcttgcctttatgttttacctttttttgctgttttgttggaatcctaacccagcctgtaaattcctctgggcagaaattataccttccactctacatactctctcactttctgttttgtaaaataatgagtacatttccagcgtgattaataatagaataggaaaaggaggaaaatctcagactaccaacaccaataaacaccacctacaaat

SEQ ID NO: 910449 - DNA, 665 bp, Homo sapiens
atctccagggatcaacacggataataaagaggaagcagagagcccaaggttgcaaggaaggcaaaccacaaccttgctgcagaggctttaaaagrctggggtgaaaagtcatttgaatgtttccagtcctgaatgcattctctgtactgcatctgacaaagctcccttgacacactgaacccccatggatccttttccccctagcaaagggagcaaaactcttaacaatctacttcagtgcatctccataaacagtggccgtccagcacccctgggagggctgccctgtgtcctgtaatgaatgcaggcccatggaaagtattgtaaagatccacagccctacagaactttgagaacactgttctatcaccattaacctacagtgggaaacagaggccaagaggtagcaaggtggtgtttatcaagttcccttagaaagtcagtggcagagctagaaccagatcttcttgattcaaaggctctacctaacacagtttatacttccctgagcatccctgaggagaacatctcttagttttgtttttgcctctcaaattcaattcacaattcttctggttaagcaccttcgcaaatttctcttaaagacccctatcccatagccagcccatatggtttgggatttatcctgccagcagcagggtatg

SEQ ID NO: 910450 - DNA, 649 bp, Homo sapiens
ttaaacccacattttacaaatgtatttgctcatacatttctcctctcctttagggaaaatcayaatatgttggattgtcaaactttcaataaatgtgagtggctgttggcaattggaggtctgcggagaactctaaagtttccaggaattggaactctaaaggctaccttccgggactctgccggctacagtcagtccccacatctttgagcttctgtggatacctgaccagcggtagcttcccagtgaatgccctttatgagccagcactgggcagggtattgcagtcagaaggcgtgagacaagcttgaggcagtgccttaaagggtggtttccatggatgccacccagacccagatcccagaggcacacacacaagcacttgcatctgttttttcactcggctggcttgcttcctcaggcccagagctagggtctggggattcccatctgggttctgccgttaatgggttgtgtgaccttggagcagttacttaacctcggggtcctgtttcctcagctgtaaaatgagggggttgcattgtgtggtcccaaagggaggcttccagttccgctactctgtgaattttgcaagcacaaaattgtgtgtcccctctccatgcctcaatgcttttgtcttgcaaacgaa

SEQ ID NO: 910451 - DNA, 649 bp, Homo sapiens
ttaaacccacattttacaaatgtatttgctcatacatttctcctctcctttagggaaaatcacaatatgttggattgtcaaactttcaataaatgtgagtggctgttggcaattggaggtctgcggagaactctaaagtttccaggaattggaactctaaaggctaccttccgggactctgccggctacagtcagtccccacatctttgagcttctgtggatacctgaccagcggtagcttcccagtgaatgccctttatgagccagcactgggcagggtattgcagtcagaaggcgtgagacaagcttgaggcagtgccttaaagggtggtttccatggatgccacccagacccagatcccagaggcacacacacaagcacttgcatctgttttttcactcggctggcttgcttcctcaggcccagagctagggtctggggattcccatctgggttctgccgttaatgggttgtgtgaccttggagcagttacttaacctcggggtcctgtttcctcagctgtaaaatgagggggttgcattgtgtggtcccaaagggaggcttccagttccgctactstgtgaattttgcaagcacaaaattgtgtgtcccctctccatgcctcaatgcttttgtcttgcaaacgaa

SEQ ID NO: 910452 - DNA, 614 bp, Homo sapiens
aaatgttgtcatatttgagtcaaaatgttgaatagaaatttggaaatattgacccagggaatggcctacttgtttatttaygcttcccccacaacacatataccttaccccccgccaaccactagattaaaaaggcagcaagtctttcttctcaagtctttccagatagtctggtatacagttggttgttcaagggttatttttgatgaattaatgaatgctttgtggcctgaatcaaagaaactttgaacactctctccctgctatactttttgctcaggggctcttgaatggcctgtggataagtcgatgcagtggtgtcctcacagtggctctgtccatacccagtctcccaaaagacaatttttctctactctaacagttttttttaagagttgagatataattcacataccacaaaattcaaccttttaaagtacacaatctagtggttttagtatattcacaaggatgtgcaaccatctaattccactaatccccaaatattttcataaacctaagaagagctccaaattcattatcagtccctcctgattcccactaatctactttctgtgtctatcagtttgcctctcctgaaaacttaatgtaaa

SEQ ID NO: 910453 - DNA, 454 bp, Homo sapiens
aaaacaagagggtggttttataatcagctataaagctctaacaggtgctcttgaatgaaggtttctgttaactggagattgtaacatcaaaatagaggaaaaacattcaggacctttgaagagctaaaatgttcattaatgtcaagcagtacagaaattaactgcataaaatgaactaataggagactggagtaatctttttagtgttttgcttaaaacattgctaatcctttgttttgcttttcaaagtcaagtaaacttttcttttgagctattaacagcttttaacaatttagtatgctcccataaacaaaatttggagcatacttgtctctctcttcctgattttctccagaatttggaaactatctgaatattcttaagttgtcttgggacctcaagaggagagarattcatcaactcataggtatttgatggtaaaaatccatggctg

SEQ ID NO: 910454 - DNA, 622 bp, Homo sapiens
tctattccttctgtgttagattatgttgattgaattgtatctaatggtgatggctgctaatgagggattttggtctggaactttattgaggattataattgaagtggctttcctccatgacacaaatgctcccccaaattaggattactactgggatagtaataatttgtctttggatatagtgtttttcaaaccttggcatgcagtagaattacttggaaggcctgttaaaatacagattgatgggacccatcttcagtgtttctgatgtagcaagtttggggtagaacctgagaatttgcatttctgacaatctcccagtcaaggctgagggaccacacttagagaaccactgcttttgtcaaagggttatgatgctcatcctatgttgagaagtgctattttggctgaatactctgagctgtttagtgcagagagaagcacaggaaaatgaagggccctaatgctcctcctggtgcatatttttaccccatgtgccttcctgctagggctagaacatatggttggaggaaccatgcagctgggctctttctgcacrtcccatgcattccaggatgagctcagattccattctaattatcgaaggcagagtgtggttgca

SEQ ID NO: 910455 - DNA, 531 bp, Homo sapiens
tcatgtagattgcctgatttctcaaggaggaggtgtttgacatacagagcygagctttgtttcacaaattcagaaactcttactagagtggccacttggaaatgttgcctaaatattaaaagcaaaatttgtatatcttcaagagaaaatacagaacatctgtatgagccagcagtagaaaatatttttgtgaataaaacataaaagattgataagttgagtaaaatgaaataagatttttgtacaacaaaggactcataagcaaaaagaaaagaaacctcagaggtgaagatatatatgcacacaatggttgtgtagtaaaatcagaatatgtaatgaattcctacaaatcagtaagaagacaaggaaagcaataggaaaaatggcaaggctattgtcaaaaattcatagaagaggtaacaagaatggccaaaaccaggtagactatcctagtaattagagaaacatgaattaaacaatgagccattctttaacaaacatcagacttgcaaaatttagaaactctgccaa

SEQ ID NO: 910456 - DNA, 590 bp, Homo sapiens
acatcaaccttgggaaagaatttatgagtaagtcctcaaaagcaattgcaacaaaaaacagacttgacaagtggaaactaaaccaaagagcttctrtacagtaaaagaaactatcaacagggtaaacagatatgctacagaataggagaaaagattcacaaacgatgcagctggaaaaggtctaatatccagaatgtataagagaaacaaacaattcaataaacgaaaagcaaataaccccattaaaaactgagcaaaagatatgaacagacacttctcaaaagaaggtatacaagcagccaacaaacatgaaaaaaatgctccacatcattaatcatcagagaaatgcaaatcaaaaccacaatgaaataccatctcacaccagttagaatggctactattaaaagtcaaaacaacaatagcaacaacaacaacagatgctggggaggctgtggagaaatggtagcacttacacattgttggtgggagagtaaatgagtttaaccactgtggaaagcaatttggagatttctcagagaacttaaaatggaagtaccatttgactcagcaatcccattactgggtatatt

SEQ ID NO: 910457 - DNA, 675 bp, Homo sapiens
gatcttctgttgcctattgtgtgtttttgacaccctcgtcaaagatcaattgaccataaatgggtgggcttagttctggcttctytattctgttccattggcctgtatgtctgcttttctgtttttatgccagtaccacactcttttgattactctagctttgcaatgtaatttgacatcaggaaatgtggtgcttacagctctgttctttttcaaaattcctttggcaatttggggtcttttgtggttccatatgaattttagcattgctttttatgtttctgtaaaaaatgccattggcattttggcagaaattgcatgtgctctgtagattgctttgggtagtgtggacattttgacaacattgattcttctaatctatgagcatggatgtcttttcatttatttgtgtcttttaaatttccttcatcgatgttttataattgtcaatgcataagtttttcacttctttggttgagttaattactgagtgttttgttgttgttgccgctgatggaaatgagattgttcttggtgtataaagttgctattgatttttgtatgttgattttgtatcctgtaactttaataaatttgtttattaattctaacctttttttgcagtgcctttagagttttctacaatcagttttaccagccctttctaaagagagg

SEQ ID NO: 910458 - DNA, 675 bp, Homo sapiens
gatcttctgttgcctattgtgtgtttttgacaccctcgtcaaagatcaattgaccataaatgggtgggcttagttctggcttctctattctgttccattggcctgtatgtctgcttttctgtttttatgccagtaccacactcttttgattactctagctttgcaatgtaatttgacatcaggaaatgtggtgcttacagctctgttctttttcaaaattcctttggcaatttggggtcttttgtggttccatatgaattttagcattgctttttatgtttctgtaaaaaatgccattggcattttggcagaaattgcatgtgctctgtagattgctttgggtagtgtggacattttgacaacattgattcttctaatctatgagcatggatgtcttttcatttatttgtgtcttttaaatttccttcatcgatgttttataattgtcaatgcataagtttttcacttctttggttgagttaattactgagtgttttgttgttgttgccgctgatggaaatgagattgttcttggtgtataaarttgctattgatttttgtatgttgattttgtatcctgtaactttaataaatttgtttattaattctaacctttttttgcagtgcctttagagttttctacaatcagttttaccagccctttctaaagagagg

SEQ ID NO: 910459 - DNA, 599 bp, Homo sapiens
gagaggatggaaaaccccaaagacatgctttggctccaacacaattttgtgaggtttggtccagtgcagcacactaatccagcactccagggaggactagaaaygtttaaagtctcccagcgctttccctttactgcgcctctggctgtacggacctaatgagatgccttgtgtttttcagaatgccgaagcaagttacgacttcagcagcaacgacccctatccttaccctcggtacacagatgactggtttaacaggtaaactgggccttgggaggtctctttgactttaggctttggggttttattctactttgttttgtttcaggcttgactaccaccagcaaaataatccccatgcttcattaaattatattgtgatttttcttcttagtggttacattctctaaagtgaaatttttaatattacaatcttcctctagaataatcttttgactgttttgttctgctaacttgaaattatttgctactttaatccattaaagagaaaagaaaatagaaataagaagttctttctcaacccattacaaggtgatttaaaacatgctgattttgctttatgtgttgaaactgtcgta

SEQ ID NO: 910460 - DNA, 617 bp, Homo sapiens
gacgaatactgtgttatcccatttatttgaggtacctagaatagtcaaattcatagaaagagaaagtagaatggcggttgctaggggctagggagagagrggggaagagagagttgttgtctaataggtacagagttccagttttgcaagatggaaagagttctggaaattggttgtacagcaatgtgaatatacttaaaaatagttgaaaagataaattttatggtatttgtattttaccatattttttaaaaagagagcactaaactgggagacaaaagaccaaggttggagttcttggttgttttccacagatagatcagtctcaaggaatttgagacttccttgaaactcaaggaagtactcaaggaagttgagtaaaggaagcttctttactcattgtttctgttaattcatctttaaacaggataaaaaagactgtggagtctagatttgtatgaggatcaaataaaaaccaaaaaaaacaaacgtttaaaataattttttgagttgtagttgttctcaatattccagagcctctgatctcttgatatttgttacaagtttcacatcttatttcataatgaaatgctaaagatgcctcagcaatagccagt

SEQ ID NO: 910461 - DNA, 576 bp, Homo sapiens
attttttttttttttttttttttagacagagtcttgctctgttgcccatgctggactgcaatggcacgatctcagctcactgcaccctycacctcccggttcaagtgattctcctgcctcagccttccgagtagctgggactacaggtgccgccaacacacctggccaatttttatatttttagtagaaacgggtttcatcatgttggccaggctggtctcaaactccttggccattagtatttttgttgaatgaattagatatctatttttagacattaagttagacaaccttcatatggtttttaaacattaaaaaaaaaaggatgagataccctggattatatttcctctattctagactggatcttgttttaaagcttttactttttgaatcaggttacaccatattttaaattttaatgaaatataatagacattataatagaaagcacagctcttcacaaactgcacacagctgtgtaaccagcatccccatccagaaacagaacattagcactacaaatccatactcctttcaatactgcttttccccaaaagtaaccactagcctgac

SEQ ID NO: 910462 - DNA, 608 bp, Homo sapiens
gaaatatatttttccgtccctttacttctagccaatttgaagtgagtctattttagacagcatattgatggatcttttttagataattgttcagccactctgtttttggttkgagaatttaatgcatttacattcaagttaattactgaaaggtgagaacttattctgcctgtgttgtggttgttttattcttttccctctctttctgtcttccattgttatttgatgatttcctgtagtgatttgctttgactcatttctctttatcttttatatctattgtaggatatttcctttgtggttagctcccagcttgtgtaaaatatcttgtagttataaccacctattttaagttggtaacttcaactgcaaacgaaaactttactttgacttctcccataaccacccactttgagtacctgtagtcagggtttgcttctttttatattgtgtgtttattaacaaatttttatcttttactttcatattaaggttcaaagtaattcatgcatcaccttcacagttttacattattctgtatttatatatttacctttctcaataaggtttatgcttccttatgcttttgcattgctattcagtgcttt

SEQ ID NO: 910463 - DNA, 608 bp, Homo sapiens
gaaatatatttttccgtccctttacttctagccaatttgaagtgagtctattttagacagcatattgatggatcttttttagataattgttcagccactctgtttttggttggagaatttaatgcatttacattcaagttaattactgaaaggtgagaacttattctgcctgtgttgtggttgttttattcttttccctctctttctgtcttccattgttatttgatgatttcctgtagtgatttgctttgactcatttctctttatcttttatatctattgtaggatatttcctttgtggttagctcccagcttgtgtaaaatatcttgtagttataaccacctattttaagttggtaacttcaactgcaaacgaaaactttactttgacttctcccataaccacccactttgagtacctgtagtcagggtttgcttctttttatattgtgtgtttattaacaaatttttatcttttactttcatattaaggttcaaagtaattcatgcatcaccttcacagttttacattattctgtatttatatatttacytttctcaataaggtttatgcttccttatgcttttgcattgctattcagtgcttt

SEQ ID NO: 910464 - DNA, 485 bp, Homo sapiens
aggcttgctgggtaacaaattgtcacaaatttattagcaaaagaacacacacttgctatatcactgctctgtaagtcagaagtccaggtgggctcgactgggttctgcacttaaggtctcacaagattgaaatcaagacatcagctgagctgggctcttatctagagatgtttacatgcttatctctctgactttaaaatttttatgtaaaattgattaatacacaaaattaatccacataatctccctgtcttaaggttgactaattattagccttagttacatcttcaagaccccttttccatgtaaggtaacattattaacagagtaacatcaggagatgaatgtcatgggggccatgttagaattcttcctaccacatcctcattcatttattttgaatcctaagaatttattgagatcctactatgttctargtccttgcagtaagggtacaatggtgaataagacaaacacggttctgg

SEQ ID NO: 910465 - DNA, 595 bp, Homo sapiens
gtatgcttattaaattcataatgtaactctcttatttagttgttggctagaaaaccarcattcattcagcaaatagttatcaagtccaaactatatacagggcactcttctgcatactgaaatataacagtgaacaagacaaagtcctcctcccagggggcttgtatactagtggcaatgaaggagagaaacaaaaaacagatgaccaagcaattgtatgaatggtggtcaaaatgctatgagaatgagtagagcagagtatgggaagagggagagccatagaggggtgtttctattttataaaaagcatccaggtttggctagtctgggaaagtggcatttaaatatagacctgaaggagatgaggaaggtattcatgtggatatctggagaaagggcactccagacagaggaaccaccaaggaaaaaggcctggaatccaagacacacctggtgtgttccaggaacagcaagaatgcgagtaaagctgcaaaggaatgagccaaggacagtggggaaggagatgaggttagagaggaaaaataaagcaagatcatgggcgacatgataagctggggaaagaactttgaattga

SEQ ID NO: 910466 - DNA, 662 bp, Homo sapiens
aagtcacacgccatggatagaagacagtgggcactgaggcagtgcgcagagcaagcctgctggcaggagctggaggtgctgcagttgggagggctcagattcccctrgaaagggcaattcaccctccatgtggccatctcaggacagcaactagagaagtgtcacaggtggtatctgcctaacgtgcctggatgtgtcggggatatcatactctctgtttaacttaaccctaggtatgatttttcctattctgcaactgaaggaactgcagttcagagaggttgagggatttgcccacgggctcacagcttgattcaaacttagaacatctaagggtccaaaaggtctgaagaaccagcccagggccctttcctttaccatgttatctatttaagaacaaacttctcacaaacccagaggaataagaaataaaggccaagcaacccaataactctgtgttcattttttggaaaacaacgttcagagttggctaaatgatttgaaaaaaatattacattctccagattacaccaaactcagaataaattacaaatggattaagtaattaaatgcaaaaagaaaaacataaaacatctaagaagaaatacaggactgtatcccatgatctgaaggatgaaaagactattttgagggtgacataa

SEQ ID NO: 910467 - DNA, 677 bp, Homo sapiens
cttatttctctgttgaagcgaaagacccttccctgatacaggccagaattttccgaagtaaggtctttgtttttaatgaaacataaaaggacaggaagaatatcaaatcataaggcagacgagtcactgctaagtcctttaaattatcatacttgttcttataccacccatttagcctaatggagaacagagggcatgccctattgtctcctgcatggactcagttacgagctgctctccaacatatggagagaggcccttccagatactgcaagacatggagagaggctcttccagatactgcaagacacaagcacacctacttggagtgtcccttttgtccttgctttgccctttgaacttgatgcatagcaatattttcctagtaacaaacttggttcccctcccacctcccaacttccctgaagtgtcacaggtaaaatactctctcttcctcgacctagttctagaagcctccaatatcctgcactatccttacccctggtttatcctcatcttagggaactgaatgctactacaaagtagatccccttttaaaatracataagcactttggtcttctccccagggttctgctatttcagggagacaagcagaggtcacaaagcatctctagaagtaaaatgccatccaggggttctgggccaccaacagag

SEQ ID NO: 910468 - DNA, 633 bp, Homo sapiens
gaattagaaatcacctttgtatgtatgtattaacccattaggactttttttttttcctgctccaaaggtgagtaccaaatgaaaaaatacaaaactcaggtgmtactggaacctagaacaatacaattttttgttatacaggctgtctcataccttagagagccagatgccaggcacacatcccaaccaaaaagccactgaaatgttagagcttattggtattgcagtataaccaagactagtctgactaatataatgttataaccaatatgaatatattaatgagcagaattaaaaattcacataaatttttaagttaaaacataaaactttaaagaaatgtcctccttgaggcaggttcatctggctatgccccagactcctgggagcacatgcactttctcatctgctattaggaaaacttcaatggtgatgtctgagaaacatcctacagcatttggcagagacagcctctgaaaccagatgaaacccagttctgctacttcctaactcttgaaccactgagcctcagattatgtgatgggggaataaactgttattgtataatgtggttaccactggtgccagttggccaagaagaacagcagaatttgtcatagaaaagcaacagct

SEQ ID NO: 910469 - DNA, 625 bp, Homo sapiens
ttgtggttttttttttgttgttgttgttgttgtggtggttgttgttgttgttttaatcagctgggcatgatggcgcatgcctgtagtcctagctacttaggaggctgaggccagaggatcacttgagcccaggaatttgtagctgcagtgagctttaattgagccacggcactccaatctgggcaacaaagtgaaaccctgactctaaataaataaaaatgactctgagcccacatctcatagaagtcatatatgtttcagtattttgttttaaagaggatttcttatcaatatggctaaattttgaggctgtgtgggatgcgaaataatttagaacttcatcccacaatgagatgggatatgccctcaagtcagtggctctgaaacaagatgaaataattacaaaaaagaaaaaggaaggaagggaggaagggaagaatggaggaagggaagaagggaaggagggagggagggagggagggagggagggagggagggaataaaaacctgccaaaggaaaactccctagttttcctggaaakacccaaccctttcttcttttcccaattccctaaagggctaaataactcaaaacagaatataaacttcagagatagcccttatt

SEQ ID NO: 910470 - DNA, 590 bp, Homo sapiens
atggtctaaattatagattctgactcagtaggtctgggagtccatatttatgtattcctcaagaaattttaaatcttaaccagatctgggggcccgttygtctagagaacagtttacctttaactcaacaaatatttattggatatattctatattccagaaattatgccaggaaatggccctgcactgaagtctggtaggagagacagatgtgtaaaattacacttgccatgtagtataataagtgctttcctaaggcatttattaattgcaggggttgtgaaagacgaaagaagaaatcatctgaaatggatctgaagagttctcagaggaagtgactcatgttgaagaggaagtgacaaagcaggtaaggaatatagggcactgtagttaggaaaacatcttggcctctgagttcaagacgattgccaggttcctgagtcatgccttataccaatgaagggggcaaagttagacagccatctatttttgcaagaagttcctatctctttttatagccctctcttccaggtgtctaggactttaactgtcttgagagaataaaaatacatttctggcttatttatctg

SEQ ID NO: 910471 - DNA, 611 bp, Homo sapiens
gataacttttatgcaatttacaagcgactacagaaagtgcagtcatgttttctaatggaaaaagaaaagagaaaaggtatttattttttaatgatcacaaatagagtcctggccagttaaaaaatttctactaataaggaataacattctttgtaaaaaattagacgtaaataaagcacaggtaataacaaataaaatgacaacaacaaaagtaaaacccaagcacatcatgattctagcttaaataattactgataaaatatatgtaatctatatagtacttctaagagttttgatgcacatatgttaaatgtatatttaaaatattaaaaatattgagcagataaattaagtagatcttattttatactgcattttatgcatactttttcagttaatatatgtttttcatgtcacattttttcgaagcccattacttctagttatatcctattttattataaagatacagcaactgacttttgagtaagacttcctgttgaatacttargtttattggccatttgaaaaaattaataaacactactatgataaaccagcttgtaaattaaatgttacataactaagtaatttttctcctcaggaaaaat

SEQ ID NO: 910472 - DNA, 632 bp, Homo sapiens
tggaggaactaaaatttgcactcaccaaacaaaaaaaatattccagctcaatggccggacgcagtggctcacacttgtaaccscagcactctgggaggctgaggcagccgatcacctgaggtcaggagttcgagaccatcctggccaacatggcgaaaccccacctctactaaaaaatacaaaaattatctgggcaagataatcccagcttgtaatcccagctattcatgaggctgaggctgcagaatcacttgaacctgggaggcagaggttgcagtgagccaagatcacaccactgcactccagcctgggtgacagagtgagactctgtctcaaaaaaataaaaataaaataaaacattctagcttatggttcaggctccatctcatggttcgaaattttcagctccagtaaaaactccaagtggtcatatagactttaattaaagaattaaaataactcacattagattttgtcatcatttaattagtggactattatggctgatattggatcaactgtttatttttattttatttttttgagacaaggtctcactctctgttgcccaggctggagtgcagtggcgcaatctccagaagctaatgtaacatatgtggaagcattttgta

SEQ ID NO: 910473 - DNA, 547 bp, Homo sapiens
atctcacctgaagcaggtgccttatgagataattcttgcatgtcttaagatctttctctgccactgctcattgcctccatgctgataactagggtgtagactcagcagagaagtatcagccctctccagggggaaatagcctatccactgaacaattgaagtaccttgaaacccacccgggagtggaccttgtattagagtggagggggggatatatgttgtgctgaactcttattgacttcactggggatggcaccaagttcaagaggcagaagaagagacccagagccagaaacaagacattgggtctcatgaaggtcttacatacaggggagagagtccagtggtggtgagctagaccggagaaccacaacacttgcaaaaagcatacagtttatgtagcattttcacttagcaccctcccccaataacttccacctggcaaccttttaayccaaaacacagggcctcaatcccctgcacagcccacattccacatgacaggatggggcccagatgttcctcatagaaaaggaatagctctctg

SEQ ID NO: 910474 - DNA, 621 bp, Homo sapiens
cctcatagaaaaggaatagctctctgggttggccactyctggattccctagctcggaattcccaactgcattcaggtgcaccatacagggtcattcttagcatatgcttaagtagttgttatcaggtacattcaccatacaacataatgctagatcagagggtattcattgatatagagacactcactcataagtcaagattcagttgtttgtcaaggacacttggagctgatcccgatagttttctggggtggttcttcaaatcctgtatgttctgatggcctacagcaaatgaggaaatgccacaagttctttgacagtctcaataaagggtctgacggctcagagaggagggatgttagaatgcatgttaaaaaggttttaggtacaatctatcacttgactatttctaactaagaaggcccagaggacactcccttcacaaagacaataagggatcctgaaaaggagtgctgacacctttgagaaggtggtctgtaaaggctgccatctatgggctgggattgacatttgaagaagctgtccaggagttaatcttcctaatattgctgggatcatgaggcccagaacaacagaggctaagtagcagtgcttagtgtt

SEQ ID NO: 910475 - DNA, 638 bp, Homo sapiens
caaaggaaccatggcagtcagctcatgttcatgtttcatgtttatkccgtttttaattttttgtacattttacacatcgtgattgcatatctacctgctaattctaatacatgatgtacaatcggtacagtaaaccagttgattgttatttggtcatctggggctctgggtgaccaaagctcctcaggtcatgggtaatatttgagtattgatgcaagcatgcaggaatccttagggcctctactggggatgttttcccatggagagtattgctttgtgttctctaggagtcagaaacattggctgtcttctgggattccacgctagggactgactctcaggcttggctgctctgcctcccattgcccagggcctaggctttgtctttagagcagtgttgttatcatcatattcctttagagctacccagtcattttcattagtttaattcctaaatcatttctctggtgtcatttctctgtcatttatttttgagggcaaaggtggagggaagctcggatatttcatttactaactactgagcctagcaaaacttattacttctttttaaattttttttgagacagggtctctctgttgtgcaggctggagtgcagtgatacagtcatggcttacag

SEQ ID NO: 910476 - DNA, 548 bp, Homo sapiens
caacaacagaagaatgagaaatcttggtttattcattcagtggaatgctgtgcaataataagaacacacttttgttttgagatagagtctcactctgtcacccaggctggagtgcagtggcacagtcacagctcactgcagcctcaaccttccaggctcaagcaatcccctcatctctgactccctagtatctgggaccacaggtgctttccatcacgtccagctaattcttttatttttgtagagactagttctcactatgttgtccaggctggtctcaaactcctgggctcaagctgtcctcccacctcagcctcccaaagtgctaggattacaggtgtgagccgctgtgcctggcagaacatgctgttgatacacacaacaacatggatgaatcacagacatgttgagcaraagaggctggactccccaaaaatgtatgtatgtgtgattctatttataaggagttcaaaaactggcaaaattaatctttggtgttagaactcaaaaaactagtttgatatgctgagttaactgtctccttttgc

SEQ ID NO: 910477 - DNA, 659 bp, Homo sapiens
atcacaaatgcatgcatgtagagaggaaggcactctgattccccatgtgacaygatatttcacttttttttccaagtcctccaggttcccacttgtgaaatacaagttccttatctatcacagagatgtagagttttttttattcctaccaagcttgaaggagtggctctttgtggagcattacttatgtatatgttgatctcacatcttccccagagcatcctagtctctgcaaataaaattaaaaaaaaaaaaaaaaaaaacaagaagcaaaataacccttctcttttccctcataagcttaatatttttttttcaagtttcaaaaggaatagactgaggggaagaaaatatacacccaaggctatttctctactactaggaactggtgtttccatacagattgtttctcatacctgggggatgagtaagtgcagccttgaaaggaagcaattggaaagtacctaaaagaagctcccagcctattttatttggcatctgctctctagggcagaaagtgagacaaggagaatctgcagtaaaaaccaaaggagtaactgaagaaggggaaacattcactgagcccttaagctagaaagacctctaatattacaatcaggactgtgtatttcaaacaacctgtaaatagtggtggctta

SEQ ID NO: 910478 - DNA, 641 bp, Homo sapiens
tacaaaaaataaaaaattaggtgttgtgttgtacacctgtagtcccagctactaaggagggtgaggtgggaggatcacttgagcccaggagttggatgctgcagtgagctatgaccatgccactgtactacagyctggtcaacagagttagaccctgtctctaaaataataaaaatcaaattcaactctttataagttggctttttttaagagatcattctacctttgtgtaatgtccccagcccaaactttctatcctcgcattcccctgggccttggaatggttttccctctcccctcttttcctcttttcatgtgttatctcaaaatttaacttttctggggcccctttatactgtttgctctctgacaagcaaacaaatctgattaatttgtttacataagatgctataccttaattatggcatagtgtgtcttcagcaccaataaggtttgtattgtaaccttgattctgaaagtcttgagataaagcagtagattgcaggaacttcaaacacaatagcaggacccgtagaggaagttttaggggtacagcttcctttgcctctgcataaagcaggctctttgggctgtcatggaaaagctgtttgggaaatggggtagatgatgctggagaatga

SEQ ID NO: 910479 - DNA, 605 bp, Homo sapiens
ttataaatgggatcatagaattaaacaatttagacttaaagtatcacatacttttagcctgtgtaataaatatcactagacattatttgaacacaatgttccgtaacatatcttcctmggagaaacaaaacagacacctttcctgagggtgaaggtaaccttcttgagatttatttaagcaaaaatagaatcgaagatgttgagatagagaagttcttagagttccctgcctccttggttagaatgatgaaacagaaattcagaatatcacacggtgcttagaggcagaaatggaaaaaaagaatctggtgttcaaattcatacttcaggtaggaggcaagcagctatctggaccttaaatgattctcttgattgattgataaatagatagatacgcagcaatactttagttggatacattatttggtgcctcttatgtcagtactctgatgttttccattttcacagtttggaaataagaaaaagtagacaaacttggctgggtgcggtggctcactcctgtaatcccagcactttgggaggctagggtgggtgcatcaccggaggtcgggagttcaagaccagcctgaccaagatggagaaac

SEQ ID NO: 910480 - DNA, 668 bp, Homo sapiens
tgtgttcgatgccactcccttctatgctaatgttttggccacatgtgttggggaggtaaaatgctggattctatacttctgttaatagtatgatgagttcaccacaaagcataaggctagaaaggacatccgtacctcacattttcagataaatgacttagcaacactattattccctgctaaggctgcctcaagagcaaaagcaggcatgcacacaattctttgttgccccagaaagtatcgcatacatttgctattgtaggaaagtataaaaaagcttgcaatccaaataaggctatgaagtagctcccaagggcagcataacttctgaagcaaactccttctgcaaagaatcctgttatttatataccaagagcaacaaacatccatatttacttttgtctgtgcccgaattcaacatttgattgttcttgtcactgtgaggcttggcgtctaaaacactgtaatgacaggttacgtggtgtgagataataaagagtggatgcattttatccagggaactgattctactactatcaaagtattttgaaagaagaggaggagaattcaagtaaaagtttaaaaatagaacagcatgaaggagatcagtatacatgtrcataaaaatgttcttggaagacctagaatatggaacatttcattagtgt

SEQ ID NO: 910481 - DNA, 586 bp, Homo sapiens
agtagtaactatttcaaagttaggatctcctggctttggcaaattttatttttgtgaaaattaaagttgggcattggcaacccaataccttttagtgttccactagaacaaaattaaatattaggccagtaatttgatgcagtggtatccaaacttttccatttcatgccctaaaaattagacactcacaacccccatcataggcatattcacttatttgtgtgttcatttttacgttgtaggtattactagactaacacatgtgttcatcataaatgaatgtataatatatatattttaaatgataaaatataaataatgagaaagaataaagatgaaaataatgttttattttgtttgttaatgattcaaaacaaatctttgccctccatatagagagtccatgtgtttgaatagactttattattttcaaaactcctcacttaacactttgawacaggaatccaaaactctgatcttaagtttggattttcttttccatatttggttttaatggctgtcactgctggggaaaaaaaagattcctcacacagatttgaagattaaaatggaaggtgtgcatcct

SEQ ID NO: 910482 - DNA, 484 bp, Homo sapiens
tcccactggacagacttctggcratatctggtgttcagactgtagtgccatgctctgctatttttattactcacacaaaagtgcgttgatgggccatgggcaagttaaatttatcatcttgcaacggtgggatgaaagagccattgctaaccctggcaaacctaaggtgtacaatttcacaaaattacatagatggtaagaggtggtgttgacacaattggagctgacactttcatttagccgacgtggaaagaggcccaagaggtccacttacaggcagtggtagggccaggtcagaagtctaatcttcagcctccttgctttgtactcccgacctcaaacccgaccactctcttctcccaaccataatgcatcttagtgagttacagtacaacaaaagatctagaaatatctgactattaaaaaattatctgctgatcataaaacaattgaaaacatagagaagaatttagttaggggctag

SEQ ID NO: 910483 - DNA, 589 bp, Homo sapiens
gaaggagtccatggactgatattttctagccaaagggagctaaaaatcagccattttgacatttggatttttcattgatgtgtcttgtttatttaattcaatttaatrtgaaagagtagagagggtagaacaaactgttcagcaacgtatagatcattaggttttaaaaccaaataaaaagtactcagtgtaaaaatttgcctgactgaaaggattttgaaattattcttgaaagctctgaagcacgcagaggcagctttggatgtgatggatatttttgctgcatagagtatccagtgccaaagagatgattctgtcagaaaatattacgaagccaacctagctttgataattgcttcagattgtctacatatataatcctaaatctcttttcaaagtacttacactaccagtggtctttgatttataactgctggtccaagagatggcctactaataatataaaacagggtcttagcttcactgcgtatcgtttccagaggatgtgaatcttaagtcaatataagagatgtgtgagtaggaatgagaactcttagaaatcataggaaggggttcaagtcacagggaa

SEQ ID NO: 910484 - DNA, 584 bp, Homo sapiens
ctttccctggcactggctgcaaccagttattactttagagacagtaaacaactgcctgaccatcacctgatgatcgcctgacattcctggttggggacaggggtgctctccttccctgcttatgtctgcctacctgctatacagtcatgggtggattttaggaaatctttagttagcaattggttgaaagagttgtgctttgtctaaagacttgaagtcaatacaaaggaatgcttatgttaagataaggggtcctactgtctgtcatgtgatgctataccatagtcaggttggatattaagctacgttgtatcaggttaatttaaaaaagtttaacaagattttttggtttgtagggtgtgacttaatcctggccttgcattgccttaggtcttttatactttggtatcttactgccacaaagagtccattctgtcagtcttgtgatctctactgaaacrttaatgctggtcagttgtgtgtaaattccaaaagagagggggtataatgaagtgtgttcaacctcccttcccatcgtgactgggaattccatttttaaggtttttctgggctcctcttggcta

SEQ ID NO: 910485 - DNA, 564 bp, Homo sapiens
ttgtaacaaaaaggataaatgcttgaggtgatggatatcttatttaccctgatgtaattattaatcattgtatgcctgtatcaaaataccccttataccccataaatatatayacttagtatgtatctacaaaaattaaaaattaaaaaaatctaaaacaaaagagtgtttggtactttctttgtggtgaggtcccactccagccacagagtctccacaggaggagagagaatatctgaaaactcttgagaatatttgtggtactgagttaacagggctgggtcatctgtacaagtttgcattaaatttggacaacaactttcctttagatttcttgtgttgctcactttaggtgatttctgagaatgaaaaaaatcttcatgagtgcaatatgtgaatacattgggtttattagaattactattacttttttataatataaagaaccatgtttggaaataaaagttgttttgagtattccctaggagtccagatttcatttaaaattcctgatttataagttgagagcttgctgacagcttctagaaaatcccaggcccatca

SEQ ID NO: 910486 - DNA, 579 bp, Homo sapiens
tttgttttctttctgcttggattatgttagccatatgaataattagcaattagcagcatacaaatttctgtgcgctaatggcagtggatttatttggctccaaaatgtactgctttatttttagaccattttaatttcatggctaaatgtttaagttgtgagttataaattataaaaagcaaatggaaggcccaagggatgaagcaattggaaagtatatatgcagttaagatcaattcattccaccttcgtaaaataaccctgtccactttttaatatttatccttctttaccactctaagacaaaaactgttctatgtacttactgttttctatggccaaatttaaattacccatgggatggaagaagtgctaataatttaaatctgctgacaaaataaataaacagcacaaccacctcattttgacaattcaaatgagactttgagtatctctgctaaggcaagcytcaagttccaatgaattctcattcctctgccttccttcatcattgtggagacttcggtggagaaacatggatggaaaaacagtggaggcctatagaagttcaagagaagt

SEQ ID NO: 910487 - DNA, 563 bp, Homo sapiens
aaagcaatgttctaaacaatctgcaaaaaaagattgaactgaataatgaaaataayaaaacagaacattatccttgaaacctcaatggtctttaagtctgttcttcaaaagaaagcatcatttcccatagtaagatcctgaagctcttttgactcaagctccccactcattctttgaactcgctgtgttcacctgggccttggcacatttcctcctgccattgtccctgactggcatgcccctgacactgtcctctgcctattttggtcctgtattcctccacagtccagctaaatttttttcctccaggtgttcttccctgaccaccttccatagcacaaatggtccattcaaaagatagttatcatacctattcacgtggtcattctcacatgataatcttcaatgacagttgagatcttgaatcatattttaactttctgtatatagcatccttgtctctttatccagttttggaagttctttgaggcaacttttgccttcagcatgactagatggagagagtagccttcacctctggtaggaaaagcaatggactgttg

SEQ ID NO: 910488 - DNA, 633 bp, Homo sapiens
aacataatttccaagctttggaggaagaatttttaatgtttctgtaatgttctcaatcagaataggtttttgtyacaaaataactcctctgcagaagtctgatggagggtgtctttttaaacatcattcttcatctattcagaggatcaaatacttaaaagggactttattgggaatgtttttctttatctatctgttgacagtaagccagtcattgaaggaaaagaagacaaaggctggcaggaaagctatgcactcaaaaacaagcagccaaatgaagttctcatcctgactgcacctgcttctgagctcacagggtgtgtacctgagatggaggtgattattaaacacagcgccctgaccactgccctttggtatggcacttcctactgactgcatatcagtggtgttgagcagattaactcatcagggtcttagtgaggcacaaagcttctcttgacacataactacgtgtagctacttaagagtgcttggtactggaggtcattatgttaagtgaaataagccagggacagaaaaacaaatttggcatgttctcacttatctgtgggggctgaaaattaaaacgattgaactcatggagatagagaatagaacaatggttaccagagg

SEQ ID NO: 910489 - DNA, 709 bp, Homo sapiens
aacaaactactcaaggactgactgaccaagaggagtcattagcacaggtcttctaggcatgaatttgtttgaaaacttttaagctgaagaataggagtccctggggatagtgagttcagtttgaagttggacagcttgcatgtgttggcagcgcagggagcaatggcttaacttgctctcaaatctatgggagagctggagcagggcacaggcagtcaggtggatgggatgaaggtggagggatgccaccatatttctgggtaacaaaagggcactcgtcctgacagacttaaaatccaacacatcaaactatgctaattaaaataatatagaaatgataatacgttgatgggtaaacagaagaaaatagaaggccagatacacattgtggtagaatgaacaatctcccccacccattgcaaaatgtccccatcctagtccctggaagctgtgaatgtgttaccttacatggtaaaagggactttgcaggtgtcattaagttgaggatcttcagatggggggtttctcctgggttgtctgggtgggcctgaaatgtaatcactgggtctctgtaagaaacaggcagggggatgctatgttgytggctttgaagacaggatagggctggccacgagccaaggaatgcaggtggtttctagaaaagttgaggaatcagattcttcctagagcctgcagcagggacacagca

SEQ ID NO: 910490 - DNA, 575 bp, Homo sapiens
gacccgcgccggcggccacgtgaygcgcgacggggccacgtgatgagcgacggcgaccatgtgacctgcaacggcaaccaccgaggcccggtcgcgcgggggctcctgggagccgcgctcccggcgggtcgtggcgccgcccgccctagagaatcgccgcggccctgaggaccccgttctgcccacgcgactgcaaaggcggccccgttgggctgagcgccgagtgcttgggaggcgaatggccgcccccgggacctcgggcccgggagtcggggcgagggaagcgcccggggcctgagggcaggagccggctggaggggctcccccaggcccggtcgcccgcgccgatcgtgacggagccgcggtggggaagggaggagggaggcaggggcgagggcaggcctttccttgccataggcggcggctaaagacgtgaaggatgaaattagaagtcccgaagcatgcatccgccctcgcagtaggcactcgggcgagggtcggagtggaggcttcctccaggcagccccagagggtcctcccgcctaatgagaaaagaacagaaggcgagtcctctt

SEQ ID NO: 910491 - DNA, 575 bp, Homo sapiens
gacccgcgccggcggccacgtgacgmgcgacggggccacgtgatgagcgacggcgaccatgtgacctgcaacggcaaccaccgaggcccggtcgcgcgggggctcctgggagccgcgctcccggcgggtcgtggcgccgcccgccctagagaatcgccgcggccctgaggaccccgttctgcccacgcgactgcaaaggcggccccgttgggctgagcgccgagtgcttgggaggcgaatggccgcccccgggacctcgggcccgggagtcggggcgagggaagcgcccggggcctgagggcaggagccggctggaggggctcccccaggcccggtcgcccgcgccgatcgtgacggagccgcggtggggaagggaggagggaggcaggggcgagggcaggcctttccttgccataggcggcggctaaagacgtgaaggatgaaattagaagtcccgaagcatgcatccgccctcgcagtaggcactcgggcgagggtcggagtggaggcttcctccaggcagccccagagggtcctcccgcctaatgagaaaagaacagaaggcgagtcctctt

SEQ ID NO: 910492 - DNA, 601 bp, Homo sapiens
tatgttacactttttgtagttgtcctacagttctttgatagtctgttcaggttttattttcagccatttttckgtttgctttgcagttcagaaatttctattgatatttcatcaagctcggggattctttcctcagccatgtctagtctactgttaagcccttcaaaggcattcttcatttcccttagtgtttttgatttctagcatttcttcttggtcgtttcttaaaactttcatctctctacatctctacattacctgtctgttcttgcatgtcatctgttttatccattagaacctttagcttattaatcataattgtattaaattcccagtctggtaattccaactctgccatatctgagtgtggtttttattcctgatctgtctctttagactgtgctttttgagttttcacttctttcctgccccagcaccagtttctatggcggtttctgctctggcaagttatgagtctctatattcacctatcagtctctccaatttaaggggcaatggtttgctctgtggctccacttctcttagaagtaaaaagagttgttgatttttcaagttgttccactttttacttgttagtaca

SEQ ID NO: 910493 - DNA, 674 bp, Homo sapiens
gggactagattgtggttggtcttaaatgcgagcatgaraaaaagcacacttgaagttcaggaggtcttggagagcccgtgaggacttctgaagaaggaggctttgtaattagatagctcgatagtgtttacaggtgtagggaaaggagctaatgtgagagggggaagtgggtggatttaaaaaaaaaaaggaaacaattgaagtgaaaccaaatctggaaaaactgtgaagtatgagattaagaaccaggaaaacatggccaaaagggcctccacagatcctcaaaaaaggagagagctgaaaagtcctcttctctccctcagtccagcaccctcagataatttgacatcaactatttaaaaacgtatcttataaaatatggataaatgtaattattaagaatcagcaaaataagcaattctaaaaaggtggccctctgtgtcaatagtggctgggttgctggtcaaggccatcttgaccaaagtctaccctagagacatcattccatgtgcactcctctgaaacaggctctacctccagcaacattcagaaagcctgcagcttccaaatctccacatcttccccagagcctaccttctcactgtggaaaactgactcctggaagacctgatgaccttgctactgttctttgctagagttggtttgattttggc

SEQ ID NO: 910494 - DNA, 413 bp, Homo sapiens
gggtcaattttagatctttcctgctttctcttgtggcatttagtgttayaaatttccccctacacactgctttaaatgtgtcccagagattctggtatgttgtgtcttcattctcattggtttcaaagaacatctttatttctgccttcatttcgatatgtacccagtacccagtagtcattcaggagcaggttgttcagtttccatgtagtcgagcagttttgagtgagtttcttaatcctgagttctagtttgactgcactgtggtctgagagacagtttgttataatttctattcttctacatttgctgaggagtgctttacttccaactatgtggtcaattttagaataagtgagatgtggtgctgagaggaatgtatattctgttgatttggggtggagagttctgta

SEQ ID NO: 910495 - DNA, 510 bp, Homo sapiens
ctttctcttgtggcatttagtgttatmaatttccccctacacactgctttaaatgtgtcccagagattctggtatgttgtgtcttcattctcattggtttcaaagaacatctttatttctgccttcatttcgatatgtacccagtacccagtagtcattcaggagcaggttgttcagtttccatgtagtcgagcagttttgagtgagtttcttaatcctgagttctagtttgactgcactgtggtctgagagacagtttgttataatttctattcttctacatttgctgaggagtgctttacttccaactatgtggtcaattttagaataagtgagatgtggtgctgagaggaatgtatattctgttgatttggggtggagagttctgtagatgtctattaggtctacttggtgcagagctgagttcaattcctggatatccttattaactttctgtctcgttgatctgtctaatgttgacattagactctatggaaattttaactggaa

SEQ ID NO: 910496 - DNA, 424 bp, Homo sapiens
tttgcagatctggttcctgtccyacactccacttccacattccctcttcaaatagaaacaaatcatataggaacagactcttcctggctaggattttgttttcaaaaaccagacctcaaacacaaaagatgaaaagtttaagtttcctggtaaatcaggaaaaactcccattcaggtgtccagttatttaagcaaaagaaattgttttgttctccctttactgaattaagttactaattttcctcaagtaacattactctaaagtattcttttaagaactttcattctcacatacgtaagattttgcataatattaacactatattgataacatgaaccaataaatattgagtgtttaatacatgccaggaactcttctaagtattttgcatgtgctaactaatttgatttttgcagcagcctc

SEQ ID NO: 910497 - DNA, 644 bp, Homo sapiens
tgatttgtgtacattaattttgtatcctgaaacttggctgaattcatttatcagttctaggagctttttgsaggagtctttagggttttctaagtatacagtcatatcatcaggacaccctatttaacaaatggtgctgggataattggcaagccacatgtaggagaatgaaagtggaccctcatctctcaccttatacaaaatcaactcaagatggatcaaggacttaaatcgaagacctgaaactataaaaattctagcagataacatcggaaaaatgcttctagacattggcttaggcaaagacttcatggcaaagaacccaaaagcaaatgcaacagaacaatgagaaataggcgggacttcattaaactaaagagcttctgcacagcaaaagaaacagcagagtaaacagacaacccatggagtgggagaaaatcttcacaatctatatatctaacaaaggaccaacatctagaatctacaaagaactcaaacgaattagcgagaaaaaaaaatcccatcaaagagtgggctaaggacatgaataggcagttctcaaaagaagatatacaaatggccaagaaacatatgaaaaattctcaacatcactaataatcagggaaatgcaaatcagaacaatg

SEQ ID NO: 910498 - DNA, 637 bp, Homo sapiens
ggtaaccataatggaagagattctggctagtgtctatcagaggtgaaagctatatcratctctcttagagtccagcttgtaatggttctttacacatcagtcacaagttacagctgtgacaatggcaacaatttgagatgtatttcaacttgtctctataatagaattctgtttatagaataagggagaaaataatccagtcttcactgggttcccattctgagggtccactactcaaaaatttgcttcactcaatttttttcacctctttgtgttttattttggtgtcctattaaaggaataaaatgacacaacttgtcccttttttgtcccattagcaaaaattagaattttggtataaagaaactttattcaagtaaaaatcaataccctttgaattggacaataatctcactaccttattaggatttctgtatttgccattacgctagttatcatgcatgttatgctttactgcgaataagcttttaatgctccaaatgctgacccatgcaatatttcctcatgtgatcacaatttgcagtaaacttttaattaaatgctcatctggtaactcaacaccccagattcatgctgtcttgtatgctaattaaattgctgatttgtttcatgctta

SEQ ID NO: 910499 - DNA, 565 bp, Homo sapiens
tggatatagaattattggttgtcaggttttttggccattattttcaatatgccatcccactgccttctggcatccacggtttttgatgagaaatcagctgttaatcttattgataatcccttgtatgtgatgagttacttcttctctcttgctactttcaagattctctctttgtctctctctctttttatttatttatttattttttgagatggagtctcactttgttgcccaagctgtagtccactggcatgatcttggctcactgcaacctccacttcccaggctcaagtaattcttctgcctcagcctcctgagtagctgggactacaggcgcacgccaccacatctggctaatttttgtatttttagtagagacggggtttcaccatgttggccaggatggtctcaatctcctgacctcatgatccatctgcctcagcctcccaaagtgctgggattataggcatgagcgaccgygcctggccttgtctatctcttttgactacatttgtctaggtgtggatctctttggatttatcctccttgggttcactgagcttcc

SEQ ID NO: 910500 - DNA, 633 bp, Homo sapiens
gaaacctatatgataaaataaatctcagctaaagtattaggagattattatgttcattcattaagcataatttgtatttctttaaatgatgagctcaaaagaatccccaagcacccttgcatgatatatttttggcaaaatgggctttcttaaatcttttctaattacagaaaatagccaaatgcttactttatgtatctatatccataagggaggtatttatgtgtatccataagggaaggcaaagctaactctactgtgtatctggacacagtcttggaacactgaaaacactgatgaaatgcaggaacgtggaggattattggacaaaactgaaaaggaactgccattttcttcagtgctgtggccacaggcaggaatacataccctgataaaagctgcaaagtgttagaaaaacataagactaccagacgttagagataataaattatgtttgatctgaccattgaagactcattcttctaatgggtgagtgatttggctcataaatcattatgcagcaatagctgtgaaytgtgagattcctttgaacatggccatttagtggactgtcctcacagagaaaattaggtggctcacttgggcagctgttcttcacccttttctacaaac

SEQ ID NO: 910501 - DNA, 595 bp, Homo sapiens
cacctctaacttacagagaaagtcttccacaaaatgtcagcaactgtagtgggaagaacactgtctactgaagggtacgtaccctttttcttcatttctaaaaaaattttttagataatgaaacaaaataccagtcatatcacatgtccacctctttctataaaacccagctccagaaagggaggcagctcctctactacctactggtgtaaaatgtgacagctaatttatttcacagcattggaaccttttggagagaggtgagtgaattaaatataaaatgaataaccaatgtgaatgcaaacaactgtccacttaaaaataatgctgtcagcttatagttatcataaaaatcatccattttcaaggtcctatccatttttcatttatttatcagttctgaatgttagcatattagtaaaaccaaatgatagaaaacaatcttggaaatgtgaacaatatttcctacgttgtgtttttcgttttgcttgttgctgagcagacagattggatctaacttgtcacgcacactccagcaaaaacaacataaaatacayacaaaaaatgatggtgtcagtgaagccacaggctcata

SEQ ID NO: 910502 - DNA, 541 bp, Homo sapiens
tttcatacctgcctactgatgtatggacttcagaataacgtggcctatgtatattttccaggattgttcttttgtttgttgtttttcacccttcctccccctattttctcttcacargacatgggagttcacagccttctaaaaattagctttcctaataacttgggacttacctgtctaggaataaaccatcctagcatgagcgatcagatgaaatctgggaccaaagactcatttttcttctaaaatgctttctccaaaaaaaaattttttttaaaaaaaagaaaagggggcaaatgtaaaggaaaatatcttgggcccccaaatcactaagttaaaaggaaaattcaagctaggaactacttaagacaaacttgcctcccattctattcaaagtcatccctctgctcattgagataaatgtgtatctgactgcctccttaggaaaggtaaatcagaaactcaaaagaatgcaaccatttgtctcccacctacccgtgacctggaagcccccttcccgcttcaagttgtcccgcctttc

SEQ ID NO: 910503 - DNA, 634 bp, Homo sapiens
cccgcctttccgaacccaaccagtgttcattttacatatattgattgatgtcttatatstccctaaaacgcataaaaccaagctgtgctctgaccaccttgggcacatgttgtcaggacctcctgaggctgtgtcactgcgtgcgcatcctcaaccttggcaaaataaactttctaaattaactgatacctgtctcaaatttttggggttcacaaggtttagttataaatgcttcttatggagcatgattttcttacaagcgaggcaggagaatcggatctggaggcagggaacctagggctgtttcacgctgacttcctagaactaaattgaaagtaaaaccctaacttcccacaccaagtaacaaaagaaccagaggcttctccctttccaaacccccaccttttctgtgtggcagatgggaaattgaaagtacctctgattggttgcaaaaagcaaaattacgctaagaagtaagttatcccttaaaaaaaattattctttctgcaaccaatcagatcttcccataggagtgtaactatgtaacttcaccatctgattgcacgccacgtcttcgtttgcatataagggcaactttgtaacttcactttagcctttcattggttgcttttca

SEQ ID NO: 910504 - DNA, 654 bp, Homo sapiens
tctgggcactctggttttggtacccatggagtagatagtttgctcaactttaatttttctgttagaaatgtataagctggaccagttgaaatgtatggtgtcagctattttttctgctgtttattrtctgttctcttcaactagggcatgatcagaacaataatctctgagaaaaaaaaaagaaaaaaaatttttaaaaaaggaaaataaataagagcataaacaagatgaacttttcccttgcagattgatgtggatgatctgctgctgtgggctgcttcttcaatatcatctcatccatttttaaaatgagttattcatttgtaaactgttgatttctttgggtcattgtcctcatacagtttttttgtaaagtatcagtgattttactattcttctactcaagcttcatcataaatttgatgtttgttcttccttcagttttcacagaattcatgttgctctaataggagctgttttaaaagtgatgtcttattcttcttagtgcctcaaactagatcctgttcaaacaagttataacaagctagtacaagtttattttggtgcaaaaaaattgaaatctcttcatagttttttcataatttgcattttccatgaactttgtgaagaccccttgtatatcccgttccaaag

SEQ ID NO: 910505 - DNA, 606 bp, Homo sapiens
tctccccacgaatgcggcgagcgagctgaatrtccttgggcatgatagtcactcgcttagcatggatggcacacaggttggtatcctcaaagagccccaccaagtaggcctcgcaggcctcctgcagggccatcaccgcggaactctgaaagcgcagatctgtcttgaagtcctgagcgatttctcgcaccaggcgttggaaaggcaacttgcggatcagcagctcagtcgacttctgatagcggcgaatctcgcgcagagccacggtgccgggacggtagcgatgaggtttcttcacgccgccggtggccggcgcgcttttccgagccgccttagtggccagctgcttgcgcggcgctttgccaccggtggacttgcgtgcagtctgcttggtgcgggccatctcagactacctgaaagaaaaactcagccacttggcagagtggaaactgcccttatatatactcagaaacattctaattggccttgttgattttcaaaagacccgcgcaacaaaaccattggctgaagagtccaacgatgtgattggtgaattactggaaaatctgattggatgaatcacttcatttttgaatcctctcttct

SEQ ID NO: 910506 - DNA, 622 bp, Homo sapiens
gaccatgtgaccagctggccctgaccccctgctaacaagcagcagacccagaacccctttctggttctcctccaggcagggcacagttgtttcctatctgagcaggctccatttgcttcacatcagcccaagaacagggaatgggaaatgccttgtgctgcaggagggaagacaaagtaagccagagagcacttggccatctggggctgggagcggaagagaatggaaccattctggagagccagacatttgttttgtagttgttgcctttgtgaatgtacatgtcctgaaaccctggttaattttcttgttcaaacattggtttaaaattgctggctctaggagagatactgtccttcagcaggttctgttataaactttgcaactccaaggtctgattcagcagcaagctggaaaagttcctggttgctaagagaccagagagcaaattagcagctcacaaaagacccagctaagaccagtaaaaaataagacaaamgaaaacaaggtaggaaatgggcctcctcaaaatcaaaataaggtaaacaaactggctaggaaaatgtctgattggaaaagacaattataagtattcttcatgctgaagtaaaatgcactatag

SEQ ID NO: 910507 - DNA, 665 bp, Homo sapiens
atcttgcaaaggatctctctgccaaaaccactgagtttaatttaatgsactacttggtcaagactggaagtctttatcttccatcctccattaatatatcaatcttaagcatgactgaaaaatgggtacattactcgtaaagataaatttgtgcatgtgctcagaaatgtctcctttagaataatcaataacagatgtccgattgcctcatattttcaggtttgaaatgtgactttattaatgtaataacgaattacaggacataaacagaaaaaaacccaaaccaaccaacccccacctacttccatgatctgattcagggaactgagttgaagaaaggtattgtgaggtgctttggtgccctctggtgggtaatcatctgaacaacacagacggtgttttagtcatagttcattttgaaggggccttggaaatctgttccaatccccaaactataggagacaaaacagagcccacggggcccagtgactggtgcagagttccaggaaatcgtaatcccgtgtcagtctaacttgaagcattcttgttaaggttactggataagtatataattatcatatatttgaaattgttttcagaaaatattatcagaaaaattcttccacagagtaattttggtgtggaatgatctgatgtattttatg

SEQ ID NO: 910508 - DNA, 615 bp, Homo sapiens
taggcatgaagcaaatatttgctaaatgttagagagacagactccagcaccatagccatttaaagcttgactacagcaaattatgtttccaagttttaaatattcagcaataagctaatrttacattatgcaagtgtctttatttgtcatgacagaaacggggacctccggtagctgggttgctgcaggaatgggctgagtcctagggtgtgggcatttcgcactaacgctgtaacttggctctgtgctgttcttctctagtccaaggccctaggttactaacttatggaaagtagccccaactggtggggagtctcagaatacaattctggtacacatcgggcaatgcttatatcttcttcttctattaatagatccccaagtcatccaggagagagctactaacactcaaggccccttatggaaggtctagaaaacaaacttaactaaaaagttagcagtgttcttgttgagtatattttccccgaaatgtattttagtttaccttttgtttattcatttagtaaacactgcttaaagtctgttttgtgagcagcaatatttaatacgcttttgagggatgaaaaaaaggatctattgaaaaagatataatca

SEQ ID NO: 910509 - DNA, 598 bp, Homo sapiens
acactggcttgattaatctcactttttaacaggtttgaaatcagtaaatgtgagtcctacaactttgttctttttttcaagatcattttgactattcaggtatgtttactatctcatatgaagttttggatcagttttcccatttctgttaaaaaaggcaattgacattttaataaatactgcatcgaatttacagatcaacttggagtcttttaccatcttaacaatacaaagtcttttcattcacaaacatagaatgtgtttccattcactttttaaataaaagacatttatttaatgtctttcaacaatgactttttgtacttttcagtatacaaatcttgatttattcctacgtatcctaggcttttttttttgatgctattgcaaatgattttgttttcttaattttatttgtgggttgtttattgctagtgaacttaattacaagtgcttttgtaaattggtcttgtatcctgcaatttgctaccttcatttattaaacytaatagctttccatgaaatttttaatggttttctatatataagaaatggcttcctctgtgttttctatcatgtcatctggaataaaaataat

SEQ ID NO: 910510 - DNA, 556 bp, Homo sapiens
actcttttaagaaactattaaagtcagaattggaaataggtaccctatttaagtaaacatcagcagtaatttctggaaaaaaaaacatttaaaaaattttcattgatgttattctttaactgctacttattaaatattttgaaagtgttgtccctattgaagaaaagaaatagagccataatgggaaataatttccacataaactatattgcacattgagggcaggctggacgggagaataagagagggaagatgatgaaattgtaacctataagcctgagtatatgtggaagtagagattgttcttgcctggcaagacagatatgtttcttaggtatgttttaactgtcagagactgctccactgctctctctacagctttcctgctatttcagtcctggtgtaagccccttattttacaaacctaaaaactaagctctatataggttaagtccaaggttacatggctcattgctgaactgagctgtaatgcatcattgagaattgcagtycttttaaccaaaatcagttcacaaacactgtagcagaggctgct

SEQ ID NO: 910511 - DNA, 642 bp, Homo sapiens
tctacaaattttcatatgtggtgttttcaccttcaaaagatttcacttttgatttcytctttaactcatcagatatgcagaattatacattttccaaatatttatgaactttttaggaatttttttggttaatgattcccaatttatttttagagaatatactttataagatttgaatttaatgaaacttgttttatgatcccaaatatagtttaataaatgtattgggtacactagaaaagaatgtgtattctgctcattgagtgtagggttctagaaataaaagatcaagtttgttgatggagttattcaaatattctacatcctgtagattttccatttacttattctataattattgagacgaaatgttgaaatctctgatgctaattgaggattttttctatttcttcttgaagttctatcagcttttttttccattttgaaatgtttgtctctgttattaacttgttattaacctttgttattcaatgcataaacgatttggcttattatatgttcagaaatctacttcaatggatattaacgtaactactccagctttcttctgattagcggtagtacatctttttccattattttatttctatttatttctttatatttaaagtggatttcttg

SEQ ID NO: 910512 - DNA, 504 bp, Homo sapiens
ggtggtgcctctccatcttgatagtttaaaatttctatatttttccatttaaaacttctcaactccctattgaaaacaatggttataaaaactgaaatccattcttacagcttttgatgagagcaaaatgtgcctttttctccctgtttttacgtgagaacctatcaatagatggctctgagaaaacagaaatcccaggaaaagaaaaattcgaaaggaaaaaaagccaaattttaaaattctctagagtctacagtaatagacagtagcaaagtagtgcactctaaagaaccagggctacatgtcttcattgcaacttgaaaagtctgcagctctatactgtcctgattacctgaggacactcccttgagtaaaacaggtttgccctgtctaagcattggcaatayaaaaacaatgaaatttttaaaaaggaaaatgttttcctcagttaactttatgataaatgctaatccttagggataaaatgaaagagtagataaagta

SEQ ID NO: 910513 - DNA, 632 bp, Homo sapiens
ctcaaaatcataagagctatttatgacaaacccacagccaatgttatactgaatgggcaaaaactggaagcactccctctgaaaactggcacaagacaaggatgccctctctcaccwctcctaatcaacatagtattggaagttctggtcagagcaatcaggcaagagaaaaaaaataaagggtattcaaatagatgatatgattgtatatttggaaagatgacatgattgtatatttagaaaaccccattgtctcagcccaaaatctccttaagctgataagcaacttcaacagtctcaggatacaaaatctatgtgtaaaaatcacaagcattcctatacacaaataatagacaaacagagagccaaatcatgtgtgaactcccattcacaattgctacaaagagaataaaatacctatgaatacaacttacaagggatgtgaaggattcttcaatgagaactacaaaccactgctcaaggaaataaaagaggacacaacaaatggaaaaacattccatgctcatggataggaagaatcaatatcgtgaaaatgaccatactgcccaaagtaatttatagattcaatgctatccccaccaagctaccattgagtttcttcactgaattag

SEQ ID NO: 910514 - DNA, 632 bp, Homo sapiens
ctcaaaatcataagagctatttatgacaaacccacagccaatgttatactgaatgggcaaaaactggaagcactccctctgaaaactggcacaagacaaggatgccctctctcacctctcctawtcaacatagtattggaagttctggtcagagcaatcaggcaagagaaaaaaaataaagggtattcaaatagatgatatgattgtatatttggaaagatgacatgattgtatatttagaaaaccccattgtctcagcccaaaatctccttaagctgataagcaacttcaacagtctcaggatacaaaatctatgtgtaaaaatcacaagcattcctatacacaaataatagacaaacagagagccaaatcatgtgtgaactcccattcacaattgctacaaagagaataaaatacctatgaatacaacttacaagggatgtgaaggattcttcaatgagaactacaaaccactgctcaaggaaataaaagaggacacaacaaatggaaaaacattccatgctcatggataggaagaatcaatatcgtgaaaatgaccatactgcccaaagtaatttatagattcaatgctatccccaccaagctaccattgagtttcttcactgaattag

SEQ ID NO: 910515 - DNA, 639 bp, Homo sapiens
gtagatagatagatagatatagcaaattacacctttccttggttaacacatctaaagttcttgaagctatggtttcaaaacctatgatattttcttcttaagtgcaggaatgctggaaaattaaaaacttaaaaactagtgtgtgtacaatttactggataccaacaatcatgaaattgtttctttagaattccaagtatatatacatatatatatatgcgcacacatataattaaaatctattttatttgtccatttatttatttatgaaataaatattatgaatacaaaattactttgagggaaaagtacctctttagatactgaaagataaatactaaaattaatcccaactcaacatatataattttatgtattatattattattaatatgtattatattagctatatggtttatgtataaaagaccttgccaagctattcagatatttaccttattaaatacttatttaaaatatttaataaatattttcttaaatatatgtattcatttatattatgaattagagatagaagacatgtatgaacttgtttttycttccagtttaacagaatactaacccatatttcagttctccatattgatagccaatacacactaaaaacacaccaattat

SEQ ID NO: 910516 - DNA, 587 bp, Homo sapiens
ctaagacgccagtgtaaaaatgtaaatatgatacattgtgatttttactagaatagaaattccaacaattaaagcctctcacaagtagaagagatttcagagtaaagttgtaagctttcccatcctaggagtttcgagcagatgctggatgatctcttggtcatgatagagtatactggatcctagcattagatggggatatggactacatgacttgaaaagattctcttcctgggatgcttagactgtattagtttctgtagtagctacaatgcagtggtagttttggggttaagacagaagtaatgtggcagatattcctggttgcatccactaaattcaatctctgcttcttaattaggagaaatccaattttgtcccaactatgcccagcttaaagtacacagcttgtacacagcttgtacacagcttgcggctataggtgggtttgtggcacaattctggccaatgagattcaagatygagttaccaggtggggctcctgggaaagcttattaaatggggctgagtaagggcctttttagcttttatcttttgtcttttgtcctttctcccatttttatttt

SEQ ID NO: 910517 - DNA, 613 bp, Homo sapiens
tgtaagaaattttggacaaaatttggacaaattaactaccaataggaatgataacagcartaagtagagacaaatcatatgttaaatatatgaatttataatcacacagatgcacaagaacacacccatacacatgcaacaaatagacaaaaaaatagtgagatgtgagttttggaggatgctagatgtcttagtccgttttgtgttgctacaacagagtacctgagactgggtaatttataaagaccagaaatttatttggctcttttttggaggctgggaagtctaagactgggcagtccatccggtgaggttgtcatgctgctgtaactcatagtgaaaagtataaggaggtacaggtgtgtgcaaagccatcacatagtgagagaggaagcaaaagagtctgggaagccaaactcacttttataacaacccacatttgatgtccacctgttgtagatttgcatcctgacctagtcactttctagctgtgtgacctaggacaatttacgtaatttcttagttaaatttttctcaactctataatagaatgaataatattctaataagattgtcaggagaattaaatagtctatatatgatattgttgcac

SEQ ID NO: 910518 - DNA, 508 bp, Homo sapiens
tggattgcttttcctacttataacatcagtactgtactagttcttgagccagtcctattattgtcaggtcctctagcaytcacttatctagagtcatgtctctagatgggatccagagtctagctgttacagaatggttttctttagttgtctttattcttctgcccactacagtctagaacctgggatttttttttaagcttatcacttataaaatttcttttaccctactgctaactcattatttgtccaaccaatggaataatgctttagtctaacttttctttatattttttcttcgttcctatgtgttgccttgacacaacttccaatattggactgtttatttggggctgcacctaacttctgccaaccctttccccggaagcctcctctaagctaaaagcctggattatgctgtttacagatagatcttcccaaaccataacaaagccatcctgactcctctatcagcgcctctccagttggatgggttccatctgctagc

SEQ ID NO: 910519 - DNA, 578 bp, Homo sapiens
agagtagtgctctgttttaaacccaagtaactatttcaattggctatggcaaactctgagactgttgagtgctaraaaaatagtttatttcaggacttgatcaatatgagaagggctaaaactacagctcaaagaaaactttgaaaatcaagaagttcattgagaaaaaaagacaaacaaaaatcgtttaattagggtggattctgttttgtaaacaaaacctttccatatttaaaactcctccttgtgcaaattaaagatttaggggatagattaagaaactcatgtgtcccatggtaacctcaggtataattgaatgaataaaaattgtaattatttcataggcatactattaggtcttaaaatatttatgagagaatgaaagaacatagaagttacaatttccccctcttttagtagaaaacaaccaaagtacagataataaaattccccaccccaaaactttactcacctccttggaactaagattgagaaaaataaatatgtaaataattcccagttaataactaaactgagggcatgtgaacaaattcacagttaacattaaatgttttgga

SEQ ID NO: 910520 - DNA, 603 bp, Homo sapiens
tgtcctcacctgcctccttgtgcaatcatcacaaagacaacttgccctgtaacggaaagtaaaggtacaccattcaatgggctctgtcattcatggtcttcatttgtttagtcctacagatgacyaaaatgtaatccctagattctaactgggtataaaaggctgcaaattgctatttcagaaactcttctcagccacagcagcatttgcagacatgaacatgtatgtcaacacccttcttcctgaattcactgcagacattactaaatgaacacagatgttttattctctaagcttatgtgcaggtccctgtattattcccagctcatcattcctgaaacactaatgggttccacccttctcttctgctattcaaattttgttgcttgagctttctgtttcacaccctatgtaaccctatgaaagctctgcctttttaattttttttttcttttgggagtggaggaggaggtggtggaagtgggtagagaagaagtgggtagggaagcttagagatgccctggaccaacaatatttgcataggaagtttagagaatcctagaaggtgctgtaacatgagaaaatatgtctgctggaacatca

SEQ ID NO: 910521 - DNA, 617 bp, Homo sapiens
ccaaggacctcgtggttttgttttgttttgttgtttgtttgttttgagaccgagtcttgccctgttgcccaggctggagtgcagtggtgcaatcacagctcaccgtaaccttgtcctcctgggctcaaacaaggtgctctgcacctcagcctcccaagtagctaggactacaggcacatgccaccacacctggctaattattctttttaaaattttttttgtgtggagacagggtctcactatgttacacaggctggtctcaaacttttggcctcaagggatccttggcctcccaaagcaccaggattataggcatgagctaccctgcccacgctgacctcttctatttgtaaaggcagctcctaagaagtaatgctgtagttagccctgtagacaagtcaggtgtctcccactgtactcttacattgcctgggacatgctctaatattgcacttatctaattcacatgtaaaagttaactgtttttaaatccatatccttgcytagaatgtaatctcctaaagggtaaggctttgtcttattcacctctgtgccctagcacttaataaagtgttgacacataggtcagtgcagtggctcacatctgtaatcctaga

SEQ ID NO: 910522 - DNA, 658 bp, Homo sapiens
cctcagcctcccaagtagctgggattrcaggtgcctgccactatgcctggttaattttttgtacttttagtagaggggggtttcgctgtgttggccaggctggtctcaaactcctggcctcaggtgatctgcctgtctcggcctcccaaagtgctgggattacaggtgtaagccaacgcacctggccagaataacgtttttgaatgtacaaaataaaatacttaaaagagtacaaaggaaactgattgtattaaagttaccaaagtgtaaaggaatttgtagaataaggcacacactgtcttaatgagatcacgtggtggatctaataactaccacaatgacagaggggtgatgagagatggacagaaatcatattcgaggatatgtgcaataatgcgatatgacaaacacctgcaatttcttctggtgacaaaattgtaagtactgattatactaccatgttttctggccatattaagaatgaaaggaaatgctaaaaatttccattagttactagaaaaaaaatcaagtgatttttcccatccaggctcacagattccctgaattctcttgagggattctgggtgtgggtgtgagtgagtgttaatcccaggtgaagcatcaggctctgtggtcctctgtgatcatctagaattcg

SEQ ID NO: 910523 - DNA, 616 bp, Homo sapiens
ggtgccataagaggtaaatgaaattatgaaaatccatattaaagagtgactataaagttgaatcaacctggttggtatatatgaaagatctagaaaagcacattaccctagtttaaataacaattgtataatttwaaaaaaaactattataatggtaagacaatgaaatttttaaaaatttttttgagttcacggttaatgtaaaattaagtgtctttttccccttatattttacatctgtggtaatattttatccctaaataaaaaagatattattataccaggccagaagaaatatcttcttattacaaattggatattgtaatcagatagaacttgtttcagtctaggtgctatctaatatttgattttctaatcacaaccaactcactttatctctctgagccgtagttttcttattttgtaagctattgtgaaaacagttgttgcagaggttaaatgtgttagcacaaggaaaacactgtgcctatcacttagtatgtcctcaaagaaatcaagcttttattagatacttgactagactgggtacttcagaaggcaattgcctgttgtggccaaaattctaatataaagtcctgtagcgcatgtttgtact

SEQ ID NO: 910524 - DNA, 655 bp, Homo sapiens
tttgggtatgtctttatcagcagcatgagaacagactaagacaatacctcaccctttatgtccaacaacaatggtcttcatgaccatctttgagaagttcaagtatgctctgatatcagagccttaatacctgctgttttctgtacgtgaaatacctttccaccagctatatgtgtagcactcaccctcacttcctctaggtttcttaaatgccactctcttggtgtagccttggctacccacattattttaaattgcaagttgggaacctcatattctttcccacagtagatcccaaaggggcccagtttcagctctagaccctcatgctgcatgaagggctggtatgttcctcctgggagatgcacaccctctaagccagtgagactgggctctccagcctctgtcccacaacatatcccaatgggacccagtctcagctctagcttctcatgctgcatgaagggctgacaggttccttctgggagagacatgacctctaagccaatgagactggactcttcagcctctgccctacagcagatcccaacagggaccagtctcagctccagccctcctgctgcagtcaraaaactatcccttttatgcagggacctgctggtagacaacatgcctatctgagccaatgtgatag

SEQ ID NO: 910525 - DNA, 619 bp, Homo sapiens
tacgctttgctaaaaagttcaaaaccttggtgacttacttaatcaggagagtggtgttgctccaacaaaattatagatgatgaaatacaaagatactccttataagtaataacagacatctgagttgaagtgtacaattgagggcggatggctgttgggaactcctgcacctgggtcaagtgggctggtgtttcaaaatttaaaaaccaaaaaccaaaacacagcacagtggggatcttccagaacatgtagctggaccttgaaagtgacactctcctagtaaattgagttcttcatcagcagggctgttgggggcaccacctgcttgccagaacaaatcaccaacaggaaggggacaataaattatttcatggatggaccaaaaaggaaacatatttcccccaattcctcagccacctacaaccccagagatacaaagacaaggaagatgagaaagggaacagagtacagagacatgtgagagagggaaatcccttccctattccaatgatagtaaaaatagctaaaacttatatagtacccataacrtgttaggcatgctgtaagtgctttaaatgaataactcatttaattctcacaacagccctgtggggtaagt

SEQ ID NO: 910526 - DNA, 621 bp, Homo sapiens
gtgaagtgggaaagagcactcaaaggaaggtgagatgaaggcttaccaagtccctgagagaaagagagaccaaacagaaaactagatttgtaaaactagcttctgctacagtgaaatctctaaccacagaaacaaaatgaacaaaatgggctcctcaatttatgacccaaccccagctcccacaagcaactggactactgaaaacagtggattcttgtcttagatggggttaggttctaaaatgagttataaggctaaaaacatccctaaaaatcccccaaattgcatatacagtatatgggcttataatctctaaataatcctaacacatcaaatatttcatcaaaattgaaacagaccatcatttttataactggacctaaattagcataaatttctataattaagcacccagtgacataggtggcttgctttagaggtatttgcatttaaaataggaagaggacaactagaagaagctctaaatcctatacttaaaaggtctgtggaaaagagtagtttgatatctctcatttcttgctcaccttggaacctaygtggttggaaaagtaccctgcactttttaacatttataattttttcttttgtttgccatagaaa

SEQ ID NO: 910527 - DNA, 609 bp, Homo sapiens
ataatgactccagatggaaatctgagtctactaaaggaaggagccctttgcactgctagactctccataggatgctgaatacaagtagtgagagctgacatcctcacctagttcttcctctggggtgaaacyatccagtctttcatcattaagaataacgtccagtaaacatcaactacagggtttttgtaggtgccttttatcagtttaagaaaattcacttctattcctagtttttaggaatagaaatagactggaagtttttataaggttgatggattttgtctaatgctttttccaaatatactgaaataatgatgtgctgttgtcttttcatctgttaatatggtgagttatactggcccatttttaacgttgaagcagccttgcattcttgggataaatttcactttgtcgttctgtgcatatatttatacttgtgttgcatatgtatgtatgctcaagggcacgggtttctgtgtgtggcaatgcagtggacctagattagaaataaaaaaccctctaaaaaagaagaattaagtaagatggctaacaatacctaacttcaagacctatcgtaaaggttcagaaattcagacggtatggtat

SEQ ID NO: 910528 - DNA, 553 bp, Homo sapiens
agtcatggttagattgatagttttactgaaagtaatttatcaaaatccccattagattgycttttaatgtcaacatattaaacctgttccctgagagatactttcctatttgttctccttgccctttaaatatcatttggtgccagtgagatgaagaatagaaaatgtatatcttttaggggaacttcgcaagcctgagatcccccactacatatagtcattcagaaaatgtttcttaagcacttactacctactttttctcagacattgtaccgggacatatagattaaaagaaagagtctttagtctcaaggattttacagtctaatggggaagcagatgtgtacaaatataaatgatgcaatacagaaattattgtggcatggtatacagggagaaatgaaagcattgaagaaggcaaagaagtcttcctcgggaagtcatggcttcaaagagaaaagtaggctgtgtcttaaaggataagtatgactttgccaagctaatttagggaactttgtattctaggaagagggaacagaatgtgcaaagcctc

SEQ ID NO: 910529 - DNA, 637 bp, Homo sapiens
tatgaaaatgatattgtggaaaaattattctgagatgcygttggaagatatggggttttaacaaaaagtcaaagaaaattaacgaaatttaaaaaaataaggcaattaataactttaggaaaaacaaagaaaaactataaaagcaaaactctgagtgatgtttgcaatgacatactgatataaacaaaattatgcatatttgctataaaatgcttggaaaatctgtgtggcaagataggggtttatttcacttttacctctctttgtgtctcttcccttggtttggaggtagcttttggtgataatcgagatttttcaagcataatatatcatcacagttagactatgaaaaattataaatataatattataccaaaattccttatcttcaatacaaaaatccaaaatcttctgaaaataaaggatttttgtaacccactggcacattggcattaagacctaacttgaattaacataaggctataacatttttattcaagctatttaaggtgaataatcccatgttttccaatagatatattaatatgtttgattctgggtattttcccagactctgctggtaatatcaagtaatatgtattattatctttaaataggaagattccaaaacatatct

SEQ ID NO: 910530 - DNA, 638 bp, Homo sapiens
aaacagttctgatgacaaacatattttcctactgactctattagtcttcatgtattctaatatatttcaattcaagctacatttctcaggctgtttggygtatacataaaatgctccaaaattagaccacatgtcctaatttagggtttaaaaattcagtttgcttatggtgcctgaaatctgcctgttgcttcatccatgatatttgctgagtccttaatccatgcagagttttgccctgggcacagaaggaggaggtgaaagagaataattgaaatgcattttctaaggctgctttcaaagtgttcaatctttaggtataacaaaaatcatcaattatcggaaagatatttactaatctaaaatcagcacatgttaaatattcaacaaatatgcattaggttttgacacaacacaaagcactatattggacatgtgggcaactgggggaagaatattccaggcagagctgtccaagcatacaatgtgagagacatagaaatgtcagatgtggttgctatgcttataaagcattaggcttactgaagaaacaatgtgtgcacacaaaactctgaaataacagtatgaaataatatgcaatcaaatatcaaaatgccttttcagcccttcagctccaa

SEQ ID NO: 910531 - DNA, 638 bp, Homo sapiens
aaacagttctgatgacaaacatattttcctactgactctattagtcttcatgtattctaatatatttcaattcaagctacatttctcaggctgtttggcgtayacataaaatgctccaaaattagaccacatgtcctaatttagggtttaaaaattcagtttgcttatggtgcctgaaatctgcctgttgcttcatccatgatatttgctgagtccttaatccatgcagagttttgccctgggcacagaaggaggaggtgaaagagaataattgaaatgcattttctaaggctgctttcaaagtgttcaatctttaggtataacaaaaatcatcaattatcggaaagatatttactaatctaaaatcagcacatgttaaatattcaacaaatatgcattaggttttgacacaacacaaagcactatattggacatgtgggcaactgggggaagaatattccaggcagagctgtccaagcatacaatgtgagagacatagaaatgtcagatgtggttgctatgcttataaagcattaggcttactgaagaaacaatgtgtgcacacaaaactctgaaataacagtatgaaataatatgcaatcaaatatcaaaatgccttttcagcccttcagctccaa

SEQ ID NO: 910532 - DNA, 637 bp, Homo sapiens
tttcctgtacttctttttttaaaaaaacttatattctgagtctgtcatctatttttgagtgwcctttctttatctacattgtattaggtactaatggggttggggaaaactaaaaaaaaaaaaaagaagtcatggtcactgacctcaggaggcttatgatgtgtttctcttagtcaagaaaaactgagatcaaatagtttcaaatgatactgatttttttggaacctagtgtgtagttgtttacccagaactctagtcagtgcggaggactgattgggaatccagagtgtgcaatgaaggtgaaataaaagacagaacctatttcctccctttctgtcatctgctaccataggttttggttgattctatgacaataatactttttgtcataatgcttacactgtaataggtgtgaacagagtaatcagaaacacctctagagctatggcagattgatgtttcttggagttacacaggaaatattaaagtttttgtgttctgccaaattatggtgctggtgatgggagaattaattttcatgttggatgccagtaaagaggggtattctttttttggatgatatatgcctttcctttaatttgtgtattcataaatgtttattgtgcacctaatatta

SEQ ID NO: 910533 - DNA, 617 bp, Homo sapiens
gcagagttcatattcctctagaaccagctcttaaagggttggtctcttggtgtcattcacacaagacctgtgcggtaatatgatatttacttctatttccaagaagaagtaaaaaaaaaamaaaaaccttatactgttctaccaaggagatttctcacccacacacaggctgacacctgttttacttattactgctgacccccaatgttggataacttcacatcagctgtaaatcccacaaactgatttaattggattcctccacattttgtatgagaaagcagaagcccagggaaacaaactggcttggccagtgaaacccttagtagcagagccgggaccaggacccaggtctccgaggtcttgtctttactggttgctcttctttggctttgcggcccctgtagtgcctcgcacaaacacatttcataagccttcactgcttccttttccagttaaacacttcgagcttcctgcttttttcttttgccatatgcacagacacttgccccagccatctggggaagggaaaagtcatatctggcaggggaacgagtgtgcagatgcattctttttataattactgaaaagaaggttgttggaggtatgatttattt

SEQ ID NO: 910534 - DNA, 600 bp, Homo sapiens
tgtttactactttgaattccctatttgatggaagtgaaatgtgatcttgctggacagtagaaggaaagactgcctgtatttcatgctcatacctactaaagcatcagactgtttcatatttaagagcagtttaaaaagcacgtgagggtcttcttaatcttaattctagtgtcttaaaaaatgtatgtggagattatatgtttttgagacactataattaaggtcaagaagggaggtaatttgcattccccttgaaaaagctttgataccagctctggggactgaggggcattgtcagtgagagggccccacacagaggcttctatgtctccagcctgcagcctggagaactatgaagacttctgtttagcctcacacagaggaaggcagaataaacaaactgaaatggcccaaacaagctactgggtttttccctagacttagggtaaggaaaaggatcaggcactgatttgmcaaaaaaaaaaaaaaaaaaaaaaaaagtgagcatacagaaaaatatttataggacactctatgccatgctcctggttcactgcagattatcaatcagtggaaagtgatagaagcaatggatcagca

SEQ ID NO: 910535 - DNA, 605 bp, Homo sapiens
atcagattttacctgtaaagttcttaaagcagtacttggccaatgtatcctaggttaggatactgctggtattttgtttccaagatgcatgctactgatttttttcccataagaatttttagcatgaaatttatttcagtgcattacagttttattttcaaaggaaacttaacctagaaatcaaggcaaatcccaaaagttattaactaatcttttcagttctaatatcatttataggaaaacaggaaaagaaaacttgtagaaggaaatagtgcaaatggagaaacaaactggggtgagagaggagagaataaggaagggtgagaagaatgaggtggagaaatggagagaatttgggaacattgtatagatagggtgataaacagaaataggctagagagatagaacgtagacatataaacaggtacagagataaacagagaattaaaatggaaagagtgagaagctcartatcttaaagggaagcttgtccattgatcatattgtaataaatgtatatatcatgtaaaaatccctttaagcagtacaaaataataccagttatatcaaatatttaaaatatctattttgtttcatagttttta

SEQ ID NO: 910536 - DNA, 560 bp, Homo sapiens
cttgcttttcacagccaaatatcttgaattatgtttctgtccattgtctcttcttccttatccttcatatatycgtcagcccactgctccctggatgcaactaaggccacggacggaagtaacattgctaaatccagtgcgacctccccggcttccacttccttgtcttctctgcagcattgcgtggggctgccctttgcccccacttcccattcttgatcttccccgctcccctctgccctctcccatctcaacagccactgcctctcagcacccttggcagcctctttctctgcccaccctttgaatgttcaggggcctcagacttccatcccagggcctcttctcacccttggtgatctctctgtggttgacttttcatctccaagagttagcttagagtaaaagaagcaatcccagaaattcgtcacttaagaagaaatgtagcgcttctatctaagaggatgctgattacaatgagaacaaccctcatggtaagatgctgccccagctatttgcttgttagactacccatgcatcctcaagcaccagctcaattt

SEQ ID NO: 910537 - DNA, 560 bp, Homo sapiens
cttgcttttcacagccaaatatcttgaattatgtttctgtccattgtctcttcttccttatccttcatatatccstcagcccactgctccctggatgcaactaaggccacggacggaagtaacattgctaaatccagtgcgacctccccggcttccacttccttgtcttctctgcagcattgcgtggggctgccctttgcccccacttcccattcttgatcttccccgctcccctctgccctctcccatctcaacagccactgcctctcagcacccttggcagcctctttctctgcccaccctttgaatgttcaggggcctcagacttccatcccagggcctcttctcacccttggtgatctctctgtggttgacttttcatctccaagagttagcttagagtaaaagaagcaatcccagaaattcgtcacttaagaagaaatgtagcgcttctatctaagaggatgctgattacaatgagaacaaccctcatggtaagatgctgccccagctatttgcttgttagactacccatgcatcctcaagcaccagctcaattt

SEQ ID NO: 910538 - DNA, 617 bp, Homo sapiens
tgaaaacagcagacccaggagacaaaatgagcagaatacatggttcagtgagatttggtataaaaagcgtgagcttgagggtcactctgttgggggtttgaatcccagtgttgcagatccctttgccctttccatgacagtgcctggctcccagctgccagtacctacatccttcacctgagggcttctgtcacatcaaagccactctacctgcccacatggtaggtcaaagctgccagggaattaacactccacacacttaacctaagaattccggctgggcgcggtggctcacgcctgtaatcccagcactttgggaggccaaggcgggcggattgcctgaggtcaggagttcaagaccagcctggccaacgtggtgaaaccccgtctctactaaaaaatataaaaaaaattagccaggcgtggtgccatgtgactgtaatcccaggtactcgggaggctgaggcagggaaattgcttgaaccagggaggaggaggttgcagtgagccgagatcgtgccactgcactccagcctgggcagcagagtgagactccatmtcaaaaaaaaaaaaaaaaaaaaaagaagtcttcaaccattgcctcagcatacaggtat

SEQ ID NO: 910539 - DNA, 593 bp, Homo sapiens
ccctgggatgtaaccatcattacgctctttgattctatgaatttgaytgttttagatgcctcatataaatggaatcatgcattatttctgtgactggcttatttcacttagcatgtcctcaaggtgcatctacgttgtcacatattacagaatttctgtcttttaaaaggctgactagtacttcattgtacgtatataccacattttctttatccacttctctgtcaatgaagatttacatttttcccatactttggctattgtgaatggtgctgcgatgaatatagaggtgttaatgtctcttcaagattttgatttcaattcttttggataaatacccagaagtggcattactggatcatataattccttgggattttttttaatgtaaatagtcatattatctgcaaatagagaaacatttttacatcttgttttccattctttgtcttttatttcctttctttgccttattgcaatgactaagattttcagtacaatgttgaacagatgtggtaaaagcagacatctttcattttttttctcaatctcagagaaaaaacaattcagtgttttatttactctaggtttct

SEQ ID NO: 910540 - DNA, 630 bp, Homo sapiens
gaacctattttcttgagatgggttaaatcagtgcataacagctaaggagagtatcattttgaattaagagagacacaaaatggctggacaaagattctcagctatattccataattctcagagaatccaagtccaaccccttgtattctgggaaggtgctattatgtggtttaagggaagcttaaaaatatcagcttcctacataactggtaataagttatttaaacagtgactctgcttcccagaacttctaagtgatacattttatcctgattaccactgagaaacctgtaaactctgcctcctgaacccaaaagagaaagccaaaatatatatgaatgatgtgtataatgtcagtcttcattattattaatacaaaatgtcactgcgatacatcgttagggagatgggttttttaagacattcgggtaagttcaggaaagagactgccagcatcagtacagttctaagaacatagtaggtattcaggtgttgattgtactcatcatttggatctgaggtttttayttcctggaaaaaaaaatagctaccacatttatttggcaacagcaaaaggccagtttctatgataggcgccaaattatatatgtggtttcatttaagttaatc

SEQ ID NO: 910541 - DNA, 627 bp, Homo sapiens
tgatctagagcaatagaagggtctggtagctggctagattatttggggaattcaggagatgtcaatcattttttttaaaaaaagsttatgtttaatgttttaaaaacttatttttaatttttaatttttgtgggtacatagtaggtgtatatatttatgtggtacacagaatattttgatacaggtatataatgtgtaatgaccacatcagggtgtatgaggtatccattaccccacgcatttatcctttctttgcattataaacaatccaattatactcttttagttatttttaaatgtgcaataaattactgttgactgtagtcatcctgttgtgctatcacatactagatcttactcattcgatctaactatatttttgtacccattaaccatccctatttccaccactgcccctccattcccagcctctggtaaccagccttctactctatctctgtgagttcaattgttttaatttttagttcccacaaataagcaagaacatgtgaagtttgtctttctgtgcttggtttattcttaacataatgtcttccagttccacccatgttgttgcaaatgactggatctcattcttttttatggctgataagtactccattgtgt

SEQ ID NO: 910542 - DNA, 608 bp, Homo sapiens
catgatctctgttcctatagagaaaaaaagaagaaaataattaagaagcaaaatgtttgagcaagaaggatacattgccaaaaatacaatttgatgtctacttcttcaggctgcaaaaaaaaaaacacaaacaaacaaacaaaaaaacaaaaacaaaaacttacagttataataattagctgcagcagtgatgtcattagaagctcatgcatttctggttatagaaactgaaaattgcacatcacacacagaatgtgggtgagattttttctcctaatatgtgtggatttagaatagaaccacctatattaaatgaggtatacacaccagccaagtgtatttcatatcatctcagccttagaaatctcatcagagttgtcatgtacctggactacttcacatacctgaagtcacagggtttctatgtcaaaaaatgacctttagtggccttgcctccactccatcaactactcactccccccagtgtagagactcgaacatagtaggggttcaagaaatgyttgtcaaaataaaataaataaaactcaaacacagaatgaggaaatgactggcctctctatctagtgggaaaaccaggtttaaaatgg

SEQ ID NO: 910543 - DNA, 601 bp, Homo sapiens
aatgagccccctcccaggagtcagatgggtcagtgtcctatgagttatcctccaaatggaacctgtaacagagtattcaatctggcttcaatttcattttgaaatagatgattccaaaaatgagtatacttgatagtggattaaaacaaaatgagccccttttggaatttaagcttgctatgcttctcttgtttacagtactattctaataaaagtatattagaaagaaggctgggcacggtggctcacgcctgtaatcccagcactttgggaggccaaacgggcagatcacctgaggtcaggagtttgagaccagcctggctaacgtggtgaaaccccttttctactaaaaatacaaaaaattagctaggtgtggtggcgcgcgcctgtaatcttagctacctgggaggctgaggcaggataatcgcttgaacccaggagaaagaggttgctgtgagccgagattgtgccattgcactccagcttgggcaacaagagtgaaactccgtctccaaaaaaaaaaaaaaaaaaaaawatatatatatatatatatatatatacagcaaattgtatactttaaatataaatatatgcagtttat

SEQ ID NO: 910544 - DNA, 580 bp, Homo sapiens
taactttaacgtaattcctatcaaaaatcctagcaaggttctcagtaggcataaacaaacttattctaaaatttatatggaaaggggaagtccttaaaatagccaaaacaattcrgaaaagaataatgtggaaggaactggtctacctgacttattatacagctacaccaatcaatactttctggtcagatgtgaccaagggaaacctcccagggatcataaataagtatagcagattgtttaaggaatttcactcactgccacaacaggaaatcttcaatattcttatcctacagagtatggtatatttgtggaccaatgactattttgagtttctaattctccccttttctaaaggaaaagatttatttgagttatctcattcctttatctagtagtttttgatgtgctggaagtatatatttgtcttcttagttctaggtcaccagaggacaacaagctacaactagacctgatggagaaaactatgtatcaagcagacattctggactttgaagtagatgcaattatgtataagaacaggtatcatctccccgggagagatggtgactgaattctc

SEQ ID NO: 910545 - DNA, 612 bp, Homo sapiens
tgtagaagaattccaaataaattatgtagatacaccactctaaaaaagggggagcacaaccccccgactccttcagtgcaagctcatgtaatgacttccagtatggaagggagggaagaaaagagtaaacttcacagtggagaaaactgacaagcactacttctaccaggtttcaggttaacaccaacagtcataaatcgtgttgacaatacatacccaggatatgatgtggtgaaaatggcagcacacttgcatggtcttcctcccaataacccatatcccaggctaatcatgagaaaaacactacatatattctaacagaggaacatcctagaatacataataacctggacacctggattccttaaaaatgtcaaggtatgtagtagcaaagctctttgaaaaaccaccaccaaaaaatctcaaggtaatcagtaacaaattacaattgtacttaaatgcaaatggtaaatctgaggcagcagtaaggtagagtggaaaggctttaggggaaaaaaaataaagtctgagaaactgtcacagcaagaggaccctraggagacatgacaagtaaatgtaatatggtgtcctggatggcatcctggaaaagaa

SEQ ID NO: 910546 - DNA, 640 bp, Homo sapiens
gaggctgctgaatcagtaagtaagtaacctctgaggaatcatggagaaagaagaaaatatggaaaggcaagaggtaggcaagtgttccaacttcccaaggaaaggtaaatcaggtaacctgttcatctaccatcaatcctcaaaagactataattatgccattttcaggatggttgataaaccactaaccacgacgtaaaagcctaaaatcctgaggaccaaataatagcaagcaataatagcaagctaaccccattcctccctaagggctgagagactatccagaataaacttgacatgaaggagtccaatcccttgaaatctggggtgagattcaattagctgattttcatattataatgaaaagaaaaattttcttagaaaaagagggaaaaaacttaaattccagtagtcactggacatgagagctgacaagggctttggatctgttcaaagaccttcccttatatgctgactgataaataaagggaagcagaatgggatatggtaggagttcaaatatgtgcccccatactgagtagataagtatctttagcaaattacttcayctatttaagacttggtttttgcatctacaaaatagtattataatactgctatctacctcagagaactctgt

SEQ ID NO: 910547 - DNA, 398 bp, Homo sapiens
aagtgttaataaagacaagtatttattattatatcaaaaacttggcttttaatatatttttrttactgatttccacataattattttatctatatagttctgctaggtaaaacaatggccaacaaagaagcctacaccgtaatccccagtacttgtgaatatgatcttataaatggcaaaagagactgtgtttataattaaggtaaggaaactgctggggagatcccaccaggtggggagactatcctgaatcgcccagatgggctcatctaatgtgtttacagaagcaaagaacctttcccagctgtgatcaaagagggctatggaaaggagttgatcacctttgcagcctttgaagatggaaaaagaggaccatgagccaaggaatgcgggtggcc

SEQ ID NO: 910548 - DNA, 568 bp, Homo sapiens
taaatgcagagtccctacttagtggacccaaatcaataaattcagcttgatccaactctatgttccttccaccattatctcatgctcttaatatccattgccgtgcttgttctctggattgccatttatataaattagagaactcaaaccgttcttttcgagtgtagcacacctcctcatgggtcacactctcaacctcatttccaggggctcaccgggactttagtgtggttttaggtctagaagcaaacaggggtgttgggggtggctcctgaagagaatcgacattattttgcctggcaactgcctcaggagaggccatcactgttgccttaggcagcacagagtttatctcctcaggcaacggtggaaaggctgatggcagcatgggtctgggaggggatgttgccactacttgggatgagaaagctgttccttttggcaaaaaaggttcatcagagttcacaaactcagtgtccccagcttcatcagggtcctcccacgtgtycccattccaagtttcagagtcccattcttttctaatcaatgccctcactttaacagtaaa

SEQ ID NO: 910549 - DNA, 626 bp, Homo sapiens
aagtttgctcatgtgcagctcatctctgaaaacagctggatctggcttcaaggctggtccgcatcctgcttgctcttattccaggctctttggcttctcaaatgcaaagctgctgttttgtgcttcttgcagcttactttggctctccttgtgaatataattgaaatttcacagtcatcagtttttaaaatgattttctgcgctttggaagtcagtgcgagtcacaaaatgtcttcagaatattctcaaagcttcttgcagaagtgaatctgttttcttcctgcctttccacaagcatttgctaagcccctactgtgtgtcaggctctgagctcagtgcctggaggaggagggggatgggaggcaaaggaggatggggcggggccccgcccttgctgcagtctagtggggaactcagacaagcacgcttgcatccaggagcagaggcagctgtgataaataccaggcagagcgtccaagtgcagcgggaacacagagacyggcggacggtgggtgggggaagtgtggaatgctctgctggcttgatcttgcccctgtctggaaaccattgctctgagtttctaggttacagatgtggagatgttttcaagggactgggaaagtttt

SEQ ID NO: 910550 - DNA, 665 bp, Homo sapiens
ccaatacattccttttccttttaagttaactggagttggtttctattgtttgcaaccaagaactcttactgatgtatacccccaaccaagtcatttaatctttacatttagccaaaaataggcaaagtcaaattaatgtattttatccatttccaagtctcaatgcaagaaaggtctctaactctaactaggacctataaaaattaatttggagataatttttccttctctctgatgtaaacttttacagaacaacattttgtaaatattttttcttattatataagcaacacttgttcactgcagcaagttaaggaatgtgaaaattataacaaacattttaattaccccaatctcatcaaaccaaaaataaacaacatattaaatttcctacaagatttgttcctaatgcaaatttgtaaaagaaaaaatacaatcatatttacagttttatcatcttatgtcgtgatcaaattttgacatcctttcatttattcagcaaatatttatgttttggcaaggatatggaaaaattggaactctcatacactgctgttggaaatgtaaaatgrtaaagtcactttggaaaacagtttgatagtttctgaaagttttaaacagagttaccatatgacccaggaacttcactgctaaatatgtatttc

SEQ ID NO: 910551 - DNA, 625 bp, Homo sapiens
agcagccaggtgaagactggggaagaaaacatcctacgtgaaagcaacagctgcaaaggccctrtagtgggcatgagctgggcacagtggaagaacagaaagaagacctggagctggatcatggtgagcaagaaagagtgcgaaacgaatctgatcaggcagccaccagatcacgtgaggtcttctaaaccagaggtagcaactcggactttcttctaagtctaactttctcaggtgttgtcgattccatcctgggacaccaagggcacatctcatatctacccaaggaagaaatgtagatcttgcctcttggtctgggggctcccaagatggggtgagatgtgggcagatgctgaactatggcaatagtgatggcaatggaggaggggagagaaaaaagaggtaaggagaggaaataggggaggcagaagatggggaagggagataaggtccaaaaaaaaaggggaagcaaggctaaaggctgtgagaatcacagggtagtttctgccattggcaaagagttacactcttaagaatggccatttaaatgcagatgttttcctctggccacatgacacttaacccaacctgaggaacagggttttcccccatgaagctgtcaggc

SEQ ID NO: 910552 - DNA, 601 bp, Homo sapiens
attaaaccttaaagtttcaaaaygatctcctttgagttgatgtctcacatccaggtcatgctgatgcaagatgtgggctcccatagccttgggcagctccacccctgtggctttgcagggtacagccctcccaccccaactgctttcacagctggcgttgagtgtctgtggcttttccagatgtacggtgcaagctgtcggttgatataccattctggtgtctggaggatggtgactctcttctcagagctctactaggcagtgccccagtgggaactctgtgtgggggctctgaccccacatttcgtttctgccctgtcctagcagaggttctcaatgagaactctacccctgcagcaacttactgcctggacatccaggcctttccatacaccctctgaaatctaggcagaggtttccaaacctcaattcttgtcttctgtgcacctgcaggactaacaccacatggaagttgccaaggctgggggcttgcactctctgaagcaatgtcctttgcccattttagccatggctagagcaactaggatgcagttcaaaggctgcacaatgcagaggtgccctggacccagcccaggaaacc

SEQ ID NO: 910553 - DNA, 559 bp, Homo sapiens
ttgctgtgtgggcagggtgatgaatgatcaccacagattcctgcccccacagcttttaagaggactttataaaatgcaactccatgtacaaatatgctttattttaaaaattatcagccatggggargtcttcatactcctggaatgcagaacccatgtgctgcctctgtctcccctatttgttggacagagtttgaggcaaaagtgatcagctcaccaaaagtattaactgtgtcagggaagagcacagaaatggataaggttctggggacctcattttatgatgtacactcgaaagaagtgtacatggttctcaggtcatatatgatctgagagcagggttgcatgtccattggaatagttttgtcagccaaagcctatttctttctaacaatgctagactggtcattcttcattcaaactatattcttcaagcttctattatgtggcaggcatgcaatacagtgcctcggatagtgcagtgaatgaggtggaagtggtcgcttccttacagatcttccggtcctaattcaaggaactgaaatatggttcagttctg

SEQ ID NO: 910554 - DNA, 601 bp, Homo sapiens
tgcttagtgtacacatctgattcttcatgagacacggatgactaaaattccatctcatctargaagcctttctcctcctctagtcatatttcatcattccatttatggcactcctatttattgcatggaatcttacatgaaatttcaactaagagcgtggatcattttctttttgataatttaataatttcaatcttctgtttcattttaaaggagtaggttgcatctactgaaatttgaagtttatagttagagctactaatgttagtttgggttagaagccatgttagaatccatactgtgagagagtactaaaattttacattacaatcctgaattcattttgaagtgatcatcatcattgtcttccttatcagacattaattgttctgttgtctgaaaagagatttggatacaaaagtgagggaaaaacagggcataaggaataattatatttagattattttaaactcaaaggaattgaactccatctatcccatagtggaaattctgtcacttatatagcaggatagagtgaagagttccatgtacttggaaagtcaaaaaaaaaagttcaaggagaatctgggactttaaggat

SEQ ID NO: 910555 - DNA, 365 bp, Homo sapiens
aggcccatgccaccatgcccagcaatttttttttttgtatttttagtagagacagggtttcactatgttgcccaggctggtctcgaattcytgagctctagcaatccatcggtctcccaaagtgctgggattacatgagtaagccactgcacctggcctatttttcttattttaaatagatataatagataacatgttttgaaataataatagcaataatgtattgaaagattacagcttatgtacaagtgaaatgaataacagtaaagatacaaagaatgagagaaagaaattaggagtgacttcttattattaggtacttgcactagccatgaaacagtattgtgttttttgaaaggagaatt

SEQ ID NO: 910556 - DNA, 591 bp, Homo sapiens
cctttccagagtgcaagacaatttcctcctcagtgatggggacaatgatagtgatccaccttgcaggggtgtcaattattcacaatctaaaagccctgagaattacgaacctcactaggaatatgtatacacagyacacttgtaatgtacttaattggcattctcctttcccctgccctgctacctgcaaatcacaccacaatgacacccttgggtttacctttggtcctggttattgacatagagcctgtctccctgcatcaaagatctgcctggatcacacaacagaagaacaaacctgccaggtgttgatgagctcatgacaagcaacctaaatggaattctgacaggccttcccagccttctacataaacataatgaatcaacacagaatacacacttagtaagctacaagtaaagcagaaagcaatgtatgaggataaagggaaaaacaacagattgatccagctcaacgataggaattgcaaaaatcattctgaatggtgcagggtgcaagtgaaatattccaaataaacttctgttaacaattgccaccaatgacccattcacctttggattctttttacttga

SEQ ID NO: 910557 - DNA, 614 bp, Homo sapiens
actaattcttactgttaagaagattttctttctatttgaaygcctgctaatgtcatccatggagataaatttttacctttgtgcagctacaaaaatctgtttctttactttgaaaatttgggtatatttttcaaaattttttatatgttcttaggttgttgaagtttattctgaatgtaatatttttacaacactttaatgatagtcacatatatgcccaagatcttaaaaaaaactcaaaagcattaaaaatcttcaaaactacaaaagtttaaattaatataaaaggttaaataattttatagtacgtgaagaactcttttttcacttgagcttcttctgtataaaattatgccttttgtaataaagccacaataaagtggacatttgaatcgagtgtggttgccttgatttcaaggccaatccagtgaacttgggagacattggtttttgcttctgtaaacccacccagctggtatccagcagtgaagaggttgtaacaaatatcacttgaatgaaaatggatcacagcacaaattcatttcaaccacttatccctaatatttgtccagaaccttaaagttttgcactgttgacaccagctttcacataga

SEQ ID NO: 910558 - DNA, 597 bp, Homo sapiens
taattttaaaaaatagtttcaatcaatakccaattaaaatttactcattatgattggctgataagtcttttaggcatcctttgatctgtaagatcccccagacccccactccatcctgcaatttatttgttgacaaaaatcagatttttatttgttgagtctcctaaaaccttcatttttctacatccctgtggtattccttaataatatgtctttatgtcctcatattttccataacttaatatatggatctagaggcttgatcagacacaggttcaaatctttttgacaagactatttcacaggtaatgttcctctatctggaggcatgtaataaatggttgcctctctttttgagtgctagctaccattatgatctatgtatagatccattagttcattaagcactgcaattggtgatattctacttctatcattctttattcattaatcagctgaggaatcctataaagaaaaatgtctgctcatttattatgtgattattcagtagtatggctcatataacaaagggagaataaatgtttgatttttttcccctttattcaccagttttcaaagaaaggagttgattcccct

SEQ ID NO: 910559 - DNA, 636 bp, Homo sapiens
tcaaaaccgcaatgagataccatttcacactggttagaatggtgatcattaaaaagtcaggaaacaacagatgctggagaggatgtagagaaataggaacgcttttacactgctggtgggagtgtaaactagttcaaccactatggaagacagtgtggcgattcctcaaggatctagaactagaaatgccatttgacctgcaatcccattactgggtatatacccaaaggattataaatcattctactctaaagacacatgcacatgtatgtttattgagatgaactctttgcttttccagtcaactcattaggacaaatcaatcacaaaaaacacctttgtatgtcagcaagtgcttttctccttaatgcactggtgctttcctcctgtagcctcttgcctgggaatatattgccatttccaatactttcccttatttcctcacttctaccacctttcatttcactctcatccttgcccatttaaaaattaaggaacttcgagttcagattctggggaaggtgcgtaagtacacttcactcagtttctcccactgaaaacaatccsaagttccagacagaatgcgtggaacagcaatccgaggccctaaaaagcacacagtagcagttgtattgg

SEQ ID NO: 910560 - DNA, 677 bp, Homo sapiens
catcactaggggtgacgatgagaggggcttctcacttctataactgtgattctccatgttttatggctaactaggaacacagtgatgtataatgtccattggttcaattatatatcagattttgaagaayagcaccccaagctgtcattctcaagttgtcatattaactgtatttgtaaatagactattgagaaattcaatcagcaagtgatatagtatattacaggactgaagaatccgtaatcatgcacccatattgaacctctttcatcaaagtcccaggtgatgatatgagggactccttgaaggtattcaggtagtcttaccccacaaacagtggattgggcaaggcgatgagggcaaagaaggctaactcatatccccaatttgtacaaaatacctgtgaggttagaatcctggatcttataggaaataagaattataatgtcattaaattacctctaaggagctagttggtttcctcaagggatggtacgatatcagcattattttctgttgctgctacattgaacatttggtagcagcagtagttaggtaactctgggtgagaaggagctcatgctttaaggcctaccaattgcctccatcactgccaccatgactgttgaaactctggagtggttgacgccaaaggctagctcacatctacagagagg

SEQ ID NO: 910561 - DNA, 652 bp, Homo sapiens
ttatctgtaattacagtaactacttcataggatacaaaatttcagttagaaggagtaaattcaagagatctgtcatataatacggtgactaaagtaaacaacaatgcattgaaaattgctaggagaattttgtttaaatctgcaaaaaacttctcactaaattatttgatattggaaaacagttactttttcagaaaaaaatgttatattaacatctaatgggcttaatgttattttaaatgaatttaaaacattgtttaaaaataactgtcctggcagaacgtaagcattatgtgttcttcgcgctgctgctgctgctattgctgttattattacgattattattactagagtttgggctattctgaggatgtgttttagaagggcttctctcccagccttgcatccagttcctcatcttcctctgtaaggcattaggatatctcctttcagcacccccctcagaaaaatcctacccccaaagataaacagttgccaaactcctctctcctagccaagtctgaattgaatccctttttcttcctttacatttgtaactttctccctcatctcttatctaggatgtggcacaacatctgataaaataatgacmgtcataaagtaagaaaggcaaacactcttctttctagat

SEQ ID NO: 910562 - DNA, 585 bp, Homo sapiens
caagtggcagcacattttcagataggcaccagcagcagcaggtactgtaatcccacagtttaactctccttgagatgttccagaaaggtggctgagttctaaraactgtgctctatgtgtgatctgggaatgatttggggaccaggaggtacagaagagttctttttagtggtgagcagatgatgacatctaggcttggctatagattactgccggcactctcttaactggtttactgcttctgcctcaacacagtacagtgctgtaaaacttcttagctcaaaacccttccacatctccccatctaactcagatacaaaccaaagaatgaactatcgcttacaaagtccactcccccaccctcgtctcctgccactctcctgctcactccatattccatgacagccacactggccttcttgctattccttgagcactttgggcacacttctggcactggctgcaccttcttcctgggacacttctccaaatacccacatgactcccataatctcctccaagtcttcatcagatatcaccttctcaatgaagcctatgctgatcattcattgacactcaatcctc

SEQ ID NO: 910563 - DNA, 581 bp, Homo sapiens
gagtgttcttatctggttctgtacccaaaataatttattcttagggattctgtgagkgattaaatgacactagagacaaacgatgaggcaatgagaaaattatgaagaaattaaggagaagagcaatatcttcttatttgctataattcataatacatggatgtttgagaatcactattatctagtgtataaggctgacttgttcccattatttcctaatccataatgctgctccttttttaccccataatccttcccttaaaccacatgtgcatcatttctttcatctggaatggatgtcttgtgtttcaaaaatgttttaccttatcactcttattttcacttctgaactaaaggtacattgcttgtataaccccctttttgctgttttgataaggtactaaattgaataatgtacctttaggccagagagcagtatagggcaagttacttagtttgtgagagagcctaggcaaccgattgctgaacagctattatctccttgtgatttcatttcctttgctcattattaggcacactataagtattgtgatattttctttggaaaattttggtcctaa

SEQ ID NO: 910564 - DNA, 595 bp, Homo sapiens
gagaggttccagtagactgggaccgtgtgggaagccttcatgcagtggaggaggtaggacttggtctgagtcctaatggaaaggtcaggcttagatagccggagttatttggggcagggaggataggatgagcacctgcatgtttgactgaagtagaccattcataggaggtagagctcggtttgtcctgcccaggtctggagagcatcacacactgtcagctctcatacatcctccccaagggggcggctcagagccaggcagtgagcaaacagcctaggattgtgagcacttcctcagttatgctgcgtatggcaccccctcccccactggaactttcaggggcatgtggctctctgcttgtcccctcctattctcttggttcccttgctcatcaagttcagctcgcttcagctttgcagcttgcttgttccctcaatttggcctaagtcttcaggcctggattctggccattcttctcagactcaatattgcttccattctccctggacaactgtgygtctttgtcctctattgttctccctgctctgctcatccagccatccgctcagttagtactcagtgggggtgaggg

SEQ ID NO: 910565 - DNA, 598 bp, Homo sapiens
caccgggctgtgagtcttccaggggggtgggggtgggagtcattgcgccggctctgaccagagccacctsgatcagaaagtgctggaaagaaacagacctggcttcccctctgcagaacctgacttgaggcgatgagtcacttctaaaaaatgcagaggcaactgagactgggggaacggctcggaaaaacggcacccgccgctggctctctgactgctttgggtagaggggtgttcgtggaagtagccgccgtatcatcacttttagggccaaaaatcaacctgcagatggccttttctttattctcatcagagtggtgttcgctgcaagttgtagcaatatttgaatggatgcattcttaaaaatgagtatgtatgggtgactgcatttaggaagttgaaccgggactaggtccaaacagccagagtggagatgaacacttggtaaaaacatctaggacctttggttttatagttatggaaatgcagaagcttctgggacttgagcactgtagtttactgagtactcctatttccttactgcttctgtagatttcattgaagctatgttccttagaattcttggtaaactatctaa

SEQ ID NO: 910566 - DNA, 645 bp, Homo sapiens
cttgcaaaatgcctagcagagtgactgacatatacaaagagcgctgtagggattwtttattatcctttctcatgcagactcacaggcattcatgttcacaatgcttttcccccctgccattacaggttttagcaacaaagagaaaatgtgtaacagaggcctactcaacaagccagttaacttcttggagtcacttaaaaccagaaagatgggtgtcctcataaaacacaggactggcccagtcctaaagatgaagctaaacatggcttggctgtgggaactgtagggccgaatggacagagctgaaaaccagatttcttcatctacagactgacaaaattgtctatgatcctttgattctggctcatgccatcttctttttccgtcttcctaagcatggacctttgcccaataccatcttctctgtttcctgcttcacactcttccctctggggacaatccacatccagggctcccttctagcccttgtctcctgaatctgttgcaccagccccaatctctctccaaattcccagggagctgcagatgtttccacccacgtcccaccagcacctcaacccagcaagtgggaaacagctcattatccgccccacacaccagctgtttttccattcattctcctcg

SEQ ID NO: 910567 - DNA, 592 bp, Homo sapiens
gtgacactatctcagctcactgcaagctctgcctcccaggttcacaccattctcctgcctcagcctcccgagtagctgggactacaggtgcctgccaccacgccyggctaattttttgtatttttagtagagacagggtttcaccgtgttagccaggatgatctcaatctcctgacctcacgatccgcccgcctcggcctcccaaagtactgggattacaggcgtgcgccaccatgcctggccaaccctgtctcttaaaaaaaaaaaaaaaagtataataatatgccatgttgacaaaggtatacagaaatgggcactctcttgcatccttgatatgagtatagattggttcaacgtctttgaaaagcaatttgtcaatatctatcacaattgcaaatacttgtgctctttagcccaacaattttgcttctaagaatttatgctacagatatatttgtatatgtgtgtagtgggaggtataaaaggctgtttgctgtatgtaccattgcttccaatggagaaaggttgacacacagcctagatatctatcactaagagagtatttaaacaaacagggactctaaaatactag

SEQ ID NO: 910568 - DNA, 655 bp, Homo sapiens
aaaacagaaagatattaaagcataccactacagaaaatcagcaaatcacaaagaaagacaggaagaaaggaagaaaggatatacwaaacagccaaaaaacaaccaagaaaataactatattaagtccttaactatcaataattacttgaacgtaaatggattaaattttctaatgaaaagacacagagtagctaaatgtatttaaaaacaagttgcaactatctatgctgcctgtagcagacacactccagctctaaggatacatatagaatgaaagtaaagggatgaaaagaagatgctccatgcaaatggaaaacaaaagacggtaggggtggctatacttacatcaggcaaaatagacttttagtcaaaaattataacaagagacaaaggagctcactatataattataaagggctaattcatcaagaggatataaaaattataagtacatatgcacataatgtcagagcacctaaatatataatatttacataactgaagggagaaacagcaatataataatcgtagcggacttcagtaacccattattgacaatgaatagagcatccacacagaaaattaacaagggagaaaataaagttaccaagaatacccaatagggaaaggataaatgttattgggaaaaccggat

SEQ ID NO: 910569 - DNA, 655 bp, Homo sapiens
aaaacagaaagatattaaagcataccactacagaaaatcagcaaatcacaaagaaagacaggaagaaaggaagaaaggatatactaaacagccaaaaaacaaccaagaaaataactatattaagtccttaactatcaataattacttgaacgtaaatggattaaattttctaatgaaaagacacagagtagctaaatgtatttaaaaacaagttgcaactatctatgctgcctgtagcagacacactccagctctaaggatacatatagaatgaaagtaaagggatgaaaagaagatgctccatgcaaatggaaaacaaaagacggtaggggtggctatacttacatcaggcaaaatagacttttagtcaaaaattataacaagagacaaaggagctcactatataattataaagggctaattcatcaagaggatataaaaattataagtacatatgcacataatgtcagagcacctaaatatataatatttacataactgaagggagaaacagcaatataataaycgtagcggacttcagtaacccattattgacaatgaatagagcatccacacagaaaattaacaagggagaaaataaagttaccaagaatacccaatagggaaaggataaatgttattgggaaaaccggat

SEQ ID NO: 910570 - DNA, 624 bp, Homo sapiens
tgttagtttaggtacatgaaatttagtactcaaagtttagtttaacttaaatatatcacatataaaagctgccatggttattccaaaatttttttgaaattaaatttattcttagtatttttcyagcaaatgttaagtgcagcgcatgaaagtttttataacaaatttcaagtgcagcatattaaaatgttcggcatttcagtggtattttccatttttgtggcaactctattaacatcttgatgtattttcccttttttttttcattgagacagagtcttgctctgtgggccaggctggagtgcagtggcactatctcggcttactgcaatctccgtctcccgggcacaggcaattctcctgcctcagcctcctgagtagctgggattacaggcgtgtaccaccaggcccagagaatttttgtattttcactagagacagggtttcaccatgttggccaggctggtctcgaactcctgacctcaggtaacacacccacttcggcctcccaaagtgctgggactacaggcttgagacaccgtttttaaaatccccatagaaccatgagaaacaagaaacattattataaaacagagaatgtgttttgtacttaattcccatcac

SEQ ID NO: 910571 - DNA, 607 bp, Homo sapiens
agtgttaacatatttattgaatgtgaagcctggtagggaagagcaagaaaaactttctatcctttttaaaaaacacatgttaacacttactgataaagtttctctgtatggtttaagaagaaaacaacaacaacaacaaaacactacacattggaatcatagtagtgctataaaaccatggggagcgagaagggaaaagaatagctaaaccagtaggcccataggcaatgactgtgggctccctgccaggaagatacaagtctaacaagaaatgaggtgacttgcagtagaaggccttggaacttggaaacaactttatctccactacattgtgctgccaacgggagagtcatttctaaagagcagatttttttttccttctaaattccattatgaagcccctaagtggtgatttttaaatatcaacatcttaagttttcaaaaatgaccatttaattagctttctaagttttctccccaaagtaaaagaaaaggcttaggttattatcttgaatgagaaatgccatggtcargaaaacaccattcttttcaataataataattcagtgatcaggagagacagaggaggtctaatgatagattttgc

SEQ ID NO: 910572 - DNA, 599 bp, Homo sapiens
aactatccttgaaaaaccctaacctccgagcttttggaaagacagatttgagtgataactccagtcatttcactcagaagccttgtgttaattaaactctttctttactgcaatacagtggtctcactgaattggttttgtttgtgcagcaggcagaaagagcctgccaggtgattacactccttgcaatgttcattatgcaaacatttattctctgatttaacccaccaccaccacaaccaaagctgtcactcagtgattcaccaaaaatggtggaaataattatcttactaacttttttctatctttcttaaatgtatgcatagttcacatttctttctttttcttttaattatttttttccataagttattggggtacaggtgatatttggttacataagttctttagtggtgatttgtgacattttggtgcacctatcacccgagcagtatacactgcaacatatttgtagccttttatccctcgcccccatctcactctttcccccaagttccgaaagtccactgtattgttcttaygcctttgcgtcctcatagcttagctcccatctatcagtgagaacatacgatgtttgg

SEQ ID NO: 910573 - DNA, 493 bp, Homo sapiens
cctgcttgtagtcccagctactcgggtggctgaggtgggaggatcacttgaactcacttgaatggaggctgcagtgagctataattgcgccactgcctccagcctgggcagcagagtgagaccctgtctcttaataataacaataataggctgggtgcagtggctcatgcctgtaatcccagcactttgggaggccaaggcgggcggatcacaaggtcaggagattgagaccatcctggctaacgcggtgaaaccccgtctctactaaaaaaaaaaaaaataataataataataacgataataatttgaaaaaagtcaacctcagaaaaggttgccaagttaactcaagtctccaatataaaaaagcctggggatgcaggggagactatggggtttgctgggcctgctctgatattgaggacacaatgattttgtggctctaaggctatgaagcagcaccatttstcacatgtcagtccatggcttggtcatt

SEQ ID NO: 910574 - DNA, 493 bp, Homo sapiens
tgttggtaaactgccaaataacagcttccaacttaaatttcttaaatgtgttatcagaacaaaactatggcacactgacattayacagtttcccacaaatagagaaaaatgtactgtaagacacttaaatgtcaaacagggaatagaattccataccagtaaggtattttacctatttttgtcttcatgattttgccacattcagtaatataattgaaggattaatagtcttgcaagcctaatgatcataatgcaatttccaattcatgttatagctatattagttatttagctacacatgctaatagttgagccaacaccaaagggatctgagccagaactaaaatttaccatgtgccttgtgtagcaatattcccaaactatctactgacaaaaaacaacaagaaacatttgtttgcaacttgtaatgtctttcccacttttggatttaaagtctgtattactaataatagtttatgttggaaacactgcc

SEQ ID NO: 910575 - DNA, 559 bp, Homo sapiens
tgctcttccctcttcctggaactcttttcctccagatatccttcaagtctttgctcaatgagacctactctgaccccctgtgatggttaatactgagtattagcttgattggattgaaggatgcaaagtatcgatcctgggtgtatctgtgagggtgttgccaaaggagattaacatttgagtcagtgggctggggaaggtggactcacccttaatctggatgggcaccttctaagcagctgccagcaaatataaagcaggcagaaaaatgtgaaaagcctagactggcttagcctcccagcctacatcttcctcccatgctgctggatgcttcctgccctcgaacatcagactccaagttcttcagctttgggactcggactggcttccttgctgctcagcttgtggacagcccattgtgggaccctgtgatcgtgtgagttaatactccttaataaacttccatatatatatatatatatatatatatatatatatatatatatayacacacacacacacacacacacacacacacacacatcctattagatctgtc

SEQ ID NO: 910576 - DNA, 559 bp, Homo sapiens
tgctcttccctcttcctggaactcttttcctccagatatccttcaagtctttgctcaatgagacctactctgaccccctgtgatggttaatactgagtattagcttgattggattgaaggatgcaaagtatcgatcctgggtgtatctgtgagggtgttgccaaaggagattaacatttgagtcagtgggctggggaaggtggactcacccttaatctggatgggcaccttctaagcagctgccagcaaatataaagcaggcagaaaaatgtgaaaagcctagactggcttagcctcccagcctacatcttcctcccatgctgctggatgcttcctgccctcgaacatcagactccaagttcttcagctttgggactcggactggcttccttgctgctcagcttgtggacagcccattgtgggaccctgtgatcgtgtgagttaatactccttaataaacttccatatatatatatatatatatatatatatatatatatatatatacacacacacacacacacacacacayacacacacacatcctattagatctgtc

SEQ ID NO: 910577 - DNA, 514 bp, Homo sapiens
ttttgactttaatttttcaactttatgatcctgtgaaagagatacatgttcagtagaaaccgtattttgagtacccgtacaaccattctgtttttcacttcagkacagtattcaataaattacctaagatattcaacacatcattatacaatagactttgtgttaggtgattttgcccaactgtaagctaatgtaagtgttctgagcgcactcaaggcaggctaggctaagctaggatgtttggtaggttaggcgtattaaatgcattttttttacttttttttttttttttttttttaaagataacttctcactctatcatccaggctggagtgctgtggtatgatcatagctcattgtagcctctaactcctgggcccaagacatcctttcacctcagcttcccgagtagctgggactagaggcatataccaccatgtgtggctaatttttcaaaaatttttttttttgtacaggtggggtcttactattttgcccaggttggtcttgaatt

SEQ ID NO: 910578 - DNA, 580 bp, Homo sapiens
tacacaaggcaacttttttcctactgccccccaacttgccctctttgtgtaggaaaggaaagaaagagaagtggtctgttctccaggaccctggggcaggaattttcaggacactgcctccaccaccactgtccccttccccctgccccagctccctgctgggctgcagctggcatttttgtcagggcactgggcagtgaccaggctcttggcagatactggtagctctgtgccaggcagagagctggctggcccacactttggggacaggactgagaccagctgcccacagcagtgccctcctgctgcctacgagagtcccacttctcaggagtgtccagggctggggctatgaagtgctgaactttgcactccagcaaggcagaagcaagccttaaacctcatggtatcccgttgcccaggactgagcctgcgaagtgccagaccctctggagctacatagtgtttgaagcatcatggctcaggcactcaggactggtgtcgcttcctcactccgagcgtcagttcactcatggataacatgggamtgacggcctcacagaatcaccatggtgggaca

SEQ ID NO: 910579 - DNA, 623 bp, Homo sapiens
tggaataataacagattctaccatttagagttgttatgtgcatgtcatgcttgcaaagaacttagcacagagcctggctatagaaggggctcagcagatgtctatggaatgaatgttagaaatgctagacattagttcccatgaacttggaagttggattgattgatgcaatccctggggcctatgtgaggcctctctgcctagctgcaagaaggtctgggaaagtgagaaattggcattcttagcttttcttgtgggaggttgtcccaacctcataaagagaggggttgctgtgggtagcaaaaaagaaaggccaaaggccacttcacttcactgaacttggcccagttggcttcattctccatggatctcaatttttttaatctgcaaaatggaagaaataattgacggtagtggccgctccggatggcctgccattgctatcatgctggctgcagcagggagatgctcccagtgccataggctcagaggagcctgcyggagctggggacaaacaggagccctgccccctccaagttggggcaggagctccccaggcacagctgcagccacccaacttgccgctgcagacccaggccttctgctccatgggcagggatatc

SEQ ID NO: 910580 - DNA, 656 bp, Homo sapiens
ctggtacccaaaacaattttgtcacacacaccatcctgccccttgtgagtcctgccagcccagctttcargggcctggcccctgattccttcttttcttatcagggtcattcagaatccggaatgactcttatttccacagagcttcaaatcccacctctctctgaggtagaagaccaacagggcttgttttctggtcacaaccctgctgatcaaaacaggatctgatccagacaggatcaagtgaagaaaccagcaggaaccagcagatggggacaaatgtgatccctggctgccctcattgctcatagcgtaagatactcccatagtgccatgacagttttaaaatgccatggcaatggcccagaagttaccactcattttctagaaagctataaataacctgcccctcaatttgcattgatccactccttaatttacatgtaattgaaagtgggtttacatgagtataaatagttaccaagagtctatagtttgctgactcagggcatactgcctatgagttagccctgctctgcaaggagcagtactgttgaatgaaagattgttttctgataccaccagctcacctttgagttctttcctgggtgaaggcaagaacactcgtaggttaagccccactttgggggctcagct

SEQ ID NO: 910581 - DNA, 564 bp, Homo sapiens
cccatccatctatggccagttgatttttgacaggcgtaccaagactgaatagtgggggaaggaatagcctttcaacaaatggtgctaggaaaactggacagccwtgtggaaaagaatgaatctggacccctacctcacaccaaatacaaaattaaacccaaaatggattgaagacctaaatgttagagctaaagccataacactctcagaagaaaaggcaggggtaaattttcatgtgccttggaataatatggttagagttaaaaccataaacctctcagaagaaagggcagtggtaaattttcatgcccttggaataggcaacagtttcttcaatattacgtcaaaaacacaagccatcaaagatagataaatttgacttcatcaaaatagtaaaatgttgtgtgtccataaatggtgttaggacactgggtgaccatttgggacaaaaaaaagtgaagttgaatccaaacttcacactgtaccataaggatgaactccaaatagattagaggtttaaatgtaaaaaaaaataataatactagaagaaaacatatgattatt

SEQ ID NO: 910582 - DNA, 671 bp, Homo sapiens
tcagtggcccccgaaccccagctagcaaccmcagtgcccagtggccagcaagtgtgctgttcaatgggctaaacaccccttgttcccttcccagcctcgttcttacaagcagctcccaccactgctgatgccggccctgtatgcagccgcaggggaaccctgctaggggcccaggaagtccgcatgcccaagggtgtgaacgtggatgattgaaaatggggtggtttctcttcctaccccactcactacagcacacccctgtatttcaggcaacggtagtggggacgtccacaatcccgttcatccaacagaaaatcctgcagttcccaggaaagccagtgtaggaggtcttggctcccctagttaaccaggagattgacataaactattccagagttcccacgaaggtctggtgaaggaaacgggtatgaccctggagattcacagatgaaaatgaggtagagcgtcctcatggctggaggagggaagtaacacacttgacttctggcttggtttccttccccacatgtgtgaagctgaagtgtcctcatcactggcattgtcattatcaaaaatctgtggcagaggcttgctagcaaagcctacatcctacctgccatcccagggcaagcccagtttctctggaaggtaaagaaggccattacatagac

SEQ ID NO: 910583 - DNA, 648 bp, Homo sapiens
ggaatttctccagtatggcaggttgaccaggggcggcttgggaacatgttgttctccaagaagcttctatagtactaactaaaacastgtctccaagcctaaaaggtgagaaaactcaagcaatgcatataattttaatttccatcaaagctccccactgctgccaccaaaccatttctccatctccttgttcgagtcccagaccctttgaagttcctgtcatccagttcctacgccacccttcccagtcctcctcatctcctgcctgccccatgcacatccttcatccccaggcttggtctctgctcatccgtccgcttctgtcacaatcatggtgatgccaggatccatggagatgaccatccagagccgtgacctcatttttcctaatgatcatgctctctgcccctcctaagcattgccctttgttatcataaacgacgtcatgacatcagacatgctggtgttaagtatccatctctctgaactcctgcatctgtccaggccattcactctagaaccctcagggctccaatccctcttttcattacccaccgttcccttcctacttttactgcactggctgcccacaagatcccattgtctatccttccagtttcttcttttcaaatacactcacctccttgc

SEQ ID NO: 910584 - DNA, 542 bp, Homo sapiens
gggtctctgtctacagatggctcagggagcaggaaagacggggcatagttggtcaaacaggcagaggtatctactgcactggcctatagggtaactcagggcaarcagcacaacagacttcaaatccctggacccatatctttctttcagagccaggactagtgagaggtgcctgaagtacctggtgcgcaaaatttaagaagtcgcccacgcttaggtgcctgtccacacctgcaccaaccaagagggcaaacctccctaagagcagctggatgactctgagagcaggtgcctccctaaattttgtggcctggatgcatccctcgcctcaccctcaccctggcccacttcttttctatcttgctttccacgggccagcagtatcagcatcccctaggagcttgttagaaatgcagggccttgggtttagctccagacctactgtgtcataatctgcaaagtgacaagacctccaggagatttatagcggcacaattgatatttgagaggtagcagaggcaaggaagggcagaaccccaggc

SEQ ID NO: 910585 - DNA, 639 bp, Homo sapiens
acaaaccctaggcaaggagggacggtgaggtcaggaatctctcaccactccaacgcagcagctaaatcacctgtggtgcctcccatgtgaggtcctgycagtctctccacgctcatattctctcactctccaacaccaacacctttggtttctgctctctctagactccctgactctcacctctctgtgtctctgatcatgaggcttcccattcctgtgtggagtcccttttctccatgcttctttggaatctgcctgcactcttcaagaacagcaccacctggccttcctgacactgagttgcctcctctaagctcccacagcacagcacgctgtatagaccctcgtcagcatttggtgcatggcaggtgctgaccataagtggttctcttcacaagacagcaggttccttcagagtgaagccatgtcctgagcatctagaaggactcagcccagcactactctgcaggggctcaaaaagtgctttctagatgtccaagtgcaggaagtctgtattttgcttcttgcagctttgacccatgcattcatctgtttcctgctggccagtcaaatgccagatgttacccttccagcagttcttacatccaatgatgtttgtttaaaaatttctgagcatcc

SEQ ID NO: 910586 - DNA, 631 bp, Homo sapiens
tctccatgtggctgctcggcctcctcactgcacggtggtggctccatgattgagtatgcaagtgtccaggcagatgctataccacctcttaggattttgccttggaggttccacagcctcacttcctggtagttgtggtcccacccagattcaaagggaggagtgtgagcatcatgccatgcacagagcagggcgtgggataaaagctggtgcagccagcttaggagaatccaatctgccacagcagctcagaggctttcctgcaggccccatggtacagagttggctgctcctcagctgtgctgttgaaagatgtcagagtagtttagtaagaggagagctgacatgtggttctggacttagctggggagacaagaaatgctggtgtcacataacagttagggcaaattgtcctttgtgcctggggtatgtgtggctgttggggaccaggaggctgcacacccctttctctcaagcctttacacagctcagatgggaggctaagacctcagactctggagaaagaccaggccatttgctagttagtgggtgtaggtccctgaccttagccccaraaaacatctgcagaggctgagcctcttcactaatgctttggacacaatgccattta

SEQ ID NO: 910587 - DNA, 630 bp, Homo sapiens
taaggaaactagcttagaaagcataagtgaccatgaccaaggycaaacagctgctaaatattactccgtctcaaacttgccccttctcactctgagtctttctccctttccctctcacttcctctctctctttaatatattttaaatttattgctgtatagatcataatgttctcagaagaaaatgactgtccttattatccttagaaacatttccaatgttatgtttgtggcccatcttacaaaaataaaagtttgtccctgtcatggtaaaaatagtctccctgctatattctacctggcatagatggccatacagtcctggcttttcatcctggcaatagcttttgctttacctcccaacaccagatactgaaaagaaagcgcaatactctctcatctgtctcttctgaataaatccttcttagatcttcataagattctgatggatcttcataagattgagttgggttttccagaaaaaggggagccttttacattcccctccaagaggcaactaaggctttaggtggcatcagtgaggatgtgctttaaaagaaaaacaagttaaaatgagaataggatgaatttaatgggcagagagcctgttttttttttttaatgtgagtat

SEQ ID NO: 910588 - DNA, 637 bp, Homo sapiens
aactatagtacactatcacaaccaggatcttgacattgatgcaattcagtaatcttacttagatatctctggttttgcttgtactcatttctctctctctgtctctctctctctmtatatataaaatatatattacatatatatgtatagatctatatatataacatatatgtatatatacacacacacatatatataattaactacacacagagagagaaatacataatacataaatacatatatacacacacacatacacacacatacatatatacacacacacatacacacacatacatatacacatatgtacaggtgcgcaccaccacacccggctatttttatatatgcatatgtattttatgtatatgtatatgtatatgtatgtaggtatgtgtttctctctctctctgtgtagttatataattacaacccatgtgtagttcatacagtcaccatcacagtcaagacttagttctatcaccacaagatacctcctgtcgctattttataacaacatccaccttcctcctgcacctctcattccctccttaaccccgacaactaccagtctgttctacattcataaaattttgtcttttcaaaaatgttatatagatagtatataaccttt

SEQ ID NO: 910589 - DNA, 626 bp, Homo sapiens
ttgggaactgtagtaaagatcacctgtgttataccttygcaaagaacttggctacattgtgtttatgtcctagggatctttagaagtttgaacttaacagtgataacttaggacatatggttgaagaaatttctaagcagcaaagcattcaaaggcattcaaggtttggactggctgcttctaaaatgctatattcatatgtgggagcaaagacatgacttaaagttggaacttacatttaaaagggaagcagagcataaaagtttggaaaatttgaagcctagttatgtgatagaaaagaaaagcccattttctggggaacaatccaagtgagttgtggagtattcacctgctagagtgattagcatgactaaaagggagccagatgctgatagccaagacaattagaaaaaagcctggaagacttttcagagatcaatgaggcagcttttttcatcagaggaaaataggcctagaaggaaagaataatttcttaggaaccctaatttcctagggttctgccaccctgtgcagcctcaggacactgctccctgtattcaggctactccagcctcagcctcagatcaaaggtccccaggtacagcttgggatactgcttcagaagg

SEQ ID NO: 910590 - DNA, 569 bp, Homo sapiens
accctctctctactaaaaatacaaaaaaaaaatattagtggggtgtggtggtgcacgtctgtagtcccagatacttgggaggctgaggcagaagaatagcttggacccaggaagcagaggttgcagtgaaccaagattgcagcactgcaactccagcctaggtgatggagcaagactctgtcaaaaagaaagaaagaaagaaaaagagagagagaaagaaagaaataaagagagaggaaggaaggaagggaggaaggaagggaagaaaggaaggaagatagaaaagaaagaaagaaagaaaggaaggaaaggaaagaaaagaaaaagaaagaaagaaaagaaaggaaggaaggaaggaagaaaggaaagaaaggaaaggaaggaaaggaagaaaggaagaaagaaaaaagaaagaaagaaagaaagaaagaaagaaagaaagaaagaaagaaagaaaaaagaaaagaaaagaaaagaaaagaaaagmaaaaagaaaagaaaaagaaatcctgttgtccaaaaagaagactgccacaggggtagaggccccacagagaaactcaactaga

SEQ ID NO: 910591 - DNA, 679 bp, Homo sapiens
tcttctgtctgaattaaaaaacaacaataacaacaaatctaaatctgaaaataatttaagaagagccaccagacrtaccccacagaatttactaaaaggtggctaaagcaactctacatggtggctgtcatctcatccctacttggggactgtgctgtgtaatatggtagctaccagccagatacagctatttaaataaaaattaattaaaattaaatacaactgaaattttcagtttctcaatcattctaactatatttgaagtgctcaatagccacatgatgttagtgctattgcactggacagtacaaacgtagcattattttcagcatcacatgaagttctgttggaaagaacagaagattaatctcctgttaatagcttctctaataatatcagctcttctctttcatggcacagattttcttccaatgtctatttacatttggatttcattagcattttaaaataaaaagcgggaaaatggcaacttgatgaatatggatgagacattgtctactcaactttggaatgagaataatatataattatgctaattttctgtggtttagaagcattggtggagaattgctatagtaggcagtcccccatctatgtgtaaagtgctatcattttcccctattctgctgcttcaattttttccccccaactgtatatt

SEQ ID NO: 910592 - DNA, 626 bp, Homo sapiens
tttgttaaactacatctactttttcagtgattctctctctgagtgtattaactatgtctgataagttttgtgataaattttttggagaaacttcaagctcacaaaggatgaaaacaagtggttaaggatgagtacagaacctaccaataccactgtgcacactccaatactgttactcaaactttcaaaagcattttcattagcaggtagagaaataggggcaagtagcagacctgggtagttatttgtggtgtgaacagaccaaacaaaatactgataatggcactaatattcctaagatttattcaagaaaaactgtcagtaagacatgaaggaatatttagaaatgctcagaaatgacaccatgataggtacataaagggcccattgaaacccagcattctagggatgtggattctcaaggaatattcaagagcaacctttaggtgtggctaaaccaggttgtattctggggactgctccaaaaatttggttttatgcttgtataaacctgatgtagcttaatgtaactttctgatcttggccccattctgcctcaccccacctcggagcatgatccttamcactatggcaacagggaggtggcgtccaggtagtagagaaca

SEQ ID NO: 910593 - DNA, 615 bp, Homo sapiens
ttcttgtgttttgcatttatattcttgatatcagtcacaatatgtgtgtataaagtctttcrcagaagcttatcatggcaacgtagaagttcaaagaagagttctagcaggcttgatggaatgatgagattcttatttctcagcaagatcaaagctttgcaaaatgtcatttgaagatctggatcttatacggtataattgcaggagagaagctctttcacctcttgaggaaaattacttaaatactctgggtagcagtgactaatctgtagcaaagcaaaggctcttctgaagtttctctctttctctcctataattaagatgcagacatttaggctgttctgtgccataaacatcaccagctctgctagttctttgctgggtttatttggttgcaatttggaaatctccacattggatctgtagtgattttactgctgtagaaactcctcaatgcaggccggtgggtctagcttgatccgattctgtgactgcggcaggttactgggcagcttgttgtttctgctggacattttggctgcagactggcttcgcggccagcagttttaataaaactcagatggccggtagcccccaaaccctgccagctgcagc

SEQ ID NO: 910594 - DNA, 571 bp, Homo sapiens
agaggcattctctctttgtaactttattttgtagagacagggtcttgccccattgcccgggctggagtgcagtggcaccatcacagctcagtgcaacctggaactcctgggctcacgtaatcctcctgcttcagccttctgagtagctggggctacaggtgcatgccaccacacctggccaagacattctcttttactagatttctattagctgctgatcttgcttgacttaactacttgaaagctttaaattattgattttgtaggtaaaatcctcagctttcacaatcactaattatagtagcactttaaactcctacaataatgaatatatatttatactccaacttactgatagcattttaacatataaaggttacaaggagatttttcacaccaggttatatctaaatgatctagatgcttacctctattcaaaaatgaatattcagatattaatgatagatctgaaatatgtacaataattatatrtaaataaaaataaaaataaataatactcctgaaagaatggcatgcttgttttatttaattttttcttgaaaacactgaa

SEQ ID NO: 910595 - DNA, 632 bp, Homo sapiens
agtaagacagggaaggaatggaagccaatataaggtgaattaatgagcaggttgttgctttgggcaactgggacaccatcttgctggggactgcaaggcagaacacacctcagagttgccctakccctctgccactgggagagattaagctggaacacttagttgctaacttcctcccatcactggttgagggctggtctggggtgggagggacataaattctctggttcttctggtctaccctacctaggccagggaagatgcgcaggagagcatctcaagtacttgcagtaagaagctttgatgtttacagacacaagtgaggcaccaacagcactgctagaaaactcccaaccatcagaaaatgtcttccatgcttcagacaaacaaccccctggaaggttttggagcaagggtggtttttgctctccatagtttcttgggatgaacttgcagcagaatgagagatagtatactgacgtttcttctccacagactgagtcatattcatctttatattgtggtgcatattttacagggtctggctcatagtaggtgctcaaaaaatattgaacacgacttcattaatgtcactgtttttgcatttatctcctttctttgagtttaagagc

SEQ ID NO: 910596 - DNA, 639 bp, Homo sapiens
ctcgagcacagaaagccacagccagacagaggagaaaaaaatcagagcaccgtagggctcctacctgatggctggggaayagcaaaggagccttcaatcctggaatcccaaaatagtcctgtttcttgacctcaaagattttagagaaaacctctcctcccatgggctctgggtagagcacttgtctgggacagagaggatataaaacgcatatcatcagattccttgttaatattaatctcttaattcccaccatcttgtcttaacaacaaggaatggaatttaaaaaacgatctttggggctgggcatggtggcttacgcctgtaatcccagcactttgggaggctgaggcaggcagatcatgagatcaagagatggagaccatcctgtccaacatggtaaaaccccgtctctactaaaaacgcaaaaaaattagctgggcatggtggtgtgtgcctgtagtcccagccattcaggaggccgaggcaggagaatcactttgacccaggaagtggaggttgcagtgagctgagatcacaccactgcactccagcctgggagacagagtgagactctgtctcaaaaaaaaaaaaaaaatatttggaggataagcttttttcaatctcaggggttcacag

SEQ ID NO: 910597 - DNA, 591 bp, Homo sapiens
tcttctgaggtgggtttacatctcttcttcccaggaagtytgtggtggtgttatccttcctgaagtggtttcagtgatacctcatgctgaaacttggccaatgtctctttgggcattttttttaaagatcagatctgttttggtagagaaccaacatagatttgaacaaaaaagagagaaaaagaatttgattaattgaaaacaaatttctgttcagagatgaattcacagaagaggtaaggtttgagggaggctgagaagtggttatgggtagttgagcaaaggtggtgggtaaggaaacaaatagcagagacagggggtaggagaaggatctctactttctgggaattcaacatcatttgtgtggagattgggaagaggatatgggggacaggcaaatggaggaaggggagaggatgcaggggctggtaagggagttgtgggtgcaggactcagcctaaattgtaccatgtaggccagaggctctcctgttggggaacttccaatccttcagggttgggctgtcaaatgctggcacacctgagttctacttaggattattttgattgtaagggtcagaaaatccatttc

SEQ ID NO: 910598 - DNA, 642 bp, Homo sapiens
cacagtctacatgaacttcttcactgtcacatttcaattaatgtccatacgtagtacttgataaatatctgtctccaacccatccctttttctttgacactccaaattcacatctctgaagctatgtcttcgaatgtaattgtcacaaaccaaattcatactctactactccatttctgctcttcctcctttctttcttatctatgattcttatggtaacagtgcaaaggctgggagaggaaaaatagaaatgtattaatgtaaagttgtcatactactcttgaagtgatataataccactttctgttagactccaatatgttgaaggtttatgctataagcactaaggtaaccaaaagatgctgcagactattatagcatctcttcaaacagacttcacagaaacttgcaagcagcctgtgtctatgacatcagttggcatgagcaacaggtttttgattttggagaactatgtttacctgacactgcaacaaaacaaaagcagctatacatgataggaatgaatacaaatattaacaactgataycattgaatttttggagggtgaggagcccctcaagacaaatagagactttcaattttaaaagagcagatattgtgtttgttcccctgacttatttc

SEQ ID NO: 910599 - DNA, 574 bp, Homo sapiens
caggatcaggcactccctaccttgcagcaggaacatatagctgtaaggacctttcaaggtcccttttggaacaagtaatcttgtaatcaagacgctgagagtctttccagatctagttcttcagctcagctcacaaatggttttcacagacccctctgtcaaaaatcaaccactttcctcccaactccattaatctgccattgctttctggcctgtttctctattgggccggctagagaccacactgcagcttgatgacagcactgtgaatgtctccagcaggcagatggtggaatatgtttcaaaaacttctccatgattcaccaccattacttaaagttatatgtggtggtgtagaggactgggaaggaggttgggggacccaaagcaggggaagcgcaggaactggctgtatggggtcatcgccacattgccaattttagacactgacaggaacaagcagcagaggcactaagtgtctcagggtctcagtcatgagccctttcacaaccatygtcaaacagtgcctgacacagagcaggcagtccatttcaagtttgtttagtgaaaccca

SEQ ID NO: 910600 - DNA, 649 bp, Homo sapiens
aactcaaggaatatgccagttctggctgagcacagaggctcatgcctgtaatcctagcacttttatgactctacaaagaactcacaataagaaaaaagaaaacaaaagtgagaaaacaccattatctatggtgctgccacttgattcttctacagaatagggcagcactaaggaatagggatggaagacagacacagtaagccttttaagttcctggagaccaagttacatgaatattgtaattaagccaagttaaaagagatattggatccaagaaaaactccgataaaatatttagaaatctactttttgacataatacagggggataaacctggattataatttactatgacttttcatgaatcctgaatcatctatcaatgcagttactaatacacaaaaatcaccaacaatctaatagagaacctgaaagtttcctttctagttaaaagaagcagtatttttggttcatagttaggcactaaatgatactcaaaacttcagtgtctatccagggcgycaggaggcagcagttaccctgaacagagagacggtaatctaattagcatggcattctttgctgaatggtgagaccatggaaatttgaatagccactttccttctcttaaatgtgtattcattatcaa

SEQ ID NO: 910601 - DNA, 650 bp, Homo sapiens
agaaaacttcaggtgcacattcagaataaaactaataaagatgaataaaacaatcccaacaatgtctgggaccagatgctagaaattctcacactgcttctccctaaaagcactatacgtcacctctctagtagccagatgcttatgtcagattactggggaaaccggctctgaggtagagatttctgtgcaaggagtttatcagaaaacactctcaggaacaacacctgtaagagagtgaaggcagtaacattgggtagagagagaaaactgtaccagaggccatagttaagcccttagggagctttgaacattcagagttatccccaatttagaccaagaggttggccccccaaatttaccagtcattagatatgagctgtctggagaggggacagagacaggttttctttggctgccctccaagaacaagactcagagacagactaagctgattgctatcagcagcaacactcatggcaactgcaagatgagtgccttaaccttgaagagggaatcttggcagtcccctrtgacatcaaccataacaaatcacatcttccaaatgtggctatctcctcacattctcacattgctcacttctaaatctaagacctgcatggatgtatctgatggaaggactttcagaa

SEQ ID NO: 910602 - DNA, 592 bp, Homo sapiens
cctgataggcccactgtgacatggtcttgagccaaaagtccatttatttccatttagtaaaccctagatgtagttttatttatttttatttaatcttcacaaccagtattaagcccgtattaarttcacttgtctgaagtcagaaagttggaaaactagggccataactcaagtttcctgatgcttagttcttttctctttcactttatcaagcattagtgatgactaattattatgacttttgaccctagagaagaagggccatttacatgtaatatgatgtagtcttaagtaccaggaaagccaaaataaggttacatcttttccaataagtgctccagtcagaacaccatttacatgtctttatcatcttccattgagaagagtaataaaaatgggagaactcctgatctataaatgatgttcagcctgaagatttttctaattaaaatttcacacataagaatgaatatctctaactttcatgacaagatgttgacttgatgatgcctactgcaattgtgcctttttagtctgactggcagcctctatccagtgcaagttcctatagcacaactgggatttaaacaag

SEQ ID NO: 910603 - DNA, 592 bp, Homo sapiens
cctgataggcccactgtgacatggtcttgagccaaaagtccatttatttccatttagtaaaccctagatgtagttttatttatttttatttaatcttcacaaccagtattaagcccgtattaagttcacttgtctgaagtcagaaagttggaaaactagggccataactcaagtttcctgatgcttagttcttttctctttcactttatcaagcattagtgatgactaattattatgacttttgaccctagagaagaagggccatttacatgtaatatgatgtagtcttaagtaccaggaaagccaaaataaggttacatcttttccaataagtgctccagtcagaacaccatttacatgtctttatcatcttccattgagaagagtaataaaaatgggagaactcctgatctataaatgatgttcagcctgaagatttttctaattaaaatttcacacataagaatgaatatctctaactttcatgacaagatgttgacttgatgatgccwactgcaattgtgcctttttagtctgactggcagcctctatccagtgcaagttcctatagcacaactgggatttaaacaag

SEQ ID NO: 910604 - DNA, 471 bp, Homo sapiens
acaaacaagacattgcacaaatatgcttcaaaataataagagctgtctatgacaaacccatagtcaacattgtactgaatgagcaaaagctggagtcattcccctggaattccagaagataaggatgccctctctcaccacttttattcaacagagtactggaagtcctggccagagcgatcaggcaattgaaataaaataaaaggcatccaaaaaggaatagaggaagtcaaactattcctgttttcagagcatgtaattctatacatagaaatcccatagtctctgcccaaaacctacttgatctgataaacaacttgaacaaagtttcatcataccaaacaatatgcaaaaatcagtargactcctataccccaacaacatctaagctgagagccaaatcaagaatgcaatcccattcacgatggccataaaaagaataaaatacctaaaagtactgctaaccatgga

SEQ ID NO: 910605 - DNA, 436 bp, Homo sapiens
cgccgggctcggcggccccgcgggcctggcggcgccggacctcggcgacttcccaccggctggccgcggggayccgaagggccgtcggagagatccggccggcgaggcggtggacccccgcaaaaagaagggcgctgcggaggcgggcaggaggaagaaggccgaggcggcggcggccgccatggcgaccccggccaggcccggcgaggccgaggacgcggccgagcggcccctccaggatgagccggcggcggcggcggcaggcccgggcaagggtcgcttcctcgtccgcatctgtttccagggagacgagggcgcctgcccgacccgggacttcgtggtaggagcgcttatcctgcgctccatcggcatggacccgagcgacatctacgcggtcatccagatcccgggcagccgcgaattcgacgtgagcttc

SEQ ID NO: 910606 - DNA, 669 bp, Homo sapiens
agtccatgcatgaccttaaccatcagagcacaacgtttcatgcctcgcatctgtttgccatacaggaggctgcgaatgcagagaacttcctcttctatcagtcatctagcacagggaacagaatcgaggctgaaggacagcttcaagccccttctccatccaagctttgagatcaataggctttagcccctctgaaccaaccatgcttaaagtttcagaagccacagcagctggcaggctgatccacacacacagatttcttactaacatcatgttcttcatagttactgctgctgaggaaataagcccactccctctgatagacagaaatcagacaatataatgatgaaaagctaccctcagtctccagctcaacactgtttcaagcagcaacaataggcaaaacaaaagtgtgaaattaaatctacttgctatccctggaagagacaaacaagaaaaaacatacatatagacattgaaatattgattcttatgtgcacaagcacaagctctgtggaagcacagaagaaaaagtgaatcagcctgtaatcccagcactttgggaggccaacgcaggcagattgcgaggtcargagttcgagaccagcctggccaatatggtgaaaccccagccctactaaaaatacaaaaattagcccaggcatggtg

SEQ ID NO: 910607 - DNA, 566 bp, Homo sapiens
cttaagctttttcactcctgtcctaagaattacatcaactttttatcaaatgaaaacactattagtgaatctcactctatcatcatagcaaacatgggtgttttcacattgacatagaactcctttgtttatttaaagaagaaaaactacccagaattaaataattttgaaggaatctgttccatgtatgcagcacccaacagaccacaaatctttgtttctctgacttagatataaaaccctctacccctcccaaatttgctcacaagaatcaataatacaggtcagacactgaatttgcctacaatggcaaatgcttcccaaacatttcagcaaacattctctaagtttgtcttttcccttccaaggattgcttgtttcacctgcaaacactcccaatgtgaatatgtttagccccttcattgtggaaggcaattatttgtttgacgggaagcttagggagatagcagacaattttgcaaacatacctacaggtcartagtaattctaaaacctcctgttcctcactcccatctccttgaaatgtgtctgtctggggttttagt

SEQ ID NO: 910608 - DNA, 520 bp, Homo sapiens
aagcaaactcttttctaaccaaaaacaagcaaacaaagcaagggacctgttggtttttgcatgaatggataattccacaagagttgagatagaacaggatggaaaatctgatgatcattttatatttatttatttaatttttttttgagatggagtcttgctccattgcccaggctggagtgaagtggcaccacaacctccgcctcccaggttcaagcaattttcccgcctcagcctcctgagtagctgggactacaggcatgcactgccatgccaggctaatttttgtacttctagtagagatggagtttcaccatgttggccaggatggtcttgatctcctgacttcatgatccagccacctcagcctcccaaagtgctgggattacaggcatgagccactgcacccagccctgrtgattattttaaaattggaaagtctctaagacataacttctggaaaaatgtcaccatatttcatttgcaattcataaggatgacaggcagggcaatcagctag

SEQ ID NO: 910609 - DNA, 520 bp, Homo sapiens
aagcaaactcttttctaaccaaaaacaagcaaacaaagcaagggacctgttggtttttgcatgaatggataattccacaagagttgagatagaacaggatggaaaatctgatgatcattttatatttatttatttaatttttttttgagatggagtcttgctccattgcccaggctggagtgaagtggcaccacaacctccgcctcccaggttcaagcaattttcccgcctcagcctcctgagtagctgggactacaggcatgcactgccatgccaggctaatttttgtacttctagtagagatggagtttcaccatgttggccaggatggtcttgatctcctgacttcatgatccagccacctcagcctcccaaagtgctgggattacaggcatgagccactgcacccagccctggtgattattttaaaattggaaagtytctaagacataacttctggaaaaatgtcaccatatttcatttgcaattcataaggatgacaggcagggcaatcagctag

SEQ ID NO: 910610 - DNA, 622 bp, Homo sapiens
cagcttcatccatgtccctgcaaaggacatgaactcatccttttttatggctgtgtagtagtccayggtgtatatgtgccacattttctttatccagtctatcattcatgggcatttgggtaggttccaagtctttgttattgtaaacagtgctgcaataaacataggtgtgcatgtgtcttcaaagtagaatgatttataatcctttgggtatatactttatatattaagggaaattactctttgttcttacatgctaagaatattttttccaagtttatcattttttgacctttgtttataatatgccattgttgccacactgaactttgcattttgtatagtcaaatgcatcagtctttcatattttctttgggtggttttacagtttagctttatttaagtgctcaaatctttgttgcatctgagtttttaaattatttttatatttttatagattcaaggagtacaaaggcattatattgcatagtgatgaagtctgggcttttaatgcacccatcacccaaataggatacattttatccagtaggtacatttttaaccctcacccgactcccacccatctgcattatttttcagtgcagcaatttagataaagatc

SEQ ID NO: 910611 - DNA, 689 bp, Homo sapiens
aaagcacacaagaagtattaattatgatgaatatgcatataattgtttaatcaagatttcttaacaattgttcaaaaacatttttcaagtcattattcttcaatgtatttgctttcaaaggctgtgggcttatccttcatagtgatgtatttatctagtccacagtcttcaactaaacagtgctgcaatgagcattctcatggataaatcacagtgcacctgtctgcttatttccttaggatataatgtgctaaatgtgaaattgctgagaaaaattacatgagcatatttaaaacttttgatatgttttgctaaatggccttccagaaaaattatactgatttataatgctaccagcagtatatgaggtcatcttttccttatattcttattaatatcccatgttattggttttttaaaattatgccaatactttgtttgttaatttgaatttctttgatgactactgaagttggatgtcccagcttcaatatctcaggactttaaatattttttaaaatccctcaaagcttgtgtttacagaatgttaaccagcccttttctcctcaatgaatgaactctgtgtcttggcasgtctcttgtagtagcagaggcatcatctcacaggtagcagctgcttgatttaaatcccacctgtgctgctggtaacatacctcccatttaataga

SEQ ID NO: 910612 - DNA, 564 bp, Homo sapiens
cacaaaattaccacttacctgtcagtcccttatgggcaggtaggggggtcgctgaggtgcgagtgtgttgtgcttgaggatgacaaagaggccagggtgcatgaagggacrtaagggagagactggggtgaaaaagcaaagaggtgggcagaggatggataatgccggctctcataggccaagggagagtttgcatttgatctaaatgtgactggaagactaaggaagtttgagtgattgatgaatgaatgaatgaatgaatgaatgaatggtgtcccagtacctcatacagggctagaatgagagcaggagctgcacaccaattagttatgaaaataaacaggcaatattttaaaattaggcaatttttacatttaaaaaaatctcaattttcaatttgtcttgaaaaaacaaaaggcctggggacattgagcctgtattccaatatggcaacagtcacagaggaagagccatactgcccatcgccacccgcggaaccacctggggcttccctcactgccgactgcctgacagacaagtgagtctgcagcccctgaattaccc

SEQ ID NO: 910613 - DNA, 597 bp, Homo sapiens
tgtccgtctacttgatgcccatcactctgctagttcgtctctatgtattattatcccatttaatcctcacagcraatcaacaaggtaggtgctatttttgccttcatctgccagaggaagaaactgaactcagagaggtggccacttgcctgaggtcatacagctcataaatggaatagaccccaagttcctctgactgtaaagaccatgctttgcactactacctcacagaggcaagctgaaacccaaaagcagcaaatgcatacatgctattatccactgagagtcaccctgtgccaggcagaatgctaagaacagggatacatgatctttagtaacttctcagcagcccagttaggcaggcactgtaagttctactttgcagatgaagaaacagacactgagaggtgaaatgacttcctaagtagcgcagcaggacacggacagagtcaggactcacatcaagatctgtatagctccaaagtctgtgcccctttctgctttgtcacatccacccatgatgctcctctgtccttcctagacttctgggaccaagacctgaacaagaatttgaccagcacatggtaaggagggaca

SEQ ID NO: 910614 - DNA, 600 bp, Homo sapiens
aacctgcctctgagtgtcggttaggagggtggggaggagagaaggtggcactgagcagaattttaatcargttttagcggtctctacctgctcatgtaactaatcaaatactcctgtcccgagggcagaaattcacacaatgcatttccattaaaaaattactctttaatcaacttcctcctactcagggccatccgaggggcaggaggaccaggcattcttgccaaggtcatcctgattgtggaagcttgccaggacagagtcccatctctggaacaaagtcttctttgtgcgtggtgagatggagttggtgtcttttggttttattaacctagggactatttacccatctcactatttcccttgcatatgtctaaaaggcaaaactaggaaagggctaggtggtctctgaatcctctcctctctatctccctaaaagaggtggctgtttctgtcaagaccatttggtggctggagagacccacggcagatagctacttactcagctatttccgtgtgtgtgtgtgtgtgtgtgtgtgtgtgtgtgtgtgtgtgtgttgcggaggtcttcatatttgaaaaaatattttctttatatat

SEQ ID NO: 910615 - DNA, 622 bp, Homo sapiens
atgagtcatcaaggcaatacaaatcaaaaccacaataatataccactacactccaatcagcgtagctattatcaaatgaacagacgaaaaaaagaaaaagaaaaaaaagtgttgacaaggatgcagagaaaagggaactcttataaactattggtggaaatataaattagtatagccattatgcaaaacaatatagaggcagaactaccatatgatatagcagtcccactactgattacttatcaaaaggaaaggaaatcaaatattttaaagggatgcctgcactcacctgtttattgctgcactgttaacatagtcaaggtggggaatcaaccttactgtccattaacgaatgaatggataaataaaatatgtttatatacacaatggaatactgttctgtcataaaaataatgaaattctgttatttgcaagaaacaggaatagaggtggaggcattattttaagtgaaatcgcccagacacaaaaagacaaatactgtgtgttttcactcatatgtggaagctaaaaaattaatcttatggaggagggatagartgatggttcccagaggctggaaagtgtgggtgggaggaggaatgaagggaggttggttaatggg

SEQ ID NO: 910616 - DNA, 640 bp, Homo sapiens
gagtgaggtggtatctgatggtggtttagatttgtgttttcctgatgattagagatgctgagcactttttcatgtacctattggctatttgaatgccttcttttaaggaatgtctattaacgtcttttgcccacttttaattggactatttgttgttttgctcttgaattgtttaagttccttacatattcttggtatcagctccttgtcagatgtatagtttacaaatcttatttcccattctgtaggttgtctctttactctgtttttcctttgctgtgaaaaaggtttttagtttaatgtagtcttatttgtctacttttgtttctgttgcctgtgcttttgaggtcttattttaaaagtccttgcccaggccaatgtcttaaagcatttcctgtgtgtcttcttctggtagtttcatagttttgagcctcttatttaagcctttaatcatttgagctgatttttgtatgtagcgagagataggtgtctagtctccttcttctgcctttsgatagtcagtattcccaggactgttattgttttaatgtaatgaaaaagccctacatgtgtaatcacttctcattttgtaagaagatttttaacccatgtcacaggtaacagctgattttcctcactc

SEQ ID NO: 910617 - DNA, 575 bp, Homo sapiens
aacaccaacaatgaattagctaaaaagaaatcaagaaagcaattcaatttataatagccaataaaataaaagraaatatgtaggaataaatttaaccaagaatgttaaagacttctgcaataaaaactagaaaacactaatgaaagaaaatgaaaggggcacaatcaaagggaaagacatcccctgttcatgaatcagaagaactgatataataaaaatgtccacactacacaaagctatctagagattcaatgcaatgcttatcaaaatgccaatgatatttttcacagaaatagaccaaaagccttaaatttatataggaccacaaaagaccctgaatagccagagcaattctgagcaaaaagaacaaagctggaggcatcatacaatctcacttcaaaatatactacaaacctatagtaacccaaacaccatggtactggtataaaaacagatgcgtagattaatggaagataatagagactccagaagtaagtccatgtatttcagccaactgattttcttttttttttttcatgtttgatattaatttattaaagcattctggaagttcc

SEQ ID NO: 910618 - DNA, 633 bp, Homo sapiens
ataatgcataggcaactcactgacagaaatggatagtctaagacttaacctctctcccaggtaataagagaactgtataaaaaggtaaggtttgaaatgttcaaattctcccattttaaagggatcagaggctacttattaacatttcccatttacccccaagaaaagagcactggcagcaagctgcacttaaaaaaaaaaaaaggaaatgggttaaaggtaagtatctcaaaagaagagcccatggcattctaagcagtgagcaataaagttcccatttaagttcccttcaaagtggctgggaatacctgcacaaccacctccctcctgccaagagagaaaaagaaataagaatttttaagtggatcgaggtcatactcatgaacacatctgactcaatgctcacttattaaagtttacaaaactcccaattcacctgtcagcaaaccaaatctgaccacagaagatacgcccaataaattgctttcacatggttgactgtgtttccaaaataggacactctgattcttgagagaggaggcaacagagtgttcgcctatagtagtcccaaaccrtaaagctctcctagatcagtaaagcatcacaactaattgggaagtggaagacatcata

SEQ ID NO: 910619 - DNA, 588 bp, Homo sapiens
tgccagttcagtgtaggaagaaaaagaagtgatgaggcatatttttaaagacaaaaaacttaaaaaaaatggacaaaattatgactgcagacatgtggagagtcctatctacaccctgtcagatggtccaaacactccactcccaaccatttagccaaactttgcatctgtttatggctacatctaggaaatcaaaagcagatgacaacatcatcactgcagccaatgtttgtagcaaatattccttctctccaaaggcttagaaatttgtgaacgtggagccaggaagacggaatcataattaaatgcagatgtgctatcatgttatgctattatgcacctaaaagaaacaatgacctggagtgcaaaaccagtgtctccctgagagagccccagatggcacagtcgggctaaggacagatttcactgtggggacctggctgtgaaggaaggcctagaaggaaactaaagagataaacattgagattagagagtctrccttcgtcaatttaaaaaaagaagaaacaaagatattagagaaaactcatattgatcaagactagatctcagttctgaaattcggaggaa

SEQ ID NO: 910620 - DNA, 598 bp, Homo sapiens
aggtgggaggattgcttgagcctaggaggttgaggctgccgtgagctgtgattgtgccactacactccagcctgggtgacagagtgagaccctgtctcaaaaacaacaaataaacaaaaaatagcagcttcagtagaagcacatttatccagaggtggagggaaggaggcctggctacaagaaaccttcatgctcaactggcaaattcagctctgattgtaaagcataaaaggaagtatttttagagcaatacttactcaggaaacagtaaaactgaacattgtgtttcatcataactggctctaacttgctgtggctgattaggaccataaattttgagtgattcaggtatgccagaccctcaaagaatctaactgaaaactgtttattgaccaatgaaccacaggacttgttttaaccaacatacaggcctgtggactctttcctctctatccacagtgctagttttcaatccttaatttgtggccgttaacaaccgctgatttgtmccccctcagtgaaactactcaatcgacttttttctataaaatatattccattgtctggcaagttttaaaaaaacacttgatttttttta

SEQ ID NO: 910621 - DNA, 597 bp, Homo sapiens
agagatccactgttagtctgatgggcttccctttgtgggtaacctgacctttttctctggctgcccttaacattttttccttcatttcaactttggtgaatctgacaattatgtgtcttggagttgctcttctcaaggagtatctctgtggtgttctctgtattttctgaatttgaatgttggcctgccttgctaggttggggaagttctcctggttaatatcctgcagaatgttttccaacttggtttcattctcctcgtcactttcaggtacagcaatcagatgtagatttggtcttttcacatagtcccatatttcttggaggctttgttcatttctttttactcttttttctctaaacttctcttcttgcttcatttcattcatttgatcttcaatcactgatactatttcttccagttgatcgaatcggctactgaagcttgtgcattcgtcacatagttctcgtgccgtggttttcagctccatcaggtcatttaaggacttctctaccctggttattctagktatccattcgtctaatctgttttcaaggtttttagcttctttgcaatgggtttaaacttcctccttta

SEQ ID NO: 910622 - DNA, 606 bp, Homo sapiens
ttaccaagaaagtaacagacacaatttttcttaaataataattaagagttttgcagaagaaaaaccagggaaagaatataatctataagcaggtgtggcagatgtggttgttgcctactcaatagccatttcttttcctctttttcctcttcccatgataaagtctggaaatacccaataatttgccacattttcttgcagccaggactgtccatgttaggcaattctggccaatgaaatataaggtcaagactgctgggttgaggtgaggggtgcttcttgaaaagagaaatagaaaaatgtccaagaagagccttctttccttccctctttctttggattctgctatgtgagtttatgatgtgaagctgaggcaaccaccttgtgaccatgagacaaagagcctgaggatgggaatgccaatctcctgaggatggcagaaagtcaggaagaagtaagccacttactatagccttttgtgaaaaatgaaatctgcttatcattartccactgctggtgagagattcagttactaacaatcaaaggcagcttagctgattcagtgtggaaactgtatttttggtcattaaatttgacaaataagtt

SEQ ID NO: 910623 - DNA, 644 bp, Homo sapiens
gctattctgtgtattgtacgatatattgaaagaatggagaaaaactggtagtatttaattcctaacatgggtcgttattctgagattgtttttaaggaagacgaatggtcctttggaccacttctagcattcacagtatctttgtgtgtgttaaaaaatgggcaccctcggctgggcgcggtggctcacgcctgtaatcccagcactttggaaggccgaggcgggtggatgacctgaggtcaggagtttgataccagtctggccaacgggaaaccctatctctactaaaaacacaaaaaaattagccgggcatggtgggaggtgcctgtaatcccagctactccggaggctgaggcagttgaatcgcttgagcccaggaggcagaggttgcagtgagccgagatcgtggcattgcactccagcctgggcaagaagagtgaaactccatctcaaacaaaacaaaacaaaacaaaacaaaacaaaaaaacaccccaaaaaacaaacaaaaacaaggcagtgggggcaccctctgagttcaaaattrtacaaaggtcctcggttaggaggactattagaaaaaaggtgccactttttattagtaatgacacaaggcttgcaacagagtaagggctgcatttcaaagc

SEQ ID NO: 910624 - DNA, 644 bp, Homo sapiens
gctattctgtgtattgtacgatatattgaaagaatggagaaaaactggtagtatttaattcctaacatgggtcgttattctgagattgtttttaaggaagacgaatggtcctttggaccacttctagcattcacagtatctttgtgtgtgttaaaaaatgggcaccctcggctgggcgcggtggctcacgcctgtaatcccagcactttggaaggccgaggcgggtggatgacctgaggtcaggagtttgataccagtctggccaacgggaaaccctatctctactaaaaacacaaaaaaattagccgggcatggtgggaggtgcctgtaatcccagctactccggaggctgaggcagttgaatcgcttgagcccaggaggcagaggttgcagtgagccgagatcgtggcattgcactccagcctgggcaagaagagtgaaactccatctcaaacaaaacaaaacaaaacaaaacaaaacaaaaaaacaccccaaaaaacaaacaaaaacaaggcagtgggggcaccctctgagttcaaaattgtacaaaggtcctcggttaggaggactattagaaaaaaggtgccactttttattagtmatgacacaaggcttgcaacagagtaagggctgcatttcaaagc

SEQ ID NO: 910625 - DNA, 608 bp, Homo sapiens
ttaaagataacatgtcttgtttttaaattcaatctgataatctctgtcttttttggggtgttcagattccatcatttaattaagtcattattaagttggatttaaatataccaccttgttagttgttttctaatttcaccatcttttctttgttcatttttttcctgccttcttttttaatttcatttaatctccaatattggcttattgtttttttcctaacagtggttttcctatggtttataataggtattttaccttataacaatctactttcaaatagtatagtatataatatatagtgtactttccacagtatacttcatttcctctcctcctatgtgctgttgatatcatatattttacttctataaatgttataaggcccacaatacattgtttctattttttccttagtcaatcagcttttatttatttatttttaaatagagacagggtctcactatgttaaccaggctgctcaaactcttgggctcaagtgatccacctgcctcccaaagtgctgggattaaaagcatgagccactaytctcagctagataattaattaccttttagatgaataataataataaaaaaaaacagaag

SEQ ID NO: 910626 - DNA, 643 bp, Homo sapiens
ctccacctggtaatccagataattcttccagatcttatctaagaccaccaaggcagtacctctatgagtttgcaagagctgcagtgttactgggcttggggtgcctcctaatgcagatatggttgcaaygaccaaaaattaatatcacaaaacccaagtccctttgaatatctggaaaatattctcaagaaagataggtacaaataagcccagactgcagagactacaataaatgcccacctctttacactgatgaacatccacaagcatcaagaccatccagaaaaatatgacctcaccaaatgaactaaataaggcaccagggaccaatcctggagagacagagatatatgacctttcagaaagagaattcaaaatagctgttttgaggaaatacagaaatttaagataacacagagaaggaattcagaagtctatcagataaatttaattaagacattgaaataattaaacaatcaagcagaaattctggagctgaaaaatgcaattggcatacagaagaatgcatcagagtctcttaacagtagacttgatcaagcagaataaagacttagtgagcttgaagacaggctatttgaaaatagtcagaggacacaaaagaaaaaagaattaaaagagaatg

SEQ ID NO: 910627 - DNA, 637 bp, Homo sapiens
tctcaggaaactatcacaaggacagaaaaccaaaaaactgcatgttctcactcataggtgggaattgaacaaggagatcacttggacacagggtggggaacatcacacaccagggcstgttgtggggtgggttttgggggaagggatagcattaggagaaatacctaatataaatgatgagttgatgggtgcagcaaacaaacatgtcacaggtatacatatatatcaaacctgcacgtagtgcacatgtaccctaggacttaaagtataataataataataaaaaagcctatttgtgtatcagtatagccaccactgctctcttttaattactatttgcatagaatatctattttcattctttcactttcaatctatttgtctttggagctaaactgagtcttgtagatagcatatagttgagtcatgtgtttttatccattctgccaatctctgccttttgattagagagtttaagctatttaactctctaaacctaaagtgacaactgaaaaggggaggcttttttgctattcattatctagcttctaaaaattcctgtttctgcattacagttttcttttgtgtttagttgactttttttggtagtgaaatgtttaaattcctttctcatttt

SEQ ID NO: 910628 - DNA, 637 bp, Homo sapiens
tctcaggaaactatcacaaggacagaaaaccaaaaaactgcatgttctcactcataggtgggaattgaacaaggagatcacttggacacagggtggggaacatcacacaccagggcgtgttgtggggtgggtkttgggggaagggatagcattaggagaaatacctaatataaatgatgagttgatgggtgcagcaaacaaacatgtcacaggtatacatatatatcaaacctgcacgtagtgcacatgtaccctaggacttaaagtataataataataataaaaaagcctatttgtgtatcagtatagccaccactgctctcttttaattactatttgcatagaatatctattttcattctttcactttcaatctatttgtctttggagctaaactgagtcttgtagatagcatatagttgagtcatgtgtttttatccattctgccaatctctgccttttgattagagagtttaagctatttaactctctaaacctaaagtgacaactgaaaaggggaggcttttttgctattcattatctagcttctaaaaattcctgtttctgcattacagttttcttttgtgtttagttgactttttttggtagtgaaatgtttaaattcctttctcatttt

SEQ ID NO: 910629 - DNA, 614 bp, Homo sapiens
aaaattcctgtttctgcattacagttttcttttgtgtttagttgactttttttggtagtgaaatgtttaaattcctttctcatttttttgtgtrtattctatagctattttatttgtgattatcatggagattacatttataccctaaagttataacactaattggaatttatattaacttaacttccataacatacaaaaactgctcttttatagcactacccccaccccttttagttgttgatgttacagaattatatctttatacattgtgtgccccaaaacataaactaataattaatttaaatgcattattttattaaattatgtgccccaaaacataaactaataattaatttaaatgcattattttattaaattacgtagaaaacaaaatattttacagaccattgctacaataatattagcttttataattgcccaagtatttatctttattcaatctttatttttttatatagctttggttacttttagttactgtatagtaacctttttcagggaatgtctagggtaataaactccttcagcttttccttatatgggaatgtattaatctctccctcacttttgaaggatagttttgccaggtg

SEQ ID NO: 910630 - DNA, 551 bp, Homo sapiens
aatcctagattaggttctactagttgtgtgaccttatggaaattacttagcagcctctgtgagcctaccctcttgggtttattgtgagaattaaatttgataacgcatgtaaaatgccatcacagtgcctggcccataaagtgataaataaaagcaataataattattattatgaattatcatgtggttggaatccaggttccactacttactgctacatgagtcttggcttcctcttctgtaaaataagaataatgatgttacctggtaagagggctgtggtgatcctgaaatgagttaatacatgtaatgctctcagggctggctggaggtcctaccagcagagttgaactaattgtacccctgagatgaagaactgctgtccttttcctaggagtggtagcagcatgcctagctcacagttaagtgttggatcaataaatggtagtcagtrttactattattactagaggccaggatactctctgtctattcatccgtggattctcagttaatggcgagttggttgcctggttattaagtgctgattt

SEQ ID NO: 910631 - DNA, 641 bp, Homo sapiens
ggagctactgaccatgacccaaacacctccatttggcccctcctccaacattaggaaccaaatttcaacatgaggtttggagaatcaaatattcaaacaacagcagggacttaaaaacatttcctactttttcactgagggggaaagcagtgacaaaggccttcattctggtgtttacggtatatatgtggtcatcctatctctcatcactttcgtgggctatttggtgaaagaaatgggtgggactccttgagccctggcattaatgtaactacctattacccatgctgagttgatgcctcataacaagattaatacagacatggacaatatgcaagctgtgggagtagaaccttctctacgcaactcaaaaaaatgacatcctgatgcacaggtagagatgcccattcttctccttctgtggaaccaaagggggtctccctagatccagagtagaacactgtgactttaataaaagtaactggcaggggccaggcacagtggctcatgcctgtaatctcagcactttgggaggccraggcaggaggactgcttgagcccaggagtttgagatccagcctgggcaacatagtgaaaccctgtctctacaaaaaatacgtttgtttgtttgcttgtttgtt

SEQ ID NO: 910632 - DNA, 553 bp, Homo sapiens
gaagccaacctacactcctgaacaatttcactgacatgcatcagtaaagtcctgtatttgtttaagcctatctgaactggtgtttctgtcacgtacagcaaagacagttttgatacatgcacactcttaaaggcagaaaatgaaagacatggacccaaatcttagtgaggtgacagggtctctctgtccatctccacagagatgaagggaagggactgggccagaaagcagggacaaatcggtttcttcccacataccaaccccagtcactgggtagtgccagctggaacactggtgaggaggattctggggccccacaggaagcctagagacagaatgctgtgattgattaggaatgtctgccacaggtgcaggagagggggtaacaagctcaccactggtttgtcattcctcatcccctgagcccccttctacgacamggtctgcaatgttttcctctccttcagcctgtgggaagggcaggggcccaacgcttgaggcttggagaagttaaatttagcaaaggacaacatcccctctgcagcaccgtgcc

SEQ ID NO: 910633 - DNA, 629 bp, Homo sapiens
ccacataacaaaaaccagaggtatttttctgttgttctcctttcctttgaccccctggtgcttcctccaagtatccttaagtgtgcaggtgcctgtgttaggggaggaataggtctatggtccaatgagctgatgagatgataaatgctgcgactttgagattctttttaatctcagccttatggtaataggccatggaagagtgtaaacagtttgggctaaggctttctaaatacagttgatgagatcctgggaaccacttatcttgggtggagtggagcacctcactttgagtttggtgttagcgctggggcaaaggtctaaggccttctccagtgattgtgctatttaaggatgttcaagggatggtgagggcctttggaaacatctgagtggagtttggagccagagggaccctggagagacccagccagcccttttgtttctcagggccagaaggaaggtgcccacctttcctgtgaatgagtcatccttgggactagaagcctgggtctkccagcttagtaaagcctctgttttgctctggtaccttacccatctacgcagcctagtttgtccaccaaggtgctgatgtggcctgcaggagttattgccaagacataattctt

SEQ ID NO: 910634 - DNA, 548 bp, Homo sapiens
tatcttttctatgttttaaaaattcatatgtaaatatatatctacaatttgcatgatttaaatatttaaaattcatataagttatactgcatgtataattctgaaaaaaattaatattatacctttgagatttatcgatgttgatacgtagagctctgattcattcatttgagctgctatgctaaactgtagttataatctatactttccttatcagtttccctatccctggttgcatccagcctttctctgttataataaacgcttgaagagaaatctgcactcccatgtttattgcagcattattcacaatagccaagatatggagccaacctaagtgtccatcaacagatgagtgaacaaagaaaaggtggtacatatccacaatggaatactattcagccataaaaaaagaatgaaattctgccattcctggaaatgtagatgaatgaaataagtcagrcacagaaagataaataccacatgttctcactcatatgtaggagctaaaaatgttggactcatagaagcaaagagtagaattgtag

SEQ ID NO: 910635 - DNA, 613 bp, Homo sapiens
gacatacaaatggccaacagttatataaaagatgatcaacatcacaaatcattgggaaaatgcaagttgaacacacgagatatcactttacacctgctaggatggccattattaaaaaatgttaatgaagatgtgaagaaaagggaatgctggtacactgtaaatgagaatgtaaattggtatagtcattatggaaaacagtacagaggttccttaaaaacttagaactaccatatgatccagcagtcccacttctggatatcaaaattaggaaggaacagaaattaggatcttgaagagatacttgcacttctatgttcattgcagcattgttcacgatagtgaagatataaaaacaacctaaaagttcactgttgaatgaattaataaagtatggtgtatacatacaatggaatgttatttagacttaagaagctatgttgtcatttgcgacagcataaatggacctagaggacatcatgctaagtgaaataagccagacacagaaagacaaatattgtrtgacctcattgtatgtggaacatactatagtcaaactcacaaaagcagaaagtagggtggtggcttccaggggtgaggggagcggggaaga

SEQ ID NO: 910636 - DNA, 621 bp, Homo sapiens
gatgatgcagcaagaaggcccttgacagatgctgggaccctaatcttggacttcccagcctccagaaccatgagccaataaatttctgttcattataaattgcccagtctatggaattctgttatagcagcacaaagcagactaacagggctgcagtcagatgtcagcctgggctgcatcatttgaaggctctgctgtggccaggggatccactgccaaggcagccctcactggctgccgagctggtgctggctgctggcaggaggccttagcatctctctgtgtgggcctccccagggctgcttgggcgtccttttggcatgtggctggcttcccccagcatgagtcacccaagagagcaaggcgggagctgtagtgccttttctgacccatcaacattctgctggacacagaggccagccctgattgaatgtggaaaggactgcatgagagtgtggctcgaggaggccagaaccattggcagccacctgggagwcttggcgatcacagagagagggagacaagacattgtatggaaactgtgagtggctgtgtcaagctcataatattccataaacatgggtggggaagataaggatgaatgattagcaaggaaaggag

SEQ ID NO: 910637 - DNA, 591 bp, Homo sapiens
ttttcatcttttaaaactgaagctccatacccattaaacagtatctccttattctccctttcctagcctctggcaaccaccattctactttctgtttctacaaatctgagtrctccaggtacctcttataagaggaatcatacagtatttgtccagtttgtgcctggcttatttcacttagcataatgctctcaaggttcttccatgttattgtatgcatccaattttccttctttttaattctgaataatattccattgtatagacatattgcactttattatttactcatctgttgataaacctttcagtggcttcttccttttggttattacgaataatgctgctatgaacatgggagtgcaaatgtctgttcaagttcccgtttttaattatttcaggtatatgccaagaagtggagatgctggatcatctggtaatttaacatttaatttttgaagacccactatactgttttccgcagcgaccgtaccatattacgtttcctaccagtaatatgagaaggttctactttctccacatcctcaccactatttgtctttttatgcttttgttttaatactagacatc

SEQ ID NO: 910638 - DNA, 640 bp, Homo sapiens
ttcaaagatgacttacctatttggaaaaataaaacaaagcattctcatattatatsacatattaaaatatattccacctggattaaggagttatcgaaaaagtgaaactaaaatttaaaaaataaaaccagaaaaatacctgaaagtctaatttgtcttctgttggtgaaggactttctaaacataaaaaaaatcacaagggaaaagtaataggaagatttgactacctggaatgtcaaaaaattcttaactaaattaaaagatcataaattggttacgattgcaacgaaatgtatatgcttaatgtagaaagtgcttatatgtgtgaaagagcttataatatatatcaagctttgtaacatatatcaaaactcttgtcctgtgatttctaattcttcttcaaagactttatatccaggaaaatcatcagcaatgaggcaaacgataaaaagggtctgcccagaaggaaactttgtaacagaaaaagatgtgaaataatccaactgcaggaaccaactcaatagggggaggattgcctaattttcaagcatttctgattcattatgtcaccattagcatagtattcccaaaacgcacttcgtgacatgcaaagatcccaagataaaaatttcacctatgt

SEQ ID NO: 910639 - DNA, 569 bp, Homo sapiens
ttatttaatttttttatttaaattttttcattgcaactttattcttataaaatatatattgtcttttawaaatttggaaaatataaaaactgtgaaatgaataaaatataaatcatacatattcctgtaacctcaatacaattattgtcaggctgtgacatgtataatcacctatgattttgtacacacatatttctacttctcttattaatactactgactgttatattgtgagtattttcctataccattaaatattctttggaaacacgatcttaatggtcctcttcctctcatacatgagaggaaggcattttcccttcattggctccatttaggctgttctccaacttttccctgtctcaaacaccattgccacaaacatcctccaggctgagtctctgaactgctcctaacttaattgccctcactccaaaagtgagggcaggtaaagggacttcaggctgccctcagcacgtttgtgtcccctgagcagactacaaagcagtgttctctgggtggagggatcacaaagacacccctcctctcacacgacccattagaaaatg

SEQ ID NO: 910640 - DNA, 644 bp, Homo sapiens
ccaaagtagagcaaaaaaaggagcaatacctggacttttcccttcagtttstaccattcattctctatactgctcagatttctaacatgtatataatgtcattatcctgctcagtatccttcactatttcccaatcacctatgggcaaaatctaaattattttgcgtggtatatgtgctagttttctattgtcatataacaaattgccacagacataacactttaaaacaacacaaatttataatctcagcgttttcgtgggacagtccaggtacaggttaactgagtcctcttctctgggtctcaacaggctgaaattaaggtgtggcccagggctacaattctcacagaaggctcggggtcctcttccacactcattcaagttgttggaagtattcatcttcttgcatttgtaaggttgagggtcccattttattgctgtttgctggagaccatcctcagcatctagagaccacagctagttccttgccacatgcttcccaaaggcagttcacaacatggctatttgctatcttgctagccaggaggagtacatctctgactttttaatacccatttaagagctcatacagtatcatctccctttttatgaactctaagtcaattgattagtaacctaaaca

SEQ ID NO: 910641 - DNA, 616 bp, Homo sapiens
caggactacatttagccagtaagtatctgtccaaccagatttgcagtttatgaataacaccttttctgaaatcttagtgttttagctgattaagctggtttctatgccayacaaactattacattttaaatatctcccttgaaatagaaatagtggcatttaaatttcctgaaaggttttaagagaacatttgaaatagaaaggatatactggccttggcttctctgcatgattgtaagtgcaacttggtagaaaaacagcaactatatttagtttcaatgaatagactatatgtaagtatctagcaatcacaataactatcttgactggagaatttcaggagaatcctcaaattaacgatggaaaaacaattaaatgaatggaaactaaaagatgagaaaaaatagaaaaacaacaatgtataatgaagcataagataaaataagaatgaatgaaattgttaactggttttcacggtaaataggaatggtaattaagaaaccttgagtcaataagaaaaccaaaagtgaaatgacaagctatctagaaaataacaaaagaaaaacttcataagactatctatatgtaacacagcaaaataatatctacgtataat

SEQ ID NO: 910642 - DNA, 631 bp, Homo sapiens
aaggtgccaagtgcatagtaggcactccattaatgctgaatacataaatacatgcatgaacatatgaaacctatgggtaaataaaaagctaaatatattcacattcactctttgtaatgcttgctgttttgagcctgcaatgttccttaccaccagaaagagcccaagatctcagataatgaaggtaggatcctggataagaaaaaaaacctccacattctgcctcctacttagcctttcttcttctctctcctcccattcaattggcctagctattctgactcaccaccccctacccctttcccacctctaccctcccctgaaacggaaaaaaaaaaaacctcacttggctttcctccccctccaatctgccctagagatgacccccagctcgttgccagggagatggtctgggtaacaggtgctactgagggaaggctttttctgtcaggaactgcttagggtgaccaaccatcccagtttgctcaggactttcccgatgttagcactgaaartcctgaaaaacgactcagtccctggcaaactgggacagtgctcataatccttcacgctttactctacaaaaccttatgtcgctgcacacagttgtcagcatctgtgtgccctacag

SEQ ID NO: 910643 - DNA, 543 bp, Homo sapiens
gctggtctaagagttagaagacatgcacccaaatccctcatctagggataaaatattagcctcacaggattggaagacactttaaaatcatattgttgcacatcccagccaacacttgtgtcttctactattaactgtcagtgtaaccttggttcagttagcctcctttgagcctcagttgtacctatataattaaggggttggaatagacattttctaagaattcttagatatctaatatcattttattctagaattctaacatttagaaatgtatttccaaaagctaagtttcagtaaaactgatttagaaagatccctttctgagatatatcaagactcggagatactcagtcacaaagaatggcaaacaccagggacttgggacacttaagccaagaccaagtacaaacaccctgcatctctcatcttgttatatctggcctcaggattgacagcagctttggtcacagacgcargggtccttggagggtttctagatcagactcttcatccatgaaccttactaactcaaacttgaga

SEQ ID NO: 910644 - DNA, 598 bp, Homo sapiens
cacatacacaaacatacaaacacacrtacacatatatacacacacacacacatacccatacatacccatacatatacacacacataaacattaagctctgagtaacaatagaaagagtaattgctacaattacatcttactgtggccaaaggctttggggacacagacgtggttggagttcctgctcagctattccctccatatgttctggtgcgagtaaaacaccttactgggcctcagtttcctcatctgtacgataaagtccagtaagcagccctgatcttttttttcctctgagcgagggtctcgctctgttgcccaggctggagtgcagtggtgcaatcttggcttactgggctcaggtgatcctcccacctcagcctcacaagcagttgggactacaggtgcacgccaccacacccagctaattttcgtatttttggtagagaccgggttttgccatgttgcccaggctagtctccagctcctgggctcaagtgatctaccggcctcgacctcccaaagtggtgtgattacaagtgtgagccaccgtgcctggccagccctggtcttaacaagctaccctatgcacagaaag

SEQ ID NO: 910645 - DNA, 620 bp, Homo sapiens
ataaaacacatactggagtttgaagacggtagaaaaaaaaaagaatgtaaattatttcataatcatttaaaaattgataacatattgatcatattttgggtataccagttaaataaaatatattattaaaagtcatgtcacctgttcctttttacttcaaatgtggctaatagaaggtataaagttacacatgtggcttgcattagtttctactggacagagctggtctggatggaagattatttttttctttggtttgttttctcattccatttccccgccaccctccgttggtttggaagttaagctttctctgcttctgattttagtatagtagttgtagttctcaaagtgtggtccctggactagtagcatcagcagcatctgggaatttggtagaaatgaaaattctagaactgtaccccagatctcctggaacagaaactctgggggtggagcccagtggtctgcttcataacccaccagataattctgaggtattctcaagttctagaaccacggycttaatgattacccttgaaaagtcactatacctatttaccttaataaaacctagggttgttcaatatcctaatgccatcctaaatagtaagaattat

SEQ ID NO: 910646 - DNA, 570 bp, Homo sapiens
aattcaaatatatcaccctcatcgtctttcttcccacgccagacactgcactaagcacttacacccattctstcccatttccacgtcaaagaggaaatggggctcagggagattcgctgttggcccgaagttgacagctagtgagggggcagagctggtacttgaacctggagcctatcctcttcaccactcacttgccacaaaggcgtggctttgtttcacagccccccttcttgcttcccacactccaggtccctgtgcatctccacagggcagggaccggtgggaatccttacctaggtgacagtgaaaggctgctggtcgagcttttcctaaagtctacctctgagggtggctcactcatccccagctgattggggtggatagggttccagttactgacactgtgaaatagcctgacccttgacagccctccctcaaccccagcaggagagtccagccagccggagcagatagatcagctccccggagaagggcagggttcaaaatggaaggacaagaccagaggctgagtcacagccttggaaaatctagttacagggtcggggg

SEQ ID NO: 910647 - DNA, 591 bp, Homo sapiens
cattctgtcccatttccacgtcaaagaggaaatggggctcagggagattcgctgttggcccgaagttgacagctagtgagggggcagagctggtacttgaacctggagcctatcctcttcaccactcacttgccacaaaggcgtggctttgtttcacagccccccttcttgcttcccacactccaggtccctgtgcatctccacagggcagggaccggtgggaatccttacctaggtgacagtgaaaggctgctggtcgagcttttcctaaagtctacctctgagggtggctcactcatccccagctgattggggtggatagggttccagttactgacactgtgaaatagcctgacccttgacagccctccctcaaccccagcaggagagtccagccagccggagcagatagatcagctccccggagaagggcagggttcaaaatggaaggacaagaccagaggctgagtcacagccttggaaaatctagttacagggtcrggggagaggctggcggccgtcagtttgtaaatcggcagtcctccctgcaacctggacaaagccatttctcggaaaatccaattagaattc

SEQ ID NO: 910648 - DNA, 558 bp, Homo sapiens
cacctaaataaatcatattatgagaagacagaaatgtaattattttgactggtgggtctctggcgggtgaacatcaaacttaaacctcaaaccaagctgctaaattctccccagatcagtgtagcatctcctatttcattgagcatgtgctacctattctttaagacctaattgaggcgctgtgtcaaaaacaatatggcccaacacatcttctctccagtgacggaggaaaaaacatcaagttctcactacctcgtatttgtcctttgtcagaattaaatatgagctcagtataacgtggataatgtgttatggctgcagtttcaaaatgagagcctttgcaaacttaagtgtcattatgaatcttctctcgacatctagtggcatttttgggttgtagctaagagagcttattagtacgaatagcatgttaaactccagcatctcagtaattcatttccccttgctctgagggaacaggctaaggtccygcttggctgtaaggggcttgaagaccccactgtattcactgtcatctttcccctttgacggtgaaga

SEQ ID NO: 910649 - DNA, 558 bp, Homo sapiens
cacctaaataaatcatattatgagaagacagaaatgtaattattttgactggtgggtctctggcgggtgaacatcaaacttaaacctcaaaccaagctgctaaattctccccagatcagtgtagcatctcctatttcattgagcatgtgctacctattctttaagacctaattgaggcgctgtgtcaaaaacaatatggcccaacacatcttctctccagtgacggaggaaaaaacatcaagttctcactacctcgtatttgtcctttgtcagaattaaatatgagctcagtataacgtggataatgtgttatggctgcagtttcaaaatgagagcctttgcaaacttaagtgtcattatgaatcttctctcgacatctagtggcatttttgggttgtagctaagagagcttattagtacgaatagcatgttaaactccagcatctcagtaattcatttccccttgctctgagggaacaggctaaggtcctrcttggctgtaaggggcttgaagaccccactgtattcactgtcatctttcccctttgacggtgaaga

SEQ ID NO: 910650 - DNA, 529 bp, Homo sapiens
ggccgcaaacctaaaataaaagttaaaaaaagaaagatgtgaaaaggcaccaccttctgatatcgttctgggagttgcagctggtctatatgaygcacagacctatcatatatgtgaaagccatcccacaagagtctgagcgactgtttttttttttttttttttttagtaaccctgaattcttctagctttaggcagcctctccttgcttcttctgacaagtacaggaaatggaaagattcaggagcaggaggagccccctgtaaccctgctaataagggagataggtcaaaagagaaaaaaacatgttagcggccaatcggtgtaggaaatgttctagtttagttagctacaaagctgtttgcagattaagcctgaatggtatagaggttaaaagcctaagctttgtatttctgtcatttgtcagcctgataaatgtacactatacaaggaacataatgattaaaattacaaataagaaaatacatttataaaccaagaaaaccaaacgtggaggagaaaaatggag

SEQ ID NO: 910651 - DNA, 687 bp, Homo sapiens
actgagctacagggttcacagagtaagcattacttytggtgtgtcttgagggtgtttctggatgagactagcatttgagttggtggactcagtaaagtagctggtcctacccagtgtggttggcattatcagatccattgagggcctgaacaggacaaaaggttaaggaaaggattaacaacctgtttttctgcctcagtgcttaaattaggacatctcatctcatctcctcctgcttttggactgggatttatatcatcagctcccctgggtctcaggttggactgatttaccctactggctttcctgagtccccagcttgcaatctgctgatcatgggatgtcttggcctccgtaattgcataagccaacttctcataataaagctccatgtgtgtgtgtgtgtgtgtgtgtgtgtgtgtgtgtgtttgtgtgcgagtgtcctattgtttctgtttctctggagaattccgactaataccgagtaagctcagtgcttaatattgtgcttagcacatggcaagttctcaataaatatttgttaaggaagtcattcaaatttctaaaccttagttttctctgctacaaaatacagtttttaaaatcctactctttccactttgcaaatccttgtgaggaaaaagtgatcatttttttcatatggccacatttcccagaaaattccat

SEQ ID NO: 910652 - DNA, 413 bp, Homo sapiens
tgctgagctcttcaaagaacggagccactgggaggtccgagtgggaggagtcactggatgatttatcccgcaggagagtcacaggaactgggagttttagggaggggttggggaacaatgatctggaaattttggcgaggagtgagactcctgtccctcccctatgcccagtgggaggactgctggggaggccaggtccttaagggaaagccaggtacccaccacagtgggaaggtgaggaggctgttcagggaagagggtaaggagctagggtcgtttgctgaagggagactgagatggcgagtgagggaagggaatsaaagagtgtttcatgcaccacgcggggatgagagctgggtgcttagggtgacctggggttttgaccttgtgtggtggctgaagcggggttgggg

SEQ ID NO: 910653 - DNA, 656 bp, Homo sapiens
attggttccacaaatactatctctttagttctttcatgtaaatccatgtaaatatttagaaaagaagtcaaaaactacagcattgtatttattgcttttaaaattcattatctcaaggaattaaaaataaaactgatgaagctcactaatttaagcaacccattaatccttttgttaacttcatttcattgtttattcagcaaaatacaaaagcaaaaggctgctcagtactcaacctcttgggcaattgcaaatacgtaaaccaccctttaaaggaccataaacttccaaagtcataaatgctaaataatgttttttcaattatagggaaaggatatttttaaaatagttaatttctccagataatttttgaaagccacaaatccaaatgaaaattttgttgaaaataagtgaaaattaactgacagagtaaaagaaatcaagtcaattccaatatatcacataacagcttctcaaaatttccccataaacccctggacaaccatatttttcacaatctgaaagaaytgcctacatagggccatgaaagaaattctggcaagtaaataacaccataaaattatacttgtgccactccaacatctttattaaaaaaactgtttttatatctactttaaggtcaagagggcttttcc

SEQ ID NO: 910654 - DNA, 467 bp, Homo sapiens
ggtttttatcaggggtttccacttttgcatccttctcattttctcttgccaccaccatgtaagaagtgcctgttgcctcctgccatgattctgaggcctcccyagccatgtggaactgtaagtccaattaaacctctttgtcttcccagtcttggggatgtatttatcagcagtatgaaaaaggactaacacacagtcccatcttctttttaaagggtatactccagcaaaactagggaaagaaaaagacatgaaatccaggcaatagaggatgctacccaggagggtaataaagagaattccccaaatggcatctgtgcaataggcatagagagcagcctgcctcgtctatagcaggtggacagagctcctggagagatgtctccatgttgaaacaaaaagagaaggtaatgagacaaatagagtctgatatgagagttttggaaaacaataatcaaagcataggt

SEQ ID NO: 910655 - DNA, 451 bp, Homo sapiens
tttatcaggggtttccacttttgcatccttctcattttctcttgccaccaccatgtaagaagtgcctgttgcctcctgccatgattctgaggcctccctagccatgtggaactgtaagtccaattaaacctctttgtcttcccagtcttggggatgtatttatcagcagtatgaaaaaggactaacacacagtcccatcttctttttaaagggtatactccagcaaaactagggaaagaaaaagacatgaaatccaggcaatagaggatgctacccaggagggtaataaagagaattccccaaatggcatctgtgcaataggcatagagagcagcctgcctmgtctatagcaggtggacagagctcctggagagatgtctccatgttgaaacaaaaagagaaggtaatgagacaaatagagtctgatatgagagttttggaaaacaataat

SEQ ID NO: 910656 - DNA, 569 bp, Homo sapiens
cctctctgatctactttatattatgctgttgtattaattaattatgtcattccatgcttaaaaacctttaatttattkctggagaataaactttacaccttttggcctgacattgaagcccttctaaatttagttgccctgatatgaatgagtgacgtgctgcaggagaaagaggtgaggagttgggagaccttggctgctgcccaattctactgcttaccaaactgtgaacttgggcaaagcaattagcttccacgagccagagctacttcatcttgaagttgtagagtatcataatgcctggattaaaaggttgttaagggaatcatatttttaaaacaatgactatgaaagcactttaagtggacaacaaaatgttatccttattcttgtttgtgattattcttcccatcttttcctccattgaatgtccttacgcactgtctactctgaagtatttaatattcttcacaaatagcccacactttacttttttgtattagttttctattgctgctgcaaccacagtacacacaaatttgggggcttaaaactatgcaagtttatta

SEQ ID NO: 910657 - DNA, 562 bp, Homo sapiens
ctctgatctactttatattatgctgttgtattaattaattatgtcattccatgcttaaaaacctttaatttattgctggagaataaactttacaccttttggcctgacattgaagcccttctaaatttagttgccctgatatgaatgagtgacgtgctgcaggagaaagaggtgaggagttgggagaccttggctgctgcccaattctactgcttaccaaactgtgaacttgggcaaagcaattagcttccacgagccagagctacttcatcttgaagttgtagagtatcataatgcctggattaaaaggttgttaagggaatcatatttttaaaacaatgactatgaaagcactttaagtggacaacaaaatgttatccttattcttgtttgtgattattcttcccatcttttcctccattgaatgtccttacgcactgtctactctgaagtatttaatattcttcacaaatagcccacactttacttttttgtattagttttctattgctgctgcaaccrcagtacacacaaatttgggggcttaaaactatgcaagttt

SEQ ID NO: 910658 - DNA, 596 bp, Homo sapiens
tcctgaccgtgaccatgtttagggcccacttagataatccaggataatttccccatctcaattcccttaatttaatcactcttcaargtcccttttgcccagtaagataatgtaggggttaagatatagacacttccagggaccaatttttttgcctaccacattttgctgagtttctccttccaccttgggtttgctactcccaaagcacaagtgcacatcctacttaagtgtcttctttgctacaaaccttttcagttactcccaactggaaaaaaatctctttccttagtaaactctctgtggtaggagaaacatttttaaggtggccacgtgtttcctctaccaatcttcaactggatattttgaatgttgctttcttagctactctccacttctcagatctgtgaagacaggtgctgacgagggaccccaggggagggcagatgatgaatgaaagactttattgttttagagctcagagagaaatcctcccattgcttttcacagcaccatgaaggaacaaaataaagggctttaattagttggctataagcagcttcttggactttcttaagtgattttgagaaaagaga

SEQ ID NO: 910659 - DNA, 226 bp, Homo sapiens
ttctctctcacaaaatggatttccaaaagctttactctgattccaagagttggatggaagacagtttatatatacaagctggaagccaccacacccagtctatttcttaaaatttggacaatttattaaagtgatatgtgyccatggttaaaagctgtcactttccaagtctcattcctcagaggcaacttctagaaattcttgcagctttctttttctctagcag

SEQ ID NO: 910660 - DNA, 571 bp, Homo sapiens
gccgactgacacctcacacggccgagtgcccctctgagacaaaggcttccagaggaatgatcaggcagcaacatttgctgttctgcaatattcgctgttctgcagcctccgctggtgatacccaggcaaacagggcctggagcggacctccagcaaactccaacagacctgcagctgagggtcctgactgttagaaggaaaactaacaaacagaaaggatatccacaccaaaaccccatctgtacgtcaccatcatcaaagaccaaaagtagataaaaccacaaagatggggagaaaccagagcagaaaagctgaaaattctaaaaatcagagtgcctcttctcttccaaaggaatgcagctccttgccagcaacaaaacaaggctggacggacaatgactttgatgagttgagagaagaaggcttcagacgatcaaacttctctgagctaaaggaagatgttcgaacccatcgcaaagaagctaaaaaccttgaaaaaatattagacaaatggmtaactagaataaccagtgtagaaaagtccttaaatgaccagtggagctgaaaacca

SEQ ID NO: 910661 - DNA, 625 bp, Homo sapiens
gtggtctgacagagtacttgataaaatttcaattttcttaaatttactgagacttgttttgtggcttttactgagacttgttttgtcatatggtctatcttggagaatgttccatgtgctgatgaatacagtgcatattctgcagttgttaggtagaatgttctgtaaatatctaagtccattagttctggggtatagtttaagttcattggttcgtgttgactttctatcttgatgacctgtctagtgctgtgaatggagtactgaagtcccccactattattgtgttgctgtctatcttatgtcttaggtctggtagtaattgttttatgaatttgggagctccagtgttaggtgcatatatatttaggattgtgatattttcctgttggactagttcttttatcattacataaggtccctctttgtcttttttaactgttgttgctttaaagtttgttttgtctgatataagaatagctattcctgctcatttttttgtgtccattttcayggactatcttttttccactcctttaccttaagtttatttgagtccttatttgtcaggtgagtctcttgaagacagcagatattaattagtgagttcttatcaattttgcca

SEQ ID NO: 910662 - DNA, 565 bp, Homo sapiens
atggagaaatattaaaggaaatagatagcataaataaaaacaatcaaaacttcaggaaacaatgaacacacttatagaaatgcaaaatgctctggaaagtctcagcaatagaattgaacaagtagaagaaagaaattcagagctcaaagaataagaaaatataaacaaagcctccaagaagtctaagattatgttaaacaaccaaacctaagaataatcggtgtttctgaggaagaagagaaatctaaaagtttggaaaacatatttggggaataattaaggaaaacttccccagccttgctagagacctagacatccaaatacaagaagcacaaagaacacctgggaaattcatcacaaatcgatcattgcctagggacatcgtcatcaggttatctaaagataagatgaaggaaagaatcttaagagctgtgaggcaaaagcaccaggtaacctataaaggaaaacctgtcagatcaacagcagaattctcagcagaaacccwacaagcttgaagggattggggccctatcttcagcctcctcaaacaaaacaattatcagcc

SEQ ID NO: 910663 - DNA, 619 bp, Homo sapiens
aaagaagagagccacaaaatgtgtactgttcaatgttgtgtgcacatctagcatgaaacatcttttgcatcagtgaccaatctgagtacttacatcttaactctaaggcacacactaaaatacataatgcctggttgttcctagatacttacttggtataaaatttaattttttctaaaaatgatcttatatggtagcttttttttttgagacggagtttcgctcttgttgcccaggctggagggcaatggcatgacctcagctcactgcaacctccatctcccgggttcaagcaattctcctgcttcagcctccagagtagctgggatcacaggcgcccatcaccatgcccagctaattttttgtatttttagtagagacagggtttccccatgttggccaggctggtcttgaactcctgacctcaggtgatccacctgcctctgcctcccaaagttctgggattacaggcgtgagccaccacgcccggtcatatgtagctctttactgtctttacarcatgatagctgcttaatacatattcaatattcattgaattataacattcactgaattgcaatattttttctcattgttcactctgttttccgatttttca

SEQ ID NO: 910664 - DNA, 619 bp, Homo sapiens
aaagaagagagccacaaaatgtgtactgttcaatgttgtgtgcacatctagcatgaaacatcttttgcatcagtgaccaatctgagtacttacatcttaactctaaggcacacactaaaatacataatgcctggttgttcctagatacttacttggtataaaatttaattttttctaaaaatgatcttatatggtagcttttttttttgagacggagtttcgctcttgttgcccaggctggagggcaatggcatgacctcagctcactgcaacctccatctcccgggttcaagcaattctcctgcttcagcctccagagtagctgggatcacaggcgcccatcaccatgcccagctaattttttgtatttttagtagagacagggtttccccatgttggccaggctggtcttgaactcctgacctcaggtgatccacctgcctctgcctcccaaagttctgggattacaggcgtgagccaccacgcccggtcatatgtagctctttactgtctttacagcatgatagctrcttaatacatattcaatattcattgaattataacattcactgaattgcaatattttttctcattgttcactctgttttccgatttttca

SEQ ID NO: 910665 - DNA, 550 bp, Homo sapiens
tggagaaatttaaccagagatgacacagaacagcgattatttcagcatagcccttaaactccagggatatgctaaggttactccagcatgtttggrtaaggaagaagggaggtaagctgaggcagagtacatacttcaaccaaatatgtttatgagcacagcttctaccatggcttctgtcagttccattttgactgttgcaagtcacttcacctctctgagctcaatttcctaagtaccagataatgatggcattaactgatgtcgtgactatttgagttggcttgggtggtatcagatgagatattggttgataggtaagaaagttactacgtgtgactctgagttcacacatctgagggtgtgcacaggcatgctggctcctcactagaactatgttattttctacctgtgcacacagatgtctctatttcccagcatccatgtggcctgaaactgagttctatacaagagaaagatggtatgtgctatcctcaggtctggtccatagatccttcccacacgatcctctttgctttttttttttttt

SEQ ID NO: 910666 - DNA, 640 bp, Homo sapiens
tttactaatttggtcattcacttgtattttaaaaaaagaatataatcttaagtttttagattgcttaacatttagaatttcttttcatttctgactgcyttctgaatgaggaactcttaatttgaaagactgttggcagaactgactcaagtacatcagctcatgcacaatatgttgttccttctctggaactgtacatattgtttttcttccccttgtggatgtttatttgaaggatgaataggtcactcttagcaggagagctagtcatgtgactgccagatactgaagacagatgagtcagttccatgcagactacaaattatgcatgctggataaatctatattcatatttgcatttgacctaagcctcaactttaaaaatagatttaacagaaattatacagaaattcaaaaattgttttgctaggaagcaaacaagttatgcaatacaatttaaaaaaagaatgttccctctgcaagaaagagatcacattagtgatgaaatactatatgtcagtctgagcttaagcccaaattcaagaacatactgtacacaaaacttctgaaatctatttatctgatgtgtgactgatagctattgatgcagcttggagaccttagggcgatactgactccc

SEQ ID NO: 910667 - DNA, 622 bp, Homo sapiens
tcaatctctgcatttaatgggatgtattatttaagttttaaaattcaggagtccagtgtttgtaaaaacattagtctatgttataagatgctagagcttggttgatcagagacccctttgttcacagaagtatctgtaacaagccaggtttactttcaaacatattttcagctataaattattggagtgggtcctgttagcattgcaaattaaatttaggggaaacattgtctctgcccaggaactgcaggccatgtgtgaattctttgattcaatccctatcacaatttaaaatattttttcttatgaaaattttcaaagataaagaaacatagattgtaaaatgaaacaatgtacccctcacccatttcaacaatcaccaacatttccttcaattttttgtttggtgataattccacaatagtctgacgtagaatatcctctttttgactgaaggcaatggggatttttcttggttaggggttacttttatttcyttttttttttctttagctatctgaatgagtttcatatttcctctttgtgtcaaccagaatgatggggacctgctctccaatgaacatctacagatagataaatgcattcattccacgtatgggtt

SEQ ID NO: 910668 - DNA, 624 bp, Homo sapiens
aagctgattactcttaataatgtgtatgattttcatccaatcagctgaagaccttrgtagaaaaatgctgacttcccctaagcaagaaggaattctggcagcaaacagccattgacttgcagccttttccctagacctgcagcccgcctacctactctgaagattttggagttgccaagcctccacaaccatataagccaatacctttctctctctttctctcttttctctctcttaaactgcaaaaagcaaacaaacaaacaaacaaacagacagcaggttcaaaatggagtcactcatactagtgtcacataaccaaaccaaaacttgcgttatttacttgcaagatttgaccttgtgagaaatcagaagagagataacagtggaatccaactaggccaacaagattttgcttacatctgtagaagaaaagtaaccttgaaatgaccaaccctctatttgttctttatttctgcttttctcttcttttttctgcccataaaactcacccactctgtttagctcatcagagtttctttctactttgtagactggatgctgcccagttcatgaatcgctaataaaagccaatcagatatttgaaactcaatttggtgaaatttt

SEQ ID NO: 910669 - DNA, 624 bp, Homo sapiens
aagctgattactcttaataatgtgtatgattttcatccaatcagctgaagaccttagtagaaaaatgctgacttcccctaagcaagaaggaattctggcagcaaacagccattgacttgcagccttttccctagacctgcagcccgcctacctactctgaagattttggagttgccaagcctccacaaccatataagccaatacctttctctctctttctctcttttctctctcttaaactgcaaaaagcaaacaaacaaacaaacaaacagacagcaggttcaaaatggagtcactcatactagtgtcacataaccaaaccaaaacttgcgttatttacttgcaagatttgaccttgtgagaaatcagaagagagataacagtggaatccaactaggccaacaagattttgcttacatctgtagaagaaaagtaaccttgaaatgaccaaccctctatttgttctttatttctgcttttctcttcttttttctgcccataaaactcacccactctgtttagctcatcagagtttctttctactttgtagactggatgctgcccagttcatgaatcrctaataaaagccaatcagatatttgaaactcaatttggtgaaatttt

SEQ ID NO: 910670 - DNA, 571 bp, Homo sapiens
cctattttctcttcccatcttccccagttccctctcagtcctattgcccaagsctttgtcaaacccaggtccagtatgtagctgcacttaggaattacctggagagtaatttaaaaatatgtttctctgggacccacctcacatttgctgaatcagaactttcaaaggatgaaacacaagggtcaatatttttcagatgttcttcaggtaattctagccaatagcctggtttgagaatctctcctctaaaaatgattccgccaagatcatgaattactttaatacaaacctactattgcctcctttaaataaacacgggggtgcaatgagaggaaggttctcccttgaataaataagtagaaaagagttgaggatcttaatgcaaatactcaattgtcctcatttgttacttgttagattacagaaaatcattcaatctctgggctttatccctcagctgttaattggcaaacttagattagatgacttgaaaactctctatgtatctgtcatgcaccagtcccagaataaactctgaactatttatatccgtatatctctcaattcttag

SEQ ID NO: 910671 - DNA, 660 bp, Homo sapiens
ggaaggaagatagagagggaaaaggaaaaaggcgggagggagggaagaagggttggtactcaagagactagaatgtgaatactatttgaccatcttggtaacctgcctcacaaatttcaaaatacaktcttcatttttatttttatttttttcataaaatagagcaaatataaacctgagacctaatcttctatcagtaaaatcgcctctgaaatttctgttcttttctggcaagtgcccaaaatagcaaattggatcaaaaatgaatgagcaactttttattctatttctactatcccctaacaaaaggaaagtcaccaaaaaatgcaaacaaacatgtaccaggatgttcatagcgggtctattcataatagccccccactggaaacaacccaaatgtttctcaggagtaaaatgaataaataaattgttatatattcagacagtgggatactagacagcaatgagaataaactattatacaactacatgcaacaatatgaaataatctcacaagcatattatttaacaaaagacacaattgaatacttataatatgattctatttatattaaagttcacaatcaggcaaccagcctatggtgacttaagttagtggttaccacttgggaaaggggacatgtgagaacccctggagtt

SEQ ID NO: 910672 - DNA, 603 bp, Homo sapiens
aacccacagaatctgtgagacataatgtagttttattattgttgtaagccactgaggcatgggataatatattaggcagcaatcgataacacatgtaaggaaggatgaagaattagagattttttttttaaactacagagtcagaattcttagtcgcaaacaacaggatctactccagctagtttaatcacaaaagaaacagtaaagagtatttaaaaatctctaggagaattagagcatcaggtctagaggctataaaggcaacaacaattcagaaagcacctctgatacctctgcttcagccaggacctaatttctgctgcagttggataaagatacttcagctcataccactgaagttggtagccaggtgccagaatttccaccattaatgacttagaaagctagattccttcaccattccctttattcaaatatggattctgtgaagcaccagcttcattatgctgctgtctttcaatcagaagtcttgcataggtccatctgcaaggaggatgggaagaaatgagttgygggctccattcttagggaagtgttatttttaaggtagaaaatatcccagtcatagaaaaggtgtttcaa

SEQ ID NO: 910673 - DNA, 616 bp, Homo sapiens
tgttgcagcactatttacaatagctaagcttgggaagcaacctacatgtctatcaagagatgaatggacaaagaaaatgtggtacatatacacaatggggtactcttgagccatamaagaatataagtgaataagtaataaatgaataagcggataagagaataagcgaaataatccaggcacagaaagataaatatcacatgttctcacttaagtatgggatctgaaaataaaaacaattgaattcatgaacagagagagttgaagggtggttactggaggctgggaaaggtagtgggggctgagggagatgggaatggttaatagaaaatggaaatagaaagttaatagaaaataaaaaatagaaagaatgaataatacctactttgtggtatctcaacagggtgactatagtcaacaatatttaattgtacattttaaaataacttaaggtatgtaataggattgttcaaaacacaatggataagtgcttgaggggatggataccccattctccatgatgtgcttgtttcatattgcatctttgtatgaaaacatcttatgtaccccataaatatatacacctgtctatccttataaataaataaataaaaat

SEQ ID NO: 910674 - DNA, 528 bp, Homo sapiens
catttattgagactatcatagactttttctaatttatacctcttttctcacttttccttgatgtttatccattcaaataattgatgataaattgatttttcttgacaaaagttaattttttatwattataatgaatgcaatatttattaagctcatattaaggttttttgtttgtgtgttttttgtagagatagggtttcaccacgttggccaggttggcgttgaactcctggccactagtactcagcccgccttggcctaccaaaatgctgggattacaggcatgagccaccacacgcagcaatattaaggtattttcttaaaaaatgttaaatgtaccataggaagagagagtactcataaaattaaaactatcagaactttgatataataaataattttgaaaaatatcatgtcacctttgaattcatagagtaaaccaaacttgatgataacaattgtttattttatcactggattcaaatttataatatataataaaatttttatttttgttcattagggaga

SEQ ID NO: 910675 - DNA, 528 bp, Homo sapiens
catttattgagactatcatagactttttctaatttatacctcttttctcacttttccttgatgtttatccattcaaataattgatgataaattgatttttcttgacaaaagttaattttttattattataatgaatgcaatatttattaagctcatattaaggttttttgtttgtgtgttttttgtagagatagggtttcaccacgttggccaggttggcgttgaactcctggccactagtactcagcccgccttggcctaccaaaatgctgggattacaggcatgagccaccacacgcagcaatattaaggtattttcttaaaaaatgttaaatgtaccataggaagagagagtactcataaaattaaaactatcagaactttgatataataaataattttgaaaaatatcatgtcacctttgaattcatagagtaaaccaaacttgatsataacaattgtttattttatcactggattcaaatttataatatataataaaatttttatttttgttcattagggaga

SEQ ID NO: 910676 - DNA, 411 bp, Homo sapiens
catgaaattaaaggtgggaaacttcactgtagagtacaatttctttggaaatgaatagcaacttgtcattttcctttgcttcttggtgatggaaattgtgaggattccaatcttttcccctgagagattatcttyttttggctgccatcctaacttttgagatgtttactctacaagcaatttaaacaaaagggaggaagtgccctggactaaaggctgtatgtgagcataatgaaaaatgcttgatactgaatcacaggagtggaagatggtgtggtgacttctgatttggaattgcacctctggagacaggactcttttgaagaaactgggataaaaggaaagcctgttgtgacaaagctggcccatttgtagcataggcattttcccctttttcccggcgtatgagat

SEQ ID NO: 910677 - DNA, 279 bp, Homo sapiens
tcatcctaaaagctaagctgacatctttctggactgacttaaagccaatttttggttgttttttctttggagatagagaactttgatctaataacactccatatattactcaaccaccctgtggggccaayctcagttcctttaaccatttattccccttgcgccttcccaaatgtgtaatccgtttacattttctcttctctaagtaatatattcttaaggtatctgtgactcatttttttttgcatgcaaaatgttgtgctgtttctgttcatgctt

SEQ ID NO: 910678 - DNA, 554 bp, Homo sapiens
tgaatggtttccatttactcagaaatatgagactcacgctgctgcctcacccccgacaatgcatgtgttctatgtttgagcctaaaatgggaaatcratgagacttgtacaatgcttcccccactctcctttcagaggaaatcaacaagatttgtattcctttccctaagtctcctttcagagggaggaagtggctagactggcctttctgtttctgtggctctgaatgagattaaaaatggaggcttgtctttctcaggaactgagctcatcaaaaacctaccaaataatagtagagtgaagcaggggctggtggttggaaatggatgagtgtgcgggttagtttcacagctcaaaagaaggaaatttagagctgaattgatgcaaccttattcccatgggaataaaagaccctcagaaccagacggatattatcataatataactattatgataataatagtgtagagcagtgcttctcaaactttggtgtaaatttgaatcacctgaagagtcacaaaaaaatacacacacacacacacacacagaggctc

SEQ ID NO: 910679 - DNA, 608 bp, Homo sapiens
gctgtttttgtcctcaccctttttctgagggtggagaaaattatgcctcaccagaccacattactcctgggggtcagaattgttggccatttcattctcttttcaggatggactggtgaactggtggttccccagcaacccctcttaagtttaggaacccattggcataagaattagaggttcttcctccaggcatctttccaaccctgcactttaactattttttccttttctctacctgtcagaagttaacttttatgtgagaggcttttttttttctttttagaaaacattttacagggcaggaccccagctatcactgtttatattctctgtaaaattttaattatgaaaaaggatttgtggggttggtcttaaactgaagcaaatccagtgtgctttgcctaactttctgtatgttcagtagcaaactttgctgcaggcctccatcttgttttaccatgatctgaaaccacatggcgatgttttgttctagcctccaccattttacaatggcacytaggttcaattccggcttagagaatgagtactttaggttgatatctgtatagctattgccatttgctgattctcttcacctctatgaa

SEQ ID NO: 910680 - DNA, 609 bp, Homo sapiens
aatctccatactaagtagaaaaagaaatcttcaagaggtaaaatggactttattttaaatatagatacacatatatatatatatacatacatatatgtttgtgtatattaaagtataaaatagtgctgtcactctattgcttgcaagcccttttttattagtgaattcaagtacaaaatccttaagaaggcttttaataatttaacattataagttcatgaagagctacaaaattattttgctgaggactttatttgcaaagaactcatgtttttttgttgctcttaataacagagcaatggagaatctagatttttttcatcatctagtggtatataatactaataatatattcagtatatatccctaaagtagcatttcagagaagttcatcaaagttttaatgctgagcatataaaaacatctgtctagtgataacaaaggaagagtcgagaacacagagaagtgggacacatagagaaatggtggatcaccgcttctcaaatttccattgtgaagggacaaatgagatragcataaacagttaacatgtttaaagattcaattctgcccacacctgttccatcaaggcctacaaatcacatgtgg

SEQ ID NO: 910681 - DNA, 632 bp, Homo sapiens
ttccactaagaatggcaacagcagtccatagaacttccgttctaagcattccattccacattatacttcctactatctttctaagagcactagytaaagcagtttatctgttgaagactgtttgcagagctcttagtttaggagaaggtaatagtctcacagaagtacagctccatgtagtgtatctcagtgcacagcagactggcctactaagggcaagctaaatacagggagaatgaagaaatggcccagtccatgctcagctgctgggaagctttccccaaaactcccatctcctactctctctgtgatcacagagaacccaaggctttatttgtatatttgaacttgaaataaaccttgaatacaggtctaatgggaatactgggaggaattttagtgttctaatacgtttgctatccaaacatctcctggaacagacatcaaagtaagaatccatagcttttatgtcctatgtttactccttcctaggtatagtacctctttactactagaacgttttctcctcatctctctagttaacacaagtagtaccaaaatgagttgtggtttctttgaggtggtgttcagcttgccatttttgtggccttttgctcaaatgcttcaaaaag

SEQ ID NO: 910682 - DNA, 587 bp, Homo sapiens
tttgtttactgatccactctttgcccccaaccagacttcagagcactgggaatggggaggaaaccggaagtagctgcaatttccaaaatatgttctgcggagccccgggcttacaagtgkctaccttaaaaatgagtcctcacccaaagaaagtcttacaataaagaaaatagttttaatcgtgtttcatctagtagtttccaaaattttttgaccacacagccctcttatattgaaaaataactattgacattcctgagactagttttgagcagcaaatagtaagaatcttcttgttactcaattcaaactgctgaaaatctttgcaatccaaggcggaaaagtgagtaatgatgctgtttgtcgggatgacagatcaagcattaaatttagaatctgaatcaaaaagctgctcatgcagaatacagggcagcttcaaaaatatgccttaaaatcctgtcactcagatttgtccttgtataatgcctgggagtggctggacgtggcatttgcctcttcacctctcacccctgtctgacctacatatattctagccccacaagaaccatatttcacattcagataaa

SEQ ID NO: 910683 - DNA, 602 bp, Homo sapiens
gtctcttgtaaactaatttcagaagtgatatcccatcacctttgttgtattctattcactaaaagcaagtcactaagtccaacccacactcaaggggagtagactacagaatcttattaccaggaggaggrgattgttggttagcatcctaaaaggctgcccaatacatcatgattgtcatgagcagggagtacataggatggaaacatatttatgatattaccagaaaaaaaatgcaaaaactatttggaatatatcagcatctcaaggaaggcatatgttgaacatcacagctctgcaataaaacagaagtgaacacactcctttgttctgtgacttacaaactatatattcttggacaagatactttatgtctctgagtctctgtaaaacctacattgcagaatagatgtaaagattaaaatagataagaccaaaaacacctagcactgtacttggcaaatggtatatggtcaataacaatagttaccactattttccttcttacatgtatcctagtctatccaactagaaatcaatatttttaaaaccatatagctctgtataaagacaatgacatctaggaatgatgtttcaatgaa

SEQ ID NO: 910684 - DNA, 602 bp, Homo sapiens
gtctcttgtaaactaatttcagaagtgatatcccatcacctttgttgtattctattcactaaaagcaagtcactaagtccaacccacactcaaggggagtagactacagaatcttattaccaggaggaggagattgttggttagcatcctaaaaggctgcccaatacatcatgattgtcatgagcagggagtacataggatggaaacatatttatgatattaccagaaaaaaaatgcaaaaactatttggaatatatcagcatctcaaggaaggcatatgttgaacatcacagctctgcaataaaacagaagtgaacacactcctttgttctgtgacttacaaactatatattcttggacaagatactttatgtctctgagtctctgtaaaacctacattgcagaatagatgtaaagattaaaatagataagaccaaaaacacctagcactgtacttggcaaatggtatatggtcaataacaatagttaccactattttccttcttacatrtatcctagtctatccaactagaaatcaatatttttaaaaccatatagctctgtataaagacaatgacatctaggaatgatgtttcaatgaa

SEQ ID NO: 910685 - DNA, 609 bp, Homo sapiens
ggtaacttgtcttatagttcatagatctctgggtcataaggaaccacactggacctgcakgtgctgtgactgaatggcactttagcgtgttctgcctctgggaggcagtaaatgtacatatcgtgaaggaagaaaagaaaactttatgtttgttagctagacagatgtccagtggtagtcattagtgctattctgcatttccccacccagccaaattttcctggtaacatgacttgctctggcaaataaaatgtgagcagaggtgagatgggtgtaattcactgcacactctctttccctttccttttggcacagccacacacaagttcaggatggtagctcctccatctgattgggtcactgagggcccacaatatgtagaggtaatgaatatacatcattagcaagaaataaacttcaactgtttaagtcactgagaggtttgggggttacatgttgccaccatgctatcctagccaatcctaagtggtacatgtagacagtgaattaattagcacctgtattttagactatgtagtagtcattgctggggtggaaacagtaactttagaatcctgaatatcaatatctttattgccattctttagg

SEQ ID NO: 910686 - DNA, 667 bp, Homo sapiens
taagtattcattgaatgataaatgtaaggcaataagacagttaatggtattcaggaaacatactgtacatatatgaaagatttccactgtcttgaagatacttcattaaaaccatcactaaatgcccttgacaatcattatagtccaattgacaaaacataatttggaaaacttaaaggaaaaaataataaaaaaaaatttggtgcccattatagtgactcaattatttccaaagctactctatttttctggctatctgtcttagattataaatgagtaaggaatactctggactgaagcctacctcctgtgaccttgtaaatgggaacaagattgtgatgatatgtgtaaggctagttcttctctaatcctctcctcctcccccaactttatcttgctctctttaaatctttttattttttctcaaatcagagataagtcaaagaaatactgcttttcttctcttattttgtttataacaatagagaaggttcataggccagaaatcccaatagaatccatatttgagcaaatgcctgtcttaggatatttcattccccattgagaatgagaatagtatgtctatgtttataatgttttaaggtgtgttttccatattttstgacatgtgatttacaacagggaggatttcagtgacagaagaaat

SEQ ID NO: 910687 - DNA, 620 bp, Homo sapiens
ggtaccattcccctttcttcatatcaagggtatataatatcaacttgaataatcactgattattttaactttgaaagcatgtctaatttagtgtttaccaggtttcattgctataaagttgtatttttsgctcattgtcgtactctactctttggaggcaagctgctaagtacaacctacactcaagggtatgtggaggaaaagttaaacttcagattcattcagcataaagtcaatacccaattcaaggaatctaagaatgaaataaaatgaagagctgaaaaatgaaatagtcataaaaaacaaatgaaaatgatagagctgaaaaacttagtatatgaattttataacaaaattgaaagtattaacagcagaatagacaaagctgagaaaagaatcccagagattgaagaccagttctttgaatcaactcaataagacaaaaaaaaataaaaataaaaaagaatgaacaaatcctctgagaaatatggattatgtagaaaccaaacctatgaattattggtatccttgaaagagaaggagaaagagcaggcaacttggaaaacatttgaggatattgtccatgaaaatttctccaacctcgctacaaaggccaacat

SEQ ID NO: 910688 - DNA, 570 bp, Homo sapiens
taattatttaaacaagacacaaattttaaaaataactttcattttacagcgataataagcagatctttttaaaggaaatagcaaataaaaatctcctttaatggctaactataaaagcaggctgtgagcactgactgacaggagaagtagattgtggtggcaggtatgaactcgcctctcgtgaactcttccaagtgaagaagagaacctggaaagagaaatgtgcgcttacataataaagaatatgaagactgttaacatgtagagaattctgacttaatcaaacaatttcccccacactaaattttacactgttctcagaacaatcctgtgtgagggttaggacaacttctactatacccattttacagatttctcttctatgtttaataatcttaatcttaacatgtttgtgactatcatcttggttcagaatgcaatacttccatcattggctacagtaatcatctctttcctggagcastcatttctgatttcttcccactaccagctactatcaaaataatcttctcagtctagggccctgagtatggcattacttttctctga

SEQ ID NO: 910689 - DNA, 611 bp, Homo sapiens
cttccagcttctggtctagggatttaaccacctcaccaaatgcttcttttttctttggctatgtagagacaaaaagagacaagacgtcatccccttcattaagtcctctcctcagatttttatttttcttttttctcctcagatttttatttttcaaaagtcatgtgtggttttacctttgttggacagtagatcttaagtagggaaactaaaaccatataataattcttttgctttattagtaaatcatgttaaagtatttcagtttgactcgttctaactagttaccaatgaatatagctgtgggcattttctattcttgtcatgctttcattcctccaacttatacttttttattgtgacactcctattgttcaaatttctaatttgaaggaattcattaccagatgagttttaaaatgaaagaatatcttcctgctatcctctcctcagcaataaaattatttttcaaatcagaggataaaggacttaagtaaaatttaaaataaacttatgaaaacrgttggtttattgaaaagcaactagcctatatgtaacatagtttatagaagtgtattttaattcagtttggcaaatattcatgtattcat

SEQ ID NO: 910690 - DNA, 631 bp, Homo sapiens
cctgtgatcaaatgtgatcattgaggaaaaagaatctcattttctcgtaagaaattagaggattgatatttttctcatgaaattatagaatattagagggacattagaaattatctaatcctatgcccttgttgttaaggttaagaaattaaaacctagtgaagtcatatgtctatctgaagagggccatcccgtaaatagtttaagctttgcaggctattggcttatgttaccttgttgccaggagaccttcccttgaagatttgctgaagaaggtcttcaaacaggaagtaaatgatagaagaaggaattttcaagtatcaggaaaggagaaagaacaatggatagtagaattatgggtacctacaaaaacattatttacatgtatttgtctcataggtcgtttttgatgattgaaacaaaaaaattccaacaccatctgaaactcaataaaatgatagttaaaagtgggaaaggaaagacatctaagtagaagtaagatttttatacttcactygacatggtaaaatattgataccactagattgtaacacatcacatgttacaggataatcatcaaagaaaccactgagaaaagtatatgaaaaaatatgctcaaatgcactataag

SEQ ID NO: 910691 - DNA, 608 bp, Homo sapiens
cacatatttaatgactctcatattttatctagctgatccattactattctttgctcctctatatgatttcttcatgctgttgctctgtaagaaattgcttaactcctataacactagaaggaaaataaggagacagggaaacacatgaaaagaaggaaatgctgacatggaaccaagttcacttcttgctgccacatttccagatgctgctacaaatattctattttaggtgacagggcaggcagggtgggccaggaataagataccaaagtcctactatattccagacattctttgaggttttctcctttgcttcttacaagactgtgaaaaagacacccttagtacaatttcacagacgaccaacttcagactcacagaaggtatgtacatttttcagggtcaaacacctgtccctcaccacaatgaaatatcacctcacacccatcaggatggctactgtaaaaaataacaagtgttggtgagaatgyggagaaactagaacacctatgcactgctgttgtgaatgtaatctagtgcagctgctgtggaaaacaatatgggaagttcccccctaaaacgtaaagttagaattactatatgatcca

SEQ ID NO: 910692 - DNA, 620 bp, Homo sapiens
ttttttatttttttcttggttgtttttgttgctcactagaactaaagaaaactgaatccacaaatcatatttaaaaatcaataagccctaataggacagaggacactagaaaagaggagcaattatggaaaactagaaaccagcccttctagattttaagcgacactcaacacttttgggaactggagcttgaatagacctaccaaacagaacagaggcaaatgcatacaggactttggtatgtaaagctggcatttcaaatcagtggggactatagacgattcaataaatggtgttggtataaatgagtggccatttgggaaaaaaaaaaaagaaacattgggaccgtatcaacttatgctaggggaaattctggatacgtggaaggttaaatgtgggaagtgaaagaatcaaagttctaagagaaatgaggaaaaattcatttataatatcagagtgggaaagccttgataacatgacttaaaatccagaagacatgaaagaaaataaygacaagttaaaaacatgaaaataaaaaacatctgcatgagtgaaacaccataaacaaagtcaaaagacaaaggacaaacttgggaaaatatttgcatctcatctaacag

SEQ ID NO: 910693 - DNA, 660 bp, Homo sapiens
gagtctaagtgtttttctctctccttgtttgcagagaagagactacgcaaggacatagtgagagggcagccatctgcgagccacaaacagaggcctcaccagaaaccaaccctgcaggcaccttgatcttggacttccagcttgcagactgtgagaatatacatttctgttgggtaagccatccagtctgtagtactttattatgacagcccttatcagactactacatagagtattcgggcatttgtaggcacttacctgccatgctggctagtttcaattgcgagtgcttgggagaaacatgagctttacttttcttttcttttttttttttttcactccatctgcctctgtgtttagaattctctgtttttctaattatggagctaacctctcaactccttgaatgaagaggctgaatgccacacagtccccgggcttttaaaatgccatatgctatgtgtatattcttggataattgtgaaccactttagacttcccctatgccccacttatgggttgactgatgtgtggtaacttgaatgrgctcaatataaaatctctctggcttgtacaaggaaaaaacagagaaaacagagaaccttttaataaaagatgaaagaatgttgaagagggcttaaaagggaaggattcaatcag

SEQ ID NO: 910694 - DNA, 417 bp, Homo sapiens
aatttgaaaacagtaagtctggctggtaaaatctttccatacaatttatctaaccattctactgmgtgtcttcacagaatactgaatgagaagtaaaaagattcagagaactagggatgctagaacggggattcatcacatcagctcaatggctgaccgggatccattaagaggggctaacacacatttacttcatgaaataattttaaaattctttggaaggatggtccaacatcactgagagtcttaactggagtagctccaaataaagttttattttactgcgggttgctgagtagcccagtggaatcatgttctgtttgccaaggctggtaacttgattttatgcttttttccgtattttcatccttttttctttttgtacttctctctggttattttctgttgatgtaactt

SEQ ID NO: 910695 - DNA, 670 bp, Homo sapiens
ttcgcttttagacttatatagttcagggtatctgatatggtttggctgtgtgccgacccaaatctcatttgaattgcagctcccataattcccacgtgttgtaggaggaaactagtgggagataattgaatcatgagggcaatttcccccatactgttcttgtggtagtgagtaagtctcacgagatctgatggttgtataaggggaaacccctttcacttggttctcattctctctcttgcctgctgccatgtaagacgtgccttttgccttctgccatgattgtgaggcctccacagccacgtgaaactgtgagttcattaaacctaatttctttatatattacccagttttgggtatgtctttatataagcaggctgaaaacggactaatataacatcttccttcttaatatactatttttggcaaatagtgggctcatcaataagtgttttctccgtattctcaccataaaaatcacattttgagctaaaatatcccgttatgatcagaggaatcaatatcatgatgcagacaaagcacttctaatgtgctatatattccggcattctccagtgcmtctgtgggatagtctaacaaattaaaaatgttatttatcttccttcactttgggctcatttaatattgtgctacaaacaaagacaatttc

SEQ ID NO: 910696 - DNA, 624 bp, Homo sapiens
ataaaatcaagaactcaataaattttactrcagctgtagagagtataaaatacctagaaatagccaaacaggtgaaagatctctaagaagagagctaaaaaaaaatactgaaagaaatcacagatggcacaaacagatggaatggcattccatgctcatggattggaagaaacagtgttgtgaaaatggccatactacccaaagcgatttacagatttaatgcaattcccatcaaaataccaacattagtagccacagaattagaaaatcctaaaatttatatgaaatgaaaaaagagccagaataaccaaaacaatcaaaagcaataagtacaaatctggaggcatcacattatctgacttcaagttgtattacaaggctatagttaccaaaacagaatggtactggtataaaaatagagtcatagaacaatggaacagaatagataatggagaaataaagccaaatacatacaaccaattgatctctgacaaagcatatgaaaacacaaattggagaagggacgctccatttaataaatggtgctgggataactggcaagccacacatagaagaataaaactgtatccttatttctcaccatataaaaaaatttaagatgga

SEQ ID NO: 910697 - DNA, 601 bp, Homo sapiens
ttttcttttttctcctgggaaagtaaacttcagtaaatagtaaaatcaactgtatatgtaaatttggcttcagcaagggataccaagctttcaaatcacctctaacattttgagtggttgctttatcttactagaccagtgccctctatctaatcccaaaaggatttttactttcatatgacaatttccctttggtttctatagttgtttattcctctttgataatgaaactgatcaccagttaccttgcctgataatttatcattttttcaatgattggcaactaagaacaaacaaaaatgtctatgcatttctgtttattccctaagtaatttcatctggtctcattgctttaattaaatgctacctaaaagttgatgactcttcaaaggtatatgtaagttttaactaattctttgggaaaaaatcaaaatattcaattgcctacatgttggttatttgttagaatgtcaaaatmaatctgttcaaaacagaacattacagtaaagggacaaatgctacttctaataatatgtagaaatgtcagtgccaagtatcaggaacaaaatgatgttcctgtttttcttttataaaacaatgt

SEQ ID NO: 910698 - DNA, 594 bp, Homo sapiens
gaacttaattttcatgttggtaacagtcttattcttcattttaataattgagcaacctattaattcaatattagtacccctaaatattttgtttcttgaatcaatcagagctggagtattcgtttcctagggctactgcaacaaagtagcacaaactgggtgacttaaacaatagatatttactgtctcatagttctgaaagtcagaagtccaagatcaaggtgttggcagggttgactcctgagggtgcttaaggagaatctatttcttgcctctttcctagcttctggcaatgaccaggaatccttggcatttcttggcttgtatatgtatcactccaatcctttcctcatcttcacatggagttccgtgatggctaatattgaatgtcaacttaattggactgaagaatgcaaggtattgttcccgagtgtgtctgtgagggggttgccaaaggagattaacacttgagttagtggactgggagaggcagacccaccytcaatttgggtgggcataatccaatcggctgccaggagggccagaacaaaagctggcagaagaatgtggaaggactagactagctaagtcttc

SEQ ID NO: 910699 - DNA, 429 bp, Homo sapiens
cctaaataacagatgtacagagattctccaaagataatatgtttctttgggagtgaacattgcaatgtggaatatgatgccatagtaagctatgggcatatttagggagataaaggaaggaaagtttggcaacaaggatcagtaacaagggtggtgtgagtacaaggttgaacaggcagttactgggcagatgtcctcacagaagtatttttggtgtaaagttttggtagtctttgtgaaaagttattaatatagtttgtctctgtgtttctgcccaaatctcatgtcaaattgtaatctttatatgttggacgagggacctggtgggaggtgattgaatcatgggggtagtttcctgcatgcagttctcatgataktgagtgagttctcatgagataggatggtttgaaattgtctagcgtctccccg

SEQ ID NO: 910700 - DNA, 604 bp, Homo sapiens
aagaagccagcaacatgcttcctttacagcctgcagaactgtgagccaattaaatctcttttctttataaattacccagtctcaggtatttccttatagcagtgctggaacaaactgaagcagacctgcaggacattatgctgagtgaaataactgaacacagaaaggaaaatattgcatgatctcacttatatgtggaatcttaaaaacaggtcaatttaatttttttaaagaacggttcatagacagaggagcctttacctactcattatttagacatttcaaatcacagacatttcaattcctatgtaatcagcaacaaaatgtaatgaaggaagggaaaaagtgtcatcagccagtattagcactagtggcctcagaagagagtttatattgcttatcaacaaggtaacattctttaaaggtttgccttatattcctattctccttttctcataactttgtacacagttctcctttactggcaacatattttgtacatggtttgattattttggaagattwaaattaaaactatattgaggatttctaaaataaaaggatgtgaagtgatacagttgaataaggaatgttttctttcgct

SEQ ID NO: 910701 - DNA, 590 bp, Homo sapiens
caaagtgctgagattagaggcattagtcacctcacctggccttacaatggatgaattttatgaygtgtaaattaaatctcaataaaagtgttaataaaaatatgtcaaaagagaatcctatctatgcttgaggacaaatgaaacatacttctcatggacagatagtatcattacataatattattttaattattttttagagaaaaattaagagatatcataaagataatccagactaattctctttagcagatgaggaaactaaagcccaattaaatactttgcatgaaagtctcatgagaagtcgcatgaaaagctaggagttgcatccacatttcctgagtactagcctggtatttgtcgcattatgccatactctttcattacagtgtgtttatactgctctgacctaaattgactagaattccaataaaataaaaatcatttacttaattataatgcatgaattgtaataatcaacatttataaatgtaggagattattattgttgttgatgaattttccttgtgatgatgatgcaggagactgtttaggtggaggcattaaaaataaatctattgtttcaaata

SEQ ID NO: 910702 - DNA, 484 bp, Homo sapiens
ttttgcatatggatatccagttttttccagcaccatttattgaacagactgtcttttttccagtgtattctcatggcacttgtcaaaaatgagttcactgtaggtatgtggacttatttctgggttctctyttctcttccactggcctatgtgtctcttttcgtgccagtaccatgcagttttagtaactataactctgtaatataatttgaagtcaggtaatgtgattcttccagttttcttctttttgctcaggatatctttggctattctggggaattcttggcttcatataaattttagagtagtttcttctatttctgtgaggaatgccattggtattttgacaaggattgcattgaatctgtagatgtctttaggtagtatggacatttttacaatattgattttccaatccatgaacatagacatttttccattttttggtgtcatcttcaattttattcactagtgctttatagtt

SEQ ID NO: 910703 - DNA, 616 bp, Homo sapiens
tggcatcctttctaaagcagatacagctgagatcacaacaccgaagtcctctcaaatatctggatagccctcccaaggacaggtaaaaacaagcctagactgtgaacactacaattaatacctaaatcttcaatgcctagagacagatgaatatctacaagcatcaagatcattcaggaaaatatgaccttgccaaatgaactaaataaggcaccagggaccaatcatagagaaacagatatgtgtatttttctgccagagaattcaaaatagctgtgttgaggaaactccgacaaattcaagatgacacagagaaagaactcagaattctttcagaatttaacaaagatatttaaaatttaataaagagattgaaattactaaaaagaatcaagtagaaattctagagttgaaaaatgcaattggcatactgaagaatgcatgagagtcttttaatagcagaatcgatgaagcagaagaaaaaaatagtgagcttgaagasaggctatttgaaaatatgcagttagtagagacaaaagaaaaaaaatgaagtacacctacaggatgtaataaatagtctcaatagggcgaatctaaaagttattggccttaaaga

SEQ ID NO: 910704 - DNA, 698 bp, Homo sapiens
gaaaaaataatgtagttaaattcatacttacagctttgctctgcaatttgttgaaagaatatcttaaggtatcaactgcttctgattcttctttggttacttcaacttcaaatctgtttaaaatagcataggcttcctgcaggatgaaggtggagtttagaaatatcacaagggaaagccattgccaaatgatttagacgccttctagaaacacattcctatgtcttagaagaagacagcatgttctagaaaagtggtttccaaaattaaaagtgtatgaaaagcacctttagattctgactaccagatactaactctggatcacaggctctgaaatctgcatttaataagcacctaggtgattctgatggagatgtatatgtctctttttcctccttgaccctatgtcaacaccacgtaagatacagactgtattaaaacaggggttgactatacaaggaacagaatgaaatgatgtgggagatactccaaagaaaagaaacttgaatgatccaggctccaagggatgaccagtaattgtcttcaccaaaaaaaaaaaaaaaaaaaaaaaaaaaaaaaaaaaaaagtwtggtaaagaattaagcttttgcagtcagggaaaatttgatataataatttattatatcttgaagtctggctggtcagcatccaaaatccccaaataccacgattttttt

SEQ ID NO: 910705 - DNA, 698 bp, Homo sapiens
gaaaaaataatgtagttaaattcatacttacagctttgctctgcaatttgttgaaagaatatcttaaggtatcaactgcttctgattcttctttggttacttcaacttcaaatctgtttaaaatagcataggcttcctgcaggatgaaggtggagtttagaaatatcacaagggaaagccattgccaaatgatttagacgccttctagaaacacattcctatgtcttagaagaagacagcatgttctagaaaagtggtttccaaaattaaaagtgtatgaaaagcacctttagattctgactaccagatactaactctggatcacaggctctgaaatctgcatttaataagcacctaggtgattctgatggagatgtatatgtctctttttcctccttgaccctatgtcaacaccacgtaagatacagactgtattaaaacaggggttgactatacaaggaacagaatgaaatgatgtgggagatactccaaagaaaagaaacttgaatgatccaggctccaagggatgaccagtaattgtcttcaccaaaaaaaaaaaaaaaaaaaaaaaaaaaaaaaaaaaaaagtttggtaaagaattaagcttytgcagtcagggaaaatttgatataataatttattatatcttgaagtctggctggtcagcatccaaaatccccaaataccacgattttttt

SEQ ID NO: 910706 - DNA, 606 bp, Homo sapiens
tataatataatactaccccacaataaaaaaggacaaactactagtacccataaaacatgagtggatytcacagacataatgataagcaaaagaagccagacacaggcgagtgctcacagtatgagtccatttacatgaaggtgaagaacaagcaaaccaatatatactgataaaagtcaaaacagtggttcattctgggtagagatgaggtgtagactgggaaggggcatgagaaagccttattagattcttgatcccaatggtagttacatggatctataccttcataaaaattcagcaagctgtacttaagactattgtactatgtgcactttcctgtatctatgctaacctttaattttaaaaagccctaaaatgaaaatttaagagactgtaaataactctaaaacaagaaatggtgatcatagaaaagatccaacaggaaaccagcaaatcaaaaatgggaagtaaaagtttcagaatataagtggataacagaggaatacagaatgaaaacagagaggaaagaaggaggaggagaagcaagaaagaaaagcattaattttgaatgaaagaaaagaaatgaattaactatatgcttaacct

SEQ ID NO: 910707 - DNA, 645 bp, Homo sapiens
attgaggtgggaggaagcaggggcattaatccaccaactctcattcctctttggttgagagttgtctctgaggcattaagtctgcaacactttcatgctgccctgttcacagacagagcacatgcctaccaccagaaccgctaaggcagagatgcaagatgccatgatgtgtacaagaatggcctgcagatgacctctggtatgggattagaggatatgaacagggtagctacagtgtctaccagagtgacacaacctaactcctacccactagcatagtatcttccttccagtcatctgtcacccaaagggcttttaggcagagaaacttcaaaaaacacatatgcctgaagttgagttgatatccatgttctggaaaacaaagaaagaggtactatggaatgaacaattaaaaagccctgagtgaacgcaaaggaagtatgtattttctgtgtggattttctcagtaacaggccagtttggctcttttcagctagggtaattggaataaaggtgttccattttgagacaagagggaaagcyggggtcactgcttgcagccaggagctaaaatgaggcttccatgaagactggcaaaaaggaagtagactgctgctgcctgagattatggcatttagggccaag

SEQ ID NO: 910708 - DNA, 622 bp, Homo sapiens
gacagaatgtcaataaatgtgtattctagtcttgctactgtgaactaaccttttcatcttagcacctgaatgtttgtaggcctcagtttcttccggtgtaaaacaagagttactgacctacatgacttattgggatcatcttgtctaactattggttctaatattctgtgctatggtactgacgcttaatttccagtgaggcacagatggctgataaaagtttcagatgatcttcccagattccactggcattttcaaaataaacttattaaatgagattataaaacagtaagggctgtgggcatagtagatactaaaatatgaattgcctttgccttccttattaaaaggaatcttggtgagagttgtagacaatgtggaatactgatggaacaatatttttattgtgttattagtggaaacgtcacctattttataagtacacatgtacattccatttaaataagaaaatgttattttaagataatttgtgagaatgtgatagtcctgagctacctctttttctacagatatattagtgaaataaaagagaacttttygaatctgatctataatcataattaaccagtacttaatgagtatttgacacttcaaaaatgac

SEQ ID NO: 910709 - DNA, 671 bp, Homo sapiens
gtgaggtacatatgttacagttgttattgattatattgattaattatattggcaatataattaatccaatattgacacattataactaacaaaagtccatcgtttacattagtacacactgtatgtattgactattcaatgggctttcacaaacacatgtcatgttcccaccattacagtatcctaaagaggtttcattttcctaaaaatcctatgttctaccaattcatcctcttcttgcctcctgcaagaacactggctattatattattatttctactgtctccatagctttgtcttttccagaatgtcatatacctgtagtcatacagcatataatctttgtaagttggcttctttcacttagaaatatgcatttaagtttacttcatgtccttttgtagctgtatagctcatttatttttatttctgaataataaacacttcattaaatggacgtgccgaagtttgtttatccatttatctatggaaaaatattttgtttgcatccaagtttggcaatttggcaatttatctatggaaagtattttgtttgcatccaagtttggcaatttggcatttttaatgaaaaaaagtgtgcaataaacatttgtgtgcaaaatttgtgtgaacmttaattttcaacttatttgggtaaatgcctaggagca

SEQ ID NO: 910710 - DNA, 580 bp, Homo sapiens
aaatatcaatgtacagaaattgagaattgactacggaggagacagcccaaccacaatctggattattttccaaatgctttaggtctggcaaaaactaaagtgtttattgccaagcccttttcctcttaattttaaaaagtcatgtgtgtttcaagggaaatttaatccacatgtttctgattcatttgcactcaagttgtcaaactgttttgtaatcacaagtctttatctttttctctccacagaaagttgagttttccaagtgtgcataaacaataacctctcagaagaataaattgaatttcaaattcagaaatcagggatgggcaaaaatgtgtatatttcacctgttctttgaaaagaaaaatattttggggcttttgcccctgacttaaaccttttggtgtagacatcacttgcccttggcaatatgcaattcttctctccaaggaacagtatatttagagttcaaaatatacagyagaaggtgctaaatgacccatgaagcaggaggattctgtctttaaaattacaagcaaatatgaccacagataatattagagttttatagcaaaaactt

SEQ ID NO: 910711 - DNA, 529 bp, Homo sapiens
tgttcaagtaattctcctgcctcagctctgcccccctccccccagccccccaccgtccctgagtagctgggattacaggcaggccaccatgcctggctaactttcgtattttttggyagaggcggggtttcaccatgtgagccaggctggtctcgaatttctggcctcaagtgatctgcctacctcagcctcctggagtgttgggaatacaggcgtgagcagtcttggttattagattgactattgtgatatgaccgtgcttgtgttcaagtaacccttattttacttaatggctccaaagcacaaaagtagaaatgctggcaattcagatatgaaggaagccataaagtacttcctttaagtgaaaaggtgaacattcttgacttaataagaaaagaaaaaaattatatgctgaacttgctaacatctacggtaaaaatgaatcttctatccacgatattgtgaagaaggataaaaaaattcatgctagttttgttgtcacacctcatgctgcaaaagtatggccact

SEQ ID NO: 910712 - DNA, 562 bp, Homo sapiens
tcgttttttgtttctgtttctcttcctctctccttacaaagaccttctgagcttccctcagtaattcttcaatcatttcttattccatcctttaatcttttgtagttttttttggtaatgttaggccagctcttyttacaaagttaactttcaaaaggccttgccctactgggtcctctgaatctaatctggagtatttgttcatctgatctctgagcctctgcaggaatgcagagggagtttcctctttttcttgttgaatcttgagtgcctttgagacagtttgtatcttagaagtggactccttgattcctttaattattagttccttgaagtcttgcatttgggcctggtccctgggacattattatcccatttgggatcaacattcggaaatgtttgtttggctggcaagacttcttgcccgggagggtgttgcctctcccagatggtcatggccactctcctaatcattcccctttcttctcctgtggacaggatatttatgatagacatcaattcagcccaggtataaaagctgggtcccaggccaggcacagtg

SEQ ID NO: 910713 - DNA, 598 bp, Homo sapiens
ttccatgtggattttaggatggtaatttcatttctggaaaaaaaggcttttgggactcrgatagggattgcattgaatctgtagatcaattgatggagtactgccatcttaacaacactgagtcttccattccatgcatgtggatgcctttccatttacttagttattctataatttaactcaatgatgttttatagttttcagtgcactttttgtgtacctccttagttaaattcatcagtaaatattttattattcttgatgttgttataaacaaaactgtttcttaattcattttcagattgttcattgctagtatatagagagggaacttatatttgtatgtttctcttgtattctggaaccttgctgaattcatttatgagctcaaatagatgtttcatggatttttaaatatttataaatacaaggttgtgtcatctgtgattagagatagtgttgctttcctttgcaatttggatgtcttttattctttttcttgccttgttgtccagtacaatgttgaatagaagtcatgatattggacatccttctattgttcctgactttatggggaaagctttcagtctttcacctt

SEQ ID NO: 910714 - DNA, 593 bp, Homo sapiens
agggtgtcggcagagtgaattgctcctttgcaacataatgaatataggctttgttacataaaaatcaaatcatgcaaatgcagtgctttcatcaaaayggagaaggaagaaattaacttaaaaacctgttacatattgtcttgccttattccatataatcagcattcatttcttattctgaatttcagtaaagtaaatttggttattttgtggagcatgttcattcatatccaaaaaaaaaccttctgttgttttcttcaagttttataaacagacccttttcagatatcagactatttgatatcttgactcttaaactcttgactaacttaaagttaagattctgacatcctcagtgggataaaaactgtaagtggaggtacttgtagtgatttctatcaactaatcttatttgtctaattgtgccactttttactaagctctttcaatccaagtactttattctcatgacctgaataagagctctgtgaaataaatactatcaatattttattttacaatgaagaccctgaggcacagaaccccaataacataacgcacatagcactttccatttcaggaattagaggaag

SEQ ID NO: 910715 - DNA, 539 bp, Homo sapiens
ctggatttgtaggattctgccccagaggtygctctcacaggttgttatgtgcctgcagcttttccacagcaagggtgcaaactgccagtggatctacccagtctggaggatggtgaccttcttccacagctcaaccaatgagaactctgtctgtgggatctgacccacattttccctctgtactaccctggtagaagttttccatgaggactctgccacttcagcaggcttctgcctggacacctaggcttttctatacatcctaggaaatgtatgcagaggttcccaagcctcaaacactcttgcattctgtgcacctacaaagtaaacaccatgtagaagccaccaacacttatggcttgcaccctctggtgctgtggcctaagctgttcctggactactttgagccactgctggagctgaagctgacaggatacagggagccatgtcctaaggctgtgcagggcagcagggccctgggcatggcccacaaaaccattctctcctcctaggcctcagggcctgtgatggaaaaagct

SEQ ID NO: 910716 - DNA, 539 bp, Homo sapiens
ctggatttgtaggattctgccccagaggttgctctcacaggttgttatgtgcctgcagcttttccacagcaagggtgcaaactgccagtggatctacccagtctggaggatggtgaccttcttccacagctcaaccaatgagaactctgtctgtgggatctgacccacattttccctctgtactaccctggtagaagttttccatgaggactctgccacttcagcaggcttctgcctggacacctaggcttttctatacatcctaggaaatgtatgcagaggttcccaagcctcaaacactcttgcattctgtgcacctacaaagtaaacaccatgtagaagccaccaacacttatggcttgcaccctctggtgctgtggcctaagctgttcctggactactttgagccactgctggagctgaagctgacaggatacagggagccatgtcctaaggctgtgcagggcagcagggycctgggcatggcccacaaaaccattctctcctcctaggcctcagggcctgtgatggaaaaagct

SEQ ID NO: 910717 - DNA, 399 bp, Homo sapiens
acaacagaagaaacctcaacaagaaaacgtgggtgaatatttttataattgtgcagtagtgaagatcctttgaagcaagacataaccagagccataaggaaaggtgttttacatttgatacatcaaagttcaatttatggcaggtggacaccttcatgccatttaaaaaaaaaaaaaaaactcaaggcaaaatatttgcaatacaaagggctgatattcctaatatgaaaaaaagctcttttaaaacaaatatgaaaggaatgatctaatcagaatgtgaggaacagtcagtttagtaaaatagttaataarcatctaaaaatgtgatcaacttcataagtaatcaaagatgcaaaaaaaatgataaatctttttgtttaatgcctctcagattgggaa

SEQ ID NO: 910718 - DNA, 520 bp, Homo sapiens
gctggttgctcttgagaagtgtatttaggtggagaacttttctacttttgctgtttagaatcttgaaataaacatgtttttaaaaaatacttatttctgttaacatgttctatttaactactataccagcagtayatgattttgtgtttatgatgaaaaaactcaaatgattgacagatttaatagttagaataaaaatcaaagtcacctttacctgtcttctcccattctcattttcctttccagctttccagctttgaggtaatcactgttcataatttgatgtatagccttccaaacctgtttatgtgcctttatggcttttgtaatttagaactttgatgtccacagcacctctgaggaaagggagaaagagcactgaccaggaaggtggcagagggaaggagagccacagtggcagaaatgtggccacacggtgacagctatgtgattcgcatgttgctatggcatcatgggattaaatgggaagtatagaaaaggaatatcacagagcagagca

SEQ ID NO: 910719 - DNA, 576 bp, Homo sapiens
gacgacatcctcagtggaaggatagtagaggaaaatccttcaatgcaggtggtgatccaagggaaaatttccatactgggtatgggataatgaaataaaaccaarcaaaactaataatttatgacctgtagttagtagtaaaatgatttgtttcccatattcatactgagggatctaaaatataccagttcaatcatcctgctaaaaacagtagttatttgagatataacaaattatatttctgaagatatcaaaatgctcataaaataataatgaataaacagaccaaaatctgtgagagtaagaacctggagaagtaagcagagtcctaaagctgctttacccccaagagcatgtgctgaacccaatcctgcattggagctctatttttaatggcttcatggttgctgggggaagtgcaggcaaaccatattactttaaaggtgagtactgaaaaggttgttaactcgagataattgagcaatacatgcaaacacttctcactctcatttctatcttcactccacccccaggcaacagcttgccaagttgtattgttgttatagagcatgaaag

SEQ ID NO: 910720 - DNA, 717 bp, Homo sapiens
ctgtctttgcagttgattagatattttatctctttataatgtaacaaactatgaggtcctccatttttttggcacatggttttataggaggattttacaaggaaactggagggcaatccatcattctactcttgtggcatcagaagctacattcttgggcacttcgaatattctcacagtttctgttccgccctcgctgacagtgtttgattactttagaaaatttcacttgaggctgggcacggtggctcatgcttgtaatcctagcactttgggaggctgaggtgagaagattgcttgaggccaggagtttgagaaaatatttcagttgataagaaccagaacagaactgtcaaatcaagatttttcttataatattgagtataaaaatcacagaatatgcacacacatacacacacccatgctagagaaaacaaaccaagaatcacttttaatgcgtatttctgggattttactccatgagactaatttcaatgacttctagtatctctggtcttacagatactatattagactattgctacaattaactttcagctaaccataaattacagcttactttatatgtaaggtaaactgcaatttcatttatttgtatatataaaacattgtgtgtatagtatatgtgcatgtatctatgtatgtaaatataatatatatcttgttgttaacyttgttacatcctgtcttgggcat

SEQ ID NO: 910721 - DNA, 660 bp, Homo sapiens
cccacttctccacaactgaggaattgttggcaaatatttctcgaacacactctttggaaaaattcagctgtgcacattaaatcgtaagatgatctacaagatcacagacccctctgaggctaatcatgtacatgtctatggatctcagcacagaaaacctcccttcagtgcctggtatatcaaatattctaatcttcactataaaactctgccaagggtaatgcagacaccgtttggatgcctccagtgatggtgagcttactatctctttgaatatcccactgagaccactgaaatcattggaagctggctggctgtctggctggatgaatgaatggataggtggggggatggatagatggattcactgactggataggttttattgggacccttctctatatcaggcctttttctagtaaaacaacgatgggcaaaatcaaggccctgctctacaagagctatattctaagggataaaaagacaacattcaaacgaatatttaacatagtgcaaagtgtgattcctgctatggaggaagtaaagcagggtagrcagtgtggcagagatgggaggcaaagactattttaaataaactggccaagaaagaccttcctgagatctgtaaaaaaattaaaaaaaaaaaaaaaacacaagaag

SEQ ID NO: 910722 - DNA, 660 bp, Homo sapiens
cccacttctccacaactgaggaattgttggcaaatatttctcgaacacactctttggaaaaattcagctgtgcacattaaatcgtaagatgatctacaagatcacagacccctctgaggctaatcatgtacatgtctatggatctcagcacagaaaacctcccttcagtgcctggtatatcaaatattctaatcttcactataaaactctgccaagggtaatgcagacaccgtttggatgcctccagtgatggtgagcttactatctctttgaatatcccactgagaccactgaaatcattggaagctggctggctgtctggctggatgaatgaatggataggtggggggatggatagatggattcactgactggataggttttattgggacccttctctatatcaggcctttttctagtaaaacaacgatgggcaaaatcaaggccctgctctacaagagctatattctaagggataaaaagacaacattcaaacgaatatttaacatagtgcaaagtgtgattcctgctatggaggaagtaaagcagggtaggcagtgtggcagagatgggaggcaaagactattttaaataaactggscaagaaagaccttcctgagatctgtaaaaaaattaaaaaaaaaaaaaaaacacaagaag

SEQ ID NO: 910723 - DNA, 682 bp, Homo sapiens
ccactttccaaataattaatttggtttatatggccaacccatgagtttgtgaaacttcagtgaacctggtttactaagagattaccatggcagggtccttttcagagcctggtttatggcagatatccaaagagtatttaatcaaaaagtgaatgatagagaagactttttattggccaggactataggtagagaggacagaagacacagagataaaaaacatacagagcttccttggaagttctattttgagcaagtctaactgcagcttgattttcttgtcagggatcttattcttctaaaatatagtcttcaatgagttcattgagggtttacctatactaactgattctgttgatgtgtgatcaccctacactgcagcaagctctgtgccaggaactgatgatataggtatgaacaaggcagccttgatgtctgctcccatggtatagcaggtgaagaaagcacacctaccttctgaatcataatgtatcttacctagattcgatttttagcattttgagcaattcaggttttatggttatgtgtggaagagttcccttcttaactgtgatgtctttaggattcctaygtatttcagtctaggttttctgaatgaagggaggtaaggtggttcttgtggatacacctgaaagtcagtgccattttttaatgactaatt

SEQ ID NO: 910724 - DNA, 621 bp, Homo sapiens
ttatgcagtagctttgatttttggttcttggttctattccaacaagggttttccttctgcatgtatcaaactgctagaggcccttttatctatcctcctggccactctctttctcttgcacacaccagtggcacaggatgcaaaccttgcatctgtatctgtccctgaaattgtgctgcaggcatgcccaatgctgttcttaattttaatctgtttaaggctctgccaaatgaaatgctgttaacaacatttacagttaatgaaaccgatgctctaggtccaagaaggagcctaagtgaagtggagagctgttgtaatcatgcaattagtctagctggcggaaatgacataagtacttccccactcttaaagaaaataaagtgttcagtggggttgtttatgtgagttaagttcttcctccaaattctccacctctccactgcctgaggtcggttccaacagagtccttcctggttactgcccatacatcatcctcaagacccagttagatttcaatcggaggactcaactttatcacacgctcaagtctcccttagctcatcagactacccatattttatatttactgkcttcttgggattttttttgttgagaagaagt

SEQ ID NO: 910725 - DNA, 682 bp, Homo sapiens
tttggtcttgaagactattgtaaataaagtgatcaattgaatctccctggactgaacatttggactgaacatttggaagagtgattagtgagaggagttaaaagacaatcaattcagggtcttgccatttattgaacagattttcagccccttcactgtagggtattgttttcagaagatctgcctgcccgggattcttggttataattcctctcatgactggggaagataaatatctttcacagtaatttaaagtggttagtctgcactctctctaaacagcttccttccattgatcaacgggtgggccatgaagcctcttgcaggcctctgcccctaatcacccttcttgttgacattccaaactgctaagctcacaaatgtactgggaggacagtagctagaggacacttattccctaagagagaatccttgactttcacggtatgtgactttgttattttcccatccttgtaagggcttgacattgtttcagaaaatagtgttgaattggggaatgtcgttttcagtttctttctcactgacccatgccattcaatgtcttcatcctcctcaaaaccttttttggaataaggcaggaaataaataaataaataaatgaaactgtctctaatgtaaaatgagttgggtagtttgaaratgtttcctctgaaacacttga

SEQ ID NO: 910726 - DNA, 615 bp, Homo sapiens
gaacaaggacaagaggtgaccccctactccctgtgtggccctgtgacctggaggactttgtaaactaaacatcaaaaaacaaggacaataaatattgtttttggttttcacattcataataaaattctttacttgattgagtataaagttttaagacaagagaagctgacaagcaatagacaaccacgttgcccatcataaaacctttatttatattcagagaacagacattgagtttcagttaagtttcccttggaaataatcatgcaaaggctgtatcattaagcattgtaacaggtagatgaggataagtcttcctcatccctaaaattcttctgaagtagaatagacacccacctgcctggagtggttaaggtaagaaggaaggacaggtaatcctggagagaggtactgcccctccacttcgctagtatttgcaggtctagattctatctttctaaatattacagaatgactcaatagcacattctactaaaaaatggtaatgtatcatttaaaaactcttcaaaaaatggttwtgaaactgcacttactgttgcttattatactatcttgatcataattttgtaatgtttgagagaggtactctctcct

SEQ ID NO: 910727 - DNA, 595 bp, Homo sapiens
aatgtgcacttatcaatatggcccagcaatttcactcctgaggattcacccaagaaaaatgaaaaattttcacaaaatttcacacaaaaaactatatacagttgtttatagaagctttattcataatcagtaaaatctagaaacaatcaactattgaataaatagctggtatacagataacatcctgcagtgcatccagtcaatgaaataatactcagaataaaaatcataataataaagtactgattgatgcaacagcaggcatgcctccccagcatactctgtgatgtgaaagaagccagaaatgaaagatgacatactgtataattccatttgtaagatagtctaaaacctgtataagaacagagaactgatcagtggttgccagggcctggggtttggggaagtggttaactacaaaggggtagacagggatgttcacggctgaggaaactgttctgcatcttaattgctgtgtcagttacaggactaggtgcatttgtcaaawtaaggtaaataaattacatctcaataaactcgactcacacccaccaaaaaaataataagaaagaaaaaatggtagagccatgttagg

SEQ ID NO: 910728 - DNA, 587 bp, Homo sapiens
catgttcaggaaagacatgagaaggccacaagctgtcatgtacacccatccttgaggctctggcacaggtagaaagygaaagctaaggcagagttgtcaactgcttggctgagtgttgaaggcatggccaacatgcacacacagtcccttagcaaagaatggggacttctaaattactgaggtaaagaaatatctgtctagttaatacctgatcactaaataatggagcagagacttctgtggccacccatgacaaagaatgcaaacattacagaattagttaaggaaaataactaaacaatcaaacaaacaacaagaacaataaacagcaacaacaacaaaccctgaggaaagggaagaatctaatttccaaagttgttacattctattatttaaaatgtccagttttcaacaaagaattataaggcatataataagaaacatgaaataagacatgaaataagaaaatacagtgttgaatgtgtatcactttcacacaatcataaagttaaaaaatcaagagttgaaccactataagtagaagactgtctgaatagattattcacagaggaaaaaaaggaatcaac

SEQ ID NO: 910729 - DNA, 495 bp, Homo sapiens
ctaaagatctgttagtgaaaattgctcaaatgrtaactttttcaaatctttgtggcagaaatggaaatctttgtgggaaaaatggatttgagccatagggcatgtttgaagtaactttctcctcttctgcatttgatgtcatgcttgaggctattgtgtaccaaactacttccactatttccacatctagaaaatgcctattacatgattaagtctgataaaacatggttctttcttgatccataaaacttacggttctcaaaagaggaacccttacaaagagagcaagtgagggccccccaaagactgactagccatcaacataaacatagtttccatttcagcacaaccagttgaaggatcatgtgccagctcaggaaagtttggtcacccctctccccagaagtatgtgtggagttcctagcagggaaccaagagcagtaacagtcactggcatcaggaagcaagctaccttctcccactttgcccactggg

SEQ ID NO: 910730 - DNA, 627 bp, Homo sapiens
ggagacaaggaagggctgttttgctgcaattcacttgatgtcaaagcaggaaagacctcggacaaagcttcaagtctaaccttttttgttctcgggtgagtaaaccaagaccagaggatgagtcttgcccagaagagtttctaaccattcttcccccaggtatttgtttcccggtgaaatttgcttaaagttggaattggctgagtgtgggccagagctatgggcattgttgtgaacacttgcttttaactgcccagtatctacttgctctttatctgtaacagctccctgatttttccctggcaccatccctcttctgatccccaggaaatggctccaggtatgggcatgtggttcatgaccacagtggttggctcagagatggccatatgatgcaatccaggccaatgcatgtcaaccacagagctcttaggaactactggtacccactggagctgctgggctggttagatacaagcctggggctgctgagagccatttttgctatgacttggggagctgcctgmgaggatgccaacacaaaggaaaaaaggtccaggtgatggaggaaaacagaaaccttagaacataatttgagcaacttgattcagctgagcctgaaggcgt

SEQ ID NO: 910731 - DNA, 628 bp, Homo sapiens
caacttattcctttccattaatgatatgatttgtaatggatttttgtaatgtaaaagggaaataatattgcctgtatccctygcttcctcttgtcctacgcccatatttaccttagcacaatggctctggttggctttgaggatgagttgtcatcaacttctaaatggaataaaaagaattttgtttgtgggaagaagtggatttgtgtgaaagacgcattttaatgactcttgtttattaatgacccaagctttctagaaccacattcaagaattaaagctgttatcagctccgctgattcagtctcgcagcatttcactacataagcagtgaaaagaatcagcaattgctgtctaaccaactaacctcagtgtgctctttgggcctgttagcagggagatgctaaggtctgaaaaagtaaataaataatagttttgttgagaatgatcctgggggaaaaaaaagcctatgagtcaaaagaaaaaaaaatcaccgagtaattaagaaagaaactccatttccaattgccaaataaaacattaaagaattgcaggaagcaaaaccaaaccaaaaaacagctatttaatttttagagttgctgttagaaattacaatgaaagaacactc

SEQ ID NO: 910732 - DNA, 559 bp, Homo sapiens
acaaatggaaaattctactcttctctagctaccttcccaaggaagacctaggaattcaaatgccaccctttaggaagtatattccccaaattatcacccaatccaggctttcccaaatgtgtcttataaattattacttacacacacacacacacacacacacacacacacacacacacagagttctgggttcaagttatgcaaaatctcttcatcttctcgaagagaaactgcacccatcagtacagtaaaggctctgaggaggggtctctttaacttcatttgaaccagcatttccttaacttattagatcacagaacacccttttaaaaaatcatgtcacgcctgttaatatttatgaaccctgttgttcatgaagtacatacgaatctatcgtctacaataggggtctgcaaactgttctctggtaaagggccagagaataaggtttaggctttgtgggcygtgcagtctttgtcacaactaatcaacttcgccattgtagtgagaaggcggctgtagagtgcatgtaaacaaatgagcatggctgtgttccaat

SEQ ID NO: 910733 - DNA, 640 bp, Homo sapiens
tcagtccttttcccttctcctggctcctcaaaaacagaggcttcagtgtttcctcctgccaggattccacagacacctccttgctggcccttggcttctgcacttagatcccttactgaccccatgcagaccaacccatgctggagtgtggctcctgaactcaaaactctctcaggtctctcactgcactcaggctaaaaaccaagtcctcatgaggctcctacagccatggttctcaactggctgtgactgtactccccagaggacatttggcattgtctggagacattttggttgtcatcacttgggggcaggaggagcggtgctactcacatctagcaggtatagccgtaatgatgttaaacatctttcaacgcacgacaaagcccctccaacaaagaatggtctggccccaaaagtcaacagtgtcaaggttgggaaaccctgccccacggggccccagggacgttccccttctcacccacagtttgtctgacctcattgcctttggctgatcttctctctcaccccactctagccacactggtttcccagctaattcttgaatatggcaggcrcatgctgcttcaggaactttgcacctgccacttcctgtgcctggaagaccctttccccaggt

SEQ ID NO: 910734 - DNA, 583 bp, Homo sapiens
tctccccaacaactcacctccactttagtggtggagaaacatcracacttggcaaagaaagacactgttatttatttgtttttgtttttatagtgtgtcttatagttttgattctcagatttttgtttgctttttgaagtccactgcttttgcctttacttattgactgcttccattacgctatttctgtatgtctaatttttaaaaaacttgtttcaaaagctctcctctatcctacaggctggtccataggattcctatatactcctcctcttcttaccccctaccctgctaccaacctgcttaccaaaagttcttagagaactccttccaatccctttctgagaattccatttttactctctctctctcttagaggcaaactatatagcaggcagttacctcttggtttccgaacagtgtattcatattcatttggccccactctccaaatggacttgaatgccaatttagtgattgtatataaaagggaataaactaaatgatcagggaaatagagagctttaatattgtagtgataacatattatcaaaccaattcctattcttcctggacatgcaaa

SEQ ID NO: 910735 - DNA, 608 bp, Homo sapiens
taaagacatacttgacattgggtaatttataaagaaaaagaaattcgatgaactcacagttccacgtggmtggggaggcctcacaatcactgtggaaggcaaaaccatgtcttatatggcagcaggcaagagagaatgaaagccaagtgaaaggggaaaccccttataaaaccatcagatcttgtgagacttattcactaccataagaactaaatcattatcacaagaacaggatgagaaactggccccagcattcaattatctctacctggtccccgccacaacacatagggattatgggaactacaactcaaggtgagatttgtgtgggaacacagccaaatcatatcattccacccctggcccttcccaaatctcaggtcttcacaattcaaaacacaaccacgcctttcccatggtcccccaaagtcttaactcactccagcattaactcaaaagtccaagtctaaagtcccatctgagacaaagctagttacttccacctatcagcctgtaaaattgaaagcaagttagttacttcctagatacagtggggttacaggcattaggtaaatacacccattccaaatgtgaaaaattgtccaaaa

SEQ ID NO: 910736 - DNA, 608 bp, Homo sapiens
taaagacatacttgacattgggtaatttataaagaaaaagaaattcgatgaactcacagttccacgtggatggggaggcctcacaatcactgtggaaggcaaaaccatgtcttayatggcagcaggcaagagagaatgaaagccaagtgaaaggggaaaccccttataaaaccatcagatcttgtgagacttattcactaccataagaactaaatcattatcacaagaacaggatgagaaactggccccagcattcaattatctctacctggtccccgccacaacacatagggattatgggaactacaactcaaggtgagatttgtgtgggaacacagccaaatcatatcattccacccctggcccttcccaaatctcaggtcttcacaattcaaaacacaaccacgcctttcccatggtcccccaaagtcttaactcactccagcattaactcaaaagtccaagtctaaagtcccatctgagacaaagctagttacttccacctatcagcctgtaaaattgaaagcaagttagttacttcctagatacagtggggttacaggcattaggtaaatacacccattccaaatgtgaaaaattgtccaaaa

SEQ ID NO: 910737 - DNA, 608 bp, Homo sapiens
taaagacatacttgacattgggtaatttataaagaaaaagaaattcgatgaactcacagttccacgtggatggggaggcctcacaatcactgtggaaggcaaaaccatgtcttatatggcagcaggcaagagagaatgaaagccaagtgaaaggggaaaccccttataaaaccatcagatcttgtgagacttattcactaccataagaactaaatcattatcacaagaacaggatgagaaactggccccagcattcaattatctctacctggtccccgccacaacacatagggattatgggaactacaactcaaggtgagatttgtgtgggaacacagccaaatcatatcattccacccctggcccttcccaaatctcaggtcttcacaattcaaaacacaaccacgcctttcccatggtcccccaaagtcttaactcactccagcattaactcaaaagtccaagtctaaagtcccatctgagacaaagctagttacttccacctatcagcctgtaaaattgaaagcaagttagttacttcctagatacagtggggttacaggcattaggtaaatacaccsattccaaatgtgaaaaattgtccaaaa

SEQ ID NO: 910738 - DNA, 483 bp, Homo sapiens
tgttctttttgcttaggaatgtcttggctatgtgggctcattttggttccatatgaagtttaaagtaactttttccaattctgtgaagaaagtcagtggtagcttgatggggatagcactgaatctataaattactttgggcagtaaggccattttcacaatattgattcttcctttccatgagcatggaaggtttttccatttgtttgtgttctctcttatttctttgagtagtggtttgtagttctccttgaagaggtccttcacatctattataagttatgttcctaagtattttattctttttgtagcaactgtgaatgggagttgactcatgatttggctctctgtttgttattggtgtataggaatkcttgttaattttatagattgattttgtatcctgagactttgctgaagttgcttaccagtttaaggagatttggggctgagaaaacggggttttctaaatatacaacaatg

SEQ ID NO: 910739 - DNA, 595 bp, Homo sapiens
ccaacacaaaattctcatgcatgaacattttattcctgatctctgaaaagttccaataattccctctgaatccagagaatatagtttgatacaagtgaacaaaatggtccctgagcatgtagaattggaattctatttacaggcaatgtacttactacagaaaatctctcgttttttaaatctccttgtgattaatccaaaacagaatttctccactttacaccaatctcatccatcaggtttgggtcaggatgtctgctggtccttctgcaaagttaaatccaccaggaaacaaggaagatttgccaccaccgaggtcaggattgtcaaatggacgtgctgcagccacactggagaccatttcagaatggggaattcccaaaacactccaggctggaggtggcaaagtccggccactaccaaatctggctgccacctgtttttgtaaaacccacaagctgagaatagtttttttacatttttaaatggttgaaggggaaaagaaagaatttytatgacatgaaaattacatgaaattcaatttttagtgtccataatgaatttgttggcgtgccgccatcctcgttcatctaag

SEQ ID NO: 910740 - DNA, 681 bp, Homo sapiens
ggttaagtgagttaatataggtaaaattcttagcacagttcctaagacatagcaagtgttcaatgaatgttagctgtcattctcattactgttatcatgatgatcatttgtatttaggacccagacatagggactgagataaaaatgctgagagctgggcttttgaccaaaacctcagctcaagtcaggatacttggcaacatctaagtgcaaccaaaagttgggtacccgttggcccattgtatgataaatctacccttgccaatattcctgtgattgataaaactcacagcaggatagttctgatcatcattatttctgaatacatttataagataatggttagtgccattcatttttatgtatcccttgatgcaaattaagctaatttagagaagaaattcttaatcagtaccatgaggtagaggaaaaaattctttaagcacataaaaaggcattactgcaacttagagaagcaaggctattttatccaagttcttgaatacaaaatatattatagtgaaagaaaagtaatactgaagataaataatgcaatttgtctatgtaatctttgtaatcattttcatgacctcactgtggcttggatcagttaattcggtcrttcaggagataatagtcctaatgagactggattgtagatcttatcttcatgtaagcctg

SEQ ID NO: 910741 - DNA, 605 bp, Homo sapiens
ctttttttattttataaccctgaagatactactgaccaacacaggaacacaactgttataaagaaagccaaaagctactaagaacttaataatacatggtcacgcttttccttctataggcactccagaattgagtattaaccagaattgagtattaaattcaatcaacacaattagctttaatgaactacactcttataggggttgatgcttcactttgtccagtttttttttttacaaggtaaataggataattcacctaacatttctaaaatttggagtggaactagggaaggtgaaggggttggcagttagcaagtacagcaccattgttttcactccttaacggaggtttgaagttcagccagaggtcttggataataggagtttttagaggatatttagtgaggtccctattggaacgttatctgtattgcaaacaactgtacatcatttagtaatcacgggcaagttttggcttgggaaagacctcatgctaattagctttatgtaaagtggaaatgtcacaattttgaggatgccaacataattctatcccatyaaatcccacatgtcaggcaggattatctagtagaggagtggag

SEQ ID NO: 910742 - DNA, 640 bp, Homo sapiens
gcatgaaggggtgttgaattttgtcmaaagccttttctgcatctattgagataatcatgtgatttttgtgattggttctgtttatgcaatggattacatttactgatttgcatatgttgaaccagccttgcatctcagggatgaagctgacttgatcatggtggataagctttttgatgtgctgctggatttggtttgccagtatttttttgaggattttcatattgatgttcatcagggatattggcctgaaattttccttttttgttgtgtctctgccaggttttggtatcaggatgatgctggtctcataaaatgagttagggaggagtccctctttttctattgtttggaatagtttgagaaggaatgataccagctcctctttgtacctctggtagaattcggctgtgaatccatctggtcctggactttttttggttggtaagctattaattactgcctcaatttcagaacttgttattggtttattcagggattcaacatcttcctagtttagacttggaagggtgtatgtgtccaagaatttatccatttcttctagattttctagtttatttgtgtagaggtgtttatagtattttctgttgtcagttttatttctctgggatcagtggtg

SEQ ID NO: 910743 - DNA, 593 bp, Homo sapiens
ggacttggtgataaggaaggaatggagggaaaaggaagatgactaataatgggcatggagtttttttgcagtgataaaaaygttctaaaattgattgtggtgatagttacacaactctgtgaacatatttaaaaccactgaattgttcaatttaaatagatgaattatatggcatgttaattgtatctcaatataggtgttatttagaaaaatctcgtctttttattaagtaattctagtgatgtaattaatatgatttaaaaatatggatataggatgtgtgtgttgattcagccttgtataaactcagtgaactgcagagtaataaactgcctcatattattgtatctgagtctcagtaggaataaaattattcaaaaagacacaattgttttctcgaggatttaaatgtattttgaatggacttggaatgatctccatatattataatagactgctatacttatttcaaaacaaaataatttaatgccatgcaattaagagcatcatgaaaaagaaattttattaatgtcttttactattcactataaagtagcaaatacgttactaagtatagcttccttctgatatta

SEQ ID NO: 910744 - DNA, 599 bp, Homo sapiens
ctttcttggatggctaaaatctaattggagagtaaggcatagcataaaaataaatctatagaagaaaaatcrttaaacaaaactagcctacaaaattttccaatgttttttgggatgcacttagatggttttaaattttaaaaatattttgaaacataaagcttaaaagagtgaacaactctggtcatcatactttttttttgccagaacctcactagaggaagatattagattggatgatatgaaaatgccaatatataaccattttttacatccaaaaaaacccaaaatttcatgtggttcaaccttgatttcaataagctatttttgaaagctggatacatattgaaatatgtgtaacatttgcagtccatctactctggactcacgctaattccttctggggccttttcagattcaagatagatttgcaggaaaaaatgcataatatttaaactaagggactggaaaattagcatgaaaagttcaccagtgatatggaaaatttcacccaatacattttgtaaagaacaaaaacctaaacacccatggtagatccacttcagtaaaccatgttagtacagcaacattatccaaca

SEQ ID NO: 910745 - DNA, 599 bp, Homo sapiens
tacatatttttcatttaaccctcacaacaaccccatgaataaagttttgcagatgaagaaactgaggtttgaaagggccaatagtttgacaagagtcactttctaacaagtggcagaagttgagttagaacatagaactgtccctctcaaaagcttagccactgaactatactgaaactaaccactgtactgaacttactgcaaaatcatgaagaagaaataaagtcactgcctcacaaagttaagagtttaggaacacaactgtaccttttcccatcgcccaaactctgctgtattcactgaagttaccagcccaagtcttacaatcctgtggagttattaggaattttacattttcctatagaaaggatttgttcaattctcctgccagataagcacatgtaatgaatgtccattctgatttctttgaaattattgaattctaaagtgctaatctgatgactatacagacatatctattttaagrtggacataaaatggacatacggtaagtgctagcaattcctgtgttctttttaccatattaaataaagatatctttcacacaagcaactgtcagtagtaatgttttactttaa

SEQ ID NO: 910746 - DNA, 629 bp, Homo sapiens
aaaagtggaatgtttaataccaagtagggagggggtctgcctttccaagctggggamgtagggaggagagaggaggtttgtgtggatggtgctgttcaaggttcccctctgaatcctgctcacctttaaatacctctggcaggcctgcataaagggcccatttcccttcctcatctagtcgaaaataccagcaggattgctctgaatgaggagacaggagcctccattaaaatgcagacgccaattactctgcaggatgggcactaagcttatcctccagacttttactggtctagcaatttgattagtatcagggtagtaacatatctccctccaaagcgtggagagctcagaggggagggatatagtgaaagacaggtggattcagcatgatcagatctggatgggctgagcccaaggagaatgtgggctggagatcaggaataggcaggtgtgatggagaacttacaagggtaccatgaaagggaagagatataaacaagcaaaaagatatgagcttatctgttacgtatttctttacaattttacataaggttagtccttatggtgtactagaataatttccatttatgtgcaaggtaagatcatttttacatttagccatcatc

SEQ ID NO: 910747 - DNA, 628 bp, Homo sapiens
gtcatctttgtatcacagatgcttacctagtatctgacatagggtcaatacccataaatgcttcttgaaatcagggttcagttagacacaaagctacagagcttaattaaacatataacaagatcaytggtcattattacgaataaactcatgtttactggcctcttctcccgtatgtgaagagggatttcttattaatcccgggtcttaaatgagtttgtcctcagcaggatctcaaagtcataagagagctacaaagattgacaattattagacagtgtcagagttggaggtgagtcttaggttgggttgatgaagcaggagacttctagttctcaagaaaatgaagaataagagagtgacaaacagtgaccatatatgagcaacgtattacccatttgcctacatatattcattttgcactatatggaattacatatttttcatttccaagaatttgttgctcatccattgttgcaggtctgacaaattaccgaaagcaaagcataaaattaggatagaaatcccattgtgttaaagttccatggaaattatgcagaaactcaactgcacagaagagtgcattaaagatacagtggttgccctggggaagcttgctttcttctta

SEQ ID NO: 910748 - DNA, 578 bp, Homo sapiens
ccagactgtccctgaactctggtcaataaccaacacggctttgtgaagaaaaatgtgatgtgtgtcaggaacaatattatttctgtctgaaggagagtaacaggcaactttgaytggataaagaaacaggcattcttggccttcttctacagaaaggaggaagaaaattgctttttggaagtgcagcaataggcccgcttgacaaattacctcctagagtgcaagagtgaggcttatctgcttctgactgggttccttctcacttgtacacttcttctgatcctggttcaagaatgggcaaacagacaggcaagggttatacatttgacctgggccttacccatggccttgtagttacttgatatttttcttctccttgaaaaaaattcttaaataaattggactttaagaaatctccttcttagtctctatccacaacctcaacttcttaatggacagtggggacaaaggcctgtatggtaggcttggatagctctgccaggtgtacctcctaaggacctccaaatcttaggggaggtgggactaaaggtcaagccaggacagatcagatttgccta

SEQ ID NO: 910749 - DNA, 595 bp, Homo sapiens
actatggcctatgggagattagaattaacattaataacatataaggagtaaaaaggatcacaggagaggtactgagatttcgcctacattgcaatgtgaattgtacaggaacttgacaaacatgttggaattgtgaaggaaacatatgcaagattccacgaaggctaaggatcctttagggaacctaaacattatcaaagaaacagacggaagaaaaatattaagatatcattttacaatccttggtttggcaaaaattaagaaataaagaattctgatgagacttttgttttggatagcatgaaagagactgtggcggaatagctcccaagaagaataattggaaaaacaataggaaggacaaagataatttatttacagcatcagggagctactgaaatgatgaagattaatgagactcaaatttcagagagaagagaaatgaaaactgagacaattatctgcaacagtgtttccacgggacaarcactaatagtgcaaatttgccagttcagggcactatatggaggctgagtgtatttgttcattctcacactgctatatggaactacctgagactaggtaatttatgaag

SEQ ID NO: 910750 - DNA, 595 bp, Homo sapiens
actatggcctatgggagattagaattaacattaataacatataaggagtaaaaaggatcacaggagaggtactgagatttcgcctacattgcaatgtgaattgtacaggaacttgacaaacatgttggaattgtgaaggaaacatatgcaagattccacgaaggctaaggatcctttagggaacctaaacattatcaaagaaacagacggaagaaaaatattaagatatcattttacaatccttggtttggcaaaaattaagaaataaagaattctgatgagacttttgttttggatagcatgaaagagactgtggcggaatagctcccaagaagaataattggaaaaacaataggaaggacaaagataatttatttacagcatcagggagctactgaaatgatgaagattaatgagactcaaatttcagagagaagagaaatgaaaactgagacaattatctgcaacagtgtttccacgggacaagcactratagtgcaaatttgccagttcagggcactatatggaggctgagtgtatttgttcattctcacactgctatatggaactacctgagactaggtaatttatgaag

SEQ ID NO: 910751 - DNA, 595 bp, Homo sapiens
actatggcctatgggagattagaattaacattaataacatataaggagtaaaaaggatcacaggagaggtactgagatttcgcctacattgcaatgtgaattgtacaggaacttgacaaacatgttggaattgtgaaggaaacatatgcaagattccacgaaggctaaggatcctttagggaacctaaacattatcaaagaaacagacggaagaaaaatattaagatatcattttacaatccttggtttggcaaaaattaagaaataaagaattctgatgagacttttgttttggatagcatgaaagagactgtggcggaatagctcccaagaagaataattggaaaaacaataggaaggacaaagataatttatttacagcatcagggagctactgaaatgatgaagattaatgagactcaaatttcagagagaagagaaatgaaaactgagacaattatctgcaacagtgtttccacgggacaagcactaatagtgcaaatttgccarttcagggcactatatggaggctgagtgtatttgttcattctcacactgctatatggaactacctgagactaggtaatttatgaag

SEQ ID NO: 910752 - DNA, 582 bp, Homo sapiens
ctttttaagtgcatgaacaatgactatgtcagaagaaatgaccatgtaacagtctgggaactcagacaaaaccttagggaatcagttaatagtttattgtggcggtgttggtctgagggttktagaatctataatactgacttttagtggtgagcttctttccaaattagttttgcctgttgatttttaacctcctctatgcagtgatgaacaaagcatctatataaagagctatgcaaaaatttggtctctgtattaacatcattcatgtgaaataaatcatggcaacattacatgtgataaaatgtggaaggtctctttatagattatatattgtctgcaatcagggacaaattttattttgtacacacaaacatttgttaatattgtgacaaatatcacatcttcccattagcttgctgagtgtaatgttactctgggacagtaactaagcaagagacagaagtatcttgtacttaagagtaagagttgcagagtcaggcaggctgggtgttaatctagtgacctccacatccacatccagctgtgtgatcttggacaagttatttgacccactagtct

SEQ ID NO: 910753 - DNA, 535 bp, Homo sapiens
tgtgttatcttgaatttctttgagtttcctcaacacagctattttgaagtctgtctgaaaggtctcatatctctgtttctccaagattggttyccggtgtcttatttagttaatttagtgaggtcatgttttcctggatggtgttgatgctagtacatgctctttggtgcatggacattgaagatataggtatttaatgtagcctttactgtctgggcttatttgtaaccatccttcttgagaaggctttccagatatttgaaagaacttgagtgttgtgatccaagctgtatctgctttaaggggctccccaaccctagtaacactgtggttgttgcagactcatagaggtaccaccttgattgtcttggacaagatccaggacaagtctctgggttaccagagactcttgttctcttcccttactttctctcaaacatacagagtctgtctctctctctctctctctctctctctctttctcactctctctgttctgagccacctaaagctgtgagtggagtgacacaagtgc

SEQ ID NO: 910754 - DNA, 535 bp, Homo sapiens
tgtgttatcttgaatttctttgagtttcctcaacacagctattttgaagtctgtctgaaaggtctcatatctctgtttctccaagattggtttccggtgtcttatttagttaatttartgaggtcatgttttcctggatggtgttgatgctagtacatgctctttggtgcatggacattgaagatataggtatttaatgtagcctttactgtctgggcttatttgtaaccatccttcttgagaaggctttccagatatttgaaagaacttgagtgttgtgatccaagctgtatctgctttaaggggctccccaaccctagtaacactgtggttgttgcagactcatagaggtaccaccttgattgtcttggacaagatccaggacaagtctctgggttaccagagactcttgttctcttcccttactttctctcaaacatacagagtctgtctctctctctctctctctctctctctctttctcactctctctgttctgagccacctaaagctgtgagtggagtgacacaagtgc

SEQ ID NO: 910755 - DNA, 604 bp, Homo sapiens
ctggtttatttttatcattccggaatcacrccacttctaaaccggggtgaaagggaggaaaacttagcacctggagaaattgccatttcaaaatttgatcactactgagcaccaagtatgtcctaaaataagatcctgcaagcaactgacttatcatatctctcttatttattgaactggaatgtacattgtaataaacatgttccacgatgttatacatgaattgggtcatctctgctactgcaaagtcatgatcagaatagtttcttagtcataaagcaccaaaaaataaaaaaaaataaaaaaagggaaccaggtgataagccccaatcttgagactttgtgtgaacattaaagtccagatgaattccagatgaattctattcaaagtccagatgaattatatttctataattcttctgagttgtttttataataagcactttcctatcctttttctattttgagaagaagcatatgttaaatttgcatatgtcacctctttctgtgacccatgaaaacaaatttcatgtaacgttttttatttcaaaaatagcacggatgcttgaagttctaaaggtaaccgaagtatccaaagattaag

SEQ ID NO: 910756 - DNA, 591 bp, Homo sapiens
tcttggagtgtaacaagctgtgtggtaggggccaatccaggcagctttctccagagacctaatggcctcaacaccttctgaacgtggatagtgccagaacacttaggagggtgtctttggaccaatrcatagttgcgactcctgtgctctcttttcagtgtcatggaactggttttgaagagacactctgaaatgataaagacagcctttaatccccctcctccccagaaggaacctcaaaaggtagatgaggtacaaggtcctaagtgatctctttttctgagcaggatatcaggttaaaaaaaaaaagttactggctggtttaatactttctaccttcttcacagagcagcctttgaatagactatgtcctagtgaagacatcaacctccgccttaagctatgtatgtatggaggccagtcgcagctttattatgcagacacacaagtggtctggacatgagggtacagtttctgcctaccaagacactacttgcactggatcttacgcaaaaaagaaccagaacacacagtgtggacaactgcccatatattctatctagattaggagagggtcctggctaggatttt

SEQ ID NO: 910757 - DNA, 620 bp, Homo sapiens
atgaatttcatgttaatattgtgaaatattaaaataattccrcaatagttgagaaaaatgagcatttttttccatttttaaaaaatgcatagaaaagacaattttaaaatcctgggaccatatttatttagaagtagctgttagtaaaacattagaaaaggagtcaggccattaggttatttatccaaatctctaagcaattaggttgaagttattaagtcaagcctagaaaagctgcctccttgtaaggctttcatgacaatgtatagtaatccacagtgtccaattcttcacactcctcaggaatatcactacctcaggttacggtacacaggctataattgatgatgatgttcagataactgaagacacaataaatgacattcagacatcaggacaattccctcatgttcttttctatgatggccacctgtaccagcaacgtgggtttcacccacacaacgatgaactgttctcttacttctccagttgattttaaagacttgttaagaggtcttactaataaaatttgggtatgatagaaaatccacaatcaaatcttgaaccaaataacatattaaattactaatatttaagtgatggaagacacacaaaaaact

SEQ ID NO: 910758 - DNA, 612 bp, Homo sapiens
gggaagagggagcggtggctgaggacgcggcggcagcgctgctgccggttgcgtcggatgcgaaggagaagctggaggacaaggatgaggatgagacgggcgcgctccccagtctccatggaactcccgccccggcccgttgctaggagcccccgaggctcggactccgtcttccttgctttgttgttccgggtgcgaggcggccgcagcttccccgcgacaataaatagactagacgctggggagcatagagacagtgcgcgagggctagagcgccgccggacagggcgctcctgggtgcctcgctagccactcatttccggctctcactgctccagtcactttccccgtcccccgcccccacccttccttcctccttcctggtccccaaatcaggcccctcctgcccacccgctgggctcggtgggaggtaagaggtgggatgggggcggcgctaatgggcatcggactagacttttttgtttaagaaccgcttgaaagggttctgaaaacaccgtgtatccyttgtatatttttagttgatatctaaacgtgtagtaatttctggcatacagtcgaatatttaggtggacttttttgtcaaaaccgtag

SEQ ID NO: 910759 - DNA, 613 bp, Homo sapiens
acactctggcaagttttgaaatgcccctccaacattttcccttgtcttgcacaccatccccttcactattcactttgtgattaacaaaatattacaaaaaaagtatagtatatgacaatgatgtcacctctcaaaatgaccagaaagtatacattcattcacactaacatgtctattttttctgactcacagggctgtgttttaatgacagattcatatcccaaaattggggtaacaccaaaaacacaacctaataagctatgccacacagtgcattaggaacaggctaatagatgttgccaagaagaaacaagaagagaaatgctcactgcctctcaatatgcagtaaacaaaaagccaaagtgctttacatttttcagtagaaaggtcataagaatgggttagccttggtatggtatgacaactggtagttcctgccaaaggagatagtcaaagaagcaacgttaattttaatatcaattacagattgatattaaataaatgtcaaggtgctaaactactgtgccacctcgcaccacttgtgattcaggaattatsttcgtggctctggtcatgacatgcccctcctcaagaaccttcaactgccccccac

SEQ ID NO: 910760 - DNA, 469 bp, Homo sapiens
ataccctgactggattgttacacgttcaatgcatgtaacaaaatatcacatctgccctataaatgtatagaaatattatttatcaatacacaaaaactaagtacaactagagcatttgcctctatggggcaatgtcagatttggaagcagcatgtcaaaggcagtttctttttctcccatgaactacgctcaagactgaacatttattcattaacacaaaatattttaaaaatcttatcctgttttcaaaatttaagacatagctctctatacaattatttctcttttatactcctaattgtgatgtataactcattgctggccaggagaaggtcagaagttagaagttacaggaagaaggtttcagagcaaaagccacacscttcccaaagaaaaacaattcctgtccactgctcagttctaattaaacaacaacacaactgaaactaaataattgaatgtcaaggag

SEQ ID NO: 910761 - DNA, 469 bp, Homo sapiens
ataccctgactggattgttacacgttcaatgcatgtaacaaaatatcacatctgccctataaatgtatagaaatattatttatcaatacacaaaaactaagtacaactagagcatttgcctctatggggcaatgtcagatttggaagcagcatgtcaaaggcagtttctttttctcccatgaactacgctcaagactgaacatttattcattaacacaaaatattttaaaaatcttatcctgttttcaaaatttaagacatagctctctatacaattatttctcttttatactcctaattgtgatgtataactcattgctggccaggagaaggtcagaagttagaagttacaggaagaaggtttcagagcaaaagccacacgctkcccaaagaaaaacaattcctgtccactgctcagttctaattaaacaacaacacaactgaaactaaataattgaatgtcaaggag

SEQ ID NO: 910762 - DNA, 610 bp, Homo sapiens
caaatgtcagggtaacactctcaagactaggtaataatatcatcatataaacacccaaaactttgggcaaaacagaccacctcagatctatcagtggacactgctgatattactgtgcatcctggaatcatgaagctggggacctggggtagcagtgtatgctgacaaggtttctgtttctacatttattattatttctctactggtgagtactgcagacttcttacagccatgattcaaaccttaacacctgagtcagctagaactaaataacatgcagaatttgagctcaattcgtctcatgggggtgaaatagcttaaaactgaaaagtaaataaaagaaaatagatgtttttctctttcatacccagtgcgtcatgaagatactgttgtcccaccaacttgaggtattcctcaatggatttggtggcaatagtgttctctctgaagatcaagacatcatgctctccacaacgatccacctcagacatcaccaagtcagtcagaaaatcctggtagaataatgttcaatcaggcagaaagcaactgaataaataatacacatyagaagagacttttgaaatatcagacatcctggaaatgctgcttt

SEQ ID NO: 910763 - DNA, 638 bp, Homo sapiens
gctgggcaaacgaactgtccccttccctccacccaccctcagaaagccgtcttctcrggtgcagctcccagggccccaaggcctcttagattccaatcttgccccctttcctactccccagcaccccccaaccccagacctctcctggtgccccgggaacctgtgccttgttacacccacccggccctgctctgccggcatctcacttctcggccaccctgccgtgcctctcctccatgctgggccctgggctcatgggagactatgattttatctgtgtctgtgtgtgtttgttggtgcacatgcatttccgtgggcatggatgcaaacgacgggctccttacatatgtggtgtgatgtatatatgtagacacagagttgcgtattttcatgtgcatgcatctgtacgtgcatgtacatgtgtgtttgtgctcatgcatactggcttcatttctgtgtgtgtggctgtggatgttatgtggggtggggagactgaccgcacatgtcagtctctacaggcctgggtcacaagtgtgaatcccaagtagcctgtgtgtgtgcttgtgtgtagggtgggccctcggtgagctgtgtgtgaagggcagatgtgtgatctgtctgggcgtggaagagcagca

SEQ ID NO: 910764 - DNA, 638 bp, Homo sapiens
gctgggcaaacgaactgtccccttccctccacccaccctcagaaagccgtcttctcgggtgcagctcccagggccccaaggcctcttagattccaatcttgccccctttcctactccccagcaccccccaaccccagacctctcctggtgccccgggaacctgtgccttgttacacccacccggccctgctctgccggcatctcacttctcggccaccctgccgtgcctctcctccatgctgggccctgggctcatgggagactatgattttatctgtgtctgtgtgtgtttgttggtgcacatgcatttccgtgggcatggatgcaaacgacgggctccttacatatgtggtgtgatgtatatatgtagacacagagttgcgtattttcatgtgcatgcatctgtacgtgcatgtacatgtgtgtttgtgctcatgcatactggcttcatttctgtgtgtgtggctgtggatgttatgtggggtggggagactgaccgcacatgtcagtctctacaggcctgggtcacaagtgtgaatcccaagtagcctgtgtgtgtgcttgtgtgtagggtgggccctcggtgagctgtgtgtgaagggcagatgtgtgrtctgtctgggcgtggaagagcagca

SEQ ID NO: 910765 - DNA, 620 bp, Homo sapiens
ctcttaatcaattggttaaaaataaaagtctcctctsttcatgtttgattcatctttccttgctcactgcaattaggtttcctattatacaattgaacttatttttggtaaggtcactaataactcctttgttaaatccaacagatacttttaagcctttatttgtcttctctatatcttaaaatatgaactatgccatcctccaaaggaaaaaaaatactagtttttccctaggtttctatgttattatttctttgttatttgatgttatttttaagttgacatataataattgtacatattttccaggtagatagtgatgttttgatacacaaaatatatagtgataagataaaggtaattagcatattcatcatcaaacatttatcatttctttgtgttgggaatattcaatatctcccttctagctatttaaaactatatgatatattattgttaactatagtcatcctatggtagttgtattagcccatttttacactgctataaagaaatacctgagactaggtaattaataaaggaaagaagcttaattgactcgcagttccgcgtggctggtgaggcctcaggaaacttacaatcatggcagaaggggaaga

SEQ ID NO: 910766 - DNA, 617 bp, Homo sapiens
ttggcaatgctaaaatctttagaaaactggtggatttatatattctccaacagttgcaaaacaccatatacatttcttcgtagaaaatgctgtgtcttttgcccatgyttattgagttgacagtacttttcttatttatgtatggacatatagaataagtcaaactttctataacattctagagtctaaggtaattaatgtcttggttattaactttgtaaaagtatatgttttcagtcatcatttcacattgaatttggatttcacttcctttgtaaataaatctgtacatatctctaaaggataacttaaaaatatatgtgtgtatgcacaatatgcaaaatattgttatcatgcataaatttaaaaaaccatgaatgtcatcaaatatccaatcagaagatttattgatacaaacacaatcaatatattgtaattggctcatttgtctcttatgtctcttctaatttataggttgctcctctatctctgttgtttttttcttgcattcttttgtggaagaaaccagttagtttgttaaagaggattccacagtatgaattttgttgttccatcctttatagcagcaaaatgcacaatttctaacccactcttaa

SEQ ID NO: 910767 - DNA, 551 bp, Homo sapiens
gctttgtacatagtaactgcatgatgctactttgctgaactgaaagaatttttttagttgtgctaggtgctatactatgcatcctagagaacagaaagcaaaagaagatggtggcctcaatagcgtacccgtttgagaacagtttaccaagcaacacacccaggagggctaattggtccactgtggtctgttgatagtgctaacacctggcaatagaaagtgttataacagaatattccttctggctttgtgggcacattccttaatgtacagcatatttaagtttctgccataatgaagtatgagctataatatcacaccaatgacaaaatgaaaagaaagatacatgagtgatccttgtcaagtcaattatatcaagaaaagcttttatcaggagctggttttcaagagacagcaaaacwgtagaggtggagagaaaaaaaaaggcatcccaggtgggatgaaaaacacatacaaagccatggaacaaagcaaataaaagacaagttgattagctcacatgaaacaatcatgttagtgaataacaagaa

SEQ ID NO: 910768 - DNA, 647 bp, Homo sapiens
tttagcttatgtaaatttattcttaagtattttttggtaactattctaaacagtattattttactgatttctttttcagatttattgctactagtatatagaaatgctactaattttgtaaattgattttgtatactgcaattttaatgaatttgttagttatttgtaagagttctgttgggtcttcaggtttttctaaaaataagattatgttgtctccaaacaaaaatgatttgcttcttcctttttaatttggatgccctttattactttatattgcctaattactctgtctaggactttagtactatgttgaatagaagcgaagaaggcagcattcctgtcttgttccagatattaatagaaaggcttttcattgttctccattcagtgtgatattagttgttcattttcatatatggtttttgtagtattgaggtattttccctatgtgcccaacttgttcagagtttttatcaggaaggaatgttgaattttatcaaatactttttcaacatctattgaaattgttatatwatttttgtccttgattttgttaatgtgatgtatccagtttattaatttgcatatattggacaatcactgaatccctgggataaattccactcgatcatgaggaataattt

SEQ ID NO: 910769 - DNA, 604 bp, Homo sapiens
caattttcttaactgaagagtcaacatgcagatgctcatgaggaccgagccactttgcaaagtaaaaatcaactcctataattggagaagaaggaaaacttcccttttaaagagcttctagaatttactaatttaatataatttttctgaccagacaactatggtctcaaaaatattagtgagtactgatctattacttggtaaattttattgatgtgaaagcaaaaagatggcctttttgaattctatcaacttctttcttcaacaattattttttcttacatggattcagtttctgatgattttactcaatttaacttctttctggaagtcccataggtacagggggaaaagaaaagtggtatcattagggaaaaattattaccacttctaagtgaatgaatgaggctatgaaagtgtttttattctttaccctgactctattgttggtgacttaaacagccacaaagacctaagggcagagcctcttgttcacagttatttactctcctgggcacaaaaacttccaagctacttgggatccagtcaagggaaaagtaacgtagaatyttggctagctttgcttcaaataaagctttcgttt

SEQ ID NO: 910770 - DNA, 752 bp, Homo sapiens
attaattatttggtagatgcctgtcttctctatgagattcagagactgtatatgacacattcagacctatatgtccaggacctggcatgtagtaggtactcagtaaatattcattggatatactgttgttttaaaaacacatacagaaaaacatttttaaaatgcttggtggctgggtgcgatggctcatgcctgtaatcccagcactttgggaggccaagataggagaattgcttgagcccaggagttcaagaccagcctgggcaacatagtgagaccctgtctatacaaaaaatacataaattatctgggcatggtggcatgtgtgggtgggtccagctacttgggaggccgaagtgggaggattgcttgagcccaggaggttgaggtagtagtgagccctgatggcactaccacactccattctgggtgacagaacatgatcctgtcaaaaaaaaaaaaaaaaaaacccgaaactcccaaaccttagagtcattaacagtgtaattgatacttattgttttgctttagtcaatcaagaagagtgtattccaaggatcatccttatggaggagattcagaaaagaggaaagaaagggaactatattagttgagtcctattaggtkctgggaactgtgccagatgctttatatcaattatttcatgtgttactttaacaactggagctggaaagtattgctcctctcatttaattaattaattaatttattgacaaggtcttgctgtgttg

SEQ ID NO: 910771 - DNA, 611 bp, Homo sapiens
ttaaaaattatacaacctgatcaagcacaatctgaccctatgattcagcaattacactacttgatatttccctgaaaggagctggaaacttacatccatatgatagcctgaacatcratgattatagcagtttaattcataattgccaaaacttgaaagcatccatgatgtcctttagtaagtgaaatgataaattatggcacatccaaacagtggaatatttttcaacactaaaaataaactatgaagccaagaaaagacatggaagaaacttacatacattttactaagtgaaaaaagatgatcttaaaaggatacataactgtatgtttcaaactgtatgactgataaagacaaaaccacagagagagtattaaaaaaaaaagagaaagaaaaagaaaaaaaaagaaagaaaatcagtgatttccaggggctagcatttggggagggatgaataggcagagcatagaggatttatagggcattgaaaattctctgtatgatgttataatagtgaatacatgtcactatacatttgttcaaacccataaaatataaaacatcaagagtgaactctaatataaactatggagtttgggtaattataatgt

SEQ ID NO: 910772 - DNA, 676 bp, Homo sapiens
caccacacactaaagtactagattggtgcaaaagtaattgtggyttttgccattaaatagtaaaagtagtaaatgttcctcccctctcccccatataggaagcttgctggactttctgaaaagtgatgagggcagcaagcagccattgccaaaactcattgacttctcagcccaggtgagagcctaacgaggaaacggggaagggaaacaggaattcgatttttttacttgccaaatatttactgaccacatactatgatgatagcagtaataataatgggtaaaatgtattgagagctcagtataaaactatgttttttgcatatattttattatacatgtactcattcatttaatcatcctataagctttataggctgggatttttgttatctattttggtataacaaaccatccaagtcctagtagcttgaaacaacagcaattgttatttctcatgatcctgtgggttgcctgggttcagctgggtggttcttctgctcgtcatggtaaagtgaggtgcagatgttggcacttgcccaggctagaatgtccaagacatggctcagcctccagggtctctccacatagcccctcaccacccaatcacccagcctgagcttcttcacggcgcagcagctgggttccaagacagagctggaccaggggccaagcc

SEQ ID NO: 910773 - DNA, 595 bp, Homo sapiens
cttcagctcaaattcgcaatggaaaagtaagttcagaaaggaaaggcgacttggccaaagattcacaatagtgtaaatrtagaccataaacttgagtttcaatttcaaatccgctagttgcttcaccctcaaggctcaattattcataatgtatgtgtttggaaatggaagcaaattctagagagatcactaaatgtcctttggcatttaattttcattctcacgtgttcttaactttctgatcttccccaaacatgatgaagtttgggactcacctatggttgaagctggctctggccctaaacctgagccttcactgaggcagctggccctgacacgcagacttcctgaagggtctcttgtttatgccaagctttcctcctccaacatgctccaggaagaactctgcttcttggaggctggggtggggaggtggtgagagaaataatgtgcactcccctagatggtgttcctattactcctgctttaatggatccggaaggacgttggggagagagcactgtgtccttgcccacacacaggaatttgagtgacccacaccattccaaaccagatgccctcacacctggaaatt

SEQ ID NO: 910774 - DNA, 624 bp, Homo sapiens
ccctgaaatagcaaaaagagaaagctaattttaaaattaatttcacaaatgaattttaaaatactttagaagcattatttcactaggcyttcttccttttaattacaaataaagtttaaaaatctatatgaaaagtaaagcacagtcctattttccccataacctattatgtaacaactttaatacaataaatctcagaaaaaataaattatttgcatatattatttttaaatgactgataaattattgccaatattaagaaatctcatttccatttgtaagtcaattttcccaaatttatattctatttactattaaaaatagacagtctttgttcttgaattaaatggctgccacaactgccagttaacttcattttcctttgctgttttcacagattaatcaatgcaggccttattttcacacagggaaaataatcattccagctcctcaacacaaaatgaatacatttgtgttccacaattgacttgaagtgaggcactcaaatgccctagaatatggcacaaaatttctttttgctttcattcatttcaagatagtgtattaatattatcctccttgcttccacacagctgtcatctaaaatgccactaaagaatggat

SEQ ID NO: 910775 - DNA, 578 bp, Homo sapiens
tttaatcataaaggaataatgaactttatcaaaagacttctgcatctattgaaatgatcatatcattttttaaaattatgaggtgtgttacatttatgaatttgcatatggygaaccatccctgcattccttggaaaaaatccacttgattgtggtatattatctttttgatatgctgctgatttttttttttttttttttggctagtattttgttgagaattcttgcatttatattcctcagggatattggcctgtaatattctttttttattgtttccttgctagtctttggtatcagggtgatgctggcttcatagaatgagttaggaagaattagattcctttatttttggaacagtctcaataggattggtatcagtccttccttgtacatctggtagaatttcgctgtcaatcagtctggatttgaacttttgttggggatagactttttttattactgattcaatcttactagtcaccattgatctgttcaagatttttatttctttcttgttcagtcttgggaggtgtatatttacaggaatttattttctctaggttttctagtttatg

SEQ ID NO: 910776 - DNA, 632 bp, Homo sapiens
caccattgatctgttcaagatttttatttctttcttgttcagtcttgggaggtgtatatttacaggaatttattttctctaggttttctagtttatgtgcatagaggtgctcataggacttgctggtgatcttttgtgtttctgtgatatcagttataatgtcacccttattatttctgatcatgcttatttgaatcttttttctagctggtggtctatcaattttgtttatcttttcagaaaccaactttttacttcattgatccttttattgtttctttggtctcaatttcttttatttctgctctgatccttgctatttcttttcttctgctgcccttgggtgtggtttgttgtttttcttgttccttgaggagcaacataaggttgttaatttgtaatctttgtatatttttgatgtacacttttaatgctgtaaacttccctttagcattgcttttgttgtatcccagaagttttggtatttagtgtcttattttcatttgtttccaaaattttttaaattgaagctttaatttcattattgacccagtggtcattcaggagcaggttgtttaatttccmtttatttgtataggttttagggttcctctaggtattgatgtctagtt

SEQ ID NO: 910777 - DNA, 695 bp, Homo sapiens
tttaaattgaagctttaatttcattattgacccagtggtcattcaggagcaggttgtttaatttccctttatttgtataggttttagggttcctctaggtattgatgtctagttataatccactgtrgtctgagaagatacttgatatgattttgattttttaaaatttattgagacttgctttgtggcctagcatatggtctctttttgagaatgtcctatgtgtacaagagaagagaatgtatgctctgccattgttgaataaatgttctgttaatgtcttttggggccatttggtttagagttcaatttaaatccagaatttttttgttgatttcctgctctgtcagtgtggtgtattgttttgttgtctaacttttttcttaggtctaatcatatttattttatgaagctgggtgctccagtattgggtacatatatgtttcgaattttatttaacatggttgacttaaagtctgtttcatctgatgtaagtataactattcccacttgattttggttttcatttgaatggaaaaatccttttccaccttttaacattgagactctatatgtttttaccacttgggctggtttcttgtataaatcacatgattggattttgtttttttaatccattccttcagtctgtatcttttaagtggggcagttagttcatttatgttcaaggtttg

SEQ ID NO: 910778 - DNA, 439 bp, Homo sapiens
ccttgcttgccaccaaggttgggtttgtgggggaaggacatatacctctcattctttctgattcttctgcagcaaacaaatacacaaaaagcaaataaaagaagcaaagaaagccaacaaaaagccacacagcttgcaatttaaccctgattttcttaatcttatgaggtgttttcacactctgagcagttaaatggcacaatttatgaaattctgtccttgagtctttgaaaaggctgatgaaagaaactggattttgtggtgactctaaagatatatgtcattctgatattttttaattgggattcctccagaaaggttttcacttttgattgtgtaatatgcayacttaaaccaaaaacattttaaaatactttttcagatgagaggtggagtttactagctcaattgcagttgctctcagtgtgatactttatat

SEQ ID NO: 910779 - DNA, 610 bp, Homo sapiens
gcctatgggagaaagaagccttacacagggtggcagaatagaaataaaatgaaggaagagaaagaaagatatttactcccttccacactgttggtctcctgctcccagcagatctgaggtgggggtaagaatagaagccttcaatttaagttaagttcaaagttttcattaccaaataggccaggatgtttgaattgtggaattgagattgtttttcaatgtatagtgactatatgtcctttgactaactagggggccatagaagtcgaccctcctcagctatatcatccagggaaaagagaataactagccccactcaatattttaaagcaacagtggggacaaaaataaaattgttttatgataaaatcctacagtgatgtttgccccagatagtgttacatctgagcagacaatgggtatttccagggagaatcaagagcagatttttggtcaccacctgggaattctgggtaggtctagctctactttcagaatgccctctcacatcttccctggaacctcagttagagctkccactctcccacccagtgttaacacaatccttcctctttctatttgcccatcacttcatgtgtttggcaactgt

SEQ ID NO: 910780 - DNA, 591 bp, Homo sapiens
atttatgagatatcagtgcaattttgttaatgtacatggtacccattaagtaacctcttgagtcttcatcctactttgtcacccttccaagtctccattgtctatcattccaccctctatatccacatatacatgttatttagctcccacttatgagttggcaaatttttttctttagtaatttaaagtcatcatactacactctcctggcctgtaaaaaaatttctgctggcaaatctatttatacagtcttatgataattcccttgtatatggtgaattgctgttctcttgctgctttcaaaattctccttttgtctttgattttaaagaattccattataatgtatctcagaaaagaactgtttatatttaatctttttggggtccttgggattcaggaatattggtattcatttccctcttcagatgtgaaaatttttctgtcattgtttatttaatgacaaaaatatttccttctttttattcttctctttgctccctcagtggctcccataatgtgtctgttggttgcytgatggtgccccgtaagtccaataagctttcttcacccttttttatttactttttt

SEQ ID NO: 910781 - DNA, 598 bp, Homo sapiens
ttgaactaagaataatttttacattttaatggattttttaaaaattcacagaaaagccctaaggggtctgaacagcctaaagtaatactatctgtttttttgtttgtttgttttgggtttttttttctttttgcttttttgttttttttggttttttacagaaaaagcttgccaacttctgttctatcttactttgctctgcaccgctggggcagtcagggaccaatttccctaaaagcaagtacagcaagccctccagggcctggcactgctgggcctgcagtgtcatctcctgtccctgtcaattcctgccctgtgctcttaccttgagcttgtcctattcttttgcattccatgcctttgcccatactttccaccctatgtaggaggaatgcacattccctaaccccactttgtctgaaaaactcctactcggaatttaaaacgatgtattaccttctctgtgaactaactctggcctcccacaccatatccaaaacagagctacagctcttttatttcyatctgtaactgtttctcctactgaaatctgaatttttgagttcaaaataatactaataatagttaacacttagca

SEQ ID NO: 910782 - DNA, 607 bp, Homo sapiens
aataaataaatacaggccaaatttataaatttgcttaaaaccggttattctgcatagacacctcagtaattgtatccaggcatccaggctcattaacaagactgggacacacctgtttgagatcaacattcagggaaaggcatgagggtgagatgttttaaactatttctattaagggtatggttactccttgatgcatacagggaagcactgagataggtgttctggaaaatagagccgagggttcagagcttaatggaagataatgttgcatttgtaagggaggcccatatagaagaggtgagacagataaactgatcacagtagagaatgaagaggtgaacagaagggaactagatgccagctggttgagaaaggaggtcagaaatcacgccagtcaacacagagatcctgtggggtagaggatactacacaagtctgcagtattttctactgagctttgagtggatccttaggggaagggctaggaaagacaaattcagacaacctgggctaaaccgacctcaactgaactaggtaacattttaactgaaatgcaatgtttatggtctcargtacaatcaataacatgaatttctctaaatgc

SEQ ID NO: 910783 - DNA, 588 bp, Homo sapiens
tatcttatgttacttccattttcattcattctaacaatctgccctaattttaacatatattctccttcaatcattcttatttactatattgcaccttattttcagttattttttataatggttgccaagtatgtggccacaaagaaagcagcagaagagtccagacctttgacagaagtagttaaagcctgtctccaaccattctcactctctgccccacctccaactccccctaaagcctcccttctctcaaatccttaccaatccctcagcccactgaatgttggctctcaaacccttacgcacaggagtcccagaaagcccagggctggctctctcaaaggctgtaactcttcctgtaagtgtatcacatttattttactaaatggaaattgcttcctaacatctcacttaaggatctgcctggttttcaagtctatgatcagttgaaatttgggcaaacasacctatcactgtgccataaaccaagaggaaatgtgaatcaaaccttggaaaagaaccagacagatactcagggtgaagtgatggaggtggagggagattcattagaggttgaagttaaatagc

SEQ ID NO: 910784 - DNA, 635 bp, Homo sapiens
aaagatagaagctgaagggacatagtgagaggtgagaggtgactagaactactgaatcaaaaggaaggtttaagtctgtgagatgaatgcaygcaacacaaaccaccttctcagaaatcttctttctacttcttatctgaagatattttctttttcaccataggcctcaatgtgctcccaaatagccctttgcaggttgtacaaacacagtgttttcaaactgcggaatgaaaagaagggtataactctgcgagatgaatgcacacatcacaaagtggtttctcatatagcttccttccagtttttatcctgggatattcacttttttgccattggcctcaatgagctcccaaatgtccattagcagaatggacaaaaacaatgtttcccaactgctgaatgaaaagaaaagtttaactctttgagattaatgcacacaacacaaatcaatttctcagaaagcttctttctagtttttatctgaaagtattttctttttcatcttcatcctcaaagcactcccaaatatcccttcgcatattccatgaaaacagtgtttccaaactgctgaattaaaacaaaagtttaaatctgcgagatgaatgcactcatcacaaagcagtttctcaggtagc

SEQ ID NO: 910785 - DNA, 635 bp, Homo sapiens
aaagatagaagctgaagggacatagtgagaggtgagaggtgactagaactactgaatcaaaaggaaggtttaagtctgtgagatgaatgcatgcaacacaaaccaccttctcagaaatcttctttctacttcttatctgaagatattttctttttcaccataggcctcaatgtgctcccaaatagccctttgcaggttgtacaaacacagtgttttcaaactgcggaatgaaaagaagggtataactctgcgagatgaatgcacacatcacaaagtggtttctcatatagcttccttccagtttttatcctgggatattcacttttttgccattggcctcaatgagctcccaaatgtccattagcagaatggacaaaaacaatgtttcccaactgctgaatgaaaagaaaagtttaactctttgagattaatgcacacaacacaaatcaatttctcagaaagcttctttctagtttttatctgaaagtattttctttttcatcttcrtcctcaaagcactcccaaatatcccttcgcatattccatgaaaacagtgtttccaaactgctgaattaaaacaaaagtttaaatctgcgagatgaatgcactcatcacaaagcagtttctcaggtagc

SEQ ID NO: 910786 - DNA, 620 bp, Homo sapiens
actacagactacacaaagaaaaacaacatagattaaaagcacaatcatcattgaaatcacagagcttccaagtgtttttatccattttaatgggttactagctgctaatttttcttcagctcctttaagcactcagtttctggcattaatgtgaggtgtgcctgggatgctttaaatgtttgttcttttaattttggcatatccaaaaacaagtttgtagagtgtccttatagattttttttatcctttcccaaattttgatcttattaagagcatttaatagtttccgcaaatccttatgttaagctcccagtgcgggccatatcatttgaggttgaggtgccacaatactgccatggttccagataataggaagttttgtcgtacttcttatcatatctaccatctgaccacttggttcagatcatctgaacatagtgtggccacggcacacagactgagaggtgcaattcaagctaaacctctccttaggggaatgattaataatgattccatagsaatcattgtgcagcacctctgcctgttctgcaatgcaatcttcctaaacaagtacgttcattttttctaactgggtccaatcctgtttacaagtaggttta

SEQ ID NO: 910787 - DNA, 596 bp, Homo sapiens
aacactgtttttgtagaaactttgaagggatatttggaagtacattgaggcctaaggtgaaaaggaaaatagcttcagataaaaagcaggaaaaagctttckgagaagctgctttgtgatgtatgcattcatgtcacagagatgaaactttcttttgattcagcagtttcaaaacattctttttgtcttttctgtggatggtcacttgggagctcattgaggccaatggtgaaaaagtgaatatcccaggataaaaactacaaagaaactgtttgagaaaatgctttttggtgtatgcattcatctggctgactaaaacctctatttcattcagcaatttggaagcatttttttttgtataatctgtgaagggatagttaggagcacatggaggcctatggtgaaagataaaatatcttcagctgaaaataagaaagaaggtttctgagacactgatttgtgatgtgtgcattcacctcacagagttaaaccttccttttgattcagaggttggagacactgtatttgtccattctgcaaatggaaatttgggagctcttgaggccaatggtgaaaaggtgaatatcccaggaaaa

SEQ ID NO: 910788 - DNA, 653 bp, Homo sapiens
gtggtgaaaaagaaaataccttcagataaaaactagaaagaagctttcttagaaactcctttgtgacgtttgcatttatcaggcagatttaaagctttcttttcattcagtagtttggaaacactttttttgtacaaccagtgaagggatattttagagcgcaatgaggcctatggcagaaaagaaaatatcttcaaataaaaagtagaaaaaagcttttgagagactgctttgtgatgtgtgcattcatctcccatagttaaaactttcttttgattcagtagtttggaaacactgttattgtccattcagcaaatggacagttgggagatcattcaggccaatgatgaaaaagtgaataccacaagataaaagctagaagaatccgatttgagaaactgctttgcaagctgtgcattcatctcacaaagttaaacgtttcttttcattcagcagtttggaaacactgtttttgtagaatctgtgatgggatgtttcagagcactttgaggcctatgatgaaaaagaaaatatyttcagataaaaactagaaagaagctttctgagaaactcatttgagatgtgtgaattcatctcacagagataaacttttcttttgattcagcactttggaaacactgtttatttccatt

SEQ ID NO: 910789 - DNA, 482 bp, Homo sapiens
cagtaaccaaaacagaatggtactggtatcaaaagagcgatatagaccaatggaacagaacagagccctcagaaattatgctgcatatctacaackatctgatttttgagaaacaagacaaaaacaagcaatagggaaatgattccctatttaataaatggtgctggaaaaactggctagccataggtagaaagctgaaactggatcctttccttacaccttatacaaaaattaattcaagatggattaaagacttacatgttagacctaaaaccataaaaaccctagaagaaaacctaggcaataccattcaggacataggcaagggcaaggacttcatttctaaaacaccaaaagcaatggcaacaaaagccaaaattgacaaatgggatctaattaaactaaagagcttctgcacagcaaaagaaactaccatcagagtgaacaggcaacctacaaaatgggagaaaatttttgcaacc

SEQ ID NO: 910790 - DNA, 539 bp, Homo sapiens
gtaaccaaaacagcaaagcagtggtaccaaaacagacacatggacctatggaactgaatagaaagcccagaagtaaggctgcatacctacaataatctaatctttgacaaagctgacaaaaacaagcaatgaggaaaggacttcctattcaataaatggtgctgggataacaggctacccatctgcagagaattgaaactggactccttccttacttcatgtattagtcagggttatctagaaagacagaactaatataaaggggaatttattaagcagtactgcctgacacaatcatgaggtgaagtcccacaatacaccatctacaagctaaagagcaaggaagccagtccgagtctgaaaacctcaaaattagggaagccgacagtgcagtcttcagtctgtcatggaaggcctgagagcccctggtaaaccactggtgtaagtccaagagtccaaaagctgaagaacttggagtctgatgtttgagggcaggaagcatccagtatgmgagaaagataaaggctggaagaatcagc

SEQ ID NO: 910791 - DNA, 607 bp, Homo sapiens
gccaatgttacttttaattattttttgttatcctgaaaaatgaataatatgttgccatgtgcaggtcttgccaattctgctaagyctgttcatgtgaaatggatgctgtgatatcctcagaaagtttgtcttaggtatgttaaacatggtccctgccatcttttctactgtgtattcctatcactggcatacccaaatcctttttaatgatgcagaggcagcttagcctgtgttcaaattatatgaatcctaagttagaagggggtccacattacaaagtttaccacttacttgaaaaggacacttacttaactaggaccaatatttgacttccaaacacctttactcactcattccttggtctcagcagcagcacgtcatataggtagttactcatggaggcagaagcagggggaagaaggaggtgtctctgtgagctgttttgttttattttacctttaaacgaaaaagcccccaaggctggtgttcaatcagcccgcaaataacccccaccatcgacaacgccaaagaacatgactgcccttctttccacacacacttgttagaaagttgttttatgactttgtttcctcttcatggatatcat

SEQ ID NO: 910792 - DNA, 577 bp, Homo sapiens
ggtttggtttgttcttgtttctctagttccttgaggtgtgaccttagtttgtctgcctgtgctctttcagatgattgtaggcatttacggctatgaacyttcctcttagcactgcttttgctgtatcccagcagttttgacaagttgcatcactattatcatccagttcaaagaatttttaaatttccatcttgatttcattgttgacccaatgatcatttgggatcagtttatttaacttccatgtatttacatggttttgagggttccttttggagttccttcatttatgaagcttagttcctctggatacaaaattcttggctgatgattgttttgtttaaggcggctaaagataggaccccaatcccttctagcttctaggatttctgctaagaaatctgctgttaatctgacagattttcctttataggttacctgatgcttttgcctcacagctcttaagattctttccttcatcttgactttagataacctgatgatgtgactaggtgatgatctttttgtgatgaatttcccaggtgttctttgagcttcttatatttggatgtctgta

SEQ ID NO: 910793 - DNA, 544 bp, Homo sapiens
tctttttaagtcctattacttcatgaaaaattaataaatcacctcactgcttctaatttactgccccmcttaagttctgacactttcttggtgacaagatgctatttgggaggtggagaggtatggcttctatttctgttatacacatatgtggtcatccaggattttgtttcttaaacttgaatgacacagaaaccatatttaaagaggaataaatattatataattcctgcactgatttactttggactacacagagtgaacgtgagggccagcaaatatctttgcatacttatctaaagcctatacttcttccgcctctgctaagtgactaggaaattaccaacagtgaattgctaatatagtaaactctaggacaattctcttcaccatttttccttgaaacaatgaaggaaaaaatgaccaaggaaatatacaagaatctctgtttgtctgttattggtgtataagaatgcttgtgatttttgcacattgattttgtattctgagactttgctgaagttgcctatcagcttaagatttt

SEQ ID NO: 910794 - DNA, 544 bp, Homo sapiens
tctttttaagtcctattacttcatgaaaaattaataaatcacctcactgcttctaatttactgccccacttaagttctgacactttcttggtgacaagatgctatytgggaggtggagaggtatggcttctatttctgttatacacatatgtggtcatccaggattttgtttcttaaacttgaatgacacagaaaccatatttaaagaggaataaatattatataattcctgcactgatttactttggactacacagagtgaacgtgagggccagcaaatatctttgcatacttatctaaagcctatacttcttccgcctctgctaagtgactaggaaattaccaacagtgaattgctaatatagtaaactctaggacaattctcttcaccatttttccttgaaacaatgaaggaaaaaatgaccaaggaaatatacaagaatctctgtttgtctgttattggtgtataagaatgcttgtgatttttgcacattgattttgtattctgagactttgctgaagttgcctatcagcttaagatttt

SEQ ID NO: 910795 - DNA, 544 bp, Homo sapiens
tctttttaagtcctattacttcatgaaaaattaataaatcacctcactgcttctaatttactgccccacttaagttctgacactttcttggtgacaagatgctatttgggaggtggagaggtatggcttctatttctgttatacacatatgtggtcatccaggattttgtttcttaaacttgaatgacacagaaaccatatttaaagaggaataaatattatataattcctgcactgatttactttggactacacagagtgaacgtgagggccagcaaatatctttgcatacttatctaaagcctatacttcttccgcctctgctaagtgactaggaaattaccaacagtgaattgctaatatagtaaactctaggacaattctcttcaccatttttccttgaaacaatgaaggaaaaaatgaccaaggaaatatayaagaatctctgtttgtctgttattggtgtataagaatgcttgtgatttttgcacattgattttgtattctgagactttgctgaagttgcctatcagcttaagatttt

SEQ ID NO: 910796 - DNA, 638 bp, Homo sapiens
agacttaccaggcattcacagaacatttcattcaaaagctacagaatacacattttttyctcatcaccatgtggaacattcttcaggatagagcatatattaagccacaaagcaagcctcaacaacatttttaaaaaattgaaatcatatcaactatcttctcagaacacagtgaaattaaatgagaaatcaaaaaaaaagagaagctttagaaaatgtacaaacacagagaaattaaacaatatgctcctgaatgactatttggtaaataatgaaattagaaaggagatttaaattttttgaaataaatgaaaatgaaaacacaacataataaaacctactgaatacaccaaaagtagtgctgagagggaagtttatagcgattaagacctatatcaaaaaaatagaaatatttcaaataaagaaccaaacaatgttcctcaagaaactagaaaatcaagaacaacccaaaccaaaaacttagaaggacagaaataatgaaagttacagcagaattaaatgaaatagagattaaagatatattcaatagaataaaaaattagatttttgaaaagataaaatgcataagccactatctagctagactgaggaaaaaaaagagaagattcaaataaaca

SEQ ID NO: 910797 - DNA, 575 bp, Homo sapiens
ggtccactctaatgaccccatcttaacataattacatctgcaaagactctatttacagataacatcacatttccaggtgccaaggatttgggcttcaacacattttatttatttatttatttatttgaaatatacaatcaaaatcccagaattatgctaaagttagtatgtgttcaacattggctcttctcaatttaccaacataatatactttctctaagaaaagaaaagagtatattactttttctaagccattactttagtgtagagagttttacagggttctagacattttttaaaaagtttatttattttaggataataatatatacaactatgcacagtaaatatagaaaaaagcatttttttactaagtaaactttccaattttaatttctcaccttttaaacttttttttctatatgtttcagagctctttagagaaacagaacacaaatataattttaaatggatataaatgattttttaaaagagagtttagattgacctrttcttttctcaagagaaacagaggacttgaacaacactgtaaaccatctagactgaacagatgt

SEQ ID NO: 910798 - DNA, 647 bp, Homo sapiens
tgttcctcaagaaactagaaaatcaagaacaacccaaaccaaaaacttagaaggacagaaataatgaaagttacagcagaattaaatgaaatagagattaaagatatattcaatagaataaaaaattagatttttgaaaagataaaatgcataagccactatctagctagactgaggaaaaaaaagagaagattcaaataaacaaaatctgatacaaaaaggaaacatttcaagtgataccatagaaatatgaaagatcaccaaaaaccattatgaacaactatacactaacaaactgaaaaacctagtggaaatggatacattcctggacacacacaacctaccgtaagtgaatcactgagaaattgaaaacctgaaccaacaaaaactgagtaacaatattgaatcagtaataaaaagactcccaacaaaggaaagtccaggactggatggcttcacttcagaattctactaaacttacaaagaactagtattatcttcctcaacccatttcaaaaaaaatcaagaggaaggactttccctamctaattatataaggccagcattaccttgatatctaaaccagataaggacacaccaaataagaaaactacaggtcaatatcccagatgaacatagatttttaa

SEQ ID NO: 910799 - DNA, 639 bp, Homo sapiens
cattttccttttgtctatatagaacactgtcctcatcatatttttgctaatattgatttttcacttcaaaactatactatgctaaaaccatttgtttataacatagtctgtactatgtacatgtctattttccaaaccatatagtccaagccaggaatcatgtctttattttacatctttgtgacattttaaaaatatcctaagacataaagaagtggtgaattttagtaaaataactagcagatttgaggcactaaaataagcatattgcaggaaaatttctcagtctatgtgttccaaattaccttatcttttaaacaggactgttaagaatctgatgtcagaaactgtgttgcagtcagtgataatatgtatttgcctataaacttcaaaatattgtgcatataaaaagtgttagtattattttaggtgatggatatctgtttgtcaaatatttaacattcttctcagttcaagtttcaaattaaatattaatataggtatttttaacccacattcatatagttacatattttggtttaattctgaaaaattgctagaggtaatactcatctactmcactgatattaaccaaatgtgagacagttaaagtttattgaaatatattccctcaagatc

SEQ ID NO: 910800 - DNA, 654 bp, Homo sapiens
ctaattgatgcaaaaatggacttgtacacacatttaagataatttaaattatgtgtatatagatattgtttgacaatattatttatctatctgtataaccctgtatatagacattgtgaacaaagcattatgttatgttctatataaagaaatttatggtaaatacttatatttaccattatatatatattatatggtacattatatggtatattatatggtatatatatggtattttatatggtaaatatatatattttatatatattccagtattaggaatgcagctattttctacttttattttttcctttctagttacagaccctaaaatgttcatgctatatatttattcccaggcactagaaatttttaaacacaagtaaccatataatgcaaataattgttttaaattaaaggtgaagatgctaatcaagattttttttaatagtttctttagggatgaaggccagccagatgatagaaaaggactctccagtgctcattccctggcagaaacatcaattcaaacacctatccacamacaaaaataccttcacaagagctaaggaaatcaggtgaaaaattacagcaccaggctctagcacaaacataagaagagatgagtgacaagggtaggaatgacaatcttac

SEQ ID NO: 910801 - DNA, 623 bp, Homo sapiens
actggaaaatacaaaagagggaacagaaataaaaaagcaaagtttgaaaactacctattgcttactttgctcatttattgggctcatttcaggtttagtcatacttcaagacccartatcattcaatatgtctttgtaacaaacctgcacatgtacctctgaaatttaaaataaaagttggaaaaaagttctttaaaaattttacaaagtatagagatttttatgcaatcagagttaattattatcagcttaaaatagcttgttataactataggatgttttttgcaatcctcttggtaagcacaatgcagaaacttatagtatatacaaaaaagacaaaacataaagaaacaaagcatatcattaaagaaaatcacctaattacaaagacatcaagaagaaaggaacaatctacaaaacaaccagaaaataactaacaaatggaagtactaagtttctatttatccaccattaccctgaatgatagattaaattctccagtcaaaagacatagagtggctgatgattaaataaaaaggctaaactacatgctgcctacaaaagacttagttcacctgtaaggatacacatacaatgaaagtaaaggaatgaaaaaagtattc

SEQ ID NO: 910802 - DNA, 600 bp, Homo sapiens
ccaagtccaaagtcacatctgagacaaggcaagtcccttctggctatgagtctgtaaaattgaaagtaagttgttactacctagatacaatgggagtacaggtattgggtaaatacacccattccaaatgggagaaattggccaaaacaaaggggctacaggccccatgcaagtccaaaatccaacagggaagtcattaagccctaaagttttactttgactccatgtctaatgtcctaattttgctgatgcaagaggtgggctctcatagctttgggcagttccatccttatgactttgcagggtacagcccctgtcgcagctactttcaatggctggtactgcagcttttccagatgcacagtgcaagctattggtggatctaccactctggagtctggagaatggtgagcctcttctcacagctccactaggcagtgccccagtggggactctttgtgtggggytcaacctcacatttccccctttactgccctagcagaggttctccatgagggctccactctggcagcaaactcctgcctggacatccaggcatttccatacatcatctgaaatctaggtggaggttcacaaatc

SEQ ID NO: 910803 - DNA, 578 bp, Homo sapiens
cataataaaagaccaataaaaacacacagccatagacaamaataaacagaacttgatttagagaagaatctttggttttagcttcaacatgtaaacgctaggaattcgtctctcctatctttacaaggaaaaaaaaatcaaagctggacaaactgaaaaccatagactcttctcagacccatgagagaactgaggtcacagtgaaaaccatcactccaaaatctgctagacaataagactatcttgaaaatgatcaaagtaaagaagttacattacctgattttaggaaataatataaagttagacaaatggattaatgtaacagaatagagcatctacaaaccaatcatacatgtatacaatcaacataatttcaacaatattcaaaaaaaagattttgaatctgaaacaactggataaatatggaaaaatataaatttgggaaagaaaatctagaatatcttagtatgttgagataggtaaaatttcttagacaaaacccaaaaagcactaccataaaagaaaagtataaagaagtgtaatttatcaaattagacattgctgcttttcaaaagacc

SEQ ID NO: 910804 - DNA, 622 bp, Homo sapiens
aataaaaaataaagagtgaaactgtcccacactctaaagattagaaaactccatatattaatggtcaactaatatttatactaattayatcattgatggagaacatatatgagaatatgtttttttttttttttttagtgttctaagatctgaggttgtacagaattgaggattccaatacggcacactgatgacaaaacacttatgttgatttgcctctgtggtttgtcataagagttgatacttggaaaagaatatatgtcagtccagcagatttacaataaatggtggcctaataggaactacaaaatttgtgccaatttaagacacatatttaagtctgaatagagaagttgctggtatcccagtggagaaaataaatgatgaaacaagataaggatcatttttattgctgagaaatgctgaggctgactagattgcaggatagatacattgaaatttaacaacttgaaaaaatgcaattaattagtaaacaagtatacgcgtttgttctttgaaagcattaattcagtcagcttcatggatatacaaccagtgcagtcaataccctggttttgtcatctcaaaatccttaataattttaaaacagaagtcctaaatt

SEQ ID NO: 910805 - DNA, 621 bp, Homo sapiens
aaaattccagggttccagtttgtgtggtttgaataatgatggtatttctcttcctatatatatggcagaaagagaccataaaatagaatctcaaacaggaggtctcttcctgattctatatatgatawatctgaatcttcagatcacgtaaatggagaagtctcacatttttctttcttgttaccacttactccattttttaatctctactggaaatgtctgccatggacaatgatgtattcttcctggccgtaacctcattttctgactgttcattctactgccaactccaccttcaccatcttcaatacagtcttttacatcattgctcagcagttcttagtgaaaatcagctcatgcggctcttaaatccagctgaagatagccaaacccgagggcctgggtcaggtaaggttgctgaactgcttactctcacagttgaggagacatatacaagaagcaaggaaagactagaaaatacaatgtattagtccattctcatgctgctatgaagaaatacctaagactgggtaatttataaagaaaagaggtttaattgattcacagttctgcatagctggagaggcctcaggaaacttacaaccatggcagaaagcactt

SEQ ID NO: 910806 - DNA, 582 bp, Homo sapiens
ttgcatgtaattaaaagcgggtataaatatgaatgcagaccagcctttgagctggtattctgggcacactgcctattgggtagcgctgctctgcaagaagcagtaagtctgctgctgcattatgctgttgcttaaatagaagttgctgtctaatgccattggctcacccttgaattctttcctggaaaaagccaagaaccctcctagaccaagcccctgttttggggcttgcctctcctgcatcacaattgcttacattaaatattatttttccaaatttgatgccactttattctcgcactttattttttagtgtataatagaatcaatttatgtattaactgtgaaagattcatcttctttataaatatcagccctgtaaatctacttaagttgtatatatacacaatggaataattttcaaccttaaaaagcaagaaatgtcatttgtaacaacacagatgaaattggaaaacattatgttaagtgaaataaaccagacacgragacacagacactgcaagttctcacttatatggaatctaagacaaccaaagtcaaagaagcagagaatagaatggt

SEQ ID NO: 910807 - DNA, 663 bp, Homo sapiens
aaagtggaagagtttatatcttgaatttggatagagaaataagcttttctttataagaaaaatatatacatatatctacatggttaacamaaatacaagtaaacgtaaccagcaatattttgttgtttttgtttcaggatcttggacaaaaagctaactagtagtaaggaacaattgcataggacaagatgaacagaaggaagttgattttattctaatactagtgctagcaataagggagagggcacagagcaaacctggacacccaactttgtcaagacaaagggctggagaggttttaagagttgggattggaaaagatcataggctatctgtgtttgctaattgtccctaccaaagaaaattaaacactctaatatgtttatgacaggaggtacttttacaacttagaacaaggctcaggcaggactcagattcctatcctttcactgaaactgggagataagggtattatcttccttgatgattaggtttcaaagaggtggttcccaggtccttgagaaagacattcctgggttataaaactgacaagagtctttttaaaagatttacatctcaaagaaggagagaagggatttacaaccataagttatctaaaataaatggtctaagaaaaggcagggcaggggcctagagtctgga

SEQ ID NO: 910808 - DNA, 618 bp, Homo sapiens
aacccttccttctcttatcagtgtggactggcctcttgtgttccaatttcatacttataatctgatstgggtgtggaaagaagatcagagaactttgaattatgtataaaacaagggtaaatgagctctgaggtaggaccaggaggcttcttctaccaacaagctttgcatgtctgttttggctgctcagtggataatttgttcatttcttgttttttgcatcattcgagatggatgctacaaggtagccaaatccagaaaggtagaatgttaagattatgcttttggtataatcagttgatgagatattttatcaatggttgtatttttttcctttgtttgttttaaacctatgccatgttgccaggcacggtggctcacacctgtaatcccagcactttgggaggccaagcaggggggatcacgaggtcaggagtttgagaccagccaggccaacatggtgaaaccctgtctctactaaaaatacaaaaattagctgggcatggtggcatggcccagtaatcccagctaccagggatgctgaggcaggagaacagcttgaacccaggaggcagaggtggaggttacagtgagctgagataatgccactgcactcca

SEQ ID NO: 910809 - DNA, 660 bp, Homo sapiens
aactaaacaattctgttaagcccagcctaagtcagtcagtccacaaacttggctaagtaaacacttatggttgttttaagctattaatttttgggggtagtttgttacacaacaaaagctgtttcatagtttctcaattgcaaagcgtgaattgccttcaacttttcattgtcgtggatttgagagaaggatgctcagagtcagctgctgcagccgcaactcaacatctcaaccctcagagatacaagaactctgttaactctagttttaataggtcagactgggaggttgtctccctctctccctccctccctctctccctcttttttcatttgttactcttacttttagtagataggtgctgaagaaacaaagataatcagctcttacttttagtagataggtgctggggatataaagacaaaaactcataaccaatgaggacattcatgcagaaaaataatatagcagatataagtgctaatggaagtgtgtgcagtctgatcagactacaagacaaatccaagcctctgaggaatgggcatgggtagcttcactgaagcrgtgtggtttcaggagcattgagtaggcactgctgcagttcttcccagctcacttgctcgtgcattcaacatggattttcccaatcaggaaacatat

SEQ ID NO: 910810 - DNA, 637 bp, Homo sapiens
acaacaaaaaagaaaactacagaccaatatcaacaatgaccayagatgcaaaaattctcaacagaatgctaacaaaaaaatttcagcagcatatcaagaaaataataaactatgatcaagtcagatttgtctgaggaatgcaagtatggttcaatatacccaaattaataaatgtgatagattacatcaacagaataaagaacaaaatccatatggtcatctcaattggtgccaaaaaagcatttgataaaattcaatatcccttcatgctaaaattgttcaacaaactaggcatacaaagaacatatctcaacataataatggccatatatgacaaactcacaactaatatcatactgaatggagaaaaactaaaaggctttttttctaaaaactggaacaaaactaggatgcccactttaacgactcccactcaacatggtactggaagtcctagtcagagcaatcaggcaagagaaataaataaaagacatataaatttagaaaagagaaagtcaaattgtcatttgttggtgatacgatcctatatgtagaacaacctaaatctccatcaaaaaaactctcagaattaataaacttgcaaaacacaaaatcaatataaaaaagtagcttctct

SEQ ID NO: 910811 - DNA, 529 bp, Homo sapiens
aagctcttttattaaaatattcaacaaatatttaatcaatccttgatctctgcctgtcactgattctgtggatatagcaaatctaatgatatctctgcctttaagtagyttacagcatagtggggaacagatgggatgacttagggaatgtgcgtagtgaagtaagagaagatagttgatacctgaatcattgggagactaccaccaacaatagatgaaaaaaaatgaagtgtatttcaccaagaagcaaggaagatgagagttaccgaaagaataacaaaggcaatattgtcaaatgctgcagagttcaaataaaacctgaaaaaaaaaaaacagacttcacaattggttaacaatctctgagacatcggttccagtggcaacaggtgaggcagatttctatgattcaacatggttacggtagtaatcttcagcaccctaatattgtttgtggagctctaaacaccatattatatcttttaaacaataaatatttgttgcattattaaataaaggaattttgaagaag

SEQ ID NO: 910812 - DNA, 522 bp, Homo sapiens
ttggctccttgtatatcttcttttgagaagtgtctattcatctatttggcccactttttgatgggattgtttgtttttttcttactgattsgtttgagttcatttaggttctggatattagtcatttgtcagatgtatggattgtgaatattttctctcactctgtgggttatctgtctactctgctgactgttccttctgctgtgcaaaagctctttagtttaattatgtcccagctatttatttttgtttttattgcatttgcttttgggttcttgtacatgaaatccttgtctgaggcaatgtctagaagggcttttccaatgttaccttctataattttcatagtttcaggtcttagatttaagtccttaatccatcttagttgatttttgtataaggtgagagatgaggatccagtttcattctcctacgtgtggctagccaattatcccagcaccatttgttgaaatggttgtcttttccccactttacgtttttgtttgttttgtcgaagatcag

SEQ ID NO: 910813 - DNA, 632 bp, Homo sapiens
ttatttcacttaacataatgacttccagtactatccatgcagttgcaaatgacaggatcttattctttttatggctgaatagtactccattgtgtataattaccacattytctttgtccatccattgatggacacttaggtagcttccaaatcttgagtattgtgaacagtgctgtaacaagcatgggagtgcagatatcttttcggtatactgatttcctttctttggggaatatacacagcagtgagattgctgaaacatatggaatctccatttttagttttttgaggaaacttcaaactgttcttcgtagttgtcatactaacttaaattctcatcaacagagtacaagtgttccattttctccatatcctcagaagtgcttgtcattgcctgtcttttggataaaagtcatttgaactgggtgagataacacattgtagttttgatttgcatttatctgataatgatgttgagcacctttttatacactcaagtgccatttgtatgtcttcatttgaggaatgtctattaagatcttttgctcattgctaaatcagattattacattttttcctacaaaatagtttgagctcctattatattcaggttattattgccttgtcagatg

SEQ ID NO: 910814 - DNA, 697 bp, Homo sapiens
acattttttagcaaatatgtggaaccatcagttttttccctgttaagtaagtaagttgtggggraggcatgcagaagatggaaggttccagtgtctgggtttagtatcatggcaggtcaaaatgcaccttagacattttcccccaagaaaagtttacagtagaagaggggctccaccgtctagtgacagccctagaaaaaaaattaaccctaccaagtaaatttgttcttataaaatgaagaatactttttttgtcccatagcataaacccattacaaaaatgaagagtctaaattaactggaaaagactttgacaatatcaaatgaaccctctgaaaatcttgtaagtcaaacattaaaaacctaatggaatgtaaagcctggtaagaagctgtttcttcaacagcccacgaaataatatgaaatcctaccctcctctttctttctttactaacactgtgctatctaccttgtaagaaggaaagcatcagtgaaagaaggcaaattgctggatttaagtccccaaacaaagatgttaaggctaacaaagaaatttcggagaagtcacaggtaaaagaaaacagccatagaaacaaagaataagacaaaagtccacagggacatcagcacctggcctacctgaggagttaattccccaattcagtctgtcctccctcagcagataaactaatatctt

SEQ ID NO: 910815 - DNA, 595 bp, Homo sapiens
ttgaggccagcctgggcaaaatggcaaaaccccgtttctacaaaaaacaaaaaaaattagacaggcttagtggcaagcatctgtagtcccagctactcaggcagctgaggcaggaggaattgcttgagctcaggaggcagaggttgcagtgagccgagatcgcaccactgcactccagcctgggtgacagagtgagactccgtctcaaaaaaaaaaaaaaaaaaaaaaaagagagagaataagtagaacacagaggagaggaagtgaaacgagagcagagcatttcaggccagacggactgctggagcaaaggcacaaagtgcacagaatgcaaaagtaaattcaaggaaaagttaatgttcctgtaaggcttgaatgtacagatggtccttgacatatgatggtttgacttatgatttttcaacttcacaatagtgcgaaagcaacatcgttcaatagaaatactacttcaaattttgaattttgatattttccgaggctagcaatatgtggtacaatactttcttgacatgccaggcagcagcaaaaagccattctgtttttcactttcaayacagtgttcaataaattgcat

SEQ ID NO: 910816 - DNA, 636 bp, Homo sapiens
taaaaaggagagagtgatcaaatgagtcagatgttgctgatgagtcaagtaaggtgaagtagagaaattattagtgattctagaaatgttgaggtcattggtgattttggtgagagcagttttagtggaatgctgggaacaaaggcctgagtgaagtgggtttgagaagcaataggaggtgaagaattggagacagtgaatatagatatttcttacaagaggttttcctgcaaacaataaaaaggacatgcgacagtaactgcaggaggatcaggaaaagcattttatttttttgcctgtttgtggattgagatggaagaaacttaaaaaataatgttcttgtgctgatgtgaataattctgtagagaggcggatattgatggtgcactgaaatgaaacatgtggcatctaatagtcaaatggtgagatattaggttggtgcaaaagtaactgctgtttttgccattaaaagtaatggcaaaaacctaatacccaggaccacattcttcaaagacgataagcagcwgagtgaatacggtgcagcacatctaggaaagttttcttctgactgacttagttttccagtgaggtatgaagacagtcatcatctgagcatgaaattggaggaggaggagg

SEQ ID NO: 910817 - DNA, 610 bp, Homo sapiens
aaaaatgacattttggaggagctgggtaagaataatatggttggctctatgtccatactcaaatctcatcttgaactgtaatccccatgggttggggaggggcccggtgggaggtgacttaatcgtggggatggacttcctctttgcttttctcatatggtgagtgagttctcatgagttctggttgtttgacagtgtgtggaacttcccactttgccctttctgtctcttgatctgccatggtaagacatgcttgcttccctttcaccttccaccatgattgtaagtttcctgaggcctcctagtcatgctttcttttaaatctgcagaactgtgagtcagttaaacctttttcttcataaattatccagtctcagatagttctttatagctgtctgagaatggactaatacaaccaattagcaatcaaagtgagcggaataaagctatacacagcaatgtgtatggatctcacaaacrtaatttgaaattcagatctgtatcactagatacacaaaattattttggtcttctgtttcaaaagtaaaaataactaaattataataattaaagatacatacttaggtagtagaactgtgaagaaaataag

SEQ ID NO: 910818 - DNA, 574 bp, Homo sapiens
gtctgacctcttgtgtttctagtaaactgactatataacaatggtaatatatttagaacaaatatgtagcctaacaacacaataaattgggtgtggaaaacatcttttttagaaatgtaaagactrgcatatttattttaaaagaaaagcagtctcaacctcctcctcctcctcaacctcctcctcctccttctcctcctccttctttgttttttgagacagagtctcactctgtcacccgggctggagggcagtggcccaatcacagctcactacagccataacctcccgggctcaagtgatcctctcacctaagcctcctgagtagctgggaccacaggtgcatggcaccacacctggctaattattttattttattttttcatagagatagggggtctcactatgttgcccaggctagtctctaagtcttgggctcaagtgatcctcccaccttagcctctcaaagtgctgagattacaggcacgagccaccatgcttagctatatttggaataaatatgtagcctactgagacaatgaattgagtgtagaaaacatattttagatctata

SEQ ID NO: 910819 - DNA, 653 bp, Homo sapiens
gctgtgtgactttgggcttaacctctctgaatttcagtttcctgatttacaaaaggcagtatagtagcgttgtaaagtttaaattacctaattcatgtaaagactttagcrcagtgcttggcacagagtaactgttcaatacgtattcactattattattaaagataagtggtacagcttgttcatctttctgtcttcagcagttcctcgagcttcatctcttcctgcacccctcttctccttccagggcttagcccagaaccttgcacagactaagtaattgctaaattcttctggagcaaatgctgaaaacatcagacagtttttatataaaacatttaattcagtctgagtaggaacagttcatgtttgtatgagacaccaacaaacgaatgcttatgggatgtccctgcaagatatatcaatggaacatcctgtctgagcaccaaagagcagcccctttcagtattgtctgaacaagctggccttacgaggagtggtgaaagagaagggggaggtttcatatcctaaggaagtgtttggaacttaatgagaagtgtaggctgagaaaatgaccctgctctttgaaaatcaaatgcagctactgaatgtgaggcttacacacagccaaggccatgtatgagcaacagggg

SEQ ID NO: 910820 - DNA, 626 bp, Homo sapiens
cacaaagtgaaaatcgcatagggtcagtattgcctttgtaattttgtaatgtggaatataaaaatactataacaatgtaatatagmagaattacattcttttaactgatatcaaaaactatgttgggtttacaaccctgcacatgatatagctagtgtcatctgtacaacaatagcacagtctctcttagtgcaccaagggactcgattccacaagggggttctcagggtgcttcgcagcaggcaactctgcaacctgttcacaagggttccagcttgctggcttttctatcagttattattattctcatcttctggagaccagtgcatcaagttttctaattgcctttcagtcagtgtttgtgtagggccgccagttccttctctgattcttccttctagaatattgaagaaatcatcaccaggcaggggcggcccatccccctcagcaaccctttactcccaagtcattggcaggaaaacattaaaatcattcatgcattctttccatgggtttgcttaaaatgcattgatttctttcaggcatgattgcatttgttacctctggataaatgctcatggattgaagcacctgtttaaatcgcaccctacttctagccctgcctc

SEQ ID NO: 910821 - DNA, 626 bp, Homo sapiens
cacaaagtgaaaatcgcatagggtcagtattgcctttgtaattttgtaatgtggaatataaaaatactataacaatgtaatatagcagaattacattcttttaaytgatatcaaaaactatgttgggtttacaaccctgcacatgatatagctagtgtcatctgtacaacaatagcacagtctctcttagtgcaccaagggactcgattccacaagggggttctcagggtgcttcgcagcaggcaactctgcaacctgttcacaagggttccagcttgctggcttttctatcagttattattattctcatcttctggagaccagtgcatcaagttttctaattgcctttcagtcagtgtttgtgtagggccgccagttccttctctgattcttccttctagaatattgaagaaatcatcaccaggcaggggcggcccatccccctcagcaaccctttactcccaagtcattggcaggaaaacattaaaatcattcatgcattctttccatgggtttgcttaaaatgcattgatttctttcaggcatgattgcatttgttacctctggataaatgctcatggattgaagcacctgtttaaatcgcaccctacttctagccctgcctc

SEQ ID NO: 910822 - DNA, 600 bp, Homo sapiens
atacttctgactgcaattttagtgttagctttttttttaatcccttttttctaatgggacttttatttgatttcayttactaattctaatttcttttcttaactcacccagaccaatattatctccttctggtgtcttatctctccttcgatttcgagcatattttctttgcactattttttcttacaacttattgtaacggtacatgtccaggaagaaaaataaaccacatcaggtatcttaagaaaaacaaatttaatataaaatattgtcaaccaagtattgaaccaaaaaaagaaaggggaaaatactaagatacctttaagataacaactcctgggacccactgccatatctaggctagagaaacaaagtgaagaggttgaaacattaaaatctatagctctgatggaggagcattctcaagctggaagctagacttctgagtaggggttgctacttggttagtgctggtgtcttcgagctcccaggaatggtcctaagggtctgtgacccagatatctaaggataggactccttggctggtgctggcacatcaggaattgagaggagggaactgagatgagtgctctgcggagg

SEQ ID NO: 910823 - DNA, 610 bp, Homo sapiens
attccaatgcaaaggaaatcatttagttttactttaagcaactcttaagtaggyaagagtattaggattctccagagaaacagaactaaatatgtctatatatgtatataaaatatatacttctatgtaaatctatattgtacatgcaaacacacacacgcacccacacatgcgtgtgcacacacacacagagaaagtaaaaaagtggttcacattattgtggaggctggagtcccaagatctgcagtgggcaagctgaaaatacaggggaagtcatggtataagatttagtccaagttggaagggctgagaactcagagtcaatgattaagttccagcctgagggctagagaagatcaatgtctcagctcaagctgtcaggcaggctaagtatcctcttaacgcaaccattttgctctattctgatattcagttgattaaatgagacccacactcattggagaaggcaagccactttactcaatttaccaattcaagtgttactatcacccagaaacatcctcacaaaaacgcccagaataatgtttgaccaaatgttgggaaccccattgcccagtcaaatgaacccataaaattaatgatcacaatt

SEQ ID NO: 910824 - DNA, 618 bp, Homo sapiens
tatgcattacctcacatgcttatcttctttttgtggtgagatcacttaaaatctctattgacaattatcaagtatatgataaggtgttattaactatacacaccatgttgtacaaaagatctcttgaacttacttctcatacataatttaatttttgtctcctttgaccaatatctctccatcccctcccgcaacacacacatcacacttcggccccactctactctctgcttctatgaattccagtttcttaaatttttacatttaagtgagattattttttagggataaatagtattccattgtgtttatatgttacattttatttattcatttttcttagcccactcagaaggctataacaaataacctcatactgggtaatttacaaacaacagaaatttattgcttacagttctggaggctgtgaagtctaaggtcaaggcaccagcagatttggtatctgctgaggtcctgttcctcatagttggcacttggtggatgtgtcstcacatggcagaagaaagacagcttttttcaacctcttttataaaggcactcatcccatcaatgaggacagagccctcacaacttaatcactttccaaaagccttcacc

SEQ ID NO: 910825 - DNA, 478 bp, Homo sapiens
tagcctcctgcacttggtcccagcagaccagagcaaaccaaagtggagtcactaatgctaagtggaaggaggtcccaaaacagacctttcagtttttcctgaaagcaggacgttgacaccaaacaatcagaaagaacttattctacttaagtcagcataataagaaaaccagctccattttaacccttacaaagaaagtgaccaacagtgacctgttaaccaaccccactttaaaaaattgaggtttccttaaaaaaaccaaccattctataatgtccagtggaaaacccattctatttcatagaatgagaagttgactgattttagaattgctaataaaagacaattcgatttttaaactaaatttattttagttttgtcttttgacaccrtcaattaattcctataatcagcccgaggccacatttttactaggaccatcttcagtttaaatagttcagaaaatacacctcagatc

SEQ ID NO: 910826 - DNA, 611 bp, Homo sapiens
accaaaatcagagccaaactaatgcaatggagatgcaaaaagaccataagaaagattaataaatccatgagttggttttttgaaagaataaataagattgatagactgctagctagactgataaaaaaaragagagatccaaataaacacaatcagaaatgacaaaggggacattaccactgaccccttagaaatacaaaaaaaatcctcagagaccattattaacacctctatgtgcacaaactagaaaacctagaagaaatgaatgaatttttggaaatatacaacctcaacatcataccaactggacaaaagctgaaagcattccccttgaaaactggcccaagacaaggatgctctctctcaccactccaattcaacattgtactagaagtcacaaccagagcaatcaggcaaaaaaaaaaaaaaaagaagaagaaagaaggaaagaaagaaagaaagagagagagggaaggaaggaaggaaagaagaaagaaaaaaaaagaaagaaggaagaaagaaagagcatccaaataggaagaaaggaagccaaaatgtctgtttgcagatgatataattctgtatctagaaaactccatagtctctgcccc

SEQ ID NO: 910827 - DNA, 501 bp, Homo sapiens
tattctgtcctgattaggtattgcccgttgattctagcattggtattcttttctaattgctgttgcagggcatctctttaagtgggcctggggctggacarcacagagtggttagtagaccaacatgtcaggactgaagaagggcaacagagacgatccaggaggggtggctaccaaggggagactcaaagataagttgatagagcagactggttggcagcctttgatacccttcacagctgatacctacactggcccatcagtagggttagcatgaaagaaggcatgaccactgcaggagggctgtggcatctgtcagtagtggtagcatggccagcagctgatggaggaagggcatggaagttttcttccttgaattttcataagtgagttgaagggggactttcatgccttttcttcattataaaccctttagccagggttcccttggaagtcagaacaaagtccccctgagaaatgccaaggactgtggcttatgat

SEQ ID NO: 910828 - DNA, 610 bp, Homo sapiens
cctctcttcccttcttccgtcttcctttttagttaaatggttttcactggtaggatgttttaatttgttatttatttttagtgaatctattataggtttttgcattatggttttcatgaggcttacacaaaacatcttacagttattttaaagagatgacaagttattttaaagagatgacaacttatcttaaatcacaaggaaaataatagaaacaaacaaaaaatgaaaaggtctacattttaggtctaccccctccccatctggcttttagttgtctcaacttacatatttttatactgcttgtctcttcacagtttgctgtagctattgttgtttttgatagatttgtcttttgagcttcatactagggttatgagtggatttcacacaacagttactgtattagagttctgggtttgtccatgtacttaatcttaccagtgggttttctatcttcagttcttttcctattagtgtttttttttttcattcaaattgaaaaactctctttagcatttcttgtaagwctggcctggtgctagtgaattctctcagcttttgtttgggaaagtctttatctctccttcgtacctgaaggataactttg

SEQ ID NO: 910829 - DNA, 646 bp, Homo sapiens
tatctttttgagtcactaacggtcatatgtttttacttaattcagtttctttgccctgaatactattttattrgtcactgattagtaaccattaagtagtggctttaatttttacattgcataaatacaatgtataagtatgttgccattcaattcaagtttaagtggaatgttcccccttttagaagtaaattgattagcatgataattattatatcccactgtaacacttgagtgatagctatagtagaaatactctttatattatttttaaaagtattttgaagggttagaacaaaaaagttgtattgttcattgtatttcattaaccatttttttcttttgacttactaagttagactgacttgtcagttagaaggccataggttccaaattagttgattttcagccactcagaagacagattatcctgggtgggcacgaaatcattagatgaaccattaaaagagactaggttcttcctgaagaaagaaattcagcacaagaaattttctcttgctggccttgaagaagccagtttccacactgtgaactgcctgtagaaagaccatgtgacaagggccctaagggcatctcctaggagttgacagcagtctctgacagccacaaagaaaacagggacatt

SEQ ID NO: 910830 - DNA, 613 bp, Homo sapiens
ttgtgtctgctggtacccagctgtcctatgcccatgggtttaaagtgcacagctgttgtcttgtctttgacagtgtgtactcctggcattcggtcagtcccttagaagggrgtagttcagtaatgataccctgtcccagaggttaccaaactttttctgtacaggaccagatagcaatttttttttttttttaaacagagttttgctctgtcacccaagctggagtgcagtggtgcaattgtggctcactgcaacctctgcctcctgggttcaagcgattctcctgcctcagcctcccaagtagctgggattataggtgtgcaccaccatgcctggctaatttttttatttttagtagagatggggtttcgctatgttggccaggctggtgtcaaactcctgacctcaggtgatccaccctcctcggcttccctaagtgctgggattacaggcgtgagccactgcgcctggcccagatagtaaatattttaagctttgcagaccaagaggcaaaatcaagggtattatgagacttacctcaataataagaaacaaaattttcacagatttttttattgacaaaattcataacataattattgagtccagcata

SEQ ID NO: 910831 - DNA, 613 bp, Homo sapiens
ttgtgtctgctggtacccagctgtcctatgcccatgggtttaaagtgcacagctgttgtcttgtctttgacagtgtgtactcctggcattcggtcagtcccttagaagggagtagttcagtaatgataccctgtcccagaggttaccaaactttttctgtacaggaccagatagcaatttttttttttttttaaacagagttttgctctgtcacccaagctggagtgcagtggtgcaattgtggctcactgcaacctctgcctcctgggttcaagcgattctcctgcctcagcctcccaagtagctgggattataggtgtgcaccaccatgcctggctaatttttttatttttagtagagatggggtttcgctatgttggccaggctggtgtcaaactcctgacctcaggtgatccaccctcctcggcttccctaagtgctgggattacaggcgtgagccactgcgcctggcccagatagtaaatattttaagctttgcagrccaagaggcaaaatcaagggtattatgagacttacctcaataataagaaacaaaattttcacagatttttttattgacaaaattcataacataattattgagtccagcata

SEQ ID NO: 910832 - DNA, 628 bp, Homo sapiens
tatgccacttctaagtccgtgtcatttccagctctctcctaggggacagacatcttcagccctctttaaacttcttaatccctgggcagcaactagcccaccataatccatgtagtagttactcagttaatatgtagactaatgaaaaactaacagtttaaaataaaaattttagataataatgaaaataatattaagtaagaacaaataatatttattcaattacggattagaaagatgaattagatatggcccacccactgaggagctgccatttcactaggagcaagcctttcagatatttacaaaaatagctagaaaacaggtataatgtagcaaacaagaagctgtgaacatctaggacccctggattcaagtgcaatgctttctctagaaacgtccaattgtcattgaaagaatactgaaatgaacatatttaaagaagagctttctttttccatttttatagtttataaaatactagtgatagtccttctccttcatataacttccttcaagagttgagaatatgaatctaagaaaactttgagttctgcrtataatatatgtgccttacagagcttctcatgtcatgcatcacaactacagggtcacttcatgtcagtgt

SEQ ID NO: 910833 - DNA, 611 bp, Homo sapiens
tgctgctggtccaggcaccacactttgacaatctcttccttagagaagcttgggcacagtgttgccagatcttgaattttcttctaaaaggagctgcaaaatccatgaaagrtgttaaatattggcaacagttgtttaaaaacaccatgtgaaccaaaaaaacattaactatggtctgagtaagacttgggagcttccatttggcagctttttggtctagattcacattaagtaagaaaaacattgtgctaaataaaacctcaggtcctgaccactgaatacaatgggggaagcacgtaacattatcttgcagagcagaatcagcactctccaccacatttgttcattctctaacttccaaaccattcctagagccctctgggtgcctaagaaatgtgaccttttagcacagcatttttcagtagacagagaaccatctgcccccttaatggtcattgtggaaatttttcagaagttttataataggccacttttttgtgacttagattggatcctattcttaaccacagcatctctcatcccctataaaggaaagagagacagaataatataaaaagaaaatcttttggatgtctccaggttccattttt

SEQ ID NO: 910834 - DNA, 611 bp, Homo sapiens
tgctgctggtccaggcaccacactttgacaatctcttccttagagaagcttgggcacagtgttgccagatcttgaattttcttctaaaaggagctgcaaaatccatgaaaggtgttaaatattggcaacagttgtttaaaaacaccatgtgaaccaaaaaaacattaactatggtctgagtaagacttgggagcttccatttggcagctttttggtctagattcacattaagtaagaaaaacattgtgctaaataaaacctcaggtcctgaccactgaatacaatgggggaagcacgtaacattatcttgcagagcagaatcagcactctccaccacatttgttcattctctaacttccaaaccattcctagagccctctgggtgcctaagaaatgtgaccttttagcacagcatttttcagtagacagagaaccatctgcccccttaatggtcattgtggaaatttttcagaagttttataataggccacttttttgtgacttagattggatcctattcttaaccacagcatctctcatcccctataaaggaaagagagacagaataatataaaaagaaaatmttttggatgtctccaggttccattttt

SEQ ID NO: 910835 - DNA, 571 bp, Homo sapiens
tcccaacctccaggcccaatcagcttcacaatatratattgttcaaatttacatgctaattttagctaattgttctatacaaacagaagccttttctatctgaagacagacttttcttcaaaaagcatcagtcttgctgttcatgtaaaaggacccaagatgtttaaatgacctaaaaagaaaaattgagaaagtaaaataaaaattgttcaggattgatttgggtggatttttttcaaattataaaaagtacaggtttctatattgaaatgattcagcccttcagtcaaagcaagccaattagacttaacctgcttattaatcctactcggcaaaatgcaaaactgcccaattagaaataaataaagcaaagattcatcatattttgggttaaacaactattattgatagtattaaatcctagagtggcccttttgaaatgttttctaattaattctagggagtcacatggacaatagaatattgggcatgtttgacgtgggcaccaaactggccttctccaagatcaatgccaaaccgtataaatccaatgatcgactgccaacagtca

SEQ ID NO: 910836 - DNA, 679 bp, Homo sapiens
ccactgtgcattaatactaaagcaattgttgataattgttctgggtttcaatgtccaattaaagctaagtggctatatttgcatacaataaacaagagaagttacttgcatcccaacctccaggcccaatcagcttcacaatataatattgttcaaatttacatgctaattttagctaattgttctatacaaacagaagccttttctatctgaagacagacttttcttcaaaaagcatcagtcttgctgttcatgtaaaaggacccaagatgtttaaatgacctaaaaagaaaaattgagaaagtaaaataaaaattgttcaggattgatttgggtggatttttttcaaattataaaaagtacaggtttctatattgaaatgattcagcccttcagtcaaagcaagccaattagacttaacctgcttattaatcctactcggcaaaatgcaaaactgcccaattagaaataaataaagcaaagattcatcatattttgggttaaacaactattattgatagtattaaatcctagagtggcccttttgaaatgttttctaattaattctagggagtcacatggacaatagaatattggscatgtttgacgtgggcaccaaactggccttctccaagatcaatgccaaaccgtataaatccaatgatcgactgccaacagt

SEQ ID NO: 910837 - DNA, 645 bp, Homo sapiens
aatttatagtactgaatatataactagaaaaaagaaaaagaaaaacagcccttgatagcactcaccaaaacaggcttcaaatattgttaggaaatttctgtcatttccaaataaatccaagtatacyatatccatgccatttcactaaaaattccgtggttaatgagacttcagaaactttgtttgattagtttattgtatcctcttaccacacatagttcttagaaaggatttttgctggctggaacatttattttcaattggtttaaattactataaacagctaaaagttttaagtagtaagagtcaaattcatttctttttccagttcgatagttactatataattgggacttttgacctttttttattatttgccgactactagattgaagatgtaaaacaatactcactttattttaggtactaattgtatattttaaacttgcttgatcactttatcttccatgtattccacaccaaatccctatgttctcaggctatttacttcaattatataatagctcaagaactctagaacaaggcaatatcttttcaaaaagtgttaatagaatccccagacattctaaatttcatgtttacaaaacaaatctcgtgtccaaacagcatcactttttaaatttt

SEQ ID NO: 910838 - DNA, 682 bp, Homo sapiens
actatggccattgctctttgtccaggcctaactggacaaagtcccatttgaagttggccggttctactacctgctgcagtctctctatgacaagctcttccttggggatatttgatgaagctcccaaagttctggttcttgaagccaaaatcttctctggcatgaattcagcacctcacaggcctggaaatgtctagggctttgcatcctaggagggtgcagttttccatagctcactgaattcaccatccattttggaagatacccttgtttgggcctctgcacagccaaatgtccctcctgccttgctaacagaatagccattccacccagcaacagtttcagggaaacctaggcccttccccagccccaggagatgaatcatcattggtccaaggcagttatggcagccagtcccctgaggctgggacacatgttgagatgtgaaggggagttgtctggaggcttctggggaaaaaattcaagtagctcactgtctctgtgcacagagaatgaatatggtaaaacagacaaacacacaaataaacaaacaaaaaacacttgtatatggatgagtccaatatcacctttattaaagcatcacagaaamtacaggttgtggattttgagctttagtttctgagaacaaggtaaataaataataaataagtctgaactttcc

SEQ ID NO: 910839 - DNA, 626 bp, Homo sapiens
actatgaagacactcaacaagcagcatgtaccagaaaacatgcatgtgactctctatagcttaccaaggctttcatgcttgtacaaggtctcatgtgaccctaaccacaacctggtaagatgcagtggacaggcaaccctgatagaagtaaggaagtgagatgattggagaaatgcaaatccaaaccacaatgagataccatctcacatcaatcagatggctattactaaaaagtcaaaaaataacagatgctggtggggttgtggaggaaagggaatgcttatacactgttagtaggactgtaaattaattcaaccattgtggaaagcagtatggcaattcctcaaagagctaaaagcagaatgaccatttgacccagcaatcccattactgggtatatacccaagggaatgtaaatcattctaccataaagacacattcatgcaaatgttcactgctgcactactcacagtagtaaagatatgggatcaacatgaatgtccatcaatgacaaattagataaagaaaatgtatacatatacaccayagaatactatgcagccataaaaaaagaaggagatcatgtcttttgcaggaacatggaagtagctggaggctattatcct

SEQ ID NO: 910840 - DNA, 610 bp, Homo sapiens
atgaaataatctgtacaacaaacccccatgacacgagtcctactttgtaacaaatcttcacatgtacccccaaacctaaaataaaagttaaggaagtgagaaacaaatgattagrcactttcccaaggggatgtggctcttcagtaggacagccaaaactggtacccaggccctgtgcatctcagaccatttctcccccactacagtgcctagtgctgatgctacctgcaggagggaaaactgaagtgccatctagggtctcccatgttcaagtaccgtggaacatctttcctacccaacaagatcaggcagaacccactccactcattcaggtgcactttgaacacaacatgcaatataaacatgtgtgggtttcaagctggcttttaggaaaaggcaattgcattttgaaacatttcatctgcaaaatcaatggattgggaccttgtcagatatttgcttagaacaaataaaagctattatgcactctgtaaaatttaaaacacccacataaaaagacttgtgtagggatgtctctggcaaacttttgaccaatcagatcttgcacttgtggaaccagtcagaactcacccatgccctgaataactct

SEQ ID NO: 910841 - DNA, 603 bp, Homo sapiens
gtttatttggcatctcttccactttgttgggaacctcttgagatgaagaaccatgacattcatgtcaatatccctagaagttgtctgggcacttttagcctattcagatatattttgaattatccagagtgctrgtggagtttcttgacaggggtctcattccaagaaaaattaagaagctttatgaaaagcaaaattgactggctacttctggggctgatagccagacctcgtggataagaactttcaaatattaggttcactggtcacccctatatcttcccctggccccatgcctcctccccagctaagaccttggcagaaaagtaatttacctttttgagaaagtgaagtacacaagttagggattgaaagaccatatactgcaatagagagaaggtactattggctatttcatgttgaactgttccttttgaatcagtttcagttccctcaagaaagagggtactgacaataagcaaatgacataaaagatgcctcatttaattatctacatgaaacagaaaggatgctgctgttgtttgtcgcctccaaaatttatgttgaaatttaattgcctttgtaacaataataacagctggg

SEQ ID NO: 910842 - DNA, 649 bp, Homo sapiens
tgggaactctttgctgttcattcacatattggttgatgtcgttctctggaatcttggtgtttgctttgtcagtatgtgtttcagaagttggatcatatttatagagttgtgttgttgtacttgttgttttgcacaaggtccagcagcgcagcaagtgccattagaaaattaatcaatgttgtttggaagtattcttctgttgcaggctctgaaagcattcatctacccatccttccaagcatcattgaacatttgccacatgctagacaattagggcttacacatttgctatacatttgagtataaccttatatttcctgttctgctgaaacttagtttctgcctttttgataattcacttatactctccactttcatgtcttcaatatgaaattgtaacacggtatgatgacttttactaaactttcctttaaattttcacttgaccttcctagagagattcacaaaaggtaaccctcaggcacaatacaataaagtcttattaatttgaactctactaatttgaaacatgtttttttcttagacttaagggtacataataatgggcagtggattatgtggacaccacaatttggaaggkccattgatcactttagattataaaaccaggatgttcctcaaagatctc

SEQ ID NO: 910843 - DNA, 752 bp, Homo sapiens
ggtgtgtagaacctgtggaagatggactggccttgtttytttgggtctactgcagctcgttggatgtgtgaataagcgctgaattagtcaggattctcctgagggacagaacaaataggatagatatacatatataaaggggagtttgttaagtagtattaactcacacaatcacaagttcccacaatagtctgtctcaacctgaggagaaaggaagccagtctgagtcccaaagctgaagaacttggagtctgatgtttgagggcaggaaacatccagcatgggagaaagatgtagactgggaggctaagccagtctagacttttcatgtttttctctctgctttatattcaggcaacactggcagctgattagatggtgctcacccagattaagggttgatctgcctttcccagcccactgacttaaatgttaatctcatttggcaacacccttacagagacacccagatcgatactttgcatccttcaatctaatcaagttgacactctgtattaagcatcacaggcacctaaggtctttggtcttttgttagtctgagggtagtaagggcagttccactgcagaggtagtggcagagaacctttcagttgcccctcagggctctgcccatggagttgcagagctgcttttgtagaaatcactggacaggagagaccaatgggtgggataggaggattttattaggtggccactaactcagtggattaacatccaagggctgagcccca

SEQ ID NO: 910844 - DNA, 653 bp, Homo sapiens
accgtactataagtttacatatttaaaattagtaaatcatgctaataaaatgtaaatatgggtatttttttaagaatatcatatgtatttatgatatttaagatccccgaaagtgaagatcctgtcttgttaagatcttattgcactgtagatgttaatttaaacatttactattgatgaggtggcctagaagaagacctagttctgagccttaggaattctaacatttaacgtccagtagagaaatgtgagctggtaaaggacaccaaaataaaatagccaggaagttgggagaaagtataagacaacatggtgtaacagatgtccgtgtaaaacagtgtttcaagaaagaggaacagtaaattgtataaagtgatgttgagaagggagggaagacatggactacaaagtaaacagtgaattaacgaagacagggacagttgaattggtagcataatagtgttaaatgccatgttagttaaaaattaagtagaatatgcagaaattgagaatgaacatgtagacaattctttcaaaattttgtgaakaggagaaatttaggataatagctataaaagaatgtgtgtatgggggaaggtattcatacacacatattttaattaagcttttaattttgagataattgtaaactc

SEQ ID NO: 910845 - DNA, 360 bp, Homo sapiens
tatgaatgtttctgaggtgctggygtgttggagagaaccaaaaaagtcttcaattttgtagttggccaaggaatagcaaaatcccggttctgaggcatttaaaaatagacaatggaaaaaagcaactggggtgagttcctgggactccctgcagtggtaaattggagaaagatgagacaaggatgcattccagcaagggagagacttacctttgtgtcaccatgagcccaactcctgacgctggggcccaggctgccagttagggacgtcaccattactggaccacagaggaagccctaccatccccaggagaagtcagtttcacactggagcatttgtgctcctagtaccctagttgca

SEQ ID NO: 910846 - DNA, 619 bp, Homo sapiens
aactttctcagctcattgcaccctgagcatctcagtaatttttcacagcacctcctaggccaacaagaataccccaaacttccattattaggttcatacaacayaagtatttagtagccactgaaaaaatacacataactcctaaaaaatttacttccccctaaaataaacatccttaaataagttaaatatgaacgtgcctactgggcactccacaacttctcaaatccggagtctggttggaactgacaccttcactgcctgcaccaccacggaccttcaatggtacttttttttttgtcacagcaaacactggaaagtcagcttcgcaaatatataatatcattaaaaggaaggagcatggtctaatgatgaaatgtgaaatacgtcaagccagtctcaacctctccgaggctcagtttcctcaccctggaaaggtaataaaataaatgcatgctttttttttttttttccttcggagatgcagtcttgctctgttgcccaggctggagtacagtgggcgatctcggctcactgcaacctccgcctcctgggttcaagcaattctcctgcctcagtctctggagtagctaggattacatgtgcccgccaccacgcc

SEQ ID NO: 910847 - DNA, 615 bp, Homo sapiens
aaaatggagaaacctcgtctttactaaaaatacaaaattagccaggtgtggtggcacatgtctgtaatcccagctactcaggaggctgagacargagaatcacttgaacctgggaggtggaggttgcggtgagctgaaatcacaccattgcactccagcctgggcaacaagagcgaaactccatctcaaaataagtaaataaataaataaataaattaattaattaattaaataaaagtccacacatggtagttcttcttgaagcagcatgttttagtaaataagatgatggacttgttatgagctcagaacaagctcatatttgccatgtgtcttggggaaagattctccatttatgccttgggaaccctattgttatcagttagctacagctgtataacaaactacgctaaaacatggtcgtttctaacgctaagcatttactatggcttatgagtccataggtcagctgggcagttatgttgctctgggccaggatcagctggtggttgctgagcttgttcatgcctctgtgatcatctggtggtcagcttggggctggctcgattaggatggcctctcatgtcttgtggttggctggcttttggctggcac

SEQ ID NO: 910848 - DNA, 615 bp, Homo sapiens
actacgctaaaacatggtcgtttctaacgctaagcatttactatggcttatgagtccataggtcagctgggcagttatgttgctctgggccaggatcagctggtggttgctgagcttgttcatgcctctgtgatcatctggtggtcagcttggggctggctcgattaggatggcctctcatgtcttgtggttggctggcttttggctggcacttgcctctcatcactcagtagccagttgagacttgttcatagggtggtggcaggggtggcacagcatcacttccttcaattatcttgcccatatcaagtcacaaagatggcccatcttcaggggatagaggcaccacaggatgggaggagaaaaatccaattgcaaagggcgtggatacagggatgaatggagaactgggaagaaaaaaatgttgtaattatctatcacattggccccttcaccaagatggtaaaaaatatactgttttcctttaatagaaagaagctattaaataaagcttttcattaggaagtttcgcrtggcaaagtcaagctctcccctgccctgtcactcttgctctggctttggtcagcagagcctctgacatggcaggaggttaat

SEQ ID NO: 910849 - DNA, 621 bp, Homo sapiens
cagttgtgccatttttggctagtgatctgtggctgggctgccagccgatgacaggcagttccccaagcaggtcacaacaaggtggcaattgaccttgctccccgaggatgtctgttcgggttctgctagaagccaagggctccctgatgtggggtttcggtttcacactgtggcactctgaacaattctttatgggctggcaaaaggcgtttcacacttcagataggccccaggaggatgatttgctttcttcaaggagaactgagaattctcagatgattggaaggttctgtactctcattttagcacctccgatagattctcccacatgtggcaaacacagtcatagctggaggtccattgtcggttgttaacaggcagtgaactgttgctgaatcagacagtccacgtatagggcatttccatcatcacagaaagttctgttggtcagagcatctaaagcatattcggcctctccccctagccaccctgtttatctcttgcttgcattcctccttgstatttgtgctgctgccaccccagttccagcccccaatgcctaataacatcctgatagatcaatagagttgtgttttagcaggtctaacatcatgttgtatc

SEQ ID NO: 910850 - DNA, 612 bp, Homo sapiens
atgtaggtgaggggagaaatttagtggaggaggagcttcagctgctgctatccatcattttcctggagtgggtgggcttctgaatttggaggcatctactaagascatgacatgtttttaagccaaaacgaaatgaagctgagatcagcggtgggagcagggtgggcagggaggagtgtgtgtctatctacgaaccctagatccctggtaggttaatcacagcttctttcaggttttccttgaatgggttgaataactggatgaaggattccttatccaagtagttgtcacttggccactaatgtccatttttcacagcatcattttgtaacgtagcataggtacttgaatgccaaatgcctttgcttgagatccggtaaagaaagagcctcagatcggggaagcatagaggaatggtttatcctgtggtctaagggcaaagcaaggaatttccatcatgtttcaaaaatgggaaagtttcccagttcctctgcttacctgacccttagatataactcaaatatcaccaccatctcagtgacagggtgggccgtcactcctccacatgctcaagttgccatttctttctggtcttgcatgagtaaccataac

SEQ ID NO: 910851 - DNA, 614 bp, Homo sapiens
taaaaaaagaaaggtccttggagcatagatgtttagaggtcaggtgaggaattaagatttatatcttaacagtttcctgagcctgagttgtaattctaaggggtaaacaaacaacagttacatctgaaggtcccttgtattgggccctctgatcacctgtgggtacaggtgggcagaagggtggtcacggagggacataattcattcaaatgccttagtctgcctcaaatgcctcaaagcacatggattccagcatgttctattagcgtttcttgagagtggaggatataggaaccttctcagtgtttaaagttttagagaagacttatggagtgatgagaaatgttccagcatagctcccagggctgggcctggatacttctagcttggctgtgagctttgctgtggcttcttcagctgtttgtgggagagtgctgaccaagcaagatttctctcaataagaactagaaccaaatacaaaactgaggatgtgccctggctcccayggtaatgatattgtaagattattttatgtgccgttgagattgatgatctcctgtttgccaggcaatggtcctcctgttaccctagctggatgacagcattaagccaga

SEQ ID NO: 910852 - DNA, 536 bp, Homo sapiens
tctgtaggggaagagggaaggcaccacatcaagggattactttgtgggacaaaagaatctgaacagcagcccttgagttccagatttttccactgacatagtctacccaaatgagaaggaaccagaaaagaaattctggtaatatgacaaaacaaggttctgtaacacccccaaaagaccacactagctccccagcaatggatccaaaccaagaagaaatctctgaattgccagataaagaattcagaaagttataaagctcctcaaggagataccagagaaaggtgaaaaccaacttaaagaaattttttaaaaaaatacaagatatttatgaaaaatactccagagaaatagatgtcataaagaaagaaatatagcttctggaaatgcaagacacacttagagaaatacaaaaygcacttgaaagtttcaacagtagactagaacaagtagaagaaagaacttcagagcttaaagacaaggctttcaaattaacccaattagacaaaaaaaaaagaattattaaaaaatgaaca

SEQ ID NO: 910853 - DNA, 643 bp, Homo sapiens
gatttgatagtattttgaattaacttgattccaataaagatagaagccttgatcccgctatcttcaaatgcagttgcacctggaaggtgcattcactttggatgttaccwtctttttctgagaacactgtgttgtgcagatgtaatttggaattaaagtcttcatcaatataaaatctggctggcccagacagacagcaatcttggacactgaatcaattaatcactgggttttaatggataacttctttcccagagctgaggcctagtggaatcgtatgtaagaaattaaataacacagctaggtgaggagatgaatttaaaaagcagaacagaagatatctaggaaatgtctttcaaagtcccttcatctctcttccctatctttctaggaactcttcctgtgcctactaatcatgcctaggacgtgattccctcatctacccacaattgcatctacctttattttgaaattaacctttaaccatctttccatttttttaaaaaaaaagcagaataaagttcaaaatcgatactatgaatagcatcacttagaaatggcctttatggctgcattcaattttcatagctaattttaaaaactaactattccttttattcccttttacgcatatctcttgtgc

SEQ ID NO: 910854 - DNA, 630 bp, Homo sapiens
catctactcattgttactaccaatgctgrtactactctaaattaaaattaactctgtgtgtgtgtgtgtgtgtgtgtgtgtgtgtgtgttttctttttttctaaagaggcaccaaggaattgcaaatttgttggcaaatccatctaagttccaccttatttcttcttcacttttgttctgatggtacaatcctttaacgcctaactgaagttgatgattcctcagccttagaaggctctgagtttaatttatttctcttttttctcctcaaggctaaagttcccaaaaccagtgttcacatttctcagttttgacaattgtctttatggtaaaatcaaactttgttttctatcttttgagttgcatctttctctacaatttctatcttatgagttatttaacacttcatattaatcctttaaaaatattttattcagaattttaaaattatttttagcagagagattaatatgaataacctaactttcagtagaggtactccaattaagctcttcacaagttaacagctttactccttttcttctttcctataagtgacctttgatagctttttatttgtcttttcttaatagctcttcaaaaatggaatagattgcttcctgagtgaat

SEQ ID NO: 910855 - DNA, 594 bp, Homo sapiens
atattaatattatctcagggatggcttttgggaaccccaatcaaagaaaggagcaaactcaattaagaccctctgttttaggtaactttgggaacctggtggagcatcctgacattacatcytgaaccagagtatgtctcaagatatttttggatcctgcttttgtggagacagaatccacaacacagcagagagttcctcactccaagaggtacattcttcttactgtctggttcactccctagacacatgccagcttgaccatcatacagagcagcccccaggatgaaggcaaacttctatctggagtctgatctttccaagatagggctgaatcaacttagctcttttttcttgtggctcattgctgctttccagattgagaatagcctcagatttctttctggcttccatataccatgcatcctattgctttgcttatactcttaccccccaatgtcaaaatagtcctgaagtgtataccagatcatgtcacacatatgcagaactgatcatgtcagttcaaccttggctccaagaataaagctgtaagtcctataaccacaaggccttagggtgacttgattcctgaag

SEQ ID NO: 910856 - DNA, 594 bp, Homo sapiens
atattaatattatctcagggatggcttttgggaaccccaatcaaagaaaggagcaaactcaattaagaccctctgttttaggtaactttgggaacctggtggagcatcctgacattacatcctgaaccagagtatgtctcaagatatttttggatcctgcttttgtggagacagaatccacaacacagcagagagttcctcactccaagaggtacattcttcttactgtctggttcactccctagacacatgccagcttgaccatcatacagagcagcccccaggatgaaggcaaacttctatctggagtctgatctttccaagatagggctgaatcaacttagctcttttttcttgtggctcattgctgctttccagattgagaatagcctcagatttctttctggcttccatataccatgcatcctattgctttgcttatactcttaccccccaatgtcaaaatagtcytgaagtgtataccagatcatgtcacacatatgcagaactgatcatgtcagttcaaccttggctccaagaataaagctgtaagtcctataaccacaaggccttagggtgacttgattcctgaag

SEQ ID NO: 910857 - DNA, 635 bp, Homo sapiens
ttccatgaggcacattctcatcattcagacaacaaaaggtacagtgtagactctgccacagcacaccatctatgttttcttttgttcatttgttttagtacaaattgcttatctaatattaattagacaatattaagaaattttacacaagaacattactgataataaagaggccaaaaaaatgtagcaaatgtctttgtgaagtgatgtctctctgcagagtggtgaactgacaattggggcttatttctgattttttttaaaccaagatttacaaagcctgtgttgacattctccacattatcctccacattatttttgctcagttcagcacgggtaccagccagtcagaacagatgtgaccctatcaaaatggatgctggctgttggcatttgctatgtttataccagcgtgtaccactacatcattctgtctgtctaccccaacatcatcagcctttcccaatacaccaaactttagttttccaaacttttaacttgccaacctctcctcacctttacacaagctgcgcaccagcctgsaatgctcttcgtcatctggagaaacccctttgcaagtcaaactataacatgaacccctctgcaagtctaagttctaatatgacttaactggg

SEQ ID NO: 910858 - DNA, 635 bp, Homo sapiens
ggagcaaagatttgaaagcatgtgctctttattctgtttgaccctatgctatatatcttaaggattcttacatacagaaaatgcaagacaagaaaccatttgactttataactaaagcaattatataactgtgttcttttctgtaataacaattctccattttcctttgcatacaaaccaatcattacatgttaaattattgttgttcaccttctttcatgggacctgctagccatttattatcagtttatgtaaacagtacttcttaggcccataatatgtactatatagtgtttgtgttttttttttaaagttatgtcaatggaaagaaatatgtagacctgacaattatagtaagaatagaatgttggtatatttgaaaaagggaagagacatacatagcaatacattaataatgatcagattgatgaactagagacggtgaggactaaaatacagttttctaatttccacacgttctaggatgagcatgtatttaaattaataattagagaaaataaaaggcattattttaaaagaagcggacrtagacacaaatttgttacagacatttaaggattacaggctctaagaaacttttatagttccacagcatcatcaaaaaagagagtagg

SEQ ID NO: 910859 - DNA, 576 bp, Homo sapiens
agtttttgtagagatgaagtcgtccatgttgcccagctggcctgaagggagatttcctgaactgaagggagtctcctgacttggcctcctaaagtgctgggatcacagacataagccaccatgcctggctgtagtaagttttgaatttgggaagtatgagccctccaacttctttttcaagattatttgggctatttggggttcccttgtgtttccaaatgaattttatgatcaggttgctaatttgggggaaaaaaactcagctgtaactttgataggattttgttgagtctgtaggtcaattttgagagtattgcaattttaacaatataaaccctttcgatcaatgaaaatgggatgccttttcatttatttagatcattaatttctttcaacaatgttttgtagttttagcatgtaagtcttgctcttcttttgttgaatttattcctaagtactttattctttttgatgctattgtaaatggatttattttcttaatttcatttttggattatycattgccagtatctagaaatctgattaatttttgtatattgatcttgtgttctgcaa

SEQ ID NO: 910860 - DNA, 581 bp, Homo sapiens
tgttatcatggctcactgcagccttgacctcccagatcaagtgatccgcctatctcagcctccagagtagctgggactacaggtatgtgccatcacacccagctsatttttttcttttgtgtgtgtgtgcagaaatggggtctcactatgttgtccaggctagtctggaactcctgggctcagacaatcctccacctcagcctccaaaagtgctgagatcacatgcatgagccactatgcccagccaagcccagctttttagatgggagtttctgcttgatgtctgtggaggaggctggaccaactacctgggcagtgaacagacttcagccatttttattgaaagcaaacatgtgtgaatgttgttagaacacagatgaaaaggagtccacagacagaagggggccccagtggcattgtgctgaccccatacataccttagccatatttataatacactaacaatactaaaatgcacacataaaaattaagtctctatggctatgagcaatatataaattcaaggatggaaaaataactgtctgttaagcaaatgttatctaataactgcagcacgttag

SEQ ID NO: 910861 - DNA, 596 bp, Homo sapiens
cagaatgcattggtagttaccaaattttggcatttcatgcaccaagaaattatccccaaatgagtggggtgctcacatagggtgttaattttttttctgttatcataacatggcattaaggaacaaatctctgtagcagaaattcccagtgaaaactattttatatctcaagcatcccttcctggacttaacttaaacttaaaaactacacttttcactccttgactttaccttgggccacaagacttgttgtggccagtagtctgggatgtggatcactttagtgctaaggcagagataagttccagtgtattttccagctcttttcatagtgaccctggggggccacatgtttcagatggcattgctaaaatgggtaggcaagtagtctaaaatctttcattactgcttggaaaaatgattcctgaaaattcctctagaccagcagcagtctttgagtgaatgagagatcaactttcatgttaagcttttragatttgggggtttatttctgcacctgataaagcctctcctaatatacagtcatttaataaagagaatatacttgcaaattttaaaacaaaaaataataaccc

SEQ ID NO: 910862 - DNA, 664 bp, Homo sapiens
gaactatctcttccaacattacaccatcttccaggggatggctgtggacacgactgattaatgtaaaaacacaggagtctggcccccttgtttcaattgcracagctcaaaagaccatcccagttccgagctccctgtggggtcagctgagacccccttcataatggcactggggtcagcttttctgtttgcccaatattgctcctcacttccttacaggttcaccttctaagagcatgccttaataaaccttctacatacaactcctgatgtattctggagaatccagtttaaggcatttgtgtttctggttaaattcttctcccaggacattgtgtgataaaatcttcctaagtaaatatttttctcccaataagctcattgggttttattatcttccctggatagatcccagctcagccttctttatcaccattagcatgacctcttcttgcatgcctacagctcaagcttacactgacaggtgaacatcacacagttggggaaataaagtgggctagtggcctcagccacttgtttgtaaaaatcactgagccttttcagtctccagagatgttcttatagttcaagtcacatctggcaaatgaaataaagacatagctcattccatgcttgtcttggctgtgccagagaagccccagac

SEQ ID NO: 910863 - DNA, 590 bp, Homo sapiens
atcacttgtactgtattcccttcattagaagtgagtaaagaagtccagcctacgctcaaggagaggggattacacatgggcatggatgctaggaggtrcaagggatcattgatggctatcatagaggttgcctatcacagttggtgaccatattttccattttaaatggatgccaagtttatttgccttcattcaatcctagtaaggttatttatatgagacgaaatgcttattttgaaaaggaagtctggtttattatacagaccatagttatcactagatgtaccatcttggttagtgatcgttagctggcttgtttggaggcaatgggaggctatgttattaggcagggagatgtgtgagctgggctcttaggactttggacagaaatctaccactttctttatctgtagaataggcttgaccatgagaaatttccctggtaatctttggctaaataatggaaacacgtgctttaaaagtgtcagaatagggtagagtcacctctagaaatagctagtatcacttatttcatacatatgctacatgtcttttgcattatagtgagaaatttactatgtgtgggtatt

SEQ ID NO: 910864 - DNA, 583 bp, Homo sapiens
tccagagactggagaagtcaaagacatccagactttttaacctatcacctcataagcacttcaagtggaactgcataggaaraactagaggaaggataagagtagtcacaactaagcataatgaagacatggtgcaaacatagtcaactagttgatttctaagactccttccaaaacataagggtccagttttatggatcatagtggggagatataattttagaaggcccatagattgctttatttcaaaaattgcttcaattcctcatgtctggcaggaggaaattgccattcaaaaagttccttgcagagggttccatggcacagccacactgagaacaaggttcctggtccccatgttgtgccaaaggaaaaaaaaaaaaacacaacaatgtaatttgttcctattagtaagtaaataagtgataaatgagtgcttgaagctgtagaaaacattttggtgtctttgaaatggcccatcattgtctctatttaaagagtctaatctgtcagatgaatcctcccaattagaaagacccaaaggagagccttctttgcattgaggttgcctatgagtagctct

SEQ ID NO: 910865 - DNA, 576 bp, Homo sapiens
gttggtaggttattaattactgctttaatttcagaatttgtattttgtcttttcagggatttgacttcttcctggtttagtcctgggagggtgtatgtgtccaggaatttatccatmgattctatattttctagtttatttgcgtagaggtgtttataggattctctaaaggtagtttttatttctatgtggtcagtagtaatatcccctttatcattttttattgtgtctatttgattcttctctctcttattccttattagtctagatagtggcctacctattttgttaatttttcaaaaaatcagctcctggattcattgattttttggtgggtttttcatgtctctatctccttcaattttgctttaatcttaattacttcttgtcttttgctagcttttggattagtttactcttgcttctctagctgttttgtgatgctagggtgtcaatttgagatcaatctagctttcaggtgtgagcaagtagtgctataaattttcctcttaacactgctttagttgtttcccagagattctggtacattgtctgtttgttctaactggtttctaa

SEQ ID NO: 910866 - DNA, 587 bp, Homo sapiens
ttggctgcccccaaacaaagaccagtgcttctcaaacrttagcttgcataagaatcacacaaataatttgtcagaatataggttgccactcccatgtttcatctatagattctgactcagcaattcagaagtgggatctgagattctcattttccaacaagctcctgattgatgctgctggtggtctacgactgctcttggaaaagcactgcagaccagtaattgtcaatctgcaccacacattgtaatcatctggggagcatccaaaaacactgatactcagaacccaaccacaaagattttgatttcattggtttgtgatgggactcatcattggtatatttttaattttccccagatgattctaatgtactgccaggattgagatccactgtctttttctttccctttcacttcaacataaataatttgaaatatctatcatctccaatagactgtaagatccctgaggatgagtaccatatctgttggttttcctactttattcctagaatagctgtctcagatctcattagtatctgttgcatatttgtcattaatgaccaatgttcctctatggtactttc

SEQ ID NO: 910867 - DNA, 587 bp, Homo sapiens
ttggctgcccccaaacaaagaccagtgcttctcaaacattagyttgcataagaatcacacaaataatttgtcagaatataggttgccactcccatgtttcatctatagattctgactcagcaattcagaagtgggatctgagattctcattttccaacaagctcctgattgatgctgctggtggtctacgactgctcttggaaaagcactgcagaccagtaattgtcaatctgcaccacacattgtaatcatctggggagcatccaaaaacactgatactcagaacccaaccacaaagattttgatttcattggtttgtgatgggactcatcattggtatatttttaattttccccagatgattctaatgtactgccaggattgagatccactgtctttttctttccctttcacttcaacataaataatttgaaatatctatcatctccaatagactgtaagatccctgaggatgagtaccatatctgttggttttcctactttattcctagaatagctgtctcagatctcattagtatctgttgcatatttgtcattaatgaccaatgttcctctatggtactttc

SEQ ID NO: 910868 - DNA, 587 bp, Homo sapiens
ttggctgcccccaaacaaagaccagtgcttctcaaacattagcttgcataagaatcacacaaataatttgtcagaatataggttgccrctcccatgtttcatctatagattctgactcagcaattcagaagtgggatctgagattctcattttccaacaagctcctgattgatgctgctggtggtctacgactgctcttggaaaagcactgcagaccagtaattgtcaatctgcaccacacattgtaatcatctggggagcatccaaaaacactgatactcagaacccaaccacaaagattttgatttcattggtttgtgatgggactcatcattggtatatttttaattttccccagatgattctaatgtactgccaggattgagatccactgtctttttctttccctttcacttcaacataaataatttgaaatatctatcatctccaatagactgtaagatccctgaggatgagtaccatatctgttggttttcctactttattcctagaatagctgtctcagatctcattagtatctgttgcatatttgtcattaatgaccaatgttcctctatggtactttc

SEQ ID NO: 910869 - DNA, 630 bp, Homo sapiens
caggcagtaaaaaatatatcaccaaattaatttagtggaaacactaaaacattcatggtcttaaaattttaacagaagcctgtgttttctccattaaaaaaattaatcgtgtaggatgtctttagtcaaaagacaaatcaactgggttgcaaaaaagactaaataatggcattgtaactgtacaaatctgacttttggctgctttttataggcctgaaaaaaatatcaaaagcagtaaaaacttatattatttctgtcagtagtccttttcataaaatgttgtgaaaacaatctctctaagaaggaagcaacatactgagcaacaagcctcagtcaggaagttcattttttctttggcttacagcccaatgccatcagaactaattaaaaacagagccacgctggtatggggctcagtgtttgggttttacaataacagagtcacaaagcagggggatgtctaatgagaatagtttctgagtttgttttgtagcattgggcaactatgtcaattactggaactgcagctcagggccagcacccatgctgggatgtgagagartcttactgccttacagattgagcttcctctttgatacatgtgatatgcatgtcacttgtatactggtg

SEQ ID NO: 910870 - DNA, 588 bp, Homo sapiens
gcacagaaaattgtaaacatgtaaagaactgaaagcttcatgctgagttttgccatgccccatttccttastatttcctgctgtcgctttaaacctatctcagtcatctctgggttccatgagcaggaacagtgtgctcataattactaacaaatcaaccaggccctgttgagctctgggtttattgataaactggaagaaagcagaagggaaaagacaaagaaagtaaaatatggggttaatcaggtgaactaagcaggtgtgaaagtggaagggaaagtagattatgatggagttatggatctaaaggaaagttgggacaagaaatgtgtcagatctggtctaggggaccaatactaaggagagaggtttagaacatgaggataggaggctgggaacacaattgtgatacttaaattagaaaatggaaatatagtccaaagcacatcttctgacattgtccttgctttgactggaaggggaaaaaacaaaaacaaaaacaaaaacaaaaaccttcccagagagggcagtgtactgacagaagctgattggattgggggtatgcaggtgataatgtatatgcagaaa

SEQ ID NO: 910871 - DNA, 633 bp, Homo sapiens
cactggttttacactagctgaacaaattaacattcacatcagcagtgtgtaagcattgtcttttctccataaccttgccagaatctcttattttttgaatttttgataatagccattctgactggtgtgagacagtatctcattgcagttttgatttgcatttctctactgatcaatgatgttgagcttttctttatttgcttgttggccatgtgtgtgtcttcttttcaaaagtatctgtcatgttctttgcccactttttattggggttccttataaatttgtttaagtcctttacagactctggatattatttttttgttggcaggatagtttgaaaatattttctcccattctgtggcttgtctgtttactctgctgatagtttcttttgctgtgcagaagctcttgaatttaagtaggtctcatttgtcagtttttgtttttgttgcaattacttttggcatcatcgtcatgaaatctttgtcagggccaatgtcgagaatgatatttcctaaattatcttcctgtgtttttatagttttaggttttccattcaagtctttcatccatctagatatgacatttrtatatggtataaggaaggggtccagctctaatcttctgtatgtg

SEQ ID NO: 910872 - DNA, 570 bp, Homo sapiens
aaaaatgaataaaggagacttaaagaaagtgtctgctgatgccttcrggaacattttggcaggactacggggaaacaaagaactttgttttcaatgctcatatctttggttattcttacctcttttagaccccttgttaatatctgaaaccatcatgatccctttaccttccatatttctcatcttaaaatatcacttgcttcaaatgacattatttgtatatttcacagataccaagaattttcacatgctatgttgcatggcattatcataattacctactcatttactcaaattagtgagcatctgtttactatggcagatattatatgctaggttttttgatataagagagctgacagtagaggtaggggaacagaatgtgcaaatatggttatgatatgttgtcatatgtactgaaatagatgtaagtaggttgctttgacagatcataagaagggattatatacagctcccaaaaagagatgatctttatactcagccttcaagagtagatggaggctataggtaaaaactggatataaaattcagaagaggaggtccctagaa

SEQ ID NO: 910873 - DNA, 421 bp, Homo sapiens
cattattgcagtttcatattgttttatgactctattgttatcttgcctctatgtctacttagattctgcagtagcatataaaaagtacctggtttcatgcctgacatgtcatagtgctcaataattgctagattttacaagttaaaggaatcccatatttataataagcacaaggtattttaaataatagaacaaattatcattaaagacaaaattcaggtacacagaacggtcaaacctgaaaagtagcatccgtatagcacaatgcctaaacagctaacatttattaaacactyactaagcctaaaatgtgtaagaaaataccaaaaatacgtaaggcctgtatgaggaagaggggtggagagcactgccagaaagccttaaatgcactcaggcctctaggaaaggcagtgtccggtgc

SEQ ID NO: 910874 - DNA, 421 bp, Homo sapiens
cattattgcagtttcatattgttttatgactctattgttatcttgcctctatgtctacttagattctgcagtagcatataaaaagtacctggtttcatgcctgacatgtcatagtgctcaataattgctagattttacaagttaaaggaatcccatatttataataagcacaaggtattttaaataatagaacaaattatcattaaagacaaaattcaggtacacagaacggtcaaacctgaaaagtagcatccgtatagcacaatgcctaaacagctaacatttattaaacacttactaagcctaaaatgtgtaagaaaataccaaaaatacgtaaggsctgtatgaggaagaggggtggagagcactgccagaaagccttaaatgcactcaggcctctaggaaaggcagtgtccggtgc

SEQ ID NO: 910875 - DNA, 552 bp, Homo sapiens
gctttcaaattctcccctgcatagtcttgaactatcaaagtttcctcaccattttcacctgcagagcactgtgagaaacaacrgcaaaaaaaaattttcttcactaaatctctctgcaaaacattctgtttatttgctgtagtcagcctctaaagatgtttgaggctttaaaagttcaaagtctaaaatttaaattctttatgagatacactatgtgcaagttttgacatttaaaatgtactgggctaccatgcttttgttaaaacactttacattcaataaagaggaaaaaaggcaatgctctcaaatttccacagacgctgaagcttctcaaattttatagttcaaattcttcctatagaagaaagcactgacggcaacgtttgaaagtggaatttccttagaatgtggaagcataatgataaacataagcgacttgcagcactgggtcatctcatgaacaaatcgctctctgtaaggtaggatttctgatttgcttggcaccaagaaatgtaaaatactcctgaaaagtggcttttgatgatcatacaa

SEQ ID NO: 910876 - DNA, 625 bp, Homo sapiens
aacagttttattttactgctttttcccttctctttaaatatgctaaatttcttttagtgtatgtttaaaagaatgcaaaggacttgctaaacataaaaaagacaagaaaagggggaggggggaatctatttttatctacacaatgccaaaagagatgtaccaatgtttttactaaaattaaacttttttttttttttaacagttaatcttgggtgccatagcaacacagcctttaaagcttggttttgctcagtgaataaatcagaccaagtcatttttcagcagtttaattccagtcaccagatcactgcaattttactaataaagcacagcagaaataaatgttctatactatcatcattagggaaatgtaatcagaaatttgttaattgaaccccattagtaaatttatctttgtactctcaaagtttaataattgaacaaattaacaaagcaaacaagtttctggcaggaatatctgacctaagtaagaaaaaattgcttgaaattgcyctattatttatatgcagatgatttttgctagcatgatgagttcaaactattcattaaaacacatctagcaattgtaattattgtttgtatccaatggaaataaaattcagaa

SEQ ID NO: 910877 - DNA, 640 bp, Homo sapiens
aatattaatcctttataagttataaaagttgcaaatgtcttttcccagsctgacacctctgttaactttgtaagttgaatccttcattgaagacacatctttaattttaatgtagtcatatctattaattttttcctttacagattgtgctttttttaaaatcttattttagaaattctcctctgtcctaggattattctttacattttatttttattttatttttatttttttgagacagaggctcactctgtagcccaggctggagtgcaatgacatgaacatggctcactacagtgttgacctcctgggttgaagcaatcctcttgccttgagcttttgtgtagctgagaccacacaggcatgcaccaaccatgcctggctaattttttttttttttttttttttttttagttttagtttttctagagacggtgcctcactttgttgctcaggctggtcttgaactcctaggctcaagcaatcctcttgcctcaacctcccaaagtgctgggattaaatgtgtgagccaccacatccagcccattttcttctttttaaattgtcaatctatataacagatactctctaaaaggaaatgatatttgttcaggaccaggcactgcaatgggaatacact

SEQ ID NO: 910878 - DNA, 640 bp, Homo sapiens
aatattaatcctttataagttataaaagttgcaaatgtcttttcccagcctgacacctctgttaactttgtaagttgaatccttcattgaagacacatctttaattytaatgtagtcatatctattaattttttcctttacagattgtgctttttttaaaatcttattttagaaattctcctctgtcctaggattattctttacattttatttttattttatttttatttttttgagacagaggctcactctgtagcccaggctggagtgcaatgacatgaacatggctcactacagtgttgacctcctgggttgaagcaatcctcttgccttgagcttttgtgtagctgagaccacacaggcatgcaccaaccatgcctggctaattttttttttttttttttttttttttagttttagtttttctagagacggtgcctcactttgttgctcaggctggtcttgaactcctaggctcaagcaatcctcttgcctcaacctcccaaagtgctgggattaaatgtgtgagccaccacatccagcccattttcttctttttaaattgtcaatctatataacagatactctctaaaaggaaatgatatttgttcaggaccaggcactgcaatgggaatacact

SEQ ID NO: 910879 - DNA, 591 bp, Homo sapiens
tggtatttctatttttagtctttttgaggagccttcatactattttccataatggcttgcattcccatcaaacttgcatttccataaaaagtgtatgagttccctttcctgggccaggcgcggtggctyacgcctgtaatcccaacactttgggaggccgaggtgggcagattatgaggtcaggagattgagaccatcctggctaacatggtgaaaccccgtctctactaaaaaatacaaaaaattagccaggtgtggtggcaggtgcctgtagtcccagctacttgggaggctgaggcaggagaatggcatgaacccaggaggcgaagcttgcagtgagccgagatcgcaccactgcactccagcctgggtgacagagtgagactccatctcaaaaaaaaaaaaaaaaaaaaaaaaagagttccctttctctacgtcctcaccagcatttgttgttttctgtcttttttataataggcattttaactggaatgagatgatagctgattgtgcatttccctgatgattagtgacattgagcattttcttacatacctgttggccatttgtatattttattctaagaaatgt

SEQ ID NO: 910880 - DNA, 605 bp, Homo sapiens
aatgagatatcatcccaccccagttaaaatggcttatatcaaaaaggcaggcaataacgaatgcyggtgaggatatggagaaagggaaccctagtacactgttggtgggaatgtaaattagtaagccactatggagaacagtatagaagttcctaaaaaaactatatagaaataccatgtgatcctgcaatcccactgctaggtatatacccaaaagaaaggaaatcagtatatcaaggagatatctgcactcccatatttattacagcactatccacagtagccaagatttggaagcaacccacgtatccatcaaagacaactggataaagaaaatgtggtacatatacataatagagtactattcagctataaaaaaggagatcctgtcatttgcaaaaacggatggaactggagaatattattttcagtgaaataagccaggcacagaaagacaaacttcatatgtcctcgctcctttgtgggagctaaaaactaaactaattgaaatggagatagcagaatgatggttaccagagggctggtaaaggtagttgtggggagtgagaaatggggatggttaatgggtacaaaaatatagttaa

SEQ ID NO: 910881 - DNA, 600 bp, Homo sapiens
acttcaactttgatgcttcaattggttaaatcttatagaaacccttaaaatcatagaatctcagagttggaagggagcttagagttccccagatccaaacttctgggcagtttacttcaaaagaacccaagagagagatagcttgagctactatttctgaataacttcttatttagtaagtggatatctatacctctctttctagtttaaattctctttcatctgtttaatgactctagtgaatatatcttgcatggggaaaatatcattctaatcatgtcatgatatattctctacatacactagccatattttttgcatagattttcaccttaagtaatgtatagaagagtggctttttcataatatatgacttagcacagttcataattattgcaatagtgactctaaattgcatgcattttatttttgtagtacacattgtgatcctaaagaaaaggcacatatgggactaacaggccttcaacaattattgtttattgtgttcttatttgyggctacctaattatacaagaaagaaactaaaagattgaatagaacaaatttactgattgtgaaatgttgattacctttgatact

SEQ ID NO: 910882 - DNA, 603 bp, Homo sapiens
gcaaaagtctctatgggaaaccctattggtaccagtggtgtaaaggcaggagcagagctagggtaggaaacmcgcagatgtggattgggtctggacatgtaggcaaaagtgcttggaccaagatctgttgacttattttactactaacagggtcaggtgcccacctcacctgtaagctctgactaattttgcatttctgaattgtgtggtgtccgcatccctgctaatgagcctagtcccataagtacatatgtatgtatgtagacctgtgtgtgcatagtcattcatccaacaaaaattgactgagtgccaggcactttgctaggtgttgggagatatggcaggggtcgggaggaaagacatttcacctccttcatagatgtcgctatctagatggggagacagtaatcaagtagacaactaaacaaaataacaggaaatatgtactgtgtgggaaagaaacatggtgttgtgatcaataataatagcagggttgggggtagcaatctatcagatactgttcaggtaaaggctttccaagaaggtgacatttcagctcagaattgaaggatgggaagggaccagccaagggttcctcctcag

SEQ ID NO: 910883 - DNA, 547 bp, Homo sapiens
ctacctgggtttctgctgcccctgatgctgatgtaattcaggccccacagctcagagcttctggattcaagtatctctagttattggtcgtatttcctattttcagtcacttcaaarggccagaccacagagttcttgtcagatgtagccctatgtttcagaatcaagataggcagaagaatcgatctactggagaccttgggcaagccacttaacctagccccagtgtcctgatttgtagaagaaggatgataatagtatttctcttgtgggtttttaaggataaaatgagataaagtatataaacctcatctttcaagcttcttttgctaaccttaatcacaccaagctttttcctcccttctcatatgtcttctcttggctggaaagtcctatcccaatttgtgtagatagcacctactcatgtttcaggtctccccctgaaatcactcctcaggagagcttccctgacacctcaaacccaagtaccctgcatcacagaggctcatggtacccggaaattttttacattgtactcaatgaattt

SEQ ID NO: 910884 - DNA, 650 bp, Homo sapiens
agagagtgggactgcaaggtatttgtcccttacatccttacccatagtacttccctacagcaagtagtcccagttgactgtgatgttaagaatatttataggtgcagtgaaaagataagcagcatttagattgggaaaggctttgaaagccaggataatgaatttgagcttaattcagaaagcactagggagccactgaaggttcttgagagggagggcttatcaggtttgcatgttggagattcaaatatgatccattataaaggatacacacatagaatctgtaacacataaaatcgttttcaactctggattccacatgggtgctagtttacagagaggtccccccagagaccaacctgatcagcagacattgtgaatcatccttgtgagaactgggaacaggcagcagccggcccacaggtacagccgatggaggctgaaaggactgagcatgtacaaatttgggaaatacccatgccatgcccctctcccagaagcagggcccatatctagtcctggaacagatttccctgagaaaaggaaagaaaggcacctggccccyagcatgagcatggctcatgacctggagcagcaacttatgtcccctctgggacccgtttcactcttgtgtggaccaggcagtctgg

SEQ ID NO: 910885 - DNA, 637 bp, Homo sapiens
atagggatcatgctgtccaaagctgaggaatcctctcccagtttccagttttagtaygtgggcaccttgcaaatggcctgttgcaagttccaggcaagaacgtcccaaagacagctgaaatgaagaaccaagatctttcagcagaaggttcattgtatgcaagccttcctggggccgaaaagaatgccagaaccttgttcaagggtctattccttgaaacaaacagaatttctactctctatcccttccaacaagaaaccataatgatgatagttagcacttattgtgcacaaatgatttgtcctgcattgtgtaagcccttcatgggcattatcaaagttgattctcatgtgaggcatatctgaattgtaatttatatatagaaatataaattgttattattatgcatattttattccccattttacaaatcaagaaactggggaaccaaagattgagggacatttctaagattatctaggtatctctatacttcaaagtctagtttttatttttactttttaatatgaaatacattcacatggtacaaaatccaaaaggtacaaggatgtgtgcagtatgtttctcctatgcctggtctcccagcatctgctctcccagcatctgctctctttat

SEQ ID NO: 910886 - DNA, 527 bp, Homo sapiens
acccggggaattcagcgctccatcaagtcctgtcttgcaygcatattgctttctgccttgtcttaggattaccaatgcctatgtgttatctcctctgccacactgtcagtatctaggcaacgggaactgaatgttttcatctctctaatgccttggcatggccctcagctgaaaatgacataaatgagtctgtggcccattgggatggtacaggctccctctaaagttcagggcacccagggcccatcaacggtgcattcacgttatttttaaatggccaagggcacgatgcaccctttacctctttagttcatgtctgggagcaaccagacagtagacaaaggctgtaaccaagccaggatggttggcatggcgacaggaaaaaaatcagtgcccttgtttaaaagcctctctgtaaaggtggagaggaagatggagcacccaactgaggctgtgggcaaaaaggatttgctacaaaccaccgggaaagaacatcaactcttcaccataatcctaatattcccaac

SEQ ID NO: 910887 - DNA, 500 bp, Homo sapiens
ctggtcacgtttcctgggcacctgccctgtgccaagctctgtgccatgtgcacaatccacccccaccccaccccatctcattggctttgatgaaaatgccatgaagcagagagtagacttctrtgtttaaaggcctgggtcctgggactcagtgaggttaaataatttgccaaggtcatcccacccatgagtactctttgcagcccacattggaaaccaacactttttctacagttttcaaaccctgagagggggaggtggaggtgttaagagacctaagtttgccgaagaagcacaattgcagatgctctgaagcctcctgctcagagtgccctagcatgtctggccctgaccttatgggttttagagtccagcccccattggctcactaggtgatcgggtgtcctttgaggctgcagcccaggctttcttttcacaggtcctaaggtctggggttatgacctggactgtactacacaggacacacaaaagccagactg

SEQ ID NO: 910888 - DNA, 583 bp, Homo sapiens
aaactggtttttatttcttcaaggttacacagtgatggctgggtgtggtggctcacacctataatcccagcactttgggaggctgaggtggacagatcacttgaggtcaggagttcaagaccagcatggccaacatggcaaaacgccatctttactaaaaatacaaaaattagccgggtgtggtggcacatgcctgtgtcccagctacttgggaggctgaggcgggagaatcacttgaacacaggaggtggaggttgcagtgagctgagatctgagattgcaccactacactccagcctgggtgacagaggaagactccgtctcaaaaaaaaaaaaaaaaagaaagaaaaaaaagattacatacagaaagtagtcaagttttttctcaagtctaagacttctaactttaagttcaattatatatatatatatatatatatatatatatatacatgtgtatatatrtatgtgtgtgtgtgtatatatatatatatatatatatattttttttttttaaccatactctgtaggaagaaatactctgtaaacctcagagaagcaatttgaggatcaaaggaaaaat

SEQ ID NO: 910889 - DNA, 583 bp, Homo sapiens
aaactggtttttatttcttcaaggttacacagtgatggctgggtgtggtggctcacacctataatcccagcactttgggaggctgaggtggacagatcacttgaggtcaggagttcaagaccagcatggccaacatggcaaaacgccatctttactaaaaatacaaaaattagccgggtgtggtggcacatgcctgtgtcccagctacttgggaggctgaggcgggagaatcacttgaacacaggaggtggaggttgcagtgagctgagatctgagattgcaccactacactccagcctgggtgacagaggaagactccgtctcaaaaaaaaaaaaaaaaagaaagaaaaaaaagattacatacagaaagtagtcaagttttttctcaagtctaagacttctaactttaagttcaattatatatatatatatatatatatatatatatatacatgtgtatatatatatgtgtgtgtgtgtatatatatatatatatatatatwttttttttttttaaccatactctgtaggaagaaatactctgtaaacctcagagaagcaatttgaggatcaaaggaaaaat

SEQ ID NO: 910890 - DNA, 623 bp, Homo sapiens
catcatgaacttcaacctggatatttttattttcccagattattcttaaattgtttggtctcctaatagttttcacttctgaaagctttattctctattcatctttgctactgtagtattattcttgcttttacagttattctgacatcttgatggtgtttgaaaaatatgatgaagtgtcatcaaggactcaattttccatcttaaatcaaaagagtgtccaatggatttatatattttctaaacaatttagttgattgacctatatgtggagacacagatagatattatttaataggcagggaaggtacattgatataacatgaatacttggctgtgtacaacttctcagagaagtaatgcatttacttttaaccacgaagttggtttctctattgtcagaaagaaagaacatcaaaacagccaagacacctgctgtggaaatgtctctttcattgatctctgaaatctctattttatgctgactttcataagaagtatctaatcttccatactcgttcacctgggaagctgggatgttaactgccaaaaacctgcattgcaaaaacaaacaaacaaacaaaaacaaagaaactgaagaacragaagaagctccatgtgga

SEQ ID NO: 910891 - DNA, 584 bp, Homo sapiens
tgcctggcttggagggttccacacccacagagcctcactcattgctagcacagcagtctgagatcaaactgcaaggtrgcagcaaggctaggggaggaaagcccacaattgcccaggcttgagtaggtaaaaaaagcggcctggaagctcgaactgggtggagcccaccacagctccaggaggcctgcctgcctctgtagactcaacctctgggggcagggcatagccaaacaaaaggcagcagaaacctctgcagacttaaatgtccctgtctgacagctttgaagaaagtagtggttctcccagcacggagtttgagatgtgagaacagacagactgcctcctcaagtgggtcactgacccccgagtaacctatctgggaggcaccccccagtaggggcagactgacacatcacatggccgggtacccctctgagacgaaacctccagaggaacgatcagacagcaacatttgctcttcagcaatattcactgttctgcaccccccgctgctgatacccaggcaaacagcgtttggaatggacctccagcaaatgccaacagacctgcagctgagggtcctg

SEQ ID NO: 910892 - DNA, 547 bp, Homo sapiens
catggatcctatgaaggaggcagattgctcccacagaacctgggagacagcacaaatactgtgaattcccaaactgtgaaagtgggaaagggggatcatccacccctgaacacacaccatcactgaaggtgcagatcacaggagaaggatttgaccttacctggagctaagataatttagagagctgagtgaaatacaggggtagaggaagaagcaggaaaagacctgtaggtactcttggtccccagggaagccatttctgacttgtctctcaggggtccttggggaaggctgccagaggaactgggaaaagaccacaaggagaaggaaacctccagctgaattgtgtaacaattccaagtgaacatgaagtttcctgaccagaacttgggagagggcatgaatatggtgtgcagactcgacaggcagggaggtgcraaagccctgcttgctttctcagcttggaggctggtatcctggggcaagttctcagccctgcctacccactgcctggaaacaaactcggtgctgttaggggggtgtaggg

SEQ ID NO: 910893 - DNA, 464 bp, Homo sapiens
tggagacctactctagcccagcacaatatattctctctctctctctctctctctctctctctctctctctmtatatatatatatatatatatatatatatatatatatatataatctgtcatccccatttttaaaattaggaaactcaattgtgatattattaagtaatatactcacacagaatatttcataccagccctgggaggtagttcctatcaccattgtatggataaaaaaagctggctctcaaacaggatatgacatttttgtactttcccagggtttatgatatctgctccaactcaaatatctttgccatatcggatggcatttttaaaaaggctattgtgtaagaggcttattagaaaaaacctctattattacatttttcttctccttgaataggcgacactgtctcttgtttactgaaaattggtactagaactaattaattccttcttgaa

SEQ ID NO: 910894 - DNA, 638 bp, Homo sapiens
tttttcttcctgtcattttaggggttgtagcaatagtgtttttgattgcagtgggttgttgactgccaagtgaatgattatacatggacatggaagttgagatatgaaaaaagccaygtgggtcagagtctcatggtcagctaccatggcaatcctgaaaagctcctctacctgaatggcctgtcctgcaataactcccctggagatactgttccctttctcaaccttggaactccacatattcaaccagttgagtcaacccccaatggagtgagatcaggcatcttcagtgaccttaaaaagccagcttgactctctagccaagactcagagggctggagccaaatcagaatgactaagatacagaaaagaatgcgtggacggaaagctgcagttgcagcctcggaagacactggtagaaatgctgttctggagaacgtgtgtggatctggtgggctaggcaccccaggcagccccctggcctgggtgaaacactcctgcttgctctcccgtttaccaaggaagctttgggtaagagcgtactttacctatccactaaaaaggcagaggaagggagggtctagtggtctgacacgcatctactaggtagaaatgggcaatgtctcccacatccaagc

SEQ ID NO: 910895 - DNA, 571 bp, Homo sapiens
tcatcatctttcagaactttcccccatgtctggcctgcctgaagccccactccctgctttccagaacaacgatgggttttgctgactggcacttactaatgggccaggtggggaatccattgcattgtgggggaaaggtgtcaaggttcgctggcagaaaaaaatgtggtaagttagttattgagggaagagtgttcaggtcaagcagacagtgggagtggcctccagtactaggggagaagccagtggactcatgggctgttttgtcttcctgcaatggttagcatcaagagagctgagaaccaagtattttactgagtataatcaaggccttgtcaaagataaaacctgactggctacacccctggttactgggatatgctgtacctccattataattagaaaaaacacacctgcgtggagtgaaggctcaatgtagggatatgctgttcctacattacaattagaaaaaacacatgtggatggagtgaaggataaatgggggcaratcaaactttcttcctgccttggagggaagtgtagaggtctgctcaggaaagagcatcagaag

SEQ ID NO: 910896 - DNA, 592 bp, Homo sapiens
tgtaatgacttactgagagtaactttcagtcctgcacaccctattcatggtaaaagccctatacaagtctgccgtttttaatattttatactgtatttttattgtactttkctatattgagataaacatatacttacaattgtgctacagttgcccacagtattcagtacagtaacatgctgtacaggtttgcagcctaggagcgacaggctataccatatggcctagttacctagtaggctataaaacctaggtttgtgtaagtccactctataatgtttgaataagaaggaaatcgcctaaggacgcacttctcagaaagtgtccctatcattaagtgatgcatgactgtttatacacacacacacacacacacacacacactcactcacagtcacctatatatagccttgcaatttatttgcctatttacattttgcttttctttaggacactgtaagttgcagtgaggtgtggttagggttgtcattttcttccagcttctttgctacatgaagcacaacatagtgcttgataaatattttgctactggaagcatgcagctttctatgtatacaaatgtgttgcttca

SEQ ID NO: 910897 - DNA, 633 bp, Homo sapiens
aaaatataagccctgtattctgtcgctgaaatgttagagatacctatcagaagacattttattctttgggaaatacaaaatatcattggatatttcattggataaataagtatgattggacattaggactcttagaattcaggacccaggaaaactttaggaaaaatctcagtttagagaaaagtgaatgagggtccccaagatcctcccggttagtcatcaaagaggcaaaatgattttaaagattgtacatctcaagtcacactgtaagtgaatcaccttgccttcttgctgatcaagacatgagatttacagtgtgaagtccgtcaatgagatttacgtcctgactcagtccctgactacctcatgccactcagctataccactgatgtagagggcctgtggcccaccaaccctgcagcacattcacttattttggctgatatggaacaaactgaaaaattatcacttttggaagctttaagagagaaaagaatcctatgggagagtagtaagtaggtattttgtcaactttgtttctttgcttctcagtgcctaaaaaggartaccatacaataacaataatatttatattttatataaaactgttataatttctcagtaattagtact

SEQ ID NO: 910898 - DNA, 638 bp, Homo sapiens
tttggatccccatccagacaaaaaaaaaatgtaaagccagtataatattctggtcaatttgccatagttgtgctggcttctaatatgccrtcaacatatataagcaaagtctcatttttcaattggaggtcccaaaactccttagcatgtatttcccccggacggttagtgagtttttgaagccttgatggagcatcatccagcaatactatcatttagctttagtgtcagagtcttcctattcaaaggcaaacacttcatgggactctggactcaggggaatacagatgaaggcatccttcagattcaagactgaacaccagtacaactcactggttaaagtcatgaataatgtataagcatcagttatcaccagataaatggctttgaaaatttgcctagtagccctcaaatcctgtacaaaccaataatcctcagttccatgtttttgtcctggcaagacaggtatgttacatgagaaacaaggaattcttcctgtattgcaggaaggccattagcagaggctaaatgcattgctgtgccttttctctcaaagggcgctgctttagatttggcagcgccactcctgcacaaaacttgacttgtactggagatgcagtttttgttttccctggcct

SEQ ID NO: 910899 - DNA, 661 bp, Homo sapiens
tgtttttaaaaattttttgaggatgttttcaatttaaaaaaggagcaaaggcaattcaataaagaaaacatagtcttttaaacaagtgatactggaacagtaacgcatccaaatgcaaaataataaccctctacatattcctcatacctcatacaaaaattaactcatataactaagtgtaaaatgttaacttctagaactgtatatggccttggtttaggcaaggaaattttagatgacacaaagagcgtaatctataaatgaaaaatgtgataacatcaaaattacatacttttgctcatgaaaagagactattagagagaaaagtaaagctacagatgcaagaaaaatatttgcaaaatatttactcagtgaagggcttgtagccacaatatatcatgtagtctcaaaattccgtaatggaagaaacaactcaatggaaagtgggcaaaatttagacagtgttcaccaaaggaggtacatagatggtaaataagtacaaagaagatgctaagcagcattagtcactagggaatgcaataccatcacacacatattagaatggataatttaatggaaaaaaaaacacattatctcaaaggctggcaaggttgcgaaacaactggawctcacatacactgagtatgtgaaggtacaatgt

SEQ ID NO: 910900 - DNA, 605 bp, Homo sapiens
atagtatatcatatagtattactctatatagtatatataatacacagtgtgactacatatagtatatataatacacagtgtgactacatatagtatatataatacagtgtgactacatatagtatatataatacacagtgtgactacatatagtatatataatacacagtgtgactacatatagtatatataatagtgttactacatatagtatatataatatatagtgttactacacatagtatatataatatatagtgttactacatatagcatactatatatagtatcactgtatcagcattactataatatatagtatatataaatatggtgtatatataactatagtgtatatataatatatactatatctagtaatactatatatagtcatttagtactacatatagtagtactagatatagtatatatactatatatactatatatactatatactgtacagtatgtatatactatatacacacactatatatagtgtgtgtacatactatatacacacactatatatagtgtgtgtacatactmtatacacactatatagagtatgtatatactatatacttcacactatatagtat

SEQ ID NO: 910901 - DNA, 540 bp, Homo sapiens
gttaacaacttaggatgtttctgatgatcaatctagttcggcgtagctctcttcaggaggttggtgatcaggtccagtatgaatagttaaaatcaaatgcagctggttttacaagttggcccagttcaacgggtcaaaatccatctgggaatgtacgtggctggggttcagttcttacaccctcccagttcctttttagatacttctgatatgatctgttccattttggattttattttcacaccatttatctatattaaaaaccgtgagttcactccaactgtagtacaaaactatggttttcattcttgctttctgcctttccatatttgtctctcccaccatcagtggttcccactatccctacattatttactaattagatcaatcccctgatatggaaccaatctcctgcttctgttgccaccaactcccctggaccaatgactgcttygttccatcactcatgtggggacactacaccatgtagataccccttcaccctgctagttggacatccctgcattgggctgcccccat

SEQ ID NO: 910902 - DNA, 569 bp, Homo sapiens
tcacagctaccacctcagcccaagccccgtccatctctgacctggactagagctgtgtctggaatgcgtttccttctggtgggttcttggtcttgctgacttcaagaatgaagccacggaccctcytggtgagtggagtttgttccttcagatgttcagatgtgtacggagtttcttccttctggtgggttcattgtcttgctgacttcaagagtgaagccgcagaccttcgcaacaagtgttacagctcttaaaggtggcatgtccagagttgtttgttcctcctggcgggttcatggtcttactggcttcaaaagtgaagttgcagaccttcccagtgagtgttacagctcataaaagtagtgtggacccagagtgagcagcagcaacatttattgtgaagagcgaaagaacaaagctaccacagcatggaaggtgaccccagtgggttgctggggctggctctggtggccagcttttattcccttatttggcccagcccacatcctgctgattggtccattttacagagtgctgattggtccatttttacagagtgctgattgatg

SEQ ID NO: 910903 - DNA, 531 bp, Homo sapiens
ctgatgaaataactgaagacacaaataaatgaaaagctacctgtgttcatgaatttaaagagtaaatattgtaaaaacgtccaaactagtcaaaacaatctaaaaattcaatgcacccctatcaaaattccaatgacaaatttccacagaaatagaaaaacaattctaaaatgaaccacaaaagaccccaagtagccaaagcaatctggagaaagaaaaacaaagctggaggcatcaccctacctgatcttaaaatctacttacaaagctagaataatcaaaacagtatggcacaaaaacagacatacaagtcaatgaaacaaaacaaaaagcccaaaatcccaaaattaaatccacatgtttatggtcaactgatcttcaacaaagttgctgaaatcatacaatgaagacaggatagtatctggtgttgsggaaagtggatattcacatgcagaagaatgaaattgggcccttatttcacaccatatttaaaaatcaactaaaaatggattgaagactcaaaagtaagag

SEQ ID NO: 910904 - DNA, 647 bp, Homo sapiens
tggtaaaatggaaaaaaatttaccatcctcttacctagatgatctatgaaagccttttcattacagctctagagttatataatcaagttaaaagttgatgatttgtgtgagtggcattagtctggctctatcacatcactgcaacagtgtggcaggcctccataacaacttttttagtactgactgactggttaagctaaatattaaaagctagtgcccttatacaaatgctgcaatataacaaaagtccaccatgagttttgcttaggcctttcctgagccttaaagcatgacaaaataatgaaagaattcttaacagggcccatttaggattgcacaagttttattgagggtctgaagaaactctccaggcctccacaaacaagtttattggaaatctgaaggaactccccaaaactctgtgatttagcaggagacaagataagtgcaatcaacccagcacttggcacttggacccatttagattgagtaaacttactgaggctccagaagaaggtctccaggacccagaccttagttatagattaaaagaagttaatcacttatgtctttagatgaatgcacacttacacgawaacatatagcttagaaggtatataagctctgaaaaacttcgtaattttgag

SEQ ID NO: 910905 - DNA, 631 bp, Homo sapiens
ataacaataagataccacttcacagaaatttaaaggcttagtaatgtcaagaattcrtaagaattgggaggatggggtaatcttggactgcaaactaaggaagccacactggaaagtgacttgccagtatttatgcaacttaatatgttccagaaatctcactccaaggaaacttgcacacaggtattcatgagaacagatatgagaatgtgcatctcagcattgtttgtagtggcagaagcctggaaaaacatgggacatgataggcagggacagaactccatcatatgtgatatatgtattcaattgaaaactgggcagtggtcagaattaatggaccagacatacattcagctatctagctacctcttgaagacatagtgtcaagtgggaaaatatagaaaacaaaacaaaatctgtatcaaagtaccagtgtaaatttaaaacactctaagcaatacataatttccaagcatactggtgatgcctgtgagagagacagaaaaaatcagaatgggcattaggaataaagagaaaaaagaaggccttatatagacctgtgataccagagcataatcaatgctattctttcagttgcttatgggaactaaaattaaacagaacaaatttg

SEQ ID NO: 910906 - DNA, 631 bp, Homo sapiens
ataacaataagataccacttcacagaaatttaaaggcttagtaatgtcaagaattcataagaattgggaggatggggtaatcttggactgcaaactraggaagccacactggaaagtgacttgccagtatttatgcaacttaatatgttccagaaatctcactccaaggaaacttgcacacaggtattcatgagaacagatatgagaatgtgcatctcagcattgtttgtagtggcagaagcctggaaaaacatgggacatgataggcagggacagaactccatcatatgtgatatatgtattcaattgaaaactgggcagtggtcagaattaatggaccagacatacattcagctatctagctacctcttgaagacatagtgtcaagtgggaaaatatagaaaacaaaacaaaatctgtatcaaagtaccagtgtaaatttaaaacactctaagcaatacataatttccaagcatactggtgatgcctgtgagagagacagaaaaaatcagaatgggcattaggaataaagagaaaaaagaaggccttatatagacctgtgataccagagcataatcaatgctattctttcagttgcttatgggaactaaaattaaacagaacaaatttg

SEQ ID NO: 910907 - DNA, 621 bp, Homo sapiens
agtaataagtccttttcatacattttttttttaatctccacaacagacctttgagaaaagtgctattaagatcatccccattttacagatgaggaaatgaaatctgagagagtagtctgaccaaggtcacatagcagttattggtggtattgtgtaggttcaattccatactgtctgaacccaaaggggatgctctaaaccttcaacctgctttttaaattataaactacagtaactaaataagataaagcattattaactagtagtttttctttagcttgactagtatatgaatattgttgcatgctaaggttaaagttttgaaagttgtaaaaatggaatatatccactttggacttggggtagaggctaatttttttgtgtccttttctatttgagtgcttagagataacttaaaactaactctaccatgtcgtagatataatttttaaatttaggcgtctgatctatattattggtagaataytccctcatctgtaaaatggtgatgataataggacttccctcagaggcttttataggagtaaaaaaagataatggataatgtatgtaaagggcttattactatgcttagtgcatagtaaaaggtcaactaatagt

SEQ ID NO: 910908 - DNA, 654 bp, Homo sapiens
acgcaccctctttgtctctgtgtggtgtcatgagtcttgacatctgaaccacattttgggtcaagtctatcctgtttctgtagagtcgtcacaatagaggcaattctacgctttaccaygaaaagcaccataagattccttacagtaacaaaagcttctgggattttaaaaaaatgggtattatttatttaaggaggggtccatatggcggcggtgagagttcagggcaggggtctgaagctcaagggcagagaatgaaggaatgagtcacagagggctgccgaaggtcggggcatagatcagagacagtgagctcaccattcccttcccagcagccgaataaagagatctgggatttacgcatagcctttgcttaaaggaaagtgtacctttttgaaccttgcgacacattggaccctcatcaactcggattttaatgagaggaattagtattccaatgaacaatctacataatatcttgtaggcaaaatatttatttggggcttgggacaatgaacaggctagaaatactcatgggcaaaaatgtaacatagtcataaatgtctacattcattttccattggttgtagaaaaagaatctccgttttggtttttacaatttcagaataggctgcccaaatccagggcattgaa

SEQ ID NO: 910909 - DNA, 596 bp, Homo sapiens
ttaatttgcttaataatgacctccagctgcatccatgttgctgcaaaggacatgatttgtttctttttaatggctgcatagtattccatggtgtatatgtaccacatttgctttagccagtctactattgatgagtatttaggttgagttcatgtctttgctattgttaatagtgctgcaatgaacatacaaatgcatgtgtctttatggtggaacaatttatagtcctttgggactatacaaacccagtaatgggttgaatggcagtactgttttcagttctttcaaaaatctccaaagtactttccacagtggctgaactaatttacattcccatcagcagtgtacaagcatttccttttctgtgcagcctcaccagcatctgttgtttgtggactttttaacgatagccatttagactggactgagatggtatctcattgtggctttaatttgcatttctcagatgagtagtgatgttgagaattttttcgtatgtttgctggttattgtgtgttttctaaaaatcctttcctaccacrtagaagttcctactgtctgtactgtctctgaactcctactctgtaaattcctag

SEQ ID NO: 910910 - DNA, 607 bp, Homo sapiens
tatctacagtaaattgatttctgacaaaggtaccaataagacacaatgaagaaatgggagtctcttcaataagtggtgttgggaaaatgsaatatctacatacagaagagtgaaaatggactcttatctcaccccttacacaagcatcaattttaaatgtattacaaacctaaatgtaagacctgaaactataaaactatgagaagggacaaatactgcaaaagaaaaactccatgacattgatctgaatggagatgtattgaatatgatgccaaaaacacagacaatgaagacaaagatacacaaagggtttgtttttagagaaaagctctcactctgtcactccattgcctatgctggagtgaagtggcatgctcacagctcactgcagtcttgacccctgggcctgagggattctcctgcctcagcctccctagtagctgggataatgtctagctaagtaaaaaaaaaaaaaatttagtagacagagggtcttgatatgttgcccaggctgctctctaactgtgagaccccatcccccaacctggccaatgaccactgccttggcctaccaaagggctgaaattacaggtatgagctactgctc

SEQ ID NO: 910911 - DNA, 630 bp, Homo sapiens
acctacaaaatgacaaattcctatggcataacttaccatctatctaaaatgaaaakaccagttaataggttataaacatcttcaacccaaatgcctaaagccaaattttaagagatggttttctaaaatccttttgtgtatcaatacgcaagtcccgaaaaatcggttcaacagccaagtctgaaatatttgctttacagccacaaaatggctcaattccatagagtagagaaaatatgtcttctatctatgaaagggaagaaatagggcacaagaaagaacctggaagttcccatgcagctgtgtcatctactaaaccaagcagataatggctatttcattttaaacccccaagttttcactattcccccaggctaagacatcgtagatgactaaaaaaaatttggtacactagtctactgtccagtgatatttgagcttttgtctttaatttctcgtttagaaaaaaagaagtgcagctcactcattgaattttacataaacatgctctttgaggctgaacgaaatctgactgattttcaatgtgagaataaaatataaaaactgttcttggagttatttctaaacagaacatcagaatcgtctaattaagaaaaaatcaaattcatc

SEQ ID NO: 910912 - DNA, 497 bp, Homo sapiens
tggcccccttagcttcagctatgcttttgacaggagattaataatagacaattcgaaattgagattactatccatttctactcayagatagcccacattgctgactgaaaaaagatcccaagtgaagatgacaagggtgttgtttccttgtgaaaataaacagacttatctgatatttttattttaatggaaggtcacttcacctgtggctcaacagtgagccaaatgagcactttcaaagggatcaagtgcaatgctcacaaaacactttggggtctgcgcaaattgttgatgcaaatgccgtaactctgtaccacaaggcacaaaagagttggcctgtcttgaaagcttttgagggtaagcagtaccaaaggtctgtcctgactagagaagatccttaacatgactcctgtaaaatgcaactgcatcgcaagggttaaccaggtaaatcaccagttggggtccttaggaactaactatggctgtcagttgagccg

SEQ ID NO: 910913 - DNA, 686 bp, Homo sapiens
gaggtagccttctttgggttaaatctgcttggtgttatattctgttctttttttttaattwttttattttattttattttatttttgagatggagtctcgctctgtcacccaggctagagtgcagtggcacaatctcggctcactgcaaactccacctcctgggttcacaccattgtcctgcctcagcctcatgagtagctgggactacaggcacccgccaccacacccagccaattctttgtatctttggtagagacagggtttcactgcactagccaggatggtctcgatctcctgacctcgtgatctgccctccttggcctccccaaagtactgggattacaggcatgagccactgcacccggtccttggtataatattcttgtacttattgatatttttctttgggtttgggaagttctttgtttttattatccctttgaatgaactttctattcctatctctctacctcctctttaaggccaataactcttagattggcccttttgaggcaattttctggaccttggaggcctacttcattgtttttattcctttttctgttgtctcctctgactgtatattttcaaatagtctgtcttcaagctcactaattcttctgcttgataaattctgctgttaaaagcctgatgcattcttcagtatgccaactgcattttttca

SEQ ID NO: 910914 - DNA, 619 bp, Homo sapiens
cataacaaaaccacatgtactttctgaacctaaaataaaagttggaaaaaaaaaaataatacctrcttcataggtaatgggaggtttaaatgaattaatatgtaaaaactgttttgaacagctgctgccacatagtcaatgaatgttaattgctattattagtttagttatgctattgtagtaactaagtcttatttatatttgtaattgtctagaaataatacgttgtgtggcatagtagacaatatatttttgcttagtaaacatatgaacaaatgacagagaagtgaatagaggaggaaatcctgtcttaagtgatggatttcatgttagacttcatttatccttgctctcctccttttcagcaagagtgggccaaagctaaaccagttgaattattctagatgtatccctttcagtactggctgatatagttgattttctctgctgtttccttgttttccatttcattgacttttatgctcttatttttaatatttttttcttctgcttcatttaggcttaaattgtttttctttctcagtttcctaaggtgggagattaggttgttgattttaaatttatcttcgaatatatgcacttaatgctgtaagtttcc

SEQ ID NO: 910915 - DNA, 501 bp, Homo sapiens
cttctttgatatgcttcctcaaaagacacaaacaacatactcattttwaaaaatggaaatttaggccgggtgcagtggcacacacctgtaatcccagtactttgggaagctgagacaggcagatcacttgagtccaggagtttaagaccagcctggccaacatggcgacacctcatctctatttaaaaaaaaaaaaaggccaggagaggtggctcccgcctgtaatcccagcactttgggaggctgaggtgggtggatcacttgaggtcaggagcttgagaccagcctggccaacatagtgaaaccccaactctactgaaaatacaaaaattagccaggtgtggtggcaagcgcctataatctcaactactcaggaggctgaggcaggagaattgcttaaacccgggaggcagaggttgtagtgagccgagatcgcaccactgcactccagcctgggtgacagagtgagactctgtctcaaaagaaaaacgtggaaatgta

SEQ ID NO: 910916 - DNA, 662 bp, Homo sapiens
tggctttccattgccctcagcatagaatctcatacaatgtcccttgtgatttggcccctgctgacgtctccagactatctcttgtactccactgatccatgaccctcacctctgatgaggctagaacaaatcatatttcacttgttccctttgaaatgcctagccttccgttgacattatgagaggtgtaataactcaccttcttgccaagggctgccaggaggaagtgggatatgatttgctctggccacagcagagggcacaaatagtatctctggtgggagggagatggacatggtgcaatcttagaagcagctttggaaaatgctatgatgtgctatatttgggtacatttggtagaggaagggtgtattgtggagaagggatagcttcctggtgacccaaggagcaatctggccctaaaaggcctcagcaccttctcaggaatgtggttggaaggattcttgtgttgcgtgaggtgttcatatagataaaatattaaagatcctgcagagtatggattctaagatctgcaggtccctgacagctctaaaacatcacacaatttagaaaactaaacagacattctaacttatgamttattttccttagcagcttctaggtatttacctattccaaatctgcccttgatgcctggttca

SEQ ID NO: 910917 - DNA, 617 bp, Homo sapiens
catggttgtatgtttaattgtagcaaatgtataaacaatgttatgatgaagatcctggtagctaaatcattacacacatccatgattttttatttagaataaattgtgagaaaaattgctgcattaaaatggaagcagttgtgttttaaaataaattaaacatgcatttaccttagggtccagaaattccactcataagtatttacccaaaagacgtgaaacataattccacacaaagacttgtacacaagtgttcataacaagtttattctatccatgatggctaaagactggaaacaactcaaatattcatcaactgatgaatggataaacaaattgttacacagtggttcctccttatccactgtttcactttctgcagtttcagttacttgcagtcaacttcggtccaaaaatattaagtggaaaattccagaaataaacaatttccaagttttaaattgcatcctgttctgagtagtacgataaaatctcatgctggccaactytgtcctgcccaggatgtgaatcatttctttgtccagcgctgcacactatatacactgcctgtctgttagtcacttaatagccatcttggttatcagattggccctcat

SEQ ID NO: 910918 - DNA, 690 bp, Homo sapiens
gctttggttttaggatcagccttgcttacagcatgatatktagtatgtggttaaggttttcttttcggctcttagtatttattttttctcttttacatagagtttttagagcagttttaggctcaaagcaaaactgagcacaaagtacagagttcccatatgtcccctgtccaccttccaccacccctgcctctcccactataaacattccacaccagagtggtacatttgttacaagtgatgaacttaaattgacattattatcagtcaaagtccatagtttacagtaggactcactgttagtgtatattctatgggttttgacaaatatgtaatgacatatattcatcattatacatgtcacacacactagtttcactgctctaaaaatcctgtctcctgccccgtcccctcctcccccaacccctaacaagcactaatcattttactctctccatagttttgccttttccagaatgtcatgtagtcagaatcaaacaataatgtagccttttcagatctttcacttagtagtgtgcatttaaagttcctctatgttttttcttggcttcatagcttatttttttagcactgaataatattacattgtcaggttgtgccacagtttagttattcattcacctgctgaggaaggtgaacttggaaaacttgaagtttgcttccaagttt

SEQ ID NO: 910919 - DNA, 581 bp, Homo sapiens
ttggagaagtcctgaacacttgttaataatcttttattccactagaatgccagagatcgcaatcctagttgtctttgtgttcccacatattagataaaagccatttctycatttaaaaatattcaatatttcaaggccccatgtgcacttgaagagagataaatgaagatctcaggatgagatggaagaagtgaccaatggactgaggcaccagagaatgtgagagtgatgccagggaatgaatgatggagatataatggtcattggccctaagctcttattctctgtgtcttggtgtcctcatctctaaaatgagaatggtgccttctttttatgtttattatagagattagcaaaattatctagtttgaaattctcacaagtggaaactatcacatttatgatttcagctatcaaaaagttattctaaaagttatataacataggataatgcatattttttcttaaaggtagtttcctcttaacatttttgtgctactttcatgaagtagtatacataaatcacccagcactatatctagcatgtggtatagtatatacatatactttctttggaaatt

SEQ ID NO: 910920 - DNA, 600 bp, Homo sapiens
aagtatgtctaggcaacattttrtcaagggttctgcctatccagtctcaccaattctggatctcaggatggtaaccaggttcagatagcactgcttaataatgtggttcgattaaacagaagtggtttaattaaaactgactgagactttaaaaggagagtggatgctattgactatgtgatctctgttctattggccaccgtgatgtgcacaactgtttggtcatggactatgttgagaaacattttctctgattaataagagaagaaccaagtaggcttggagctagctgggggaccagctagagagatggaaatccttgatttcccggtgaacaagaacatttataaagacagaaatatgcagaatctgttgttgttgttgtttttgagtttgtggggactaaatcccagatctgtttaagcatttgtgagcactaatgcttttgtgagaatgaatttttctgaaggaacttacaaaagtgttgagtttcatgtttgggttaaagcaatcaagcatgaagacatatatatggatgaagggccaggatggagagagaacttctccaggccatctgagttccagatagatagaataagt

SEQ ID NO: 910921 - DNA, 611 bp, Homo sapiens
acagtggatgaaacagaggctcaaacatatgaaattacacaggtggagggtcagggagccaggactggagttgaagtatgtaaaccctaagctcaatgcaccttctgctgccctctactgggtgccttctggccaccctactctttgcctcatgatgatgtcagaattgaggcacaacagaattgatgtcacagtcttctttgtccatgaactttttgtttctgcccactgaatacagggtcttaaatcccacagtttttttggagtagattaggcatgttcaggtacatagtcccaaagaggatgatgctgtcataggacagcctggcctggcacttggggcccttgacttctcattctggttctgctactaatgttttatgtaaccttcagaaacccttcccctctctgagactcagtttccctatatggaaaattgccttaccaattccccttctaggtatctgttaattctgyagaaacactcaagctctgggggcacagatgcatgtgctaggagtgttcaatgcaacactgctcataatagtcaaatattggaaacaataattatccaccaaactattgtagcaaataaagacaatgaagggcaa

SEQ ID NO: 910922 - DNA, 615 bp, Homo sapiens
tttttatagttatctttgaaagaagcccatcctgtcgcatggacattgtatagcatgargaaactcttctcctggtagggtcagatgacaggggcattgctgcaacacctttggtttgttttgattagcagttaagggtgataacgttcagtttaaagtgagcctttttttctcatctgctgtaaaacattctatcctcattctttggttgtgggatttgatgcacactttcatttccaccttctcttctgcctttatgaatttgtagactttgattagggtgcctctcaagctacatcttcacagatggaggcagtttgatttttaaaatctgtttttttcacacaggtcagtccatcagtcatctacttcctgccaccccatcccagctatcatttctcaacactttgaacagttgtcttatcctctctgaagacttctcttaggctcctttccttgcccaaataagttgatgattcattcttctctgcaacatatgtcccttctcatatttttatcattgtttatgatcttttttccttaagtgaaacaaaattcttcaaagaaaaacacagtatctcatgaaggtctttacctctggaatttaggagacca

SEQ ID NO: 910923 - DNA, 634 bp, Homo sapiens
aaacagtgtaaattgagagctcagtttcttagcagtaacatgtatttagtgtgtttggaaggaaaacagcctaaattatggaaaagtgtgatgatcaagatctgacataaatacatcaacaaagactaaatgtagacacagacatcagaaatgcctttctcacatgctgcaggggtgtctcctttgcctggcagagctttagaaacacatcatgtgccttcagggggtgttatcttggctgtggtgcaggcaaagcctaagctgctctgatctttgggcctggagtcacctggaggaaggattttcagtatcatattccagattctgtacaaaggttttctgtctgacactagagggtttttggctgatgtgatgctgcagatttggtcagccttttggtgttggttcttgtgtttctgcgtgtgctcacataggactcctagcttctagtactgaaccttagttctgttcgcatctttttgtgacctctgttgatctgggagcagctttccttctttaaccaaggctctgctgtccatagattgctggtgctgaataagtccaatccactactgccctcratgctcccgttttggggttctctctccggccctgtgactttctgagtataaac

SEQ ID NO: 910924 - DNA, 628 bp, Homo sapiens
gtgccctggagcctgtctgccctcatgattgtytggagaggtgagaagaccaggagtagtaaaacagaccaaagatttcccaatttctcttggggaagtggctgggattggggatggtggccaatgggagcccaactttattggtaaaattctgattattttatgagaagaatgtatttttgtatcatttgtgtaattaaaaaattaagcaaatgaataatatgaacacttcagttcttaaacattgacaatgtatatactggatgtaataaaacgcactgaattgaaaaaactttgctttggtgatttgtaagagaggagttttccctgtcattttcttttgctttgatcaggggatactagataatatcaaaccggctttatccaaactgtatattgacaaataggagacttgtcttcccaatatctggtgtgacaaggaatctcaaagaattgatcagaatgcattccttcattggtactatgtggtgttaattattgtagcactcttgaaaattgtttggttattcttgtatgtttatgtttttcatattaactttaaaattgttttttccagttacttactaaaagactcatattgattttgattgaagcggcattaaactta

SEQ ID NO: 910925 - DNA, 655 bp, Homo sapiens
cactattatatcccctttctgtctcctaattttggttatttgtgttttctctcgattagacttctcagcaatttgttttgttggatacaacaacaaaaaatttcttgtgtttagaaaatctagtgtttttctgcatctgtggagattcattgtaaaatgtctttcttttttttggcagagacctgatttcacaggcaggcacattctctcattcctcaaagtgaacctctgcttttgaactcctgcatcttttcatgtgtctggtgatgttttcctgtttgttcacccttacaagcgaaggtgtgagcttgctcagagttggggtctgggctgccagagagcatcatggaggggccagaaaagggaagggatagttgagatgtgctgttatttttctttagcaggccagaaatttgacagcctgtgagggcagagagcttaggcagagctggtacggggagctagtacaaggagcttcatcaaccctgggagaggtttgtatcggcatttagtgttggctggaacgcacgcccccatctsttttcctgtcacaattttctccattaggagctagctgcctacatggtttgtcaggagccatgttctgccaaggataggctgggcgtaagcattgctgcaagctgcttactctgca

SEQ ID NO: 910926 - DNA, 637 bp, Homo sapiens
acaatcatatgaacaaaagttcaacaacataaccaatcgttagagaaatgctaatcaaaaccacaatgagatatcattcacaccagtcagaatggcttttattaaaaagtcaaaaaatagcagatgctggtgaggttgtggagaaaaaggaatgattacatattgttggtgagagtgtaaatcagttgaattattgtggaaattggtatggcgatttctcaaaaacctaaaagcagaaattccatttgacccagtaataccattactgagtatacacccaaaggaatataaattattctattataaagacacatgcatgcatatgttcattgcagcactattaacaatagcaaaaacatgaaattaacccaaatttcaatcaatgatagactgaataaagaaaatgtggtatatatacaccatgaatactatggaaccataaaaaggaacaagatcatatcctttgcatgatctgatggagatcatcatggatggagctagaagccattatcttcagcatactaacacaggaacagaaaaccaaacaccacaygttctcacctataagtgggagctgatggatgagaacacatggacacatggggggaacaacatgcactgaggcctgttggcaggg

SEQ ID NO: 910927 - DNA, 649 bp, Homo sapiens
ggtcacaaactcctgggtcactgctttttcaccattttaatccaatatacactyaaggtgcatttagaaagaaggaaagtaaaagccagtatgcatagcattctgtgaggcctctgtgttttaattctccctttaattataaccttaagttatagctctccagctcatttcatttagcagaagcttgatgaccaattcagatgaaatcctttcataagtaagatcatggatgttggcttacactgaaatatcttcccccaccccccgccaccctattaaattctttatttcactccaaggcatactgactttactttgccccctttttatggatgcaaaatactaagtagtcttgattgaatcttagaatagccaggcacagttttaagggccttacatgcatgacttcacttatttataccaataacacccctgaagttgttgtgaaaattaagtgcttagaaagagaaagtgttcagtaagaaggacatgctcaagaaacaatgaccattattaaatcttctcagatgccttgtgaattgcttattgttatcattcccgttttacagatgagaaaatagatgttaaacaactccccaaagtcacccatgtggcacagtcaaccttggaacccagacactctggcttt

SEQ ID NO: 910928 - DNA, 703 bp, Homo sapiens
cagctgaggtggggcatcgatggctgaagtccagacaccattctccttcccaaatcttgtgtcagctcaaaagaagggacacatctttgtaattcattcaccaagagggtactcacataacacacgctaggctgtgaagtgctcagggcccttctggtatgcacttcacggcctggagtggcacagttctgtcacctgcaacctgccctaaaaccagctcctggactctgctgttaggagccatgggagcatcaaggaattgtcaaagaagcccaggtaggaagctggttccattccttaatcacatgttgaagaagtgggtgctaatgcttctctatgtgaccgattgaacctgaccatataaccttgattagatattgttttcctggccaacattcctacaagttgccacattgctatctttccaactcctgttcattctgtcattttgtgtgtttaatgcacattgtttcctggttaaaccagttttcagtgttgatatttaatacatttacctttaaaaaaaaaaaacctacagggagtttccatttgtacgatgaaaagtcaaacaaataggacccataactgccactcaaatgataacatggccctyttgttaagacgtacaatagcataggccttctttttcatcttctttctaaagtcttcctgcaccctctcagcaacttctcataaccaagag

SEQ ID NO: 910929 - DNA, 662 bp, Homo sapiens
atggttaggagcaaggtttggggagtaggaggtaggaaaggcatcctgagggaaataataattgagctgatacatgagggttaaaaaaggattatacawgtatagtgtggcaaggactgggctatcaagatgggaaaatatatgcctgaagactgggggcaagaagggatttaaagagaaaagggaactgagaatagagatcagagaaaaagaaggaaaaacaaggtgttgcagaagccaagggatgagactgtatgagaaggcaagagtggaccacagtgtcaatgttgccaagaggtcaaataagatgagagcaaagagtgtccattggattcaacagtggagaaatcactaatgactgcactaaaagccctttgagtcagtgatgtgaacaaaggctaggtcacagtgttgagagaagcaaatggactctgaggcactggagactggaactgtagacaaatcatggaaatttaaaacatatcattattttttcagattcagggggtccatgtgcaggtttgttatggatagattgcataatgctgagatttaggcttccattgatttgtcaccaaataatgaacataatattcaatgggtagtttttcaaatcttaccccactccctccttccccactctagtagtccccagtgtctct

SEQ ID NO: 910930 - DNA, 548 bp, Homo sapiens
gtgtaataattttcatgactgcgcttgtacagacgatttcaccattggctgcagttctgattttaagttsatttgctcgttttcatgttgaagttgacatttatatgtagttgtattaaataacaaagaattttagtaaatgattcctttcttactccaaagcaaaaaactcaaaaactttgacctcctccataagaaaaatgtagcaattcccaaattatgcagaaatgtctagaaattatcaaatgtaaaatttaactctatattctagaacactttctcagaacaaaaagatgtgttacacggtggaaactaaaggaattttaagatgagaaactataggatattgtttgaattcatgtctgaatatttggacaagatgaaagttttctgagcattgtggatggattactatgttgagaaatgcataacaatgatgtgtaaggcagaacagtattctagtaggacggtagaacattcttgttaccttaacaagttcccctctatctttatagttagtccctctctgttaacacccaagtcctggc

SEQ ID NO: 910931 - DNA, 597 bp, Homo sapiens
tctgccattttgatttaaggttttctgctcattccaactcaacagtgagctctttgagggcagaaattgtgtcttattcatttttcttgttatgccctaaaaatgtattgtkataatatataagtaacgtacaatttaccattttcacctcttgaagtgtatagctcagtggcgttaagtgcattcacactgttgtgcaaccattatcaccattcatctccagaactttctcatcatcccaggcaaactctgtatccattacacaatagctctccatttcctcctgccctcagcctcaggaaacctcccatctactttctctttctacgcgtttaactactcatatagatggaatcatccaacatttttccttttgtgcctggcttatttcacttgacataatgttttcaaggttcttttatgttttcttatgcgtttttatatctctctatctttgatagcacccaatacatagaagacaatgaatgtttttgtgagtgaaaacataagaccagaaagaaataggatgtcatattctagggacactcaagacactttcttgaggacagaggcactgtagcttggaatttggaagat

SEQ ID NO: 910932 - DNA, 597 bp, Homo sapiens
tctgccattttgatttaaggttttctgctcattccaactcaacagtgagctctttgagggcagaaattgtgtcttattcatttttcttgttatgccctaaaaatgtattgtgwtaatatataagtaacgtacaatttaccattttcacctcttgaagtgtatagctcagtggcgttaagtgcattcacactgttgtgcaaccattatcaccattcatctccagaactttctcatcatcccaggcaaactctgtatccattacacaatagctctccatttcctcctgccctcagcctcaggaaacctcccatctactttctctttctacgcgtttaactactcatatagatggaatcatccaacatttttccttttgtgcctggcttatttcacttgacataatgttttcaaggttcttttatgttttcttatgcgtttttatatctctctatctttgatagcacccaatacatagaagacaatgaatgtttttgtgagtgaaaacataagaccagaaagaaataggatgtcatattctagggacactcaagacactttcttgaggacagaggcactgtagcttggaatttggaagat

SEQ ID NO: 910933 - DNA, 741 bp, Homo sapiens
taaaatggggcaataagaaccaaaaagcaggtactgtccctatgtaagtagacttcctagtcctggccaaaacaaaamcaaaaaaaaaacaaagcaacacaaaacaaaaacaatgtgtgaagagcatcttaccgttcattgctttggatgatttgtgcaaatctagttaatgggggtggatctgatcagtctttgtaggaagtcagtattggcatatgtctggcttctgaattttctaaaaatataattatttatttttaaatccattcaatcaacactgaatttactaatcaactactaaataagtaaaagatcctatagtagatccttcaagaaatggaaattgagacattaggtcactataaaccccaacccttgtaatctttttgtggcaaccttaggaaacttggaatgctttttacactctgataaaggtttaattgtaatcatagccccagtgttgcaaaatgagtcagaagatacaaagtatctcataggataatattatagctgtaggtacttcaaatggacaagtataacacattatgactgctaatatggatgcattgggaggaaaataagccctaagaagcaatatgcagaaaagctatgattgctggagacagatagatccaagaacctaggtaatttttcagcaaactgtggttccactttcgcctctttcttgacattgactgtgtttttaacagggaaaaagttatctgaaatttttgatagagt

SEQ ID NO: 910934 - DNA, 604 bp, Homo sapiens
ctctgaatccctctgaattctatgaagtaataagatatctatgatggwacgcaaagtaattcctgacagagaaaatcagtgatcctctgttgtgtatcctgagtttaaaatcaactgatttttctaagattcctggttaggaaagatgggttcattacgaaaattaaagttaaaaggtagcagatcctgttaggagagaaatgcctacaagactcaccttgttttaatgaaaatattttctgtttgacagctcaggttgagaagaaaatgataattgtataaacaaagaagaaataagtgtgagtgtacattcacatccattttctaatgcttatagtacagtcttgtggctttaaaataatgagcttaatgggctttgtcatcaaagaaaacattttttactcagctttcccactgctataaaatataattattttgtgataaggtataaatataactttgacctatattagtgaaggctaaaaaaaaatctaagatcaccatagaagtatgtattcaatttccctactttccacatgaatctttctccttgaaatttttagtggacagagtagaatataaattctaaaatcataatgtttaa

SEQ ID NO: 910935 - DNA, 625 bp, Homo sapiens
aaatgtttttccatttgtttgtgttttctctgattccttcaagcagtgttttctaattctcattgtagagatttttcacctccctggttagctgtattcctaagtattttttttctatgtgtggcaattgtgaatgggatttaagtagtgcattttgaattactgttttctggtgctaacaggtaaggacaatattgtctcaaatactcaacttagtttccttcaaacaactatccttttctattcatatttacttattttatacatttttaacaaagctatgtagtcacagcaacttgacataaaggtgtagagttagtggaaacagaagaacataggtttatgggaaagtaaggcatcatggtttaatgtctcgtggtttcttagctggtgttcagtgaggaacagataggatgaacttctttgttaaatgattaagtgaatgttacttaagagaggatctactgtataaaatgaaaataaaatcaactatattcattcrttctaatacctgattagatatgaaatctcagatgtgattcttaaccaataatttgaggaagttctaaagtggggttggctattatcctgaataaaatctacttatttagatataaactgtctg

SEQ ID NO: 910936 - DNA, 600 bp, Homo sapiens
ataagattaaaaaatcctattgttgtctaagctagggtttggcaacttttcataaacattgtgccmtttacaggccatattttctctgtagcaactcctcaactctgccatggcagcataaaagcagccatagacaagacataaaggagtggctgtgtaccaataaaacattgtcttagtccattcgggctgctataacaaaatagcatccatagactggatggcttataaacaccaaaaatttatttgtcacagttctggaggctgagaagttcaaaatcaaggtactagcagacttgtttcctggtgagggcccaattcctagctcataaacagctagctctctttttgctatagcctcacatggcagaaggggtgaggatctctctaaggtctcttctataagggcactaatcctgttcatgagggctccaccttcaagacctaatcagctcccaaagccccacctactaataccatcatcttggatttcaacatatgaattttgggaggcaataaacattcagtacattgaaaacaacatttacacaacaagcaacagcctggatttgacctgtgggttgtggtttgctgaacact

SEQ ID NO: 910937 - DNA, 600 bp, Homo sapiens
ataagattaaaaaatcctattgttgtctaagctagggtttggcaacttttcataaacattgtgccctttacaggccatattttctctgtagcaactcctcaactctgccatggcagcataaaagcagccataracaagacataaaggagtggctgtgtaccaataaaacattgtcttagtccattcgggctgctataacaaaatagcatccatagactggatggcttataaacaccaaaaatttatttgtcacagttctggaggctgagaagttcaaaatcaaggtactagcagacttgtttcctggtgagggcccaattcctagctcataaacagctagctctctttttgctatagcctcacatggcagaaggggtgaggatctctctaaggtctcttctataagggcactaatcctgttcatgagggctccaccttcaagacctaatcagctcccaaagccccacctactaataccatcatcttggatttcaacatatgaattttgggaggcaataaacattcagtacattgaaaacaacatttacacaacaagcaacagcctggatttgacctgtgggttgtggtttgctgaacact

SEQ ID NO: 910938 - DNA, 577 bp, Homo sapiens
tggagatgattgtgagtcttccaattggagttgtcaagctgtagttgaatatttgattttggagctragaagaaaggtttgggctggagataaaatgatattttaagtcacaggaattgatgagaaagctattgagagaagtatagtgagcgggggcatcaggaaaaaaaaataaaatgaaatgacaaaaccaaaagaaactgagagagtgaggtaaaaaatgtcagagaaaaaccatgagaggatagtatcctggaagctgagggaagataatatttcaagaaataaagcgatttaccctgctgaatattgccgaaaggcagataaaatcagaacaaaaaagaagtctacttcttaacagcagagacatgatcggcaaccttggaataaatagcttcacaagggggtaggaaggaaagatgtagcccaaactggagtggaaagaggggtagatgtgatgtgtgaaaaaggagatagcaggaataaacacttcttgaaaagttacacagtaaaggggaatagaaaaaaaaggtgatatctggaggggaatacgagactcagaagattcttcttgaat

SEQ ID NO: 910939 - DNA, 606 bp, Homo sapiens
aaactcttgtagtcattgtatctacaggcttcagtatttgtttctccctaagaattaatttttttttaaagcttgaaaggmttttcccctttccaaagacactttgaaagagctcgcacagtgtatgtagcctaatagagaacagtgatcctggtataaatgtaaaaccaaaatcaaaatcaaaacatgcttttgaatgtaatatagttctaatgaaactgtaagccataaagttgaaaactcctctgtttatggaacatatcttttgcaatgaagagaaattctagatcttgggaagatctttgaaaggtatcaaatttaaagaccctacctaagcttacctcagaaacttcacaacataatctttttcaaggttttgatccaaaatcaggtaaacttttgtggtagaaattttgtggaaactgaaaaaggcaaggaaaatgaaaagcaggtaggtgctaatcaagcaccattgtaattgaaactcacctttactcctgaaattctcaggtatgcacacttgtgggcataaccacacagaatacttatgtgaacacatatggagtgagattgttttaaagaaggatacaagtaaaacccaaacat

SEQ ID NO: 910940 - DNA, 643 bp, Homo sapiens
aaaaggcctatatgacattgtagaagtaaggacagttgatccacagtctgctgcctgtccttcgatgtggtattggctcatatcccctgagagatagtaacctgatcttgtacatggcacactgttgtcatctgctactgatacctgacgacaatcaactcttgctttctttcttggcttgatcagggcctaatggacctaccacgctgatttagccttttctattctcttgtggccactacaagcccctcagagtcccttccatgtgatctgtgtggcataaggcctacctgtctaccttacggcctctgcaacaggatcacttcaccactttccccacacagccatcatattcagcccaatgacaatcccctagctcttaaagttcacaccacctagaaatcacatttgacgcagtgtgcaaactgaactatgtcttgatattacatctgtactcctccttcctgactatgctagtgtatgtgggactgctctacacagcagtcatgttcccaagttccraacagtgggcagggcaaaagactctatttcctctttctgaagcaaacctggaaagagcagtttagaacatacttatgactattcccctttctctctctctctctctatatatatatccatt

SEQ ID NO: 910941 - DNA, 623 bp, Homo sapiens
aaattaagttctgaattaactaatgaaaagttaaaaataatagttacaaataataaaagttaataaaaaataaaaagtgaaaaaaagttaaaagcttggcagtgaatggtgttcagatagatgcagatgttgtatatctcagcctagattttcttgccttccagagttcttgctggggacacccgatggcaatgaaactgtctatgcagtgtacacttcatcaagcctcatttgggaagctggcctctttctaactactgtctctttatacgtagtcccatatcatttcagaagcacttcaactaacaatgcctcagtctatatttaaaagaatatttataaacagtgagctttcctggttattgaaccagactgaacatcatcaaaggctaggtgtttctgaacaatacctgaccagagtgtatggcattctggaactccttttctcagactatcaaatacttcttctgtagccaagttccaatttttgaaaaaggtaaagacaaagggtgatacgcagtagaggcactcccartagttgacactcaatcatctttttccaaagcccctcattctctattcctttcagggcttataatctgtcactttttgggattcatttc

SEQ ID NO: 910942 - DNA, 566 bp, Homo sapiens
tatatggagatgactatagactgtgcatgaagagttgaagaaatctgagactagaccccaagtctatgtttgccaaaatatgttccaatttgtcaacactcaactcactttcctaacaacgagtcttaggttttaaatattatatgactaaactctaccgcacattcctattttctaaaagtgtggctttggaatcagcctgggtttaactcacaacactgccatgataccttggaagagtaccttacaaattgatgatctactctgtaaaatggaatctctcctgtatggattaagatataatgtataaaacagacaacaaagtgcctgatacatggaggtggccgttgctgtaaaattgctcgtatattgctataaaatacaacatccaagaatgtcagtcattgttcaaactgatggtgctatctaatttcaaactatacatattatacattcaacacacacatacccatatatatatatgcacaacatatattgatacacattttttttttyttttttagagacaggatcttactctgtcactcaagctggagagcactggt

SEQ ID NO: 910943 - DNA, 443 bp, Homo sapiens
agatccccaacaggtggtatgtattaagaacacttcagtttttctaatgtagtgtaatttcatttgtgcctacaaacaggtgaagcctcgtaatctcataggcrttgagattgtgtcaattttcatattacctaacaagggctgaaagcaacctagccaaaaaacaactaaagagctaaacaacctgaaatggttagactttgtgtccccacccaaatctcatcttgaattataatccccataatccccatgtgtcaaggaagaggctaggtggaggtaattggatcatgagggtggtttcccccatgctatcctcgtgagactgaatgagttctcatgagatctgattgttttataagtatttggtagttcctcctgagttcattctccttcctgccaccctgtgaagaaggtgtcttgcttctccttcaccttcggccatg

SEQ ID NO: 910944 - DNA, 642 bp, Homo sapiens
tgaaaaatacataatcaaaatgaaaaattcacttgaagtgctcaatgatagtttgtggtgacaaaagagacaatcagcaaatttgatatagattaatagagattatacagtcttaagagcagagagaggatgggtacagtggctcttgcctgtaatcccagcactttggggggctcaggtgggtgcattgatgaagtttaggagttcgagaccagtctggacaacatggcaaaacatacaaaaaatacaaaatttacctgggcatcatggcccacacctgtagtcccagccactcatgaggttgaggtgggaggatctctagagcctggcaggaggcagagattgtagtgagccgagattgtgtcactgtactccagcctggttgaacagaatgagaccctgtctgaaaaaacaacaacaacaaaatgaaatttccttaaaaaaaaaaaccagaaaaaagaataaagaaaaaataaaacctcgcaaaaatgtggggcattataaattgcaccaatatttgagtaacagaaggagaagagagatgaaggggcaagaaaaartatttgtaaaaactaatgttttaaaatttcactagggggctcagcagtaggtttgatcaggcagaaaaatcagcaaactggt

SEQ ID NO: 910945 - DNA, 617 bp, Homo sapiens
catgcttccagtacagcctgcagaactgtgtgtcaattaaatctcttttctttataaactacccattctcaggtagytctgtgtagcaacagactaatacagtcattgatacaaaaacctgcacaaatcttaagtatggaatttaataaattatcacaaagtgtttattactttttcccattaaaaaaattaattaggcagattttcaaacatacacaaaaacagagagtaatataatgaataaggtaatattcactataagtaacataatgaatcctcatgtgcccaaaacccattttcttttttttattattattatactttaagttctgggatacatgtgcagaacatgaaggtttgttgcataggaatacatgtgccatggcgccaaaatccattttcaacaattgtcaacacatgagcaatctagtttcatgtacactcccactcaccaccctgccactggattattttgaagcaaatcccagacatcatattgttccatctataaatacttcaaatacatctctaaaaacaatgttttctgctgggcagggtggctcatgccggtaatcctagcactttgggaggtcaaggcaggcaggttgcttgaggtc

SEQ ID NO: 910946 - DNA, 609 bp, Homo sapiens
ataattagaagatcaaaggtttttatcttagggatatggaggaagtcttatctcctytggcttctactgttctagcagaggccaagtatgactgactttctttcttcagctgtgaggacatataaataggaacatatcctcacacacataaaaaataatgctgcaattcaaaagggtggtgctatcttttcttgggtggaagaaaaaaattagaagtattctcattcctattattgacatgattcaagaagttgtcacaggtataaaaattgagcatcagttgtgaaaaatgaatattctgaaatcaagaaagattttataagaattttcaaaaatgaatacttaaaaggaggcagtgaaaagttgattgagtgctctaaaaactgtttcagatgtttgaaactgaacatttctccaagaaccaaggaaattaaaaaattggaattcttgagagacaaaaaagtaaaaattaaatgcaaatttagaaaaaaaatccacacgtgagtgcaaatttaaaacaaaaaatgcacacataaaatgcagagtagccgaacagaaagaataagaataagaaagaaataaaagaaaattgttctgaactgacaagtc

SEQ ID NO: 910947 - DNA, 609 bp, Homo sapiens
ataattagaagatcaaaggtttttatcttagggatatggaggaagtcttatctcctttggcttctactgttctagcagaggccaagtatgactgactttctttcttcagctrtgaggacatataaataggaacatatcctcacacacataaaaaataatgctgcaattcaaaagggtggtgctatcttttcttgggtggaagaaaaaaattagaagtattctcattcctattattgacatgattcaagaagttgtcacaggtataaaaattgagcatcagttgtgaaaaatgaatattctgaaatcaagaaagattttataagaattttcaaaaatgaatacttaaaaggaggcagtgaaaagttgattgagtgctctaaaaactgtttcagatgtttgaaactgaacatttctccaagaaccaaggaaattaaaaaattggaattcttgagagacaaaaaagtaaaaattaaatgcaaatttagaaaaaaaatccacacgtgagtgcaaatttaaaacaaaaaatgcacacataaaatgcagagtagccgaacagaaagaataagaataagaaagaaataaaagaaaattgttctgaactgacaagtc

SEQ ID NO: 910948 - DNA, 445 bp, Homo sapiens
gtccccaagcattcttctcctttatataaatttgggggcttccactgataaaaagccatggcttgaacatagggcmaaggtaaatagaagattgcctactgaccaagtggctgtagtctcttgtttgccattggcccttagctggagtttctgacatgattctacttaatcaacaagaagctcccacctccctagtgccttgacttagccagcagatgaaatcaattagaagtggagtgctaaataagtactagagtggttttcaaggaagcttcagggtttgttttccaaaagttccatttaccagttcataatcttcactcctcacaataatgggcaaataccaagctgcacactcaagagagattaaggcaaatctttggttaagaacacctgagcactgatgactaaagagtagacaatttcagttatgtaagataaataa

SEQ ID NO: 910949 - DNA, 587 bp, Homo sapiens
tacgttcctctaagtaaaatgaaacatggtcagggggcggttccaagatggctgaacaggaacagctccagtctacagctcccagcgtgagcgacgcagaagaygggtgatttctgcatttccaactgaggtactgggttcatctccatggggagtgtcggaaagtggctgcaggacagtgggtgcagcacactgagcatgagccaaagcagggcgaggcatcgcctcacccgggaagcgtaaggggtcagagaattccctttcctagccaagggaaggggtgacaaatggcacctggaaaatcgagtcactcccaccccaatactgcacttttccaacggtcttagcaaacggcacaccaggagattttcaacccagaatttcatatccagccaaactaagcttcctaagtgaaggagaaataaaatactttacagacaagcaaatgctgagagattttctcaacaccaggcctgccctacaagagctcctgaagggaacactaaacatggaaaggaacaaccggtaccagccactgcaaaaatatgccaaattgtaaagaccatcgatgctaggaagaaactgca

SEQ ID NO: 910950 - DNA, 654 bp, Homo sapiens
gtattcattatctattgctgcataataagttaccataagcattgtagcttaaaacaacatgcattattatctcacagtttctgtgggctagaggtctaggtgtagcttatctgaatcctctgtttaggtctcacagactgtaatcaaggtgttgggtaggctgtgttctcatttggaagatcaactggagaagaatctgcttccaagctcacttaggttgttgacagaattgatttccagaaataaagtgggcaatatcctaaaaaagatctgtctctctcctaaacttcagtaggaatttttaacagtcaacatcttaatgtaagtcagaggtaggggataaaatcatatccctattcttctaaatagcaggaaaggcatagaaagaaagaggaattaatatatttttccatcattctcctttcctttaccaaaactggtaaaggagttcccctgaagaatttgactcttaccatcttgagggaagaagatgtgatttcaaagttcccattggttctttgtatagctaaaggtagaggcctctgcaaaggccatgtctttttacagagctctttagtaagcttttggccgaaaaaaawaaatgggtcaatgaactagtctggaaagggaaaggagttgtgtaaagctaaatta

SEQ ID NO: 910951 - DNA, 607 bp, Homo sapiens
gggtaacagagtgagaccctgtctattaaaaaaaaaaaaaggactaatgtgaatgtttattgaatgttttatttttgtgtcaaaaatacgggtccttgtgagaacatcctgagtgctaagccaataacaacactatttttgagaagagagagaaaatgattttgcagcagtgtagaaagatgataaaacaaaaggaaaggtgatctgcgaatttggccccattttctctcctcttctgtggccagagctttcaacttcgtggagctggggctttcctgtgtttgctgaacagaggagctgaggctctggacctggtggggtggtgagaagggaggggcgttgtccgtaataggatgattcctgcttctcacgcgtccctccctagggaagttgctgggactgaagcctgattgttgctggcctttttcccctgcccctcccccttgtttttgttttaagctctctgtacccgttggcaggtagaggacyactcaaggccttggaagcagtgtgctttaatggaataagtgcaggcttaggagccagtcagactggtgttcatatctgaactctactacaagtaactgtgggtctgggataagtactg

SEQ ID NO: 910952 - DNA, 584 bp, Homo sapiens
aacacccaagaatgatcaataaatactaattaaaaaaaaaacatacaaaataacaatacatgctgctcaagaatagaaacttatatagttaatgtataggaatggaatgcttaatattccatttagaatagtaggtatcttcagagggaggagaaagaggcaacagagaagagacagctggggagcttcaactgtctaggtaatgtttaagctcttacattattatattcttctttttttttttgagacaaggtctcgctgtcacccaggctagagtgcagtggcacgatcatgactaactgcagcctccatctcctgggctcgagtgatactcccacctcagcctcccctattatattattctttatgctgcttgtatgttaaatatttgatactatattaaaaattactgccgggtgtagtggctcatgcctgtaatcccagcactttgggaggctgaggtgatactaaaaatacaaaaaaaaaattagctgggygttgtggtgcatgcctgtaatcccagctactcaggaggctgaggtacaagaatcactagcatctgggaggcggaggttgcagcgagc

SEQ ID NO: 910953 - DNA, 580 bp, Homo sapiens
tattctagtacttttgttattttrttttgttacattactctctgatcctttcagaatttgttctggtgtaatgtaagatagggattcaacttttttctgtatggccacccagttgtcttagcaccatttattgtatagctcatcttttctatacacatatgaaatgccacttttatcatataccaaaatttcatttattttttgtgtctgtaactttatattttgcttcttaaatttacatctctattcatgcagtagcttcatatcattttaattactgaggctttatggtgttttatgtggtagagttactcattcttcattacacttttttcagaattttcctggctgctcttgtttgtttctttttccatataaactttagaatgagtttattttgttctgagaaaaaaaaaaagtattgacattcagggtgccattacatttacaaattagctgtgaaaggatgaatgtttttatggtacattttcttatccaagaacatagtacgcatttctatttatgtattttatgtcccttagaagcatcttaaaagctttcttcatatggttcttgcata

SEQ ID NO: 910954 - DNA, 595 bp, Homo sapiens
agatgggatctaaactcaaagactctgatccataaatttttggagctgtaagtctgaggtcaaaagacatgaatcttaggaaacaaatttccttttctccagggcttcctgtctctttcctcatccagttataagggaaaaaaaatattacagtagaagaaaaaatggtcagtgcaagctgatcttggctaaggttaaaggagggccatacaataatggtctgcctcttcccatttttatttagcttcccaatagaataatgatcatgctgtggcatgttttggaataattatatctggcagaggcatcactcaggttttgcctgtatgtaaatggaggactgtttccttgtgagtagatgaccatgcctcccaatttacctggcactgtctcaggttgtgcccctttcttctcaaaataccatgatttggatgaaaatataaattgccaccctgttaatgagccactgttttagagatggctccctcccagaaggaaagctacctaaaataccctcagatggtattagacattaaygaaaaataaactttaaatattttctagtcacattaaaatagctaaagtaaaaaaagtg

SEQ ID NO: 910955 - DNA, 613 bp, Homo sapiens
caagcaatgctgcaatgtataatttgtacatatgtattttcatattgtcagaagtgcatcttcagggtaaaatctagaattgtaattactgagtcaaaggtaaatgtatatgtagtcttattaatgttgctaaattgacctccagaagggttgtgccaatttgcatccctattattaatacattgagattggctgtttctcacaggctcaccaatagactgcggtgtcatgctgtttaatttttactaatcttttaggtgaaaaataatatcttagtgctgttttattttgcatttccttagtgagtttgaatatctttttatacattttagagcaagttttatatatttttggtaaattgtcagttgatattctttctcaacgtgacaacttcataatttatgacaatttttgcttggctttttttcaatgttatgtagtcaaatttatcaatcccttcattcacttcccctgaattttaagacatacttgcaataactttccctgtgccaaggttaaagaagaatttattgacttktttagtatttgtagggtctcattttctatatttagacctctgatcgatttaaaatttattgatatggtgagaagt

SEQ ID NO: 910956 - DNA, 602 bp, Homo sapiens
ttttattcttcttcacttttgaagcttastttggctggatatgaaattatgggttgaaaattcttttctttaaaaatgttgaatattggcacccactcttttcttgcttgtagggtttctgcagagagagccactgttagtctgatgggcttctctttgtgggtaacctgaccactctctctggctgcccttaacatttttcctttattttaacctttgtggatatgacgattatgtgtcttggggttgctcttctcaaggagtaactttgtggtgttctctgtatttcctgaatttgaatgttggcctgccttgctaggttggggaagttctcctggataatatcctgaagagtgttttccaacttgcttccattctcccagtcagtttcaggtacaccaatcaaatgtagatttggtctttttacatagtcctatatttcttggaggctttgttagtttcttttcactctttttttctctaatcttgtcttgtcactttatttcattgagttgaatttcaatctctgatatcctttcttccgcttgattgattcggctgttgatatttgtatatgcttcacaaagctctcatgctgtgtt

SEQ ID NO: 910957 - DNA, 531 bp, Homo sapiens
ttgacgagattttatttcattttattttatgtttttatttataattattatagacacataatagtacatattaatggtatatgtgtgatattttatacaagcatatgttgtgtaatgatcaattcagggtaattggggtatccatcacctcaaatttttttttctttgtattaggaatattccaatttcaatctttcaattgttttgacatatgcaataatttaatgttaatgattgtcaccctattgtgctaccaaacactagatcttgttatttctaactgtatttttgtacccattaaccatcccctcattattcccctctcctcattacccttcctatcctctgagaactatcattctactctctatctttaagtgttaaattgtatttttttacctactatacatgagtgaaaacatgcaatgtcctccagttctatctatgttttygcaaatgacagaattttattatcttatggccgaataatattccattgtgtatatgtaccacatgaccactaaagagaac

SEQ ID NO: 910958 - DNA, 358 bp, Homo sapiens
agccatttcttcagatggtgcaagtcccaagttttggtagctttcatgtggtttgggtctgcaggggtgccgaaagcaagacttgaggtttgggagtctatgcctagatttcagagagtgtatggragtgcctggatatacaggcagaagtctgctgcccaggtgcagacctcatggagaactctactagggccatgtggagggaaaatgtggggtcaaagcccacacacagagtccccactgcggaactacctagtggagctgtgagaagagggccattgttctccagactcaagaattgtagatccactgacaacttgtaccacatacctataaaagttgcaggcactcaatgcca

SEQ ID NO: 910959 - DNA, 358 bp, Homo sapiens
agccatttcttcagatggtgcaagtcccaagttttggtagctttcatgtggtttgggtctgcaggggtgccgaaagcaagacttgaggtttgggagtctatgcctagatttcagagagtgtatgggagtgcctggatatacaggcagaagtctgctgcccaggtgcagacctcatggagaactctactagggccatgtggagggaaaatgtggggtcaaagcccacacacagagtccccactgcggaactacctaktggagctgtgagaagagggccattgttctccagactcaagaattgtagatccactgacaacttgtaccacatacctataaaagttgcaggcactcaatgcca

SEQ ID NO: 910960 - DNA, 630 bp, Homo sapiens
aaaacatatgatattcaacttttacaaaagagtacatataatattctttatctgtcaatgtaaaaatggtcagaarcttttcagatatatttgattttcctttccatgaaggcttcatttttgtaaggatttttaaaaattaatagagaaaaaaaccccataaggactctcaaaccagtggtctaaaatggaattaattttgtccccatcaattgctatttctttgcaaatatttcttatcttggtgaatgatgaaccatttagcctctgacccaagccataaacctgttagttgtcccccttagcttttcttttcccacacccctccatcatcttgcattctgtctaattgattcagtaaatctggttgattctacttcttgtgtatttttattatttttcctttcttctccactggaaacttttatgactctagtttatactctcatctaggtcactgcctatgtccctaagttgtatccccagtgtctaatgccatcacactccctcctttaccctcaccccaggctacacttgaacaggtagagcagggaatgccatgtagacctcatgtagccaagttggaggccctttccagttcatccccttgactttattttaaataataca

SEQ ID NO: 910961 - DNA, 598 bp, Homo sapiens
ttgttaccagttgcggaggcagcgcatagcacaacgtagtacctggaacctgacggcacctagcatgtttcaacagttagcgcccgcatcaccccaagggattaaatttggcattctttctcttgagactcaagtcctggcagagctgttgatcctctcacaagattctgtcatgtatgtaaagtacactttggaatcttaaattttagagccgagaggtgccttatagaaaatctgtttcatccctctcgttttacagagaagacaccaggcctgaagagcgtgatgtagctggagctagctacacctcttgatagctaagactccaaggctccagacaccttggtgattgcactctccaccatgccaggaccgcagtgccagtttaccccactcacctgtagagaatgtatccggcggaggtcattatatatacttggcttgattcaggttatggagaagtcaggcatggccactgtgtgggtttgatggtatttctaggtgaggtaggccgcctatggtgtatttttggaactaaaagcctacaccccccagccacccctgaaartttcattgctgttctctattatttgcagca

SEQ ID NO: 910962 - DNA, 570 bp, Homo sapiens
cctgtgtcatgatgcagcctataatatttagggcccaggtgtttggcgcatctgatgctaacactttctctgaacttttcgtgtttcataatcacccacagtcaccccagagcaccagatctgccttcaaactgaacatgttcttgccttcagggtgaagttgggctaaaggcactcaaaggcctactttgccccaaatccttccctgcactccccaatcctagcctctttgtctactttacctccaaagccccatttgagcctctcttttagattaaaacgctgtctcttcaagaagcaaataagcacctgttttccattctgaatttcagcattagaaagggcctcaaataccaactaaaccacttatccacttctcgtagccgcttgacatcatctccacctgttaccatctaacccagggccaaagcatgctcccttgtgaaaaaayattaagttaccagctggcacaaattcaactccccccaacccccagtcccaaggggacactttcttttattaatcctgacccctttaccatattttatagctgtagcccagggttagctc

SEQ ID NO: 910963 - DNA, 453 bp, Homo sapiens
ttacataagactcaactcaaatgtcatcttctcaaagaagtctttcctcaccatctggtcgaaaatgtttctcctaccccttctcctagtcacagttttcttcatgacgcacatctgaaattatcctatttattacattgtttgctcatgtatcccttgcttctcccgccacccacccatcaccactaccacctttaccctcctaaaatgtaaagcacatgaaagcaaggctattttttgccctgtttaattcctagaacatgtctcacatacaggaggcactcaatacatttttgttatataattatcagtacaggttaactctgaagaaactttatctgttgcattatagaacactgattataaaagggwttttaaaaatattttgtaacattcaattccttatcatgtacttttttcttttttaattgaattatgacttacattaaatgc

SEQ ID NO: 910964 - DNA, 643 bp, Homo sapiens
tggttgatgttctcttcatgaagtggaaataataggagcattataaagttattagagtctgtcaatactcccatacaggaaacatgtctttttataattgaatacaataagatagtctaccaatgtacaagaaaatttcttataattcagtatataccacaatatagtcaaggctttaaaaagtttctctcattttgactttaatagaaaagtattctaagagcagtactcaaagtattcaacccactattgggctaagattagttgttcatgttagcaatgtatatttttgaagtatccaatctcaatgcttgaccaaatgagatgaagtccttgttttaatttggtttttcacaacttctaatttcctaagattaaatgaggcaaattgattttttctttgccagatttgatatactattgaagagcataaagacctactttctatttcgtggtctattcctttaccttgatggtcaatcatgaagacaacatgattgagtgaaataaatttctccttactgyttttaaagcaatggtgctcatttgagtattggacaactagaaacataggaaaaagtagacaaattttatgggaagggattaagcacaaataccttatttaaatattcatgcttaaaaa

SEQ ID NO: 910965 - DNA, 640 bp, Homo sapiens
aaggaagaaaaagctggttttggatcaggattttgggttctgggacagacatttaccaacatctgtttcaaaggagaaaatagaagcccaccctagaagtctaagggtcatcaggaaatagacaaacatcaggatattatattaaagcacatctgtctccagtttggcatgaaaagcctatatttagatattattttaagagctatgtttaaaaatgctgataaagtagattccatactcattttttagtcaactgtgttatttttctttttcacagatgtgcacacttggtactatagtttgaatatattttctatcaagaccaaaatttaaaaagtaaaagtatggaatttctgtcttctccatcctggcttaaaactttggagcatacctcgaatagcttatgcatcgttggtggaaagtccttgcatcattattttaccttgtgtgtatacgtgcatgtgtgtatttcactgttgttgcttggggcctcctcagttggtgtggtatattgggtcttcaatcacctggtcataccaggcctattgtagccctggagatttggtgcctrtttgaatcaagtctggtagcaaccttctgtagacctaattctttcagctgtgatttgttatagaaaaaa

SEQ ID NO: 910966 - DNA, 549 bp, Homo sapiens
tctgcgttggtgagctacatgacagaggaccgcgtcattggtttgtcagtctaggtgtagcatgtygctgatatcacaactttttctaaccaagccactcatgagttgattgtgcaagacctctctccataaagcagggattgatagttcatatatcaaaggaatcagatacgtgtagtgagagaagaattgggtactgtgcaatatagggagatggaaagattttgtcttacaggaggatgcttttcgcaagtgggaaagtgggctctgtgtttccagatttcctagtttttcaaaagtaactaaaatcctcatttttaaaaaggttaaaccttcagattgccaatttatttacattaaaaatattctgtgggcataacaaaaccagatttagtcttcagggcaccagatttcaaattctttaccaaagttctcaaaactgtgggccaaggccatattttgtctctgtagctaggcctactagctaatccccgcattttaagtccacttccagagctatttttttccctatctatcccatttagttaa

SEQ ID NO: 910967 - DNA, 629 bp, Homo sapiens
cgtcatagccaaactttcctagacaatagttttctaattcattacaatgtcttctgatcctgattctacatattaaacatatgaattttaacaaaaatctcttccttagaaaatacaatatactctttttcttttcatgttctataatgatgttttagcattttctctttagttggtgttactggactgaatatttgtgttccccaaaatttagatgttgaaatcctaattgctaagctgatggtattaggtcgtgggacctttgagaggtgattaggtcatgaggatagaacccacatgaatgagattagttctcttataaaacagaccctcccctgcccccagagccctctttctttttcccatcaccatgtgaagatagaagaagttggcagtctgcaacacggatgagagccatcactcaaacttgaccatgctggcattgtaatcttggatttctagcactctcaccttggatgtccagcgataaataagtgtttgcatttaagtcactgaatctayggtaattttttacagcaaccaaactgaataacacagtggtcattttcttcttaaaattctgtcttccttttgctttctttacttccctattttccttctggtcattt

SEQ ID NO: 910968 - DNA, 660 bp, Homo sapiens
ctgtgacttttgttactaaaaggagtaacaaatatttcatatcattttatagaagctgtataaatctyaaaatatttttacattcatgactactttggcattatggttgttattaagcccacaaatatatattgttatttaatgtgttaataaagaagtatgcatattattatattacaacttttaaatctttagaaaaccgtatttcgatacaactagtttctgttgtaatcctaaatgttttatcttgcatatgtaataaaattcagacacacttcacaagatgtgaaaggctttaaaggaacaggtctttaaatttcaccacatgtcaaagaatccctggtttaggggataggagaatatagcattttagaatccctggtctaggggataggagaatatagtgtatttttaatagcactgtctccatagtcagactacttgggttcaaattattgataggtgacttacaattgatgtgttctatggcaagttacttaacctcagtttattcttctgtaaaataggaataataattgctcctttgcattcttgtgataatacattaagaaaatgattgtaaaatacttagtataatgcctgacatctatttcacttttaataaatgttacatatcattagcaagagagttagatacta

SEQ ID NO: 910969 - DNA, 617 bp, Homo sapiens
acactttcatcttctgagtgtactgcctgaggctattgttctcttcatatcttgcagatctttctggggaaaaggccgcatgcatcagcagtttttttgctaagggtcttgtaattaattggatgacctttcagtcaaagaatttctaaggacaagatttctcctattttggctcaggaaactgcaggcatcagttgcacaacaatatttaacattagcacagctaataagtcatatccgttgcattaaacaaaatgtacagaacttaatatttttagttacacccaaacactagatagggtttgcaattaatcatttttacattctatattctgtttgacactgattgtacaacttcaagaagagggtcacacaatgatttattcagtaaatatgtatagagcttgtgtgtatcaaaaactgtgctaagtgctgaaattagaaaacataccatgtacctgccctcaacatgttgtcattctattaaatggtgtaataacacaacactgagtcataraagtttcgaaagagaagttcacacaaaaaaagagctaggcaaatgcgtctgacattatatatcacttatagctggtatcagttaaagccaggtcttcaag

SEQ ID NO: 910970 - DNA, 480 bp, Homo sapiens
gtggctcacacctgtaatcccatagcattttgggaggccaaggtggggggatcacaaggtcaggagagcgagacaatcctggctaacacggtgaaacccygtctcccctaaaaatccaaaaattagccaggtgtgggggcacacgcctgtagtcccagctactcaggaggctgaggcaggagaattgcttgaaccctggagacggaggttgcagtgagctgagatctggccactgcactccagcctgggcgacagagcaagactccatctcaaaataaacaaataagtaaataaataaaataaaaagaaatggagaacctaaatggaatccagtggcctccctaagttgagaagacagagctaggagtccaaaaagggaaatacagctacaaatttcagggaagaatacaagagaaaagaaagctgcacaaaaaataagacaactgcagcgatttgttgaaggtccttctcagctttagt

SEQ ID NO: 910971 - DNA, 480 bp, Homo sapiens
gtggctcacacctgtaatcccatagcattttgggaggccaaggtggggggatcacaaggtcaggagagcgagacaatcctggctaacacggtgaaaccctgtctcccctaaaaatccaaaaattagccaggtgtgggggcacacgcctgtagtcccagctactcaggaggctgaggcaggagaattgcttgaaccctggagacggaggttgcagtgagctgagatctggccactgcactccagcctgggcgacagagcaagactccatctcaaaataaacaaataagtaaataaataaaataaaaagaaatggagaacctaaatggaatccagtggcctccctaagttgagaagacagagctaggagtccaaaaagggaaatacagctacaawtttcagggaagaatacaagagaaaagaaagctgcacaaaaaataagacaactgcagcgatttgttgaaggtccttctcagctttagt

SEQ ID NO: 910972 - DNA, 580 bp, Homo sapiens
agcaatatggatacagctagaggctattctcctaagggaattaatgcaggaacaggaaaccaaatactgcatgttcttatttatgagagctaaacgttgggtactcatggacataaagatggcaaaaatagacactgggtactactagaagaaggagggagagaggagaacaagggttgaaaaaccattgaatactatgcttactaccatggtgacaagatcatccatatcccaaacctcggcatcacacaatacacccatgtaacaaacctgcacatgtatcccctgaatctaaaataaaagttgaagacactcaacaaagaaacatcagacttaatctgcactatagaccaaatggatccaatatatatttacagaacatttcatccaatggccgaagaatacacattgttttccccagcacaaggatcattctcagtgacagactataygttaggtgacaaaacacaccttaagacactcagaaaacctgaaataacatcaagcatcttctctgaccacaatagaataaaactagaaattaataacaagaggaatttaggaaactatacaaacacca

SEQ ID NO: 910973 - DNA, 659 bp, Homo sapiens
  misc_feature 181, 198, 556: n = A,T,C or G
ctggtttcagatgcatccagcctatagagaacaaacattatcgtaagaacaatataacagcgggcttgccccagaattacttgccctgtatacttggctcatgacttctctatatccatttccccctttgttcttaacagaattctttattcaggacagtctaccctgtggcttaggggtngaccatgtttcagggtntctggctagttaaatgtaagtagaagtctaatagataagactatagggaaaactgtttctaagaaggtggagactcacatatcatatggattttgcctttgctcttcaccccttttccctgccttgaacatggatgcagttcccggagctatgattactctcaaacccataggaaaaaaagccaaatagtaagaaaggcagaaaaggaagactggagtgaggactgaccttgagtaattaaaccaactctgagctgcccacctccaaacttgttgtaagaggagaaggagaagcccctgccagggtatacctctttcatgcaagtttctgctcttctttcaccacaaaggccctttcngagactttctatggctgtctctgctactttggttgtccctcttttcatttctyttcttccttaagtagttttgcttttagttggaagagattgggaggcagac

SEQ ID NO: 910974 - DNA, 591 bp, Homo sapiens
tgtagattcttttgggctgtataaacattttaacaacattgattcttctaacccatgaacatggaatatctttccattttgttgttatgtctttaatttctttcatcaacrttttatagttttcattgtagagatatttcacttcttcggttaattcctaagtatttaatttcatttgcagctattgtgaatgggattactttcttggtttctttttcagatggtttgtttatggcatacagaaatgctactgttttttttgtgtggattttttatcctgaaactctactgaatttgtttatcagttctaacagttgtgtggtggaatctttaggtttttctaaatatgaaatcagatcatctgccaacaaggctaatttgacttcatttctaatttggatgtcctttatttctttctcttttctaatttctctagctaggacttctagtactatgttgaataaaagtgatgaaagtgggcatcctggtcttgttccagatcttagagaaaatgcttttagtttttttttcctatgcagtgtgatactttctgtggatttttcttatatggtttttatgatgttcaggtat

SEQ ID NO: 910975 - DNA, 592 bp, Homo sapiens
gcaattcaccacttagttttttcattctctcttctcccacccaatatcctttctccttacgcttgacaccacctacccacctccttcccagggtggtttttctccctttaggcagcttccttttaaccagcaattatataagatggaaaactggataatgtaataaaatatatgaggaaaacatattaaattagagtaggttaaatccagcatttctgaaaataaagtgtcattcattccctgagaaaaacaataatttaggatgcagtttcactgctacctaaatgcacatataaaatggatatccaaatacaccctactgttgtctgtcgaggataaaggatttcaaggccagtttgtctcactggagtttagtaattgaaccatatggcttatagattattgaatctagtgttacaagtctctgaaaaacaattttggcttgataaagagcaatggagcattaccgtactttcacatccaatgtccaccaattayagcaagtatgaaagaatgtaacttaaaagctataactggttttctcatcctaactgatcacgcacaccatacaaaatatttcaaaggcacaaaa

SEQ ID NO: 910976 - DNA, 601 bp, Homo sapiens
cccaagtcctccatcacccttagagaccccgggttcccttttaaggggtttagccataatgaagcagatggtgcttgctgatgatctttggaaattgggttgtatttgcaattcagaaaaggggcactgggatctttgcatatgtgtaaagaaggtgttttctgaaaatcataagggtgtaaataaggtttaggtgcatgtttaaatctacttgggggacaaacttttagggaacattctcaaggtctttaggagtgtctttcagcataataaacaactcatggattacgaattgttcttctagttcattaaagcatgctccataatcactgattgaaggcaactcctagcctagttcaagtaactgtaaacaaaactgtaagatttggtgctaaagctagtgtgatcttcccccattctgaattcactttggtatataaaccttctggccagatcatcttcactgttaaacttttcagatttagttttccacacctggccccaggttttaacggagttagaagctatagttaatgcttggtagacattttctyggaggcatttgaaccagagcaactccatcttgaatagcggctgagta

SEQ ID NO: 910977 - DNA, 564 bp, Homo sapiens
ataaaaaagaatataattttagtrtaagtatatccaaatgttgcctgggaaatacttacattaaaatattattcattttaaaaaatgtgaaattcaaatttaactgggcattctgaattcttgttaaatctagcaatagcaaaccccaggatacatctgacagtatctggaggcatttttggttattacaacttgaagagggttcgctattggtatctggttagtatagactaaggatgctgctaaatatcttatgattcatagggcagcccccacacaaggaattatctagcccaaaatgtcagtactggtttaacatatttattgtagtcttctatttacaactctctagtacaaaatttcctttagaataaaattggaagaaaccctaagattcccccaaagaactggcatttctgaaaattcttttattaataacagctagaaaagaactaagtaaccaattttatttcccttttcacgttgactatcaggaaactcagaccaacttaaaggcccaagcataaagactgtggcatcttacatgttgcatatatatttagt

SEQ ID NO: 910978 - DNA, 564 bp, Homo sapiens
ataaaaaagaatataattttagtataagtatatccaaatgttgcctgggaaatacttacattaaaatattattcattttaaaaaatgtgaaattcaaatttaactgggcrttctgaattcttgttaaatctagcaatagcaaaccccaggatacatctgacagtatctggaggcatttttggttattacaacttgaagagggttcgctattggtatctggttagtatagactaaggatgctgctaaatatcttatgattcatagggcagcccccacacaaggaattatctagcccaaaatgtcagtactggtttaacatatttattgtagtcttctatttacaactctctagtacaaaatttcctttagaataaaattggaagaaaccctaagattcccccaaagaactggcatttctgaaaattcttttattaataacagctagaaaagaactaagtaaccaattttatttcccttttcacgttgactatcaggaaactcagaccaacttaaaggcccaagcataaagactgtggcatcttacatgttgcatatatatttagt

SEQ ID NO: 910979 - DNA, 637 bp, Homo sapiens
atgattgggagtattatccccatttcccagctgaggaaataaaaagctggtaaaataatttgtgcagcatcaagtgaccaactcactgggcctgagggaggttacccaatgtcaggagkttacccaatgtcaagaggttacccaggctatcaagtggtacagcagaacttcaaaatagatctgttttccccaaagctcctgtttattctagcacaaagagttaaaggaaaacactgaaattccacagtaaaattctacaggagactgggcattgagaatgaagtaaaaaatcacagaagtttttaaggtaatacttggaattgaggatctcaaagtccctagaagcccaaggaatttgtgcttgtagaaaacaccttctaggctcaattgcagaacttccagaaggttctaaggacctttcctctttcagtcgcagttcctgatgctatcagagtgagagtctctttactaaagacccattcacagtagtagtgaatgtccattttgttgttggtcggcagtattgagacagcatgtaggaatagggacttcaaaatcaagcagactcaaattctggctcagccaattaatagtgatgaccccttgggagggtacatactctctgttttctcagtgg

SEQ ID NO: 910980 - DNA, 667 bp, Homo sapiens
attataatgccaacgtactttccrtcttgcacactctactcacaatccctcccaaagtcctacagttgtttactcacagtgttcctaccagaatatctttcctccaatgtattcatctggttaaatcctattcatccttcaaaatcccaaatcaaatatcatttcttctctttggctttttctgtactcatctctttggacagaatcaaatgcttcttttgcagggatcactgagcgctattaatagaacctttctgtacaacctggctctattctagcacacaaatcattatttgttttagctcactctctcttcagtgatgttcttcaaaaacagcacctacatgttattcatctttcatctccagcacaaaagcatatgcctagcactttggagaaaaacaataaatgtttgaaaattgaactacaattttcataggaagaccttgatgacaattaactaatggcagagctaagttttctcctcaaaatctcagtgcttttccagtagaccatgttgcatctacttgaatcatttcaccatatattctcacatggctaaaaaattcctgggagtgtcctgatcacctttcttttgaacttttggttttagcaaaaaggtaagaggctgaataaaaattaaaattgaaaaaaagttaaaaggaat

SEQ ID NO: 910981 - DNA, 651 bp, Homo sapiens
caagcatggtaaatcttggaatatattccatgtgcagataaaaaaatgtatgttctatggttgatgggtggagtgttctgtagatgtatgttagagccaattggtcaaatgttgagtttaagtccagaatttctttgttagttttctgcctcgatgatctacgtaacactgacagtggggtgttgaagtcccccactattaatgtgtggccgtcaaagcctttcataagtctagaagtacttattttatgaatctgggtactccaatgttggttgtgtatatacttaaaataatgaagtcttcttattgaattcaactgtttatcattatgtaattcccttctttatcctgttttttactgttgctggtttaatatctgttttatgtagtataaaaatagcgacccctgctcttttttgttttccatttgtatgctagatctttctccaaccctttactttgagcctatggatattgttacatgtgagctgggtctcttgaagacagcagaaggatgggtatttttttttwtaaaatcccatttgccattctgtgccttttaactgcagtgtttggacaatttacattcaatgtcaatattgatgtgaagttttgatcctatcgtgagattgttagctggttgctttgtag

SEQ ID NO: 910982 - DNA, 651 bp, Homo sapiens
caagcatggtaaatcttggaatatattccatgtgcagataaaaaaatgtatgttctatggttgatgggtggagtgttctgtagatgtatgttagagccaattggtcaaatgttgagtttaagtccagaatttctttgttagttttctgcctcgatgatctacgtaacactgacagtggggtgttgaagtcccccactattaatgtgtggccgtcaaagcctttcataagtctagaagtacttattttatgaatctgggtactccaatgttggttgtgtatatacttaaaataatgaagtcttcttattgaattcaactgtttatcattatgtaattcccttctttatcctgttttttactgttgctggtttaatatctgttttatgtagtataaaaatagcgacccctgctcttttttgttttccatttgtatgctagatctttctccaaccctttactttgagcctatggatattgttacatgtgagctgggtctcttgaagacagcagaaggatgggtattttttttttwaaaatcccatttgccattctgtgccttttaactgcagtgtttggacaatttacattcaatgtcaatattgatgtgaagttttgatcctatcgtgagattgttagctggttgctttgtag

SEQ ID NO: 910983 - DNA, 609 bp, Homo sapiens
tctgaaaggattgtggaaagttgtttttatgtttttatttgtttgttttgaggacaaactttttgaagataggtgctggtatatggtgaatctcattcttctcccacaaggaggagaggtggagaaagtgtttgcttctcaccttaagcctagtgagaaaagcttcagtaaggccattccaagaaagtcaaaaactttccttgaagttagggaatatattggcctgaggcgtgtctccacatgaaaaatgtaaaagattagaaatggtttatcagcttttacagtggtgcaaagggtaggtcattgctctgttaggattggatttattggggcaaaggatacaagagtggtacacacagaccagaaagttggaaaaatgctggtgtaggactatcttggattctgtccagtagggctatccagaagtgtaaacaggccttagcagttagaatctaaagggagtgccggattccttggtcaagtgagagaaagatgatgaaatagagyagacacgtcacctgtaaaaggctaccagaggtgggcagtatctgatgatggcatggggttgaggcctttgaagaatcaacaaaaatgcttcataaaaattaa

SEQ ID NO: 910984 - DNA, 635 bp, Homo sapiens
tgaatgagatttgaataaagttaaggcaaaggccatcttcttgctgctatttttgttggtgaagatggctgcagaaatgagtattttcaggtgyctgtggctgtcagacttggccttgtaagtgtctagaagcagttgtggcagcaacagcaatgccttcctgacctctgcttgcagcagctatagttttatgtccctgtactaatttgttcagagtgaggctcctgactcctgatctaccatgctgtctaggaattttgcagccagctaagctactgcattcaatcccattctacatgaaataccaggtttctgtttcctgcagtcaactttgactgatatgaaaatagtcataaccacataaatgaagagttatagtttactgagtatctattaaatgccagacaaattgaggatcagtgagataacttgtacaagttcataaagctaacgaatggcaaaaccagtgtttgagtttcggtccatctgtttgcaaagctagtacacaaagggcagaaactgtaatatgtccatttctattttcaatttttaaaaagaatgaaatcatgtcctctgcagcaacatggatgcagtcagaagccattattctaggcaaattagaacaggaatagaaa

SEQ ID NO: 910985 - DNA, 645 bp, Homo sapiens
ccactgactgtcaccgtgttttgggagacaaagcctaggactttggtgtgtccaccgtgggtcaataaatgcccccaaacaagcatatcttgcaaaagtggggacttattaattcattgattsgtttcttgattgatcaattgatttatatgtccctgttggacaaagggtttgaggcagcctgggaaggaagtgaagtgtggaaactggtcatcttctgtgcttcttacattccactcattgggaacatcaaaaaatgaaaaaaaaatccagctgctacatagctggggaacaaattcttggtatggaagtaattctgctaaggctagcctcctcagagtaattccaaatgcttttcctattttcaaatttaattaggagacatttctgtagtgtgagtcatcatttaataatggggggtgtttattagggaatgagtggaaagagaacaggacagctggataattcaaatcccagttcttcaagtctctggctgtgtgatcttgggtgagccacttcacctctctgaacatcagttttcttgtctttaaattgatatttacctggcaaggtttggggaaggtctcaactagattatgtacataacaagcttgccagtgttagtacataataggtgtttaataa

SEQ ID NO: 910986 - DNA, 612 bp, Homo sapiens
gggtttgggagcttcgtgctgcttcattttcaccccaaagttcttcctaccacccaaaatattatgcatttgttctcaggtgtcgcttctgtctctccactgaaatgtcaygtccttgagtgcagaggctttgtctgttttgttctgtaatgtgtctccagcacctaggaaagtgcctggccatagcagatgctctagtagatattttcagagtgaataaatgaacagattggattgaatatagggtgagggagagagaagagtcaacagcgatgtctgcatctcgcgcatgccacccagggatcagggagctggttattgaaacccagaggaaacccagagggagcgttaggtgggggatggtggcagtgggagtggaaagaaggcacccagagggcagtggaggtgaggatcagctgctcagggaggctggagacacggagtcaggggccatcagcagctggaatgaccatgaatgtgagcccggagggaatgcgtgggcagagaggcacagtgtagatgagaatgccaaggagcagcctagtgcaggaacgggagggctcacaggcaggagtgtgacaaggagctgttaggaaataatcagagcagtaa

SEQ ID NO: 910987 - DNA, 577 bp, Homo sapiens
catacacaacccagccatgataaatgactgaggtagctacagttatcattgtgggcayagctcaaagacggggctgagaggaaaaaagcaaggtgcacgatgaatcatatagtaagagccatttatataaagttcaaggacctgcaaagcaatattttgtagcatttgtgacttgtaaatatgcattcagagcagaagacatgggactaaccaacactgaattcaggatcatggcacacaaatgtttattatattattttaaattcttgactgtaggtttgaaatagttcaccctaaaaatgcataaagaacaaaagaatttagcctctactgtgtcctggggcaggaggaggcctacattctttcttctccttctccactagctcccctcccaagccctgtcccatcctcaagctgaggtcttgagcaggggaaggtgacaaattctgaagacgtgggacccgggttccaagagcagtggagactcgtgcctctgcacactttgcccctcgtccactctcccctcatcctcagtagtggaatcctgatttttattttattttttgaggcaaggtct

SEQ ID NO: 910988 - DNA, 692 bp, Homo sapiens
gatcagcctacaactattaaaaatgccttgttcacagaactctacaaaatagctctttatctaaaaaattgccatggcaaatatcaccccagtgaattaggtgtttgtgtgttttgcggaaagtggtatcttttctaaaagattgctacctaaataagaatgctctggagagtctaatacggaaatgaaaggatggttctgtcaactttggtgtctcttttaaggaagagaaatgtattgctctgtgctgctctcctctctctctctcttgctctctctctctctctctctccccccatctctttctctctctctcagtctctctccctctctcagtctctctctcccctcctcctctctccttttccatctctctctccctctcattgtttcctgtgctcaaactgtcagaaagtcctcaaatctaagcaatcagcctggagagcttcaggctgtgcacgccacagagagggtgtgacatatttacatatttaaagggaatgagcctccagttctcaatggggacatggtggggtttttagctttctaaggcaacatcacctattcctggaaacaattagagtgctacacaatagcccccatgcaaactccgcagtgacaggaacatgaaaggaaagagaatakgggctttgcagaaacagcctcttactcgccgttgacagggaaggaag

SEQ ID NO: 910989 - DNA, 614 bp, Homo sapiens
acgcccacactaactatagtttgtttgcagtaaaaatatttgaaaggagtttaatgattttgcttcttaaattatctagcagcaggtaaytcatcaaagttgcaattacctgtgatttgccccacaaccaataggcatccttaggcattcttgcaatggttttctcaaacgtaatgcagtttttatgacgacgacatcatcaatacagcacccagcaagcagtgaggaggctgcactgctatagttggcaggcgtttaatgaagcatttattaattttgattttgtggctttcttgttgaattttggagcccataattttcttccacattgcacacacttgcgtggaccccagaaaggttcatgcctaaggctcttgggggtttgtgggtgggtgggggtgctcttttttcttggcagtatgctgaaggtgagaagattccagaggtagctgaacagttgctttgctggggagggtttgcttagctgctggagtcactcccagtttcctctttcttggtttttgtggtggtaaaaattaagtccaagcatctggagagccacatgtgtgatttgcaaacatcaaacacagcattcattccttatttcttgatta

SEQ ID NO: 910990 - DNA, 634 bp, Homo sapiens
cagatggtgggattgtgggtggggactgaagaccaaagagatgctattttctaacagtaactttagaagagaccaaaaagctattttaagccacragttggaaagggggaaggtggagatggagagagattcctgcctctaaccatatttgatgatgagcattttggtcagttattcattcttccatccatctgtctagtacttgtttgagtacctattgtaacactcattggttggtgttgtcgggttgttaaggggctaaacttgacattctgttatccctgacattctgttatttcctgacatcatgctatccacaagagtgagattgtatctcaaaaggacagtcgtcctttccttattactcctactccataagcatctaacttccttgatgacttaaacctcaaatcacccagcaatgaccttcaggaattccattttttaactgatagattagttatattttccatatcacatttgttatttcctaaaagtacatttaaatccttaaatgtttttgaatttttgcattgctctaactacagcaacaaaatatacacaatgggaaagagttcagttaatcaaaatttaaaccagttttacctaatagcatttaaatcttttctaaatt

SEQ ID NO: 910991 - DNA, 619 bp, Homo sapiens
catttcatcactagaattttcaatatttgatackacagattgtattcaatgttgatagggtttggctgtgtccccacccaaatctcaacttgaactgtatctcccagaattcccatgtgttgtggcttggacccagggagaggtaattgaatcatgggggccagtctttcctgtgctattttcgtgatagtgaataagtctcatgagatatgatgggtttattggggcttctgctttttgcttcgtcctcattttctcttgctgccaccatgtaagaagtgcctttctcccccgccatgattctgaggcctctccaaccatgtggaactgtaagttcaattaaacatctttttcttcccagtcttgggcatgtctttatcagcagcatgaaaaaggactaatacagtaaattggtaccagcagagtggggcattgctgaaaagatacaagaaaatgtggaagcaactttggaacagggtaacaggcagagactggaacagtttggagggctcagaagaaataggaaaatgtttggaactttacttaagagacttgttgaatggctttgcccaaaatgctgatagcaatatggacaataaaatccaggctgaggtggtct

SEQ ID NO: 910992 - DNA, 608 bp, Homo sapiens
cctagaacggtgaggagtcaatttctttgctttaaaaattacccagtctgtggtattctgttatagcattacagaattgttgggacaaagatgggcaccctgatctagaagacaaatatactctactaggaaaatagatacttagttctgctgctttttggaaaggttactaaaatgcctatattggttaattagttagttagttggttagttagcttgtttaagtggacttttttgtttttgggagtagcgttcctgtttgccctcatttagagttgtgctcaaatctgtgaatcttgctatagtccaaactcccaaaccactggatcctggcaaaagaacaggtatcaagagaaaactttgagactacaagttaacaaatgaaaggtgagcagtaaagaatgggacagtcacctatcattgtactacagtcaggttagaaatcaagattgtgaggttttaccttttcagggaaaaaaatattcaaaatgaaaataytacagggaaaaactatactttgataaataatagcttttctgttattctgataaatattttacatttttctatatattatatattgttaatctataggaaaagattttatt

SEQ ID NO: 910993 - DNA, 650 bp, Homo sapiens
caagaagaaaacaaacaaccccatcaaaaagtgggtgaagcaaatgaatcaacacttctccaaagaagacatatatgtggccaacaaacatgaaaaaaagctcatcatcactggtcattagagaaatgcaaatcaaaaccacagtgaggtaccacctcatgccagttagaatggcgatcattaaaaagttaggaaactacagatactggagaggatatggagaaataggaatgcttttatactgttcttgggagtgaaaattagttcaaccattgtagaagacagtgcagcaattcctcaaggatctagaaccagcaataccatttgacccagcattcccattactgggtatatacccaaaggattataaatcattctaatataaagacacaagcacacgtatgtttattgcagcactgtttacaatagcaaagacttggaaccaacccaaatgcccatcaatgatagtctggataaagaaaatgtggcacatataacccatggaatattatgcagccataaaaaaaaggatgagttcatgtcctttgcagggacatggatgaagctggaaatcatcgttcacagcaaactaacacaggaacagaaaaccaaacactgcatgtyctcactcataactgggagttgaaaaa

SEQ ID NO: 910994 - DNA, 658 bp, Homo sapiens
aaaggttaggggtggggagatttttggttaaaaggcaaaaagtttcagttagacaagtggaataagttttgaaatctattgcacagcatggtgactattgttaacaataatgtatcatatattcaaaaattctaaaagagtggattttaaatttttatactacacacaagaaaaatatgtaaggttatagatatgttcattagacagatttaattattccataatgtgtgcatatatcaaaacattacagtttaccctacaaacaagaataatagaaagtattaatttataattgttttgtttaagagacaagatctcactctctcacccaggatggagagtggagagtagtggcaggatcatagctcactgtaacctcaaactcttgggctcaagcaatcctccaccctcagactgccaactacctatgttacaggtataatacctagtattacaggtacatgccaccacatctggctattatttttttagacacagagtcttgctatgttgtcctggctgctctcgaactcctgtacacaagaaattctcccttctcttcctcctaagtgctgagattacaggcatgagccactgcacccagcctgataatagtcttttaataaaggyaactcaagtatattgaaaaaaggacttt

SEQ ID NO: 910995 - DNA, 601 bp, Homo sapiens
agctaatccaccatgatgaagtaggctttatttctgggatacaaggtttgttcaacagatgcaaatcaataaatgtgattcatcacataaatataactaaaaacaaaaaccacatggtcatctgaatagatgcataaaaggattttgataaaatataacattgttttttgttaaacactctcaacagactaggtaacataagtttgaaggaatatacctcaaaataatagccatctatgacaaacccagaaccaacatcataccgaatgggcaaaagtttgaacctatttctcttcagaaccagaacaaggcaaggatatcctctctcaccactcctattcatcatagtactagaagtactagccagagcaatcaagcaagaaaaagaaataaaaggtatataaacagaaagaggaagtcaaactatatctcttcacagatcaacaggttgtaaaaatcaaaaatacctgtgccctaccccctcaaatttataccagacattttcactagattaaagaaagacattatttgatatygctaatatagtgatcttccccttagccacatctcataaatcatctaaactcttagatacctagct

SEQ ID NO: 910996 - DNA, 589 bp, Homo sapiens
aacatggtgggaggtgattggatcatgggggcagatttctccattgctgtttcatgatagtgagggagttctcatgagatcttgttgtttaaaagtgtgtagcctttacccttctttctctttcctgctccaccacggtaagacctgcttgcttccccttcacttccatccatgactgtaagtttcctgagacctcctaaccatgattcctgtacagcctgtggaactgtgattcaatttaacctcttttctttataaattacccagtctcaggtggttcgttagagtagtaagagaatggactaatacagaaaattggtacctaagaagtggggcattgctataaagatacctaaaaatgtggaattgacattggaactgggtaatgggcagatgttggaacagtttggagggctaagaaaaagatagcaagatgagggaaagtttgtaacttcctaggaacttgttaawttgttgtgattaaaatgctgatagtgatgtggacaatgaagtccaagctgaggtggtctcaaatggagataaggaacttattcgcaactggagtaaaggtcactcttgctatgcttta

SEQ ID NO: 910997 - DNA, 667 bp, Homo sapiens
actgttgaactctttcaagtcaaaaatagatcatgttacttttgaaatgtcattgaagaaaaaagacttcctattcgttttcctttcttaatttagttttaaataatgactactaaagctggataaatatccatagcaaatgtagatgtcccctatagtatagtaattgccttcctaagtagatacccagaagaatctcctccataagtacaagagggaacatttattaattaaagaatattccatcactgtttgtaataccaaactctttaatgctcatgaattagagggctgagtaaactgtattacttttatcagatgaaatactatccagtagttaaattacagtgatatatagcaatatggttcaaaagtgaaaaaaaaagattacatacaatatgcaacccattttatagaattaaaaataataaaaatgaaaatatatgtctgtggatgcatatacatgtgataagctctataaaagagacatgtaggaaggcatgggatgtttcaggataatgttaacaagttagcagaaggcaggggaacagrttagccaagatcaaccatatattaggtgtaagttattgtgtaagatttcctaagttttgttttggatttgtacatgattgtttcactataaaaagaaaactaatacacgtaataa

SEQ ID NO: 910998 - DNA, 684 bp, Homo sapiens
tccattctaccaagaagaaatctggttaaattactggattgagataaattgcgattataatccagrtcagatgaggtcagatttcatgttctttctgctctatactgagactgcctctatgctgaaatctggatctcagaaaaatatgttgattactatacattttaggtttgatattaaggcttcttagacattttccaaatgaacgaatatatcttaaagcttaatttcagcaattttgtcaggttagaatttcaagtatatcttacatttcttaaaaaaaatttgaactggttatataattaggatagggcatgtccttttgaatagtgaatattcattttgctcagaaatagcagaaaatggcttatttaactaatgtgcacttagaggaacctcaatcaggagcagatagctacatcagttttgaaattgaaatgcttgaatttatttggatatcctggttacagagagttgttttggaaaatccaaatgcctgggccttattcctggacagggaatgttcttatttgtaaaaccaaactaccagcacagattggagcctgtttaacacatacaacattgtatcctttcttgttatggtcatgtgttgagacaagacacaggagaaaagagtgccatctatatgtataatttgttattttaaaaacataggtaagccat

SEQ ID NO: 910999 - DNA, 596 bp, Homo sapiens
cactcattaaatattatttgaatgaatgaagtaaaataaaaagtaagattgaccttaaatgagagtaaactcaaagtatctattggtatcttttkgttgcaagtgatggaaaccccttatcaaattggcttcagcaaaaacaagtatttaactggttaatgtaacttgaaatttccatgggtggctgaattcaagaattcaaacaatgccatcccatcaggacctggtttttctctggatctcagctccatctcctgctttattcatttttttttcaagctctgagtggtacccctgaagctacagtcttacatcttccaaatagaaaaagaaaaggtgttttttccccattagtcctgggaaagccttgattggttctctcgattctggctgtatcacatccccgtccctgagtcaatcactttggttggggaaatgcaatgttctcattggccaggcctggaggacataagaggtggaggtagtgaatgggggacaccttcactgaaagaaagtgaggtgtgggttcacaaagaaaaacatcaagattaaatagatgctgcatccacccaggctccaaatctacctaattaaac

SEQ ID NO: 911000 - DNA, 714 bp, Homo sapiens
tttaaatgctttttaagcattttttaatcaataatccttagtcaaaattaattgttggatagggaaaaacagaggttagtgtggctgtcaccagagaaggaccatcaagattacaaactccaacattactattttgatgtagaccactttatagattgtgtcccaagggctttgagttttaaggttatcccattgcactgaggtccacaaggcccactaatttacattgcttgagcctaatttacattccttatgcctattgaacttgaggctcaatattagtcaaactggactgataaagtatattggcatttttctccctcacatctaaaaaacaatttaggaaaatgaagaaaaataacatctagcatattcagtatgctactttttatatcagttttcacgtattagctctaggcagagagcccttgtgggtaattatgttttaatatagtacaaacctctttaaaaatgataccatgtgcaattaggagttcaaaatgaccttgtttgatgaagtttgataaaatgtctctatttgagaaaatactacagcagtcttcaagtgtaagaccagtgggcctcatgttgcttatgaaaatgcaatagaataggcacattgaagtaagatgtgcttcactcagatgatttaaattatagawaaacacctcacatcttctgccatgcttttgattaagcaaaataaggagtgtg

SEQ ID NO: 911001 - DNA, 629 bp, Homo sapiens
tgttgaagttggttgaaaggaaaaaggagatttgtagttatgttctcatagtatttttttttattcttcatggaattcaagaaatgtaagtaaagaactgtattatttccaattttttgtttttttcagctttattgaggttcagttgacaaataaaaattatatatatgtacaatgtatgacatgatgttttgatatatgtatgcattgtgaaatgattaccacaagcaagctaattaacacatccatcacttcacatagttacctttgtttgtgtgtgtggtgggaacagtcaagatctactctcttagtaaatttcaagtacacaatgttccattgtttaccatagtcaccatgctgtacattagagccccaaaactcattcattctgcacaattcaaattttgtacctttcaatcaacaactctcgattcccctccatcttatccccactggaaaccaccattcgactctctgcttctatgacttcaactgttttctattacatatacagtcagtcctctgtacccctgagttccccatccatggattcaaccaaccacagattgaaaatatttggaaaaaargatggttgtatctgtactgactatgttcagacttttttatct

SEQ ID NO: 911002 - DNA, 641 bp, Homo sapiens
actgttaagtttagaagcaactcgatatagctatcatttaagtcagacacaaccctggacttcctaggtgccaataaatgactttgcaattactttcagctaaaataatatagatcactagagttactcatcagctgcaggataaaacctaaactcctttgttaaaataatatggccctctattgacccacaaaaatcctgcacctatcaattcttcccattccaattcatgtcctaaaaatactgaaaagctcagcattcttcagtctcacacagtatcatttcacgccacaaggcctttgagataggtttccccattgtccagaatgtccatcccctatttacccatccttcagacctctgctagattactacctcctctacacaaacttttctgaaggtctcagcctccttcaaggctcttttgctccatgctccctcccctcgttgggttttatcacaatgactgtctgaccctattgtctcctcatcagactctacgtgtcttctaggaaggacatgcttttccttttcgtatcctctacctgaagcaatatatcacgtactcagcagacgctcaataagtgtttgagaaatgaagaaacamaaagacagagggaaggagagaagaaaagaaacaa

SEQ ID NO: 911003 - DNA, 621 bp, Homo sapiens
tactatgcatagctctacatatgctatataaattacccatgaaaaaaatcactggcatcgcaatgtgtatcagctagcatttgctgcataacaaaccaacctaaaacgtagtggcttaaaacaaccatgtattattgctgatgagtgtctggatcagctaagtggttctgctgagccatgccaggcttaactgattccagctggattcactcatgttcctgcaggtaactactggattagctaggggctggctggtataggatgccctcagctaaggtggttcatttctgttccatattctacaaaatgatattccatgcacgttcacatggcagtggcagaagagagtaagcagaagccatgaggcctctgaggcctaggctcagattgaatcatggcctttgaggcctaggctcagattgaacgcaccatcccttccactccattctattggccaaatcgagtcacagggatggcctagattcaaggggcagkgggaggggaaaacagattccacctcttgatggaataagctgcaaagtcacatggtcaatggcatgaacacagagagtaatagaaaatttgagacttttctgcaataaaccaaccacaaatatcttg

SEQ ID NO: 911004 - DNA, 593 bp, Homo sapiens
gattcctctgatgaatctgggcaaaataagtgggaaaccttttggaaaggattmatcattctagatgtcattaagaacatttgtgattcatgggaggaggtcaaagtatctacattaacagaagtttggaagaacctgattccaactttgaatggtttaagacttcagtagacaaagtaactgcagatgtggtagaaatagcaagagaactagaattagaagtgcagcctgaagatatgactgaattgctgcaatctcatgataaaacttgaatggatgaggagttgcttcttatggatgggcaaagaaagtggtttctcaagatggaaactgctcctggtgaagatgctgtgaaacattgttgaaatgataataaaatatttagaatagtccaaaaacttggttgattgacagagcaatggtagtttgagaggactacaatcttgaaagaagatctactgtgagtaaaatgctatcaaacagcattgcttcttacagagaaatgtttcatgaaaggaagagtcaatcaacacagcaaacttcactgttgtcttattttttaaaattgccacagtcacctcaaccttcaacaa

SEQ ID NO: 911005 - DNA, 607 bp, Homo sapiens
ttttgttttccaaatatttattatattttatttgtttccttttcaattgttctgttccatttcctttgggaaatacagagaagtgccccataattttcttttggactggataattataaagtccagatgatttctttttatgtaaacatctcttaaattgttaacatacttaagtctctcatttaaatgatgactagaaattgttgaatttgagttatgtatgcttaagacattccgtcattagaataccagaaaatcttttgaggctactgattgtattgggctatgaaatttccttccctgtgtttacagaaacaacaacaaaaaaaacatgctatttcaaaagtattttatctcggggcctatttatttctaaacatgtgcctatttatttctaaacatgtagctattgaatgctgtatcttctgtgataaaaattgtaaacatttttttctcaacttttagattcaaggggtacattttctggtttgttacaaggrtatattgtgtgatgctgaggtttagggtacgattaaacccttcacccaggtagtgagcatagtacccaataggtggtttttcaacattcccccccgccattccctct

SEQ ID NO: 911006 - DNA, 606 bp, Homo sapiens
gatctttataaagcaaatcctaacattcagctgtagtacataaagaacagactgcataaatggagataattctatactcctggaaaggaatagttactcttataagatgttaattctatatcggagccattataaaataatttaaaaatgatctataagaataaatatatgaaaatatctaagaaaagtttcacagaaaagagtaatagcaaatttgctctgtgaagtataaaagattataattcctcagtacttaaaatgattggaaagagaattattaaataaatggtattaggtcaactggttaattatcatgagaaaaagctaaaatagaacattacactttatgccaaattatattcttgaaatatttaagatttttaatgtataaattataaaagtactggaagaaaatataacagaatacaaatgtgttttaagaagcaaggaaggattaaaagtataatattgaagacaggaagaacaaaatctactgtgtaaaagtttgaccacattcatatgtggaataaagatatgcgaatgaaaacaatatgmgctattatttgtaccaatcagattggaaaagattgcaacaaaaatatcaaa

SEQ ID NO: 911007 - DNA, 555 bp, Homo sapiens
gtatttgttttacctttgccttcttttatggcaagcaattttgattttgcatatagagctataatttattctttaactttttttataataaacttaaaacaggatcagttaaaatatttaataagagtgtggatggcacacagattggtaaaaattcatgaaattgtagtttaaataagtaatgtctgagaagtactgatttagccacctcaagagcccatttctaggatccttaaggctggatatgcaccttccactggcaaggtaacagaaggtgaatctcaaccatggctgtacctagaaccctggggaactttctaaaatgctgatgactagactccactttagactgattaaatcagaatatctgagtgtgaggccccaggaatgggtatttttttaaagcttccaagatgattgttacatgaagccagggttggaaaccactaatactagatgtcgtcaattcccttcaaaacgagcttcaagactaacttttgaaacctctctctctmtatatacatatgtatatattctaagttaagtatacagtga

SEQ ID NO: 911008 - DNA, 483 bp, Homo sapiens
acatctgagatttgattagagtatcaaagggatagtcctggagtgcagcaaaggagtggagacacayctgtggtgactgaaagttgccacagcatggaagcactcagcctgtgcagccccttctgccccatctggattgaattggcccagagacaggagggacttctcattgcagggtgaaggtaggcagaagatccccaccagccccactgccatcacaaacacaaagtctttacaacaggagaatctcacagtctttgcaagccctcaggccagtttggagtattgccaagaattgacacagctgcatgtcctggactaggagtacaaggtgaagacttcccacccccagaggcttaagctgcagcaacacagcaccatctggagaacagagtcatctcttgagtgtgccctcctctgggggccagtagccactgtgcctctccagcactggagctttatcttcagtacaccaagcccaca

SEQ ID NO: 911009 - DNA, 483 bp, Homo sapiens
acatctgagatttgattagagtatcaaagggatagtcctggagtgcagcaaaggagtggagacacatctgtggtgactgraagttgccacagcatggaagcactcagcctgtgcagccccttctgccccatctggattgaattggcccagagacaggagggacttctcattgcagggtgaaggtaggcagaagatccccaccagccccactgccatcacaaacacaaagtctttacaacaggagaatctcacagtctttgcaagccctcaggccagtttggagtattgccaagaattgacacagctgcatgtcctggactaggagtacaaggtgaagacttcccacccccagaggcttaagctgcagcaacacagcaccatctggagaacagagtcatctcttgagtgtgccctcctctgggggccagtagccactgtgcctctccagcactggagctttatcttcagtacaccaagcccaca

SEQ ID NO: 911010 - DNA, 628 bp, Homo sapiens
gccatacttatcagataaaaacagactttaagtcaaactgtatgaagagacaaagaaggtcattttataataataaagagatcaacttagcaataagatataataattgtaaatatrtatgtaccctacactagagcactcagataaacaaggcaaatatttttaggtctaaagggaaagatagactccaatgcagtaacagttggggcctttagcaccccactcttaaccactggacagatcatctagacagaaaatcaacaaagaaatatcagatttaagcttacagataggaataagttctggtgttctgtagtgctgtagggtgactacagttaacaataatttattgtatatttttaaatagagaggatgttgagtgcccccaacacaaagaatgataaatatttgaggtgatagatatgctgattatcctgatttgatcattacacattgtatacaagtattgagatatccctctctaccttataaatatgaacaagtattatgtgtcaattaaaaatatttttaaagaatgaaggaaacagattttttaaatgaaaggaaagaaaattacctgacttggctgaatggccccatgtggtctctcattctccagtaggctact

SEQ ID NO: 911011 - DNA, 494 bp, Homo sapiens
cacatgcctgtaatgccagctactccggctgaggcacgagaatcacttgaaaccaggaggcagaggttccagtgagccaagatcgcaccactgctctccaacctggatgacagagtaagactctgtctcaaaaaatgaaacaaaaaaaaaaaaaaagaaagaaagaaaaaagaaattcgtttagcttgctaagagtttttttttttaaatcatgaatggatgttgaattcttaaagatttttctgaatctttgagatgataatttttctactttatcctataaataaatgtggttaattgcattgattaagtggtaaaccaacatgtttctggaataaatgtaatttagttgtgctgtattattttgttaaatacttattaaattattttattattaaattgcyggattctgtccgttaatattttgtttaggattttcaaattcatgtcttctgggcaattggttataattttcctttctcatagttttttca

SEQ ID NO: 911012 - DNA, 567 bp, Homo sapiens
catgtgcctatagtcccagctacttgggaggctgaggcacaagaatcacttgaacctgggaggcagaggttgcagtgagccgagatcatgccactgcacttcagcctgggtgacagtgagactctgtctcagaaaacaaaaagcaaatgtaaacacacacgcataaacaacagtattgcaactagaagagattattaataattatttatgtatgtagtgattgggctgtgagaccaaaagtacttgataaatacaggaagtcatgataagtgaaaaggaacttcattgttatcattatctaggtttatagttctcaattccatgtgttcattcataggtacttgataacattacaacagacaaaatattaattgatgtattcgacggtctacctctgtatgatgatgtgaaagtgcagtttttctattcggtgagtaatcacaaartagcctctgccattgttcttgtctggtctaatgatttcatgtaagatttgctttactacaattcccaacaagggaggggtagggggaagaaaacaataaatcagatctataacaaattttt

SEQ ID NO: 911013 - DNA, 634 bp, Homo sapiens
cttgcatctcaggaataaaacctatgtaatgatgatgaattacatttttgatatgctgatggatttggtttgctagcrttttgttgaggatatttgcatctatgttcatcagatattggcctgtagtttgttgttgttgtttccttgctagattttagtgtcaggatgatactggttttgtagaatgagttagagaggaattccttgattgataccatctatttttttgtatgtttggtagaattcagctgtgaattcatctagtcctgggcttctcctgcttgataaatatttttaatacaaattcagtttcataattaactactggtctgttcagatttttttaaatttatagagaaaaaatatttatttggtttatagttgtgcaggcagtagaagcatgggaccagcacctgctcaggtttgggtgagacctcagaaagcatccaatcacagaggaaggcaaagggagggccagggtatcacgtgtcaagagagaaatcaagagcaagaaggggaacatggcagggtgttttaaacaaccagctctcgtgcgacacaacagagcaaggactcgctgatcgccaaggggatggagctaagcaatttatgaagggtccactcccatgattca

SEQ ID NO: 911014 - DNA, 567 bp, Homo sapiens
accagagagggggaatatacagtaaatgaagagactatgtaattaaaasacattttatgctactgaatgacaagtgctatggaacaaaatacagcaggaatgcggccagggtgtgagtgtgagtgtgtgtgtgtgtgtgtgtgtgtgtgtatccatgtgtaggatgcaagggaataaaatatataaatatttaaaggaaaagaggcaggtgtatgaacaggagtggtgaggcttgggtgggagtctttgaggcagaggcatgcctggttattttgaggcaagtcaaaagtaatgtgtagctggaacaaaattcaatcagggatgatagtaggaggtggttcagagaggtaacaagtgccaaacagtgtaaactttgaaggccattttaatgactttaacttttattctgaatgtgatggaacaactttggagaagtaatgtgagttttgatagagttactctgacattctggctactgtgttgaaataagactgtgaggggtcaagagcaaaagttgcttttgcttctgtttagtagttcatgattaggagactttgcagtagacca

SEQ ID NO: 911015 - DNA, 618 bp, Homo sapiens
ctattttttaactttttgttatttctatttatatcttattataccatctatgtcttgaaaagttgtagttaatatttttsattggctcatagtttagtctctctacttagagtaagagtagtttatacatcatagttacagtgttatgacattctgcatttttctgtatacctactattaccagtgagttttataccttcaggttgttacttattgctcattaatgtccttatctttctgattgaaatactccctttagcatttcttctaggacaggtctggtgttgacaaaatccctcagcttttgtgtggaaaagtctttatttccccttcactttgaaggatactttcactggatacactgttctagggtaaatgtttttttccttcagcactttcaatatgtcatgccactctctcctggcctgaaacgtttctactaaagagtctgctgccagatatattgtagcgccatcgtatattattggtttcttttctcttgctgcttttaagatcctttttttatccttgatctttgggactgtgattattaaatgccttgaggtagtcttctttgacttacatctgcttggtgttttataactttcttgtacttgg

SEQ ID NO: 911016 - DNA, 675 bp, Homo sapiens
aaatttcatatagttttgagttttgaaagtatactaataccttctatatttaaaaaattaaatcactaagaaaaaggggaataaaatctattactgagagcaaactgaagcagacttgctttttagattgagcaactgaataaatgtgctgctctacaacccagaatttttattgtagaagaacagacatgcaagaatgaaaaggcaaagaactcagtggagaaggataagaactggaggtgctggtataaattcattatttctaagttatgtatatgtatatgaatatttatgtgtatatacataacgtgtaggggtgttcaatcttttggctttcctggagcacattgaaagaagaatcgtcttgggccacacacaagatacactaacactaatgacagctgatgagctacacacacacacacacacacacacacacacacacacccaaaaaaaaaaaacacctcataatgttttaagaaattttatgaatttctgttgggccacattcaaagccatcctggaccacatgtagcctgcgggccatrggttggacaaacttctgtaagtgtatacacatgcatgtatttcgtgacaccacctgctgaaagggtgaagaagtaaacaccctccagtagcaatgagcacacccagcacccattccccactaaagga

SEQ ID NO: 911017 - DNA, 588 bp, Homo sapiens
aactctattcttcaaaaataccaatgacaaaaactaaatcctagaacctacttggaggaaggggtagattatgaaggacwtaagatcaaatgacataactgtaatatggctggtacattagataaacatacggcattgatgtaagtttaggaatttgatagcaggattgtgatttttaaagaatattcctactattaagaaatacatactgaaatggtggtaaaaaggcacaatgtatgtaattaatcctcaaatagtagggggttgggggaatagagacacacagacacacacacatacacacacacacacacacagagaaagtgagagagggcatgcccaatgataatgaaatgctaacaacagatatatctaagtaaatgggatatgggtattatttttattttttccaacttttagagtttgaacttattttcaagtaaaaactttctaaaaacgcataacataccaaagaacagacattcttgagataaaaataggaaaaagaaacctatctgacgatgactggtttacaataaagatcctgaaaagatcaaccccactccagctcaccagggagcagcccca

SEQ ID NO: 911018 - DNA, 588 bp, Homo sapiens
aactctattcttcaaaaataccaatgacaaaaactaaatcctagaacctacttggaggaaggggtagattatgaaggacakaagatcaaatgacataactgtaatatggctggtacattagataaacatacggcattgatgtaagtttaggaatttgatagcaggattgtgatttttaaagaatattcctactattaagaaatacatactgaaatggtggtaaaaaggcacaatgtatgtaattaatcctcaaatagtagggggttgggggaatagagacacacagacacacacacatacacacacacacacacacagagaaagtgagagagggcatgcccaatgataatgaaatgctaacaacagatatatctaagtaaatgggatatgggtattatttttattttttccaacttttagagtttgaacttattttcaagtaaaaactttctaaaaacgcataacataccaaagaacagacattcttgagataaaaataggaaaaagaaacctatctgacgatgactggtttacaataaagatcctgaaaagatcaaccccactccagctcaccagggagcagcccca

SEQ ID NO: 911019 - DNA, 607 bp, Homo sapiens
tctcttcatagtcaggtattctggggattgcatctgttttgaggcccaatgaggggatagttagttcatgagtgcaggacatcttcggatgagattaatatacggatggggatctctactgggagaattgttyggttatcaacatccaggaatcgaagttttcctggctttaagtctgctgttgggactatataagaatcgaagactaattcttcatagcctgtatattcatagcttcaatatcattggtggccaattgctttgacagtgatagaagggttgttaacctcatctgttatgtacagaacacgtaaggataggagggcaattaaaattaagataatggcaggtaaaatagttgagacagtctcgattttttaggcatctatgatgctagtatgagttaattttttggtgagtattaggaaaataatgtataggaccagggaactaattaggaaaataattataagagcgtggtcatggaaagtgagctctataataggggatatagcgtttgaaggccaaattgaactagacgagctattaaaacatgcgagagttaacttatacattaaaagttgaggcaatatctcattttttttct

SEQ ID NO: 911020 - DNA, 649 bp, Homo sapiens
atgtctacaggatgttctactccatgatctagaccatttgcgtgacctcgcgcaaaggcaacagtactaaccttggagtctaaacgccaagggtatgaacgtgggcacgtgtcgcatacttcccagttcatgcatactttccaaacaacgcacagccatgagtgggagaggggagaggattgaatttcgtgagcagcatgcaagatgtattgacaggactgcaccgagagtcttttctccaaggaaggtcaaattttaaccttttaacgttggaagtgaagacacctgatatgatcattgacaaaccaagaaatactaaaaaccctcaagagttgaagcattcttttacaatccttgttttagatacctttttaatagggtgaccaattgccccagtttgctcagcactgagaagtttcccaggacacagaacattccaggctgaggcaggatgcttggtcaccctacttctgcacgtcagcgtgcttgggaagcgccctgcaccaccggcattcctgggccccagaacccaggcactgggccggatcaggccccargccccaggccccaggcactgggtgggatccgcagaacatgggtcctgcctctcagcagttcaggtctcttcacatttctcagcctcctatgg

SEQ ID NO: 911021 - DNA, 530 bp, Homo sapiens
ccaacctgaaagagtcaatgcagcattccaaatggtccacaactgagtactttctccatcaaataaaggaggcaattaagatatttaaaatcagaataaatgtttgagataatgtrgaacaaacaataggttaattgactgttgctgttgattgttttgtttggttttgcttcccagtgttaactgttcccagtgttaactgttgccatgatattctgtggatgtcatttaattcctagtccaagacgtcactaaagcatggggagaatgcagtttgttggtgaaaaatttatctgtatgcaatactcatgtggactttattcctattaaaataatatgctttgtttagccaatgaattgaaattttaaaaaaattcctttgtgctaaagtcatccctgtattttatttcaagacaaacccaaataccttataagcaaagagaaacattcagttagccctttgtcaaactctggcatattgatttcttaaaacaaacatgttttcttttgttttcttacacatacctttt

SEQ ID NO: 911022 - DNA, 582 bp, Homo sapiens
caacccagaatttcatatccagccaaactgagcttcataagtgaaggagaaataaaatgctttacagacaagcaaatgttgagggatttcgccaataccaggcctgccttacaggagctcctgarggaagcactaaatatagaaaggaaaaaccggtaccggccactgcaaaagcaaatcaaaaagtaaagaccatcgaccctatgaagaaacttcaccaactaatgggcaaaataagcagctagcatcataatgacgggatcaaattcacacataacaatattaaccttaaatgtaaatgggctaaatgccccaattaaaagtcacagactgacaaattgagtaaagagtcaagacccattggtgtgctgtgttcaggagacccatctcatgtgcaaagacacacataggctcaaaataaagagatggaggaaaatttacaaagcaaatggaaagcaaacaaaaagcagggattgcaatcctagtctctggcaaaacagactttaaaccaacaaagatcaaaaaagacaaagaagggcatcgcataattataaacagatcaatgcaacaagaagagctaac

SEQ ID NO: 911023 - DNA, 582 bp, Homo sapiens
caacccagaatttcatatccagccaaactgagcttcataagtgaaggagaaataaaatgctttacagacaagcaaatgttgagggatttcgccaataccaggcctgccttacaggagctcctgaaggaagcactaaatatagaaaggaaaaaccggtaccggccactgcaaaagcaaatcaaaaagtaaagaccatcgaccctatgaagaaacttcaccaactaatgggcaaaataagcagctagcatcataatgacgggatcaaattcacacataacaatattaaccttaaatgtaaatgggctaaatgccccaattaaaagtcacagactgacaaattgagtaaagagtcaagacccattggtgtgctgtgttcaggagacccatctcatgtgcaaagacacacataggctcaaaataaagagatggaggaaaatttacaaagcaaatggaaagcaaacaaaaagcagggattgcaatcctagtctctggcaaaacagactttaaaccaacaaagatcaaaaaagacaaagaagggcatygcataattataaacagatcaatgcaacaagaagagctaac

SEQ ID NO: 911024 - DNA, 579 bp, Homo sapiens
gcaaggggagggatagcattagcagaaatacctaatgtagatgacgagttgatgagtgcagygaaccaccatggtacctgtatacttatgtaacaaacctgcacattcttcacatgtatcccagaacttaaagtataatttaaaaaaatcacatatagagtaagataactaaccagaaaagttgaaattaaatgtatatagaaaagttggaaaatttttgcaaatatatgaaatagctagaccaataaaaattattgtaattaagcatttaattttgctctgaatttcttaccaatcaagttgacatttttaaaaagaaaaggatgtaattctcattataaagtatctcgatataaaaatattaatataagaaagcctttatttctggagaacattgtaaggggaatgtactcattctttatttctgggtccctaatcacgatacagtcctatatttctcaagctgtggagaaaatatccccagagtatggggatatgccagggtgtacctaaagccacagatgactttgagactcagcttaacaattttgggtaaaatttacgtaagcttacatgttt

SEQ ID NO: 911025 - DNA, 579 bp, Homo sapiens
gcaaggggagggatagcattagcagaaatacctaatgtagatgacgagttgatgagtgcagcgaaccaccatggtacctgtatacttatgtaacaaacctgcacattcttcacatgtatcccagaacttaaagtataatttaaaaaaatcacatatagagtaagataactaaccagaaaagttgaaattaaatgtatatagaaaagttggaaaatttttgcaaatatatgaaatagctagaccaataaaaattattgtaattaagcatttaattttgctctgaatttcttaccaatcaagttgacatttttaaaaagaaaaggatgtaattctcattataaagtatctcgatataaaaatattaatataagaaagcctttatttctggagaacattgtaaggggaatgtactcattctttatttctgggtccctaatcacgatacagtcctatatttctcaagctgtggagaaaatatccccagagtatggggatatgccagggtgtacctaaagccacagatgactttgagactcarcttaacaattttgggtaaaatttacgtaagcttacatgttt

SEQ ID NO: 911026 - DNA, 609 bp, Homo sapiens
gtgcacagtcttctctttactcattctaccttcttttgcmaggtgagctcaattgctcctatggcttcagttaccatctgtatcccaatgacagacaaatttacatctccagtggctcagacatcctgatcaatgaggctgaggttctacaggacatcacacatctcacaattgcttcaaatgtgtgattaggcactcaactttttcttctctccctccttaccccaggaagaaaaaaaaaatggcctcatctaatctttcctatctcagtgaacaattctattttccactcagtcggccaagctagaaaatgaacagtcaacttgaacacatgcctccctttctccagactgtacgacatctatttaattgttggacctcatcaactagatcccatcaatggactacttcttaaatccatccactcctagcccaccattacttcttaccatagcctcctaagtggtttcctcagctctattcttcacagtgcagccagaggcaccttttaactctggtctgcaactctgattacatcactgcccacaggacttgactctgtttgcttctatttcatcgcgcacaactttctacctcaccttttctgct

SEQ ID NO: 911027 - DNA, 420 bp, Homo sapiens
ctctggaatcagactgcattcaaacctttgcttctccacattttggccgtgtgaccacaagctatattgtaacctttctgagtctaattttcttgacttgtaaaacacagctaataactccagagggttgttgggaaaattaaataaaataatgtacgtaattgtttaccatgatgccaggccatacaagtgcacaataaatggtaagtattactatttttatcctcctgttaaagagctaagaagttgtttagggcagaagtttctagacagagttgtgtgagttattcttttaaataggaaatagtttattagacagcttgttaagaacactagagtctcataaaaagaggtcatctattttactttctgggtaaaattttatwcccccacaaaaattcttttcaattctttctctaa

SEQ ID NO: 911028 - DNA, 354 bp, Homo sapiens
ttgaccaggtaataagccagctccacaatgaacccataaatgtgtgcaatgataaaaagggcctagacaagaaagtttccaaaccctaaagactagatcgaataagctacatatgaggctktgtggttaaggcaatctgaccatgtgcgatctcaacccataatgtattttctcattacacaattaaagaaatattgcataaaaagttatccataatacaaaagctaccattaggaagcacggtagaacaactggttttaatttaaatattgcgtaagcttacttattattataaatgaatctttggtgttctgacaatttattacactgtgcttggtatttggtacaatatac

SEQ ID NO: 911029 - DNA, 610 bp, Homo sapiens
attttttatgtgtacaggtgtaactaatggctagatactgagacatgatgttgggggattaaagggtaaatgcatctgtaatgttgatagctattgccagtctctcttcctggaacgttgtagcattttattcycccaccaataaatgtttgagggtacctgttcctacacagccttgcccaaggaagtgtatcacacttctggattttgccaatccagcagatgacaagtgttttcttagtgtggttttaatatttgatttctttttttttcttttttcttttttctttttttcttttttttttttttgagacagggtctctctctgttgcccaggctggagtgcagtggcactgtcttggctcactgcaaactcaacctcccaggttcaaatgattctcatgcctcagcctccccagtagctgagattacaggccttgtatgtgtgccaccatggccagctaatttttgtatttttagtagagatggggtttcaccatgctggcctgtctggtctcgaactcccggcctcaaatgatccgcccacctcagcctcccaaagtgctgggattataggggtgagccaccatgccagcctgatttcttatca

SEQ ID NO: 911030 - DNA, 545 bp, Homo sapiens
ttggtgttagaagctgatcattctctatagcatcctaatttgtaattttagtttgcaattgacattatttcagttaacaagacatcttagatattgaaatattggttaagttgttraaaattctttcagtaactatcaggtaagtaaaaaaccattgttaattggtctttgtctctacacatgtgcatgcacatacaaatgcacatctctttttttaaaccacaaatttgcctttgtattaatattctcaataacattatatttaagtatgttacattaaatcttgggaaatagtgaaattttttttcttttcatttcagaaaatagagaatcctgatgaactggcagaacttataaatatgaatcttgcgcaactttgctcacttttgatggctttatggggacagtttctggaagttataacgctacacgaagaactaagaatattattagcacaagagcaccatactttgagggtaagttaaagagaagtgattttagagcattttaatgagtattatttacctttagaaaatttttatgaa

SEQ ID NO: 911031 - DNA, 568 bp, Homo sapiens
ggcagctcctgctctacctccttctgctcctcctaagcctagacccaaacctaaacccaaaaaatcacctgtgcctccgaaaggggccactgctggggccagccacaaaggtgatgaagtgcctcccattaaaaaaaataccaaggctcctggtaagcaggcccccgtccctccacccaagccagcaagccgaaacacgacccgagaggctggtgagtatgcccccagtgccctgtggggtcacttctagggtgcttggctctgggatggggctaattgtttcttctaggtgtgatgggcttttggtgtcttaggacattacaccagcaggttcagctttgacacaaagaatgcccaggagattcctttgttgctctctaccaaaggaaattcaacccattgaatagttcacctcattagtttttgagtgaatatactggtttcatsttgagtatccactatcagcaccagttgaaggatactgggagtagtatgcctgatgaatgacaatgatctgatataacattatttagacattgactgaccttctacctatatgagcctatgg

SEQ ID NO: 911032 - DNA, 670 bp, Homo sapiens
gctttaatcatggcactgcactccagattgggtgacaaagtgaggccctgtgtctctctctatatattttatatatatatatatrtgtgtgtgtgtgtgtgtgtgtgtatgtgtgtgtgtgtgtgtgtgtatagatatatatacttatcctttacttttattaataaacaccacatttcattattttgttgacagaaattatgctcatagtgaggggggaaaagtgtttttccatctgaattggaattttgtcttgtttgttttctgtctattattctattttccaggaattttgaagcctgatttttaacattgaacatattttctgccctccctagattgcgtcagatatgcaacttgaatagcatgtgttatgttcttatccaagtagttgattaaaaggctgaattggaaagctttatgcattatggcatattagtactgtcagtacatgaaatagttatcgttaagtatttcagtttgctataaatcagtttcctctaagttaaccgaattctctagtccagctgtttccatcttaccttaagaaaagtagtgacattttcaggggccttagtgaaatctttctatactacctcctgtgactggcccatcaatatgccaaatctagcccaaccaaaaaagataattatgttcatttagagtcact

SEQ ID NO: 911033 - DNA, 604 bp, Homo sapiens
ggcctgctttttcatctcaagaagttcatagagaaaaatcactttttatttatgtttcagataaatgactttttatcagaaaggccttccctgaccatgtatcctatttaaatgttattaaatattatccctgatgtgctttattattattcttagaacttattaaaataggacacacatatttgttcacttttttctttattcttttctcctttactagaatgtgagctccatgaggccagaacctttgtcttttttttttgtcttaactgttgaacagtgtctggcaatacagtaggagttcttttaatatttgttgagcaaatgaagaataatcctttatttacatgtatccttaatctcagccagatcttccaacaagtcctgggtttactagactttcttgttcttcactcaggttcttacaaatggtcaccagaaggaggacaatcacaagtaagtcactcaggcaaaaactgagagttcacaaaggcaaaggattataaaaatattratgaactttgaaaaactcaagtctgcatcatgtccttaagaatagaaacagattataaagaaaaggtataattagataaaaatataacta

SEQ ID NO: 911034 - DNA, 644 bp, Homo sapiens
tcaaagacaaacctttgatacctagtgcccttgttgaaccctttgattaaatggttatgcctagatggcataatgggtggattgaagttatgattcacgtaactcttaaattgtgagagatgtctaaaatgttcatacttgagaggaagagaatgtagaaatagacacactaagtctttcctacaagaggccaacttgttttgcaagtatgggattaaagataggatttcattgtataagccaaggagcttaaaaataaactcataattgagattggaacaatgagcattatgtacacttttctactaaactcacattcgaaagtgtgtgaattgttgaaaaatgattttatgaatatctattttggaaatatctccagaaatctcttcccagtctgaccaagatgttacaaacatattttagtttcttttgccttcaattggtttagattgattactcttctaaagtaaagtaataaataatgtggacataaagcaagcagaaagcagatattttgctgcaggaggaagtagrtaaaatagcggcagaattaaaggaccaacctgtagccttaggagatcccatcagaaatcaatctgaatcacatacatacttctgtgtggtgtcagatatttctcagtgcc

SEQ ID NO: 911035 - DNA, 573 bp, Homo sapiens
tctaattgacattaaatccggcaatcatgtcactgactcatttctatagccaaaattattctcaatatactgtttgcatatctttagtagaacattttttattccaccagcaaacataaagttagaaatgttttattatctaccatatgaggtagcttaatagtatcaaaaagagcataatatctgacaagtggttagttttgtgtcttcataaaaatgttatagacgtagtatcaactttcgatcaagtagttcatgactgaggatgtatactggacccttaattttctgaatgtattttctatatttattaagttaatcaaaacaaaaacaaacaaaatttcttaccatttctacttagctgtgaagtttctaaaactaaaaataaaccaaagttctttctggcagtagtcacttctttttctaactatccattgtatatctccccttgaaagtcccttagtcattatacaatgaatttgttttttaaatgargcggtggttatattttaagaagggcatctttccacaaaaagcatatatacataagtgtttctctcattttaaagtgtc

SEQ ID NO: 911036 - DNA, 573 bp, Homo sapiens
tctaattgacattaaatccggcaatcatgtcactgactcatttctatagccaaaattattctcaatatactgtttgcatatctttagtagaacattttttattccaccagcaaacataaagttagaaatgttttattatctaccatatgaggtagcttaatagtatcaaaaagagcataatatctgacaagtggttagttttgtgtcttcataaaaatgttatagacgtagtatcaactttcgatcaagtagttcatgactgaggatgtatactggacccttaattttctgaatgtattttctatatttattaagttaatcaaaacaaaaacaaacaaaatttcttaccatttctacttagctgtgaagtttctaaaactaaaaataaaccaaagttctttctggcagtagtcacttctttttctaactatccattgtatatctccccttgaaagtcccttagtcattatacaatgaatttgttttttaaatgaggcsgtggttatattttaagaagggcatctttccacaaaaagcatatatacataagtgtttctctcattttaaagtgtc

SEQ ID NO: 911037 - DNA, 577 bp, Homo sapiens
ttatcctcacctttatgcctcgaaataccctgaggcttgaccatcttttgacaccargaagtatgggaactcgtgaaggcctttttgttcctgagttggggtggaaaataagaatcgtccactaggcctctgctgatatcatcctctctgggagtgtaaggagtgcctcattaccattttcaggtggtggccactgatattataggggactctataaaaccctgtaaaatcttgactctctactagccctcttttgacatcacctccaaaatggaaagaaaaggccaccttatcactgctggatagttctagaagttcagatttcctagtctccactggctggcatggcagatagagtgaggatgttccttaagactgggcggaaatgcaagtgccgacttccacatggtcttctgtgacaccacctcagcagggagattacctcatcgcagcttagtggaggtgaaattccaggctccccattcagcattttttagccaagaccacagattctttcttcttttttgtttttctctgtagtgtttggctggagtagagttgttattgtttaaaaggt

SEQ ID NO: 911038 - DNA, 577 bp, Homo sapiens
ttatcctcacctttatgcctcgaaataccctgaggcttgaccatcttttgacaccaggaagtatgggaactcgtgaaggcctttttgttcctgagttggggtggaaaataagaatcgtccactaggcctctgctgatatcatcctctctgggagtgtaaggagtgcctcattaccattttcaggtggtggccactgatattataggggactctataaaaccctgtaaaatcttgactctctactagccctcttttgacatcacctccaaaatggaaagaaaaggccaccttatcactgctggatagttctagaagttcagatttcctagtctccactggctggcatggcagatagagtgaggatgttccttaagactgggcggaaatgcaagtgccgacttccacatggtcttctgtgacaccacctcagcagggagattacctcatcrcagcttagtggaggtgaaattccaggctccccattcagcattttttagccaagaccacagattctttcttcttttttgtttttctctgtagtgtttggctggagtagagttgttattgtttaaaaggt

SEQ ID NO: 911039 - DNA, 629 bp, Homo sapiens
taaatataaatatactatacatcagaaaggtaaaccaatagagatatttatgtagtaatatttaaatgtgccaaaggcagtgatatccttaaaacaagatcacttttagctgccctgctttgcacagatattgcagaatcttcaaaatagaaaaaggtattatgtatgaataggagtcatttgaattggaaaatagaaacttaaatcatcttgtccatcacactgtcaaggtagatttcctttaacatgctctatgacttaagatataaaagtgtaaaagaaaaagaaaagcttaaaatttctgaatattatcactttacttttttagggaataagccttaatatgtatctaatttgacattgttaatattttcatacttatataggcttgactttgattaaatcaagcaaactatcagtttgtctttagtgaatgaagtcttcttttatatatgtgtagcatataccttttgtttaattttctgtactttatttaatagtaatayatctggtacaataatcttaacaaaattgaagttttcagtaccgaatctagaaatgttggatgcctggtgagatgtgaataatttatatgtaaaaacaaaaactccaacctttattttcctttt

SEQ ID NO: 911040 - DNA, 629 bp, Homo sapiens
taaatataaatatactatacatcagaaaggtaaaccaatagagatatttatgtagtaatatttaaatgtgccaaaggcagtgatatccttaaaacaagatcacttttagctgccctgctttgcacagatattgcagaatcttcaaaatagaaaaaggtattatgtatgaataggagtcatttgaattggaaaatagaaacttaaatcatcttgtccatcacactgtcaaggtagatttcctttaacatgctctatgacttaagatataaaagtgtaaaagaaaaagaaaagcttaaaatttctgaatattatcactttacttttttagggaataagccttaatatgtatctaatttgacattgttaatattttcatacttatataggcttgactttgattaaatcaagcaaactatcagtttgtctttagtgaatgaagtcttcttttatatatgtgtagcatataccttttgtttaattttctgtactttatttaatagtaatatatctggtacaataatcttaacaaaattgaagttttcagtaccraatctagaaatgttggatgcctggtgagatgtgaataatttatatgtaaaaacaaaaactccaacctttattttcctttt

SEQ ID NO: 911041 - DNA, 629 bp, Homo sapiens
taaatataaatatactatacatcagaaaggtaaaccaatagagatatttatgtagtaatatttaaatgtgccaaaggcagtgatatccttaaaacaagatcacttttagctgccctgctttgcacagatattgcagaatcttcaaaatagaaaaaggtattatgtatgaataggagtcatttgaattggaaaatagaaacttaaatcatcttgtccatcacactgtcaaggtagatttcctttaacatgctctatgacttaagatataaaagtgtaaaagaaaaagaaaagcttaaaatttctgaatattatcactttacttttttagggaataagccttaatatgtatctaatttgacattgttaatattttcatacttatataggcttgactttgattaaatcaagcaaactatcagtttgtctttagtgaatgaagtcttcttttatatatgtgtagcatataccttttgtttaattttctgtactttatttaatagtaatatatctggtacaataatcttaacaaaattgaagttttcagtaccgaatctagaaatgttggawgcctggtgagatgtgaataatttatatgtaaaaacaaaaactccaacctttattttcctttt

SEQ ID NO: 911042 - DNA, 579 bp, Homo sapiens
gtaagacaccaagctggggtggccaaagatgttgcagctctgaaagagactcctttcttttttctgtagaaggagagggaagagtaaagaggactttrtcttgcaacttagatactacatcaggccacagtggggcagtggagtaaggcactgggcagtctttttttttttttttttttttttttttttttttttttttgagacaaggtctttctctgtcacctaggctggagtgcagtggcacaatcacctctcactgcaacttctgcctcctgggcctaggctcaagtgatccttccacctcaacctctcaagtagctcggacagcctgccccaagggcctgtgctggtggctgccatggggagactcctctgcttttggaaatgggagggaaagaccttgtcttgtgggttgggtgtcagctcagctgcaggttaatagagaaccaggtagattcaagaggtagggaggatcacaaaaacaaacaaacaaacaaacaaaacagaaattaataacaaaaaggcaggagtaaatccttacttatgaataataacattgaatgtagatggactaaactc

SEQ ID NO: 911043 - DNA, 579 bp, Homo sapiens
gtaagacaccaagctggggtggccaaagatgttgcagctctgaaagagactcctttcttttttctgtagaaggagagggaagagtaaagaggactttgtcttgcaacttagatactacatcaggcmacagtggggcagtggagtaaggcactgggcagtctttttttttttttttttttttttttttttttttttttttgagacaaggtctttctctgtcacctaggctggagtgcagtggcacaatcacctctcactgcaacttctgcctcctgggcctaggctcaagtgatccttccacctcaacctctcaagtagctcggacagcctgccccaagggcctgtgctggtggctgccatggggagactcctctgcttttggaaatgggagggaaagaccttgtcttgtgggttgggtgtcagctcagctgcaggttaatagagaaccaggtagattcaagaggtagggaggatcacaaaaacaaacaaacaaacaaacaaaacagaaattaataacaaaaaggcaggagtaaatccttacttatgaataataacattgaatgtagatggactaaactc

SEQ ID NO: 911044 - DNA, 638 bp, Homo sapiens
ctcaaggatagactatatgttaagccacaaaacaagtctggagacattcaaaaaatttgaaataatatcaggtaccttctctggccacaatggaataaaactatyaatagaaataaataacaagaggaatttttcaaactatacaagctcatggaaattaaacaatatgctcctgaatgaccagtgaatcaatggagaaattaagaagagaatttaaaaatctctttaaacaaatggtaatggaaacacaacataccaaaatctatgggatatagcgaagcagcactaagaggagagtttatagttctgagtgcctacatcaaaaaagtagaaaaacttcaaataaacaacctgatgatgcatcttgaagaactaggagaggaagagaaagccaaacccagaattaatagaagaaaagaagtaataaagactcacgaaaggaaagacttcacatgttctcacttatttgtgggaactgaaaattaaaacaattgaacaaatgtagatagaaaatagaaagatggttaacagaggctaggaagggtagtgagggtgtgtgtgtggcaaggagtgggattgcttaattggtacaaaaaataggaaaaacaaatgacacctagtattttagcacaacagga

SEQ ID NO: 911045 - DNA, 583 bp, Homo sapiens
attatacactgtatgcctgtatcaacatatctcatgttcctcataaatatatagatctattatgtactgataaaaattaaaaagaaagagtggaagacacagaagataamaccatttgatgatagaggcagagattggagtgatgcatctataagtcaaggaacaccaagcacagtgacagccccagaacctggagagaggcatgggacagattattcttccagagcttgctgaaagaccagccctggggaaatgctgatttctgatgtctggcttctgtaactgtgtgatatggtttggctgtgtccccatccaaatctgaacttgaattgtatctcccagaattcccacgtgttgtgggaaggacctagggggaagtaattgaatcatgggagtaggtctttctcatgctattcttgtgatagtgaataagtgtcacgagatctgatgggtttatcaggtgtttctgcttttgcttcttcctcatcctttcttgctgccaccatgtaagaagtgcctttcaccctctgccatgattgtaagacctccccagccatgtgaaactgtaagtccaattaaactt

SEQ ID NO: 911046 - DNA, 646 bp, Homo sapiens
tggggcactgcctagtggagctgtgagaagaagcccaccatctgtcagaccccagaatggtagatccrcttgcaccatgcacctagaaaagccacagacactcaatgccagcctgtgaaagcagacaggagggaggctgtaccatgcaaagccacaaggctggagctgcccaagaccatgggaacccacctcttgcatcagcatgacctggatgtgagacgtggagtcaaaggtgatcattttggagctttcaattagactgtcccactggatttctgacttgcatgggccctgtaacccctttattttggccaatttctcccatttggaatggctgtatttacccaatacccatacccctattgtatctaggaagtaactagctttcttttgacttcacaggctcataggtggaagggacttgccttgtcttagataagactttggactgtggacttttaggttaatgctgaaattagttaagactttgggggaatgttgggaaggcatgattggttttaaaatgtgaggacatgagatttggtggggccaggggtggaaatacattgtttggctgtgtccacatccaaatctcatcttgaattgtatctcccagaattcccacatgttgtggatgggacctagt

SEQ ID NO: 911047 - DNA, 646 bp, Homo sapiens
tggggcactgcctagtggagctgtgagaagaagcccaccatctgtcagaccccagaatggtagatccgcttgcaccatgcacctagaaaagccacagacactcaatgccagcctgtgaaagcagmcaggagggaggctgtaccatgcaaagccacaaggctggagctgcccaagaccatgggaacccacctcttgcatcagcatgacctggatgtgagacgtggagtcaaaggtgatcattttggagctttcaattagactgtcccactggatttctgacttgcatgggccctgtaacccctttattttggccaatttctcccatttggaatggctgtatttacccaatacccatacccctattgtatctaggaagtaactagctttcttttgacttcacaggctcataggtggaagggacttgccttgtcttagataagactttggactgtggacttttaggttaatgctgaaattagttaagactttgggggaatgttgggaaggcatgattggttttaaaatgtgaggacatgagatttggtggggccaggggtggaaatacattgtttggctgtgtccacatccaaatctcatcttgaattgtatctcccagaattcccacatgttgtggatgggacctagt

SEQ ID NO: 911048 - DNA, 613 bp, Homo sapiens
tatcctgcattccagaagctccagccatgsctaaaagaagccaaggtacagcttgggttttggcttcaaagggtggaagtccaaggtattggcagcttccatggggtgttgagcctgcaagggcacagaagtcaactattgaggttggggaacctccacctagatttcaaaagatgtatggaaatgccggatgaccaggcagaagtttgctgcattgggggcccctcatggagaacctctgctagggcagtgtggaagggaaatgtggggttggagcccccacacagagtccctactgtagcactgcctagtggagctgtgagaagagggccactgtcctccagacccctgaatggtagatccactgacagcttgcattgtgcacctgaaaaagctgcagacactcaatgccaacccatgagagcagctgggagggaggctataccctgcaaaaccacaggagcagactgcccaagactatgtgaacctgcctcttgcatcagtttgacctgaatgtaagacatggagtcaaaggtgatcattttggagctttaagagttgactgtcctgctggatttcatacttgcatgggccctgtaatccctttgttttg

SEQ ID NO: 911049 - DNA, 661 bp, Homo sapiens
gctatatctatgcacagttaagttatggcacttatagttgccatataagtgatgtgttagcaactgctagttctaataatcccctgtatatcctctcctgtaataaaggaactttcattttgagctgaggtcacrgtggccaggaagttgcagcaaattgactaagttctgggcaatgagttggaggaaaagtgtgccattttcaggccatagtcttaaaggaagaagtgtagtttttctgctcctctctaaaacctgttgcttggatctcagacattcttggataggaagagaatgagagccacaccctagggatgatggagcagaaagctggcaacggagtcactgaactgaagacaaaataaacgactccttttgtgtaaccccctgttatttggaggtctatgttatgtttctgctaattgatactaattactacaagaaaatagctaattgtgtgaaaacagcatctcctttgctcaagttactggccagttcatttgttctgggagctcctgggttgagctaaaatccctagtatattaatcccacctgaaaattctggggcttgaagcattagtgttttctgaagatagttggttgtctctaggttattaatttgtaagacattataaatgtagcaagtagtatctgaatagat

SEQ ID NO: 911050 - DNA, 605 bp, Homo sapiens
ccttcccctccttgcccatgacatcaaggggagtatagataatgtatatgtgcttcaaatagaagttcctggagtggctcccccattgctctaaggatgaagtcttaacttarcatggtttgtaaggcctcacgtgatctagctcctgcctatttgtctaacttcagtctcatccccaccattctattctagccatattgaatttctttcagagtctcttgcctatgggtcttggcatatgctgtaccatctgccaggaacatgttccacctcttcactggccaattcttttttatccttgaggtgtctgcttaagtgtcgtttcttccaggaagtcttcccagccctttgggttgggttcccttcctatgtttccctattatggcacctcctatactgcattgtaactgcttgagtagttgcctctgctgagactgtgagctccaggggacagtgaccatgactatgttgttcatcactgtgtcttcagcattaagcacagtccaacacacagtcaataaatgtttgttaaatgaatgaagaaaagaagaggggaagggaagatatctgtagcctgagctgactcagttgctgttgtcttggtt

SEQ ID NO: 911051 - DNA, 661 bp, Homo sapiens
atctttttcaaatttggggagttttggcagctattattttaaacatttttctgttctactctctgctcctttgctacgaagcttatcatgcatacaccagtatgtctgatgttgttgcataggtgtctgaggctctgttcatttttgtccactcccattttttcctgtttctcaggttaagtaataaaaacgacctatctgtaagttcacttactcttttttctgttaactcaaacccacagttaagcccctctagtaaatgttttctctgagttattgtactttcaattacaaattcttatctctcttttataaattatttccctttattgatattatctattgagtgaaacattgtcctcataatttacttctttagacacagttttgtttagttcatcgaagatatttgaattgtcttatttaaagtcattgcctaataaattcaacatctggattcctcagggacagtttctagttaatgcttttattattgcagagaagcatctttttctgtttctttgcatatctcaagttatygttgaaagatgggcattttaaaaaatattatttggcatgtctggaaatcagattccaactctttcctagagtttgttattattatttgttgttattttcagtggtgctccttgttgagtaa

SEQ ID NO: 911052 - DNA, 661 bp, Homo sapiens
atctttttcaaatttggggagttttggcagctattattttaaacatttttctgttctactctctgctcctttgctacgaagcttatcatgcatacaccagtatgtctgatgttgttgcataggtgtctgaggctctgttcatttttgtccactcccattttttcctgtttctcaggttaagtaataaaaacgacctatctgtaagttcacttactcttttttctgttaactcaaacccacagttaagcccctctagtaaatgttttctctgagttattgtactttcaattacaaattcttatctctcttttataaattatttccctttattgatattatctattgagtgaaacattgtcctcataatttacttctttagacacagttttgtttagttcatcgaagatatttgaattgtcttatttaaagtcattgcctaataaattcaacatctggattcctcagggacagtttctagttaatgcttttattattgcagagaagcatctttttctgtttctttgcatatctcaagttattgttgaaagaygggcattttaaaaaatattatttggcatgtctggaaatcagattccaactctttcctagagtttgttattattatttgttgttattttcagtggtgctccttgttgagtaa

SEQ ID NO: 911053 - DNA, 552 bp, Homo sapiens
acacatattatagacaatattctccaccacatgctcatacattgctacttggtgcagattacttttgtagatagtgaatcttgtctattttatgttggttcttattgatgttactttgagtatactgttattttctaatctcaaagggggactatctcactgttacgatactaaccagtatactttgtcctttttttcattctttcttcttttttggaccaatatactttgtccttttctttttttgagatggagtcacactgtgtcatccaggctggatgcagtaagccatctcagcttactgcaacttctacctcctgggttcaagtgattctcctgcctctgtctcgcaagtagctgggactacaggtgcacaccaccacgcctggctaatttttgtattttcagtagagacagggtttcaccatgttggccaggctgtttttgaactcctgacctcaggtaatccacccctctcagmctcccaaagtgttgggattacagatgtgagccatggaacccagccctctttttctttgataatgaaaactt

SEQ ID NO: 911054 - DNA, 610 bp, Homo sapiens
tttgttagaggctgtggttgctttcaaaaattagaataggaacaacgacttgtaaaaattcaacacttttatttttgagacagtctcactgtgttgtccaggctggagtgcagtggcttgatctcagctcactgcaacctccccctccagggttcaagacattctcctgcctcagcctcccgagtagctgggattacagatttgtgccaccatacctggctaatttttgtatttttagtagagaaggggtttcaccatgttggccaggctggtcttgaactgccaacctcaggcgatcctcccccctcagcctcccaaagtgctgggagtacaggcgtgatttaacattttaacattttaaactaccacttactacattcactgtgtctgtgatttaatatacctttttcagtggccacaaaattataaaatggatacagaatagtctcttcaaaaaattaaggaagttctttcttttttctttttcttttttttttttttttggtttgagayggagtcttgctctgtcgcccaggctagagtgcagtggcacaatcttggctcactgcaacctccgcctcccgggtttaaggaattctctgcttcagcc

SEQ ID NO: 911055 - DNA, 612 bp, Homo sapiens
gccttccaccttctagtaggccccattgttggttgtttctgtccacgtgttctccttatttagctcccacttataagtgagaacatgcagtctttggttttctgttcccgcattagtttgctaagaataatggtctccagttccatccatcttgctgcaaaggacatgattccattctttttatggctgcatatattccgtggtgtatatgtaccacattttccttatccaatatactgttgatgggcctttaggttgatccatgtatttgttattttgaatagtgctgcaatggacatatgtgtgcatgtatctttatggtagaacaatttgttttcttttgaatatatatccagtaatggtgttgggtcaaatggtaattgtgtttttagttctctgaggaatcactacactgcgttccacaatagctgaactaatttacacacccaccagcagtgtgtaagtgttcccttttctccaccacattgccaaaatctgttgctttctgattttttaataatagccattctgactggtgtgaaatgrtatcttgctgtggttttgatttgcatttatctaatgagtggatgttaaggtttttacatatgctcg

SEQ ID NO: 911056 - DNA, 610 bp, Homo sapiens
ttctttactcttaaagaattcttacaagataagaaggttgttttctgagtgtgtgtatgtgtatatacgtgagtgtatacattttgcttaaagagtattgtgctataaatctaattttatttctaattttttcacagagcataacatccttcatacattcccacattgctgtaggttatttttggttgtttattcccctgtagctgctgcatggttttcaataaaatgaatcaaccacattttccctatccagtcttgcagtagaattcacactgatatcctgctactgaaatattcacttccttatggtatccttatgaaaacactttttggtcatgtgttacaatttgtcaggggctgtgttagtctctttatattgctatgaagacatacccaatgctgggtaatttatttatttattttttaataaaagaggtttatcttggttcggggttctgcagactgcacaggaagcaatgstatctgctctgggtgaggcctcaagaagcttacaatcatggcagaaggtgaaggggagccagtgtgtcacatggtcagagagggagtaagagagagaagggggcagtcccaggctgtttctaacaatcag

SEQ ID NO: 911057 - DNA, 601 bp, Homo sapiens
agtcttgcagtagaattcacactgatatcctgctactgaaatattcacttccttatggtatccttatgaaaacactttttggtcatgtgttacaatttgtcaggggctgtgttagtctctttatattgctatgaagacatacccaatgctgggtaatttatttatttattttttaataaaagaggtttatcttggttcggggttctgcagactgcacaggaagcaatgctatctgctctgggtgaggcctcaagaagcttacaatcatggcagaaggtgaaggggagccagtgtgtcacatggtcagagagggagtaagagagagaagggggcagtcccaggctgtttctaacaatcagatctctatgaactcactgagaagaactcactcaagtggattgtgctaaaccaagcttgtccaacccacagcttgtgggctgaatgcaggtcagaacagctttgaatgtggcccaaatttgtcaactttgttaaaacaaaagagagtttgtgtatgtgtgtgagtgtgtgtgtgtgtgtgtgtgktttatttttatttttatttatttatgtatttatttattttagctcatcagctattttt

SEQ ID NO: 911058 - DNA, 624 bp, Homo sapiens
atgtttttttctttttttttagatggagtcttgctctctcgcccaggctggagtgcagtcgcgccatctcggctcactgcaagttccacctcccgggttcatgccagtctcctgcctcagcctcccaagtagctgggactataggcgccaaccatcatgcccagctaattttttgtgtttttattagagacggggtttcaccaagttagccaggatggtctggatctcctgacctcgtgatctgcccgcctcggcctcccaaagtgctgggattacaggcataagccactgcgcctggctacaaattatgttcttaaaagaagctgctcagtgccatgcctaacacaagatggaactccacgatgagatatgtgtgaagacagggtgccatggttacaaacaaggactccaggtgcagactgtttggttcaaacctggaccagcggtatgaatttttgcaactctctgtattgctctttgcctcagttctttcatawaacaactagaagtaaaaacaaggttattgtgaaaattaaatgaattaaagtaagtggagtgcctacaacacccccaggcacacggtcagcactgagcatgtttttcattactactcttaatgaggta

SEQ ID NO: 911059 - DNA, 607 bp, Homo sapiens
gcactgttgtctgagagtgtcgtttgtatgatttcagtgtttttttttaaatttgctgaagattggtttatgtctgattgtgtgttccattttacagtatgtgtcatgtggtaatgagaagaaagtayattttgtcatttttggatagagcgttctgtagaagtctattaggtccatttgatcaagtattgagttcaagttctgaatatcttcattaattttcttccttaatgatctgtctaatactgttagtagggtgttgaagtcttccactattattttgtagaaatctaagtctctttgtaggtctctaagaacttgttttacaaatctatgtgctcctgtgttgggtgcacgtatatttaggataattaggtctttttgtttaattcaaccttttaccattatgtaatgaccttccttgtgtttgttgagttttgttggttcaaagtgtgttttgtctgaaattaggattgccacctctgcttttttatgttctcctttcgcatggtagattttttttccatccattcattttgagcctatgggtgtcattgcatgtaggatggggctcttaaattcagtataccattgggtctttttcttt

SEQ ID NO: 911060 - DNA, 580 bp, Homo sapiens
ctttgtacaaggcaaagaaagagtgagttgtctcacatggcaagaggaaaacacgcagagtagggaggtgacatagttttcagtggccagatctcacgagaagtcactcatgattgtgaggatggtacaaggggatggtgctgaaccattcatgagaaatttgccttcacaaatcaattgccttataccaggatccaccttccacattaggaaatataattaaatatgagatttggtggggacacatattcgaattgcatcatcagtctttgagtataaagacatgcacagcaggctttatccagccaacttatttgggactctttatagggtttgtggtctacagcatatacactaaaatattcatacttcaaagagcagtaaagtggtattatcattcttccaaaagtcccaatggtagtttaggcattcatggcatgatttagttcatgtttgctactgtttctattctgtcaacatattaactgtttcctacacaattctgtattcagctkgatttcagttgagcacaaaaccatccttgtgctaccacggatagctggcactagctccttgctag

SEQ ID NO: 911061 - DNA, 644 bp, Homo sapiens
ggcagcggttgttctgttggggaccagtgagcacgtgctggggagggctcgcctgtgcttcctcagtggctccacctctgcttctaagaaaaatcactcattccatggctggarcagagaaaatacaacattagcttagaacatcttgttcctgaaactaaaaaagtgctgacagagtaacgaagacaaataaaaaagacaagaagtcagcttgaaatgtctaccactggcctaatcttggggaattggagcaccagaatcatgagctttcccttctcagttatttattggttttacttctccatgtacagcaaagaagagaagaaaataatcatctggcaaccatcatagtaataattgttcaaacacaagtcatccatgaaatgctaaatctagtgggttctgggagtaactggatatttacagagcctcaaagtatctccccacaaaatacggttcaactacaaaaagaaaattgtcacattagcatggacaagcctggcaggtactccttaactcccctaagtagtaaaagctgtaaaatgcaaagaagccttcgatgacctttactaaagtatcaatgatgacttggttctttggctgtttaaacagctggcctttgggcaatttgagtacgtcaaact

SEQ ID NO: 911062 - DNA, 640 bp, Homo sapiens
ataaagttagtaaacgggtatctcttgaaaatragagctccagggaattaaaaaatgtaaagttcccatttcctttctgtgttaacacagctaattatgatctttactaaacatcagaattcagtcaacagaattcagtatttcaccaaattaaaaacaagaattatattagagaaatgaaacccaaaagagaaatggtcatgtaactaaccacagtctaggagttcttgcagttatttgaagtctgtgggcttgaaataggaattcttatgggtgtttggggaatatattttctgttgagtcctatactagtaagattttcaacacaaggtgactctgggtctcgccttgtaggaagagcactgagaaaatatttcatctgctctttctccatgaggagcttcatgctgatcactgctattttcttatttgatctgtaaagatagcaaaaacacacgcttagtatttcatttttcctctaatgattcttaatgacttgcagtttttaaaaacttgccctgagagcaaaccaaattatccactaaacagtgttttcacactgaagatgtgtgagagcatatctgttgtaagcaagtataattttaaaatcattctaaagaagcacctgtgtttctaaggt

SEQ ID NO: 911063 - DNA, 668 bp, Homo sapiens
aagagtggaaataccaagtcttattggagagagtcaaggtggtataattattacaggtagacatgtgtatgcccactgtgtcttaagtgaacgtgtatgtgaaaaggaggaggaactgtagcacatggcagagttatctgttctctctaggctgctagatttaagaacaccagaaacagcaatccggcttcaactgagaaatctgctgaggaagttttttctagctgagacaaacatgaaggcaggaatgttttgtaggtctgctatagactgaatgtttgtgcccccacaaaattcatatgttgaagccaaatactcagtgtcatggtatttggaggtgaggcctttggaaagtaattaggtcatgaggatggagcttccatgaatgagattactatccttataagaagagacataagagagcttatttcctctctctttctgatctccaccacgtgaaaatataaggctgtcatctgcaaaccaggaagtaggccctcaccagataccagatctatcagcaccttgatcttggatttcccagccttcagaactgtaagaagtaaatgtttactgtttaagccagscagattgtggtatatttgttatagcagactgaactgactaagataaggcctaagtaaatctataacaaagcgtgtaggcag

SEQ ID NO: 911064 - DNA, 608 bp, Homo sapiens
gtatctatatttttataggaatcttctttaatgaaggttaatcactttggtagtctttgaagaatttaaagacttttccgacttctctctctgttcactaatgtgcaattttgaaagccaaattaatgaaactcttccttgcatagctcatccttatcccataaattcatctagttaaagtaaataggaagataatgactacattcttgtgtcataaccaccacctttgctttaatatataaagatcgatggtgagtcgaagtatgagaacattgaccaaggaggaggctggaaatgaggttgaaattgtgaactaacctgttgtgaccttttttttaaacctttacagtacacatgattttattgtgtctacttctatacttaaaagatattagctttaatttgaaatgattttttaaatgataagactcctttgtcaatcgtcatccttgactgaattccatctgctgttcctaatacrataattcgttggatctaagatgtcaatgattgtgagccttatcattatttcctgaactactaagaaaaaaatctacaaattaaactataaccaacaatgctttcttgtctatgagatgtgttatttt

SEQ ID NO: 911065 - DNA, 609 bp, Homo sapiens
tgccatgcatttgcttggcaagtctcttaaatctcttttaatctagaatgctgagtttgcatgaatgtgggtaggagccaaattttaaccagcaacagttaccattataaattattcctcatcccaggcaaagcagtgcattctgaagggaaaacttattatctatccctccttgtagacgttttacacgttatccaaacaagaaagtgtattcatgttgaatatttaaaaaacaatattgtaaccacaaagcagaaaactaaaccaccaaaccacaaaggtagacaacaatagaggaagaagagaacaaattatctacaaagtaaccagaaaacaattagcaaaatggcaggagtaagtcttttactatcaataataaccttgctggtacatgggttaaactgtccaatcaaaagatgtagaatggctgagtggatcaacaacaagatccaactagatgctgcctacaagagacccatttttaaactttaagaataggcatatactgaaagtaaatggatagaaggagatattccatgaaaacagacagttaccaaaagagagcagggatgcctatacttatakcagataaaacagacttccagtaaa

SEQ ID NO: 911066 - DNA, 698 bp, Homo sapiens
caacaaaaacaaaagtagacaaatgggactatattaaactaaaaagtttcaacaccacaaaggaaacaattggtaargaaaacacctgttgaatgggagaaaatatttgcaaacaattaaacccacaaggcagtaacattcaggatataaaagcaactcaaactcaatagaaaagcaatgaaatattctcattaaagagttaagaaaagtatctaaataaaaaatttcactaaaacagacatataaatgaccaacaggtgtattttttaaaaagctcaacattatcttttgcatcagattaatgcaaatcatcataccccagataaaatggctattatcaagaagacaaaaaataacagatgctggtgatgatgtggagaaaaggaaattctcatacactgttaatgagaatgtagattagtatagccattatataaatcaaaatggaaatttctcaaaaaactaaaatagaactaccatatgatccagctattccactactcagtcattatccaaaagaacagaaatcagtatatcaaagggataactgcacctctatgtttatcacagcactattcatgacagcagagatatgaaatcaatctaaagtgtctatcaacagatgaatgaataaagaaaatgtgacatatgaacgcaaatttaatactattcagccataaaatgaattaatttctgtc

SEQ ID NO: 911067 - DNA, 492 bp, Homo sapiens
tgggctgattctatgaatttctaatttctattggctaacttttactacwttttaaccataaatatcctttgaatgtaagtcttactacttttgaagaggcagtaaaaacgtcagggctgcaactagtgagagaagagtgtagattctgaaaaaaatttaagggatactaaaaaactcattaatcaagataaatattttcatgcaatggtttttaaaaattgcattttaaaaaatgcaaagaatccataatgaacaatattaaatttttaattactaatgttccgctgaaccatataggaaccagagggaaaagaaaaagggtatacttctgtatgtgtgtttctatgtacttttaatttttttttctcgtgcagaacattaaagtagcttaaaaatgtaaaattggatgtattaaaactcacagcattagtttaaatattttatttataacaaagaatgtattataatattactttcctggctctgaagaaa

SEQ ID NO: 911068 - DNA, 575 bp, Homo sapiens
tcttgtttctgaaataatttttaccatattctatatgtatatgtttgatattgcaaagtcaatgacccccaagacttagtggcttaagcattaagcattttgatatctcaagagtctctgtcacctagctggttccaggtgagctgtgtcagctacagtgttggtttgtctaggcttttctcagagagaatggctcatctctgctccatgacacacctcagtctccaataggtttacctggcgttattcccagtgtgacttggctgggttctgagagagagttgaggacatgcaagtctttatgctacattctgttggtcaaaccaagtcctctgcattcaagaggtgaggaaataaatgtcacctcttgataacaatgactttatagtcatattacagggagaaatatatcaggaaaaaaaaataatttttgcaattaatctacctcatctctgttttggcaactggatccccgtttgatttactagtaamtgatttttgccttgataattattcccaaaaccataggttgaaaaaaattaagaaatattattataaaattttgtaacttggaa

SEQ ID NO: 911069 - DNA, 630 bp, Homo sapiens
gcaagcacacaggaagcttaggtcccagtggggctttgccttccctttcttttacaaaatggttgcagggcctttggttgcgagagaggatgtgggaaagggaaccacaggccgctgcagacttctcttctgtagagcagtgttatgagaggacacgtgggagctggggatttgaacattgcttctgtttaagctatccatgcctgtgaacccttggaaggtctttatatccccagagttatgagtaccccagtttgaagaccacttctttagacccctccacttactccagttgagtctgggatgtgcccacgcagatctgattgcagctcttagattaggccttcatgtttgttgaatatttacaatgtaccaagtggcttacctttataagtttgtcttcctgaagaccttgttacagataactcaggtagcagaagactcaggagccagactgggatactcctaatccctaaattaacttttgttcctgccacaaaaactttcttagttgcataagacatggtcagctgagctygtggattgaaaggaggatctgaaaggaaacctcagcgtttgtagaccatttcctgcttgtggtttccaacttaatgagagaaacagtgcctt

SEQ ID NO: 911070 - DNA, 671 bp, Homo sapiens
gcagcctcccccagctgccctaccagtgcgcagtcccattgagaccaccaccatcctggcagtgtgcatgtgtgtggactgctgccacctcaccactgtgcccatgcccataccctccctctgtcataccatcctgctgctgcttactcccccatggcctctgcactgcagcacactcttctggactcccccaccccctgctgccccatcagaggcttttgctggcagtccttgtgggcctattgttgccagtggactggaacactttggcccttccagcacagcagtgcttaatctcaagaagccagagaacaaagccacgggccgagtctcagccccacagggttagaacatgcagcccaggagtgttgagctgacccctgggcccctaaaagtatccagaaaggaagccaattgagtaaacccaacttataccaaagtcaaaccctcaagggcatcaaaaaatataaaagcaaaaagccacattcaaggacagcaacttcaaagattaaaagaacatcagcccacacagatgagaaagaaccagcacaagagttctggcaactgtaacagtcagagtgtcttctyacctccaaatgaccacactaactacccagatatggttcttaacaagattgaaatggctgaaatgacagacatagaattcagaa

SEQ ID NO: 911071 - DNA, 583 bp, Homo sapiens
ttgacaaagttgcttttcaaaggaatcaaaggtcattttcaaaggaaaagcaacttacttcaagataagtctttctccagagagtcagtacttcacattcacaatattaagggtattgtgggttttgagttyatgtgagaattgtgaagatctgaaacaggaagttaggaatcccttttttgagtaggaatcagtatacacattccatcttaacatcccatatctataaaaacatttagctaattataatatagatgatttcttaaaagcagttacaaattgttaagaatatgtatttagttgtattggagcaaaattgtttttgttgtttatattttattttttgattacctatatttgcttttttcataactgagttaaaaaggtatttttaagaagctctcaatgtcatataatactttcacttgacttaaactcgtttttttataatgtgctttgtttttgttttaatgacttctgctacagcagaggaatttggcagaatattaagcagtgcacaggagtatttagggctgttattttccattacacatttgtgaatattggaggctgattctttccc

SEQ ID NO: 911072 - DNA, 657 bp, Homo sapiens
tttgaaagttagccattttaaatatttgtgcctttttccatttgtcaactattggaacattttccagaagatctacactgaattcttaagctgtcccacatggtatatcattgtataggggacagtatgaaactttacaggtaaacaaatgtgctgcatggaaaaaacatttaaaatcagggcattacttcaatgaacagctgagaagaggaagaggataggaggcagggagggaccagaagaaataattctttttctaaatgttgcaagaagtggtctaccaggtaatttgcattgtgattagagcagcttcagatgggagagagaaagaacatgaagagggctggtcacacttcatgttgtatcagaattaacaaaatatacctacatcctacattaaatatgacttatacttaatgatacgaacatcaagttgcagttgattattgaccttaaagtaatactttgtagacatttaagcaaacatttgtaaattttcatagttctgatttacttttgtatcttagagctaattatgttttccttgggtctaggatgtttccataggtctgtggaaagtctgtggcacactggcmtgtgcttgtgcccctggtggataaaatgggcccagacagggaaagaagctgggtctgagct

SEQ ID NO: 911073 - DNA, 591 bp, Homo sapiens
tctaatcactgtagaggctctaatttttctgggctgttcttacagtttcttcttctgtgtgctctgcttcttagctgtctccttcctcagtcctctcctagtcttgctttatactagrcattcttggcctgtgggttcagagatgagcttcgaaggatctgtcattcctctgaaatatatagcgctttgtctgcatatgcaaatgtgcattttttagttgttaggttaatgctttttaccagccttccaagtgtccatgattcaagaatgttacagacagccttagtgcacactgtcctgaataatcacgtttcatggctttttcttctctctgcatgcgtgatatcacatgtctggtccacaactctgtcctgtgcttcagccctattcattcgtctactctttatctccacctaacaactcaaagatagtatgtttgggtgtcagttttactatttacctaattgctcttcatgtcaaatgtctctgaattggcctggatttcactttcttccttacctaaacatctacatctaaatattcatcaaactcttggaattttacctcttaaatgataccttttctgtcttc

SEQ ID NO: 911074 - DNA, 581 bp, Homo sapiens
cctgggccactcagcctaattcatcacaatgtaaattagcaaagatagagcggacttctcttgaggctgcaacccgagcttgctccagcaatgctggtgttctagtgacaggaaacagccagaagaagacacttaccctacttcttgaaccagggttctcagtcagctatcctagtggttcctcctagagggtaggctgtatctcttgccttcacactacagaagtggattagttatctatgttgtgtaaaagactaccctgaatcttagtggtttagaaaaagaaaagttactatcttaggtttctcattatcaggagtcctagcacagcttagctggatgtcccacttaagatctctcacaaggctgcagtcatctcaatgctcaacccggggaagatccacttccaaactggctctcctgtctgttgccaggtctcacatcctccctggctgtkgactggagacatcactccttgccacgtggacttctccaaagggcagctcacaatatgcggctgccttccttcagaacaaacccgtgagaaagcgtgtctttttgtaacccaatctctatagtga

SEQ ID NO: 911075 - DNA, 645 bp, Homo sapiens
attcagcaccagtttatggtaaaaacctgcaacaaactaggcacagaagraacatatttcaaaatattaaaggccacgtataacaaactcataactaacatgttgaatggggaaaagttaattgtgttccctctaaaaacagaaacaatacaagaatgcccactttcacctctcctattccacatagtactggaagtcctagtcagagcaatcaggcaagataaagtaaataaaaggcatcccaattggaaaagaaaagtcagattacttctactcaccgatgatgtgatcttatatctagaaaaccctgaagattccaccaaaaaacttagatttgctaaatgaattcagtaaagtttcaggatacaaaatcaatgtacaaaactcaatagcctttctgtacaccaatagtcatgtagctgataacaaaaacaagaaggtaaccccatttaaaataggtacaaataataataaaataataggaatatatttaacccaggagtgagagatatttacaattacaaaaacctacaaaacactgttgaaagaaaatatagatgacacaaaaaatgagaaaacatctcatgctcataggttagaataattagtatcattaaaatgaccatggtgcccaaagcaatttag

SEQ ID NO: 911076 - DNA, 619 bp, Homo sapiens
agttaattgtgttccctctaaaaacagaaacaatacaagaatgcccactttcacctctcctattccacatagtactggaagtcctagtcagagcaatcaggcaagataaagtaaataaaaggcatcccaattggaaaagaaaagtcagattacttctactcaccgatgatgtgatcttatatctagaaaaccctgaagattccaccaaaaaacttagatttgctaaatgaattcagtaaagtttcaggatacaaaatcaatgtacaaaactcaatagcctttctgtacaccaatagtcatgtagctgataacaaaaacaagaaggtaaccccatttaaaataggtacaaataataataaaataataggaatatatttaacccaggagtgagagatatttacaattacaaaaacctacaaaacactgttgaaagaaaatatagatgacacaaaaaatgagaaaacatctcatgctcataggttagaataattartatcattaaaatgaccatggtgcccaaagcaatttagagattcaatgcaatttctatcaaaataccaatgtcatttttgtataaatttaaaaaaatattctaaaattcatatggaaccaaaggaga

SEQ ID NO: 911077 - DNA, 576 bp, Homo sapiens
aagctcctgtggaggattctgatctgttgctatatttggaaatctctgaactgggtcatstggctttctgaacaccacttggccttcagcttgtggctaccacctctagcaggggcatcttcttctaacacagggcaggaggcagatccagacaagggaagagaatccaaaggagagacaggagtttcacatgggcttctcatctgaaaacttgtctcattcccattaattgccagtaggagttgttataatctcctctacataaggctttagcctcaccctcagggcctaatgaaataagcacaacagaatccagaactacgcttcatctcccccagagtgaaaccacgttgagagtagaagggatttttttcttataactgacctgggagctggctagatgattttttctttttggaaaaatgtgttgtaagtctaaatgatccatataaagcaacagtcacagccactaaaaacctcttggattagaacccttaggattgcatgcactctgtcaaagtaatcctgccaattaatgaaatgttggttcattgttattaattaaaataataggtt

SEQ ID NO: 911078 - DNA, 576 bp, Homo sapiens
aagctcctgtggaggattctgatctgttgctatatttggaaatctctgaactgggtcatctggctttctgaacaccacttggccttcagcttgtggctaccrcctctagcaggggcatcttcttctaacacagggcaggaggcagatccagacaagggaagagaatccaaaggagagacaggagtttcacatgggcttctcatctgaaaacttgtctcattcccattaattgccagtaggagttgttataatctcctctacataaggctttagcctcaccctcagggcctaatgaaataagcacaacagaatccagaactacgcttcatctcccccagagtgaaaccacgttgagagtagaagggatttttttcttataactgacctgggagctggctagatgattttttctttttggaaaaatgtgttgtaagtctaaatgatccatataaagcaacagtcacagccactaaaaacctcttggattagaacccttaggattgcatgcactctgtcaaagtaatcctgccaattaatgaaatgttggttcattgttattaattaaaataataggtt

SEQ ID NO: 911079 - DNA, 608 bp, Homo sapiens
ccaccacgcctggcctgtaatttctcattgtgtttatttagtcttctctgttttttctttgttagtctagctatcaatctatcagtcttatttattcctttaaaaagctaacttctgattttgttmatcttttatatggttttttacatctcaatttcagttcagctctgattttggttatttcttatcttctgctacctttggagttgtgagtgcttagtgctataaattttcctcttaacactgctttagctgtgtcccagctgtatatctgttatatctttagaacctgttcgtttaatccttacgctgtatgttgcctcttttggacatgcggttctgggtcatgaactgcaaatctcctttgtcatctctttgaaagacatcaggaaagatttaacttaattctcagtgctttctctttgaaattttttcatttatttttaaataccagccatatattttctttaggggcaaaccatcatttatttaacattgttttctctactgttttatattttgtttctttacagcttttttgtttttaaaatatgcttccatgagcatctttgccaatataaaaccttttattatttcattagaataag

SEQ ID NO: 911080 - DNA, 602 bp, Homo sapiens
aagtgaaaatggatctttagagaccaccagccacattcatggaaaacaatattgaaggattttccttcttgccttggaaataaagagtgataaaagatctacttaatttggacaaatctccccacttttagaygaactttaggtttggttatgccctgttttcctctccaggaatttccttctagccctatgcgaaaggttaaaatatagctgtgttttcagtccttccttctcctttcattgctgcctagttagcattaatacagggacaaagatgaaaattgttagagctgagtgcaagtttgaattaaatctaaccccttctttcatgcaccaagtatgaggtctagtctttccttccttaataacaactggcaatagttaaaccttatataatgtttaatacaggcagtccttgttttgcatagttctgatatgcacaaatttcacttactacagtttaattaaataacaccagtccctcaacaatatgattcaaattttagttaccacatatattagctgtgagcaattgcatgaagtacagactttgctgctagctctttagttccaccaagtcactatataagtaacagatgtgc

SEQ ID NO: 911081 - DNA, 602 bp, Homo sapiens
aagtgaaaatggatctttagagaccaccagccacattcatggaaaacaatattgaaggattttccttcttgccttggaaataaagagtgataaaagatctacttaatttggacaaatctccccacttttagacgaactttaggtttggttatgccctgttttcctctccaggaatttccttctagccctatgcgaaaggttaaaatatagctgtgttttcagtccttccttctcctttcattgctgcctagttagcattaatacagggacaaagatgaaaattgttagagctgagtgcaagtttgaattaaatctaaccccttctttcatgcaccaagtatgaggtctagtctttccttccttaataacaactggcaatagttaaaccttatataatgtttaatacaggcagtccttgttttgcatagttctgatatgcacaaatttcacttactacagtttaattaaataacaccagtccctcaacaatatgattcaaattttagttaccacatatattagctgtgagcaattgmatgaagtacagactttgctgctagctctttagttccaccaagtcactatataagtaacagatgtgc

SEQ ID NO: 911082 - DNA, 409 bp, Homo sapiens
tctcttgatcaatgtggtgaaaacccgtctctactaaaatacaaaaaaattagccaggcgtggtggcatgtgcctgtaatcccagctacttgggaggctgaggcaggggaattgcttgaacctgggaggcggaggttgtggtgagctgagattgcgccactgcactccagcctggcgacagagcaagactccgtctcaaaaaaaaaaaaaaaaaaagaaaaaagaaaaaatgataacactggaaatgaagtttgaatcaaacataaatgtagttacagaagaaayagctgatcatgggaatgttgacactactgccttttgaaagacacgcaatcagaagaatctgttcaaggcaaagttactgacataaatgaggaaggtggttgtaatgaagggatcaacatatccc

SEQ ID NO: 911083 - DNA, 634 bp, Homo sapiens
aagtatgaaaactatatagattgaaacwggggttgaggagggagagctggaaataaatctgcaaataaaactgagaaacttattacctagatgtggggatatcccaagtctgtctccagctaacaacacttggataaacatgctgccttggcatatttgaagtaagaaataggaagcaagccttggtgttccataaacatgtattaacgaagccaattcatggatacattttagttgttagtacacagggaagagattaaactttaatttttctatgctttccattttttgttagtttctacctaagttctatttttaaaattcttatctttccttagtttaggaggcaaaatgttttgttagaccaaaggcaaggcgtaagagaaattttagttgttgtgtagtttagcatggtgggagtaactttcattttggctttgcattttagaaagagctaatagagcacagaggtgaaaatgtagaatggaaaagtctggaacacttaaaatatttatcctttgtcatcccaggcttttcccttatgtagagtagcaggacttctggggaagagggcataaagactgcatataaaactatatatcagaatcctactatgagtgcccaggaatttttg

SEQ ID NO: 911084 - DNA, 443 bp, Homo sapiens
tcccaccacccacattgttgaaaacctcataattcattatgcatcagctgtagtactcagaggatattccctcagttacacagcaaaattagcccattactaaatggtgatctggtcccacctaataaagcttagaagaccccaaaattccactttctaaagaaccacatcccttgagaaagctcaagagtatttataggaacacaaaaacatccagcatttaacaagataaaattcacaacaacaggtatctcataaaaaattacatgcagaaaagcaggacaatttgatccatgttaaagagaaaaagcagatagccaaaatgataccagaaatgacacatggcagattcaataaataatgataataattttttgtaactgtcttccatgagctcaagaaggtrgaggatttactgaacatattaagtagattcttggaag

SEQ ID NO: 911085 - DNA, 633 bp, Homo sapiens
ctcatggagaacctctgctagggcagtgtggaagggaaatgtggggttgaagccaccccatagagtccctactggggyactgcctagtggagttgtgagaagagggccactgtcctccagaccccagaatggtagatcccctgacagcttgcaccgtgtgcctggaaaagccacagtcattcaatgccagcccgtgaaagcagccgggagggaggccataccctgcaaagccacagggatggagctgcccaagaccacagcaacccacttcttgcattagcgtgacctggatgtgagacatgaagtcaaaggagttcattttggagctttaaaatttgactgccccacttgatttcaaacttaaatggagcctgtagcccctttgctttggccaatttctcccatttggaacagctgtacttatccaatgcctgtacccccattgtatctaggaagtaagtaacttgcttttgatttggacagaatcataggtggaagggacttgccttgtctcagatgagactttggactgtggacttttgagttattgctggaatgagttaagactttgggagactgttgtgaagacccgattggttttgaaacatgaggacatgagatttggaggggcca

SEQ ID NO: 911086 - DNA, 579 bp, Homo sapiens
ctaggaacctcattatcatatttccagtcactcccaagatttatattggttcaatcttaaagggcgggacaattttgaggtgaaaacrgtgggcagcaagcttccaggtcataagtagatttaaaaatttcccgattggcaattggttaaaagagttattatcagtagaaaggaaagataagggggtgtggagaccaaggttttgttatgcagatgaagcctccaagtagcaggcttcagagagaatagattgtaaatatttatcatcagacttaaggtttgtgtagatgtcaatggtggagggtataatgagccatgtaggagatcccctcttctatcaaggcctgaactagtttttcaggttaactctgtaatgcccttggccaagagaagcgtccatttagaaggttttggggcttagaattttatttttggtttacataaaatatattaaaataaatataacattaaatatataaaatatgtaatgcatattttatataattatatgtgtctatagaggttatatttatttagagcaaatgttatgtcaatattctttttaatacaaaattaaaa

SEQ ID NO: 911087 - DNA, 675 bp, Homo sapiens
cattggtctgggaaaatatttcttgagcaataccccacaagcacaagcaaccaaygcaaaaatggacaagtgggatcacatcaagttaaaaagcttctgccctgcaaaagaaacagtcaacaaagtgaacacacaatccacagaaagtgagaaaatatttgcaaactacccatctgacaaaggatcaacaaccagaatatataaggagctcaaacaactctatagaaaaatatctaataattcaattaaaatgggcaaaggatttgaatagacatttctctgaagaagacatacaaatggcaagcaggcatatgaaaagatgcttaacatcactgattatcagaggaacgcaaatcaaaactacaatgagataccatctcacaccagttaaaaatggcttttaactaaaagtcagaaaataacaattgctggagaggatgtggatccagcaattctacagctgggtatatacctcaaagaaagaaaatgagtatattgaagagatagctgcactgctatgtttgttgcagcactgttcacaatagccaagatttaaaagcaacctgtgtccatcaacagatgaatggatgaagaaaatgtggtacttatacataatggagtactattcagccataaaaaaggataacagcctgtcatttgcaacaacaggagtgg

SEQ ID NO: 911088 - DNA, 605 bp, Homo sapiens
tgatagtttcttgtacatttgtttatactccctactagtgtctaagctccataaggatagcacctctcttatttatgattgtatcaaaaaattcagawtttttttagcgcataaaatatatgaaaatataattgttgaactgttgatttaataagtgaatctttaagctaggccgagagggagtaaagtggtcaaccaggatctaaccacaataattaattatgcttgtttctcacaaccattttgataagacacaaaatttcaaactacaaaatcacttttgaattactagacaaggtggtcaacagaaatcccttactctccctcatagcttactcttgttctacatattttcttttcttaatgtttgtgttctatccatccttgtttcccacctgagtttggagacagaggacaatataagtatcagaaattggttgatgtcgtctagtttacagattatttggtatttttgaaagctacattttttttttttttgcagctgtgccaaaatacttccacgttaaaaagctagggctagcacatggaaccttgagaatgggactacctgacaggattctggcctggcagaagccctgaaaagg

SEQ ID NO: 911089 - DNA, 615 bp, Homo sapiens
attgtcataaaatatgacaaatggtttttctagggttcacaaaatatataaattttagtgtttacacaagacctcatatgaatggataataatgtaattaatcagtgtattgttcaataattwgatggtttactacttttaattatttgagttattctgataattgtgtacatccattttttccacatatttacttattttctttatattgctagatgactactaaatcaaagaatatgacttcttttaatggccttaatgaatactgtcacaataatttccagaaatgtataacaatttacaattcaaatgcccatcagtaatgcactgtcttaccgtaactcagcatgtgtgtgtctcttcactaacaataggattctataccacaaaattgctaaagattctgccaaaagtcccctagacctaataaatgactttggtaaagtttcaggttacaaaagcaatgtacaaaaattagcagcatttagtttttttctttttttttaaattttactttaagttttgggatacatatgcagaacatgcaggtttgttacacagatatatgtgtgccatggtgctgctgcacctattgacccgtcttctaagttccct

SEQ ID NO: 911090 - DNA, 603 bp, Homo sapiens
acccaaaacatgtttctttgccgtgttttgaaatgggcctgcaagaccatccattgtgggggaaaatttgcawctgtagaaattctctattgatatagctagatctttttcttccaggctctcccaatcctgaagacattaattgagagtttagcaccttttaaaggtctgaatagaaaaaacatttgtcatctattgtctctaagggcaaccactatgagacttcaaaagaaccttggtctccacaatcttttatcttaacctgaacatttcctttccattaattccaggcaaactcaaccatttataaaccagaaaatgtttaaatttacctattgcctggaaccccctccccaccactccgctcgaattgtcccacctttctggaccaaacccatgtatttttcaaatgtatttgattgatgtctcagaatcactttagggaatgatgtttcatgcctccctaaaatgtgtaaaaccaagctgcaccccaattcctttgagcagatattcttgggacctcctgtgggctgtgtcacaggccatggtcactcatatttggcctaggataaatctcttcaaatattttacagagtttgactc

SEQ ID NO: 911091 - DNA, 603 bp, Homo sapiens
acccaaaacatgtttctttgccgtgttttgaaatgggcctgcaagaccatccattgtgggggaaaatttgcaactgtaraaattctctattgatatagctagatctttttcttccaggctctcccaatcctgaagacattaattgagagtttagcaccttttaaaggtctgaatagaaaaaacatttgtcatctattgtctctaagggcaaccactatgagacttcaaaagaaccttggtctccacaatcttttatcttaacctgaacatttcctttccattaattccaggcaaactcaaccatttataaaccagaaaatgtttaaatttacctattgcctggaaccccctccccaccactccgctcgaattgtcccacctttctggaccaaacccatgtatttttcaaatgtatttgattgatgtctcagaatcactttagggaatgatgtttcatgcctccctaaaatgtgtaaaaccaagctgcaccccaattcctttgagcagatattcttgggacctcctgtgggctgtgtcacaggccatggtcactcatatttggcctaggataaatctcttcaaatattttacagagtttgactc

SEQ ID NO: 911092 - DNA, 409 bp, Homo sapiens
gttttaaatgaaatctatctgactcccccttttcccctaaaggacagtaactcctagtgtcatgagaaaaataatatacaattaaagggctatgagagtttagcagaggaattgattaattcttttccaggagtcaggaagggcttagtgggaacgtttaaatgggacccctgatggatgagtagggtttgattggcaaggggtaacatgtaggtgggggcggggggtgaaaaggctgatgataaaggttgaacagcagtatgagcaaaagtaatggagtattattaatgtgtctgaggttttcaaagcaagagcaktgtatggcccttgtgggtggtccacagtttggatggggcataggggggtggtgatagacagcttgcatctccaaatgtagagagccttggaa

SEQ ID NO: 911093 - DNA, 409 bp, Homo sapiens
gttttaaatgaaatctatctgactcccccttttcccctaaaggacagtaactcctagtgtcatgagaaaaataatatacaattaaagggctatgagagtttagcagaggaattgattaattcttttccaggagtcaggaagggcttagtgggaacgtttaaatgggacccctgatggatgagtagggtttgattggcaaggggtaacatgtaggtgggggcggggggtgaaaaggctgatgataaaggttgaacagcagtatgagcaaaagtaatggagtattattaatgtgtctgaggttttcaaagcaagagcagtgtatggcccttgtgggtggtccacagtttggatggggcatagggggstggtgatagacagcttgcatctccaaatgtagagagccttggaa

SEQ ID NO: 911094 - DNA, 576 bp, Homo sapiens
tgatccaacacacctactattgggtatatacccaaaagtaaggaattcattatattgaaaagacacctgcattctcatgtttgttgcaggattgttcacaatagctaagagttggaagcaacctaaatgtccaccaatagataaatgaagaaaaaatggggtacatatacacagttgagtactattcagccatgaaaagaatgagatcccgtcatttgcaaccacgtggatgggactggaaaccattatgcttagtgaaacaagccaggcacagaaagacaagcatcacatgttggcatttatttgggggatctaaatatcaaaacaattgaactattcgacatattcgaaatatcaaaacaattgaacatcctctgaccagaggatgggatgtgtatttaggggttgggggaaatgtgggaaaagttatggttataaaaaatagaaagaatgagtaagacctactatttgatagcacaacagagtgactkcagccaatagtaacttaattgtacatttcaaaataaccaaaaggacattattggattgtttgtaacatgaagaataaattcttga

SEQ ID NO: 911095 - DNA, 587 bp, Homo sapiens
catcatcttatccccagccccaggacaccagatactttccttccctgagactgtcacaaagtatgccccaccaaatatagtgactgagagagtcactgagctgcacagtgcaatctttacatttatagtcagctgaacttaagaaactttggacctttcctcaggactcagtgaagtctgtgctacatctgccggcagcaagatgcaaaggctgactaagccttattattctgttatcttcaatagtaaatgacttgaggttacctaagaggatgcattcactaaaagtggtaatgaaatgacttacaaatgcgatcaagaggtttagaaagttcaattttttgtggcttatgcaaccaacccacgagcagtggaaatagcatcttagtccatattatctaaaaatttaccttagttaactattcattgattgttctgttatattcaagtagtttcataaaatagatccacgatttgaatgtgaaaatgtgcttaaaagtgtaaatgaattgtgatgatagctactgtttggtgataagatcactaamtgacaaatagtgtgctaataaacaatgaagagattttaa

SEQ ID NO: 911096 - DNA, 605 bp, Homo sapiens
ctagaactagaatctccataagagcaagtactgtttggttcaactaccraaaccataggggttagcacaattcctggtatgaagtaagtgttcagtgatgacctgttgagtgaatgaagcaaagacatttgtattaacctattaacctcaatattttccccatagtgattatgagaaaaacactttaatcaagaagggtatttgggaggacaacaaaaagagcaactgctaagtcctattttataaccagtcttacagtgaaaaggaccctcaagggctacaaagtattgcagaaatgataaagatgagagaaacacagggtaatatatggaagcctgtatagaggaaaaaagatgaaggtccaaagatcttgtctggaccaaaggcatttaacttgtggaagggcagtgtagctcccctagatttaaccattattaaaattttcatatttacctgttatactgtaatcaactagacatagccttagtttcttactactgcaaataaaaggtgaatgtaatcttggaaattattataaccactttaaaattaaatttaaatatctaagcaaaatcaacctgctgagttctccagattttccacca

SEQ ID NO: 911097 - DNA, 585 bp, Homo sapiens
taaaagaacagccaggaaaatattcacagaaaaaacataccatttacaatagaaagaagaataataagaaaggtgacataactagaaatgattactagatatctattaaagctatcaaaataaaactttaaaatttaaaattcttctagtctatattctttgttatgtgtgtccattgaagtctctgctcagttatcttaatggtcgtttaatgattggacagagatttccttaactacctgaaactaatgtcttccacagtctttgttgaggggttttgtgtgtgtgttgggtatactttctacattcaagaagttacaactctaccttagccttcacttcctgtttacacagagcctcaaggttagaacttaggttttcaggtcttttctgagcatgcacagagtcctgtgcatacacatagacttctgtatgtggttgtccttcaggattcccaggaatgtatcagagcttttcaaagctccctgtgagtgtactatttccctacttccccttttaaggyttctttgcctattgttttctcagtctaccatccattgcctcaggcagctgtggtgttataca

SEQ ID NO: 911098 - DNA, 587 bp, Homo sapiens
tcctgtcacctctgttttatcaccccagcattttctttggggaagaagtgtcaaataattgaatcaaagccagcagtcaagtcaggtcaagaaaggtgcattggagcaagaggatgctcatgtcaccagcactgctgggcaggaaagaccaaggaaagcaaatggctcaacttgagaaagctcatctgaaagagttaagataatgagagaatgcattctttctgtaaaagatttaaaagctcatgtaaagtcaaatgtaacaatacttattagagacggtggcaaatactttatgactcaataaggcaaatctcctcagtagcagagttcagaaatattacattttttttccaaatttgtcggtagaaaaaaacaaaacaactaaatctaactttgattctcacgtcttcttccctctctgtgattaagacggaaggttgtaaactcagctgcaattktaaataattaatgctaaacatttaagtgctactgcagcacaaaactgctccagtaatggggttggcttcataattgcagaaattctaacttttacaaattttaggcatagtttatttcagaatgaaata

SEQ ID NO: 911099 - DNA, 503 bp, Homo sapiens
ctacaactctatttgtgtattgattccaacattttctcttaatagttttagaggctgttgaccaggagctgtaagtgtctatagagtgcttgtacatgttatcagtgtatgtgtatgtatgtatatatatatatgtgtacatatgtagtatacgtatacacactctgtgtatacacacacacactctacatgtacatacatatatatctatacatacacacaaactctattgtgtctatatagcacattatgtacctctcacttcacttttttgcctcttgggattagaactcatgatattccaaatgactaagtggtcaaaaattgataaagaaggatgataaacaatggcctcgaaaatattcacctggratataccaaacctgagtgatagattcccatgcaacaatcatcaatctgaataagcttctatgtatattagctctgtgaactcttttaaaagttgaaaatatctgtaggtttataagctttgtactggcctc

SEQ ID NO: 911100 - DNA, 587 bp, Homo sapiens
ccctatatatggtatgcttgttcctatatatacttaaccattaacaaatttataaattaggcacaaaggattaacaatcataactggtaataaaatagaaaattgcaacaatataatgtaataaacgtttcrtgaatgtggtctttctctttcaaaatatcttcttgtactgtacttccccttcatcttgttgtaatggtatgagatgataaaatgcctacgtgatgcgatgaagtgaggtgaatgacataggcattgtgacatagcgttaggctacagttgactttctgaagattctccagtcggaggaccatttgcttcgggtgatcctggatcgtcaagccatgttgatgttgattggatgtcaggagcagacgatgtccagcactaacaggtggggaacatataccccacagatatgctggacaaaggaatgagtcacattaggggtgagatggaagcaggaatcatgctactcagaacagtgttccatctaaaacttataaattgttatttgtgaactttttcataaaggtcataatattttcagaccacagttgagtgtgggtaactgcaagtgtaagaaa

SEQ ID NO: 911101 - DNA, 587 bp, Homo sapiens
ccctatatatggtatgcttgttcctatatatacttaaccattaacaaatttataaattaggcacaaaggattaacaatcataactggtaataaaatagaaaattgcaacaatataatgtaataaacgtttcgtgaatgtggtctttctctttcaaaatatcttcttgtactgtacttccccttcatcttgttgtaatggtatgagatgataaaatgcctacgtgatgcgatgaagtgaggtgaatgacataggcattgtgacatagcgttaggctacagttgactttctgaagattctccagtcggaggaccatttgcttcgggtgatcctggatcgtcaagccatgttgatgttgattggatgtcaggagcagacgatgtccagcactaacaggtggggaacatataccccacagatatgctggacaaaggaatgagtcacattaggggtgagatggaagcaggaatcatgctactcagaacagtgttccatctmaaacttataaattgttatttgtgaactttttcataaaggtcataatattttcagaccacagttgagtgtgggtaactgcaagtgtaagaaa

SEQ ID NO: 911102 - DNA, 678 bp, Homo sapiens
gctcaaagtttacttctttcataagtagcaccaggatgaagtggctacaaggtgccaagtgttttacagtgcattgttygtttactttttttgatgagtatcctatgagagaaagagatgatgggaggctgtgcatttgtggggcagggaatatatgggaaatctctgtcctttttgtcaatttcattgtgaatcctaatgttctccaaaagctaagtctattttgaaaagtcatatatcacataaattcctagtcccagagagaacagcttattgaggttctaaaagatgcaaaaggtttggtcaagttatttattgccctacctcccagaatctctcccttctccctctaaggatgagactccttcttatgactgaatgtaagaagatccacaaatggtgaagaagggaaatgatgagattttcctcaaccatcaagagagtaaagggctgtaggatgattgataggaactgaaacaaatggacagtaatttttaaacattaaaacatgtcagcaatgtaagttgctactagaatcaataatggtggttgccatacctgggcaggtcaaacatactgtttattgcctaagagagggagagagttaaagagagattgagagaggaaggatacagaaccaaaagtctacacaggaaattaagtgtgtgctaaacatta

SEQ ID NO: 911103 - DNA, 632 bp, Homo sapiens
agtgggaaagagctcagctttgtgaggacaggaaagtaggccaagctgtggtggctttagagagaagtaagccgaggccagagcaggcaggaattgccatggtgggaaatttggatgttactataattgtastgaggaatcattgcagatttttaaacaatgggcagcattatttttaggttttaaaacgattactttggatgttctctctaaagaatatattggagatgacaacagtggaaagagaattttgttaggggattttacagcagtctagaaaattaaaaatggtagcttggtccagggtcatagaggtggtgatataaaacagtgggtgcctccaagataaatctgtagatgaaattaacagaacgtgcattgaatccaagagtgagagagggtggtggccaaggaaacttgaaatttttatttgtttatttttttgctttctggttttgttctttgttctttggttttttgtttgtaagaaactccttaacttatgaagccattttgtcatagatgaatgatgaagtaataaaccaagaaatcgagttttatctttaccttttatgtacctgcaaaacattcaagtggagatcctaaatacacagtttgatatacaggtaaag

SEQ ID NO: 911104 - DNA, 639 bp, Homo sapiens
ctcctggaaacttagtaagtatgtakgcatgcggcatgttcaaggtcgtaggcaaccttttccaaactaagttctttgcccttcatggctttgtggaatttaaaaaatcaattatattttatactctgaaataaaagtttccaatttggaaagatgtttaaagtcaacggttgtttctccaataactaacacagagcttggcatacagtaggcaccttataaatttctctttgagagaatgaataaatgcctgggtaaagctaattgatacaaaagggctcaataaacttgtgaatattaaatgaaaaaatggaaaaacaattggcctctaataaccacacagaaaactgagtacatgttttctgctctttctgattttccaaaacacacagttaagaagtttctcatgtagcctgacacataaaggtttagatggtgagttatttattggatatactattcattatataatcatttgtgtatcttttgacattaattgttcaactttgtatgatttcataatcagttatagattatttgagccctccttttttaaggctactttcaaattgtatagttaattttatagttttttataaagctactcaagtgattcattattatagataactttgatta

SEQ ID NO: 911105 - DNA, 639 bp, Homo sapiens
ctcctggaaacttagtaagtatgtaggcatgcggcatgttcraggtcgtaggcaaccttttccaaactaagttctttgcccttcatggctttgtggaatttaaaaaatcaattatattttatactctgaaataaaagtttccaatttggaaagatgtttaaagtcaacggttgtttctccaataactaacacagagcttggcatacagtaggcaccttataaatttctctttgagagaatgaataaatgcctgggtaaagctaattgatacaaaagggctcaataaacttgtgaatattaaatgaaaaaatggaaaaacaattggcctctaataaccacacagaaaactgagtacatgttttctgctctttctgattttccaaaacacacagttaagaagtttctcatgtagcctgacacataaaggtttagatggtgagttatttattggatatactattcattatataatcatttgtgtatcttttgacattaattgttcaactttgtatgatttcataatcagttatagattatttgagccctccttttttaaggctactttcaaattgtatagttaattttatagttttttataaagctactcaagtgattcattattatagataactttgatta

SEQ ID NO: 911106 - DNA, 639 bp, Homo sapiens
ctcctggaaacttagtaagtatgtaggcatgcggcatgttcaaggtcgtaggcaaccttttccaaactaagttctttgcccttcatggctttgtggaatttaaaaaatcaattatattttatactctgaaataaaagtttccaatttggaaagatgtttaaagtcaacggttgtttctccaataactaacacagagcttggcatacagtaggcaccttataaatttctctttgagagaatgaataaatgcctgggtaaagctaattgatacaaaagggctcaataaacttgtgaatattaaatgaaaaaatggaaaaacaattggcctctaataaccacacagaaaactgagtacatgttttctgctctttctgattttccaaaacacacagttaagaagtttctcatgtagcctgacacataaaggtttagatggtgagttatttattggatatactattcattatataatcatttgtgtatcttttgacattaattgttcaactttgtatgatttcataatcagttatagattatttgagccctccttttttaaggcwactttcaaattgtatagttaattttatagttttttataaagctactcaagtgattcattattatagataactttgatta

SEQ ID NO: 911107 - DNA, 503 bp, Homo sapiens
ctctaaactttagaagtctgtcttactagctttaaggatttctatttttaatcttgatgttacaaatatttgttttggaaaccgcatasctaacatacttggtgaaaagttgaaatcgttttttctaagatcaggaacaagaggaggatacccactctcaccacctttactcaacatagtactggttacatgatcttttttttttttttttttttttgagacggagttttgctctttcgcctaggctggagtgaagtggcacgatctcagctcactgcaacctccaccccccaggttcaagtgattctcatgcctcagcagctgggattataggcgcctgccaccgcgcccagctaacttttgtatttttagtagagatggggtttcaccatgttggccaggctggtctcgaactcctgacctcaggtgatccacccacttcagcctcccaaagtgctgggattacaggcgtgagccactgcgcccggccatacatgatctta

SEQ ID NO: 911108 - DNA, 599 bp, Homo sapiens
tttccttttgccccatccctttgttcctctctgaaatagagagacaaagaccccttctaccatgaagaatgaaaccacacaataaagatgagagagcagaaagaggagctggggtccttgttgtcactgttggtggtctggtcagctttggtccacgtaccacagaactcttactgccagtaggtcagggtttcctgttactagaagctcagttcaattctaactgatacaagctccatgaacatgtgcaccgtgtctatttttgttccccacgcatccccagcgcagtgtctggcacatagtagtctctgctcagcgaacatctgctgaatgagtggctggagagagcacggtctttggagtcctgcatattcaggctcagagtcttgctctgcagctgaaggctgtgtggccgcttaatttctctgagccccaatttcctcaagcataaaaactggatgataacatcccaaggktttattctgagggtctaatgagctgacgtgtagaaagtgccagaccttgactagaagctcagttaatagtatttgttactatttttagtaacataatagggctttgttttatttttagagttg

SEQ ID NO: 911109 - DNA, 446 bp, Homo sapiens
aataacctcaaaggtactttggagattactggcgtagcccctcccgtcataggcccagagtgtcatgatctgagggaaggaaatcctgcaaaagagagcytagggtgcgctgaagatcttggggtttacttcccagggctgcctcaagtctctgcttcccacattctgatgcagcactccttgaccaccccaggtatggtttaaaggggttcaggtgtggctttggctccagcttcagaaggtgtaagtggcagtatccacatgatgttatgtctgcaggtgtgcagaatgcaaaagctgtgggggaatggtttcctccacctggatttcagtgaacattagggactacctgggaacacaggcagtagacggttgcagggctggagccaccgtcgagagcccccactagggcaatggctagtagagctataaaggtgggtccaccc

SEQ ID NO: 911110 - DNA, 520 bp, Homo sapiens
atgtcctaggccttcacctttactcaccactcactcactgactcacccagagcaatttccagtccagcaagccctgtgcattgtaagtatcttaaacaggtataccattttttatcttttatatcatgtttttactgtaccttttgtatgtttagacacacaaataattaccattgtgttacaattgcctacagtattcagtgaagtaacaagatgtacaagtttgaagcctaggagcaataggctgcaccatacagctaggtgtgcagtaggctataggtttgtgtaagtatactctatgatgtttgcgcaatgatgaaattgcctaaggacacattactcagaaactatccctgttgttatagtagcaataatgcaagaggaaatagatatatccctaaccatagcaagaaattttagtatacctctatgaaaattgatagataaaacagtcaaaaaatagtaagaatttrgaaagcttaaataatacaattaacaagcacaaacagcagtctatatt

SEQ ID NO: 911111 - DNA, 633 bp, Homo sapiens
gctggcttccatctggagatctttgatgggtacaaatggtagcygactttcttcgatcatctctcgaacgggagttcggtgagcagcaactcggctcgtccgggaatccagactttccggaagacggaccctccccccagtccagcttagcccgcctctctaggatttacgcgcgcgctctgctctccctcctaactcgaccctccccttgacccacgcctctgcgcaggcgccttggcgggctgtggctgcggagttggcgggtcggcgcctgcgcactggagtcccccgcgattttttcctccggggtgggcgaggaggctgtgcggccttccccagcggctgtagcaggagacctgcggctgcatctcccagggccttccggcggggccgagggtaggaccgaggcacttcttccttgcaagcgcgtttatttgtattttcaaccacacttcagacgctactggtttataggaacgttaagtttactgagtgtgcagctacgctcccctgggtttttgttcctttccttaaagggccaggtgtaggagacagtagtcctgctcccaaaaaaagaataaatagaagtgcccgccctcttgggctggacccccgtggccaagggagttttta

SEQ ID NO: 911112 - DNA, 627 bp, Homo sapiens
gcaagcgcgtttatttgtattttcaaccacacttcagacgctactggtttataggaacgttaagtttactgagtgtgcagctacgctcccctgggtttttgttcctttccttaaagggccaggtgtaggagacagtagtcctgctcccaaaaaaagaataaatagaagtgcccgccctcttgggctggacccccgtggccaagggagtttttagtgatggctggcatggacgtcagtatgaaagtgtaccggagtattagtgatgcttaacttttcacaatttgaatatgcacttaagtagggcagtgcattccctgaactcagctttatggctacagcccagtgaagcaacgggatgtgaactccaaaacggcgaatcctcctttgctgtttccctctggtgcctttctgcagcctcggagtgagttcttggctgtagtcagttttcagtaccgttagtgacgagtccggtggggcgcggccaggattaggatgaatcatacaagtgctgggtggatcctgtctttacctaaaattttgataattagttgtggggcgcggccaggattaggatgaatcatacaagtgctgggtggatyctgtctttacctaaaattttgataatta

SEQ ID NO: 911113 - DNA, 603 bp, Homo sapiens
tttgaattcaaagcctggtaccttaacccctgagaactagactgcctgttaagagtcaatgacatgacacaaaccccacagatcctgaggctgcatggcacagaaaagagcctttacaggatcctctaagttaatcccccatggtacagataaggcaactgaggcacagagaagtcaggggactcacctaaggtcacaaagcaggtttgcagcatccagtgctcttggttttctcacactcagagtgatttctccatataccttcccccatcactgcatgcaagcagggcctgggcagttctcaggcctccctgtgccagctctttcagtcagaaggagttggtttctactgtagagcatggaagcatggttaaaagagctaactctgaagacaaccagcctgcgttcacactctagctctgccatcttctgctgtggccttgggcaagttattaacctctctgtgcctcaatttatctcccgcatttaatgataatagctgtgtggattaaatgagtcactatgtataaggggcttaaatcagtacctggagagtagcaagsactcaataatagttagctactttatgatgaccactcccac

SEQ ID NO: 911114 - DNA, 619 bp, Homo sapiens
aaatattattttctagttctagatccttgaggaatcacaacactgtcttccacaatggttgaactaatttacactctctggtgggagaaatttctaaacagcaaagcattcawgaggtgacccagatgtttctaaaagtgtacatgcatatgcatgaagaaagagatggtctgaaataggaacttatatttaaaagggaagaagagcataaaaatttggtaaatttgcagcctgactaggtggtagaaaataaaactcattttctggggagaaattcaagtgagctgcagaaatttgcataagtaatgaggagccaagtattaacagccatgataatggggaaaatgtctccagggtatttcagagatcttcgcagcagcctctcccatcacaggcctagaggcctgagggagaaaaatggtttcatgggcaagaacctaccacccgctgccccctgctctgtgcagccttgggacatggcaccctatgtcccagctgctccagctccacccatggctaaaagggatgaaggtacatcttgggctattgcttcagagggtgcaagccccaagccttggcaccttccatgtggtgttgagcctgcaggtgcacagaaggc

SEQ ID NO: 911115 - DNA, 658 bp, Homo sapiens
atatatacctagcctatgttgaggtataatttctttttttgcagaacaaaggtatttataatcctaaacaccccctaaacaaatgcttttggtattttattttttctgggggtatttaaaaataatatacttttttttgtacttgtacaaagtcaagcaaatgcaattatggcccctctgttgtagaagagtgcatttaatttattaggtagcttgttttgtacacatattctcctggagcatctctgactttctcaaatattaggttactatacgttgcaatatttgatataccctccactgtgcatcaatcctcagagagagtgaaatcttttattggattggttgaaaatcaaaggcacatagaagcgatttgtaatctataaaatgctctctctgcaccagtgccacccaccaaaaagcaacacaataggtaacttaatgattagagaaatagtgatgatctaaatcaagttactcttaatctttaacattcaatgtgtgcatgtgtgggcctgcagggaattttggaaaatgagcagagacagatcattttgytagaagatcttaatgctagatgagaaaagacataatctgcatagtcagatatacagggatgccatttccagacattagtgcatacagccagcttgcacct

SEQ ID NO: 911116 - DNA, 617 bp, Homo sapiens
tttaaatggagtctatagtcaatcaacttcccatatttactatagaagagccatgtaacctgtcatttgyccaattcattgatgcaggataggagaagagttgaatccaggcttccagaactcccagtggaaatggcccatattgactgaataaatggaatacagataagaatatgtcagatgcccacaagaagaagataacatcaccagttgggattcaaaaataattacctacacaggccatgtgtggtggctcacgcctgtaatcccagcacttcgggaggccaaggcaggcagatcatttgaggccaggagttcgagaccagcctggccaacatggtgaaaccctgtctctactaaaaatacaaaaattagctgggtgtggtggtgggtgcctgtaatttaagctactagggtggctgaggcagataacctgggaggcagagcctgcacctagattgcaccactgcactccagcccgggtgacagagtaagactccatctcaaaaaacaacaacaacaaaaaaaaaaacataagtaatcaccgacaatttgggtattcttttcatctattgatacgtaacaacccaaaatcttagtagtggtttaaaacaatg

SEQ ID NO: 911117 - DNA, 602 bp, Homo sapiens
atagaaatagtaattttctgctgcagagcaagggagttgcaacaggagagcaagcagtgggtctgtgacaactggctagagaagggactgttgctgaggtgaaggtgtttcaccttgggtattttaatggatgggatataaaagatcttgggatggatataagccaccaatttatctagatgactcaaggaagaaaggaataaaatagaagactagctaaaaatgtaaatcacctgggtagttataatccccccaaatgcatatggtaatggatcatttcactaatattttacttcatcttggtcagagtttcagggccaaaaagacaaatgtattggcataatacgggactttattggatgccattgctacccaggaagtcatggatattgtttaactctcgaaacaataaaagaaaatgcaagttggtgaaagctatcatactgcccttcagtgtttggcaaaacattcatgaaatgttgaggccatgtcagtgccaaagcataagtratgtgctttggtatttaactcttgaaacaatgaccatatacagctctcctattaggatgcatgaacactgtgcacagctagcacaatataaa

SEQ ID NO: 911118 - DNA, 602 bp, Homo sapiens
atagaaatagtaattttctgctgcagagcaagggagttgcaacaggagagcaagcagtgggtctgtgacaactggctagagaagggactgttgctgaggtgaaggtgtttcaccttgggtattttaatggatgggatataaaagatcttgggatggatataagccaccaatttatctagatgactcaaggaagaaaggaataaaatagaagactagctaaaaatgtaaatcacctgggtagttataatccccccaaatgcatatggtaatggatcatttcactaatattttacttcatcttggtcagagtttcagggccaaaaagacaaatgtattggcataatacgggactttattggatgccattgctacccaggaagtcatggatattgtttaactctcgaaacaataaaagaaaatgcaagttggtgaaagctatcatactgcccttcagtgtttggcaaaacattcatgaaatgttgaggccatgtcagtgccaaagcataagtamtgtgctttggtatttaactcttgaaacaatgaccatatacagctctcctattaggatgcatgaacactgtgcacagctagcacaatataaa

SEQ ID NO: 911119 - DNA, 620 bp, Homo sapiens
cagataagaaaaacagattttcacaatcctgctagctctgataggttcactaaatcttgttgatatttktacacataactcgcagttcattggtacacattagaagcttgtagcctatggaaatgctatttacatgtgggggaaataatatgtaatttaccaaaggatcaacaattatttccagtggtaagtaggctgtgattattttacaagatggaaaacccttataaattcacttattgctggtgctggatgatgaaatgtaaatagttgtaaaagatagcatgctttttttttcctaacttgaattcaccagtgcactgaatgaaaaaaatggtaaaacaaaaccttgaaatgatggagtcatggaattacagcataggagaaaaaaaaattctagaaattgatcattcaagtgtgtcctagctatgcaatgctcccgaaagtagagctctgtcctatttttacagatccccacagaaggaaattatgtaatttataccctttagttacattgactaaaataaattgctaacaagtctaataattctattttgacttgcttatgtacttattggtttcagtgtggaataacctatgactcctttaatgagtaatag

SEQ ID NO: 911120 - DNA, 620 bp, Homo sapiens
cagataagaaaaacagattttcacaatcctgctagctctgataggttcactaaatcttgttgatatttgtacacataactcgcagttcattkgtacacattagaagcttgtagcctatggaaatgctatttacatgtgggggaaataatatgtaatttaccaaaggatcaacaattatttccagtggtaagtaggctgtgattattttacaagatggaaaacccttataaattcacttattgctggtgctggatgatgaaatgtaaatagttgtaaaagatagcatgctttttttttcctaacttgaattcaccagtgcactgaatgaaaaaaatggtaaaacaaaaccttgaaatgatggagtcatggaattacagcataggagaaaaaaaaattctagaaattgatcattcaagtgtgtcctagctatgcaatgctcccgaaagtagagctctgtcctatttttacagatccccacagaaggaaattatgtaatttataccctttagttacattgactaaaataaattgctaacaagtctaataattctattttgacttgcttatgtacttattggtttcagtgtggaataacctatgactcctttaatgagtaatag

SEQ ID NO: 911121 - DNA, 604 bp, Homo sapiens
ccctcttcctcactgaggaagatatatgttctaaacacatatcatatggtggccccttcctgcctaacatcctctattggatctgtattagtccattctcacactgctataaagaaatacctgatattgggtaatttataaagaaaagagttttaattggctcacagttccacaggctgtacaggaagcatgatgctggcatctgcttggcttctggggaggcctcaggaaactcacaaccatggcggaaggctaagaggaagcaggcatgtcctacatggctggagcaggagcaagagaagagagaggagagataccaggcacttttaaacagccagatatcacaggaatatcaccggatatcacctcaatgacagcttaaagggagatggtgttaaaattgcattgaggattcaatcacctcccattaggccttacctcccattaggcattgaggattataatttgacatgagatttgggtgaggacacagatccaaaccgtatcaggatccctaatgccttcatgacaaagttcaaactatttagagtgtaaaccacagtctgtcataayctaatgcttcttcacttttcccaaaatattg

SEQ ID NO: 911122 - DNA, 656 bp, Homo sapiens
aatgagcttttgcatgtgcaggtttgctggctccatgagtgcctgccctgctggattcctcttctccagctcctggctctccagggttaatgctccgctcagaggctgagaagtgcagcctctctactttggtaattgaaatcaatttctcagccttatctttaggaaacctatatagtctagactgcaatctgaaagcttgggctcaggcaacttttaaatgaaaacccctctgcgaggggggagagggagaaaagaacaagtggctcaccttgctccgcaatttcttgagaagcagatgagtgtgtaagtgatgtctctctttttctcggggtatttggctttggagtatgtgagaatgtgtttaaagatgtgtgaacttagatgtatgtgagtacgtgagtgtgtgatggcgtgaagtgtgttggtgtgcatgtgtggggatgggggatgcggaggtcgatttaggtgtgtgtatgcatgtgtgtgcgtgtgtgtgcatgcatgactggatacaagtgtgatggcgatggccttctttttgtttttgtttttgcctctgagattgagaacatagggatgagggaggtggatgagagtgtgttcatgagcataaatgtgtgtgygcaggtgcccagagtaaattcataggcttg

SEQ ID NO: 911123 - DNA, 631 bp, Homo sapiens
cacagctggttcttatgagcaggtaagagcttgcttcagcacgtcatggggcaaacccaagtctgtttgatcctgaccaatcagcattctgtctagattcctaagatctgctattaagtgataaaagtaaggtgcattagggtacatatcaaagggaaaaaagaatatatatatatacacacacacacatatgaaagaatatacacatattatgtgtaatttgcttgtgtgtgcaaatctaaaaggatttgccaggaactgatcacatcattggttttctccactgggtagtagctggaaggcagagtgggagagagattttctctgggtattcttttgtacttttaaaaattcgagccatatgggtgtattaactattccaaaaaaaaaaaaaaaaaaagaacaaacacgcaacaaatccagatgaccaagcaaccaaccaatcaaccacaaacagactttgggcctgcagctctgtcctgggctggtctgcgggcctggagctgggcaggggttgctgagtggcttgatcagggctgcccaccagaccacactgcctttcggcaggccttggtctgtgcagccaggctggtgtktggggatgatggggaggcttccatgcctggagtct

SEQ ID NO: 911124 - DNA, 584 bp, Homo sapiens
gttgcggtgagtcaggatcacaccactgcactccagcctgggcaacagagcgagactctgtctcaaaaaaaaaaaaaaatcarctaatgtaatctatcacatagaaatgaagaaatcatattgtcatattttcaaatgcagaaaaaatgacaaaatctaacacccattcaagataaagaaaaaaatcctctcagaaaactaggaatagaggaagactttctcaacttgataaagaacatctacaaaaaacctacaactccacaaaacaaccagaaaacaacaaaatggcaggactaagttcttacttatcaataataacattgaatgcaaatggacaaaactctctaataaaaagatatagagtggctcaacgaattaaaaaacaagacctacaagaaacacatttagtccataaagacacacatagactgaaaataaagaaatggacaaagatattgcatgccaatggaaacaaaaaagagcaggagtggctatgcttatatcagacagaatagatttcaagataaaaactataagaaaagacaaagtagctcactgcatagtaataaaggggtcagttcagc

SEQ ID NO: 911125 - DNA, 580 bp, Homo sapiens
aacaattatatgaaatgatgctcaacatcatatgtcattaaggaacttcagattaaaataatgagataacactacacgctgatcacaatgatgaaaacccaaaacactcacaacaccaaatgctgatgggaatgtggagcaacaggaactctcattcattgcagggaatgcaaaatggtgtagccagcttggaggacgtgtggctgtttgttccaaagctaaacagagtctcaccatgtggtccagcaatcacacgccttgctgtttactcaattgagttgataatttatgccctcacaagaacctgcataggaatgttgatagcagctttttcctagtagccaaaaactgaaagcaatcaagatgctccctcaattgatgaatatataaacaaatccaggcaatggaatctcattcagtgataaaaagaagtgagttatctagccaagaaaagacatggagcaacctcayatgcaatgcatgttggtaaataaaagacactaaagtgacacataagtgacatacttattgtatgattccaactatgggacattttggaaaaggcaaaacaatgcagaca

SEQ ID NO: 911126 - DNA, 685 bp, Homo sapiens
agttctgatcgttcaagagaatgattaaatatatatttccttaaaaaaaggacacatagattttrtttagcatttctagagaaagttttcagtttaaccagttcacaaatactattaaaaatggaaatcaaatactctccttcagataaaattttcaagatgcttctggttgcaagcatcaaaaccaactgtgactgatttaggcaaaaggggaatttattggcttgtggaatggcctgttagtcaatttgcattgctacaaaggaatatctgagactgggcaatttataaagaaatgaagtatcttgttttgttttgttgttgttttttgtttttgtttttgttttgttttgttttttgagacatagtctcactccgtcacccagggtggagtgcagtggcatgatctcggctcactgcaacctccacctcccaggttcaagcaattcttctgcctcagcctcccaagtaactgggattacaggcacccaccacccaaacccagctaaattttttttgtatatttagtagagacgaggtttcaccatgttggccagcctggtctcaaactcctgacctcaggtgatccacccgcctcggcctcccaaagtgctgggattacaggcataagccaccatgcctggccaagaaatgagttttacttggctcttgattcttcatttat

SEQ ID NO: 911127 - DNA, 588 bp, Homo sapiens
gggggctggagaggacccatctccgatgttctgagcttccactaccacatgactggcagctgtgctgcccctataggctccacaccttgaacccttgcctgctgccctccttcccctccacagccaggctgcctgctgcatctgcagccacatagtgggtggcctcatcccggtgggtgagaccagagctcagagaggctcggtgcttcctgcagtcacaaggtgagtggggcctggctgtctccatcctgaggctgtgttctctctgtgacactcagcttctcccactccccaactgaggattagtcatcagtagggccaccttcagcttctcctgagtcccaatagcagggagcccagaagtaatgtggtgttgtttaagccactgtagtctggaatggcttttgacatagcaatacatcactgaaagagttcacgttttaaatagttacaaagaatrttcccagcacactgtccatatgaagagctttaagtgaaattattagagtgctctttttaaataaaaggcaatttgatgcccaccatcatccactttagaaaatgcattaacaaacatttcctggagaa

SEQ ID NO: 911128 - DNA, 649 bp, Homo sapiens
ttggagatcatgtttgtgagccaggactgtgtggastgtcacagcagaggccatggggccagggtagggacaatggagagacaaattcagcctgcaagtttaacaaaaaaagaaaatgtttaatttttttaattggactttaatttttggagaagttttaggttcacagctaaattgagtgtaaggtgcagagatttcccacatacccttttcagaacacatgcatagctgctgccacctccagtcccttatcagcgtcctctaccagagtggtacttttgttagaagttataaacttacattgatgtttgatcattttaatatggccttttaggttaaaaatgttaaaattaaaataaatgttgctatcacctggtttattagaaaaaatgtaggctttagggttacacgagtgtaaattcaaatcctgagtctgtaactcccgactgtgccgtcattaacattttaatctttctaaaaatctatgaagtaagtattatgaaagttacttcgcaggattgttcttagaattaaatgagattatggagacaaagcacctgtcaccctgtgtttgacatgtggtaagcattcagtgcataacttgatagctagccagattttgttcctacctataatgtgttaagctttt

SEQ ID NO: 911129 - DNA, 622 bp, Homo sapiens
gcctgtagtcccagttacttgggaggctgaggtgggagaatcgcttgaacccaggaggcagaggttacagtgagctgagattgcgccattgcactccagtctgggtgacagagcaagactccgtctcaaaaaaaaaaaagaaaaaaaaaagacagacatatattctgtaatgtatgttaactgaaaaatagttagaaaacataaaaagacacacggaagaaaatcaacatctgtaatcatatcatatacaaaaaagacattacaaacactttgtgtatatctgtaaatcttttcatatgctataatggatcatgttacttggtaatgaataatattgaattacatgaataaaaaacaccaatataaaatatactcaaaataccaatacaaaatatactcaaaaataactgataaaatgcattgggcatctttttttctatttcagtatattctacaacctgaccaccaacagaagtaatggttaataaatatttaagtaagatagattataaagttcatcttcacttatatttctagtgaaaagacattaaatagtggaaatggatgatatcttgaaacatgactttaagattyttttttctagccatataaaccaatctca

SEQ ID NO: 911130 - DNA, 649 bp, Homo sapiens
atggaaaattcagaatagaaagattttctatgttgattctgcttttgagtttaactacatactttttcaacacttaataggatataggtagatcttatttgaagctgatagaatgttgaaagctttgtttgtttagtaagtctgaaattgatgagtggtttttctctctcagcttgctcttgagaaatatgaggaaatgtttccagcatttactgattcaagagaatgtaaattattgaaagtaagtaatattagaactttgaagaaaaatgcttttgttctgttaggtgacaacacctaagtgggattgggtatgaagtgaagttttaatctataaagtctgctaactgaggggccctggtactttcctgctttcgtattataggtgttcaaatgcaattaaggtcagaaacatgtagttgtgttctgaaataggcacctgagaaatgttactacagaagctagatccctaacttggctcttgacttgtatatgagtatttcctcagttttgtgcaatatttggcaacattggtattatacttaaagtatatatttagaaatgggacttcatsttacagaactgttttttaaaatatttttatgctaccagaaactcctagaagctcatgaagaacagaacagtgaag

SEQ ID NO: 911131 - DNA, 552 bp, Homo sapiens
gcctcgctgttattgcttctacttaggtgcaaatgttgctcagacaaaaaaaaataataaagggcaatgtatgataatcatgtctccttttcctacataaaaggcagttatcaaaaaatcattgagctggtccccaaaggtgagcctgtaaacagaaaactgtcccgtcctcaggtctcactgtctctaaaggaggctcaatttaaacagatgtatttgtgtgtgtgcgcgcatacaactataaatcaatttttaaaaggaaaaaagttgaaatgtctttgagcagtgatttttaaaaatgactaggagttaactgggccaagaaggcatgatggacatggaggtgcaccaccaagattgaccttcaaggaagggcttgttgctccagctgtggtcaggcagcttctagttgttagttctctcaggtaccacctgagttgcagagtcctgccagccaatgtcacaccctctctagggcaacccactactattgactgatgaaggggcakagtataaacactcagccattttaaccccatttgagacaactct

SEQ ID NO: 911132 - DNA, 531 bp, Homo sapiens
gcagggccatgctccctttgaagtctgtaaaagagaatcctaccttgctttgttcaaccttagactataggatttccttgatctgtcacaggtaactaaaatctctgcctcacatgggtccrtatgtggacttcttacctttttctgtgtctccattctccctctgcctttctcttgtaaggaaagctatcactggatttagggcccacactaaatccagaatgactgcattttatgatccttaacttaattgcattgtcaaaacatcctcaactaaggtcattcatattcacagttctgaaggggtagtccacagacatatattttggcggtcaccattgaacctactatactttccaacatattttatgagtccaaaactttattaccaatatatgacaagggcattgtaagaaagttataatccaatatctcataaatttgaataaaaatttcctaaagaaaatgttatcaaatccaggataattttaaaagagataccacattgaattgtgtttcttccagaaatga

SEQ ID NO: 911133 - DNA, 610 bp, Homo sapiens
cgacacttgtgattttgtgtttttattttaaataataaccatcttaatggatgtgaaacagtaagttggatttgcactttcccagtagtcaattatgttgagtgtcccctcatgcacctattagtcatcaatatatcttacttggagaaatggtgtgaaagggtatacagttttcaaggttgaaacatgacaataattaggatgattggacaatttagtgaagaaaaaatattattactatagttaacatttttttggcacttattccgtgccaggctgttactaatgctataagtgcatgatctcaatcaacttttactatgaagttgaagactatgaaggtgcctttattatgatttctattgttcacttaaagacatggcatctcagggtcaacaagtatcttggcttatgttgcacagcttgtaagtggcagaaacctgatgcaaattagttctgcctgacttcaaagcatttggctgttaactgctatgccatgttgtctaatgcrtggcttgttgcctaatagcctgtcaatatatgttaaaaatccattatccccaccctcaactgaacccacacacacacacgcacacacacatgcacatgc

SEQ ID NO: 911134 - DNA, 700 bp, Homo sapiens
tttaataatgctaatatgaatagttgcctggcccttcgctctgacaattacatcctatttcttctgtttgttttaagtttagaaatcccacctgtattcaagatctcattcatttatatttcaagccttaattagtaggctgtatcctcttgtagctataagtagcacagagcttagtactgtacttaatttttctttcagtccttttcaatatatcagttctccccaaatgaaatacagtcttccagaagacaggatctccactttcttcttatccttggcattttccaacccctggctcactctgttatgattttgagcactccacatcctcatactggggcatctagttcctgctgcttaaacttctgactcccaatgctgtatcctcaatcccagttagaattccaaactccagatctctacttcccattttctaatgattgaagcctatttaagccccatggattaatttcaatttacaaattcctgaaacagtacaaccctttcccattatcttactctaaattgatttttccctctcttttttaaaaaaattatggttaattgtcctaccatacatccagtcatccaagttagaatctcaggcattaatttttaccttcttgtttcctttgtttcttccccaacattagggacattaagacctaccctyatatggccttgctacccatcactt

SEQ ID NO: 911135 - DNA, 495 bp, Homo sapiens
cccaagtagctgggattacagacacgtgccaccatgcctggctaattttttgtaattttagtagaggyggagtttcaccatgttggccaggctggtcatgaactcctgacctcaagtgatccacctgctttggccttgcaaagagctggcattacaggcttcagccaccgcacccggccccataatttactctcgattccagctttttgttgccacctcctcgtcaaaggactaagatgagctaagatagagaatttaagatattattgtgtgcattccattcctgcataaccatagtggaactctctttgctgtcactaaatatagagactttatttctgtttcttactatccagtctcaccagcaacatattttgtaggaaatctgccaagttcctgactcatagatgcaagcttctatattttacaggttgatagagtttgtttattttaatatttctttgtgtgtgtgtgtgaagaccccacatttaggtt

SEQ ID NO: 911136 - DNA, 645 bp, Homo sapiens
gaaggatgggctgcagggatgagcagagctttgagtgaggggctctcattagcctgaggtgagaggaggttktgaaggaaggaaaagagaggagtgttgttgagtttattttaatataattaagattttctgacagatacaagttaaatattggaattattttaattattattttgactggtttcatcctagcaactagttaaaagcccacatggtggatgtccaattactatttctgaataaatgaatattattagttgccatcctcaaaggccaggttgtaccagtctaggcacagtcaatatgaaccatttgcagaacatgatggtagctgatgccacagtgaaaacagagcccaatggtctggcaatgctgcaaatctaaggcaggtatcagaattttccactgtgacctcaacacaccttttcaatcaatccaatttaacatacagttaatggtggcttatctcattcagttcactgcaatagttcatgttagattacaaagatgaaaaaaaggcacaggaagccctcaaagtcaaggtgtttaaatataacaggtgtttcaaatacatctgtccaataagacctgttccttcaaagatcgaataattcccatcatttgttttgtttattgatttatgct

SEQ ID NO: 911137 - DNA, 498 bp, Homo sapiens
tgagagaggtaccacttttccttatccttgaatacctagaggccattataaggttgttcattgacatactttctattttgttgtgtctcaggaaagagagagggccaaggaaaggaaagacatggtggaatgaccagttggtagagtggtaagaacacacccaacattattgattaaattcattgttttatctaggtgtagctcatcgtgtcccagaacaaatgctacagtaacatcaaagatatctggtcacagatcactgtaacagacataacaataataattttaaaagtttgaaatagtgtgagaattaccaaaatgcaacagagacatgaaaagagcacatgttgttggaaaaatagtgctaatagatttgctccatgcagtattgccacgaaccttcaatttgaaacagatgcaatatctgagaaccacaattaagctaactgcaaaaarttaggcatgtctgcatatgtctattaggcctagtttgtttta

SEQ ID NO: 911138 - DNA, 599 bp, Homo sapiens
tccaagaccatcaagaatgtgcctctrtgaatctgcaagaaccacagaattactgggcttgggtgccccttaaagcagatatagcttaaatcacaacacccaaatcatgtcaaatatctggaaagacttcccaagaaggacaggtacaaataagcccaaactgagaggacaacaataaatacctcactcctcacttcacaggcacacatgtatatcaacaagtgtaaaggccattcaggaaaacatgacctcagcaaatgaactaaattaggtaccagggaccaatcctgaagaaacagagatatgtgacctttcagatagagaattcagaagtcactgttttgaggaaaatcaaagaactgcaagataacacagagaagaaagcattttatcagacaaatttaacaaagacattgaaataaatgaaaagaatcaagcagatactcaagctgaaaaatgcaattgacatactgaagaatgcatcagtcttttaacaacagaattcatcaagcagaagaaagaattagtgagcgtgaagacaggctacttgaaaatacacagtcagagaagaaaaattgagaagaataaaatcaatacag

SEQ ID NO: 911139 - DNA, 682 bp, Homo sapiens
ttgatcaaccacagggatgggttctgagaaatgtatctttaggtgatttcatctttctgtgaataacagaatgtacttcacttacacaaactagacggcatagcctactaggctatatattatagcctatttctcctaggctaaaaacttgtacaacatgttactgtactgaatactgtaggtgactgtagcacaatgataaatatttgtgtatctaaatatatctaaacatagaaaaggtacagtaaaaatatggtattataatcttatgggaccaccatcatacatgtggtctgttgactgaaacatcattatgcaatgtctggctgtaattaagatgattcagactgaattcattttagctttcctagttcacttatttattcaaacttattggacttttgataagtcctgtgtgacttattgataaatattaacaatattgttactatagattttcctaggatgcccagaatcctgatgcactcaattggccttccaggaaatcatagccttacacagctatagatatgaaaactttacataagaattctgtgccaactgctatggaaaatcagaaggatcccaaaaaccatggctagatagttctrggaaaattttacagaagtttgtatttgcttttaaatatatataagggcaaatgaaattaacatttattgac

SEQ ID NO: 911140 - DNA, 642 bp, Homo sapiens
agaaatacaaaaattagccaggcatggtggcacatgcctgtagtcccagctacttgggaggctgaggcaggagaatcacttgaacctgggaggaggaggttgcagcgagctgagattgtgccatggcactccagcctgggcaacaagagtgaaactcagtctcaaaacaaacaaacaaacaaacaaacacactgctttaaagtagtccattatagaaatatatcatgatttacccatccattctattgtttatggacattagggttgtctctacttcttaattattatgtgtaatgctgctgtaatcaatcttgcgcatgtgatttcttatgcaaatatcattagatctgccagatatgtacataggatcggaacttctgtccaagggtatgcttatatttggttatgtaaattataaccaaagtgttttaatcaaggtatactaccactgatagtgtttgagaatccgtattttcaatacttttaaacctagcaatttttatgagtgatttatagtaaattattgtggatttaatttgtaaatttctgttgactaatagattgaatgcactttcatcygcatgacattatttaaactacctccaattttcttgcccatttttctactggattgtcaacctt

SEQ ID NO: 911141 - DNA, 617 bp, Homo sapiens
gctgagattgtgccatggcactccagcctgggcaacaagagtgaaactcagtctcaaaacaaacaaacaaacaaacaaacacactgctttaaagtagtccattatagaaatatatcatgatttacccatccattctattgtttatggacattagggttgtctctacttcttaattattatgtgtaatgctgctgtaatcaatcttgcgcatgtgatttcttatgcaaatatcattagatctgccagatatgtacataggatcggaacttctgtccaagggtatgcttatatttggttatgtaaattataaccaaagtgttttaatcaaggtatactaccactgatagtgtttgagaatccgtattttcaatacttttaaacctagcaatttttatgagtgatttatagtaaattattgtggatttaatttgtaaatttctgttgactaatagattgaatgcactttcatccgcatgacattatttaaactacctccaattttcttgcccatttttctactggattgtcaacctttttcatatttatttgcaggaaattttatatacttgtattttggactaagktgtcttagatttgttttggaaatcatttttcta

SEQ ID NO: 911142 - DNA, 590 bp, Homo sapiens
taaggttgcttggtccaaatgtctaaatattgctcatgatctgttggtttcttcaaaaaattcttaacttgtttaaagtttgaaatatttaaactcattctaatttccaaattaaatgttttaaaatggaatatatgaaaaattaggattcaacttctgctagtctctccaacatcttctccaccactcatctccatgaacctgatgcttgatagtgaatccagaattcacaatgcattttctttactgtgcaaatgggatgatgagtccttttgttaaaaaaacacattgaaccttctcgctttcttgtctctttgccctagctttatttcatattttatactatgtatttgtgtaattagggtgatactcctgatctctcttatattctaagttccaggaggttgggtaacttgtctgtattgctcctcaattatattcatcatactttaaactccctgacaacagtgccatgtgcctaggtgtttgtattcttagctctgtttgttaaaaggatgaatgtgtatattaaaattttycagttttcaaaattcagcagaataattctttgtatagtacagtctttgatt

SEQ ID NO: 911143 - DNA, 655 bp, Homo sapiens
cttctcagtcaaaaatacttcacctaagatgaataatcaccttaataattaccatcagagcatcagcctagtccttctctgcttaaataaatgcaaaagaaactgcaagtgccataggcagaggggtataggaaggtttccagagggggaaaagagcccatggaaagaaaaataacaagaaattaaatgacacactgtgaaatcaaccatagataaaagaaatcatgagataaattataaaatattttgaactgggtaaaaatgaaaatcgtatataaaattgtgtgggatgcagctaaagcagtgcttagagggaaatttatagcttcatttgcttatatttgaaacacagaaatagaaaatagacaagtaatagagaaaattaacaaagcaaaaatttagttcttttgaaagattaacaaaatttataaatgtttagcaaggccaatgaagaaaagaaagaaaatacaaattaccaatacccagaatgaaaggtgaggcctacctacagaaacaacatatttttaattgactcattgtaattgtacatatatttgrggtaaaatttgatgtttcagtacatatatatgttttataatgatccaaccagggtaattagtgtgtatctatcaccccctgcatttatcatttattt

SEQ ID NO: 911144 - DNA, 649 bp, Homo sapiens
aaaatgtagcctatctgaacaatgggagaaaacagactgagaaacaatgcaaagaacctcggggacctatgggacaataacaagagattcaactttcatatcatcagagctccagaagaagaggagaaagaaaataatgccaaagggtatttaaataaataatagtttaaaacttcccaaatctgttgaaaacataagcatatacaggttgaagaagctgaataaaccccttgcaggattaatccaaagaaatccaagccaagaaacatcataatttgattaacattacatatactattatactatatagcatgtgtatatataaacacacaaacataaatatatagagtaatatgcagttcaactccaaggacagtacgaaacaaaaaaaatgcattccaatatctctcatgaatatagacaaaatatcctcaatcaattattagaaaatagaatgcaatatgtagaaagaatttacataggccaagtggatttatttcaggtgtacaagactacatagacatttgaaaatcartaaatgtaatctatcatataaatagaatagagaagaaaaattatatgatcgtattaattgaggcaaaaaacaaatttgataaaatccaacacccgtttatgataaaaactctca

SEQ ID NO: 911145 - DNA, 578 bp, Homo sapiens
tcctacaggctaaaactaagccctgcagatggtatgtgtgtaaaaaagaaaaaaatgatctggagcatgtagtggaaacattttaaatttcagtaaagaagatgccattttgtttataacaatgckatataaaattttcttgaaatataattggtgatgacactggcattttcctttgttgtcataatcaggaacaaggggacaagaaattacagtgcgtggatcagaaaccagtcactgcttcactggcctttcaccagacactgattatggtgtcactgtttttgtgcagacaccaaatctcgagggaccaggagtctctgttaaagaacataccagtaagtttttgaggaatctggaaagctttcataaggctttagaatagaatgctctaggtaaggaagacttaagtgaatcctgtgcaggtacctctccgtaggggtagcaataatgatgggatgatggcagattcctgaatgtggagtctaaagctggttcaggacctttttctgtagcaatttgcaagttgtccctgttattgagttggtgctactttgaggaagggctaaaggagggag

SEQ ID NO: 911146 - DNA, 573 bp, Homo sapiens
ccccccaggtaggtttgctagtattttaaacaggcaaagactataaataccgagagggcacaccatcccgaagagattcacaacttcatcctgttattcttttttttktttttgagacggagtcttgctctgtcacccaggctggagtgcagtggcgcgatcttggctcactgcaagctccacctcctgggttcacgccattcttctgcctcagcctcccgagtagctgggactacaggcgcccgccaccacgcctggctaattttttttaatttttagtagagacggggttttgccgtgttagccaggatggtctcgatctcctgacctcatgatcttcccactttggccccaaagtgctgggattacagaagtgagccaccgctcccagccaacttcatcctgttattatagcataaagcattcttattaccatggcatatgttttagcaagaagttcaacctccataacttcattttcatgttccctttgttaaaaaaatgaaaagtttctattaggcattaactataacattaatatatgatgaaatgaattttagtgacacaaagggt

SEQ ID NO: 911147 - DNA, 617 bp, Homo sapiens
aatgctcagagcatgatgaaatttagatagggagaaggatttgtggaatgctgaaaaggcattctgaatgtcaaaaatgtgtgacttggagtcatgaatggtagaggagaagttttgactagcacacatgcaaatgtgggcttacatacttcaaaacccagaggtaaaacctgttaaaaatgaatgtggcacattcctcgggaaagcttggacaggtttattcatattaggttatcttaacacaatttgtgcattagagactcatgttgtgacttaattctttcaataattctgtcttcagcaaaagaagttaacaaaaaacaagtgtgctacaaacacaatttcaatgcaagctcagtttcctggtgttcaaaaactgttgatgtgtgttgtcactttaccaatgctgctaataattcagtctggagcccatctatgaagctgaatctggttcctggtaagaacgttttaaattactttaagatgttatagtcrgggcagggacttatttatttattcactccctcattcatccccattcaataaacatatgttaaataccctcactgtggtaggccctgggctcaccatagtggtatttaaaagaaaagaaataa

SEQ ID NO: 911148 - DNA, 512 bp, Homo sapiens
catcagacaaaaccaaattgagggaaatctgcaaaatagctgactgatactgttttaaagtatatatatakagagagagagagagtcagtgtctcactctgttgcccaggctcactgcaacctctacctcctgagttcactccgctcaatgcaacctctacctcctgagttcaagcaattctagagcctcagcctccagagtagctgagattgcaggggcctgccaccacgcccagctaatttttgtatttttactagagacggggtttcaccatgttggccaggctggtctcaaactcctgacatcaagtgatccgcccgcctcggcctcccaaagtgctgggattacagccatgatccgtcacacccagcctgtttcagtgttaaagttgtaaaagacaaagactaaagaactgtcatagaagggagacaaaggagacataaaaactaaatgcagtgtgggatcctagatttgatcctggaggagaaaatggacattgttggaataactg

SEQ ID NO: 911149 - DNA, 581 bp, Homo sapiens
aacaacaaaaagacaaacaatcaaattgaaaaatgggaaaattatttgaaaaggcatttctccaaagaaaaaatacaatggccaacaagcatggcaataataataataataactgctggcagtgatggggaagtaaaattgtcctgctgctttagaaagcagtttggcagttcctaaaaatgttaatacagaattaccatataaactagcaattccactccaaggtaagtgaaataattgagaataaaggtaaaaacagatacttgttcactagttttcacatcagcattatgcacaacagcccaacggtggtaacaacccagtattcattgacggatgaatggataatcaaatggggtaggtacacacaatggaatattattcagacataagaatgaatgaaacatatgatacctgtggcaatatagatgagtctgaaagagattatgctaaataaaataaaccatattattccactttcataaaatayctacacataggcaaattcatagaaacagaaagtatattggaggttattaggggctagaaagactgacaaatggggattgccacttattggg

SEQ ID NO: 911150 - DNA, 570 bp, Homo sapiens
ctctatacaaatgtttgtaatattaaataataaaatgcctaactaaccatcaatcagtgggtaaaaaagcatctccccacccttagtcaacaattagtgatgctgtttctttacaggagtggttattgggaaaattgagagtagagtggaaatgtttttatctcaactattactcaagaattactgcagctataagtcaggataagtaggtgatgtttaactcttcaaattctatttattactcacaccaagaatgcaacaactcaatcagtatttgccttccagtgctgccttcttagcgcatagttcctatgtgaatcacagcctcatggaggaaacatgtgaagaaattacacctcatcctgtatattttgacctggaaatgagacatggcacttctgttcacaggctattggtaaaactagtgacatgaccccacagaaaatccagagggytatgaaatgtgaagaagctcatggatttttttgaaaaattgagcagttaatattaccgccatacccaatgttattttaatatttcccacttaatttcaccggatatcataagaca

SEQ ID NO: 911151 - DNA, 566 bp, Homo sapiens
atgatgcaaatattggatgggagtgcttccaacatcttcacgcttagcttcgtcaccatggtaaagtttggtgatgggaacaagatgcataaagatrgcatgatgcaatacaccttaattttaaatattcttaaaataatttgcttcaatgatacatccttaagtgccttgtctacctactattattacacaacacctcatgtccttgttttcagtttcctgttaggaacacacacatttattaccacaatatctgtctattatctgatgggaaaaggtataataatgggtcattggaacatgaggagaacatttgtgtgatggttgatattaagccaaaggtgttttatattctttcagaggatatagtccagatgccataacattattagcagaagctggaaatgtgctttgaaggatatattcctgacatttctgtggaaacaacaagactgtgaatggaaagccttcaggcatgaatgggcttaataagtcacggattctgggtcagtgtttgaaaggctagatttgtatagttaaaagtatgctaaaggacatataagtcc

SEQ ID NO: 911152 - DNA, 624 bp, Homo sapiens
gcaaataaatgtgtgtctaataactaaggaagaagagaaactgtacgcatcaagaaggagatctgagattaccatcataakggagagctaccaaacttctccattcctaatattatgctgtcttacaaatataacctctaatcctcaaagtccctgaaagagaaatggttctgtaatacaaatgggaaaactgaggcttgaggagacaaatcaatactgataaaaagcacacattgactaaaagtggcaaattgagaataatatgaacatcacaaatagtaatagttgttcatttgtggaccattatcactgaaaatggtggaaaaacaccaaaaggtcaagcaaaactgtcacagccaactttgatagatctctggaaaatggtcaaaagtttgcaacaaccaagcaaacactgaaaagaggaaaaggtaattcaaaaatagtaggaacattttccagtgcttttacttgttcttgctctacacccctccttgatttggtggcaaatttgataatagtggcccatgttgccagtttgggaccctggtccttggttctggaggaagaatagcagatcttactctcaaagaattgtatttgacctgtctgttgcctgcctaaaga

SEQ ID NO: 911153 - DNA, 624 bp, Homo sapiens
gcaaataaatgtgtgtctaataactaaggaagaagagaaactgtacgcatcaagaaggagatctgagattaccatcataatggagagctaccaaacttctccattcctaatattatgctgtcttacaaatataacctctaatcctcaaagtccctgaaagagaaatggttctgtaatacaaatgggaaaactgaggcttgaggagacaaatcaatactgataaaaagcacacattgactaaaagtggcaaattgagaataatatgaacatcacaaatagtaatagttgttcatttgtggaccattatcactgaaaatggtggaaaaacaccaaaaggtcaagcaaaactgtcacagccaactttgatagatctctggaaaatggtcaaaagtttgcaacaaccaagcaaacactgaaaagaggaaaaggtaattcaaaaatagtaggaacattttccagtgcttttacttgttcttgctctacacccctccttgatttggtggcaaatttgataatagtggcccatgttgccartttgggaccctggtccttggttctggaggaagaatagcagatcttactctcaaagaattgtatttgacctgtctgttgcctgcctaaaga

SEQ ID NO: 911154 - DNA, 605 bp, Homo sapiens
ttaaaaattatacaacctgatcaagcacaatctgaccctatgattcagcaattacactacttgatatttccctgaaaggagctggaaacttacatccatatgatagcctgaacatcratgattatagcagtttaattcataattgccaaaacttgaaagcatccatgatgtcctttagtaagtgaaatgataaattatggcacatccaaacagtggaatatttttcaacactaaaaataaactatgaagccaagaaaagacatggaagaaacttacatacattttactaagtgaaaaaagatgatcttaaaaggatacataactgtatgtttcaaactgtatgactgataaagacaaaaccacagagagagtattaaaaaaaaaagagaaagaaaaagaaaaaaaaagaaagaaaatcagtgatttccaggggctagcatttggggagggatgaataggcagagcatagaggatttatagggcattgaaaattctctgtatgatgttataatagtgaatacatgtcactatacatttgttcaaacccataaaatataaaacatcaagagtgaactctaatataaactatggagtttgggtaatta

SEQ ID NO: 911155 - DNA, 577 bp, Homo sapiens
tttattctttattagtctagctagcagtctatctatttattaatattttcaaaaaaccarctcctggatttgttgatttcttgaagggtttttcatgtctctatctccttcacttcagctctgatcttggttatttcttgtcttctgctagatttggggcttgtttgttcttggtactgcaattcttttagttgtgattttaggttgttaacttgagatctttctagattttttgatatgggcatttagtgctataaatttccctcttaacactgctttagttatgttccagagattctagtacatggcctctttattctcattagtttccaagaacttcttgatttctgccttaattttgttatttacccaagagtcattcaggagcaggttgttcgtttccatgtagttgtatggttctgagtgaatcccttaatcttgagttctcatttgattgcactgtggtctaacagacttttcgttctgatttcagctcctttgcatttgctgaggagggttttacttccgattatgtgatccattttagagtaagtgccgtgtggttatgagaagaatg

SEQ ID NO: 911156 - DNA, 412 bp, Homo sapiens
cacggcaggaccacgcccagcgttgtcgccacgctctgggccctgggccagcccccccatggcgcaggtgggcaccggagcacttcccctggtgggcctcacactcactcaagttcagggtggggcctgggtcaggggggcggagccagaccaggggcagcagcacgaagcttgcggtgagcagcaggctcagcaggttgagtagcagcaggaagcggaggaaggtgaagtaggaccgaattcctgtgccgaagaggcctgcagtgggagagcagggtgggtcagggaggccggggccggggctggggccgcgctgagagtccaagggcgggcccacyggacggcgtggggtgcccgccaggctcccacccgcccgagtccggaggtaccgctgacagtcacctgggggtgc

SEQ ID NO: 911157 - DNA, 615 bp, Homo sapiens
tatcaaggcatgcctttgatacagattggcatgttccaaaagtgggcaggaacaggagagggaacaaagaggaggaggaaaagaactgtgtgctaactacttctgtatcagaacagagcccatgagatgctggtgtctgctgtggtcatggccctgctgtctcattggctgtagctgcctggacccaaagacacctgaagatgttggtgtgggctctgcctaagagggacagagcaactcaatggaccaattagatgttcttatttgggaagtttggaatcaatataatgccaagagactaaatagtggtggagagagtggtcataggaataaagccagaggaccacagaggagagaggcaatgtgcagaaaccacagggaagcataggtcacaaattagagagtggggagaagggagctggaagtggatggagtagaagccaaactgcagggaactgcaaatctttaacggcctcgtgctaaatcaggaagcaaggatgcctgctccttgggagcagtaaggcagtccagtggctcagttattagcactgtgggaccattcactkccagcacaattgctcagacaccacagggatgagtggcaatggctattcc

SEQ ID NO: 911158 - DNA, 483 bp, Homo sapiens
gagtttagtgaatattgatacatcagttttggtttcttagttttgacatgggtaccatgttctataattgttaacaatggaggacactgggtgaggggtctatggcaactctawgtactatctttgcaagttcttaaaataaatttaaaattatttaaaaataaaacatttatgccaaaaaatttcccttgaagtcaggacaagtaggatgacctcaagatgctaactgacagtgtaacaaaacaaaaagaaacaaaatatatcaggattaaaaaggaaaagctgaaatgtgcattattcaatatcattgtttacacagaaaatccaaaacaataaacaaaccattagaactgataaggcttcagtcaatttctatcaacacacacacacacacacacacacacacacacacaaatatttacctacataacagcaacaataacaaaatgtatttttaaagattccattacaatagcatgaaaa

SEQ ID NO: 911159 - DNA, 676 bp, Homo sapiens
agtacctgatgctaggtaatttataaagcaaagaggtttaattggctcacrgttcagcaggctgtacaggaagcatggtgccagcatctgcccctggtgagggcttcaggaagctttcagttgtggtggaagattaagtggaagcaggcatgtcacatggtgagacaggaagcaagagggaggggaagaagtgtcacacttaaacaaccagatctcacatgaactcatagagtaagaactcgctcattactacaaggatggcaccaagccattcatgagggatctgctcccatgatccaaatgcctcccaccaggctccaccttcaacactggggattacaattcagcttgagatttagaggggacaaacatccagagcttatcaggcatggtgagtttcaagcaagtgcgggctgcccgaacaaactttgggcatattctggaattgtttcacaagttgcctgtagtgaagaaaacactgtttcagtagagaaaattattaacttacatgcaggagaaatttaaaaacaagaacaaaaattgctggttacagcttcagtggcttgtttgtttgtttgtttgtttgtttgtttttggatacagggtccagctgtatccaaacaggatacagcctgttgcccaggctggtctcagactcctgggttcaagcagtcct

SEQ ID NO: 911160 - DNA, 566 bp, Homo sapiens
aaatacttaagattcagtagctctttggagactaaaatgatgtaaaacatggagatatgaatattaaaactaattactagtttttgaagttatgttgtaaataaaagtaacargggaaagccaatggactgagaaacagaaaacttagatttgagtcctgcatttgattatattaacttcagcaaattacccaacctagctctgatttatttaattgatttatactataaaggagttgaattaggtgactttccaagatacttccaagtcctaaaattctcattctctcactttaaacagtatatttaaagtgtttagaaagttgaaatccattatcttattaaagctaatgcgaccaaagaaagcagggcagagacggtatctaattagtgtagcaatgtcttacttggattgcatgttggaccaactggactctcccatctttgaggtgaatcaaactcacccccatcttcttcaggatttctaaatgctcagggttagtggccatgaaatctctggctctcagagggggtttagctccactcctgaaactctcctctctgcta

SEQ ID NO: 911161 - DNA, 653 bp, Homo sapiens
tgttagagggagggtggagaactccaatatgaaggagaaaaagtgaacagctaatccttaaaagtgtttaagatcagtcatatttggagaggtctgtcggcagccttcagggccggactccaggccaagggtagtcagggatagaatgccaaaccagggtgagagagggcaggagagacatcttgagcatctgctggtttgcccacacaaactctatctcccctttttctgataacgagcatccatgacttctcttaggaaaatttactcttcctctctcagtccatatggttcaggtgaggttgacttaccccattcccacatacctggggatgagtgtgactctcactcgggtccaatggagaaagcactggaatttggaggggggaaggaagctttctttctgatgatattgctgagttagttccagcaactagatgaaactaggggttggcttagggggcaccagaaggagagagagtccctaaatagaaagccaacgtggaggagagatagaaagaaaccaagcctgaataatgctacgcagcyccctggaagcaccgttggactttacagctctggactgctgcaagtctccttgtatctagtttaagcccatctccattgagtttaattcactgccaaaggaatag

SEQ ID NO: 911162 - DNA, 653 bp, Homo sapiens
tgttagagggagggtggagaactccaatatgaaggagaaaaagtgaacagctaatccttaaaagtgtttaagatcagtcatatttggagaggtctgtcggcagccttcagggccggactccaggccaagggtagtcagggatagaatgccaaaccagggtgagagagggcaggagagacatcttgagcatctgctggtttgcccacacaaactctatctcccctttttctgataacgagcatccatgacttctcttaggaaaatttactcttcctctctcagtccatatggttcaggtgaggttgacttaccccattcccacatacctggggatgagtgtgactctcactcgggtccaatggagaaagcactggaatttggaggggggaaggaagctttctttctgatgatattgctgagttagttccagcaactagatgaaactaggggttggcttagggggcaccagaaggagagagagtccctaaatagaaagccaacgtggaggagagatagaaagaaaccaagcctgaataatgctacgcagctccctggaagcaccrttggactttacagctctggactgctgcaagtctccttgtatctagtttaagcccatctccattgagtttaattcactgccaaaggaatag

SEQ ID NO: 911163 - DNA, 605 bp, Homo sapiens
ggtctcctcatttgttgtaaatttcagtgtagtgtagttaagccatataatcagggctacaggtactatttttgaccactggggggaccattgttctccasgttgtttcattttttttctttttattatactttaagttctaggtacatgtgcacaatgtgcaggttagttacatatgtatacatgtgccatgttggggtgctgcacccattaactcatcatttaacattaggtgtacctccaaatgctatccctccaccctccccccaccccacaacaggccccggtgtgtcatgttccccttcctgtgtccatgtcttctcattgtggttttgatttgcatttctctgatggccagtgatgatgaacattttttcatgtcttttgactgcataaatgtcttcttttgagaagtgtctgttcatatccttcacccactttttgatggggttgtttgtttttttcttgtaaatgtgtttgagttcattgcagattctggatgttagccctttgtcagatgagtagattgcaaaaattttctcccattttgtaggttgcctgttcactctgatggtaatttcttttgcagtgcagaagctctttag

SEQ ID NO: 911164 - DNA, 616 bp, Homo sapiens
aacaccccactgactgtatgagacttatcaccaaggcagaaaattgacaaagacattcagaatctgaacttaacactggaccgaatggatctgatagacatctacaggactstcttccccagaacaatagaacatacattttcctcatctgcacatggcacatactctaaaatcaactacatgaatgggcctaaaacaattctcagcaaatgcaaaaaaaaaaaaaaaaaattataccacccactctattggaccacagcacaataataatagaattgaagactaagaaaattgctaaaaaccatacaattacatgaaaattaaaccactggcttctgaacaaattttgggtaagtaatagaattaaggcagaactcaagaagttctttgaaactaatgaaaacaaagatacaatctaactatttttctccatgcaaggacaccaatttagcaactatctacagacaaaaaaagacctttgtaaaaaccacaaatcaagtaattatgctcagtacttgatttttactttatatcattgaaagaggtactaaaatggtagaaaaatagttttgaatcgcggacaccgcctctttttatttccttgaagaggcagaat

SEQ ID NO: 911165 - DNA, 627 bp, Homo sapiens
ctttgggtatatacccagtaatgggattactgggtcaaatggtatttctggttctagatccttgagaaattgccacactgtcttccacaatggttaaactaatttacactcccaccaacagtgtaaaagcattcttatttctccacatcctctccatcatctgttttttcctgattttgtaacgattgccattctaaatggcatgagacggtatatcattgtggttttgatttgcatttctctaatgagtagtgatgatgagcttttttcatatgtttgttgaatgcataaatgttttcttttgagaagtgtctgttcatatccttcatccactttttatggggttgttttcttcgtgtaaatttgtttaagtttcttgcggattctgaatctaagccctttgtcagatggacagattgcagagatttttctcccattctgtaggttgcctgcttactctgattatattttcttttgctgtgcagaagctctttagtttacttagacttcatttgtcaattttggcatttgttgccattgctttgggattttagtcataaagtctttgyccatgtctatgtcctgactagtattggctaagttttcttctagagtttttatggtttt

SEQ ID NO: 911166 - DNA, 613 bp, Homo sapiens
tgggactggccccctccacagcacccaagccagccttgggcaaaaggtgctgtcatcccagctgacccctggtgccagcccggtacacaccagtgargggatcaccagggaggcctggtgccagcctggtgtgcgccagtgaggggattgccagggaggcctccacacagactgacctcttttggtgctgggggaggggctgccactgtagatgctctcagctggggaaccttccccagagcaagctgctggatgtgcaggggccccgggcatgctgtccagcaggtcctcccaggctcccagctgcccccatccatggccttccgacacagccgccagccgctgaccgacatcaggtgcctgtgcattgctgggcccaccctccagcactgtcacgttcatcttagcaatggctcatgaggttggatggctcctgtccatgctcagccaaggatccactcagagcagttcagtggccttcccctggctgcagagtagagccggatggagttggacctggacgcaggccgcccccagcctgtgctcctggccaccgctcagcctgcccctgctgccaacacggtccgaatgaccactgtgtgtcccatgcgcc

SEQ ID NO: 911167 - DNA, 613 bp, Homo sapiens
tgggactggccccctccacagcacccaagccagccttgggcaaaaggtgctgtcatcccagctgacccctggtgccagcccggtacacaccagtgaggggatcaccagggaggcctggtgccagcctggtgtgcgccagtgaggggattgccagggaggcctccacacagactgacctcttttggtgctgggggaggggctgccactgtagatgctctcagctggggaaccttccccagagcaagctgctggatgtgcaggggccccgggcatgctgtccagcaggtcctcccaggctcccagctgcccccatccatggccttccgacacagccgccagccgctgaccgacatcaggtgcctgtgcattgctgggcccaccctccagcactgtcacgttcatcttagcaatggctcatgaggttggatggctcctgtccatgctcagccaaggatccactcagagcagttcagtggccttcccctggctgcagagtagagccggatggagttggacctggacgcaggccrcccccagcctgtgctcctggccaccgctcagcctgcccctgctgccaacacggtccgaatgaccactgtgtgtcccatgcgcc

SEQ ID NO: 911168 - DNA, 596 bp, Homo sapiens
gttttttccaaatgccaaggtgccctattttggggtagtgtctcccaatccctgtcactmtaaaccaggggttttaggaaatctgaagatacagttcagggaatcctgaactttgatgggaaaaaaaaggatttttttgacatcctgactaaaacttaacattatgagcatgggcaaacaaataaataaataccactgtaatattagtagtgcctatgattttgtctcaaatgggaattatggatattttataatatattacagctgttgcagaggttgaaatatattttagattcatgttattttgaaattacaataatttttagatcacaagctatatcaaatgtgattgcagtctttttgtcaatagatgctcttgtgatgtagctgggaaactattgggtaactaactctgtgcctagtagttgttcagcagcaaaatggtaatgttgcatgtctttacaatgatgacccagaaatccctatctataattgactgttgattaacgacacaaagggagaagcatcattttcattctccgttagtattttgcaaatctgggcagttcaaatgagaaatcttgtcttaatcccta

SEQ ID NO: 911169 - DNA, 546 bp, Homo sapiens
cccaatttgctccattttactgcagctaatgagtccataactagtcataatctcagatatattgacagggagggacctgtctggttgaaaataatattcatattccttagccaggcaagtatattcctatggtggagaaggcacactgagctccaataaccgtatgacaattttacttttaaaagcatccaactcactttcttctaattttatgctttcttgggatcctcctatccttaattttatttccccaagctttctctcccacagggattaaaatgtgctgacaagctgacaggagtattccagtctacttggcagttaacttcctcatagagacgtctaaattgatgttctggtttataatcagactcttgtaagtttggtcagaagggatcaatttgcctgggtctgttaacctctaggtgtccacataataacccagtttctgaacctgaaagctgcatatcagaacctgggcaatgaaaagccamcaagaaatgacacatacactgtatcaccaggctagaaacagccactcagacg

SEQ ID NO: 911170 - DNA, 446 bp, Homo sapiens
ctacatctgatgtaaaagtcctaataataaggttaaaaactacctctgattaaaactacttctcrccaagactcccattcatgtgtccacagggtaattcaacactttgccagctatttagttgtggcttcttaaaggaaacaagatgtcagtctctattttcatggatcacttttatctgaaatcttttctctgcatgatacaaatttactagaatcataatctgtcctttgtaatatgtcaaaaagtggagaaatcaattatgtgtaattatacatggagtctcccagtatactttcagagcttattattagtaaatttcatgacaaaagaaggacaagaatagaaatatttcattacaaagaaacgaggataaggtagttgttttttcaaattactcttaccctgactttttttcatagtatttaatacccactggcatactt

SEQ ID NO: 911171 - DNA, 611 bp, Homo sapiens
ctattcagtcttataaaaagaaggaaatcctaataaaactgaagtgyagtgtgctaagtgaagtaagcccagcatagaaaaacaaatattgtgacctcatttatatgtggaatctaaaacagtcaaatttgcagaaacagagcatagaatggtggttgacaggggctgtgggggcaggtgcagggatggggagatgttggtcaaagggtgcaaagtttcagttagacaggataaacaagttccagagctttattgtacaacatagtaaaacatagttaataataatgtattgatactagaaaattgctgatatagtagatcttaaatactttcaccacaaacaatatgtgaggtgacagatatgttatcaggcttgatttaatcatttttcaatggatatatatataaaatatgctgtacactgaaaatacatacaatttttatttgtcacttacaaaatcatctgtattgctaaattcagcatttaaaatatgaaaatattagcatacataatctaccatatgtactaaaatggaacatatattataaatattcaaatcaataatagtaatatggattaaaagctggtatctttgagttctaaatgctca

SEQ ID NO: 911172 - DNA, 548 bp, Homo sapiens
gagaacatgtggtatctgattttctgatactgcattaatycatttaggataatggcttctaactgcatccatgttgctgcaaaggaaatgattttgttctttttttggctatatagtattccatagtgtatttgtacctttttttttttcatccaattcactgttgatgggcacctaggttgattccatgtctttgctattgtgaatagtgctgcaattaacatgcgggtgcatgtgtctttctggtagaataatttgttttttgaggatatatgcccagtagtgggattgctgggtcaagtggtagttctgttttaagctctctgagagacctccaaactgctttccacagtgactgaactaatttacattcccaacagtgtatatatgcttataagcattcccatttctctgcagcctcacccaaatatttttaaattttaataatagttattctgacttatatgagatggtatctcgtgatttttgatttgcctttctctggtaattagtgatgtggagcattttttcatgtttttttttttttt

SEQ ID NO: 911173 - DNA, 628 bp, Homo sapiens
cccaggctagagtgcaatggtgcgatcttggctcactgcaacctccgcctcccaagttcaagcagttctctgcctctgcaacctccgcctcccgggttcaagcagttctctgcctcagcctcctcccragtacctggaattacaagtgcctgccaccatgcccggctaatttttgtatttttagtagagacgtggtttcaccatcttggccaggctagtcttgaactcctgacctggtgatctacccgcctcggcctcccaaagtgctgcgaatacaggcgtgagccactgtgcctggcctggactgttgtttttcaaagcgaagttgaggatcacctggcacattttgtaacaaagtggatctctgggccacacccaggaatcaacaatgtctctggatgtgggatcctgagcgtggtggcggagctctatcctgatgacagaggctcttaggaggcctgacctggtcagaggagaatgggcaaaggatggccagggaagggtgttcctggcacagggctggcatgggcaaaggtctggagacaggaaagcagatggccggggtgccagagatgaaggggcacagcctggcagtgacaggaggtgctacagtccctgggtggaagct

SEQ ID NO: 911174 - DNA, 666 bp, Homo sapiens
ctagataaactcctgaagatgagaaagaatcagtgaaaawagtgctgaaaacccaaaaggccagagagcctcttctcctgcaaatgatcactatgtctctccatcaaggccgcagaactggacagagaatcagatagatgaattgacagaagtaggcttcacaagaagggtaataaaaaactacgatgagctaaaggaggatgttctaacccaacgcaaagaagctaagaaccttgataaaaagttagaggaattgctaactagaataaccagtttagagaggaacttaaaggacctgatggagttgaaaaacacaacaagagaacttcgtgaagcatacacaagtattaacagccaaatcgaccacgcagaagaaaggatatcagtttgaagaccaccttactgaaataagacatacagacaagaatagagaaaaaagaataaaaaggaatgaacaaagcctccaggaaatatgggacttcaaaaaaagactgaacctatgattgattggagtaccagaaggagacagggagaatggaaacaagctggaaaacagacttcaggatattttcccggagaacttccccaacctagcaagacaggctatcatgcaaattcaggaaatacagaaaacaccattaagatactccatgggaagatcaactc

SEQ ID NO: 911175 - DNA, 597 bp, Homo sapiens
ccaattcttgtatggtttaagaaagtaactctatttggaaagttatgagtgtatgtgaagtcaaatagagaggggcatacacaccgtctaccgaatcgatctgcggctcacctcttttcccactatctytctcccttttctagctcacagtggtcttgggccaggcctttttacagctattacagaacccattttcacattgttcggttgagcgtttatctttttgattctgtatttactcttctgttcaaaagcccggggcaaccgaacaaaaggataatgcttcgtatcacatttaagagtagaaattacagttcaactatcagaaatgctctgggatggagctgcccccgtgggacctgggctgcactgtttccatcctcccaggaagaaccttgggaacctattcacccgctttggttttggcaaactcactagcctgaggctatgcagtgaagatgaagttagttgaaatatagttgtttacatctgttttcataaggatgattaagacaccttttctcatgggggctacagcagctaacatcttttaaaaaggctttagcttctgcaaaagcattgttctaggtatacacc

SEQ ID NO: 911176 - DNA, 597 bp, Homo sapiens
ccaattcttgtatggtttaagaaagtaactctatttggaaagttatgagtgtatgtgaagtcaaatagagaggggcatacacaccgtctaccgaatcgatctgcggctcacctcttttcccactatctctctcccttttctagctcacagtggtcttgggccaggcctttttacagctattacagaacccattttcacattgttcggttgagcgtttatctttttgattctgtatttactcttctgttcaaaagcccggggcaaccgaacaaaaggataatgcttcgtatcacatttaagagtagaaattacagttcaactatcagaaatgctctgggatggagctgcccccgtgggacctgggctgcactgtttccatcctcccaggaagaaccttgggaacctattcacccgctttggttttggcaaactcactagcctgaggctatgcagtgaagatgaagttagttgaaatatagttgtttacatctgttttcataaggatgattaagacaccttttctcatgggggctacagcagctaacatyttttaaaaaggctttagcttctgcaaaagcattgttctaggtatacacc

SEQ ID NO: 911177 - DNA, 655 bp, Homo sapiens
agtatgtgggaaactgacagctaaacattattgagttttctgacgcataaacatatatgtctccatttatttagataattagtttctctgaacaaattttacacttttcagtgtatagatattgtasatatttcattaaatttaagtatttgatttttttattgtatcgtaaatggcattcaaacatttcagttttgattgttgcccatatatgaaaatacaatttatctggtatattgatttgtatcttacagccttgttaacctcaagttttagttctagtagcatttctgtacatttcatcagtttctacacgggtaatcatgttgactgtgaataaagactacttcacttcttcctttctaatcataatttcctttacttatttttcttgtgttaatgtactgagtagcaccgccagttcagagttgaatagtgatagtgaaaactgttcttttcatatcctggatatacaggaagtcattcagtccttggctaagtaatataatagctgtgggttttttagagatatgctttatcaggttaggaacttctattattattttgctgagatttttctttaactgaaaaagatgttgaatttttttcaaatgtgtctgtatctactaagacgtttatgtggttattcttcttg

SEQ ID NO: 911178 - DNA, 563 bp, Homo sapiens
gtcgatgtctattaggtctgcttggtccggagctgagttcaaggcctggatatccttgttaattttctgtctcattgatctgtctagtgttgacagtggggtgttaaagtctcccactattattgtgtgggagtctaagtctctttgtaagtcagtaagaacttgctttatgaatctgggtgctcctgtattgggtgcatatatatttaggatagttatctcttcttgtttcattgattcctttaccattatgtaatgcccctgtctcttttgatctttgttggcttaaagtctggtttatcagagactaggattgcaacccctgctttttttttgctttccatttgcttggtaaatattcttccatccctttatttttagcctatgtgtgtctttgcacgtgagatggatctcctgaatacagcacactggtaggtcttgactctttacccagtttgccagcttgtgacttttcaytggagcatttagcccatttacatttaaggttaatattgttgtgtgaatttgatcttgtcattatgatgccagctggttattttgcc

SEQ ID NO: 911179 - DNA, 562 bp, Homo sapiens
aaacactacgtaatcaccaaaccacatgtgttactaccaagctaaaatgaaaaagaaaaaaataaaggtgacttaaattaaaatgcccctagacaaagtaattatccgacttaacttccaatgtccatgcacgtgatacttccttgtgaggacaagaaagggagtggcacagtgaatatggaaaaagagtgtcaataatgggattgaaggacaagaggaaatagttcttggttcataggtttgggcagcaaatattctatctatgtgagtgatgaagagatacgtactcctgtcagaaggatggctcctttctcttcataggggataaaagatgagtggaagtcagactagtgaggggagggtgttagatggtggttttgattaacctgataatttcaggtgaaaaatcagatctcccagattaagattatgaygctccaataatgctgtaatattacttaaaggaaaagatggggagctaagtcttggcaattgtcacacaaaaattattgatatattgatcatcttaaaaggttactacgtttataaatcataactgtta

SEQ ID NO: 911180 - DNA, 640 bp, Homo sapiens
gggacagaagggagacaaagcagccgcatgtgcattgcactttattcttctctctggtggtcttgcaaagagcatctcgtctccyggtagctgctataattagtatcttattatcttgtcactgttcaaatttgatttgctaaatcattctgaacttccctgacaggctgctgatgcaaggtcagaaaataacatttcatacttattttaggccagcttccctagaagcagggtctgagatggggatttaaatgcatatgattagttgggagagtgctcttaggagaaaggcggaaagtaggataggacaggagaagaaactcagccaagatgtggttcagctgaggttttatctcagcctgatcctacaggaagctatagagaatgaagggcaccggagaccaagtcgtacgttgaggcaaagaggctggtcctttgaaccctcttgccaatcagctacagattgcccccagaaatttagtgtaaccccataacctcccagatatttctcagtgagacaactcctctagaccaaggtctcagtataaggaggaaagcagttatctggaagcaaacaataatcacagcaacaggggatggggctcctcaggtgaagtgtatcttgacaatacttactagc

SEQ ID NO: 911181 - DNA, 640 bp, Homo sapiens
gggacagaagggagacaaagcagccgcatgtgcattgcactttattcttctctctggtggtcttgcaaagagcatctcgtctcctggtagctgctataattagtatcttattatcttgtcactgttsaaatttgatttgctaaatcattctgaacttccctgacaggctgctgatgcaaggtcagaaaataacatttcatacttattttaggccagcttccctagaagcagggtctgagatggggatttaaatgcatatgattagttgggagagtgctcttaggagaaaggcggaaagtaggataggacaggagaagaaactcagccaagatgtggttcagctgaggttttatctcagcctgatcctacaggaagctatagagaatgaagggcaccggagaccaagtcgtacgttgaggcaaagaggctggtcctttgaaccctcttgccaatcagctacagattgcccccagaaatttagtgtaaccccataacctcccagatatttctcagtgagacaactcctctagaccaaggtctcagtataaggaggaaagcagttatctggaagcaaacaataatcacagcaacaggggatggggctcctcaggtgaagtgtatcttgacaatacttactagc

SEQ ID NO: 911182 - DNA, 661 bp, Homo sapiens
tactaaaactgaaggcttaccagattaggcctgcccaacttaacttactctgccttgttttagtcacttgctttcagttgattttaagacgttatgtagctaaaagtcaggtggctaaacaagtttaactaaactcccactagcttccttatacataatgtctctaatatatatgtcaccatggtaacaattacttaagttgtttttcaggaacttagagttagttctcatccagttcaagccactgagaccactgaccctccaaatgggcctgtgtgagtatagatgcgtgactttttgatgtcagagggccaaaaactccactctcagattatgctaatgacataatttgtgaatatgcatcctatgaagaaccatgaagcttgactatgcttgtgcagatcatcaattgcttcatattttcttactctcaatcacctttccccatgtcttggaccaccttgctcctttatcccataaagagccctataactccattatcggggagggggattttagagctgctttcccatctctttgttgctctgctttttgtctaaaacttattctccatgacaaaactgttgtctcagtgattggcttactatgccacagtcataacaagcytggctcggtataaaaatcttgtgtcatccttgta

SEQ ID NO: 911183 - DNA, 629 bp, Homo sapiens
gtactggtaaaaaaagagacacatagatcaatggagcagaatagagaagccagaaataagactgcatacctacaactatctgatcttcaataaacctgacaaaaacaagcaatggggaaaggacaccytattcaataaatggtgctgggataactggctagccatatgcacaagattaaaactggaccccttccatataccatatacaaaaattaactcaagacgggttaaagacttaaatgtaaaacccaaaactatacaaactctggaagacaacctaggcaatgtcattcaagacacaggcatggacaaaaatttaatgaggaagatgccaaaagcaattgcaacacaagcaaaaattgacaaatgggatctaattaaactaaagagcttctgcacagcaaaagaaactatcaacagaataaacagacaacctacagaatgggagaaaatttttgcaaactatgcatctgacaaaggtctaatatctagcatctgtaaggaacttaaacatatttaaaagaagaaaaaacaaccccataaaaaaagtgggcaaaggacataacagacatttttcaaaagaagacatatatgcagtaacaatcatatacaaaaaagctcaacatcac

SEQ ID NO: 911184 - DNA, 593 bp, Homo sapiens
ttgtattttttcactgtttcttttctcctgttattagcacatattttataatgttacctccagaaggaatttgcagttaatacattttattacttatccttttgagtctttttgtatatgtatagtaataaaacaggctgccctggaatgcatctatctctatatctatctgtctcgatagatataaaaggatttttcaagaaaatatattcaagatgcctttgaaacatagaagataatgcaaacatttatgtctgtggaaagagtcacagaaaagaagatatttaaactgcctcttgacgagtgaataggagtttggcaaacaggacagaagctcatgaggtatcacaggattttaagaagaaaaaagttcgtatttggcttttatgagaaaattttggaaacaatctggagaaaagtttggaaggagtgaggctgaaaacagagataccatttggaaactgaccataagatttcaagtggaatgycaagtttctaaattaagagcatgatgcaaatacggaaggaaggattacaattaagatggataaattaataacagtggtaatagtatgtgggagcagattgtaaag

SEQ ID NO: 911185 - DNA, 681 bp, Homo sapiens
taggcacttaatggatatttagttattgaatcaatgaatgataaaaattaacataaatttgtggagacttaaaaactgagtttacagggtactatsggggcagagtacataaattaagtagccaatcctctattggtggacattacatttattaaagatatttcaccattataaataattatgtagcacaaataactgcatacatgtccaagtattcttttgaacaattttacaaaggtaaattactggataagtttagacattatactgacttgtgacatattgccaacttgccaataaggaaagttgtgcctttttcattacataaacaatgggggttacattgtaaaaatatattaatttgataggcaaaaatattgttttcatctgtgtggctttgaacaccaacaagattgaaatgtttttaaatgtttcttggtagtttttatttcttcttttgtgacctgcctagtcatatcctttgttcgtttttttcctatcatttatctttttcttactaaactatgagcttttatttacctaatatacttattctgtaattaatgtcattattatttttccagtttgtcacttaaatttaattgtatttatcttcatctgacacaataacatttaacatttttatattaaatttatcaatattttctgttacagtttttg

SEQ ID NO: 911186 - DNA, 541 bp, Homo sapiens
aaaacttcataaagtatatgataatcatacacatgctcaacaataaacttatgtggtacagaagctctcggttagctcaccayatttgtaattgttaactgtgtggtggtaggaagcgtccctgacaattttcactttgcaaaccttcattcctggattaaactcaccaccaatacaaacaatcactgtcgctcactcattcaccaaaaatgaaataaacaattaccttacttgtttttattagtctatcttaaatgtatatacagataacactttacttcaatgtttaatattagaagagctttggtatttatttagaagtttggtgatgttttgtacaccagaaatatgcagcaggaacttaactgttgtttatatcaattagcttatggtaaaactggttttgttatatgtcaaaaccaattttgtggtatgacttaaagttgcagtttccaagatcctattaactatgttaagtgaggacttactgtattacaagcattagatcatcaaaaatatataatataaagcaaagcaactg

SEQ ID NO: 911187 - DNA, 595 bp, Homo sapiens
atgtcctcttaggaaaaaatctctaataaaatgttttgcgaatgttrccattatgtgtcagtttgcatcctactacataattattactcaaaaggttttgtctataattttattcaaaatacgttgacctagcattcactttcccttgatattaaaaacagataaaaactaaatgacaaaaatatcacaagaaatgtctagcacagataactcaaacagcctaatagttgaaaaattctgaacacttttcatttgaaaatgagaggttaagtttcctacacattactgatgctaatgaagtcttaaccacaatgaaccatcctgtgagaaaaagtcaagcttccattgacaattctaaatgtattatgtgtttataactgtaaatactttgtcttcaacatgagtccattaaatttaagaatcagagtagcaaatagtggggaaaaatacagtagcaccaacttcaaaatatttacaattactgtttgcagttttgatcataaattgatcagtaattctaaacataacatttaaaaatcataactatcttgagacatttttgacaatttccattaaatcctatgaaaacatagtt

SEQ ID NO: 911188 - DNA, 606 bp, Homo sapiens
aaacctcaacaagccaataataagtaatgagagtgaagctacaattaaaagtctcacatcaaagaaaagyccaagacctgatagattcactgctgaattccacaaaacatttaaagaagaagcaataacaattctacttaaactattccaaaaagttgaagagaaggggaactttcaaactcattctatgggcccatcattaccctgataccaaaaccagacacagacacaacaaaagaaggaaactacaagccaatactcctgatggacatggatgcaaaaatcctcaacaaaattccatcatgcaagttcaataacacgttaaaaaaattgacttgccataatcaaatgggatttatcctagggatacaaggatggttcaacctaagtaaattaataaacatgatacatgacattaacagaatcaagaacaaaagccatatgatcatagctgctgaaaaagcattccattacattcaacatccatttatgatgaaaactctcaacaaattgtgtacagaagaaacatatctcaaaataataaagaccacttataaaaatcccatagttaacatcttactgaatagggaaaaattgcaagccttt

SEQ ID NO: 911189 - DNA, 639 bp, Homo sapiens
aattgactcacatgtcaattaagtcaccttcttccaaggtggcagaaaggagaagtgccgagcaaaaaggaaagagccccttataaaaccatcagatctcatgagaaytcaccatatgtcacaagaacagcatgggggaaaccacccccatgattcaaccacctccacttgatctctcccttcacacgttgggattatagggattatggggattacaattcaggatgagatttgggtggggacacaaagcccaatcatattgatgagatttgttcccaactttgattgcaaacagtattattctcaaattctattttgaagtatgaatgatcagttcactaagatcctttgtgggaaaatctagaaaagtatcttcaaatacattacatgttccaaaggtttgctttcaaaatctggtgaaggttcatctgctcatacattaatcaattatcatactttcttttttagagaacccaagtaagaatttttacatttgcgcttctcacattttaagtcaatgctaactacaacattgttgtccctacctcgaagtgagtttcttaaactatatgatgatttcaatgcagactctacaaaagaaaaacttctgatgtggtcttgagaaatatacttgattaa

SEQ ID NO: 911190 - DNA, 617 bp, Homo sapiens
acaactatgagatcaacttccattatgttgcaaatgcaaatatctctaaaaaatgttgtttctaaattataaaccaacattctttccacatataatcctttagtgagttctgataaataaaatatatattcaaagaaaaaaataattttattttttaaactattatttggaacagctacattgttcacagtttcaattttcaatcagcttacagtaatgaaaaaatgacagtttttgcttatattaagtgtgaaaggacccaacttacaatggaattttgttttctttgcttgaaaataataatacaataggtatgtttctaataagagaatcctagccaagtaaagtaaaaacgtaaagcatgacactttgtctcaatctaatctcaggagtttttctgtgactaatgctcagaaactatgatataatatttgtttaataattatggaaattattggttcttgggaatttacatagtttactctggagaataaagagctacctctttaaaatattcatgggtgatagatattattttacttaagakaaaagtaatagcaaaatgtatactgaattaactttgttcagaggtaattatttctattattattaaatat

SEQ ID NO: 911191 - DNA, 622 bp, Homo sapiens
ttgcacaaaataaagtagaaggatatttaactgtagtaatgctattgaaattttgtatgagactccttatgactaaatctgtgaatcactaaaagaagaggaatggagaattaactcaaacccttaaaacagtttctcatctttttatatggaaattaaaattgcctatgacatttccatggacagaagtctagtcttaactaatcaattactcttataggccaaaataattcaggatattgtacttgcggtataattgaaatataattatttttcaagataaaatctgatcaaatctttctttgcaataaaaagagaagtgagactaattgcaaaaagcaaaaatgttattcctatcacaattacttaaagataacttcaaatacagtatcaaaacatttcaacaaatactacagttaatattttgaatttatcctagaacttaggaaaagcccattgaattttagagaaaaaacacaatatgtcatttcataattttaaaamtatatatgtcaaagataaattttgataaaaattatttcaatgtaaagcagcaatttgtgggccatgtatcatggtggtttagatcatctaacaatagatattctggaattttgaaagg

SEQ ID NO: 911192 - DNA, 637 bp, Homo sapiens
aaacactgttggcagataaacagcaaatactgaagatttgaagaaatgaggtttagaacaaattatagtgtgggaggttgctatacagttggaagaaagtataaatgttttgaacatgtctcagattgtggtatctgccagtttctactttgaaaatgatataaacctaaaattacttctgtaagccatattcaacattaaatataaccccttcaaggaaaatgtaagtaatcactattgataccagggtgagtttacagatgtatcaggatgtgcaattcatccattgtgtcattcacaaacaggaagttgccaggaagaagttgaaaacagtgtacattgtactagatgttgtcattgaggggactaatttagtgaaaaaaagatttttagaccatagaagccttgtgattctttgcaattagaatgaatatctgtggtatgagaatttttcattatggcctatctcaaaaataaagattaaggtaagttaagcatttatcttttcaagtgtcaaatgttccatatttgctaaccttaacacaattggatacccttggagaaatctttcccttcaagataaaarcaaagtaacaataaagcaagaaactgctttgagaataaattcatactatga

SEQ ID NO: 911193 - DNA, 616 bp, Homo sapiens
taaaaatcattaatgactctgtggactcatgcagattgactgggacacatacatktggccacatactgttctgccacaactgtccaaacatctatgtttatagtattaaatataattcagcatttgatagaccagaagtgtgcctatagttaacaataatatgttgtacttttcaaaatacctagaagataagaaattgaatgttcctagcataaagtaaagacaaatacttaaggtaatggctatcccaattatactgatttaatttttacatttataggagtgtatcaaaatatcacatgtacctcaaaatacgtgcatctattatgtatcaattttaaaaactttttacttcaaaaaagaaagaaaaaataaatttaaaaattgatctaaaattacaattaaggagaataagacaaacacatttttctggaagtactgtgaaggctgcagctattgtctgttttattccctgcagtatccccagtgcctactgtcaggttcattataggtgctcaaatattcattgaataaatgaatggatacattctttctgaacattaaaattatcatctcatgtcaatgcctttctctaagaatatcaaagtcaagcagt

SEQ ID NO: 911194 - DNA, 616 bp, Homo sapiens
taaaaatcattaatgactctgtggactcatgcagattgactgggacacatacatttggccacatactgttctgccacaactgtccaaacatctatgtttatagtattaaatataattcagyatttgatagaccagaagtgtgcctatagttaacaataatatgttgtacttttcaaaatacctagaagataagaaattgaatgttcctagcataaagtaaagacaaatacttaaggtaatggctatcccaattatactgatttaatttttacatttataggagtgtatcaaaatatcacatgtacctcaaaatacgtgcatctattatgtatcaattttaaaaactttttacttcaaaaaagaaagaaaaaataaatttaaaaattgatctaaaattacaattaaggagaataagacaaacacatttttctggaagtactgtgaaggctgcagctattgtctgttttattccctgcagtatccccagtgcctactgtcaggttcattataggtgctcaaatattcattgaataaatgaatggatacattctttctgaacattaaaattatcatctcatgtcaatgcctttctctaagaatatcaaagtcaagcagt

SEQ ID NO: 911195 - DNA, 714 bp, Homo sapiens
tcaaccaattctccattctctttggtagaagccaaaatccaaatggtctccttggtatcacacagaatgccaattacttcccctttcsccaagcacctaccttgtgcttgcccatgtggttaccctgctgagtctggatttatgatctgggcaaggagattggcactacctctttcctatcttctcacagcctactattcagttccactttagacacacaaagttgaggccgagctggcaggctgagcatgaggagcaggagtgagggagcaggaacagtgatgcctcatgcccaccctgccaagaggggaaaccagcaatgcagaaatggtccccttacccgtttcctggacagaggaatgtctcctttccttgaagtctcctgcaaaagctaaaaactaaaaattcctggcaggttgtggtggttcataccggtaatcccagcactttgggaggctgaggggagcagatcacttgatgttagcagtttgagaccagcctggccaacatggtgaaaccccgtctctactaaaaatacaaaagatagctgggtgtagtggcatgtgcctgtagtctcagctacttgggaggctgaggcaggagaatcatgtgaacccaggaagtggaggctgcagtgagctgagatcgcaccactgcactccagcctgaatgacagagcgagactccatctcaaaaaaaaaaaaaaaaaaaaaa

SEQ ID NO: 911196 - DNA, 587 bp, Homo sapiens
cccctttccccaagcacctaccttgtgcttgcccatgtggttaccctgctgagtctggatttatgatctgggcaaggagattggcactacctctttcctatcttctcacagcctactattcagttccactttagacacacaaagttgaggccgagctggcaggctgagcatgaggagcaggagtgagggagcaggaacagtgatgcctcatgcccaccctgccaagaggggaaaccagcaatgcagaaatggtccccttacccgtttcctggacagaggaatgtctcctttccttgaagtctcctgcaaaagctaaaaactaaaaattcctggcaggttgtggtggttcataccggtaatcccagcactttgggaggctgaggggagcagatcacttgatgttagcagtttgagaccagcctggccaacatggtgaaaccccgtctctactaaaaatacaaaagwtagctgggtgtagtggcatgtgcctgtagtctcagctacttgggaggctgaggcaggagaatcatgtgaacccaggaagtggaggctgcagtgagctgagatcgcaccactgcactccagcc

SEQ ID NO: 911197 - DNA, 640 bp, Homo sapiens
ctcaaaataaataaataagaataaactctttctttcggtatctatttggtttccctacaagttggaataattcatctcaatgctagtagtacctctctgaaggtgcatggggctgacttaagtattgctcacacaatgatggttgtctcattttattaattctgtgtattttatggtaggcctaaatgatagttgtgatgggaccttattgagaattttggtggtactggaaaactgcttgcacatggactatggccctataaataggcgatgaaatactattaaattaattaaataacataatctagtaagaaatgaaggaacagcaagaatgcctggctgctttggtggtcaccaacatagtttatattatagacaatgcatcatctggggcctgcccacagccacggtaaggaggtgaaatgagtatagagaatccaattttttttttttctcataaaaacttaagtgttagatcattgtggaagggcttgatttgatatgacagggatttttgataaacmgcattggtgacatgaatacagtaagccagaccagattgcttttgattttaatgttagattcatttttctcagcttcgtaatgtaagaaaaactgaattgaactttaaatatgctta

SEQ ID NO: 911198 - DNA, 607 bp, Homo sapiens
ggcacccctgtcttgtgccagttttcaaagggaatgcttccagtttttgcccattcagtatgatattggctgtgggttcrtcatagatagctcttattattttgagatttgtcccatcaatacctaatttattgagaatttttagcatgaggggtagttgaatattgtcaaaggccttttctggatctattgagataatcatgtggtatttgtgattggttctgtttatatgctggattacgtttattgatttgcatatattgaaccagccttgcatcccagggatgaagcccacttggtcatggtgcataagctttttgatgtgctgctggattcggtttgccagtattttattgaggatttttgcatcgatgttcatcagggatattggtctaaaattctctttttctgtatattacaaggctacagtaaccaaaacagcatggtactggtaccaaaacagagatatagatcaatggaacagaacaaagccctcataaataatgccacatatctacaactatctgatctttgacaaacctcacaaaaacaagaaatggggaaacgattccctatttaataaatggtgctgggaaaactggctagc

SEQ ID NO: 911199 - DNA, 607 bp, Homo sapiens
ggcacccctgtcttgtgccagttttcaaagggaatgcttccagtttttgcccattcagtatgatattggctgtgggttcatcatagatagctcttattattttgagatttgtcccatcaatacctaatttattgagaatttttagcatgaggggtagttgaatattgtcaaaggccttttctggatctattgagataatcatgtggtatttgtgattggttctgtttatatgctggattacgtttattgatttgcatatattgaaccagccttgcatcccagggatgaagcccacttggtcatggtgcataagctttttgatgtgctgctggattcggtttgccagtattttattgaggatttttgcatcgatgttcatcagggatattggtctaaaattctctttttctgtatattacaaggctacagtaaccaaaacagcatggtactggtaccaaaacagagatatagaycaatggaacagaacaaagccctcataaataatgccacatatctacaactatctgatctttgacaaacctcacaaaaacaagaaatggggaaacgattccctatttaataaatggtgctgggaaaactggctagc

SEQ ID NO: 911200 - DNA, 657 bp, Homo sapiens
ctcatatacacagcagcaggagactttcccaccttttaatggctgagcaaacttcatcccaggcaaccctggcaaaatgaaagtgtattgtcaaagttacttgtgmagatgactgtgtttagactagaagaaaagtcttgatacatcagaattgccacacacgcgtgctcacacagtctttattattaacatctaaatgcaaaaagtaatacaaagctttatttaaacatttaaatgtataaggagaaatgactttgtgttctatattgttcttttgtgtgtgtgtatgcctgtttttatcctttaagaaacaacagtgatagagtattgagtagtttcttttctttttttcttttttgagacaaggccttgctaaccctggctggtttgcattggcgtgatcactactcattgcagtctcaacctctcaggctcaagtgatcctcttgccttagcctctcaagtagctaggactacaggtgtgcaccaccacacccagctaagtttttattttttgtagcaatggggtctggctatgtttcccaggctggtctcaaactcctggactcaagcaatccaccagtcaagcctcttggagcgttggagttataggcttgagccaccttgcccagttgagaagtttctctaaatctgata

SEQ ID NO: 911201 - DNA, 651 bp, Homo sapiens
ctatatatagtatatattwatatatactatatatactatatatttatatatactatatatactatatatttatatatactatatatactatatatttatataccatatatatcatatatattaacatatatagtatatatgttttctatatatacacacacacatatatacacacacctatatatatatattttctattggtttccaatttcctattagttctgtttctttggagaactataactaaggtactatccaaaaaatatttcttaaatcctttgacctttttcctacaacctcttgtcctcaggaaaacaggaatgtcacctttcactgggcccctaaattcataatctattctactcatctggcattttgcattgactaacatataataggttttaggttttacaaattgtagttactttatttatgcagctgaattgaaagttctctggggcaagaattgcctaatatacatgaataccagctttcagccccatagcaaagcagtcgactccttcaggggttcagtgaaagtcaggagaaggctggagtgagttacttcactacatgtgaaagaggtgcccaggagctcattttcccttcttgtatcaactcctgaaagtctcttacaaaacgtactcaaaa

SEQ ID NO: 911202 - DNA, 605 bp, Homo sapiens
ctcccttttgatcctgctctggccatataagacaagcctgcttccccttcacaccttctgccatgattgtaagtttcctgaggcctcgccaaagcagaagctgctatgtttcctgcatagcctgtacaactgtgagccaattaaacctcttttctttataaattactcagtcttaggtatttctttacagcagtgcaagaacaacctaatacagatgaggtcacactggagtagggtgagcccctaatccattatgactggtgtctttataagaaggagagatttggacacagacgcacacagggagaacgccatgtgaaggtgaaaatggacgtgctggtctacaagactgggaaggccgaaggttgccagccaacctccagaagctaggagaaggcctgggacagattctccctcacagcccccagaaggaatcagccctaccgacaccttgatcttggacttcttgcctccaggacagagacaatacctttctgatgttgaagccrccagtttgaagcacttattctcatagccttagcaaattaagacagtacctctgacagggatgcctccctccccgaatcagcacatgacttactcct

SEQ ID NO: 911203 - DNA, 620 bp, Homo sapiens
tgtaattttgtatcctttaacaaaactctccctatccccactcccttaaccctgcccagcctctgctagcctgtgttctamtttttacttctatgagattagcattttttagcttccacatatgagtgataacacatggtgtttaattttctgtttctggcttatttcacttaacataacgtttgtattcttaaaagattatttggctgatgtctggaaaatggattgtaagagtgcgagagtggaagcggggagaccacagaggtggtttttgtcttgtaggagagagaggatggcagctggactagggcatcggacatggtgatagagaggaagtaggagacagaagtgctgggatgagtgggatgaatggtatcttgactggtggggagggtgtgttgaggagtcaggctttggacttagtaggagggtggatagtggggctgatccccaagagcccagaaaacagggagagcaacaggctttgagggctgatggggcattttgtttgagacttgctgcaaaatgtccacaaggaacatttgagcaagctgttggttgtgcagatcagagttcagactaaggcagtgacttcagcctcaacttatcagcgacaagca

SEQ ID NO: 911204 - DNA, 620 bp, Homo sapiens
tgtaattttgtatcctttaacaaaactctccctatccccactcccttaaccctgcccagcctctgctagcctgtgttctaatttttacttctatgagattagcattttttagcttccacatatgagtgataacacatggtgtttaattttctgtttctggcttatttcacttaacataacgtttgtattcttaaaagattatttggctgatgtctggaaaatggattgtaagagtgcgagagtggaagcggggagaccacagaggtggtttttgtcttgtaggagagagaggatggcagctggactagggcatcggacatggtgatagagaggaagtaggagacagaagtgctgggatgagtgggatgaatggtatcttgactggtggggagggtgtgttgaggagtcaggctttggacttagtaggagggtggatagtggggctgatccccaagagcccagaaaacagggagagcaacaggctttgagggctgatggggcatttkgtttgagacttgctgcaaaatgtccacaaggaacatttgagcaagctgttggttgtgcagatcagagttcagactaaggcagtgacttcagcctcaacttatcagcgacaagca

SEQ ID NO: 911205 - DNA, 581 bp, Homo sapiens
ggaatgggaggcgccaggctgtgatctttttagggcagagatcacatctttcttggttaccattatctccacagggcacaatagagggtctgggtccataagtattagttgagtggctgactaaatgagtgagrgtttctattcctggagccccctaagacaagactagataccatttccccagaacacagagccttgctcaccaatgagcaatacagtattgctcaccaaccactgaatgaatgttgaatatgtgagtttgctagcggcaagtattgcgtgtccagtattgctgctacagcacacgcatctcttgaggactgagtggatattgaaggggagggggcatctccagggtggagcaggaatcgggggtggggaggattacctgaatgacactttgtcaagtagcctatgaatttctgccttgttagtttgaagtattctgctacctagaggcagagtattggactaaaaaacttctgacagcccaagtatcatctccttctgagagggactaagccagcagatgaagaggagagactagggccatggaaagactggaaggaatagctttttgt

SEQ ID NO: 911206 - DNA, 460 bp, Homo sapiens
ctaaatgagtgagagtttctattcctggagccccctaagacaagactagataccatttccccagaacacagagccttgctcaccaatgagcaatacagtattgctcaccaaccactgaatgaatgttgaatatgtgagtttgctagcggcaagtattgcgtgtccagtattgctgctacagcacacgcatctcttgaggactgagtggatattgaaggggagggggcatctccagggtggagcaggaatcgggggtggggaggattacctgaatgacactttgtcaagtagcctatgaatttctgccttgttagtttgaagtattctgctacctagaggcagagtattggactraaaaacttctgacagcccaagtatcatctccttctgagagggactaagccagcagatgaagaggagagactagggccatggaaagactggaaggaatagctttttg

SEQ ID NO: 911207 - DNA, 460 bp, Homo sapiens
ctaaatgagtgagagtttctattcctggagccccctaagacaagactagataccatttccccagaacacagagccttgctcaccaatgagcaatacagtattgctcaccaaccactgaatgaatgttgaatatgtgagtttgctagcggcaagtattgcgtgtccagtattgctgctacagcacacgcatctcttgaggactgagtggatattgaaggggagggggcatctccagggtggagcaggaatcgggggtggggaggattacctgaatgacactttgtcaagtagcctatgaatttctgccttgttagtttgaagtattctgctacctagaggcagagtattggactaaaaaacttctgacagcccaagtatcatctccttctgagagsgactaagccagcagatgaagaggagagactagggccatggaaagactggaaggaatagctttttg

SEQ ID NO: 911208 - DNA, 581 bp, Homo sapiens
ggtttaatgatttacaaatgaataattcatcttcctagtcactcagggrgaagtcttggagatgactttggttttcaatgcctcattaacaaatatcaaattggccatttagttctatccactctcaaagtatcttttatattttcctcctactctttatcctcacagtcattgtcttggctttcataattgtttattcatcccatttcaaaacctcttggtttctccagttttatctttccatggtctattcaccaagaagatgagcttttaaatgtgttcatttaattatatcatttcctattaaaatcttctgatgactttcaaaatcctgatctgacatacaaggcttttgatgatttggccatttccttgtatgtccttataatgcatctatattcttaatatgtctgtgttgaactacttgctcttcattcatttaaactatgtatctctatcttgatcacaaggcattggtgataggccctcagaaagaaagatttataagacatgatttctgtcctcattgaattcctagttcaatatcagagacagtaattttaaaattatatttgttataa

SEQ ID NO: 911209 - DNA, 652 bp, Homo sapiens
taaatctggttatacctaaattatagagcaaagcaaagtattctcagcttatctttcctgatttaactttgaaacagaaagaattcccttcctgcacatccaaaaaatcaagttctgcttcttgttccaatgacttttccccctcacagtagtaccttaaaaaaatgtaatcatgctgactttaaaagcatggtttcattccctggcatgatttgttttttttctttatctcagagatgaaaagttttagaatctctctcagaagggtgagaaactattgtacacatctatataaaaaatcaagagatttcttctgtgagaagttcatatccaatttgtttaacttactttatgttataaacttcaatagcttatttgcttttttggattctgtggccctttctgtttgtgaaaaaacctcttggcaaccacgaatacatgacagtattcctcagctgacaacgtgccaaggatcatcacatctagaaaaagcgctatctggcgggacataaatacagggtcataccataaaaaygactaaagcaactgctgaagaatatagaatggatgtaaacctcagctgactcattcagtataaatggaatatgtgtgactgaaatataattgctttttaacttattcatttgcattt

SEQ ID NO: 911210 - DNA, 656 bp, Homo sapiens
agtaagaattaagaggtgaggggaggttgtttgggagtaggggagagctctatgagtttgctgtgcaagctgactgtattagaaagaatatttatagaaagagattgtaawccgtttaccccgaaaaaacaaaaacagctttcttaccaagaggctatctgttgaacgttcaggggatgggacatctgtgaaagccataaaagtgtatgtgagagaaagaaacagctctaatcacccaccaggccaatgacagatcccacatatgcctcccgtgtggtcatgaggaatttctctaatgttacttccttggacccaaccatggagaaatgggaccaattgtaagtgtgtgtgtgtgtgttttgagaggtgagaatatctaagttagagattagaagctgataatatccactattccattttcccattcctaggctaaaacaggacaccgttagaggatgggaaatgacctaaaacctctgactcatagcaggttctcaattctatttttagagtagttggtaataacagtgcaagtgtaaattctgtggcaaagtgaaagtacaaacaactttactatagcttaggaaaaaaaacaggtctgcactagctacaatgtgagagaggttaaatagaggatagagataaaattgtcactg

SEQ ID NO: 911211 - DNA, 370 bp, Homo sapiens
ggcaaaaatgtcactaggattttgtttttctctatcaccatgccattcatcatttttttatcaacatttttttcacgatcataaatggctaggcaatgtggcaggtgcttggcagagagataaaaggatgcaggctgtgttcttcaggtactcagcctgatggagagatagatgtgtcatgtggtcccactaccctgtaggaaaccctgggactgaggaaagtgcccagacccataggagcccmgtaaagggagggagaatccacttagcaggaagggtcatcctcatgccctgcctgtattaaaaaaaggaagactgatgaaaaagcaaatgatccaacaaacaaaaacaaaagagagaagaaaagaaa

SEQ ID NO: 911212 - DNA, 618 bp, Homo sapiens
cttggacttgtgaatgccactgccttctgaatagtcaattgcatgttacaggcccctgagtctgaatatttccaaaatgaaacttttcatcttgagtctctaaatctatttttactcttgtgatcaattaaastagcaccaacccagtctcccatgtcagaactcaaggtatcttccactctgacatttctcaaatcaatctgtcctcagttcttgtctattataactccacactacctcttaaagttgtccatttatctatcccatacatagtttcttccagagtactggccaccatcatctcttttctgtctccttaataataatgttcagctctcagattaagctccatttcttattcactgtgttactagtaaagctctactgtcttgatcttaaacaactaccaaacttcttcaggtctctgttttctgtttcgcttaaagtgaaaagtaatcatagccaatgaaattagtttattacaagtgaaaaattttgtaatgtgccacataagatatactttataaatggtatttcccttacctataaagctgttccctgtgacagggattataagaaaatcatatagacaaactgcagtgtggtgtttggttcata

SEQ ID NO: 911213 - DNA, 584 bp, Homo sapiens
ttttccaggctcttttattgatatgcaaatacaattacagatgaacatagttgttatactagtcatgaatatgttagtcataatcttctgaaattttcattcaagattacatcttggacatgttttcatactactgtctatattgacccatcttattctgccaatggttgcctaccattttattgttaagaatataccagggattgctaaacatgttctaaaaagagccagaaagtaaatattttaggttttgcagtccaaaagatcacatattctgctattgtagtgtgaaagcagccatatacagtggataaatgaatgaatgtggctttgttcacaggctgtatataacggagggagtgtaggatttggcccatggattgcagtttgctgactcatggaatatactacaattttaaaaataattatgaaagtatcattcatttttttaaacccagtcttctcaaaataaaatacccacacgtatttaaaaaatttaaactaccccgaagggtctaaaattaaggatktttttgtctcccactttattcgctagtcccacttatgtaatgtaagcatttttg

SEQ ID NO: 911214 - DNA, 584 bp, Homo sapiens
ttttccaggctcttttattgatatgcaaatacaattacagatgaacatagttgttatactagtcatgaatatgttagtcataatcttctgaaattttcattcaagattacatcttggacatgttttcatactactgtctatattgacccatcttattctgccaatggttgcctaccattttattgttaagaatataccagggattgctaaacatgttctaaaaagagccagaaagtaaatattttaggttttgcagtccaaaagatcacatattctgctattgtagtgtgaaagcagccatatacagtggataaatgaatgaatgtggctttgttcacaggctgtatataacggagggagtgtaggatttggcccatggattgcagtttgctgactcatggaatatactacaattttaaaaataattatgaaagtatcattcatttttttaaacccagtcttctcaaaataaaatacccacacgtatttaaaaaatttaaactaccccgaagggtctaaaattaaggatttttttktctcccactttattcgctagtcccacttatgtaatgtaagcatttttg

SEQ ID NO: 911215 - DNA, 623 bp, Homo sapiens
gagtttcctttagcacaccattctacggagtgatcagcaagttgattacactagtcagcttccgttatggaagagacagcattttgttcttactggaatagatacttactctagatattgatttgtgttttttcaggcaatgtttctgcaaaaactgccatttgtgtacttataaaatgccttctctaccattatggtattccacacaacatggcttctgatcaaagaattcataatacaacaaaataagtgcaacaataagcccatgctcatgtaactcagtggtctaaattctattggttctgtttgtccaaagaaccctgagtaatacatctagtaaatgattttttcatcacctgttagtaaagaccacaagaagtagtttacaatatacctaaactatctgatatgggctggattgtgttttcccaaaatttatatgttgaagccctgatcccccagtacctcagagtgtgactatatttggatatagggtttatgaaagtaaaatgaggtcattggagttggctctaatcccatctgactggtgtccttaygagaagaggaaatttggatacaataatagacatcaagaatgcacacacacagaaataaaggccatg

SEQ ID NO: 911216 - DNA, 666 bp, Homo sapiens
atttgggccctcaatggattggatggtgcccagccccactgggtgaaggtggatcttccagactcagtccatgattcaaatgccaatctcttctggaaacaccctcatagacacacccagaaataatgcgttaccagctatctggacatcccttaatccagtctagttgacttataaaattaaccatcacggacctgatatctctctctctctctctttcataaacatttactcattttggttgaaacctgtcaaaagtgagatttttctctaatttttgccaattagaaagacaagtgggggtgatgtggagtcacaaacctaggatctgatctaaacattggaccaaccagcgtatggacaaccttccattacatcatatcgtgatgcattctgggctagactgcagctgagttggaataaattgttcctcagcactgctctggcttagaacagtgggcctagaatgaggatgagtaaaaacagcggtgagcttttgttgagctcaatgagggaagaaactttttgtgttygtaagttctaggagaactgagcagctggaccccactctaaacttaaccagccaaaatcttcaagaagttcaaggaggccataagcttaagatgtgtgtagcgagtggccgggcgcttctcccccattttgcga

SEQ ID NO: 911217 - DNA, 625 bp, Homo sapiens
tttgataggaatagcattgaatttctaaattggtttgggtagtatggccattttaatratattgattcttcctatccatgagcatggaatgtttttccatttgtgtcatctctaatttctttgagcagtgttttgtaattctcattgtagagatctatcacctggttagctgtattcctggttattttattctttttgcggtaattgtgaatgagattgtgttcctgatttgactctcagcttgtgttttgttggtgtataagaatgctagtaagttttgtacgttgatttttgtatcctgaaattttgctgaagttgtttatcaactgaaggagcttttgggccaagactattgggttttctaggtatagagtcatgtcacctgcaaacagggatggtttgacttcctctcttcctatttggatgctctttatttctttctcctgcctgattactctggccaggacttctagtactacgttgaataggagtggtgagagagggcatccttttcttgtgcccgttttcaaggggaatgcttccaggttttgcccattcagtatgatgttagctgtgggtttgtcatagatggctgttattattttgaggtatgttccttcaatac

SEQ ID NO: 911218 - DNA, 607 bp, Homo sapiens
cggatacaaatcatggcaagggagcaattcgtcactcatgtagatgtccatggtaaaatctcattctctgagaagactgaatagaatcaaacctgaacactcccaattgccatcgttattgcccagatccatcatgctactaaacacagcaccatacccattattatagactaggaacaaagtaagggactctatctctctgacacagaagttacgaatgcatgtcagaagttgtgaatcctgctaaagttgaccagtgttttagtagtgaaggaggccacaacacatgaggcattgcttttattcattcctggaaaaatgactaagttgaaacttttactaactgttctgggctaaagtgctgcctcactgctgtcagtgccttttcaggtcacagtgttgctcttccagtccaatcagccaactctggccacactaccatggttcttgatcctaatctgtgtcatgttttcagctttctgatgttacagagctgctggtcaaggtattcaatgggctmccgtgctctgtaacacccacaggcacctggtcagtttgagcattgaaaggatctcctcaaaaatcaacataggaaaatttccagctc

SEQ ID NO: 911219 - DNA, 565 bp, Homo sapiens
ctcaagttaaaaaggtcctgcacagcaaaggatgcattcaacaaagtgaagacaactcacagaatgggagaaaatatttgaaaaccatccatctgacaagggattaataataagaatatataaagaggtcaaaaactctataggaaaaaaaatctaataatccaatcaaaaatgggtaaaagattatatataccaactacataaaatttaaaaattaaaaaaggaagaaccaaaaacacaggcaaaataaatgaacagacatttcccaaaataagacatacaattggcaaataggcatatgcaaaagtgctcaacattattgatcatcagaaaaaatcaaatcaaaactaaaatgagatattatttcaccctagttaaagtggcttatattcaaaagacaggcaataacaaatgctggagaggatgtagagaaaagggaacccctgcacactgttggtgamaatgtaaacttaacttgtacaccatatagagtacaatttggagattcatccaaaaaactaacaattgatctaccacatgatctagcaatcccactgccgagtac

SEQ ID NO: 911220 - DNA, 590 bp, Homo sapiens
ctattcagctataaataaggatgagatccagtcatttgcaacaacatggatggaagtggaggtcattatcttaagtgaaataagccaggcacagaaagacaaacatggcattttgggattgaaaaatcaaaacaattgaagtcatagatatagagagtaaaaggacggatactagaggctgggaaggttagtggcggggggaggaggtgggaatagttgatagatacaaaaaaaatagaaagtatgaataagacctactatttgataacacaactagggtgacgatagttaataacaacttaactgtacattttaaaatagcttaaaattctaattggattgtttgtaactcaaaggataaatgcttgaggggatggataccccattctccatgatgtgcttatttcatattgcatgcctgtatcaaaacaagtcatgtacaccataaatatatacaactactatgtacccataaaaactgaaaataaaaactcatttacaaaaataaaaaatatcaagtaatatttgaagatacagaaatgggaaaaagacattttaacytacggaaataccacaactgaaatcaaaag

SEQ ID NO: 911221 - DNA, 550 bp, Homo sapiens
tctagatttttgatgtgggcatttagtgtataaattttcctcttaacactattttagctgcatcccagagattctggtacattgtctctttgttctcattgctttcaaagaacttcttgatttctaccttaatttcattatttacccaggagtcactcaggagcaggttgttcaatttccatgtagttgtgtggttttgaatgagtttcttaatcttgagttttaatttgattgtaccctggtctgaaagactgttataatttcatttcttttggattttctgaggactgttttacttctaattgtgtgagccattttagagtaagtgccgtgtggcagtgagaagaatgtatagtatgttgttttggggtggagagttctgtagatgtctattgggttcacttcatccagagctgagttcaagtcctgaatatccttgttaatgttttgtctcaatgacatgyctaatattcacagtggggtgttaaagcctcccactattattgtgtaggagtctaagtctctttgtatgtctctaagaacttgtttt

SEQ ID NO: 911222 - DNA, 625 bp, Homo sapiens
tggaaatcttctcccctcctgccatgcgggatttatcacttcaaggcagggtaaccttgaatagtcagacacttacaaaatggcttgctggtcttccctagaatttccacacccacataaaagataggcttcctctttaatgattaacaaactttttttatgtggaggtgatatttaccacataagaactgtggttttggtaattctggagaatcattggtttgtctcatccttttgaattcttgtgttggatgatttgtggcccagttggaagagatgaaattacaggactaaataagagtaattttgccccagtagagtattgatttcattgttgctttttcctgcaaacctgaacaatattctggttgtctatttatctgatttagccacaaacattgaagttaagtgactgaacaaataagatgaactctttgtctttctagctattatgtacatataccctttttacttgtatactggaatctctataaattcagccctggttaccactgctagccaaagcttgaaagggaattttgtgtccagttaaataatagattggacaatttctataacattatttgtcattttctgtrttaagcattagtaaaagctaaggtta

SEQ ID NO: 911223 - DNA, 676 bp, Homo sapiens
tctaatccatttgccatcgtgtagctgagatgatcttctacaaattcaccctgaccatgcacctccctgtagagccttctatggtcccccactgccctcaaaagccagcattcttttccctggcataggagatactttgatctggcctctctgactcatgctcagtcctgtcctgcagctcccctgactcattgcattccctcttgacacgaagcctgtgcagatgctgttccctcagcctggaagacctcagtctgggtgactcatgctcacgctttaagtccctggtcagacagcacttcttccgggaagccagcctgaccttctcagcagggttctaagacccatatttcctgcctaatcacagccttttgcaaaagtgggtggtagttgtctcctcactggctaggcacacagtaggggctcagagtgtgattcctccaagtagaggggctccctgttgcctcaggactaagtccagattctgcaccatgttcaggagatcctgtagcgtctggcctctcctgacctcccagccctgratctagcccccatctctccacaactttctttattcagcctgttggcttttaatagttcttctaactctcctcatggtcttctctcaaggcctttgttgatgctgtcttctctgcccagacatgcctccttcttc

SEQ ID NO: 911224 - DNA, 578 bp, Homo sapiens
tgaacctttaacgtctttggtgtgggaaagaggcaaggagacacacagctagtttttgaccatgtctttgaaagccctgtgtgtggacagcaatkcatcctgggaggtggagtagctaggccccctattgccttgggaacccagccaaattgggatggaaataattccatcttagtatattgtcacatggatgatcaaactaaggaacctgccgaggccacacagctagtacccagcaggctgactcctaagcctgagcttttcctgctgcaggtggttcacccagagctgacttaaaataagctcatggtacagaggccaggccaggaggatggagttagatggcccttggttcaaactcagttgtcatttattagtagtgtgtccttgactgctttctcctctctgattctccgatcatttaaccaatagacgtttaatggccaggttgtctaccacgtgcaaggcactcaatttcattctctgtaaagatgtgaataataaaagcacctgtttcacaggagtgttgagaattaatgagatcatgctcaagtgtttgacagcgcccggcacatggt

SEQ ID NO: 911225 - DNA, 621 bp, Homo sapiens
aaaattattcacatgttcacacacattttgctaaatttcayggtctgcatggacacctgaaactgattcttttcctttttggtaaaatgggaatggtagttgtgaaaatattgggatagctgaacccaacatgtttgacatgtgcgctcagctttatctttgaggtccctatggaaatgacatatgcaaggcaataatcagccagataaaataattcttcttcttcttcataagctggagctacagccagaaatcacaattagaagttataaagtaggcctggactcttcagagggttttgttcaatagttttctcctgtgaaatgaagacacaagtggccttaaaccaaattagggttaaagtgctttttatattttactccaaaaatgtccatacctgagccagtgaatatttactgtgttagcagactaaattgcacattcccctttaccagaagaaaaggagcaaagtgatttgatattagttaatatacattacatgcttattatatgctctaagagttgtatacagattaatatattcaatctttagtgaaagagatgttatagttgacaaattctggtacaaaaggaagctaaatatcttatctaagatgacat

SEQ ID NO: 911226 - DNA, 551 bp, Homo sapiens
accatatcactcactattcctttttatttagtctactagcttatttatacctcttattatatttttagtgttttccctggggtttgcaatgcacattcctaattagagtctaccttcaaataatattatgcttctttatgtgtcatattaggagcttacattatagtcccaatttgtccctcccattatttgtgttattgttgtcatatataacatttttaaacattctataaacacaattatgctttaaacaattactttttagggcaattaaaaataaggaaaaatgtactttctatgtttagggccctttttatttcctcttgtagatccaagattttgtttaataccatattccccttgcttgaagaactccttttaacatttctcatgtctctgttgacaacgtatttcttcatttgttgtttccctgagaaagttttcagttctactgcawttttgaaagctgtttcttctggtatagaattctgggttgacagtttttttgtttttctttcagcacttcaaagatgccactccatggtcttcta

SEQ ID NO: 911227 - DNA, 570 bp, Homo sapiens
cacaatgctactatttccaatccaagcaaaattctatcatgccccagagcyttaaaataaaacagttaacaaaactgagatttacttatgtctttccagcaagctctttaaatttagtacattagttaaaaaaaagatgcttttccatgtttcttacctatatcttcactgatatagaaaacccagaatttccttgttaaaaattcattaatgcttaagaaagtcattttatttatgatttttttttcaattagaaaaaaaggcatacacatccaagaaaaaaagaatttgagatggatacttgcataaaaaggtaagaggctggagtcacatttgcattaattgttcacttgaacaggataattattaaaataaataatcataaatgaatggaaaatgatatgactattttaaaaagcatttcaacatactcaccttttattataatgcaaatgaatatctctaataccacctcgatgaatccaacacttaaaaactgatagagtcattataggttagtagttaagaacacagactttggagtgacactccctgagtttaatctcagtt

SEQ ID NO: 911228 - DNA, 515 bp, Homo sapiens
gaagcagaagccattatgcttgctgtacagcccgcagaactgtgaatccattaaacctcttttctttacaaattacccagtctcagatatttctcaatgcacgaacacactaatacaatccgtatcagtcatttactgaggctgctctcagagcacagaaattccctgtaatttcagccctccactctgggcaatgtggcttaagaggtcagagcaagaccttgacaaaaaaataaaaaaagaaaagcagatgcagctagcttagctggaccgttgtgccctgcagcggttagacaaagaggataaaagggaaggaggatatgagtagggcaccacctacaacatatccttcactgtgatggtgattaaaaagaaaaaaaaaaactcaagtttcagatttatgttattttagtcaaaacatctttttttctttttttaagactgtttactgtattttggatgatgcctcrgttctcttgctggcagaggttggaacactagatggcattgtatta

SEQ ID NO: 911229 - DNA, 680 bp, Homo sapiens
ctgagtaacagtctggcagttctttaaaagttaaaaatagagttactgtttgtgtgtgtgtgtgtgtgtgtgtgtgtgtgtgtgtgtgtgtatttgagacagggtctcactctgttgcccaggctggagtgcagtggcgcgatctcagcccactgcaatctccacctcccaggttcaagcaattctcccacctcagccttagaattactgtttgactcagcaattccacatctaggtaataatcaccaaaaaagtagaaacaaccccaatgtccatcaactgattaacagatacacaaaatgtggtatactccatacggattatcatttggccataaaaaggaatgaagtactggcttatacattctaaacatgaatgaaccttgaaaacattttgctaagtgaaagaagcccatcacaaaagaccttatattttatgattcatttatatgcaatatccagaataggcaacatcatagagacagcaagtagattagtggttgccaggcaatcggaggggagagaagggagatagcaaatgactgttagtgggtacggagtttcttttgggggtaatgaaaatgttcgggaattagtggtgatggttgcayaactctgtgactgtactaaacagtattgaattacacaccttaatatattttataatatatgaagtacatc

SEQ ID NO: 911230 - DNA, 632 bp, Homo sapiens
tgtgactagtttatccctaagtcaagttgttttctatttatttgttttcttttggtttggatcagattggtttgtacattatgtggttaagagcktctgctgggcttctagtactggccatcaccactagtagctatgatacagggaaagttatgtccctctctttgcccaggttacccatctgtaaaatgggaaaatttttgaggccatcactaaatatcagtagactaaaggactaaatgacctcttaaaaattcagggttcaagacaacctatagaatgggagaaaaattttgcaatctatccacctgacaaacacctaatatccagaatctacaaggaatttaaacaaatttacaagaaaaacacaaataactgcattaaaaagtgggcaaaggacattaacagacacttctttgaagaaggcatttatgtggccaacaaacatgaaaaaacgttcaacatcacttatcgttagagaaatacaaatcaaaaccacaatgagataccatctcatgccagtcagaatggcgattattaaaaagtcaagaaacaacagatgctggcaaagttgctgagaaaaagaaatgcttttacactgttggtgggaatgtaaattagttcaaccattg

SEQ ID NO: 911231 - DNA, 648 bp, Homo sapiens
gctgttctgtaattgttccaatataaaggagtcaaaacaatttcttaatggaagtattaagtagtgctctatgttgtcaactaatttatttcccatttcaaacattagttgacatgttttcatttctcttttggaaggaaacaactaaatatgttatcaatccatcatttacttgtacaataaataaagttctaaatcactgcacagtgtaaaatggcaaatagacttccccataacacaaagccatcctgaaaagttttgttcattttagaagaaaaaattttaaaacctgagcaccataggatatgaattttgtaaataattatgaaaagaaaacaacaataataaaactctactaatcttagctcgatcttataaaaagttccataatgagtaatcaaattttatttccaattaaatatgttatcacccagtagtatgccataccagtttctaattcatacttcaattatcttctaatttaaattaatgactataattgctgttataaaacaacagctctatagcctgctattcagaccagtaaataagagtttaagggcttgtgayagcaaatgaagtttcttattggattttaagaaaaatttttataaaaatatgtgaggttattcaatagaatcacattta

SEQ ID NO: 911232 - DNA, 627 bp, Homo sapiens
aaggcttcattctttctcagccaaaattttcttatttgtacaaaggagataaaactattctcaggttgttggaacaattaaataaaatgattcacaacaagtggtcaacacagaaaatattcacaataaagcaaggtccctttcaatttatccttaaagttaattaataaaaagcttaaacttcagtattatgcagattatttgtatgcacgtatcaagctacccttttcatatcattcaataaatgatgcataatttttggcttttgttgttttgttgttatggttttttgggggtttttttgctttgctttggaaaggggataaatgttaaactaatttgaggaataagttaagccaaggaaacatgattctaaactacataatttaaacagatttctatactttgtatttaggtgcgaaccattttagtcaaagtttgaaattatgtttacctcctataaatatttgttgaataaatttatgaatgttttctaagttaaatagctttaaaagctatactgtcataagatactcataccacttaaaattcaaacactattatratatatatgcttatataaaatgtttcaaatctgaaatataaggattttttttttcctgaaga

SEQ ID NO: 911233 - DNA, 338 bp, Homo sapiens
gtaagaaaggaagagagatctttgcttcttccagattttattttaattcactatcgtgtgarctatcaatatacatttgaagcacagtggttatgtaatgtggactgtttttttctcttggagaagggaaatacagctattctcaaatatttaacagagaggcactcttgttcttttggaaaattcttcttgggtctaccttatagctccaggaattgtaggagaggaaagtgatgcctacatagttggccagtgtgagagagtcagccttggcaatctgtgggagaaacatgtcatgtgtggatgtcatgaattgttctcccaggctggtgtctttg

SEQ ID NO: 911234 - DNA, 572 bp, Homo sapiens
tccctttgaataaactttctacccctatcactttctctatttccttcttaaggccaataacttttagatttgcccttgtgaggctattttctggatmttgaatgtgtgctttattgttttttattcttttttttttcttttgtctcctctggctgtgtcttttcaaatagcctatcttcaagctccctaattcttctgcttgatcagttctgctactaggagactctgatgcattcttcagtatgtgaattgcatttttcaactctagaatttggcttgattgtttttaatcactttaatctctttgttatatttatctgatagaattctgcattccttctctgtgatatcttgaatttctttttttctcaaaacagctactctgaattctctgactgaaaggtcacatatggctgtttctccaagattggtccctggtgcttggtttacttcatttgacaaggtcatattttcctggctggtcttgatgcttgtagatgttctttggtgtctgggcattgaaaagttacgtacttattgtagttctcacaacgtgggcttctcaatctgtg

SEQ ID NO: 911235 - DNA, 603 bp, Homo sapiens
ggtgcccaggaattggaggttatagtgagctatgatcataccactgcactccagcctgggcaaaaagaaagagcctgtctcttaaaaaaaaaaaaaaaaaaggcataaaaataggaaagaaataaccacygcactcctgtcaagactgaatgctgaattgttttttggcaggggaaagcttgagaggatatgaagattatatcaactgtcttagcctacatgcctagaaggatggtagtaccattaattgatagatgttaatagaccaatttggcagtaaataatagaaaaccataaagaatgatttaaaatatagggctattttatcttgccccccaaaaagttgctgatgatatagttgcttaacgttctgtcagtggctcattggctaagaggttcaatggtgttacagccagctacccttggcctttgtctcatgactataaaatgactactgcagtttcagacagcatgtaataagaagggaggaaggagtgatgtttacttcatctgcccttatctaaggaaaacaaaaacttttacaaagatgcccctctttcctcctcccctactgctgcagattcgcttttatgactcactggt

SEQ ID NO: 911236 - DNA, 588 bp, Homo sapiens
ctgcaccaatctccacaggctactactattctgatttgtaatagcatgggttatttcatctcttcttgaacttcataaaaaacaatgaaacttttaggtctggaatcctttgtctgacttcaattcaacatatgtattacagattcatctatgtttgtgtgtgtgagagactgtgagagcagttcatgctttttatgctaaatagtattccattttcatgctaaatagtattccattttatgcatataccacaatttgtatatccattttccttttgataaaatgactttcacatcattttcaatagttgaatattataaatcagctcctacaaacatcctttaaatgtcttacagcatatctatattttcatttttccaaggtaaagacctagaaatggaattgctaagtcacagggtagacctacgttcaactgcctaagaaagtacaaagcagttttcaaaactggttgtactatttcacactcccattagcaatggatgagtttcagttgctccatatccttaycaatgtttgctgttgtctgtctttttaatttcagacaccatagtgcatgtgatgtagtag

SEQ ID NO: 911237 - DNA, 654 bp, Homo sapiens
tctcctaatttctttgaaggaaattgttttatttgaagtaaaaygaatataaaatatatgtcaacatatcaaaaagacgagggtaaacggaattttgctgtttaaagattattacaatttaaaccatgtagcgcattattaatttggagcagattgtgataagtgaaataaatggagatatatatcatggattgaaaaactaaaaattattaaggtgtcagtctccctctgttccaatgatctatagattcaacacaatgccaatcataagcctatcaggtgttttgtagaaattaaaaatctgactcttaacgattacaggaaaatgcaaaaaacctagaataaccaaaacaaccttacaaaagaacaagttggaggactttcaatggttgtcttagaaatttacagtaattaatgcagtgtgacattagcataaagatagataaatagatcattagaagagaatagcacatccataaacagacacacacttacatggtcgattaatttgtttcaatggcatgaaagccacttaatgggggaaaatcatctctcaacaaataatgctgaaacaactggatattcacctgtttaaaaaaatgaacttcaatctttatcttaccatacatgataagtaactcaaaataaatcaca

SEQ ID NO: 911238 - DNA, 588 bp, Homo sapiens
atactgttacagtgtcattttattaaacattttaattcacctgtcaaaacaacagattaactccttagtgtaaactactagagataatttttaagagggaaatggaattcatatcacctcttatttattatgagcaatattttaatataaaaattttatatgtgaaaatgctattttaggtactttgccattctctttataaatgtgtatttgagtggttctgtatatttatttacattatcatgtgtgaatatgttcacccatatttcaggtcactgcattttattctcttaatacaatgttttcacaacggttaccttgctttccaaagataaatatattttggattagaaatctgagttgttttaatttctaatacctcttgtaaaagaagaattaataactttttaaagcagtattcaggtaaatacaatacattattttgttttctaacaaaagcagttcttagttcaggaagaaaagactaatctggcttctatgtcaatttgtctccatagaaatgaaagcctcctcttgcttctttcattattagcttcacaccartgactgtgatgcattagaatttgg

SEQ ID NO: 911239 - DNA, 660 bp, Homo sapiens
ttatatgggtatctgttttctcatgagcttacacaagtaaggtggtatcattagagcttccatataaagaaatacagaccagaaaccagtattggtgcttatgcaactgatgatttttagatcatgatcartatgataataaaacagttaacaatctaaaaacaatattcagagcacacagagtctctgatgaaaaactcatgtagattgcattagtgtcaattatacatagaacaatatagaccatcatttcaaaaggtagttatccatatttgatggtcagtttttccttgtattgaggtgactctgaaatagaccaattgcttggtaaatcaactattttattttattattttattttccataagttattggggtacgggtatatttggctacatgagtaagttcttcagtggagattcatgagatcctggtgcacccatcatccaagcagtatacactgcatcatatttgttgtcttttatcccttgctcccctcccactcttccccccaagttcccgaagtccattatatcatttttatgcctttgtgtcctcatagcttagctcccacatatcattgacaacatatgatctttggttttccattcttgagttacctcacttagaataatagtctccaatctcaaccaggtcatt

SEQ ID NO: 911240 - DNA, 602 bp, Homo sapiens
atagttgtgataaacacttaactaaatgactgttttatttgctttcttagaaattagaatgtttttgaaatgatttgttttttttcatctagctttacaagctatccaggaaaactgagtcaatgtcttattttttctttctacatatttttctgaagcaagcagatatgttttgcaaaaataatttacaggttgtattttattttattatttttatttttgccaagcctgtgtatcattatgtattgagtgagacttccaagagtgtcaaaattgaatagttagtggtgaaatttaccaaacgcagttagctgatggaccctgagggcctcaaataaaaatatccaaggaaaacctcttgaagcgaacttttgtgtttcttcatgatggatgtgttctttgagtatggcatgttcaggtttccagagccctgtctgaagatgaggagacttaaagaggctaccaggttaatccctccctgtaggccttggcatttctttctcagmcctcctcgcagttgagcatgttggcaccatctcaatgcctacttccttcccacctcaggctggattagagaggattctctgtgatagacactcatg

SEQ ID NO: 911241 - DNA, 611 bp, Homo sapiens
agatatcaggacattttttttaagaggactggcatggttgcttatggttgtaatcccagcrctttgggataccaaggtgggaaggttgcttgagctcaagagtttgagaccatcctgggcagcattgtgagactctgtctctactaacaataaaacttaaaaatttagccagcatggtggcacatgcctgcagtcctagctacttggaaggctgaggccaagggattgcttgggccaaggtatctgaggctgcagtaagccatgattgcaccactgcacttcagcctaggcagcacagtgagaccatctctcaaaaaaaaggaaacaaaaacaaacaaacaaacaaagaaaacaccaaccaaccaaacaacaacaacaacaacaacaaagacaaatgatatcaggggaaattccttagaaaggaattaaaattcaaagggtgattattcaagtacaaaatttcataaaaataagttcctaaacaaaatatagactagtaacatttttacaacagcaacttaaatatccatttgagaaattctccattcatacaacacctccactgtatgaatgctgagccagaaagtagcctaccattacagcttagctct

SEQ ID NO: 911242 - DNA, 580 bp, Homo sapiens
ataaacataaaaaaagctcatcattactaattatcagagaaatgcacttcaagaccacaatgagataacatctcacaccagtcagaatggcrattattaaaaagtcaaacaacagatgctgtcaaggccatggagaaaagggaacacttatatactgtttgtgggaatgtaaattagttcagccattgtggaaagcagtttggaaatttctaaaagaacttaaagcagagctactatttgacccagcactcctattactggatatatacccaaaggaaaataaatcattctaccaaaaggacacatgcacttgtatgttcattgcagcactattcacaatagcaaagacatggaataaatctaggttcctgtcaacagtgaactgaataaagaaaatttggtgcatacaccccatggaaaactatgcagccacaaaaagaacaaagttatgtcccctgcagcaacatggatgcagcccttagagatcattattctaagcaaattaacacaggaacagaaaaccaaataccacacattctcatttataagtgggagctaaacaccaagtacacatggacag

SEQ ID NO: 911243 - DNA, 503 bp, Homo sapiens
tgtcacgctgctatgaagaaatacctgagactgtgtaatttataaaggaaagagtttttttttctttctttcctttttttttttttttgagatggagtctygctctgttgctctgttgcccaggctggagtgcagtggctcgattgatctcagctcactgcaacctctacctcctgggttcaagtgattctcttgcctcagcttcccgagtagctgggattacaggcgtgcgccaccatgcccagctaatttttgtatttttagtggagatggggtttcaccatgttggccaggctggtcttgaactcctgacctcaggtgatctgcccaccttggcctcgcaaaatgctaggattagaggcatgagccaccgcgcccggccaaggaaagaggtttaattgactcacagttctgtctggctgggaagccccaggaaacttacaatcatggcggaaggggaagggaaagcaaggcaccttcttcacatggcagtgggaaaagtg

SEQ ID NO: 911244 - DNA, 495 bp, Homo sapiens
cggctcaactgacagccatagttagttcctaaggaccccaactggtgatttacctggttaacccttgcgatgcagttgcattttacaggagtcatgttaaggatcttctctagtcaggacagacctttggtactgcttaccctcaaaagctttcaagacaggccaactcttttgtgccttgtggtacagagttacggcatttgcatcaacaatttgcgcagaccccaaagtgttttgtgagcattgcacttgatccctttgaaagtgctcatttggctcactgttgagccacaggtgaagtgaccttccattaaaataaaaatatcagataagtctgtttattttcacaaggaaacaacacccttgtcatcttcacttgggatcttttttcagtcagcaatgtgggctatctrtgagtagaaatggatagtaatctcaatttcgaattgtctattattaatctcctgtcaaaagcatagctgaagctaagggggc

SEQ ID NO: 911245 - DNA, 632 bp, Homo sapiens
atttatgatttagaacttaaattcagggaaatgtgcacatcaataatactgtggtcatctattgttcctttagcctatattcataatatgagggagggataacaaggatcaagtttattccatcaccatgtttatactctgtgggatttagagaaatcaaccacacccttcattgaaggagagactgcaggcatttaacagtttgggaaagagagaaccccctgttggtgataccagatgtcatgccatcttcagtaccgttttacacaaagacaggcctcagagtaacttgtttcctccagtcttctctataaaagatgctcttaccttcaccctgagtttattttgaacttttacctaaactacaggtttctttcaaagaacattttgatattacatacactattcttagcatttgaaagctgcaaagaaagtaatacaaatgcctcagatattttttaaatagttgagaaaagttcatcttctgcagggcatgtgaagggtcaggacggggaaaacttgagtgagagttcctggattttaatattggccagggtcttgcggcaaattgcttaacttcmatacttcctttcattgatgcatgaatttattttgacaaactctccttaagc

SEQ ID NO: 911246 - DNA, 612 bp, Homo sapiens
agagtatttgcattctttttagtagttttgaactttattctgtaaaacagtaagttgcttgaaaagaagccaatcctttctaggtgtgcttgaagcaatgcccttctgaggactctattcaatgccccatgaaatagggagcttttcacactgcatgtgctaatcatgctcatgctcatgacgaagccccaaggggagccctttgcagacctctgaggttctttcttaggtagttgcctctttccagtatgctgcctgtgaattctagatgccttggcatctctgaactctgtacttgtcttctcaattcagcaatatcataggctctctatgcatttcttcttcctgtgctctagcctggaaacatttgtagttagcaagatgggacaattgtagggctcactttattttttttccttttctcagaggttattcttctgtactacccattgtctaatatctgaaaaccattgattatattttactttattttttagttgtttgttgtttaaaatgggagggtaaatcttagccctattactccwtcatggctggaggcagaagcaaaaacagattacttcttaattgtattcttactatagacatattgag

SEQ ID NO: 911247 - DNA, 699 bp, Homo sapiens
caatctcaaatccaagatttgatcaataaagcgatattggtagctatactatcttctaatactttggaggaaactcaccacatgaggcagctctttttgggccatggatagtaaggaaaaaaaaattgctgtggtatactaacagtagccagataccacattaagactttgcattcgttatcttatttattctttaaaactacatttttaggtaggagttactacactcattgcaatgtcaaagtccttgaagttcataaaggttttacaagatcacactgtgggaatgtggtagaagtagaatacagtatttgcacaaatatgtaatgaaccgttgttactggtctaaactactcatgatcattttatggttagtgtaagaacagagaataatcctccattctctcttgccatcttagaaaataagtaactcagctaagaacaatttgaacatgtttattgcagtatatacctaagtcactcataaccagtttattattatatatattttttgtctttagtatacatcaaacacttggaaacttctggggatacagagcccaagtagtcattgttttgggggtttcatagtctatctgagagaaacatmtaaaaatgctcatgtattaggttggtgcaaaagtaattgcagtcctaatacactggaagggaaaagcaaggaatagtcagttttattca

SEQ ID NO: 911248 - DNA, 610 bp, Homo sapiens
gtatcaggatgatgctgttctcataaaattagttagggaggagtccttccttttcaattgcttggaatcatgtctgaaggaatggtascagctcctctttgtacctctggtagaattcagcagtaaatccatctggtcctgggatgcttttggttggtaggctatttattactgcctcaattttggaacttgttattggtctattcagagattggacttcttcctggtttagtcttgtgagggtgcatgtgtccaggaatttatctattttttttagattttctgatttattgacatagaggtgtttatggtattttctgatggtagttttttttctgtggggtcagtggtgatatcccttttatcattttttattgtgtttattggagtcttctctcttttcttctttattagtctagctagcagtctatcttattaatttttttttcagaaagccagctcctgaattcattaatattttgaagggtttttcgtgtctctgtttccttcagttctgctcagatcttagttatttcttgtcttctgctagcttttggatttgttttttcttgcttctctacttcttttaattgtggtgttagggtgtcag

SEQ ID NO: 911249 - DNA, 552 bp, Homo sapiens
ggaattcttctaatcagaagtagtgaataaagttgggcttcttagaccctcaaccctcaccatatgctcwaaattcttagggagatcatggcatataaggttaaagagttactgatatggtttggctgtgtcctgacccaaacctcatcttgaactgtagttcccataatccccgtatgtcatgtgagggacccgctgggaggtaattgaatcataagagtggttacctccatgctgctctcatgatagtgagtgagttttcacgagatctgatggttttataaggggttttttctcccacttcactctgcacttctgcctgccaccatgtgaagaaggacatgtttgcttccccttctgccatgattgtaagtttcttgaggcctcctcagccatgctgacctgtgagtcaattaaacctctttcctttataaattacccaatctcagtatgtctttactagcagtgtgaaaaaggactaatacagtaaattggtaccggtagagtggggtgctgctataaggatatcggaaaatgtggaagaaacttcgg

SEQ ID NO: 911250 - DNA, 649 bp, Homo sapiens
tctttatccactctttcattgatggggatttgggttggttccatgattttgctattgtaaactgggtgcaccaaaatctcacaaagcactgctacagaactcactcatgtaaccaaataccacctgtaccccaataacctatggaaaattaaaataaaattttaagaaaagaagtaagctaagaaaaaagagagggagggaagaggtgggtactacaccttggcagagggaactgtgtgtgcaaaggtgggagataagagaaggcaaagaacactggagaaatggaaaggaattcagagtggttggcgcatagaatgcgaggatgaaacagagaggtaaacaagagcctgaacaggaagaacatatgaatcatgtttagaagtttggactttatcctcaaggcaagaagagtagctgaattatttttaagaaggagctttaaaattctatacatcttggactttataaaaaacagaatagttaaaagaactgttctaaagttcttttattctctgtaacatactctactccaaaaaattgaattaaattgcaaaataagtaaataaaaataaaaatacaacttctttagattctgataamctcctttcctccatacacagccagatgataatcattgcagtagggaacc

SEQ ID NO: 911251 - DNA, 412 bp, Homo sapiens
gagatggccggatcatagtagttctattttaatttttgaggaatygccatactgtttctatcatggctgaactaatttacattctcaccaacagtatgcaagagttttcttctctgcacacactctccaacactagttaaatatcattgtttttataatagccattctaactggtgtgagatgatatctcactgtggttttaatttacatttctcaggagaatagtaatgttggatttttttcatatgcctacagccatttgaatgtcttcttttgagaaatgtctgttcagatatttggcctgtattttatattttgggttgttttctcactatggagttgtttgacttccttctatattttatatattgactttttatcagatgtatggtttgcaaatattctcccattc

SEQ ID NO: 911252 - DNA, 412 bp, Homo sapiens
gagatggccggatcatagtagttctattttaatttttgaggaattgccatactgtttctatcatggctgaactaatttacattctcaccaacagtatgcaagagttttcttctctgcacacmctctccaacactagttaaatatcattgtttttataatagccattctaactggtgtgagatgatatctcactgtggttttaatttacatttctcaggagaatagtaatgttggatttttttcatatgcctacagccatttgaatgtcttcttttgagaaatgtctgttcagatatttggcctgtattttatattttgggttgttttctcactatggagttgtttgacttccttctatattttatatattgactttttatcagatgtatggtttgcaaatattctcccattc

SEQ ID NO: 911253 - DNA, 634 bp, Homo sapiens
gacagtgatttaacatcttggtctagtgtcagaaagggcccaatatatgacaagggtctttgtaggacatatgacaatggaagcaagatgtgggagtgatgggaagatgtaactgtgaggaaaggaatgtggcagcaaggaacagagcctctagaatacacacagctttgctgacacctcttatttaaggggtaaaacatggtgctttcgtatacatagacatagtgtaatggttattacagtcaagcaaatgaacatatccaccctctcacatagttaccgtgtgtgtgtgtgtgtgtgtgtgtgtgtgtgtgtgtgtgtgtgtagggcatctaagatagactctttgagcaaaaatactgaattcaatgcaatgctattaactctagtcctcatattgcacattagatctctggacttcttcatcctacctttctgcagttttgtatcttttggcctgcatctccccattacctctccgacttcactcctggccaccaacatgtcatcctctatctttgtatatytgaagatttttctccttgattctgtccagtaacatgattttggacttctgacctccagaactataagatgatacgtttcttttgttttaagatgctaagttctgata

SEQ ID NO: 911254 - DNA, 628 bp, Homo sapiens
gtcttattgggaaaaggacactagctatcagccacatggacaggggatggggtccaaccccagaggaagaggaaaagggacaagcaagagctgaacggagcctatagctagcatcattatcaatggtgaaaatttgaaagcttctcctgtaaattcaggaacaagacaaaaatgtccattctcactacctctattcaacactgtactgaaagtcctagccagagcagttagacaagaaaaagaaataaaaggcatccaaattggaaaggaagaagtgaaattatctctgtttgcagacaacgtgactttatatatagaaaatcttaaagacttcaccaaaaaactgttagaactaataaacaaattcagtaaaattgcaggatacaaaatcaacatacaaaaattagtagcatttttatacacaataatcaactacctgaaaaacataccaagaaaaaaatcccatttactatagcatcaaaaattaaaatatttagaataaatttaaccaaaggcataaaaaaattatacactgaaaactatgaagacacaaacaaatggaaagatatcscatgttcatggattggaagaattaatgtcattataatgtcccaaagtgatctacaga

SEQ ID NO: 911255 - DNA, 551 bp, Homo sapiens
cagcctgggcagcataagtgagaccctgtctcctaaaaactaaaataagaaaaaaaacaatcaggaaaagtccaggcacggtggctcatacctgtaatcccagcactttaggaggcagaggcaggcagatyacgaggtcaggagatcgagaccatcctggctaacatggtgaaaccccacctctagtaaaaatacaaaaaaaaaaaaaaaaattagccaggcgtgatggcgggcacctgtcgtcccagctacttgggaggctgaggcgcgagaatggcatgaacccgggaggcggagcttgcagtgagccgagattgcgccactgcactccagcctgggcgacagagggagactccgtctcaaaaaaaaaaaaaaaaaaaaaaaaaaaaaatcaggaacaagacaaagatgcttttctccatttctgttcaacattgtgctgaatgttctggtgagggcaatcaggcaagaaaatgaaataaaagacattcagactggaaaggaagatgtaaaactattgatattttattgatatttacaggtgacatgat

SEQ ID NO: 911256 - DNA, 597 bp, Homo sapiens
agttaaaaatgtatactttgttgtgaggatgtagaggaaacaagcactgttatgtaattctgtaagagctgagacgtgacacaatctatgtagagaagataattgaacaaatctatggaaattacatctgcaattaccttaggacaaagaattctacttctaagaatttttcctactaatatactcacacatgcatgaaataatgtttataagaacaaatgactgcaaactacttatatatctattagcaggggactgttaaatccaccaagtttcattcatatcatgaaatcatagccattttaaaaagctctttatgtaatcaagtgacttccaagatatattgagcagtgactaaaagaaggtactgaacaagaggtctataaaagttatgtgtacactatagtctattaagtgttcaacagaattatgtctaaaatacatgaacattacttactgaaaaatactttgytgctgaaaaatgctaaggatcatctgagccttcagcaagttgtaatctttttgttggtggagggtcttgtctcgatgttgatggctgctgactgatcagcgtgctggttgctgaatgttggagtg

SEQ ID NO: 911257 - DNA, 582 bp, Homo sapiens
ctttccactcctctctcaggagagagcacagagagtagcctggctgtttatgkgagaatgcaggcaccaaaagcctagtaagcaagtaagatcacatggtcttgcattcaagtcttgtgtaagctatacattcctgagcttttaagaataacagacatgggtcttctttttttatttaaaaacatttttattcttaagagagacaaggtctcattatgttgcccaggctggtctcgaacttctgagctctagtgatcctcctgcctcaacctgccaaagtgctaggctactggtgtgagccactgtgtctgacccagacatgggtcttctatggctgtacactccccagcttcgcctttagatccaaggcctgggcagaaaactagcagtgctgtgaaggaacatacggccagacaccaagccaagtgcctcagggctctgttttccttcctggcttgcccatgcacatttaacttctgccacttcagacctgcctggatcctcagaccaggccccgttaaggtcatacccttatctatccacctgtgctggcaaagtaaactctgctggacttttaccttg

SEQ ID NO: 911258 - DNA, 582 bp, Homo sapiens
ctttccactcctctctcaggagagagcacagagagtagcctggctgtttatgtgagaatgcaggcaccaaaagcctagtaagcaagtaagatcacatggtcttgcaytcaagtcttgtgtaagctatacattcctgagcttttaagaataacagacatgggtcttctttttttatttaaaaacatttttattcttaagagagacaaggtctcattatgttgcccaggctggtctcgaacttctgagctctagtgatcctcctgcctcaacctgccaaagtgctaggctactggtgtgagccactgtgtctgacccagacatgggtcttctatggctgtacactccccagcttcgcctttagatccaaggcctgggcagaaaactagcagtgctgtgaaggaacatacggccagacaccaagccaagtgcctcagggctctgttttccttcctggcttgcccatgcacatttaacttctgccacttcagacctgcctggatcctcagaccaggccccgttaaggtcatacccttatctatccacctgtgctggcaaagtaaactctgctggacttttaccttg

SEQ ID NO: 911259 - DNA, 582 bp, Homo sapiens
ctttccactcctctctcaggagagagcacagagagtagcctggctgtttatgtgagaatgcaggcaccaaaagcctagtaagcaagtaagatcacatggtcttgcattcaagtcttgtgtaagctatacattccygagcttttaagaataacagacatgggtcttctttttttatttaaaaacatttttattcttaagagagacaaggtctcattatgttgcccaggctggtctcgaacttctgagctctagtgatcctcctgcctcaacctgccaaagtgctaggctactggtgtgagccactgtgtctgacccagacatgggtcttctatggctgtacactccccagcttcgcctttagatccaaggcctgggcagaaaactagcagtgctgtgaaggaacatacggccagacaccaagccaagtgcctcagggctctgttttccttcctggcttgcccatgcacatttaacttctgccacttcagacctgcctggatcctcagaccaggccccgttaaggtcatacccttatctatccacctgtgctggcaaagtaaactctgctggacttttaccttg

SEQ ID NO: 911260 - DNA, 567 bp, Homo sapiens
gtggatgcagaagacatttctaaggtggagctgatgggtctgagcaaccgtttggtgaatgaatggtagcatctaagatgatgtcaaagtttctggcagggacagcagagtagaaaatgtcaccaaggccgcagaaagtggtaaaaggaaaaggcctgggtgttccttgatcctagagcacctatatctaaggcaatataatctttgcaggattttcagaccaaaaaaaacgttcttgggagaagagaaaagagtccgtaattgcctacagagagtccttgaattttgtttcttcaactgagcaattctccctcttgtatgccattcaggggcatccttaaaatatttttactccaatgtctataatactaatctgtatgtctttgtgtatccaaaaagcacttgtacccccaaacctactgaaattcttaaaaaaaaattctgtaaaacttaagcttcgtgcattaatggattttttaaaatagagctatcacaggataacaaattttgcccaccactwgctaaatgctggctgcatcatctctttgcacaatgtcattgacacaa

SEQ ID NO: 911261 - DNA, 482 bp, Homo sapiens
caaagttccacagatctctagggtggggcaaaatgccaccagtctctttgctaaagcatagcatgagtgaccttcactctagttcccaataagttccttaactccatctgagaccacctcagcttggacttcattgtccatatcactatcagcattttggtcaaaacaattcaacaagtctctaggaagttccaaacttttcaacatcctcctgtctttttctgagcccttcaaactctttcaacttctgcccattacctagttccaacattgtttacacattttcaggttatctttatagcagtgccccacaacctcggtaccaattctttatattattccattctcayactgctataaggatactacctgagactgggtaatttattaaaaaaaaaaaaggaggtttaattgactcacagttctacatggctggggaggcctccagaaacttaaagttatggcagaaggtgaaggggaag

SEQ ID NO: 911262 - DNA, 520 bp, Homo sapiens
ggggcaaaatgccaccagtctctttgctaaagcatagcatgagtgaccttcactctagttcccaataagttccttaactccatctgagaccacctcagcttggacttcattgtccatatcactatcagcattttggtcaaaacaattcaacaagtctctaggaagttccaaacttttcaacatcctcctgtctttttctgagcccttcaaactctttcaacttctgcccattacctagttccaacattgtttacacattttcaggttatctttatagcagtgccccacaacctcggtaccaattctttatattattccattctcatactgctataaggatactacctgagactgggtaatttattaaaaaaaaaaaaggaggtttaattgactcacagttctacatggytggggaggcctccagaaacttaaagttatggcagaaggtgaaggggaagcaaggcacgtcttacatggcagcaggagagagagcatgaaggaggaaacaccagacacttat

SEQ ID NO: 911263 - DNA, 520 bp, Homo sapiens
ggggcaaaatgccaccagtctctttgctaaagcatagcatgagtgaccttcactctagttcccaataagttccttaactccatctgagaccacctcagcttggacttcattgtccatatcactatcagcattttggtcaaaacaattcaacaagtctctaggaagttccaaacttttcaacatcctcctgtctttttctgagcccttcaaactctttcaacttctgcccattacctagttccaacattgtttacacattttcaggttatctttatagcagtgccccacaacctcggtaccaattctttatattattccattctcatactgctataaggatactacctgagactgggtaatttattaaaaaaaaaaaaggaggtttaattgactcacagttctacatggctggggaggcctccagaaacttaaagttatggcagaaggtgaaggggaagcaaggcacrtcttacatggcagcaggagagagagcatgaaggaggaaacaccagacacttat

SEQ ID NO: 911264 - DNA, 598 bp, Homo sapiens
agaataattactcaagatcgtccaagattttgttctgcctttcttcactaaataccatttccttttttgagataaggtcttgctctgtcacccaggctggagtgcagtggtgcaatctcagctcactgcagcctcaacctcccaggctcaaggaatcctcttacctcagtctcttgagtagctgggactacaggcatgcaccaccgtgccagggtttgttgtgttgttgctgtttgtacagacagggtctcactatgttgctcaagctgcctttgctattaaaagtttttttaaaacattaactttggaaaaccctcatgccatctcatcattacagatatactataatgtatttttttaaatttccctattgtttgatactcaggttcctcttccaaccacaacaataaacaatattcaatggacattctttcatataaactttttattcacccacaaatatctatgtgtctattatgtgtccaccctagcattaggttctaggaattcaatggtgagcaaataattatgcsgtctttgcccttgagaacttataccaaagcatttaaaatttcaaccttgaaagtgcttcagatga

SEQ ID NO: 911265 - DNA, 636 bp, Homo sapiens
acagaacagaaagcccaaaaataaatgcagacatacagaaactgatctttgaccaggtgccaagaatacayagggaaaggatagtctcatcaacaaatgatgtcagaaatactgaatatccagaagtaaaagaatgaaattgcacccttttcatatactatacacaaaagtaaactcaaaatggattaaagacttaaaggacctgacatgataaaactcctagaagaaaacgtaagacaaaagcaaaatttttctagtcaatgacttcttggatatgacaccaaaggcacaagcaacaaaagcaaaaatagactagtgggactacatcaaactaaagagcttctgcacagcaaataaaaaaatcaacagagtgaaaaaggtaatttataaaatggaaagaaatatttacaaccatatataaaataaggggttaatattccacaaatgtaatgaatgactacaattctatagccaaaaaaaaaaaactgattttttaaatggccaaaggatttgaaaagccatttcttcaaataagttgcacaaatggccaaaaggataagaacagattctcagcatcatgaatcattaaggaaatacaaatcaaaaacgcaacgagatattatttcacacccatta

SEQ ID NO: 911266 - DNA, 636 bp, Homo sapiens
acagaacagaaagcccaaaaataaatgcagacatacagaaactgatctttgaccaggtgccaagaatacacagggaaaggatagtctcatcaacaaatgatgtcagaaatactgaatatccagaagtaaaagaatgaaattgcacccttttcatatactatacacaaaagtaaactcaaaatggattaaagacttaaaggacctgacatgataaaactcctagaagaaaacgtaagacaaaagcaaaatttttctagtcaatgacttcttggatatgacaccaaaggcacaagcaacaaaagcaaaaatagactagtgggactacatcaaactaaagagcttctgcacagcaaataaaaaaatcaacagagtgaaaaaggtaatttataaaatggaaagaaatatttacaaccatatataaaataaggggttaatattccacaaatgtaatgaatgactacaattctatagccaaaaaaaaaaaactgattttttaaatggccaaaggatttgaaaagccatttcttcaaataagttgcacaaatggccaaaaggataagaacagattctcagcatcatgaatcattaaggaaatacaaatcaaaaacrcaacgagatattatttcacacccatta

SEQ ID NO: 911267 - DNA, 567 bp, Homo sapiens
tacttagagttctatcagaacacatcatacccattcatttaatgtctacgcttttgtactgcaatggcagaagtaagtagtcataacagaagctatgatgaagggtctccaggcctaaattatttactgtctggccctttactgacaaattctgccaatccctggcttagaaaatccattaacttttgaaaaggtagtaaaacacaaaagcacaggccatcctaatactcttagttgcatgttgcaaacaaacatcaatcagcagactcctcggcacattgtctatttatagtccttcctttagtggtcccagaaagatattattctgtggctgcctactcctttcttgttttcatacttagcaagcctgagacatggtgagggtacagagcttctctaccggctctgagatgagtcccttcacctgcttttggccatttgctctcaacacacctgattgtacaggtggamtccatccacctggagcatttgttggcttcctaaacataatctgaagtctaaatggatggatatgcctctttctcagggcaaggactaatatgaggg

SEQ ID NO: 911268 - DNA, 642 bp, Homo sapiens
gctgtgactgattcatgactgaagttcccatgaggactaayaaacttgtgtggggaatgaggaaagagagtagcccttagcatttgaatgatataacacaacgatatcaatttagggaaaactgaagcccataatacttagcatttttataatggaaaagtgaaatcctcccagggttaaaaagccatatatatgatgtgaatgggaaggctctagccttcatttgttacgttataataggaaccccacgtgcccctctctcaaatttcactttgttcactttcacagagtgaaattactgtgctacaaaactgtcccaagggactaactcccgaaatgtgtctgctgagctactacggagtcacaaatgacagagaaaatgctttgcagtatttgttggaagccaggcactgccagattcaatgcaattgcagaaattcattacacatccaaatctctaaaatgccgagtagaaaattacttacatcgagcctcagcagtaggaaaaggtgagtctggaacaatgtccaggaatgaaatgacctcattcaatttagcgaatattgaccaaattcccaccacgtgctaggaactagaaatgtaaatattaagtcaaataatgctgagcacctactgtgtgct

SEQ ID NO: 911269 - DNA, 613 bp, Homo sapiens
agccatagacgttaaaaaattatcctggtcagtgrtggaaccaggattctaatgaagtctgtatgaacccaacattttactctcaaccaatatgttatacacctctgcagaaatggtctagactcacagaagaaataaaaggccaattcaggaatttaactctgatttcctatctccagattttcagtccctctcctataacttgtccagtgtcccataccttgagagagggctttattttagaagttaattaatggttgatggtgatttaatatattaccactcttaaccagcaaatagggatcttcgataacttaaataacttcatttaaagaaatcacaaagataaacattgttttccaactgatgggctactagagaaaaatgttttgggagtatggaggccttttgaattcctgagatgccaccaagcattctgtgccaattcttcttatgcagaggtcaacttcacaggccatagaataattaagggagtgcagggcataatcaataagaaaaactaaaaaaaagatcaaaagtcttcagtctggatgaaatgaaaatcaaaagtgaattattctaaagtaagtaagaagcaagattgtgtgggaaa

SEQ ID NO: 911270 - DNA, 632 bp, Homo sapiens
taaaaaaaaaaaggatgtcaatgctcacatttagtcttaagctagttggagttcaaaaaattttcaactggtattaagtatttatttgcctatatttatttcttagtactttattgttgtaagggraaaactagctatctccagtaactctaggacagtggtcaaaaatttgggcagtttggatcttggctctttttctgaagaatattgtgactatgagtgatggctctgcacctgctgagattaaaaagagtaaatgggcacctcctttccttctcatgaggatgtacagaagagcagtggttgaacagaggcatctcatttttatgcttctaggggcttctgcttgtcctacctctggcccacatggtgctcccaatcaaggtaatatgaaaaacaaatgtttaaaaaattgtttaacactttaggacaacttttttttattacaagagagaatgggattttatagacgtattttgtttagtttcattctttctgttgcttcttttaattttttctataaaaagcagattttaggaactaaacaagggtcagatgtatctttaatttttttagagcatcattctcatgttttattgccctctttttcatttctttaaattctaccttct

SEQ ID NO: 911271 - DNA, 586 bp, Homo sapiens
tgaaaactataaactcagcccaaaacagaatgatttttgcttgtgtaatttttaataaataagacattgatgttggtttaatgaaaatagctacatcttgmattagtaagattactgtaacttctaatcctgtggctttgggcagtctattacacagagagtagggagatttgttttgtgaaaggactgttattgtctttgtttcaaagctaaaatatgaactaatttcctcccaaagttagtttggcctatgcccaggaatgaacaaggacaacttggaagtgaaaagcaagatggagtcaggtcaaatctgtttcagtatctcagttataattttccaatggtggttttataactttaaatcatgactatcacggttttcataaataatctaagtaaacaattaaaataaaataattaggtaaatgtgatgggatactacttgcagaggaactagttataatacagcatatagagttatattaaattaaataacaaatatttcattatttgggtatcttgcaataaaaatatatggtaggaaaactttctaaacaaacgtatcctttgtttaaaagggtgaaca

SEQ ID NO: 911272 - DNA, 645 bp, Homo sapiens
tattaaaataatttaagacagytctggcaagtcaacagatatcagtagagtaatctgggtgtgaatggatgtgcagaggctaaaaatattcatctcatagaagtagagactagaataatggttactagaggctgggaagggtacatgggatagggaaagattagttaaaggatacaaaattacatctggataggaggtataagttctagtgttgtatagcactgtagggtgactataataaaaatcatttattatatgttttaagtagctagaaaagaggattttgaatgttcacaacataaaccaatgataagtgattgaggtgataaacatgttaactaacctgatttgatcactatacattgtatgtattgaaacttactatacaccccataaatatatacaattatcatttgtcaattaaaaacataagaaacgcttcttaaacataaagagttagaagctaggttttgaaagatgtggttccaatggatcagcagagaaaatattccaaaaatgaagcacagattctgttaagaaaaacatggagacactagtaaacaaaatataataatgaagcaaatctggccagaacagagagttatgttcagaaggaatatgatgaggttaatgcaaatatggtaa

SEQ ID NO: 911273 - DNA, 639 bp, Homo sapiens
ccttaaacaaaacaattatcagccaataatcttgtatccaaggaaattaagtttcataaataaagaaaaaataaagcattttttagacaaatagatgctgagagaattcaccactgccaagataacactacaagcacgctaaaagaagttctatatcttgaaacaatacctcaacatacaccaaaataggacctcaataaagcataactcccacagggcctataaaacaataacacaatgaaaaacataccaaagtattcaagtaacaactagcataatgaacagaatagcacctcatatctcaatactaacggtgaacgtaaatggcctaaatgctccacttaaaagacacagaatggcagaatggataagaattcaccaaccaagtatctgttgtcttcaagaaactcacctaccatgtaaggtctcacataaacttaaagtaaagggatggaaagagatattttatgcaaatggacaccaaaagcaagcaagagtagctatattcttatatcagacaaaacacactttaaagcagcaacagttaaaaaagacaaaaagggaccttatataatgataagaggactagtycaacaggaaaatattataatcttaaatatatattcacctgacactgga

SEQ ID NO: 911274 - DNA, 644 bp, Homo sapiens
tgaaagatatgggactttctttccccacacagttctaattaaagggtaaaacttttatctcaggcatgacagcctgagactattggagcccaatttactcttgtcccagatcacttgtgaggcttcacastagaagattccataccagatgaggcaaactaaaaaagacagaagccactggctctgtccactgtcctgctagtaaagcagatgtgttactccaagacaagtgggtcattgcccccctccaccccaccccactcaagagcagtcacaaagcccatttgcctagaaagagagtgatcagatctctatgaagaaacggattttatttggaatagcctgtgggaaagttcaagccttagggcaatttcaaaaacaatgaaggttttggtggtaggtaattaagaagatgcaggtaattccatgtaagcatctacctaaaccttagaccagctgaagtttaccagagataatacaggaaaagatacagaagagcactcctagggttgaagattcatcttaaagcctacctctgcaaagagacctgactttcttgaaaacaggctgcaaagcaatttaggtgcccagggcattgttgaaaacaatagagcaattatccatcagttcatgtaacctaacag

SEQ ID NO: 911275 - DNA, 625 bp, Homo sapiens
tatgtatttcagggcaaactaatgtcaagggagggaaggcagttcctgtctttttgctattttttaagcaatcctctccaatagggctgcttctgaaaataagtttctaattaaacttcccatactatattgcagttaaatagggtaaaatttgctgtttgatgtattgagaaagcatgcaaacattagaaggcaatgtgaaggttgctagaagcaatgtgaaaccacaatttcctaggcattacgagtaattattagcaggcaagttgttgagttcaaccagaaaatgctttagttgtatcttgttgtatatcaggaacagcctaggtttgcattccatgtaaaaggagaagagaccactgttccagttggttttccaaatagaagtgaagaaaccatgaagatgtccctatatccagtcccttagccaggaccagttcagttggagcatggacagtcaaggaggctggagttctcccagtaaaggatagtgtaaggtttggacartgtgcctttttactaattttggcaagaacatcttccagtaacagaaaagatattatacatatggtaagtagatggttaaaatccagtcctgactctgccttgtccttttttgaatggg

SEQ ID NO: 911276 - DNA, 660 bp, Homo sapiens
agtgaggccagatgaagtagaagtaaggtctgcaggctggagtttcatccagagaaatcttcttggctgtgaatcagtacaggagcataaggtggggacagtgagggatagyagtaggaatggcaacagaaacaaaaagaggagaaagggtagcttctaggaattgcttaaagagcacaagaagaatgtggaagttaataaaaggaaactattggtggtgacagaagccaatgatgttggaggctcttgttaatggaaagctaccttgagaattgagtataagccctaagctttgcattttttaaaaatggaaagcagccatttcatatttcaagagtgttctcccttaagaaaatgaatggtatacaagctatttctattgtggtctgtgagccacagcttcctaactgtgtaaaagcaacacttggctgaacagtgactacaagaagaaaaaaaactaccacttttacagcacaatgaaaagaacgaaaaaaaaggaaaatttcctttgccatggaatttcctgctggatagaattattcacccatccttttcttctagctgtcatgactagttagggtgtagaacaggtaccacctctctttggtataatgccacactgaattaatccaacttggagtcatggatcatgggagccta

SEQ ID NO: 911277 - DNA, 579 bp, Homo sapiens
gagattgaaatatccaaaatttattgctgaattttctattattccttaaattctttcaacttttacttaatgtgttttgagactctgttgctatttgcatacgtgtttataattagtatatcttcttcaactattgaccttttataattatacaatttctttgtctctagtaacaattttttgttctaaaatctattttgtcctatgttaatagaaccaatctagctcccttttggaatctgtttgcgtaatatatctttcccaatacttttaccttcaacccacttatgcctttgaatttcaaggttgtctctcatagacagcatactagtttattgttttatttttaagtcaattccaccaaactctatcttttaattggagatcatagtgggttgatccgttgtcccctcacaagtgatcaaaccactatgactatatatgtgtgtgtatatatrtatatatatatatatatatatatatatatatatatatatatgtctaccttatacctgtgggtgtgaacttgtttggaaaaggggtctttgaaaatgtaatcaagttaacatcttaagatga

SEQ ID NO: 911278 - DNA, 652 bp, Homo sapiens
gttaaggtttgaggagcgctgattctgcatgagtctatgatgctagagggcccctcatgggaaagccaggggatgtggcagagggaaaaagcagggtgttggaagaggatctttcttcactgtactctctccaaactgcttcaaacagggaaacctcttttttgcctttcttttctttttaatagattagcagtgctcatatatttcctttcgggaaagacaggtccttctgcaaataagaaaattctttggctagggtatcatcaacattatttcagcccaaaagcttcacaaatacactttcaaaggcaagaggaaggaaggcaaattgattatagcttcagaggaaaataattaatacaatactaagcatacagacttgttttcttggagctcgtgtgggattagactgttgcagggctgttggaaattcaggaaaggttaccttgatttctgcaggagggaagaaactggtcctatactaccaccaaggcccaggagaaaccccatacctggatgctcacagagctcagagtaggggcaagacagctctcccaatatttctagcctccgagcaaattttraggaatgtcagatttttggcataaagcatagaatggtcaaatggcatattatttctgcaatggcaaga

SEQ ID NO: 911279 - DNA, 633 bp, Homo sapiens
tctctcttcagccaatcccaacaaaacagaaataatacaataaactttcattcaccttcagtacgacggagttcccaggtcaattaaggttgagacttctcccagaattatgggaaccacaatcatgtmattaaataggtgcattttcagattattggcatctcaggaaagctcagaactcccttttctccatagttcctctgcccccaccacttatactgccagactgtggggagagaagtcattccagagcaatgctatccaatagaaaattactgtgagctacacatataattttacatcttctggtagtcatttttaaagaaaagtagacagtgttttatgtgttgagtcccagcaaaaagttatgttggagttccaatccctgatacctcagaacgtgatcttatttggaaatggggtctttacagaagttaggaaattaaactgaggacattagtgtgggccttaatccaatatgactgatgttcttataaaaagggaaaatttggacacagaaaccaaaatgcatagagggcaggtaaggggaatagacacagagagaagacagccttctgcaagccaaggagagaagcctggacagatgtttccctcacagccctccaaaggaac

SEQ ID NO: 911280 - DNA, 611 bp, Homo sapiens
tcttacttctttttagttttattctcaggcacagggaagtaaatggctttagttagcacatctccatccccccaccaccactactcaggcmtaagaatatccttagaacttatgactcaggggaaaagagaacaattttctgagtaactctggcaaaaatcatgggaaaaactcccatgggacaggattgtatcacatgcctatccctgaaccaatcactgtggccagggatggtaatatacgaattggctcaaacttggcttactgacctattctagggtcatgggatctaaatccactatgccatatggaataagcaggaaggctgtggagtaagaagtgatgattttcccccccaaaatagatactagatcaataaccatatgtccagtgttgtacacattgcaaggtataataattattaaacagataatatcaaatgttggttgctctcaagaccatagataactaattagtccttgtggtatattactctattgtgataattcatatgataggtaaagttgttagtatcaccaaattgtcctagactcttaagcattgttaaatatttgcatctgtattattctgaagtttttctgttttcctct

SEQ ID NO: 911281 - DNA, 613 bp, Homo sapiens
ctcacacctgtaatcccagcacttgggggggctgagccaggtggatcacttgaatccaggagtttgagacccagcctgggcaacacaatgagaccccatctcttaaaaaaaatgtataaatgaggcaggtgtggtattgtgcatttatagtcctagctacttgggaggccaacgtgggatcacttgagtccaggaggagttcaaggatgcagtgagctatgatcataccactacactccagcctgagtgacagagtgacaccctgtctcggaaaaacaaaaacaacagcaaaaatacaaaccaaaaaacagaaaacaaaaacccaacctattgtgtctaattttttaaagatctctcaaccttgcttaagtgaccaacacttaaatcttctctaattgtttagtttacatttatttcacctcacaaaataaattgcaagattcttaagaactatatttgtcactgcatgattataccatcatcatcatagtcatcgtatcattctyatcttcatagctaacagttgtatagaacttaccatttgctgaatactcttctaagaacattaagcatataaactaatttacatattttatggttcacaacatctcta

SEQ ID NO: 911282 - DNA, 578 bp, Homo sapiens
cgacagagcaggggctgggaagggtgctggggcacagcccagccctggcatggatagggcaggggtccaagagacctgcaggacactgcagagtaacttgcatacagggcgagagagggcatgtgggggagggcrggcagacagtgcctgatgcaggccatcccgggacctgggacctgcgaggcccagttgtggagcctcctgctgtggcggggcacggggcttctggggaccaaagtctggaaaaggggccgggaagatggacagggaaagcccttggaggtggtctggttacctgggtgagctaggagccacagtcatcataccacggtcactagggccagcatggtcacctagaagcctgcaaacagtgccagcctccaggccctgtgccccgaggtggcctttaatcttgcactcactctctaggaaatgatggggcagtattctgtgttgagggaggaaaaacactcccttccaaaagcatgacaggcagaaagcagagaagggccaggactggctgagggcggggagctgggcctctggggtggacacacccttggtcacattgtgagggt

SEQ ID NO: 911283 - DNA, 605 bp, Homo sapiens
acaaaattaatttctcagaatgatcattagtatgagcactatatgcattcatgaatctccaacattatgtttccttccctttattttagatgcttttaaaacrccaaaataaattttccttttcctagcattagagcaatatgtgtgtgtgtatattgcattcatgtgtacatatataaaataagggaatttggagaatacatataagtgcaaaagatgaaaattaaaaagtccataatcccctaacccataatcattgaaaaagatattcttcacttgctataacataaaaatataccattcttgatgagaaaaaaattcagataagcgtttcaagttttacaccaccaaaatatcatcatcatcatcaactaccacctcagcaacacaaacatacctcttctgtaaaaacataaagccacatgacatggccatatcagagttcaagcttaattcaaagtttttccatgaagatactgaatctgaaacttagcaagacaaaaaaggttataaatttggatgagaagcatttcttcaccgtttcatattgctatgtctggagaaataggggagcgaaggggtaaacaggtaaagaaccaggttca

SEQ ID NO: 911284 - DNA, 646 bp, Homo sapiens
tgctgcttccactatggtaccctaaaaattcacactgttagttcattaggaaccccctcctccacttcacaatctaggacacccctgtggtctttcctactccttttctatctttgtaacagattattctcattttgagctgtggtttccttttcaattgaatcgtatctgcctttagtccatctggtattcttcactccacaaaagatgaaactgagacacagagaattatgtatcttattcattgtcacacagatagtgagtgagtggcagaactgggttttgaatctaggcaatctggctccagaatccatgctttcaacaattgaaccatagagccttccctttctgcctatagcccctttccattaaatctctcatttttaaaatgtgctattcccttaaaaagcagcattaattttcattaaaataaagataaaatcatagtaatacagctagagatgaatacctaattcttatctctccagggtgttactgtctattcatagaaatattttttgactcattgctattactgtayatttttaccttagctttttttccttcttataagccataataaagaagaaaagcctcattttaattagttgtgtgtacaacaagagcagcatacttggtcttttag

SEQ ID NO: 911285 - DNA, 613 bp, Homo sapiens
aatattcctgctttagcaagaacattataggctgcagtaattctgcttgttctttgtcatcaggtatttgtactaattaggaatactttcagctgtgtgtaacagaagactctgaccaatggtcttaagtgattaacatatgtaattattttacatgccaaggagtctagaggttggtggaagaggatttggtgtagtggctcaaagataaaagtcctgagctctttatattttccagtttaactattcttagtatgttggtttttcatcatcatgctgcttatttcatagtcacaagatggctgctgcagctccaggcattacttcttcatagtagagtcacattcagaaaggcagtgggaggggcaagacacactctcctcattagacttgctattttttttcccttggaagaacagcccctaacagacaacctctcacctctcactggtcagtagaggacttcaggagatttctagatccttttgctttgttgacaaagagcaaaggattaccttgcctgttatatagmgcaatcatgaatcatctcctgtggctaagaggaggccacattccccaagatcaaggtctctttacctgctcttggacacat

SEQ ID NO: 911286 - DNA, 641 bp, Homo sapiens
attggctatttatgagtgtggagaaatctaaggaaacgtattttcatttcttattcctcagcaaattacagctcgacatgggcctttaaaaaatagacttgctttacttcaaacaacttgcttaccttgaggttttctgggaacgtagggctgtatacttctgagagctctttcataaatgatgggatgtgctgcaacctctcagctccaggcaccttgaaacaggcaggggggtttctcttttgccttccgtgtttgcttaagggaaactaaaagcaatcttctatttgaggtcaagttctattacactgaaaacatttagtcttcaacatacacgattaagatagcacatctgtagtggtcacgaggatacatgcccaacttgccccatagaaagatagtaaaggaatctcttgtgttggtggaataataggactgaaacatattgaacttcttgaagggaaagtataagtagcatcctcttcttttgctttctggacacatattttcccatctccagaaagactgagtccccagggaatraagactattgatgtggccttaagtttgcaatttgtgcttcccataaaaattcctcccccaactatgtatgtatgtcaatcatgatatgtcaccagcag

SEQ ID NO: 911287 - DNA, 694 bp, Homo sapiens
gtggggaatggtaattactgtaaggcttgaactaaaagtctcttgttaacagttttgaaagttattgaaccttatttagagtcaggtggtttttattgtagtatatgtggttcagtaatttggaagttgagtcagtaggagtcatttaacatcaccgtttgaagcaaacatgcatttaaaaaaattctatataattactaattgaaaaattaatttcagaacaattatattaaaacacagcattaatttgacttataacatctttgcatgtttgatgaaaaaagctcttctcgatggaacaggccaatgtttattcttacatttttaagattaagcagtaatcatttcatattgggggcagcagtgttaacaattatgtacacttgtcatggatttcattaaaggtacttgacactaacaactctccatttaacaaaaaaaggtagtgttaacaattatgtacagttgtcaaggtacctaatactaaaaactctccatttgagaagaaaaggtaagagaaaggaatagatgtgttattattgattttctctggaattcacatttgagtaagactataaaacccccatatgtagaatggtggcagcatagactagtgggagtaatggggagccatggactgtaactgtagagttaggcaagcytaaattctgattctatgttgttaggaggctgt

SEQ ID NO: 911288 - DNA, 607 bp, Homo sapiens
aggaagaaaacaaataactaaaatcagagcataactgaatgaaaytcagcctcccaaatccatacaaaggataaatgaaacctaaagttagttctctggaaagataaaattaatagactgccagctagatgaacaaagaaaaacgggagaagatctaaatgagcacaatcagaaaggacaaaggaggtaacattgtaactgatcctacaaagatacagaaaattctcagagactattatgaacatgtctatgcacacaaattaaaaaatctagatgaaatggacaaattcctagaaacacatcttcccaagattgaatcaggaagaaatggtaactaatcagaccaatatcgagttccaaacttgaatcagttataaaaaatccaccaaacaaaaaaaaccttgcactgatgcatttacagcaaaattctacctgatgtagagagaagagctgataccaattttactgcaactattccaaaaaattgaggaagtgagactcctccttaactcattctatgaagccagcatcaccctgattaaaaaataaaaattaaaaaaaaaacctggcaaagatacaatgacaaaagaaaactttagggcaatat

SEQ ID NO: 911289 - DNA, 669 bp, Homo sapiens
gtcacttctttgctcatgaatataagctgaggctgctgtagcagccatgccatatcttggaactttttgctgcttagaaatttattctcccagataccctaaatcatyactctcaagtttcatgttccacatatctctagggcagggtcacaatgcctccaatctctttgctaacacataacaaaagtgacctttgctccagttgtcaataagttcttcatctccatctgagtccatctcagcctggtgttcattgtccatattgctatcagcattttgatcacaacaatttgacaagcgtctaggaagctccaaacattccctcatctttctgtcttcttttgagccctccaaactgttctaacttctgcctgttacccagttacaaagtcactgtattagtctattctcacactgctataaaaaactacccgagactgggtaatttataaaggaaagaggtttaattggctcagggttctgcaggctgtacaaaaagcatgattggcagaggcctcaggaaacttaacaatcatggtggaaggcatggggaggttgacatgtcctacaccactggagcaggaggaagagagagtaaagggggaagtgctacacactttcaaacaaccagacctcatgagaactctcactcaccatgagaacagcaag

SEQ ID NO: 911290 - DNA, 687 bp, Homo sapiens
taatatcagctggcctcgaaagagaacccgagccttggggaccccaatcttggatctacaagatctctcagaccagaagccctgggrggtaaatccctccatccagaatcttgtctttcatcgattcagtgtgaactacttctcaaatttctacatttctggtcccccttaaacactgacattccagtcagtctgatgttaaattctgctttcccctttccaccttgtgttacctaccaccacagcctggcccacatttttctacccctccctccttctgtcattaacaaaactccccagacccttgcaaagcccctacagcagaattatcccaagagagaaacagtggatttaataagcttccccttagatggccccaaatcccttccagttgattaggggaaaaaacaactacacacaggacagtttcctgatgcgggaggtgagagagagaaagaataaagaaagttcctgaagtcctgggcctcagggaccaaattaagaaagcagcaccacttattcaaaatcagatgaatgtcagtgggatgtttgtcaaacaaacttgtcattatttgtcacaatttgaggaagtatcagtcaatagtcacactcgagcgcataacagagttatttatagctgccagtctagagttttaactcatgcagggccaaggttcgatgttataa

SEQ ID NO: 911291 - DNA, 580 bp, Homo sapiens
catgttacccatttgcagttaatttctacattctgtcagtttttcaaccagctctatttcctagaaatgcgtgctcctgctgttcttcaattatggactcagtctaggccttaatccataaactgagctgactgctgcagactagtcttttttccccttccagcactctaagacagaattttcctctcaaactttttatcatatgactacctctctcaaatctaagagctgttgtttccctcagcctgacctattctctctccccatctactttggccacataagccatcttaaatcacacactcagcacaaaggttccaattgttctcaacagcccaaatgtcacattctggttcctctttgtctccaaaggtcccaggttataaggctctaacatgaaatctagttgaaagtgtttaattattggttttaaggaaggttggttaacttagttttttgaccaacatgtacccaatgtgatcaggcttgtgaggtaagttctttggttttccagtcactttggtttaatgtttgcagactactaacctyatgaaggtttgctcacaaattgacacatttg

SEQ ID NO: 911292 - DNA, 539 bp, Homo sapiens
agtttcagatcttagatttaagtccttaatccatcttgagttgatttttgaataaggtgagagrtgaggatccagttttattctcctacatgtagctagtcaattatcccagcaccatttattgaaaaggttgtccttcccccactttgtttttgttggctttgttgaagatcagtaagctgtaagtatttgggtttacttctgggttatctgttctgttccattggtctatgtgcctatttttacacaagtaccatgttgttttagtgactatggccttatagtgtagcttgaaatcaggtaatgtgatgcctccagatttgttctttttgcttagtcttgctttggctatgtgggctcttttttggttccacatgaattttagaattgtttttttctaattctgtgaagaatagtgaattttgatgggaattgcattgaatgtgtagattgcttttggcagtatggtcattttctcaatacggattctacccatccatgaacacaggatgtgttttcatttgtgttgtctatgattt

SEQ ID NO: 911293 - DNA, 596 bp, Homo sapiens
tgagaggtgaggatccagttttattctcctacatgtagctagtcaattatcccagcaccatttattgaaaaggttgtccttcccccactttgtttttgttggctttgttgaagatcagtaagctgtaagtatttgggtttacttctgggttatctgttctgttccattggtctatgtgcctatttttacacaagtaccatgttgttttagtgactatggccttatagtgtagcttgaaatcaggtaatgtgatgcctccagatttgttctttttgcttagtcttgctttggctatgtgggctcttttttggttccacatgaattttagaattgtttttttctaattctgtgaagaatagtgaattttgatgggaattgcattgaatgtgtagattgcttttggcagtatggtcattttctcaatacggattctacccatccatgaacacaggatgtgttttcatttgtgttgtctatgatttctttcagcggtgttttgtagttttccttgtagaggtctttcacctcctyggttcggtatattcctaagtattttatttttttgcagttattgtaaaaggggttgagatcttgat

SEQ ID NO: 911294 - DNA, 610 bp, Homo sapiens
aacaccccacaataacaaaacaatgggcagttggtctcatgtcttcctacgcatggtgccagaatattttctgatgtattccattcatcatgttccttttaaatcaaatccagtgttgttctraagactgtagaccaaattctactgtggctcagagcctctcacagcccatgttctaattatgaacatgaaattttgttaaataaataatttatattggagtctagtgaattgtaattttgtgataacagcctggacaacattgagagacctcatctcttaaaaaattctaaaaattaaacaggcacagtgggtcatgcctgtaatcttagctactcagaaggtggctaaggtgggaggatcacataagcccaggaggtccaggctgcagtgatccactgcactgaagcctgggagacagaagaagatatcatctcctaaaaaataaagaaaaataaaacaaaactttgctggaaaattatagcttgagtgtaagcggtacaattgtttgtcagtgccccaggaatgccaagccactgtttttctattgtcctcaaaatgcagtgttccaaaacgctgaatgacttcacttactttctcaaaggtaggg

SEQ ID NO: 911295 - DNA, 600 bp, Homo sapiens
ttttctacaacttttccctaagtaaatgctcagtgaccccaagacaaaataatctgaataaatccacatcttacctctactctagctgcagccaagagccatcagatggattccatcctgcctcttccattgaagtagtaaagcttgggcttcccctccatgcttaaggatttttgaaaatcaacatagagagactgattgagactcttctgcacagagaaggataaatacaagcttacagagcagcacaaggttgatcacaaagctgtggacttgcaacttatgccccaaattaaagctgcttctcagctagaaggctacttgcattctgtgttctttctcacaaatggaatttatcctcacaaattggtgttctaaatatcttgaaaaaaaaaaaactaaatgaacaactggtatattacttttaaataggaagagagtgaggaagccagacagatggaaggaattaaagagtaaggctgaccagcttttcttcctgcaggaaggggtaaggttttagcayaccaatcttttctctctttttgtatacacatcttcctccctttccaatcaaggcaagcccagcctggagaaactggg

SEQ ID NO: 911296 - DNA, 613 bp, Homo sapiens
actctgtcctctttatatattacatattatttctgaggcttactgaaataatatataatgtaatatataatgtaatatatattgtaatatataatgtaatacttcaggtattagcctaatgcatgaaagaaaaaacaaataataaagacattcaaaattaaggaagaaattttcctaagataatagcagttaactaatacatttaagaaaaagtttgaaaaaaatcctttagaattttgtgcaatgaaaaatatttctcttccatttataataaaaagaagatttatcatgtaattgattattccatacactatcattatttacagtttattaataagaatggactaaaaatgtgaaaaaataattttggaatgcccttagggtctttgtgattttgagacaatctatgtcttccagtcaatgtcttaagatagatgtccttctcatgtatccttctgtggagagtggatagattagcttgcttcacaaaccatgcctyaatctcaattcttactgattatatggtaaaagaaaacaaataggcaagtcatcaaaacttctctgtatgtatcctacccatgttggaaaccataaaattatttaacagagtcaa

SEQ ID NO: 911297 - DNA, 536 bp, Homo sapiens
aaatatctggttgtcgattttgtataaattataggataagtctctgaattaaacaatgatgctacaagtcactttctccatagtttgaaccttccagatagtctctacatagtatttctagataagcctaccttgtcttcccacaacctcctgctgcaccatcttgtttgcttctacaatctatcctagtgttctagcatggaagaaggcatagagtttggttggcaaaaaggtcctaagcaaggtcaaacttattactaattaagaaacagggaaaagtgttaaaagaacatgaggaattttgttcaagccatagaaagagaagacagaaacactctaaaatttacataaatcatgaatgtaataaatgtaaactgcaaaatttacaaagttaccccttttgrccatcataaatctcagcaaaacatccagaagaatgtcaaaactagagcaacatagcttttttggaagcctgtcaggaaaaactaaatataaaatgtatgcctaaggaatggaattgatttgcttttttcggt

SEQ ID NO: 911298 - DNA, 610 bp, Homo sapiens
ttttctggcatgtaaatgtgctttcttattttaaaaataaataagcttttacttgacaaagctcctacactttccaacattatttttcagtagtggatggaaaataagtgttgatttttctttctataaatggaccattaaaatccaagggaggacttcaaaatacacatgcaaataatattaattttaaagtagaggcactgcacactgagaagaaaattgggaaatggctacttaaatgttagcaatttacaaccaagagggcctgcatactgattgggaaggcagacgcttgaatagtatcaagatataaatagaactgatcaaactgagataacaggaaaggtagtcacataattataatataaacagtataaataataccaactatttgaaggtaaaaagcatgtgcttaatcgtacttatttaaaagaaaataggtcaaccaaatgaaaagaaaaggcgaaaagtgactggatgagcaagcctcttcactccccagacctccatyatctcttctgcaaaatgaagggatcaggtgaaatgatctgaatatcagagatttataacactttaatgattctaaaactgccttaagaactgcacagta

SEQ ID NO: 911299 - DNA, 586 bp, Homo sapiens
tgaaagatactcaatgattccaatattcatggaaatgaatgaggtcagtatttaacagatcagtgaataaaggtacccataagacccttgccaatctaatctatctatgacattaggtgattaattttcataacaaacgacacgtttaaaattaaatcctatttctgagaagaatgtgtattttctgaaatggataatcacagtgtctagaaagtaatattacagcaccacaacctaagtcccctgtcagcccagtttgagtcatgtacctgtctggaggaagcaaagttaatataatgacttagctgagtcatccagtgagagcccagtaatatgggcaaagttggagacctcatctgtgatcaaatttccactggtggtgacttaattaaccattgaccttgtactgaacagcaaaaatcataactatggatttctgtcagcctactgcctttcttgttaatgccacatcttacccaagaataggaagtgagytctactttctagaaacagaaatgtatttgaaataatccagtaattatatttctaccctgtgatattattatgttaatcagttgctctctac

SEQ ID NO: 911300 - DNA, 446 bp, Homo sapiens
atcgtgcacacatttattgcatcaatgaggtctctgttctctatcttttggtggtctcagaaattgcttgcataaaagtttcacagtaggtcactgttgacaatattcaagtcgttggattatcttaacatctttcagagtcaaaagaatgggaaattcctgaacgaagggagaggtaaaggataattaaattatcaaacctagggtgccattcctatggctaatgactatagggctcactacatcctggtcaagaagtaactaagaatggctgtaaaatatttactaagtctatatatgtttaataataatttcgctaatgaaatccaatttgtaaattaatattttgctrtttgcaaaagtattgagtgttggtcagagataaagataactgaagtatttgcagtaactatctttagaatgtgggctttctaatcagaacacta

SEQ ID NO: 911301 - DNA, 446 bp, Homo sapiens
atcgtgcacacatttattgcatcaatgaggtctctgttctctatcttttggtggtctcagaaattgcttgcataaaagtttcacagtaggtcactgttgacaatattcaagtcgttggattatcttaacatctttcagagtcaaaagaatgggaaattcctgaacgaagggagaggtaaaggataattaaattatcaaacctagggtgccattcctatggctaatgactatagggctcactacatcctggtcaagaagtaactaagaatggctgtaaaatatttactaagtctatatatgtttaataataatttcgctaatgaaatccaatttgtaaattaatattttgctatttgcaaaagtattgagtgttgrtcagagataaagataactgaagtatttgcagtaactatctttagaatgtgggctttctaatcagaacacta

SEQ ID NO: 911302 - DNA, 636 bp, Homo sapiens
atgcccggccaatatctgaatctttacttgtttcttgacagtattttccaaaatgctaggtggactttggactgtgctctcctaatgcaccttctgacacaggraggcaacgcaggcccatataacatcccctcccttatttgtagcccattcatctgtgcataaatgccttcctacatgtttgttttatttctggtcatacccctggtctttttttcatgagtccctttggcctggaatgcatttccttcctattacttttatgcttctgttaagaaagtttagaattcaacaattaacaactctaattgttaaattctaaacaatcttcatttagttattttctggagaatgtctacagtgcagttccagcctacagtatttagagcacctgaattaattatgtttgcctaataataaccctgtttcatttatgaaactaacagtggatagagttaatataaaccatgtcatattagaaaggctatgtaaagatttcataaataaaataagcgactgaagaagtctttttcaatctgtaagagagggactgaagaattactagaagatcatagaaaagtaatgactgatgaagaatgagagacactgacacagaattgaataaaaaaatacata

SEQ ID NO: 911303 - DNA, 636 bp, Homo sapiens
atgcccggccaatatctgaatctttacttgtttcttgacagtattttccaaaatgctaggtggactttggactgtgctctcctaatgcaccttctgacacaggaaggcaacgcaggcccatataacatcccctcccttatttgtagcccattcatctgtgcataaatgccttcctacatgtttgttttatttctggtcatacccctggtctttttttcatgagtccctttggcctggaatgcatttccttcctattacttttatgcttctgttaagaaagtttagaattcaacaattaacaactctaattgttaaattctaaacaatcttcatttagttattttctggagaatgtctacagtgcagttccagcctacagtatttagagcacctgaattaattatgtttgcctaataataaccctgtttcatttatgaaactaacagtggatagagttaatataaaccatgtcatattagaaaggctatgtaaagatttcataaataaaataagcgactgaagaagtctttttcaatctgtaagagagggactgaagaattactagaagatcatagawaagtaatgactgatgaagaatgagagacactgacacagaattgaataaaaaaatacata

SEQ ID NO: 911304 - DNA, 636 bp, Homo sapiens
atgcccggccaatatctgaatctttacttgtttcttgacagtattttccaaaatgctaggtggactttggactgtgctctcctaatgcaccttctgacacaggaaggcaacgcaggcccatataacatcccctcccttatttgtagcccattcatctgtgcataaatgccttcctacatgtttgttttatttctggtcatacccctggtctttttttcatgagtccctttggcctggaatgcatttccttcctattacttttatgcttctgttaagaaagtttagaattcaacaattaacaactctaattgttaaattctaaacaatcttcatttagttattttctggagaatgtctacagtgcagttccagcctacagtatttagagcacctgaattaattatgtttgcctaataataaccctgtttcatttatgaaactaacagtggatagagttaatataaaccatgtcatattagaaaggctatgtaaagatttcataaataaaataagcgactgaagaagtctttttcaatctgtaagagagggactgaagaattactagaagatcatagaaaagtaaygactgatgaagaatgagagacactgacacagaattgaataaaaaaatacata

SEQ ID NO: 911305 - DNA, 618 bp, Homo sapiens
ccaatgaagagttatagtcactataacagtagcaaaatcagaagtcatttcttttttgttttgttcttgaatttaataatggagtctttttaaaaaaaatcagtatgtagcaattaattataataatttgcatgcttatgtcataattattcttgccagtaggagccttgtctgtgaacgttcagtcgtccctattagttttaatgttttccttttcgttttttgtgtcttcctcctttctatgcactagaaataggattagccacatattaaaatagctctagattttttgtagaaaacggtgtttaaaaatccaaaatctattttctcaattttctctccccgccttctcttcctccttctgttttattacttctattaattacttttcacttatttccacctgtattttaatctaagatataccataaaatgcattccatgcacaccataagtgtttttacttccctttctctgtgctttctgggtttcggtgcttctctcctagcaggtgggtgaggcagctgtaccttgaagcagccctaagcagtcacatgctctaagcaccygtggtttcctaagatttgatacctgcaagaaacttgggtgaattataaa

SEQ ID NO: 911306 - DNA, 696 bp, Homo sapiens
tggattattttgttagttgtgtctaattgactcctcagtgcattcagagaattcttcatctctgatattataaatctcttcctagcattttcatgttactcttttctatagtttccatctctttgctgaaattctccccctatccatggatattgtccacctttaccacaagattctttaacatattaacataggtatcatacaaacccaaactgatagtttccagatggtgtcttttctgagtctgtctgtcttgattgctttattatttaacagtgacttatcttccctcttcagcttttggtgtgtcttgtaattgtttaatcaaacactgggtatcataaatggaggaacagtagagattgcagtaaatattatttatgctttgaaatgggcacccatcttctgttgaaaatatgttttgtggtcaattgagtcaacctagtaactggttgaactgaatttggcatttgtgcttgttgcttttatcttaaatgcaccacaggtttaaattcctccagtgatgggttgctgctatcttttgcttagagtggggcctggggtgtggaagaattttctcagtgttcctatctattattagattttagcagtcactgcatgcctgcactacagaggggatatcttcatacayataatctaaccccattgaaactgctgtttcttcttaatgaatgc

SEQ ID NO: 911307 - DNA, 599 bp, Homo sapiens
attgtttgcagatgacatgatcctatgtctagaaaaccccattgtcacagcctgaaacttcttaacatgagaagcaactttcacaaaattttaggatacaaaatgwatgtgtgaaagtcactagcattcctatacaccaacaacagtcaagccaagagacaaatcaggaatgaaatcccattcacaattgtcacaaaaagaatagaatacctagaaacacaggtgacaagggaagtgaaggaccttttcaaggagaactgcaaaccactgctcaaataaatcagagagggcacaaagaaatagaaaaatattccatgctcatagataggaagaatcaatattgtgaaaatagccatactgcccaaagcagtttatagatatattcccattaaactaccattgacattcttcacagaatttggaaaaactattttaaaattcatatggaacctgaaaagagcctgaatagccaagacaatcctaaacgtgaagaaagctgaaggcatcacactactcgacttcaaactacactacaaggctacagtaaccaaaatagcatggtactggtgcaagaacagacacatagaccaatggaacag

SEQ ID NO: 911308 - DNA, 627 bp, Homo sapiens
gctaactggcacaggggcagaaagagcagaaaaaacagcacgggttctgcactttgacatgcctggggcccattgggtgatgatgtgagttctgtgtgtttacatcatcgtttggcctttgagagacaacgagggagagaatgagagagagaggagctggagctgaaggacaggctgttctggccctggttgcagggggagcgggcggtgcaggctgcagagtgaacactaaagaggccgaggttgctctcctggctctacagtggggagctcctgaccttcccgggcctcagtttccccactcataagatgagggctagggctccatctggaaggcggtgaggattagtggcttcacaggtaaggtgtccagcccacactagcagtcagtaaagtgctgatttgggccccttttatctctaaaaccctggggtcaagacctgcacactttctttaccgaggactcaaatgcagccacagaagtagctctgggtatcccaggaccctgtctgagccactgccrcagaaagcagagtgggcctcgcagccgtgaggcgctgcgccacgggcccgggagggcttacccgtcctgtgctctctcgcaggtccagtgtcacagctacacgg

SEQ ID NO: 911309 - DNA, 608 bp, Homo sapiens
taggagataaacctaatgttaaatgacgagttaatgggtgcagcacaccaacatggcacatgaatacatatgtaactaacctgcactttatgcacakgtaccctaaaacttaaagtgtatataaaaaaaaagaataaagaagacaaactaaaaaaaaaaacagtttggtaaatggaaagaacttaataattccaacctgtttgacaataattgcattctgttttgcctgatgcttgaagaaatccaggttatctcatacagtcttatttctaatttgtgccaatgaaatgaactcataagttcataagatgtaaaacgaactttttttgtgccatgtcatgagagcagataattcttggctgtcacatgaactcatcaccttttaatgggtcaaggaggctgtagacattactcatcctagcttttttgtggactttcactgtcaattacaaagctctacttaaccttttacatagaacattgattctcccctcccccacttcgttaattctttcacagataattgataaaaattaagtttattttttgtattgaaagagcattttgtcatggtttatgattttcaaagaacaatcataaccacagga

SEQ ID NO: 911310 - DNA, 632 bp, Homo sapiens
accccacagagtctagctagtggcagttaataattgtagctcagccagagaactatctgttctttcttgtttttctcatctcctcagycttacccacttctttcattccttttctcacctctaacctagttggagaaaaaaaatggtggtaagttaagctctatttttttcttatccaaaaagtatgtagcaaaaggtcctaggaacagaagacatggctttcattgctgatgtgcagtggggtggcattcagtgtttatgaatctcagtattacatgtggccacagtgcctacaagacaagtgtgtcagtcagggtaggtgtgctcaaagcagattggcaggaggttctgctccccagacccaggctgacagggcaccccaccatgtgacactgtcttctcttccagagttttggagttggctgtaacagggaaagagaatgtggaaaatgtaagccattatcccggaatagacatatctcagctctcctctttttcctggtcagaataagggacatattcatgcttaccttcaggggaactgggatggtaattctctaaattccacaaggaaagggaaatatttgttaatttactctagcaagcttgggttgcttttattttatttttaa

SEQ ID NO: 911311 - DNA, 647 bp, Homo sapiens
caaggcccaatttcctggacttctaggagctgggacttgactggcagcagcttgcttttcctacccgggattgacaggagccaattatcaaagcagcttcccacccctggaaccctgcattgattggctcccctcaagcctccatttccagctgtcctcctccactcaggccagttctctccctccagcatcgcatctgagtgatgcataatctccagccaaagccctatagccacccctcttctgccacatcttcaccagcttctggtggacccctcaattcccacagccagagctgccctgtggaatgccccaccagtgggctcttgctctggttccttcttaggaggcttttctgtggatgcattcaacatccttttctccttatttgggacctgacttcccttcttgatgccatttccctccatcttaagaacataatgtgtctacttgagcccctagaagtctgggctaggacgaggggccaagaggaatctaacttcatctgctagacccaggaccaacctccattcttcctccacgcagagccttcaccatgtgcctaagccctctccctcccatccttggaagtgcatctaataaggcagtgcatctcatgactgcaasaccacccccatagtcttttg

SEQ ID NO: 911312 - DNA, 643 bp, Homo sapiens
tgggtatttttctcctatgtttagtatgacattgtgcaaggaatttaaatatgcggtrcccacatcatccttctataaaactcttaactcatagttaagatctacaaaaaaaaaaaaattgagaactttttctgagattgctttgtaactgctaaatttgtataagaaaatcttgaaaatgttcaccagcaaccataaccatcattaaaaatcagcaaatatctttagatttctttataaaacatatatttaggtatgaagaacatgaagaaaaagatatgatgctaatcagttaatgaagtatgtatagaaaacaagttttgtttaaaaataaaatatttatatgataatatatgcctagccatagtaaagttctttgctgtaacctaaagtttgataaacataactaatctagcatgaatgggatgggacaccaggaatgatgacaaacagtgtctatttcctagaaataaaatttgggttctgggtgaaagcactctatgagtctcaggtataattccaggaccaggaactagatgatgtgcaaagatcctctggatggtatgggctagttatttagtagttctatgataatattgcagcctctcatgcaatgctcttgcccttagtatttatattctct

SEQ ID NO: 911313 - DNA, 595 bp, Homo sapiens
agagagttctgtagatgtctattaggtccacttggtccagacctgagttcaagccctggatatccttcttaattttctgttttgttgatctgtctaatattgacagtggggtgttaaagtctcccattattattgtattggagtctaactctctttgtaggtctctaagaacttgctttatgaatctgggtgctcctatattggttgcatatatatttaggataattagctcttcttattgagtttatccctttattattatgtaatggccttctttgtctcttttcatctttgttggtttaaagtctgttttatcagagactagcattgcaacccctgcctttttttttgctttccttttgcctggtagatcttcctccatccctttatttcatgtgtctctgcacgtgagatgggtctcctgagtacagcacactgatgggtctgagtctttatccaatttgccagtctgtgtcttttaattggggcatttacctcatttacatttaaggttaatattgtcrtgtgtgtatttggtcctatcattatgatgctagctggttattttgctcattaattgatgaagtttcttcat

SEQ ID NO: 911314 - DNA, 576 bp, Homo sapiens
ctctgacactcaaatgcctgcctccccctctgtatctcacataatcttgccttccaacatcatttttttcccatttgactgagtggtctgacctaaaacagctgtgcgtgacttgaaatttaagcattcctctttcaactctctgataagaatctttcccctttaataatgctctcagtggctcctcgcccattccttttcatttctgctaggtgcttttaagttcagttttccttccaccccctgcaagccccccaaggcttagcttcagagacaaggctctctcaagacccaatcaattccaacattcagttaagctaattaatttcaggttgccatcaatatatttcttaattatggtttaaacataggtaaaacctagaattgttcgtcaacagccctcagcctcagctgaatgctagcatctaccattaagaattcccatgggtcaaatcgagggtctgacaatagytacaaagaccacatgtgtatttgcataggatttgcatatatctacataggttagtctctttgcagtagatttccaattaaaatgttattattttggccttgaag

SEQ ID NO: 911315 - DNA, 578 bp, Homo sapiens
cagtatggaatcatagaatgttcatacaaaaaaaaaaaaagaaaaaagaaaaaaaaaagaccttagaagtaatctggtccaaggttcttatttttaaaatttaaaaagaaagaaaaaaaaaaaacaaaacaaagccctgaagcctagagaggggaagtgactcactcactgacacacagctaatagtgagagaacaagatcaagatcctgagtctattaactcttaattatgtcacttttcaaaaaccaggcaggccacacaaaatatactgtgttactcaggagttgaatgggttccttctgtggaagtgtcaagatctaccactgtctcacccattcgattctagttgacaattatgtcatttggaagggtattttttttagaatctaagagaaccttagtaattatctgttcacctccttatttaaactattgggagattayggctccatatgataaaatagcatgccctaactttcttggtaggttaaagaatgtccattaccatcatgaattcaacaccttcctcccttaatggcagggaaaagacaactgtttgtacagatgaatgccacac

SEQ ID NO: 911316 - DNA, 650 bp, Homo sapiens
ttttaaaattattttggatggacacaataattatatatatttatggggtacagagtgatattttgacacatgtatacaatgtgtaatggtcaacttagggtatttagcatatttctcacctcaaacatttattattaatttgtgttgggaatgtttaaaatcctttctatttgaaattatgcaataaaatattatctatagtcacccaacagtgctgtagaacactagaacttttttctcctatctagctgtaattttgtatccattaaccaaattcactattccctcctccctccatccttcccagccgctagtaaccacagttctactctccacttctatgaaataagcttttttagcccccacatacgagtaagaacatgtgatgtttgtcttcctgggcctggattatttcatttaatataatgtcctccaggcgtatccattttcctgtgaatgacaggattttgttcttttttatggttgaatactattccattttgtatctatatctcattttttatccattcatctgttgatgaacacttaggttgattctgtcttggctatagtgaatactgctacaataaacatgggagtgcagacatctcttcatctatgtcrtttttgtcctgggcacatagctaagc

SEQ ID NO: 911317 - DNA, 342 bp, Homo sapiens
gtttaaaagtttaaaaatgtcccccttcrcatgctctctctgtctcctactgccatataagacgtaccttgcttcccttccccttctgccattattgtaagattactgaggcctccccagccatgcagaactgtgagtcaattaaacctcttttctttataaattacccagtcttgggtagttctttatagcagtttgaaaatggactaatagagaaaattggtatcaggatagtggggtactgctataaagataacctgaaaatgtgaaagcaacttgggaagtgggtaatgggcaaaggttggaacagtttgaggggctcagaagaagacaggaagatgt

SEQ ID NO: 911318 - DNA, 353 bp, Homo sapiens
tttaaaagtttaaaaatgtcccccttcgcatgctctctctgtctcctactgccatataagacgtaccttgcttcccttccccttctgccattattgtaagattmctgaggcctccccagccatgcagaactgtgagtcaattaaacctcttttctttataaattacccagtcttgggtagttctttatagcagtttgaaaatggactaatagagaaaattggtatcaggatagtggggtactgctataaagataacctgaaaatgtgaaagcaacttgggaagtgggtaatgggcaaaggttggaacagtttgaggggctcagaagaagacaggaagatgttggaagtttgga

SEQ ID NO: 911319 - DNA, 565 bp, Homo sapiens
tatgtttgatgaaaactgcctctgtatgctcaaatgaaacaaaccctatcatttccagctcacaataaatgacccgtcaggacaaacatttcagcagtgagcttgtccgaatgctatctkatcttttatgcttgttttatcttttactggtattaggaatatggttgctttaaatttatattttctcccgggcttttagggattgtagaaaagtttttgcttttggcagtttgtagaaaatattaaagtgcattaaagaaaattgttctcaaggagcccacttgtgtctaagatttccatgatacgtctcagtttttaagacatacatgttcaagcagacatttgtcaataataaaaactttctctttttccaagcagatgcatttggtttcccaaatttgatgtaatttgcctgtaaagtcatcttgatccagtactttttattgcatattttcaatactcagcagggactaaactttcttctttctgactttgtctgcctcttaactcctggaagtgccccagtgatttcagtctatttgagatggcccttgcggtttgtcca

SEQ ID NO: 911320 - DNA, 596 bp, Homo sapiens
cacaaggaaattcctggtgagatgttaaaacttcaccgtggcaatgcaaattgatagtttgtctttaaaggtgcagtcaccctggccagccagacataaactttattgttgtcttattttcagaaattgccacagccaacccaaccttcagcaaccaccagtctgatcagtcagcaaccatcaacatcaaggcaagaccctccatcagcaaaaggattatgactcactgaaggcacagattgttagcatttttagcagtaaatcatttttaattaaggtatatatattgttttttatacatgattccacacttaatagactatgatatagcataaacacaacttttatatgcactgggaaaccccccaaaaaatgtgtgactcactttattgcaatattcactttattgtggtgctctaaaatgaaacccccaatgtctctgaggtatgcctatgtaagaaattgcaaaacatgyctatagtgattacaccattttgcattctgactggcagtgaatgagagaaccagtttttatcttcatcctcaccagcatttgttgttatcactattttttattttagctgtgtggtatctca

SEQ ID NO: 911321 - DNA, 608 bp, Homo sapiens
aatacatcaagtggctaaatggattaaccaaaaaaaagactcagtgatatgctgccaacaagagactcatttcatctctaagaacatacatagaccaaaaatgaagggatggaaaaagttattccatggaaatagaaatcaaaatagagcagggatagctatacttatatcacacaaaatagaccttaagtcaaaaactataaaaagaggtgaagaaggtcattatatgacgataaagtggtcaattcatcaagaagatatgacagttgtagatatgcatccatccaaagttggaacacctaaattggtaaagcagatattaatagatccaaggaatgagatagactgtaatataataatagtaggataactaaatactacacttttaacattggacagatcatctagacagaaaatattggacttgaagtatgctttatttatttatttattttgagacagggtctcactcttttgcccaagctggaatgtagtggcaagaccatggcttactgyaacctctacctcccctggctcaagtgatacccccacctcagcttcttgagtggctggaactacaggcatgcaccaccattcccagctaattt

SEQ ID NO: 911322 - DNA, 525 bp, Homo sapiens
cctaagcttccaagggccatcctagcagtgtatgagcattgtttcccagggtctgtgccagagtgtcaaatctgtattctgagagagagcttctgtgctaataaactctccctcatccaactttacaattccctcctctcccctttgtctagcactctctcaggattcatttttggggtcataatctccaagtaccagctagtctccatcaaccagagtctgtagcacctttggtgctttcacttttccctcgaattggtccttaatcactcttagccagtcattatctcttttaatgaatcaatggcactcaacagccacccaattccatccttatatttgcctttcccctcaaatatctcaaaagccagacatactgtaccagttagtgctcctccttccactggcatcacatcccagtgtacaaccagtgaaaggcttaataattgcaccactgaagcatrcctggtgctatctatactctacctgccactagtggtggggcctctttgtcagccagctggc

SEQ ID NO: 911323 - DNA, 498 bp, Homo sapiens
caaaactaagcagtcgaaggtgatttgagggctctgacctgtgatgtggccagtggatgtctccattaacagaagaaaggaatttgatcaaaaccacaacgtaataccatcttatccccccaagaatggccataataaaaaataaaaaaaaaaagatgttggcatggatgtggtaaaaagggaacacttctacactgctggtgggaatgtaaactagtacaaccactatggaaaacagtgtggagattctttaaagaactaaaagtagacctaccatttgatccagcaatcccactcctgggtctctacccagaggaaaagaaatcgttatatgaaaaagatacttgcatgtgcatgtttatagcagcacaatttgcaattgcaaaaatatggaaccagcccaaatgcctatcaaacaacragtgggtaaaaaaactgtggtatatatacatgatggagtactactcagccataaaagggaattaatggcattcacag

SEQ ID NO: 911324 - DNA, 573 bp, Homo sapiens
tttgtaagacaatatccacataagctgatttaaacacaagtgattgattttggggtatagaccataacaactcccttccctaaagctctaaggagacaaagattccttgttagaattaaagaagcaattatttttaaaataataaaataataaaagaatatattttctgtggaaaatatacaaaattttgattagtaaaaagaagaaaaataatcgacctaatctctagctcttgaaaaataccataatgtaatactatttttcacttgccttttctgattaataatagagaacatacttctaggttactttctattttgtaatgattttgctgttttaaaaatgttttaagtctttttgtatatggaagaaaattttattcatggaattgagagaaaagaacaaggacaaaagtaaaaatctcctataattccatcatacaaataaatcatttggaagtatagagagtctttttttagsattatttttattttcttctgtgaaacaggaattgtttgtacatcttttttagcatgctgtatctttaacttagcaatatattgtgaacatgtt

SEQ ID NO: 911325 - DNA, 632 bp, Homo sapiens
agtcaggagttcaagaccagcctggccaacatggtgacacctcctctctactaaaaatcaaaaacattagttgggcatggtggcgctcgcctgtaatcccagctactcaggaggctgaggcacgagaattgcttaaacctgggaagtggaggttgcagtgagctgagatcgcaccactgctctccagcctgggtgacagaacaagactctgtctcatataaataaataaataaataaataataaagctgcacacttacaaccacctaatcttttacaaggctgacaaaaacaagcaataaatttattcaataagtagtgctgggatactagctagtcatatgtagaagaatgaagctgggtccctgcctttctccacataaaataattaactagaaatgaatcaaagatttaaatggaaggcctcaaattataaaaattctagaagataacctagaagatacctttcttgacatccaccttggcaaataatttgtgactaagtcyccaaaagcaattgtaacaaaaaccaaaatagatgagtgggacctatatagcatagtcattacaagctaattacctgattattggtttcctgagtaatcacaaacttcccaacatgtccaaatgcatt

SEQ ID NO: 911326 - DNA, 610 bp, Homo sapiens
tgttgacataaactgattttgaaagtcaatgtcagatttgaaataagctaacttgaggagataagtgaactttctattacattcagtaaagatcatgtggaagtgagataaagggtaaagttcattaagagttatctttaaagaaattactttttagggagatgcaagataaaacaggagaaacatgatttcagtatggccaaggatacactcatgccaggaaaatctttgggttatgttctacctctatcagcactcattcaaagccatcaaaaatctgttgctgatcagtttaacattttcaaatgtggagctctaaaagctgaaataaataagtatgaaattacatggagattttgaaagaaagcacgctgtatgggtacctacttctctgctcatcccactctctgttcccactacattgccctattttctgttacctaaaactcccagcttgttgcacttgctttttgcatttgytgtttcctcagcccgtattctttgctggaatcccagctctatcaatttccagctgtgtgatcttaggaaagttacttaacatttctgtgcctgttaaatgttaaagttatttgacatttctgtgcaaatt

SEQ ID NO: 911327 - DNA, 629 bp, Homo sapiens
agatggaattcaggccgcaaaacagctaaccttaaagagactatccacgtaggtctagtgcaatcatagggttgttaaatgtggaaaagagtggcaaaagartgaggatcagggcaatgcaatgtgagaaagacttaaagagcccttgctggctttgaagatgaaagaagaccacaagctaaggaatgcaggaagcatttccctagaagccggaaaaaccaaggacatggattctcccctagagcttccagacagaaatacagccctgccaatatcttgattttcacccagtcgaacccatttcagacttctgacctctagaactgtaagataagtttgtgttgtcttaaagtcactaagtgtattctaacttcttacagcagcaataggaaaccactaggctttcattcacaggtgcacagaacccttgttcccacacacccacatgtttaatacaactttgaaacacgagcatattctgctgctgttgtatttacatcacaaaaacagaccccttgagagcagttatttccagggtcctctgaatgacttctttcttgagaggtgagggaagcaagaagtataaggacagggaaagaactgaatggagttataatatgtacagcatc

SEQ ID NO: 911328 - DNA, 595 bp, Homo sapiens
tcaaattatataatatatatatgttgctttggtcaaaagttcctaattatcttgtttttttgagatggagtctcactctgtctcccaggctggagtatagtggcgygatctcggctcactgcaacctctgcctcccgggcaagtgattctcctgcctcagcctcctgaatagccgggactacaggcatccaccaccacacccagctaatttttgtatttttagcagagatggggttttgccatgttggccaggctggtctcaaactcctgacctcaggtgatccacccaccttggcctcccaaaatgctgggattacaggtgtgagccaccgtgcctggccctaatggtaatttgatattgaagaaatgtctaaagcttggagccctgtgatcatagaaaataaaagatgtgaatttcaatttatatagccataattttgttgctgagaagtatgatgaaataaataataatttttaagattaataatatttcctattttgaagccctgctctctatctgagaagtttcagagatgggttctctccacctgactggctagaatgagccactgccttgctttttttcctggtaaca

SEQ ID NO: 911329 - DNA, 536 bp, Homo sapiens
aaaatttcaattaggcagaacaaatgaaagcrtgttctctcattatagtagaaaaaagggaaacaggaaggcaggagggaggaagtaagggaaggagcaagagaacgaaggataaaagcaagagagacaaagtaagagagaaagaaagaaaggaacaaagagacagaaagaaaaaagaaaggaagaatgaatgaatgaagaaagaaagagaaacctttccatctggaaatatatagactatattttaaaaagcaataatctgacaagttcaatatgttaatcacctatggatgtgtttgtattgcctattttttctcttggtcctgtcttagtttgcctgttaaatttttattagatgctgaatatgaaaaagtgatgtgactcttgatgaagtcacctttctccagagagatttttctttgtcttctggaaggaaattagactaggtgtcggttagtttaatgtagtaagagatttctcaaaagaaggcatacaagtggtcaaaaaaaaatatgaaaaaaatactccacatccct

SEQ ID NO: 911330 - DNA, 611 bp, Homo sapiens
gtcagggcaccagaggtctgcagtgccaaattagagtggagtaaggactccatgctgagtaaggaaagaagatcaggcaggcactggggagtacattgaggatggaaaggagggcgatggaggccatctggaaggacgaaagcgagtggtagcaggagaggcatcttaggtatgaccccgggcatgacacgcaacctctctgaatctgtgtccctgttggtataacattctgtgaagcacacaggtcctggagccttcctgggttcaaatcccaccctctgattactcatgaccctcaataagttctttcaacttggtttcttcatctgtaaaatggagatgacaataatagcacctccccactattgtttcatcaggatcacatgagttaatgcattgaaaacacttagatcggtgccaggcacatggtaagtggtcagtcaacgtgagctagcactgaagcaggagtcacagttgcaaagcacagaccagtgcctgcrcgcgcacacagcaggcactcatcagtgagacggaccttctatctgcctcttacgctgtaacacatatcaccacccaacatggtatttttttgcttatgtgattattgtccc

SEQ ID NO: 911331 - DNA, 565 bp, Homo sapiens
ttaatcttgggcttccaacctctagaactatgagaaataaatttctattatttatttataagatagccagtctatggtagtttgttcaagcaacatgaacagactaagacaccaggcaatctgtcataagtgcctctgatgggcccaagtgttcccaagttggaaataccttccttacgcatcactgtctcagaggtgatccctagaagagtgcacaggaaagaatatgcaagggaaacaaggatagccaatgcacttttatgtaatacacacaatgaccctgtgaagcaattattccagtttaagagatgaaaaaactgagtttcacggaaaatccaaaacttgccagggacacccaggaaaatgggtggtttcatactaggtggaactggggaattggcttcaaagtgcaagtgagcaggacaagagaagaccagyttgcttagactggaggaggtaggttaggcagaagtgaggtaggccaggtgggaccaaacgctaaagagccctgcaagtgccacaaagtgtcatgaacttaatgagtcaggcagtagggaaccattca

SEQ ID NO: 911332 - DNA, 647 bp, Homo sapiens
aggtcacatggctgctgcctcagagtccctgaggcactgctgtgccaatgcacagttggtttatcttaacatcacccaccccaggaaacctcccttgaccctgtccctaggcctggctgagatgaccttcggtcctactctcacctgtaggattgcaggaataacaaatgacacttaatcacaggcctctgagcaaaaactgggacccaacaaatttgagtgtgctgatttcatttgtagaccctgggaaaaccgatgcttatacctttcccaagccctggcagggcattggcacagatctgctttcaccctgagtctctctaggtgtctctgtgtccatgccttctcagcagctcacaactgctgcccagggagatgaagcccaccagctcctttgctaaagggctcaccccctagagaaaagggctggctttgcagggtgcacgatccgatccgtgctggcctttgtcacccgattccctgagcagctgctcagagctgtggagtacgctgcagtctgcagagtgcgatggccccttcgtgagtcccagcaactcaccagggtcacagccagagctgggtggacatrtgccttctagatgaggctaatcggaagatattcaagggcatcaagctgccccgcccag

SEQ ID NO: 911333 - DNA, 644 bp, Homo sapiens
aattccaggtcaccataagtcattcatttagccaaaatgatgacttaaaaatttttttaagcaaaaaaactttactcattgatagagggaagacttagctttccaaacaatctgtctcttgtctttcccttccttttttggtagtttattcaaaaggcaaacaaaaacctttcattatcctttaatattacatgaaagtctttttcaagatagaaagccaaatttcacccttgcattagtgtactagtaatgttaactccaatctttaataaaaccttatagacaaatttatccaatcttaatgtgtttgaccctaaggtaagattctcataaaccttttataaccctttacaaatttttgctaaggagcagatcagtgttctaggaaaaagtctgttgtacctttattccattgttcaatttccagataaactgaataaaacccttttgattttagccaatatattaacacatataattttttacaagatttttttttacaaatcttttacagcttgctcaagtgtttagctttattctatctcatttaaaacaatcatttaaccttctaacctaggcaaaaatgtacattcttatgscttcttataatcttttcctaaaggtgcatttcactgtccttacac

SEQ ID NO: 911334 - DNA, 568 bp, Homo sapiens
tttatggcacaaggaatctctggtggtgggggtgggtgttaagagtgattggatttwcattttagtgaaccaccttagctgccactttaagaatgtataagatccaaggcatgctagctaattgtttataacaatcataatcatccaggtaagaggtggtgctagtttggattagggtagtgaggatagtgttggaggagaaggaatagattggaaagagaaggtaatctactggattggttggtaaaggggaagacagggacagctctcggatcctggatcagacatttgggtgaatgttggtgccatttggttaacggagagttgggaagatcaagggtgggtgttcatttcaggtgagggatactgattattatttggaacacttgcagtttggggtgatttggggtatctgggtggagatgttccttccataagtctttgggcttgataagattgaatgtgttctggaatggaaaacaattgggagacctgggtggggtgtggctttgagtgctcacagggagcatttagcgcttagtgatggaaaggaggacctcacttaata

SEQ ID NO: 911335 - DNA, 568 bp, Homo sapiens
tttatggcacaaggaatctctggtggtgggggtgggtgttaagagtgattggatttacattttagtgaaccaccttagctgccactttaagaatgtataagatccaaggcatgctagctaattgtttataacaatcataatcatccaggtaagaggtggtgctagtttggattagggtagtgaggatagtgttggaggagaaggaatagattggaaagagaaggtaatctactggattggttggtaaaggggaagacagggacagctctcggatcctggatcagacatttgggtgaatgttggtgccatttggttaacggagagttgggaagatcaagggtgggtgttcatttcaggtgagggatactgattattatttggaacacttgcagtttggggtgatttggggtatctgggtggagatgttccttccataagtctttgggcttgataagattgaatgtgttctggaatggaaaayaattgggagacctgggtggggtgtggctttgagtgctcacagggagcatttagcgcttagtgatggaaaggaggacctcacttaata

SEQ ID NO: 911336 - DNA, 463 bp, Homo sapiens
cgtcttatttattgattactgtaaattaagatataaatggctatttgmataatttatacctgtgggaattaactggagtatttgttatttgactgttttctattaaggaatattaggcttggtgctatgatgaatgatcttgtaaaatcatgtgtattcttaagaaaatttttgaatataaatttcttgaactgacgatttcgttgatgatacttattttcatgtgtgtttgtggttttgacaaccagaaattacactatctttccaacaaatagtcccaacaaataatacttttgccagggccgaagcgaagccaattggctttagagtggtagagattgtagagaatatgcccttttttaaactgcattaacttgcctagagcctttgtaatgctccaagtagtagtaataatagtagtagtagctatgcagctctggagtgggactgcctaggtctgaat

SEQ ID NO: 911337 - DNA, 584 bp, Homo sapiens
tgcataaatcaaatcaaaatatttgtgkttttgcatggattttaacatttgtgttttaaatctattttctgagtagattttatgaacctaatgaaaaaattgaaagcaattcctccagcataacttctgagtgatactactgtacaggtaaccctgtatgaaagggaaagagtttgatacaatggacactgggaggctttacctggaagtgcccaaaagataccattagttggtaatttgtaactggctcatatgttaaacattgtagggttgagagtctagatgacatgtgaacaacaaaatctccatttttagtgctgatacttttatgtcattcagacaagagctggtaggtttagacatttatcctgaaataatgagaagtttttcatttctgaattagttagaaagttggcactaaaactgccccaaggcacggtctgtgaatctaagtgtatccacaccaagccatctttcatttaagtctgtttaataaatcatcttcttaactggtgctgggggcataaagttcatgcctctggcacaacagaaaagaagaaaaagatcaggagcatagaagtttt

SEQ ID NO: 911338 - DNA, 636 bp, Homo sapiens
gctccccaacaccctgatgtcctcctccttcctcccattgtccatggatggagaagggaccaacggttcctccggggctgagctctcgtctcctggtgctcctgcttccctaccccccmacccccaggccagggctgcagcctgaaggggcactgggtccctgcgccctgtgagatgggcgctgccacccttgctctgcaggtgacgaatggaggcgaagtgaattgcagtgtcatatggcatttgagtcctagacagcgcccaggactggtccgaccaccgctagatgccaccaggggggctctgcctgtcccccaccccagcagacagcaggcccagccccatccaagctaggtggagacccctggtccataccctcctgggcttccctctgagttgtatccaacccacccagcaacagctgctctcagcaagcctcctggcctcacctgcactctcttccctcctctcctgcctcttgccttcctttttttgtgagacagatcttgctctctcgcccaggctggagtgctgtggcgcaagctcagctccctgcaacctctgcctcctgggttccaacaaatctcctgcctcagcctcccaagtagctgggattacaggcacccatcaccacgc

SEQ ID NO: 911339 - DNA, 621 bp, Homo sapiens
aacctctggaatgcttctgtttctgggcagggtggtgaatccgactctcctataattcaggacacgcataagcacttcgtgctgtagtagatgctgaatctgaggtatcaaacacacacaggataccagcaatggatggcaggggagagtgttccttttgttcttaactagtttagggtgttctcaaataaatacagtagtccccacttatctgagggggatacattcaaagacccccagcagatgcctgaaacggtggacagtgctgaaccttatatatattttttcctacacatacatacctatgataaagtttaatttataaattaggcacagtaagagattaacaataataacaacattaagtaaaatgagttacttgaatgcaagcactgcaataccataacagtcaaactgattatagagaaggctactaagtgactcatgggcgaggagcatagacagtgtggagacattgggcaaggggagaattcacatcctgggtgggacagagcaggacratgcaagattccatcccactactcagaatggcatgctgcttaagacttttagattgtttatttctggaatttttcatttaatgtttttggaccatggttg

SEQ ID NO: 911340 - DNA, 680 bp, Homo sapiens
gcataaatattgaatagaaagaagtaatattgctgtwtttaaagaagatatgatcacttacgtataaaattttagttttagaaaatctaaaaaacaatttttagaataaacaaatttagaaagtttataagatacaaggttaatatataaaaatcaacagtattcttatactccagcaacaaaaaactggaaagtgaaataaaaaaatgtatacttccatttataataatgccaaaaacataaaatacgtagaaataaattccagacttcatatcaaaatgcaaaggccctagactggccaaagcaattttaagagggaacaaagatggaaaacgtatcctaccaaatttcaagaacgctataaagttacagtgatcaagacagtttggtattgcttaaaagataaacttataaataagtggaacagaataataggaagtcaagaaatagacacatatgtgtacaactatttcttaaggacgctaagacaattcaatggggaaaagaaggctttttaacaaatggtgctggaataaatgaatattccctatggaaaaaaataaacatatattatataaaaatgtacttgaaatggatcataaacctaaatataaaacctaaaatgaaaatttttaaaagaaaatagaggaaaaaatctatgatcttgggacagacaaagg

SEQ ID NO: 911341 - DNA, 580 bp, Homo sapiens
tcataaaagtcttaagttgaacttttcrgtatcttttgacaattcatcttcatatatatctcaacaccaagactattaatctcagttagcttattatctcaccaactcttcctattaaaaagttttgatgttttacatattgcctaaaattcacatcagttgtttataaaagtggtacatatgcatctttcagatgcataagactaagtgccccaatgtatgaaaattcagcagggagttctagagtttgttcaggaatgcctttggccaactgactctgatgtctctctttcctgcagatctgagttcaagttcaaaatagagacacaggacttagaacacagaaatctaatggctgagggtttaacattcttttcattctattatcaaatgtacaaaaatagctcttaataatgtgcatgtactttaatgccactcaactatacacttataaatggttaaaatagtaaattttatattatacatattttaccacagtaaaaaaaaaggaagtgatgtgctcttttggagagaaaaaggacaaaatatatttattatttttttccatttccaggcaagc

SEQ ID NO: 911342 - DNA, 612 bp, Homo sapiens
tctgcgtcgctcacgctgggagctgtagacgggagctgttcctattcagccatcttggctcctccccacttttttccagaaaagatacttgatataatctctatctaatcttcttaaatttggtaagacttgttttgtaagctagcatgtgatctatactgcaaaatgttctatatgcagtaggggagaatgtgtattctgcagctgtttgatggaatgttttgtaaaggtctgttagatcaatttggtctagagtgcagtttattttttaccttgttttattttattttttttttagagtgcagtgtaaatctgatgttcctttgttgattttctgtctgtatgatatgtccgttgttgaaagtggggtgttgaagcccccagctactattgtattgcagccaatctctcccttttgatcaaaagcatttgccttatgtagttaggttcttcagttttgggtacatatatatattcataattgttatattctctcattgaattgacttctttattattatataatkatataaagactttcatctctttttacagtttttgacttaaagtccattttatgtcgtgtaagtatagcttcattagttctctttt

SEQ ID NO: 911343 - DNA, 644 bp, Homo sapiens
gtagtcccagctacttgggaggctgaggcaggagaatcactttatcccagggaggcggagcttgcagtgagccgagatcacaccactgcactccagcctgggtggacagagcaatactctgtctcaaaaaaaaaaaattaaataaaataaagtaaggaaaacagagagaattgatagaaagagggttatgcttttagatgggatgcctgagaaggtctaggggagagggcatagaggtgtgaaatgcagaagagcattctggatagaagatacaaagaccccgaggcagcagacttcatggcatgctccagtggccttgagggccagtgatatggtttggctgtgtccccacccaaatctcatcttgaattgtagctcccacaattcccatgtgttgtgggagggacctggtgggaggtaattgaatcacaggggtgggtctttcccatgctgctctcataatggtgaataaatctcaggagatttgatggttttgtaaagggaagtttccctgcacaagttctcttctcttgcctgatgccatgtgagrtgtgccttttaccttccaccatgattgtgaggtctccccagccacgtggaactgtgagtctattaaacctctttcataaattgcccagtctgag

SEQ ID NO: 911344 - DNA, 565 bp, Homo sapiens
tggccatggcagagccaggcaccctggctcaaggcagagccctcacaggctctgggcgggctggcacttcaaggcttgcctggtgctgtgggacccacctccaagttcactcacatggttattggcagccttaggtcctcactgcctgctggagagtcatagaccagtccctccccaggacagcttacagcatgacagctggcttccattagagcaattgagggggagaggctgatggagcgcccgagacagaaggcatcgtctttctgtgaccttatcttggaagtgatatccatcaactttttctacattttattcattagaagcaagtcacggggttcaacctgcattcagaagaggggcattctccaaggaggcagggatcactggagtcatcttagaggctgcccaccagtgtccatacacacatcccctatacacgtcccatgcacacacacatgcccacacacacacaracacccctcacatgctcacatacacacatgcacacactcacattcacaccacacataccataccacacactacagacagactcacacca

SEQ ID NO: 911345 - DNA, 565 bp, Homo sapiens
tggccatggcagagccaggcaccctggctcaaggcagagccctcacaggctctgggcgggctggcacttcaaggcttgcctggtgctgtgggacccacctccaagttcactcacatggttattggcagccttaggtcctcactgcctgctggagagtcatagaccagtccctccccaggacagcttacagcatgacagctggcttccattagagcaattgagggggagaggctgatggagcgcccgagacagaaggcatcgtctttctgtgaccttatcttggaagtgatatccatcaactttttctacattttattcattagaagcaagtcacggggttcaacctgcattcagaagaggggcattctccaaggaggcagggatcactggagtcatcttagaggctgcccaccagtgtccatacacacatcccctatacacgtcccatgcacacacacatgcccacacacacacagacacccctcacatgctcacatacacasatgcacacactcacattcacaccacacataccataccacacactacagacagactcacacca

SEQ ID NO: 911346 - DNA, 573 bp, Homo sapiens
agaaagcaccaatttccaatttccttaaggccttatattgcagttggtaggactgactttggaagtgtacctactaggatgaccatcagtataggatccactggcccctgttttaggctacaacagtagctatggccaccctagctgtcatttcagttccttgatactcagggaaacttgggcatggttatgggaggcctgcgaatggcccagagttagtagggaacaagatgaacacaaaattctgtctagttgaaaccatggctacaatttggaaatgagtagggggaaagaatcaacgtgggctggaccctctcctgtgaattaaattggcccagagtagtaagccgtgcatacacctcaatttccttcctttttttccatcggattgatatttttggaatctggccagggtgagggataatgtttgcgtagagtcccacttctctcttttctccattgtgccatgcatgctatagaataagagccctttttagataacagagtctaattaaattgtcttgctgattttttwaaaaatggataccttagttattaactaccttcaactaa

SEQ ID NO: 911347 - DNA, 605 bp, Homo sapiens
tagttctaccccattttaccctcttggaactcactctttttgttctacagcagcactgttattagagctttctgtgatgatggaaatgttatatatctkcactgtccaatgtggtagtcactagccacgtgtggcagtcaaacatttgaaacgtagctagtgtgactgaagaactgaattttaaatcttacttaattttaaagaataaatttagatagccacgtgtggctagagtcttctgtattaggcagcacagattgagggctaccattgctaattccttgaatggtctacctggaatgccaatttaagtgtggaaggagggaatggacacagacatttacagtataactgaattgtctgttgttctcatataaaattccctttataagcattttgattgacttggtgtggaaatgatgttaccatgctgattccttgcttttgggttgccttttttgagaggtactctttgggtaccactttaaaacctgctttttttacataaattttttcatgtcagtaaacacacttctgtctcattgtttttaatgactgtagagtgttctattttatagactactttatgactttatactacctta

SEQ ID NO: 911348 - DNA, 687 bp, Homo sapiens
ggcaaagcttctggtgaacagcaggctgttagaagttttgggagagtaaaaaattatacatgaattttagattatgcaggggtctatattcttaaacctcacattgatcaagggtcaactccacttataaaagaaaaaaaaaatagctgtaaaacagccttgagcaggtccttcaggaggtattccagaagaaggcattgtcatcatagaagataacagctccacccaaattactgcccctgaagaccttccagaggaacaagatatggagatggaagacaatgatattgatgaccctttgtgtacaccctggataatgtgtgtgtttaagtcttggtttttaacaaaagagttttaaatgtttaaaaaaataaattataggtcgggcacagtggctcacaactgtaatcccagcactttgggaggccaaggcaggcggattgcttgagcccaggagtttgagaccagcctgggcaatatggcgaaaccgtatctctaccaaaaaagaaaaataaaatcagccaggcatggtggctcgcagctgtagtcccagcttcctgggaagctgaggtggaaggatcacttgagcccagctgagactgcattgggcygtgattgcaccaccgcactccagcctgggcaacagatgagaccctgttccaaaaaataaaaataaaaaaattgaaa

SEQ ID NO: 911349 - DNA, 587 bp, Homo sapiens
ggaagcaagatatgaaaatgaaattcaagactagtgttgagtcatgagtaacaagtgcgttagaagtgcaggatttgatggtcaggatgagttcaggattgaaaatctctggtggtacaactaggaattcatccttgtatagatggcttatcccaatgcttttaagaaaatccttccttttggatatatgtggtcctctgtcttcctgtcctgaaaataaagccaactagatggagagtgaaagcccaagctacaggactcttcctctaagcatgaggaaactgatgttctgaaaaagtcactttagtaattgacacctagattgctgtggatggatgaagaggaaataaagtagaagtttgtctgctaaatgctaggaatcctagcacagtaatctaggtttgagggaataaagacctatacttcagctccttctttcagtttaatcttttccatgtattccaggggacactgttgtccagtagtttttcttaacytgcttactgttcatggtccttaaggggctcacagtattctctatacttcccacactcccgttcagcaacacttcgaatgtcctatgttct

SEQ ID NO: 911350 - DNA, 606 bp, Homo sapiens
gccatgtggaactgcgagtccattaagcctctttttctttataaattacccagtctcaggtgtgtctttattggcagcatgaaaatggactaatacagaacggataaagaaaatgtggtacatatacacartggagtactattcagcctgagaccctgtcatctgcagcaacacggatggaactggagatcattatgtttagtgaaataagccaggcacagaaagacagacattgcatgttctcacttatctgtgggatctaagttaaaacaattgaactcatggagatagagagtagaaaaatgattaccagaggttaggacaggtagttgcggggggagggcacagtggtgaaggggaggtggggatagttaatgagtaccaaaaaatcagaaaaaaatgactaaaacctagtatttgatattggctatagtcaataataatttaattatacattttaaaataactaaaagtataattggattgtttttaacacaaagtataaatgcttcaggggagggacacccacaatgtgattatttcacattgcatgcctgtatcaaaacacctcatgtactccataaatatatacatctactatgtacc

SEQ ID NO: 911351 - DNA, 592 bp, Homo sapiens
ctttctcattttgacccttcaccaagttacatttgctgaattggttttgccacgttaccatcaaatcgcacaaagggaggtatatgaagcagcaaatgaacctygtgattgggtttactgtgaagatgccaccagagcatcacacaatgtgtttcagggtggacaatttctctccggtcgtgatcacaggaatggttgtactcctgggaaaatggcttatcgaaaagaatcagaacactgatcactctccctcttttcatctgctagaaagttcacaggccaatttactcaggtctagcaaatatatgggattgcatagcatatgttctgtgtaaatataccccacctttatcttagttttccagcctaattttttcctttataatgcattcttcactttttaagtattattgtattgcatgaatttcagtaattagcttaataaggcaggatacaaataaaataatacaagtaaaatatacactttatgctcatgtttctgtacttaagattgttggcaatttattaatgaaaagtgatttgccatagtgttcccaaacagagcatgatgactcccaggtgtggaaagagt

SEQ ID NO: 911352 - DNA, 698 bp, Homo sapiens
ctcaaaaatgtattttctgtattggctctttccctttaatatagaagtatactcaccctttttgttgaatcttggaataaaaggctttctttaccatatgtctccctttgactactactacatctctcttctcagccaaatacttgggaagagaagccctcagtttgtgtcattgttttctcacctccagttcaatactttacccacttcctgacatccagctcactcacacacacacacaagcccaatcactaagttatcatagctgatttgtagctttcctgccctcctggcaacatttgactctgtgcattgagataatacacgttgagtacctattgaccaggcactgtgttaggtgctgctgttatagaaatgaaaagcagacatcatctcctttctaatgacttacagaggcagccattcctgatttatatgcaggtgtcttgactcccagtgctcacatttgcaagcttcacttaatgccatggaaatcaccctattctccgtatttttttcttcccaattcttcttactatacagagcttctcaaggcaatcacttccatgcccatggcttcagttgcattctctattctctgaggacaatagaattttaaatgttttgtttcatgtatyagttttattttatacaagatgcctcatttgctgtaaccatagattcagagttgctccatg

SEQ ID NO: 911353 - DNA, 596 bp, Homo sapiens
attcttattctctaggtcctccctgcttcatgggtgcaagctgctttggcacctatgggcagcacctgccaaggttgccaggactcagggatccaaggatggaagagggaaagaggacactcttctttctctcccacacataccccgggtatatctgctaggaagagaggggaaccaggcacgcctgctcccttctttctaaatgggtagccattcatcttcagtttgtgaccctttcgaatgcatcctgaaacactgggactcctttgataaaaacaacttttcctttctcctcctctgtcctctccatactgtgggacactttcctcagatgcattctccgaactggaaaaagttaatttcccaaaccttaaactggttggcttagcattgggctcaggggaagggaacccagaagcccaatatgctggcaaaaagttcaagttttgttgttgtcgttgttgttttaccagttgggcttttggcttccctctccctgtgcaaactggtgaaaggccttgggactttggagctgyccttacccctcctcttgttttgttttgatacatgttttctaatgactctgatgccaaaag

SEQ ID NO: 911354 - DNA, 634 bp, Homo sapiens
caatattaatattattcataataaaatctgctgaagtgagcacccaagtcccaaacaatctgaatgaaccattctaccatacccagccaatattaatattattcataataaaatcttaataaatgaaaaatcagtaaataaaaaatgaatataaaatacctaaacataaatttgtcctaaaactctagttgagggttttaaacatatcaagagtaactgttttgagtcaccttaaagcattgcaatttgtacaaccaaaaggaaatatatcctaaggaaaaaatgaattgccaaacgaggaccctaaaactgtttgttgttggcattgttcattttcaattcatagatgggtattataggatgaaggagatgaggagcaataatactttaattctgtcattcctggtgtcattgaggacctaggattcttagtatagaagaaaggggatacagatagaagttacaaagtaacaaacactttatagtcctcaatttggataggacaagtcatcatggattcatgatatgctttaactctcaaaaaaaragagaacctagaaggaaggagaactcctgtgtgtattcacagaaaaagccatgaatcaaggaccaccttagtaaggcagcatttctc

SEQ ID NO: 911355 - DNA, 628 bp, Homo sapiens
ttgcttttcttcatgaaatctgcagagctgccraaagtaccttgatgttttctgaaagcagagccaatgaccacactccagggactgagttctcaaatgtatggtatttgctaaggacgggtgtttacctgcagatagtgtgatggggttcagagccaaggaacactagtttctgtgccctgtttctatgttaaaaagacatttcgttcaactggataacagggcaattctggtggagaaaaggtctattctgccataggatggggcagcagcctgcagttcagaacactggtgtgtgtctggagatttccaggaactccagctgctggtagaggcccagaaggtagggggcatttgtcttcagatcaaaggtgagggttctgctcaccccattatcttggccatgtgtggacccttaagtttgcaggattggatgtcctgactgactgtgccataggagggtataagagactgagggcaacacaactatagactgtggggatgatgttcatagggagcgtccctgctgcctgtggcaagagtaaagagtgaaatgcttggggctgggaagaggcaacaaaagtctacataatctattgtcctcagctcatctcccatcctagtccag

SEQ ID NO: 911356 - DNA, 645 bp, Homo sapiens
gtcattaagaaaagacaaaggctgaagactcagaaggatattaactaaggaaagcaaattggaatcgggatacaatttaagcaaagcctggcaccttttccatttyctgcagtgagtcctgctgtatctgggaggttggcacacggagagtggcaccacatagtgtccagcacatcacaatatttgagtatacttacagaataatatagtaatatataatagaatgataataacatctgctgtgtatttaacgcatactatgtgtcaggcatgtactaaagcactagacatatctaatgtgcatatatatacacatatatatgacagatataaaaatctgtatatttatgtgggtataaaaccaatatttatatatagaaatcttatgaatgtgtaaatacacacataagtatatgcacacatacatataatctcatttaatccttaaaatcactccgaggcaaatggcatcctcattttgcaggtaagaaaaataggagtttagaaggttaagtaactttgatacggtcacagtcacagcaattgcacctagatctgtcccatctgtttcagaacctgggctcttacacatcaccaaagaaggttctaatgacaactgaagaccaacaaaggaaaatgagagag

SEQ ID NO: 911357 - DNA, 619 bp, Homo sapiens
agtctgaacttccttatctgtcaaatgaagaggacacttgctcccctgccagcaggacagctttaaaggttgacagtaataaccagggatagagaggctagcgtgcatgaggcactattctaagtgccctgcaaatgtccattaattcgatccttctcagaactcttttaggtaaatacctttatccccattgcacatttgagaaaactgagatacaaagaggttaagtaattggtcaaaagctcatgcaagctaataactgaacctagtctagccccagaatccatgtttttaatcacttctttatcctgcctccccaatatctcctaaaggtcaaacaagaatacatctgaaaatgcttttcaaaccattaaaagatacattaataataatcattataataattagtgtacctcccagcacccccaatcctcttggtaactgccctgattcacccttggagggaaccattcccagctatcatcagttcatgcttcaccttctgcagaagatgtgctgacctcaggccctggagtgaagcacatgatctggctatccaatmggaataggccaatatacctggccacagccactggtccagcatgaggcacatgactca

SEQ ID NO: 911358 - DNA, 596 bp, Homo sapiens
tgataaatattatgtaagaagtaaacaaaataaagtcagttattccttctgaaggaaacaataattttaagaaaaaaattattttatyaactatctcaatgtaaacatatttcttagctcaaaaatataacccatattgtttctgcttctttttaaattatttttaattgacaaataaaaattgtacatgtttatcacgtataacatgttttgaaatacatatacattgtggaatagctaaatggaactaactaacatatgcattacctcacacatcctgttttgtggtaagaatacttcaaatctactcttttatcaattttcaagcatataatacatggttatttactggagtcatcatgaagtacaatagatctcttgtccatagtcattttaaagaaaataatcccatgtgcagcaaaggagactaggcaacttgtcctataccacttcctcacacccttcacccccaaattccacagctggttcaactgggataggttccagtgcaaagtaatctgaaggctagtcaggaactgtagtgactccctcaaaatgaagagatgggatggatcaattcacagtctcaggaatcc

SEQ ID NO: 911359 - DNA, 656 bp, Homo sapiens
agcagccagttcagcttgcgactcaaacaactgcacacgggtttttcctggagataaccagtacactctggtatacggtrgaagggcttatgtgtccttcccattttgtcacacagaatattaaaaagacatcactcaagagttgagatttaataaaaacagtaattgttactgcttcatacaggatattctgaagtgaaattggcattctgttctattgtaagcatgtgctggtgaagaactagcagtttggtaccactatcttgtttcgtgctgaggtgccagcagttttccccaccattacatttcactagcagtgcacgtcaatactgcgaaaaagacagacagcatcttggtattactgtgaaaatagttttaaccttgcattccctgataagatcttgcgggcccccaggaacccacagaccacactttgagaactgtggcactagcttgccatcttctgtccaggccaccaccatctctctcccgggcttgcaaaaaagcctccttgatggtctctatgcttttacttttgcctctgtagaagcccttctccacagagcagccagataatcttttaaaaatgtatgtcagatcacatcgctctcctgcttaaaactcccacttcagatgtcccattgctcatagaatag

SEQ ID NO: 911360 - DNA, 636 bp, Homo sapiens
atatccaaattgttgtcccagccattgccttcgtcccttgctgtgcagagcatttgtgaaattatgtcattcactaatttgtttatgttctctcatctccatgagtcaaagctccatgagccaaaggatggggatttggtcttaggagaccaacactcagaccatttcctggtacataataggtgctcaacaaatattgaacaagctaacaaaatgagaaaccgtaactggcaaaaagcttgatttgtatttgaggtattctcaggagtcagggaaagggagagggaatatgcttcaaagccagatgcagtggaactatggctgggggaatcattgaaacagattgggtcatagacatgcaaagtctaatgctgtgattgaatgatggctgtcccttcagtcttcagatgtcttgtgtggttctttgggcttctccaggaaagggaatgagacaataaggcacattgttttcctcccctttaatccacagcgcatcttgtcatagtaacaatggccccagtcttgtctaccwtcgaaggggaaatctcagcactggtggacactcagccttgttccttgtagcctgaacacctggaatttcaaaagcagcatgctagtgtaaaacttgcaagaagc

SEQ ID NO: 911361 - DNA, 595 bp, Homo sapiens
aagtaggttgtatttagctgtctcatagtgrgtgatccctgggaggtggttgtttaaggcagatatctgaactgaccattttgaggcactgggaggaggagaagcacgagaaactgtgtcaagcaatggtgactgagccctgcttctggagtgagaaaattaaacttctgttcaaagtgaatgccaaggcaaaaaaaaaaaaaaaaaaaaaaaaaaacaaaaaacgaaaacaacaacaacaacaacaaaaaactgaattcattgcaaatgcatccaaagtttaaaaatgactgaaaataggaaagaaaacattcagtggcagtgaaccagttgccatgttcctgctgcaaagctttgtttgtgagagcaagtgaggttttgggaaaagttcatggaagagagaacagtggagatagatggaggcctaaaattgttccaaagccacttccagagagagaatccacataagtgagaaagccacacaactgtcctgctgggctgatggcagcattgactatgatggcaggggtgtggtggtgggggtgtggtggggtggggttacttgggagagggtagaagtgagaagacaactttg

SEQ ID NO: 911362 - DNA, 630 bp, Homo sapiens
atggaatactgtactattcagcaatttttaaagttatgaactctgaatcatgagacaacatggttgaatcacacaaatgttagtttgagcaaartggttacatactactatatgatactattgtaatgcagttctacaacaggcaaaacaataatgttagtgattgtgctggaatttaaactggcagttgctggggttcgatgagggacattgactagaaaacgaggtttctgggtgataaaaacattacttgtcatcattggtgtggtcattacagactgcatatattttcatactcactaatatccttcaaatttatgcatttcattctatataacataacctaaagtataaaaaaagtatgatctataaatctgcattttgtaaaatacaaagcattttgtttgaagtattttgttcttaagatgtcgattacctcagtatcactttaaaggaaatcattaaaagattaatatggaatgatccttaattcaccaagtgagatcttatctcactgtgaggtgattaggaattgataagctcatggaagcaatccacagaattctacattataatgagtaaagttataatctacttaagaattaataatgagttcaaaattcacacatt

SEQ ID NO: 911363 - DNA, 575 bp, Homo sapiens
tcctctggaaagccaaacttcactgagttccatgcacttggaagatcatttggaagagagaagggcctggaggttattccatatcttgttattgttatttctcctcactgtttactgtatctcctcttattataacatttatttactaacttctgcaaaatgaaaccagtaataatggctgggtttctggtaattcagtagtggagaaaatcaggataaagtacaaaataatgatacattaagtttttctttattttgatgtacttttcttgggttaacaaccacaaacattatttgttttgaagaaaattaaggaataaagggaataattcaataatatcaaaatagtatagcaatttgaaatttgagaaagcatgattttctccccattcatcttagggtgatgaaatgaagaaattgggaatacagcctattcctatgatggacaragacaagaaggatgaagtcccccaaggccaggtatgaattattaaagtaaattgtaattgctaaagccaaatagtttaaggtgggcataaaatcatacataaatggaaagcatgtcatcatatatt

SEQ ID NO: 911364 - DNA, 575 bp, Homo sapiens
tcctctggaaagccaaacttcactgagttccatgcacttggaagatcatttggaagagagaagggcctggaggttattccatatcttgttattgttatttctcctcactgtttactgtatctcctcttattataacatttatttactaacttctgcaaaatgaaaccagtaataatggctgggtttctggtaattcagtagtggagaaaatcaggataaagtacaaaataatgatacattaagtttttctttattttgatgtacttttcttgggttaacaaccacaaacattatttgttttgaagaaaattaaggaataaagggaataattcaataatatcaaaatagtatagcaatttgaaatttgagaaagcatgattttctccccattcatcttagggtgatgaaatgaagaaattgggaatacagcctattcctatgatggacagaracaagaaggatgaagtcccccaaggccaggtatgaattattaaagtaaattgtaattgctaaagccaaatagtttaaggtgggcataaaatcatacataaatggaaagcatgtcatcatatatt

SEQ ID NO: 911365 - DNA, 681 bp, Homo sapiens
gctgttgtactatttacttcaakgcaactgtagcacagctgtctgaagaatgtacatgctttgatgagctcgaggatctcttagaagctttttctaagaaataaatgagtgcagtatctcaagaagataaacatccagctctatgaaaggaggaagaaaaaataaatgtcttcagggctggcctcacagatcccatttctaatgggatttcttctatgcctattactgtgtagactgaatgtttgtgtcccctccccccacccccaaattcacatgttgaaattctattgccagtatgatggtattaagaggtaggacctttggtgggtgattaggtcattagggctaatctgggactagtgcccctataaaaaagaccctggagagctccctcactcctttcgtcatgtaaggactcagtggtaagatggctgttcatgaaccagaaagtgagccctcaccggacatcaaatctgttagcaccttgatcttgaacttcccagcgtctagaactgtgagtaataaatgtatgttgtatataagtcactcagtctacggaattttgttatagtagcccaaacaacacctatctaaagttctgtttgtcctcagctcacctagcacatgaaatgaccacaacataatatggctattctggatttgtgctcagttctttatttt

SEQ ID NO: 911366 - DNA, 681 bp, Homo sapiens
gctgttgtactatttacttcaagrcaactgtagcacagctgtctgaagaatgtacatgctttgatgagctcgaggatctcttagaagctttttctaagaaataaatgagtgcagtatctcaagaagataaacatccagctctatgaaaggaggaagaaaaaataaatgtcttcagggctggcctcacagatcccatttctaatgggatttcttctatgcctattactgtgtagactgaatgtttgtgtcccctccccccacccccaaattcacatgttgaaattctattgccagtatgatggtattaagaggtaggacctttggtgggtgattaggtcattagggctaatctgggactagtgcccctataaaaaagaccctggagagctccctcactcctttcgtcatgtaaggactcagtggtaagatggctgttcatgaaccagaaagtgagccctcaccggacatcaaatctgttagcaccttgatcttgaacttcccagcgtctagaactgtgagtaataaatgtatgttgtatataagtcactcagtctacggaattttgttatagtagcccaaacaacacctatctaaagttctgtttgtcctcagctcacctagcacatgaaatgaccacaacataatatggctattctggatttgtgctcagttctttatttt

SEQ ID NO: 911367 - DNA, 584 bp, Homo sapiens
ctcaggcactcaataccagcccctgaaagtatccatgggggatgtaccctgcagaaccacaagggtggagctgcccaaggccttgggagcccacccattgcatcaatgtgcctgggtgtgagactcggagtgaaaggagattatagctttaagatttaatgagcaccctgccgggttttggacttgcatggggtatggtccctttgttttggccaatttctcccatttagaacaggaatatttacccaatgcctgtacccccattgtatcttggaaggaaaaactttttttttattttacaggctcacaggcagcagggacttgccttgtctcaaatgagactttggacttgggcttttgggttaatgctggaatgagttaagactttgggagactgttgggaagacatgattatgttttgagatgtgagaaggacatgatacttgggagaggcctggggcagaatgatatggtttggctttgtgcccctactcaaatctcatctcaaattgtaatccccacttatcaagggagggacttggtgaraagtgattggatcatgggtgcagtttcccccatgcagt

SEQ ID NO: 911368 - DNA, 542 bp, Homo sapiens
accccaggaaaagtcccaaattaccccactccttwaaaaagaaaaaaaaaaaaggcaataaatgtcttttagttccaatcctaattaaccctctctatagtgtttggtactattcatcttcttgaacctctattatttcttggtctctaaaacacccccgtcttctggttttcttccttttctttcaatacacatccccacccccttcctctactgacccaggcagtttttgttttttcctcactggcttctttttttttttttcttttttgagattggggagtctcgctctgttgccaggctggaatgcagtggcaggatctcggctcactgcaacctctgcctcctaggttcaagcgattctcctgcctcagcctcccaagcagctgggaccacaggcacgcgccaccaagcccagctaatttttgtacttttagtagagacggggtttcaccatgttggccaggatggtctcgatcttttggccttgagatccacctccctcagcctcccaaagtgctgggattacaggtgtgagccac

SEQ ID NO: 911369 - DNA, 542 bp, Homo sapiens
accccaggaaaagtcccaaattaccccactcctttaaaaagaaaaaaaaaaaaggcaataaatgtcttttagttccaatcctaattaaccctctctatagtgtttggtactattcatcttcttgaacctctattatttcttggtctctaaaacacccccgtcttctggttttcttccttttctttcaatacacatccccacccccttcctctactgacccaggcagtttttgttttttcctcactggcttctttttttttttttcttttttgagattggggagtctcgctctgttgccaggctggaatgcagtggcaggatctcggctcactgcaacctctgcctcctaggttcaagcgattctcctgcctcagcctcccaagcagctgggaccacaggcacgcgccaycaagcccagctaatttttgtacttttagtagagacggggtttcaccatgttggccaggatggtctcgatcttttggccttgagatccacctccctcagcctcccaaagtgctgggattacaggtgtgagccac

SEQ ID NO: 911370 - DNA, 643 bp, Homo sapiens
tctacataccatggatggctggataagtcttccaaggctgccataasaaaacacaaactgggtggcttaagcaaaagaaattaatttcctcctagttctagaggatgaaagtccaagaacaacgtgctagcagagttaatttattctgaagcctctttccatggtttgcagatggctcctttcttgctgtgtcctcatggggacttttctctgtgtgtacacatccctagtgttccttcttcctctacttataaggacacccaccctttcatattggggcctcaactttgtgacctctctaaaggctgttaaaataaaaacttcagctgaattaaatttaaaggagtttaattaagcaatgaatgattagcaaattgggcagcccccagaatcccagcagattcagggggactccagtacagccaagtggtagaagatttacggacagcaaaaggaaagtgagttacagaaaacagagatgaggtacagaaacaactgggttgattacagctctgcgtttgccttattcgaacagggttcgagcagttggctacatgtgattggccaaaactcagcgattggcacaggtgtgggctatattcggtttacatctccacttgttacagttcacggtgtacagaaa

SEQ ID NO: 911371 - DNA, 642 bp, Homo sapiens
aaagatgcttcctccatgttattgtaatgagagggctctaggttaaccacttgggtataacaataacaatagtagaaataaacaattttagcaacaatgtaatgggaagtatcaagaaataactaccataatccyttattacattataattatttaaaaggaaaagagagagaatagaaaaaaaaggaaaggagaggaaaaggaaaactaaaggaaaggacaagacataaatatttaatgagaagcaaaacattataatgtttcattttattgtaaacctccacagtctgttataaaccccaaattagatacttatattgtgtgtgtgtgtatgtgtgtgtgtgtgttactggttactgacctaaattcacactgacctaatttctcaccagcatttctatgttactaatgtgataaacattcctaacatatcattattctatgattaatctgaaagactaaaagaataatatttaaaagtatagtgactagctaggagcattataattatttaagacaacaatttattggagtttcaatagcactatcttttgcatagatgatttcatgcaaaacattagcagtgcttcaagatatttattataggtagaattatttcagaatgacatataaaatcatata

SEQ ID NO: 911372 - DNA, 655 bp, Homo sapiens
taagagaattcattaccactaggcctggtttattaaaaagaaatgcttatgggagttcttcaagcataaacaaaagggtgataattactataatgaatacatatgaaaatataaaactcactggttgaggtaaatacataggcaaatccagaatgctccaatactgtaatcatacatatttcttgtatgaaggctaaaagttaaaatggtaaaaaataactaaagctacaataagttgttaagaaatacacagtgtaaaaagatgtaaaatatgacatcaaagatataaattgtgggatggtagggtaaaagtctaaagtttttgtattcaacagaattattagcttaaaacagtagatgatagctataatgcaagatgttttatgtaagcatcatggtaaacacaaaacaaaacactgcagcatatatacaaacaattaaaaaaagaatcaaagtttagcactacagaaaactactgaaacccaaaggcagttaaaaagagaggaagaaaggaacaaaagagctataaaacaaccagaaaacaaataacaatatagcagtaataagttcttacctatcaataggcactttgaatgtamatggattaaattctctaaacctgggcaacatagcaaaaccctgtctctactaaaaa

SEQ ID NO: 911373 - DNA, 501 bp, Homo sapiens
tggattcactcaacaaccgtgtgtggatggggccacccaatatgtgccaggagttgaggacacgcagggttatgatgatgaaatagataaggggcccacactcacggaccctgcaggacagtggagctgtggacccagcatgcgagtaaagacccagtgagctcaccagacagatcatttaaatcaggtgataggacagtgaagggcgggggctgcattagttttggtggcaagagaaggattatcttctgagaggatccacaaagtaaagagggccggtatgactgggtagagtgaggaccgtggttgaggcagaagatggagctctttattgagctctagggagcccgtcggatgggacctacggggcttgagggagcccatcggatgggacctacggggcttgagggagcccatcggatgggacctacggggcttgagggagcccatmggatgggacctacggggcttgagggagcccataggatgggacctacgggg

SEQ ID NO: 911374 - DNA, 595 bp, Homo sapiens
attcacagtagaatgaaaaagtccaaaaaacactaatgctccacctctcctgttgaccaaacccaaggaattccccacttcagcactccggaacygggttttgtctgtgcttagctaggattacttgctggagaggggggtccctgtctgtccccacaacgcctgccttcacccctacctcaaccccacccccaccttttcctcagcatgtccaatctctacctatgcttcaacacttattagtaacaatgctgggattaggggactcacccactaattctacccacctccagtgcaatgtgtagaggagtcacagcagaataaacagagacaaaggaaaatacagcactacttcccggttggctgggcttgggcacccaactgcaactctgaaacctcagggaagtgagaacaggcccctcgtagtgccccagcccctcagcagtccagaccaaaggaggctggcccagcacaccaagccatgaacacacctgagggtctgcaagaacactcccgcctcgaaaccacccaggaagtggatccaggccttaccaagagcacttggatactttagagtgtctggaggtctgtgttt

SEQ ID NO: 911375 - DNA, 626 bp, Homo sapiens
ctggcaatgaaaaagccattattgttgttgcatcttcccacattattgcaagcccgtctacctctggatgarctgagttccacggtatttaaaaagctggcacctttgttacccacttcagttttctatttcttctcctttgagagccagatatcaaagactaggactttcaaaagcaaccatatatattggggaaatgagaaagtcatcgtacatgctcagggacaggcacagactcagaaagccaatcttcaagattcttcctcaaccaggaatcctgtacttcttcacccaagaatcctgtatctggcaaaactgtactccaaaagtaagggagaaattaagactctcatagataaacaaaagctgagggaattatccccagacctgtcttgcaagagatgtccagtggaatcctgcaggttaaaatgaaagggagacagtaacttgaagccacaggaagaaataaaaatctcagtaaaagtagataaatagacaattataaaagctaatattgctgtaacaatgatatgtaacttcattttttgttttctatataatttaaaagattagtatattagaaattattagactaaaagctaagattattgctactttggttcata

SEQ ID NO: 911376 - DNA, 657 bp, Homo sapiens
cagtagggctgccatgagaaaggtgacacagaagagcagacgagagggagcagaaaggtgtatgcagattctcttgtgtccatcagccttaagaacaggggctgctgagccragtcagaggctgaagccactcctagggataagatccccccatgtctctactctggggacattagctccactgtttagactagcttctcactttcacccacatttttaggccagtggaaacttccataaatccaggtcatacattcacattcaaccgatgtgtgtttacccactacttccgatctgaaattttgggaagctggagaacggacagggacacttgcccacagctctgcaggccagaggtggtcccattctgggactttctgtccttctctccagctgaacaaacctgatgatgctggcctcctctcatagaccttttaaatgctgcatgaagtccaaaccacttagcagaattctggtccccaccttcacttccaacctcctggatgccctcttgccctctactctttgttctggtcatgaaatagaaaatataatcctgcacccggtctttacctgggcagggcccctgtcctggaatgcctcccttttcctgctttatctaactcgcctctgttcagtgaagacccaacttaaatg

SEQ ID NO: 911377 - DNA, 570 bp, Homo sapiens
ctgcctcatactgtgggggaaggcatcccgtggtgaggaagcacacttgcatgagccagagcgggtgggggctgagctcatccttctgtcaggaacctactcctccgatactaaccctcgtgaccgaaccgcctcctaaatgccccacctctcaatactgttacaatggcaatgaaattttaacatgaattttggaggggccattcaaaccatagcactatcgtttcacactcttgccagacaaaagtcctgaaatcagagctctgatgacatcattcctgggctcaaaaatgctccatggctttacaaattctacttataatgttcttggcctggaagtcaaggcctcacatatcttacttcaatccactatttctggcaggacacctcaccacacttcccttgctcctgtccacatgagctcttaggccaggggcatgcttctctgtttgaccacatgcacctcctctcctgttatttctgccatttgagatgctccccttcctacygctgcattaactgaaagccacacttcatgatccagaagagatgccacctcctctgccaagc

SEQ ID NO: 911378 - DNA, 652 bp, Homo sapiens
ggcaaccagaaacctgtcagtwtgtgctcttaaggttctaaaattgcagacattggttgtttcaaagccacaatgatatttttttaaacttctagatatatttttctttccatcaattgcagaaatctatccagcattgacaagattataataaataattaaactggatcacagtaaatcgtagtggttattatcttgtctttgaggtagttccccccccatcctctcgcaataaaatcattgatggtcattctagagaattcagctttgaaaattgaacaggttcttctgtttggctattctgtgattgtaatattaattatttaaaaaatttttagtgattattaagctatcatgtactgttgaaaagtagtaattttatgtatcagtaaactattcagaacacatgtatctaagtttaactgaagtaaacagttacagactttagtgtttacctatgtcatcttttagcatgaagtgattcactcctgagttgacacatacaaattaaaaatgaaaaataacaattttaatccaagcccaacatagtatgcatcatatttttaaaaattattaggtgcatattaatgagctccaagtaatagctattattccaatagacttccctgacccccactccaggtcaggaaag

SEQ ID NO: 911379 - DNA, 558 bp, Homo sapiens
tagaaaacctctccctgcaactctttcaggtagaagccggcctccctccctcacctccttccagcctctctttccagtctcaggcaggtctttcctcactggcttagctaaagcagcacagcacgcccccagccctctcttttcctgctgtatttttatcactgagcacctatcacttcctgacatgatattatgtaacatttgtttatttatttatttatttatttgagatggggtcttgctctgttgccaggctggagtgcagtggtgcgatctcggctcactgcaacctttgtctcccaggttcaagcgattcccctgcctcagtctcctgagtagctgggactacaggcttgcgccaccacgcccagctaattttttgtattttagtagagacggggtttcaccatgttggccaggatggactcgatctcctgaccttgtgatctgcccracccagcctcccaaagtgctgggattacaggccaccgcgcccggcccattttgtttataaattgactcagatgaaagctcagaaaaagtggggatatgttttgc

SEQ ID NO: 911380 - DNA, 592 bp, Homo sapiens
tcagttttttgtttgagatggagtctcgctttgttacccaggctggagtgcgtgacacgatctcggctcactctgcctcccaggttcaagtgattctcctgcctcagcctcccaagtagctgggactacaggcacgtgccaccacacctggctaattttttgtattttcagtagagacgggtttcaccactttggccaggctggtctcgaacttctgacctcaagtgatctccccacctcatcctcccaaagtgctaggattacaggcatgagccactgtgcctggcctctttagtatttttgttttaaaattttgtttgtagagacaaagtctcactatgttgccccagctggtttcaaactcctacactcaagcaatcctcctgccttggctcccccaaattttgggattacaggcgtgagccaccatgcgcagccttttagtgttgacacccttgttgaaaattagttcagtgtagayatactgatttaattctgggttctctattctttcccattggtctatctgtctgtttttatgccagtactatgctgttttggttacagtataatttgaagccaggtaatgtga

SEQ ID NO: 911381 - DNA, 592 bp, Homo sapiens
tcagttttttgtttgagatggagtctcgctttgttacccaggctggagtgcgtgacacgatctcggctcactctgcctcccaggttcaagtgattctcctgcctcagcctcccaagtagctgggactacaggcacgtgccaccacacctggctaattttttgtattttcagtagagacgggtttcaccactttggccaggctggtctcgaacttctgacctcaagtgatctccccacctcatcctcccaaagtgctaggattacaggcatgagccactgtgcctggcctctttagtatttttgttttaaaattttgtttgtagagacaaagtctcactatgttgccccagctggtttcaaactcctacactcaagcaatcctcctgccttggctcccccaaattttgggattacaggcgtgagccaccatgcgcagccttttagtgttgacacccttgttgaaaattagttcagtgtagacrtactgatttaattctgggttctctattctttcccattggtctatctgtctgtttttatgccagtactatgctgttttggttacagtataatttgaagccaggtaatgtga

SEQ ID NO: 911382 - DNA, 598 bp, Homo sapiens
ttcccatttgttgtatgaaatcagaaactgcattagtaatgrgacaaaagccttaattacagaattaaagatttaacaaattaaaaatagttaatcgtaatgctgtttttttagtgtgagggagttttaaatcaaatcagcctatccagaattatgaatagtaagaaagatgggcacttaacagctcgcaaacaccagtgggagcaggacttggggagaaaaacatgcagagggaggagctgatgctatctctaatgataaagtttggacattcattaattttctccttcaaaagggtggggccaaacagaaactggtcttgaactattatgtatttgcaaattcagtagtttaccttcctttgattcatcaatatatgtttaacacaactggcttattataattaattattctacttaaaaatatttattgagcatctaccatgagttagccactgtggtaggtactggaatgatagcaaaaagcaaaacagacattcgtggagattttacttttacattattttgatcccagaaattgtattacttaaggctttgtttatgaaattcttattaaatgaataatatattatttttaa

SEQ ID NO: 911383 - DNA, 615 bp, Homo sapiens
ggatttcataccagtcccaaggtgctctgaggccattatttgcacataccraatgagcatctatttatataggtggctacagaaacaccactctccaggcatttggtaaaccatatctaatacatttatttttcatatgtttattcttaaggctggaggaagaagttggccatcagggttatctattgtccctgtttgcagatgacatgattgcatatctagaaaaccccatcgtctcagcccaaaatctccttaagctgataagcaacttcagcaaagtctcaggatacagaatcaatgtgcaaaaatcacaggcattcttatatgccaaaaacagacaaaaagagagccaaatcatgagtgaactcccattcgcaattgcttcaaagagaataaaatacctaggaatccaacttacaaaggatgtgaaggacctcttcaaggagaactacaaaccactgctcaacaaaataaaagaggaaaacaaaaaggaagaacattccatgctcatggataggaagaatcaatgtgaaaatggccatactgtccaaggtaatttatagattcaatgccgtctccatcaagctaccaatgactttcttcacagaactggaa

SEQ ID NO: 911384 - DNA, 641 bp, Homo sapiens
agaaattgcaacatcagtcaagagcaagatgagatttgagcccaaatattttrgggaaaggtcagttatgtcaaggaacacagagctgctctctccaaagcatatttaaataaaaatattcacgttttttccacctgccacaaactctttacactgccttcttttaaaatgatatagttgatgtttcatacctaagctacgatgttcaaacttaaacagcttggtgccacaatggggttgttgttcatgtgaaaaataatgcctcgttgttctatcaacaaaaaagtacatattataatgagttaaatgtaacatgccctttacacaacataaaaagtatttcttgcttcgtttttattacttttttatttttgaatcttttaaaatgcatcacacacttactttcctcctcaacagtatccaatttagcctttcgttgaagactaaagattgtcaggttaaacatcaattatgatacttccaactggattcaacacgtatttactcagggagcactcacagggaggcattatgccaagagaaatggcaatgctattcagtgtttatgatcccaactggagaggaaaggcagatgcataatttcaaaattcctggcagaacacagcaagttccattatata

SEQ ID NO: 911385 - DNA, 602 bp, Homo sapiens
gcagcctgtcatgccacgacccttccctcatttggagatgttcacttcagagcataaaatcacacgtgcatctgcttgaccgtgtgggyggtggtgagtaatcctatttcccagtgtcgagcatggcaaagaagagagagatagaaatagtgatgaggactgagagaagaaagaaatcaattcagtgcagtttctgatctgttttgggaagtcaaggagtaagtttaaaaactcttaagatttttgaaatggtggtagcagggcatgaaatcaagtacaggacccttctaagcacagagccccgtatgactgcacacactgtactcctgtgaagccagccccagtgaagagttatgcctggggaacatacataaacagtatgtgagcaagcaaattggaacgcgtagtcaccctaaaacagcggttctcaattagtggcagttttatttcccaggagacatttggcagtatctggagtcatttctggctgtcaacaatggggtcccattggcatctggtggatagaggccaggagtgctgtaagttccatacaatgcttaggacagcccccctgccctcgacaaagaatgagcttgccccaa

SEQ ID NO: 911386 - DNA, 671 bp, Homo sapiens
gggaaagctggcctcctatcttgtctacacagtccctgtacaggttcctgacctgtggtaagtaaagagtgtcactttctaacaggcccaggagcccaaagtcttcctgaggtgaggaattcatccaattaatacaggtatttgcaggcacaggccgggcttaagacattaaagtcgaatgtgagattacttatggaataaagttccagcaaagccaattaaaaaaaaaacaaggagcctatatggcaaataattattcttgatgattttatgcaaatactccagccaaatataataagacagaaacttattttgcaaatgaattttgttctataatttgtcctcagtgaaaggggactggagagagaaaaaattatgtttcaaaatcacctatagtacacctgttgttagattttagtctcacttagtgtttttaaatttttattattttctatagtttggactaaactctaaaatttttcctggtcacaagtccccaaaataatttttttcattttttttcttttttcctttccttttccccccacattttttcctgattagaaatcacyaaacattaaactgtgctttcctaaagccctgtgaactaaagctagacaatctatttacatacataagctactttcatacctgcctactggtgtatgaac

SEQ ID NO: 911387 - DNA, 617 bp, Homo sapiens
gagggactgtattagttttttttcacactgctataaagaaatacctgagcctaggtaatttctaaagaygtttaattggtccatgaatccacaggctgtacaggaaacatggctggggaagcctcaggaaacttacaatcatggtgtaaagggaagcatggagaaggggaagcaggcttgtcttacatggctggagcaggaggaagacagagagggagggtgctacacacttgtaaacaaccaggtctcatgagaagtctgtcatgagaacagcactagaaggatggtgccaaaccattagaaagtgcccctatgtccaatcacctcccaccaggccccacctccaacattggggattacaactgaacatgagatttgggtggacacacagatccaaaccatatcagatagtaatgaacatggaggagcagcccagtatccagcacaaaggccctcagtaaacagaagactcagaaggagggccaccctgtctcaggagcactgattggcctgcccttctttccttcagcctcctggagggcagggtctgtgtcttctttatctgtaccccgagcccctagtcctcatggctagtaggcacttcacgaactcattac

SEQ ID NO: 911388 - DNA, 644 bp, Homo sapiens
agcaaggagcaggaaatattccatcctaggatggcctgattaggkacattccaccaaggagattccaattcaagaccctacatgtgctggcagtgtctctcctcagtgtccccatgttgaaccacaataccttttattcctttcattcttgtctagggattggaagactatgaccaaatccagtcactacctattcttgtaaataaagttttattggaacatagccacctccattcatttaaatattgctcatgactgcttttatgctactgctacagagtcaagtatttgtaacagagacctcatagcccacagatactagaacatctggtacctgtattttcaaataaaaagtgtgctggcccctgctctagtcatactgagagtcttctctgccccaagattagaacaggtcctttcttgtccctcaggttctccccacatgctgtcccctttgcctgaagttaacttcgtggtatccttttattggggactctctcatctttcaggactgttttcaaaggacatttccctgaggggtcatcgctcattaaccaggcccaggctttattttttcatggctgccatcctctttaagtgtaatactttatatgttgttagcctagaacagagctccacgtggg

SEQ ID NO: 911389 - DNA, 647 bp, Homo sapiens
caagcttctgttacgataacccccatggctgttactatacatggctgtgggaactgagctgatcagggctgagaaaatagttctaacagagagactgttttcaatctcagtggtattaagtcaggaactgaawgcacttgaaggactaagaatttgatatgcaattaatatataaaatatgaatatatagttgagtatagaaaggagcattattagtggacataggtggaataagatttagtgcaaagagtttagatcatttttatttttaggcctcagacataaatctgaaatgcttaacagaacagtgtggcaaagaaatacttttcaaaattattcaaagtaatttttagtaatttactcaaagtaaatttggaacatcaaaatttcaatatagtattagattctctacccagaagtccccacatgtgctaattcccaatatcatcagtctgtccctattacaactttgaaatatctatgttattgcattgtgttgtctttatttgtgcatgcctgctgccttaactctgagcttattttgaaggcagaaactgtgtcttattcatttgtatattaccagtatctgacacagtacccaacacaatgtaggtcctaaaaaagtttttggaatgaatgaatgaatc

SEQ ID NO: 911390 - DNA, 598 bp, Homo sapiens
atcactgtcctctttttacagatgaagaaactgaggttcagagaggttgaatcactctttcaatgccacacttaaaaaagtggtcaaaccaggagtgatggcgagtgcytatagtcccagcaactcaaaaggctgaggtgaaagggtcacttgataccgggaattcgagtccagtttgggcaacttaagagaccttgtttcaaaaaagcaaaaacaaaaataagtggtcaaattaggatttataatcagaactatctgacattaaagtgctcttaaaagtgaaaacacgactgggcgcagtggctcacacctgtaatcccagcactttgagaggccgaggcaggcggatcacctgaggtcaggggttcgagagcagcctgaccaacatggaaaaacgccatctctacaaaaaatacaaacttagtcgggcgtggtgacgcatgccggtaatcccagctactcgggaggctgaggcaggagaatcgcttgaacctgggaggcggaggttgcagtgagcagagagcactccattgcactccagcctgggcaacaagagtgaaactccgtctcaaaaaaaaaaaaaaaaagtgaaaactca

SEQ ID NO: 911391 - DNA, 563 bp, Homo sapiens
atgaattcaaatgaagtcatattttgagggaaggggagagggccagtccccctgggggacttggagtcaagacagacaactgtgggtaagctttactggcaagcctctttcaatctatttcatagcttacatrcccccgctcctctgatgccccagcccaaacaatgatacacagtgtgtcaggaggctgtagtagcctaaaccccaaattactgtgacttaaagtcaacgtagtattatttttgcttcttattgttgtgtttttctgtttttattttcaatctcacctgagaaggaggcagaccaggggtaatctgggagatccatgatcattagggacctagactccttttatcatctttctctctgtatttgtcttccatcttcagtgttgcctcatggtcacagatgacttgctggagcaccatcaatcacctctttgttccaggaagaaaaaagggggagcaaggaaaaaagattaaaaggacaatgcttcttcagtacatcagcagcttactttctcttggccacctctatcaaaaaacaagaatggagaacatatt

SEQ ID NO: 911392 - DNA, 595 bp, Homo sapiens
ccagctgagttgatggccacgcatttatatatgccagcatctgagatctgggcactttcaatatcaatgatctgtcctctgttcaagaaagtcatgctggtggaacctgagagtagacgattatctttgtaccatgtaataactgaaagaagaaggggagaagatgatctatgtaaaaattttttaaattaaatatactaagttggatcttagctaagtcactattactttattcttatacttattatttgaatttaatctgtttacataatcatctctttagctttgatttttaagagaaggtaacccttagaaaaacaccaagatccaagtcggtgagtcctgaaaatgaatttagaagaaagatattctttactatctctaatatatcagtattatttaatagcaaactttcaacctatctattttttgttgtatgtttcctctcatccataaaattttggctacatgtctaatcaaaccaaataccatcmacactgttggcctcaaagatttatgttgttactgattcatatgaataatctaccagtggtgggaatatacaaaacaaagttgtagtctcattagaacgaca

SEQ ID NO: 911393 - DNA, 625 bp, Homo sapiens
agttgttcctaaagactcaccccagaaccacccctctatcactcttaaaattgcttttgtattcatttaattccatgtattaaccctacctgtttgaaatgcctagaatgtttctgttttctgcactgaattctgattatcaacacaatatttaaggacacaagacttataaatatagctatctaacttttccaactggaaaagaaaaaaaggaagaataatcagtccatgacacattcctacaaaacagctttttaaatacttgaagccttctggactgaagtgctcattgaagaatttgacagactatgtcgctgctgcaataaaacactatgatgggaataagaaatacaagagctatggaatgggttggcaatttctcacttcactagagaacttaaagaaagattggatgtcagcaagaatgccagactaaggactcaaaaaatctactcctccactaaagaaacaaaaatgttggaaacattgtcaaamtcaaccttttcagaacttgggaaattaaccaaagacttgcaaaaatccaaaaagtatttattaaaaataaatgctaaatttcattaagaacagtgagttttgaggcattttaactgacctagccctgtca

SEQ ID NO: 911394 - DNA, 648 bp, Homo sapiens
ctaaaaataatgtgtcctttaatatattaatgatatgaagcaaagcaaatactatgaagcaaggttaatcgtacaaagcacctacaacagggctttggagtcagcattctgtctcatattttctgtgtgactttggagaaggtatggaccttgagcatcagtttctgtttccttgtctgtacaatggagattgaatattatccaaagaattaaaagagctagtatataaaaagtgcttggctgatgttaagtgctccactaaattgataaaattaacaaatgttattactttacatggatttaaagaccatctctgcagtgtggaagacagtcccagatgcagttgggaaatgaggtgattcttctctgtgtgattcccaaatctcctggactctggctggcataagtgtgtgtgtgtgtgtttatgagaatgttcactcgtagaattctctaaagtagcttctgccactactaccaccattcaaagcatactctaaggcaaaagaaggaaatatttaaagagtgtgagagacagtgaaaatatccarcccaagaccaggcatggagaaagcccccaggaaacatcagcaaagtgaggagggaatgtacagatgggagaagtatgtatggcttggaatagacgccccc

SEQ ID NO: 911395 - DNA, 615 bp, Homo sapiens
tctaacagtcaggtccctcagctgcaggtctgttggaatttgctggaggtccatcccagaccctgttttcctgggtatcaccagyggaggctgcagaacagcaaatatggcagaacagcaaatattgctgcctgatccttcctccgttagctttgtcccagaggggcacctgcctgtatgaggtgtctgttggcccctactgggaggtgtctcccagttaggctacacagtggtcagggacccacttgaggaggtagtctgtccattctcagagctcaaatgccatgctgggagaaccactgctctcttcagagctgtcagacagggatgtttaagtctgcagaagtttttgctgctttttgttcagctatgccctgcccagaggtggactctatagaggcagtaggccttgctgagctgcggtgggctccacccagtttgagcttcccagacactttgtttacctactcaagactcagcaatggtggacgcccctccccctgcctggatgcagtctcacaggtccatctcagactgctgtgctagcagtgagcaaggctctgtgggcatgggacacatcgagccaggcacaggagagaatctcctggtctgcca

SEQ ID NO: 911396 - DNA, 626 bp, Homo sapiens
ttgtcacaattaggaaatcaagtgaaaacaaaagaaatttgatatcaaaatactggccacaggtttttttgtttcgttttctttctttctttctttctgagatggagtctcactctgttgcctaggctggaatgcagtggtgtgatctttgttcactgcaaccttcgcttcctgggttcaagcaattcttctgcctcggcctcctgagtaactgggattacaggcacccatcaccatgcccagctcattttttgtatttttggtagaaatggggtttcaccatgttggctagactggtctcaaattcctgacctcaagtgatctgcttgcctcagcctcccaaagtgctgggattacaggcatgatccactgcacccagcttgttacaggtttttaaaaaacatcaaggaggatttctgcttttcttacagctgcacttctccatcacacatttcaatttcatagttaatattattatatatttgaattatatttataatatacaaatatatttttatgtaaaattagaagtcccagatcccattttctgcattactctcctaagcaaatgctattattaatgtattgtgmattacaatttgccatcattttaaaataagaggttt

SEQ ID NO: 911397 - DNA, 669 bp, Homo sapiens
atgcaacatgttcagccatcaacaaaaattacaagcaatgaaaaatggcaaggaaaaaaaagtatgaaaagacaaggcaagcatcagaaccagatccagatataatacagatattggaattctcagtcagggaatttaaaatcactaagattaatatgataaggggtctaatggagaaaggcagagatcattcaagaacaaatgggcaagagaagcagaaagacactgtaagcaaaatcagaaggaaaggcaagaaatcaataaaaaacactacaacaaataaagaatgccctcagcaggctcattagcagactaggcacagccaataaaatattcagtgagcttggagagttgtcaatggaaactttccatattaaaatgtaaaaacaaagtaaaataaagcaaacagaacagaaaatcaaaggactgcgggacaatttcaaaagatgtaacatatgtataagtgaatatcagaaagagaagagagaagcagaagacatacttgaagctgcaatggccaagaatgctctaaagtgacacaatcgcttttaaagcagtctggcagttcctcaaaatgccaaacatagaatcaccatgtgacccaacaattccaccctttgggttatactcaagaaaaatgrtgtccacacaaacacttgtccatgaatg

SEQ ID NO: 911398 - DNA, 630 bp, Homo sapiens
tatagacatttctgtttagtatagtgaatgaatgaatgagaagaaatgctaatattcttgaaatacatgcgaatgtatgagaataaatgcttatgtgacactgaagtaaaagcattccaaattgctcccttgtttcacatgcataattactggtttcttttaataaactggtgatcatatcatattctacagccaaataggaacttctaaaagattttcacactcattggttattaaagtttccaaagatctaaatactcataacatcctgagcctgtgattttcaacaacaaggctttaaattcttctgacatttaacggaatttgctgtggtgttagaacagtgttctacacaaaatgcattatagaacatttgatttctctctggaaaaaaaaaaggtagcaataatgaactcttgagaaaggaaatccagttcaattggatttgaaatatgcatgttaaaaatagactgtgtatccatgagctgttggatgatacttaatcaacagtaattgttgttcaagcaaagcrtgccctttccatcctgggcttagcactcccttggattagcaggatgtgccatgcgcggggattgtgggggcctcacaattgctgtacttcaacctctt

SEQ ID NO: 911399 - DNA, 590 bp, Homo sapiens
atagccagcttgctttaatgctctatttcccagcagtttcaaactcacaaagatggccaacagtggcagatgggacctgacgcttgaacttggggagctttcctccaacaggatgaatccatggaagataccaggcacattctcaaaagaacagaagtttagctggtggaaatgagagtagggtggatgtaagttaaaattgttgataagtaaataccctgattgggtattcctgtcaggtgctgctgtaaaaaatctcttaaaacactgggtgaagtggataaatggattccatttaacagagcatttactggggtctattagctgactattaccttaatgattatattataggcggcaatggggctgtcatcataaaagatgaaaatgatcaaggagaaagaagtatgagctcagaagaggatgcagcaatgtgatgagacagagttgtgcctgttggcctccttcagtgagaaggctgcatctgaaattatcactgaagcaggaaaaacagtgtccttattctttttgtttatycaaaaatgcaatagcacactgatgcatatggaacctggggctatgagaattgt

SEQ ID NO: 911400 - DNA, 484 bp, Homo sapiens
ggacatccctaataattatagttcaacaatgggatggttgtgttttaggtttaggttttctgcaaagcaatgaacttcccatcaatgagagaattcaaatagaggctcagttcaacgtcagagagaagatggaagtgattcctacattaggtgcaggttggactagattacctaggaaatgacttaacagtctaagcatgtgtgttgggtgatgtataatactgatatatcaaagttctaggtaagatttctggcacttataaaatttattaaatgaatgaatgtctttatacatttttagtgatacattttgaaaagtcttatgtcagagagcatttcttagggaaaatgaaagatgtttctaaacctcctgagccccatgagcatgaaagaacttgtttcartactgtgtgttttcaaatcccttttatcccatcaacattaaaaatcataaggctgttaagaattgagatggggtttaaga

SEQ ID NO: 911401 - DNA, 600 bp, Homo sapiens
atgcgtgtggtacctcgtggattgctgtactttcctaaaatgctgaaacttttccttggagaaaattcccatgtctttcatgtgtcatcaaagttagatgctttccaaggaaagttagtccatttckaataaaaaaggagcctttgcttgggtcacaccctgcattctagcaaccatgctccttttcctttctcctttcctttgaacgtgtgtgtcatgcttggaaaatttcctcttcatatttctgctaaaaaaaaaaagtccaaaacaccttaattgcatggtggagaaagtgtttttcaggaacactcttgtttcctgcctacttctaggagtgaaaaccaaggttgatttacaccctcctctcagattaatatttacctccttgaattttggcaggaagtgcaaatgcaaatctccctctgactattacatagtttgcattcaatcaggaacaaggtagcaaaaaactgttgcaggaacccaagtttctccccaagaaatgatgagtgactaagatagcaccagtataaaaatgccacagctcttggattggaatgtggccttctgaagaaccatcttgcctggtcctggcctgag

SEQ ID NO: 911402 - DNA, 670 bp, Homo sapiens
tatgcaccatgaaatactatgcagccataaaaatgaacaattaaagattttcaagcatcaaaatatattgcatgagcttaaaagtctgtgagggatgtaaaatatctgactgttacaggagagcgtgttcattttttaaatggatgatggtgggtatgaaattactatgcttactattgattacattttaaaaagtgtttgacagttttgtttaacaatttcaatatttgccatcttaaaaatgatatcctttgctaggaggcaccaaactttcagaagttattttgggggataagcaaatggaaagtctaaagattactgcactcagctactgctcctaggaaactgaatgttcagcccagctctgcttcttggcaaagggtgtcacctagcacatgtggaatgtgtgacaccccaggagggtggcatatcctactcccaatgccatgcttatcaattgctgcaggtgatgaacactctcacattggagaatcttcctttaaggttagggcccttcaggatctttccttaggaaagatttctctgcccagccctggccagatccagtgaaattctcctgataagcattctcagagcccccacastgtttcctcagatcacttattctgtttcataattatgcattaaaaaggccatgaccaaagtccag

SEQ ID NO: 911403 - DNA, 583 bp, Homo sapiens
tctatctcagccactttgccttcagtcaatggagaaactgactgattcagataatgcattgaactcaagactgtsagtatttaggggtccatatggttttggtctaggatagtgggaggaagtcagtgagcaaaagcatggtggtaggcttacatctgtggcctttacttccttaaaaccaagtgtttgccagacagacctggagccaagccaaaggcttcccaatgcttgtggcaacatcacttcattctcaccaccatccaaagtagacaggatggtttccattttttttttttttttttttcaaaagaaaccaaggttcagagaggtgaaatgacttgccttaagctcacttcttgcagagctgggatatgagccgaggtcaaactccaaagttcttctagaaacccatgctgccacactttagagagtggctgtcctttgcctgggctcaggttgagaccttgtctctttcaaacctgatttccactcctcccctcccctctagtcacccctactactctccttggctgttggcaacagactcatctccttccatttcaggccatagcttatgtacctg

SEQ ID NO: 911404 - DNA, 594 bp, Homo sapiens
ggtctgcatcatttctgatgccgtttctttcttgcagctatgtctggtgttcacatggtgagattctcactttgtttccttgctcagaatccatggttttccataacaaggccaacccagcaccattaaggyattgccaaaacacatttttcatatgacctggcaccttctacctgcttccagactttcttaataccaacttgctacctgccctttctcctgtgccacctatttgtaccttcctggatgcccaccctttgtcttattctctgtaactcgcttctttatgtctttctcatttcccatctctggattccaataaacacacagtgcatgatgccaccccagtcccagtttggatattttaatagaaactcaaaaaccaatgattagatactggaaatttggcatcattaacagaaattgcaaagtctaggatatttgggaatactaaggaggggctaatttaaaatttaaattatttgcacacttggagcctgcacatatatcttggtattgatcatggctctttggaagctatttatgttttcagcacacctataaggctgagatttatactgcatttggtgttta

SEQ ID NO: 911405 - DNA, 646 bp, Homo sapiens
gcatcaccaacattactgaacgcaggcagrtggatgagattacttagaataagtagtcagaagaaaagaggatcaagaacagaatcctaaaaaattagccacacttatggaatagtgaaaatagacaaagttaaaatgaaactattacagagacactattctctggaatctcagtttgcaggaatttttttaaagtcatccaatccaatctctcttttaaagagcacatctcttctacttaatctatggtggtctaatacattcatttttagtataactgtagttgtataaaggcttttctgcgataagcaaatatattctccaataatttctcttcagtggtcccagttttggtttgtaagataacactgacttaacctactccttctactatatgacaaattcagatctctaaattcattaatttattcaataagtattgagtccctatgaaagtcaggaggcctaagctctaattctaactctgctcagataaaaatataagtttgcttctacctacagacaaaacacaaatttttcaatatgccatgccatataaattctagacccttcccaccagtctagttattatttactttgattatgtgctcaaagtttgatgtccaacaaaaatgatagtagttat

SEQ ID NO: 911406 - DNA, 657 bp, Homo sapiens
tgtattttataatttgtcttttagatataagtcttacagtattctcccactagttaattaaagaataatgcttgacaaagattgagaaaaatcaatgtactaataaagatggaaagcactacaatacaatttgtctaggcaataaataaataaatttggattatttccatgcactcccaggcttattaggaagaggaaattcccgcctaataaaagaatatatttccatgcatatattcccgcctaataaattttggtcagactggttgatctcaaaaaccctgtctcctgataagatgttatcaatgacaatggtgcctgaaacttcattagcaattttaatttcccctcggtcctgtgatctctccctgcctccacttgccttgtgatattctactaccttgtaaagtacttgatgtctgtgacccacacctattcgcacactccctccccttttgaaaatccctaataaaaacttgctggtttttgcagcctgtggggcatctcagaacctaccgacatgtgatgtctyccccagaagcccagctttaaaatttctctcttttgtactctgtccctttatttctcaagctggccgacgcttaaggaaaatagaaaagaacctacgtgaatatcggggctggttccccgatatat

SEQ ID NO: 911407 - DNA, 669 bp, Homo sapiens
agaaatagtgaactattaagaggctcttttgttaaaatttttgtcacagaaatttcttcatttacagtgactgttcctttgtacaaatataagtaggcatatagaagatattttttgggggggatatgtttccatagttaaaaacttagaatcacctatatgctgatcgatgctctgaatcctagaagagcttcccaaataacatcaaaacatcaacaaaaggcacaaaaggactagtgtcagcagtaaaatctacttagattattgtgatctatatcttttaatgagattcatttccaaatctatttggaggccctgccaagttttctgaaaaagccttctaaaagtattttaggtcaactacataaaattagagttcttcagtaagccgatggagtggctagacctttggaaactctaaagtaatggtccttaaacattagtgtttatacatgacttatctgttgactataggcaattctgaaagaggtggtttatattaaactatactttataacatgattctctattattaccatatttttttgatgctctttcacatgggaactctatctgaagcaggaagagatcttcaaggcaaattcagttcctcaaatcaaaattcaaacytcaacatgattatatgatttctagagatattgatcaagt

SEQ ID NO: 911408 - DNA, 673 bp, Homo sapiens
tcagggactatcacagaagaggtgggcatgtaaaattgtaagggtcaattktgaggggtaaaattagatcagagcttttctataaagtaaatattaatatcaaaagcacactgatgcaaagccagtgttggagcccatatgtcagaataacagggttttcttgaagcactgatctactctttaatagcaagttgtaaaagtttataaaaggtttatggaaatcttaccttatggtcaaactgattaaaattagataagttgtttataagattttattaaaattagctttaacattaataatacactatacaaaggtacaatttggttttcttttctgaaaaaaatttttatgtaagggataataagagatttttgtttaccttatgagtaaaattcaggggagaaaagaggatgggggagaaaaagatttatttggcctcatgctatctttattagatcttattgtttgggaaattgagtctactcactatcaaagggtaaatgtcttcatattatcatcttggctaaatgaatgactattttagaataacttgtgattctattttgtgatatcaagtatcttaaaactttaatatttgacatattttccagcagcaaaatattagttttaaattcagtctttttgacctcaaagtaactgtttttggatatt

SEQ ID NO: 911409 - DNA, 306 bp, Homo sapiens
gctctgtgaaaattcacagtggacattaaagactctgagaagttctgtagaaaaaaaaatatttaacttggtttaactctacatatccaaattttttgttgaactacatcacttgatatggtttggctgtgtccccaccctaatctcttgaattgtagctcccacaatccccacgtgttgtgggagggacctggtgggaggtaattgaatcatggaatcatggggacgggttttcccatactgttctggtgatagtgaataagtctcasgagatatgatggtttaataaagggcagttaccctgca

SEQ ID NO: 911410 - DNA, 462 bp, Homo sapiens
aaagtccacattcctatgacttcttataatattttaccaaaaaygcatttcagtttctttacacaccttgcatgtaaaactgtttcttcagttgtctcaataacatattacaatgttagcttttagcaatttttacttttggtgaaaaacctggttagtaagcgattttaattatgtaccaggtgtggcacctaagacaacagataagatttgactttttccagcatagctagggggcatggctaacatcacatgtccccaggtcttatctagaatctaatgctctaaagtaggtaaattgaacaattttcaaaagtcaaacaagcagtttatgaccttaaagcatttagaaagcttaatatctgacctgtaaaatttagaccaaatgtctttattttatcaataatctttaaaactgtttttactttccaaagattacttaagtcgtgtactaaaaggcat

SEQ ID NO: 911411 - DNA, 619 bp, Homo sapiens
ctttggtgctagctattacaatagttttcatcatgctatagaggtacaaatggatattttggggggagtctaaaggaagaagtaattaattacaagtaagatagaaactgaagcaatggtttcacagaaaaggtgaacgtttgtgcttgcctttgaaatgtgaaaaggacttttcacattggcaaatataggtcaactatgttttggctgtttaccatgagccacaaagccaccttcagactgtactaatcagtttcagaaggaaatggaaaccaaaattttttttagactgaaaaagattacaaagaataaacttatctgaaaagttagtaaagtggagtttgggaggcagtggatttattgttcgtttgtgtgtttatttgtttgaatagcttgtcctttgagataaaaatgtagaagacggagaaagcgtaaaaattgtactgaatcaatattttaggcctgacacccaaatgtgcttcacagtccacatacccactaaagtgtggcattgattaaggtgggactggtctttggggactcgtaaagktgctccatacccagaaggcacatggcaagcctgataattacctccaggcataaatcatcagctggggaa

SEQ ID NO: 911412 - DNA, 525 bp, Homo sapiens
aggagacttaaaatccctcagtcagcacaggacagatgtagcaggcagaaaatcagtaaggatgtggttgaactcaatggtaccatcaatcaagtggatataatcaataccaatagatgacttcatttaacaataacagagtacatatccttctcaagatcacatggaacattcaccaaaatggatgaaagtctcggccataaaacacatttaacacatttaaaagaatagaaatcatacagtgtgtgcctttaggccacagtgcaattaaactggaaatcaataacagaaagctggaaaattccaaagtacttgcagattaaacaacacacttgtaaataacacatgggtcaaagaagaaatctcaagaggaattttaaacatatttggaactgaataaaaatgaaaagataacatcacaatttgtgagatgcagcaaaagaaatatttagaggaaaatttayagctttgaatgtatacattagaaaagatgaaaaatctaaaatcaatcaccttagatgtata

SEQ ID NO: 911413 - DNA, 600 bp, Homo sapiens
caaggctaagggcagaaagtgcaggcacatgggggacagcatgatctatttatcgattcatttaaacatttattgagtgcctactgtttgttagggayggtgctatagccactggaggaagagaaatgaaggagtctattggggaaaaagaaaaagaattaaccgcacttaattatcctgcaatgatcattacagtgagagaaaggtttgcacaaaatgttctggtaatccaggggaggaagagattgaatccagggggaaagacaggatagtagataagagtctaggacctggactggaggggcacatttcaaatcccagctctgtcactcaatagctgtgtgatgctgtgtaacttgtgtaggctctctggcctctgcttcctcatctttaaaatagggataataaaaattatacctggtgtgcagtatggtgtctataggtaataacactgtatcctatacttgaaattggctaagagtaaatcttaagtgttctcacagaacaaaagaagaaaatggtaacaatgtacggtgatggctatgctaattagctaggtgatagtaatcatttcacaatgtatcaggcatcaagttatac

SEQ ID NO: 911414 - DNA, 670 bp, Homo sapiens
tctgctgtaggtttaattttaaaataatcttttattttaaaacaaccaattatgatttggagatgtaattatgggatttttaaatttttctgtattgtccyttttgtaccttattttcttcctctgtcctatacaatgatcaccccttattctcaaggcatacattccaagacccctagtggatgccagaaaccacagatagcaccaaaccctatatgtattatgttttcctatctgatgatgtaagtgactaatggactggtagtgtatacagagtggacatgctggacaaagtgatgattcaaatcccaggcaggacagaacagaacagcatgaaatttataactagttggcacaacatgcaatttataactatattttcacacaaccactctatctcaaataatattccctggtctctttaagttttacatcttttaagctcctatatgtagtttatgaattaattttaactggttattgttttactctacactttttaaggtgaagccatttaggattttaatgttttaatcatacatagtttttaaaataattggcatattgatataatgaaaagttctgtttttctctcatggactatttcttccatacatttagaaacttctattttacagttataaataggaggttgtagaactattaaaag

SEQ ID NO: 911415 - DNA, 647 bp, Homo sapiens
cgtggtcaggctagatgagaaaattcttacagaatgtggtgtgctgtgctgctgtcgccactttgctgggagactgaagctcagacagctaagckatttgccagggctgtgcaacccatctgtggtgggaattccagaattccaacctggagaatctgacttactcttttggagaacattatatttgataaactggaatcattgttttgagtgctcccatggctctgtaggccaaaacagtagaacttatgacagtagtttggtcttcaggaactccacttaaccccaaactaccctccagttttcagagagcactggggaaaagggagggatgagtgtgtattgaattatctgaattctgccacttatgcctaagagatatgtatgagagaatctttacattttgtacacattattctaaaattccttttagtccttaaacaactctcagggggaaaatagtacagaattaaaataaaagttcttaacatttgtccctgaatatatttttagaaaaagtatacttgaaatctgatcacctataaggaaagatttatcaggagagtttaaatttttatatttactcatattaaatgcatgtgtgttttgagaccaaggttttttgtttgttttaatattttggggag

SEQ ID NO: 911416 - DNA, 629 bp, Homo sapiens
taaaaatttctagatacagtgctacgaagatggcaaggaagtctctcaaagatcmaaagaagagggtgaactgctaggaatttttggaacttgaactacaaagcagtgagttccttgaatttttgtgttatctgtcatatatcctgagctaggtgctacagaagcctccaaactgccagaactgccagaaagtacagataaagaagctccaagaaagtcttgttttctttaggcaaaggaccaggtgaagggtggctttacaccagaaaatttttggcagtatctgccaaacaccactggaaaactcacatcttactccctccatgatttcagtggtgctaaacagaatttgatcccgtcattcccatacattgatactgttagacttgatgagttacatgggtatattgttattttctagagcagctgctaggaaaactatccaaagcaatatacttttgaaaagataaagaaatcaagatagaaatttttaatatgatcaagtcacccaaaggaaagtaagagaaacagaggaaacaaagagaaaacaagtaataaaatgacagtcttaagccctagtatgttaataaacccaattttattactttaaatttaaatgatctatggaa

SEQ ID NO: 911417 - DNA, 575 bp, Homo sapiens
tcttgtgatgaagggcgatgagatactactaagtggctgtgtgtatgtgtgtgtgtgtatgtgtgtgtgtacaatatatctgttagctctaatgatgtgtttgcatattctttgaataaatgactcttttatattcttagaatgttctagataggttgatttaatcagtaacatctttccttaagtttcctaattctagggtgccatgtgaaaagatgcagaagaaaagttatgcttacacagatgacattcaggaatgaatactttctgctataacaataaaaaagtccagtactagtttcaatatcaaaagacgaagagaaatggttatttagaactctgtgcatagaataccaatctggctttctctgtagttaactgattctgaataaagatggtgatttgatcaaatttcaaacattttgaattcctcagaataccyttaattggcacagttttgttctttacaccctttgcttcactcttgctttacaaaagttagtgaataaatgaatgatccatttagtctcccaaagttttgatatactacttttgtcatatctagaatctcacat

SEQ ID NO: 911418 - DNA, 531 bp, Homo sapiens
cttcttcctaggagtaaatctttgaccatcctttcattttctcctcatggtttttccctctggtttttaaatcttcttgagctacttttgattatctctattttcctagaaaatcgttcatttmatttaaattttcagaattactggcaaaaagtttaacaattgtgtaccaatgtatgtttttatttacatttatcttgttctaatgacatctggttaagtgtattttcttctttaccttaataggtcttaaaaattgttttacctatatttttaaaggacagctttacttttataattagctactctttgtcttgctatttagttcttttctggctttgtagtttttctttttttctctgtctggtaatgtcttccacttacactgtatttctgatgtggctggagtgcagtggcgtgcgatctcagctcactgcaacttccgcctcctgggttcaagcacttccctgcctcagcctcccgagtagctgggattacagatggggtttcaccatcttggccagtcttgtc

SEQ ID NO: 911419 - DNA, 739 bp, Homo sapiens
gaatgtatattctgttgatttggggcggagagttctgtagatgtctattaggccctcttggtgcagagctgagttccattcctggatatccttgttaactttctgtctcattgatctgtctaatgttgacagtggggtgttaaagtctcccattattaatgtgtgggagtctaagtctctttgtaggtcattcaggacttgctttatgaatctgggtgctcctgtattgggtacatatatatttaggatagttagttcttcttgttgaattgatccctttaccattatgtaatggccttctttgtctcttttgatgtttgttggtttaaagtctgttttgtctgagactaggattgcaacccctgcctttttttgttttccattggcttggtagatcttcctccatccctttattttgagcctttctgtgtttctgcacatgagatgggtttcctgaatacagcacactgatgggtcttgactctatccaatttgccagtctgtggcttttaattggagtatttagcccatttatatttaaggttagtattgttatgtgtgaatttgatcctgtcattatgatgttagctggttattttgattgttagttgatgcagtttcttcctagtgttgatggtctttacaatttggcatgtttttgcagtgsctggtaccggttgttcctttccatgtttagtgcttccttcgggagctcttttagggcaggcctagtggtgac

SEQ ID NO: 911420 - DNA, 626 bp, Homo sapiens
ccgtggaatgcacttccctacccatataaagatctgtgaacagagaatggaagtctatctggctctagatatttgtgcaaaagsactatccagtcattggctgaaaacttacaatgaatcaggagtaacccttgggaagccagaattaaaaataaaaagcaagaataaaaaaaaatccaggcaaagatgtcagagactgctgatcatgaaggagacgtattttacagatttaagcctgggtaagttaccaaacaactccaaaaccttccagcaccgataactttcagataaaaaataatcatgttctggccaggcctggtgggtcacgcctgtaatcccagcattttgggaggctgaggtggacagacaacgaggtcaggaaagcaaaactgttttggctaacacagtgaaaccctgcctccactaaaaaatacaaaaaattagccggacgtggtggcacgtgcctgcagtcccagctactcgtgaggctgaggcaggagaatcacttgaacccaggaggcggaggttgcagtgagctgagatcacgccacggcactccagcctgggtgacagagcgagactctgtctcaaaaaagaaattaataataataatcgtgttccagagt

SEQ ID NO: 911421 - DNA, 483 bp, Homo sapiens
aaattccatttagactggaggaataagttttagtgatctatttcactgcatggcraatgaattataaggtattatgtatttcaaaattgctaaaagaattgatttttaatgttcccatcacagaaaagaagttggtaaggtgatagatatgttaattagcttgatctttctacagtgtatacatagatcaaaacattacattgtacattatatattatataatatattttatataaaatataatttattttatatattatatactttatataaaatataatatactttatagtatctattttatatctataaaatcattatctctcaaataaataaataaataaataagaaagaaatttacctagagagcaaaatgccacatttataaacctttaaagcacttgggtatcatattttgcttaacaagtattgctcacctcagagtcttaaaatgttctatttaataatactattattttatct

SEQ ID NO: 911422 - DNA, 597 bp, Homo sapiens
atatatttgaaaacgattgggttaaaaaagctattctatttaaaatatcaagatggccatacataacacasatagataggtcctcaacattagcaggttgggtagtgtagtcaactgctgaaaataaatacagcacaacccaacaaaacacctttcccctcaaacactaacaaagtaaaataaaataaaagcaaaaccctgaaacccaagcagaaatgtaaagctgaagagacattttctagattggtcagtcacagcagtgtattcagaaggcagttcttcctccgggtttgagaggcctgtagccatgtatacagaaactatcttgggtaaggtgcctctactctgtcgggcttactatttaagatccttagtgggtgtcagaggcctttggcctgtactgcacaggtcttttcttgtttgtggaacgtcaaattcattttctctccaacaggccttttggtttcttaaaactctccggttcttgtccctgcacgtttttccctctcaatggcatttgactcaggttgccagtcattaatttccttgtatggaattaaggagatcttctggtccattctgtggctagaggcaata

SEQ ID NO: 911423 - DNA, 571 bp, Homo sapiens
aatacacttttaaagccatacttctggcatgatctagcattttccaggaaaataaaagaggcacatactgtaactgttgatcatggggagtgatggatgggttctgccctctgctagtgcaaaacatatcactgaaagtctagaggaacaggtaaggggttgatagttgggacaatgaattttgaaagatactctgagcttatctcatttatctaaaaaatgacattagaaataaccagcacaacacggtgaaaccccatctctactaaaatacaaaaaattagctaggcacctgtagtcccagctactcgggaggctgaggcaggagaattgcttgaacctggaaggcggaggttgcagtgagccaagattgcgccactgcactccagcctgggtgacagactgagactccatctcaaaaaaaaaaaaaaaaaaaaaaaaaargaaaagaaaagaaaaggaaagaaccataaattaactgggattgaaagtgtgtgtgacatttatatcatggcataatctccaaatgaagaacatgtttatttgatttggggatagcttactcaggatt

SEQ ID NO: 911424 - DNA, 606 bp, Homo sapiens
tttaatcaaaaggaaagggagcttttcactgtacaaatatgattgaaagcmctgtatatattcactcagatttctcaggtaaggggaagggtatgtatcctggaaatgacagcatgaacacttgccaagccctcatatgaatcagtgttcactcttgtaaatcataaatccattagccaccaagagaatttctttgttttattctcaaatttgcaatgaaacctgttcttaaagtaattcctttagtaatatacttgtgcaaagtaaaatcatctttaaaattaaccatttctcatatgtaatttccaaagttaatttctgaaaagcagaatataaaaattaaaaacaaacttcagtgaagttcattgtaatctgtctaaggtttattcactctgataagaactgctggtaaatttagctaatttctcagaagagctgagtctgaaaatatttccttataaattagtttatttggtttgtttatactaacagtacagttattttgatatacctttaaattatattatctgtactatgattttatatgcttttagtttaaaataagtatttcgcatgaatgcatgagaacccacacttattttatat

SEQ ID NO: 911425 - DNA, 606 bp, Homo sapiens
tttaatcaaaaggaaagggagcttttcactgtacaaatatgattgaaagccctgtatatattcactcagatttctcaggtaaggggaagkgtatgtatcctggaaatgacagcatgaacacttgccaagccctcatatgaatcagtgttcactcttgtaaatcataaatccattagccaccaagagaatttctttgttttattctcaaatttgcaatgaaacctgttcttaaagtaattcctttagtaatatacttgtgcaaagtaaaatcatctttaaaattaaccatttctcatatgtaatttccaaagttaatttctgaaaagcagaatataaaaattaaaaacaaacttcagtgaagttcattgtaatctgtctaaggtttattcactctgataagaactgctggtaaatttagctaatttctcagaagagctgagtctgaaaatatttccttataaattagtttatttggtttgtttatactaacagtacagttattttgatatacctttaaattatattatctgtactatgattttatatgcttttagtttaaaataagtatttcgcatgaatgcatgagaacccacacttattttatat

SEQ ID NO: 911426 - DNA, 601 bp, Homo sapiens
atattccagagacacacattctttctctttcttcctctcatcttataagatagggttatatttagttggcttttttcataaacatgtattttacctgaatttgaagattaaatttcttaatatttatatgaagaatgtagacaagcactaatggtgttttgttcagtctgaggagaagaaagttaacacaccatgaaagcataggaatgttttagaagatttttagctctcgcaattgggaatctcctggtttaaatttctatcatttcagcctcagggcaatccaaatcatacagggcttggacttcattgcatcaattctaatagtttttgcttttcttccccatgaaaacccccgtactttccttgtattgaggtgtggcttcagccttcaagggtccattctcagtatgcttgaaatctgaagatgaaatgaatttcataactggaaaatccagttatcaggcatgarcaaatggctgcatttgtttcagattcttttgctagtcgcttcattttcttctaatttaacaaggtcatgtatgaaattagactcagctgttatttattttattactgagctccaaggtataaatgttcc

SEQ ID NO: 911427 - DNA, 630 bp, Homo sapiens
gtgccgttgagatagctagtaataatgtgtgttctcattgtgtttgctcttgtctgtagagaccaccagaaactgatttagcctgaggaatatatttcaaactgaaatttttattgtaaagtaattgcaaataacgtgtaattaaaagtgatgagaaccccttacatttgtatagcatgtttactttccaaagcacgtcatgacctcttgcttttataattctaaaaaattcttgaaagataggaaaggcaagttctattaatattatatttggacaaagaggcaaatagatattacagctgagtattcttaaatatgcaagtgatattttgttttgttgacaccttggtttgttgatttgaaagcccagtgcttttgatttagcttcaggtttggtaaaaaaggagaacagtatttactgaatgaataaacttcccctttgtaacatatttgtgtcacaactctgcaattatacaaagagactgatgtctgccttgtgggarctataattgccacttggacaagtttcatgtggttgacattaatagaccatgctgattatgactgacaaccaggggttcttaaacttatccagtaaaagggttttttcccctaatatcaaattcacaa

SEQ ID NO: 911428 - DNA, 611 bp, Homo sapiens
aaatggccatttgccagcagcaagcgaacccctaaatagtcacgttctgttcgggagkcaaaggaaaaagaaaatcccctgttttctaagtacagctgggtaatggttttctttagaggtgatgataaatgtattctctgaaatgtattattagacttgttaaatgtgtaattaaagggattccatgaagttgttgcagcaggaatgggatttaaattgcccccaaacccccttccacacacacattattactttacctgtgaaaatcttaaaagctgttggtttacccagcagcttagagccttgaactaagtgaaacatgaaatatcttcaatatatgtaccagaggctctgcgtgtgtgtgtgtgcgtgcacgtgtgtgagacattgacaagagaaagattgatatactcaaaccctacatcatactgtttttcataaatttccatattgaatccaagagacctcattttgaggatttaaaataatgtggcatcttgcttcattaccaataaaagtaagctttttggcctacccataataccccagggtaactggatttcaaaagcaaatcaacttgagcttggtctttcactaactaaaaatacagt

SEQ ID NO: 911429 - DNA, 641 bp, Homo sapiens
ctgcaacgcagaccatggaccaggagctcccaacctcagctgcacagcacaggggagcattggaacatgggatgcccggaccgtctgacccacaccaactgaatcagaatctttaatatggtgtttctcagagggccccctggagccacagcaacattgtcacctgggaacctgttagaaatgcacattctcaggccccacttcagacccactgaattctgtggccagccccagcaatctttgttctgactgttctcacagtccctgccaggggttctgatgcatgtggaagtgtgggacctaattagaaactgcatttctagcaagtttccaggcggtgcagatgtggctgctctggggactacactctgaaaaccaccagagtctaactgtctaatgggtagagccaagctctgggagagagtgggggaaattaaaagctacccaggtgagtggctctgatgcaggtgagagtaattagcattgccatagcctctcatcgtctcatctgacaagaggtacacasctggagagggagctcacacaggtgagggcgttacaggagaagaaataccatctcctcaatttgacctgtctgtggtctcttcatttctataacactgcaatttggggttcctggt

SEQ ID NO: 911430 - DNA, 600 bp, Homo sapiens
tatgataggcctgggtgcatttgacaggggaagagccgaccatacctgtcctctgacggtggggggtggctcctggaatgctgagctagcaaccatggtgagtccccstactgtgtggacccttgccaggcctcaggcctcagcagtcacttacataaaacaggtggtgaaggccaaagcctggggagaaagaggataatcagagtcaagtcatgaagacagcatgccatgggctggaggagatgtcccaccctgagccaccacaggagaaaataaagcaaatgattgacagcccctaaatgtgcgggttcctctagagcactgtcctcctgccacagacaaatcagctggattttgatgcaaaagtcaaaccaaccaccgagtatggctgaggaggaagagaaggctgttgccctcagcctgccccagtcagtgccacacagttagccttttacttccttctcctttcctccctctctccctggggaccctctcagaccactctcccaaggccagctggcctcattcccatcctcccaacataggctaccttggacttcaccacctctagattttggcctgcaggagcaccgctctcca

SEQ ID NO: 911431 - DNA, 623 bp, Homo sapiens
tcattttttcatatttctgttggacaaaatctgttttttatgtaccagtttatgacaacttttaatagtggggctattacagttttgtgtattagacatgttgcagttttttgttttttttttttttttgccacattctcattacctttcaaagttttatatggtatttttgataagtagaagttttgaaattttatgtagtcattgctatccccttttggattttttttccttttctgttatactttgacagtccctctcaaaacaagattcagtaaacatttacctatgatttcttttaattctttgtgatttcttcatttgtctccttatttgaagcatcagcctgtggtgatcatgaacacaggctctggagttacatggacttggatttggatgctggttctcccaattacttgctgtgtgaccttggataatgcttaacctctctgaaactcaattttcaaatctgaaacagggttggaagttgcaggagataatgtatgtygaagtgtccagcacattacttggtcagtagcagacatgtaatcttaaatattgccacgttaggtctctgttaagtatgtacaattttgatcttcatgaaggcagagacactgtct

SEQ ID NO: 911432 - DNA, 639 bp, Homo sapiens
aaatgagactatttacatacatatacatattttttgaactttgaaagtctttatcacagtattgcatgtgacagaaaattgcagagcctatatgtttaacaagaggcaaatagttarataaatgttggtacaaccttgaaagaaattactaaaagccattcatattcatatggtataggagacaccttcatataatgacttggaaagaaagcttacagttcgttaactagttaaagaagtgccccagagctctgattggcaggagatagaaatccagtcagagcagctgaagtgagaagataaattataaggtatcttagctcaggctgcctagaagcagagcctgaggcagggtttcttgggcaaatgatgtaatgaggaaacactcttgggaaaaggagctgagggaagcggggcagggcaggggatggtgctaagagaggatgtggtctctaggtgaagacgagcttcagcctgatcccatagggaactctggtgtataaagagctttatagaattgacaccaccttaaggcaaggaggctagccccgcgcacagaagccaggtgatgggtgcaccagcctgggcgaggagatcaaggcttggtaccaacagcatcaactacctaaagatagacta

SEQ ID NO: 911433 - DNA, 623 bp, Homo sapiens
ccatattttgccaattcagtcatccaggagagaaaaaacggtgaaatgggtttggttcagggtgtatggctattaacaagaaaataatgagaagaattccaacaattattaaaaaggtagaatcacttggacttgatgataggttggaaatggagagaaagagagagggagaggctgaaaataccttttaaatttctggcttgggactaggtggtggatgctgccattcacaaaataagggcagtaagtgtgcatgtgattaaatgtacatgcttttgagttccgggatgcctacttgggtgtacatacacatacgtgtatagtacatgcttatgtgaatgtacttgtctttttgtgagtgaggacttttgagcagttggaggtgtggagagcatgtggtataagtcaaggtatgcatgtgtgcagggtggtcaggaaatgaagacattcgcatatgtccacaggcatagaggtcttgagtcccaccagctgtgtaccccagagcctgtagttctraggaatagccctgggcaacaaggaccaacacattctcttagcttatcaccagtctgttccttacattgtgcctgctttaagaagtcacacagcatggagtgtgctta

SEQ ID NO: 911434 - DNA, 596 bp, Homo sapiens
ttagttccttactctgaaatgctagcagaaaactaagagttactaatgggattcatttcctatgactactataacgaattaccatcaacttggggcttgaaacaatacacatttattttcttgcaggtctggaggctagaagtctgaaatcaatttcactgtgtcaaggcaaggtattggccaggctggttcctgctagagagtccaaggaatatgttcctttgccttttccagcttctggaggtgcttagatttcttggcttacggccccttcactccaatttttgcttctgttgtcacatggccttctgtctctgttgatcttgcctccttcttttaaggaccctggtaattaagtttaggtcttgctgagataatgcaggatgatctcctcatctgaagattcttaacttgatctgaaaagttccttttgttatatacaagtcctggagattagggcatgggaagcccattattcagcatatcacaactgtctcatgaataatcaggatttycttgaaagtaagcctaaggcctccagatggacatagaatcatcctattatgtaccactttgagggggcggaattaagaaaa

SEQ ID NO: 911435 - DNA, 586 bp, Homo sapiens
aaagtcaaaatgatcagaaatagcaaaagccatgtattctctggacatatgtttccggaattaatcataatatgaatccaaaagacmatgtcatggttctacgtttgacacatcaaagaatagtgagaatttgttttagaaggagaagtttactcaaagtctctttctaaacaatggtttgctgctgctacattgatttatctaattatcattattattatcatcatgggttaatgtttgttgattacttatgcaatcttgttattgctatgcaatatatttactaggtactagacagcattctaaatactttcatgtattacctccattaatgttcctttgatgcaaatactttttaatgcacattttacagttgaagaaattgaggcacagagaagtaaattcagttgtcagcctaggaagtttaggatgggcaggggggacaaaattcacattcagagcccaagttcttaacctgctctactatttaatattaccattttcaatactaactatagatggcatttattgttacatgtgctgggcttaatgcaaaacacttcaccttgaccaaagcagagggatg

SEQ ID NO: 911436 - DNA, 594 bp, Homo sapiens
tttgttattaatcttcagtggtatttttcacaaaatcagagctaatttgctaaacagaagaacttttcagttttgttctaagcayaaaattgtttaaaatctcagttgctacatagataattaactgagaatacaaatttataaaatagataaaaaactatttgtaccatgtaccataaatgtgatgtttggagcagaaaatcagtagttttcagctaatactaagacaggaaatcatttaatatcaattgagattaaattggcacaattgaactaaattaatgtaaaaatgacttggtacacggcccaatttttctattacttcaagtggaattttgcattaacttatataactctgtaaattttccactactctctatttaatgttctagctgcatcattctgtaacttgaatctattaaaaactgtatagcattctaccaaagatggtctataaaagaaatggaaatttattttgaatagtattccactctccagagctttagaggtaagtaaaaatgtctcagattttacttcttgttattgatattcagatgtttctgtttaacttttattgtccagttgattaaatat

SEQ ID NO: 911437 - DNA, 708 bp, Homo sapiens
gctttgcagtcctgtgtgaacttgcgtacatcactgcctcactctgtctcagcatcttcttcaagggaattggtgatgacacccacgtttcagggtcattatgaagataggtgaaatgtggactgcagagtgtccctactgatgaggaggagcagggcacccggagtgggcaggtgcaggaggaagagggaaatgctctccactttccctggctctggttttattatacaatccggcatcttggagttcaagggactttggaaatgactccttccccagttttctaactgaggcccaggttgctaagcagagatgcagatctatatcctcagagtaagaaatcctggctctagcaggaggcatcaggggctgcctgcctgtagcaaaggttctgcagcatccctctcccaaatccccagtctggcaccatcatcaccaccatcaccctacgttgcactcatgcatacatatgcccccacacacattcacaggtgcacactctcctactcacatgcgcacactaacacaaaattacccatgcacacgcacacacactgacttcaacaatactacctgcatgcacacacatrctcacgtgagcacacacctcccccctccacacacacccatgtgcatgtactctcacacacacacagacctgtgggcgcacacctacctacacacacccacacgcctacccacatgcag

SEQ ID NO: 911438 - DNA, 708 bp, Homo sapiens
gctttgcagtcctgtgtgaacttgcgtacatcactgcctcactctgtctcagcatcttcttcaagggaattggtgatgacacccacgtttcagggtcattatgaagataggtgaaatgtggactgcagagtgtccctactgatgaggaggagcagggcacccggagtgggcaggtgcaggaggaagagggaaatgctctccactttccctggctctggttttattatacaatccggcatcttggagttcaagggactttggaaatgactccttccccagttttctaactgaggcccaggttgctaagcagagatgcagatctatatcctcagagtaagaaatcctggctctagcaggaggcatcaggggctgcctgcctgtagcaaaggttctgcagcatccctctcccaaatccccagtctggcaccatcatcaccaccatcaccctacgttgcactcatgcatacatatgcccccacacacattcacaggtgcacactctcctactcacatgcgcacactaacacaaaattacccatgcacacgcacacacactgacttcaacaatactacctgcatgcacacacatactmacgtgagcacacacctcccccctccacacacacccatgtgcatgtactctcacacacacacagacctgtgggcgcacacctacctacacacacccacacgcctacccacatgcag

SEQ ID NO: 911439 - DNA, 459 bp, Homo sapiens
gtttaatggttcctccatttctttccttgtcaccagatagctgtggtcacttctcgccgtgagcagtgtgcccacctctagttgaccctccacacgctttctagtgtgtgctgtggacaggaaagctagtaaccgagtttgttagagctgtgtgtaaaataaaagtaaaaaggctctgaagaaacatctcggagacctccgatgagtaacatgcattagcttctgagcaccttttgtgtgtcaggcattttggctgctcagagctctcagtcttgctctgctctgcactgcagggtagctgaattgagggaggtaagttctgcatrgtgaaatcaagagcgatttcaacttccaggagggaaggcaactgctatactcaaaaatccttctcttttgaaaaattaagaggactgattacattatatcactttgagcaggttcttatgaagtaaatagagg

SEQ ID NO: 911440 - DNA, 619 bp, Homo sapiens
tggattatctttttgttttttgccttgttttatgtatgtgtatgtgtgttcatactttttattcaaygccaaacataaaggaacagtagagactgaggtaaatagtatttatacccagaattaagcttgccttttctaccagatcataagttgggggctgggggaacaggctagatttggggtttgttttactgaattaacttgtaatgcatcacactcctcagattctttccacgatgagctgctgctgccttgtgcttactgtgaggcctggagggccagaggggctattccttgtttcttctctactctcagctctcagcatgcctgtgccacatgcgtggttctctctgtgtgctccccagcagtagagaccaactcatcccggtttgcggggaacttttgcagtttaagcatggaaagtcctgtgtcccaggaaacccctcagtctggggcagaactgggtgcttggtcaactgagtatctgaggctcccagggattctaaactcatgctaggccccactcaactattgataatttgttgaaatttcccttcttttcttctttgctcttgctcactattgggtgtgaggtgtatgctggacttaggatagttcc

SEQ ID NO: 911441 - DNA, 560 bp, Homo sapiens
aatcagagtgtggtgttttccatccttataaggtcctgtctccttgtttacccaccccttcttggattatacrattatacagacacagcactctttttcatgatgctccaaccctaaaggtgagtggaaagcacaggagtctgtaactcccctggacccagaatcaaactgaaatgagatggtttgatttggagtcaggattaacgtggcccaattgagaagtcaagtaaaacctggggggagattaagccaagaaaggagatgccagctctctgccttccttgccagatggcaggtgtgtgtatgtgtttatataatcaatgcccacacatccggctgtgacttctcactcagagttatatgaacattgcaggggttcacaaactgtctggagatctaattaccagtttcataagcccaacagagtgccagccacagaaagcagccaggagagggaaggaggaggggtgcaagtgctgagcaaggccacgttgttattaaatgctacattcagcacctgtgccatgggctgagcctgccagtctccaagggaaagctgc

SEQ ID NO: 911442 - DNA, 572 bp, Homo sapiens
tgttttgttttgttttgttttaaataaatggattgcttatagagggaatasgtttcttggagtgcttatgtattagatataggcaggagatcaacaaatggttatagtgaacctgctacactacacagtgtgcctagagagccagtccctatcctcatggggcttgtcatttagcaaggaacacagacatcaaattaataactgtaactgtgacacacatgaactgaagtgcaggggctgtgggtacacatagcagagactcaacctaggggagtgtcagaaaatggaagggaaatttaagctgaaacataaaggacaagaaagacacaaagttcccagtgggtatgaaaataaagcaggtttccagggactcacagtacagacccggctggatctgtccctgaggcatcacctaccagcaactctgggggaaaaatgggctcctgggttggatccaggggcgtgaactcctctggtttgaataaagatggcgagaggctgacctatggggaaagagaacaggtaggtgatgcagtatctcctcctttcaaacacccaagaggaccaattca

SEQ ID NO: 911443 - DNA, 627 bp, Homo sapiens
agtatttaagaccctagtatctttactaggctgaaattttattgytctccatcagaattcttttaagaattaaagaacaaagaggaggtactgtgctttcttttaagtcagagaagcacgaattgacgtgacctcgtgtacagtgagaagagtgtgcagggatgcttttagaaattaaaaggcaaccacattggccagtcagacaacatggggtggatgacaagagtctaagaaatgccagaggaaaagcttttcctctggcttctggaaagtcaagttattgacaattttcaagtggataagaagaatattaagaaggtgaaatatctgttctacatgcaagacacaaggctttacaatacattatcttctacttaaccccttccttctctgttaactgcatttattctggcccaagtttttgactgcattgattctggcccaagttttccaggccatcccaattgccctatcctttgagatttaaacaaaagtggattaaatgactctgtcatgcatatgacaagctctctccacccttctttcactatgattgctaggaattcttagagacttatgttaatatttctcctggtcatcacttggttcaactttctcctgtcacag

SEQ ID NO: 911444 - DNA, 674 bp, Homo sapiens
ctcaaactccatattcaactcatcagtaaattctttctctggtatctcaaaagcattttcaattaactctgtaactcaactctacgcccttaattttcagtacagatgctcctcggtttatgatggtgttttctcctgatacacccatcacaaattgaaaatatcttaagttgaaaatgctttcgatacctctaacctactgaacatcataggttagcttagcccaccttacattaatctatagttgggcaaagtcatctaatacaaagcctattttataataaggtgtcaaatatctcatgtaatttattgaatactgtactgaaagtgaaaaacagaatggttgtatgggtacttgaagtacggtttctactgaatatgtattgcttttgcaccaccatagagttgaaaaattgcaagtcgacctattgtaagttggagattgcctgcactgccatctctcatctggaaactacagtagcctccaaaatatgcttcctgcttcccctctggtccctcactgatccttgatcacagagcagctggaatgatcatcaaaaygcatccatcagatcatctgacttttcttctcaaaactttggatggcttcccacatctcttacaagacatcctaaattccttaggatggcaacatcttattccctgcttcctgt

SEQ ID NO: 911445 - DNA, 502 bp, Homo sapiens
ctatgtccttctatccttctccatggtcccctcccttccacgctgcatctctggacctggcctctgcgtctctcatgcctcaggcccatccctctctaagagatctttagttcctgccaacctgtcrcaactcaaggattaaactaaacatttctccagcatagagcaccccctatgtttgggcattcttcactgtcttccctgtatgtggctgtataaaccagcctgaactaccttcccacccagagctcataaaggcagactccagcctgcaaatgctctcagaatagcatttgctcagaatagcaggtgctcttaacacctggcagagaggggccccattctctttgggcattttccatcaatttgtatctgcagaccacatgcatcagaatcacctccagggcttgtttaaaattcagattcttgggtctcactctagatttatttaaccagaatctctgcaaggggggccctgaacctgcattttcaataaccagct

SEQ ID NO: 911446 - DNA, 645 bp, Homo sapiens
tcttctgcatcaattaagatgatcatgtggtttttttccttcattctgtwaatgtgtattacattgattgattttcatatgttgaaccatccttgcattccaggaataaatcccacttggtcctggggcataatccttttaatatactgctgaatttgatttgctagtattttattgaggatttttgcatcagtgtttattaaaaatattggtctgtatttcataccattgtggtcagagaagttattttgtatgatatctatctttttaagatctattgaaatttaatttgtaaactaacatagtctatcttagaaattgtttcatgtgcacttaaggatgtgtaagctgttgctgttgggtagaatgttctgtatatgtctgttatatcttgtgggtttattgtgttgtttaactcttctgtttccttatttatcttttgtatgattattctatctattatagagagaggatattgaggtctctaactgttactgtattaatagaactgtctatttcttccttcaactctgtcagttttttgcttcatacattttgattatctgttgttaggtgtataaatgtttataatcattatatcttcttgctgtgttgaaccttctattaatatatgatgcccttgtc

SEQ ID NO: 911447 - DNA, 576 bp, Homo sapiens
aggtgtatctctgatcccacattgctgtccagggttagatggcattaaatattatgtccatggtaattctctgttggagagaagaggaatttgtttgatcagccttgtctaagcttcattgtccctcacaagctgaaatgcaaacccaaggctgaataagttagactttccttttcttggtcccaaaattgcattgcaaaaatgtcggtttcattatgaattttctccatcaatttttccttcctgtaaatcataactttttttcacagtatccaattattccatttcctaaattttgattaaatattaagaaataaaaattcttttcagcacaaacatagatatcaagggagacaaaagacccaatttgttttgactttttaaaataatactcattttggtatcctgggatgataaaggaagatgattgtgacactatggatttgtttaatttttttaagtgttagacaaagttaattcttgtctcaaaagtttgtraaaacagttttcacattctcactgctgtatttagccatcttcccctctaaattttgtttttttctgatgatttcagaa

SEQ ID NO: 911448 - DNA, 616 bp, Homo sapiens
catgtgtgcatagaggtgttcataatagtctgtaatagttatttgtatttctgtggggtcaatggtaacatcccatttgtcatttctgattgtgtttatttggatctrtcttttcttctttattagtctaggtagtggactaccttattaatgtttttcaaaacaccaactcttggatttgcttattttttcatggcttttaatgtcttgatctccttcaattcagccctgattttggttatttcttgtcttctgctagctctggagttggtttgctcttgcttctctagttcttttagttgcagggttaggttatacatttgagatgattctaacttttgatattaagttggaatttagtgctataaatttccctcttaacactgccttagctgtgtcccagagattctggtatgttgtatctttgttctcattagtttcaaagaatttcttgatttcttccttaatttcattatttacccaaaagccattcaggagcaggttgtttaatttccatgtaactgcatgttttgagttttttgtagtcttgattttcactgctatccaagagtgaatttggtatgatttcagttcttttacatttgctgaaaattgt

SEQ ID NO: 911449 - DNA, 580 bp, Homo sapiens
actggctctgacctttaaaacttctattaaacaaacgtctattgagaacctagtggtgccagtagatagaactttgaaaaagacagtcaaagttcttgcccatctagagactgtattcttgtggtaggagggagaataaacaagtgaacaaaaattaaattactaggttagatgagggagaagcagcttctttgataattctcttaggaaaagattctctgaagaaggaatatttgaactgagacttgaaaggtaagaagaagccagttatttaaaaagtcaaaagactattccagttaagcacaaaggtgacaaagtgcgaaagaacttggtgaatgtctggggaagagaagggagtccagagtgggtagaattaacaagcaattataactggaatatttgatgaggctggagatgtagataagtgtcaaataatgaaggactttatagaacatggtaagaaatttgtattttattacaggagtatgggaagccaktgaaggcacgtgagagacgtgatatgacatacttgaaaaagatcattatggctactgtggaaaaaatgaagcagaagggaagt

SEQ ID NO: 911450 - DNA, 691 bp, Homo sapiens
atgtaagaggtgatccagtgactacctttctgggagaagagagctgtgagaagaaatggcttttcctaacrtaataatagtcacacaatactgctctagcagccttatccataacagaaagaaataacttagtgattatacaaaagtgaaatacttagcacaaacctggttttagtttatccttgaggtatggaaccaacttatattctttaagaaccaattcccagtctaagtctggaatggtcaagtttgcaagagttcccaaacattcaatcacaaactcctcttcttcatcattagagatctgggctgcaaggtccccaacataatcctgaataaaacataattttaatataaatttaaattattttttatttaatctaataacccacaggaatctaacaatttaactcattgaaagaaaaagtaaatatcaaatgtgattttcttgttttaataatcttgagctaaattgctaaagaagcctatggtgaactggtttaaggcaagaagactgtagtggggtggagggattaggggtaagggtcacaaaacaaaaacaacattgaaacataggttgagatttctaggtgctaaactaacaaagttgataacataagagcaatttggattataaattaatatttgacgagacctcagtaagagctgtatttccaaatgtagcaatttc

SEQ ID NO: 911451 - DNA, 670 bp, Homo sapiens
caatctacccactgagaccattaagatcatgtataaagacttgacctggcccctaaattttacagaacagtgatacaatagggtaagaaaattagaatacattggataactagaggtaataaagtacaaaggaagcaaagcaatataatattgggagagattatgagacatgttgtatatataatcacccactccggatgctaaatattttctaaaagtgaattctaatctaattataggtttattctataaaacacatatgtgataggcagtacttaaaatggactataaatgggtcaaaatggtgacaaagattttactaagaatatcttactttcatatagtttacagtttataaagctcctttaatatatgtaattaatgaagatgactatattcaatttttttcatcattgaaatgaatatgaattactactaagccactgctttcctacattcaaagtcatgttatttgcaatacatgaggatttttaccaagcaaaaattaatatgcataattacaaacgaacagaatattatattaactctaagatattccaaccggggttatgactttagtaagtaggttaatcagtggctgattaaactcatgaatgagtttaaagccttattgatattayatacattactttgagtagccaatacctct

SEQ ID NO: 911452 - DNA, 646 bp, Homo sapiens
ttaggttctagggcatgaactgtaatttcccaatctgtgacaactccccttcctcttacagtctccctgggcaatatctattctttggtccttctttcatgcaatactttaaaatgtaaatataaaagacaatgttgtttatcacagtttttaataggaactaaaaccccacacaaaaatatagatatgtgaacaagtaaaattcaggtatcaaccagtaaggggaactccaagaggcagtttcagggtgcacattccaacaggcccttgtgtactcaccaggcctacaaacagccctactgtgtacaagacctcaaagggataaagatattcatgtacctagaataagccttagtgacccatatgctagcactgctaagcatcactcaaagactctatctgtgataattcagcattgccttccaagtatggtctgacttcctcttctatgaccctggaatctgtttttgcaattgccagtgatgatgaataagtgcataggctacagtgcatgtttaaggcatgctttaaaaagcacatcattatttcaaaaattttaaagattcctaaaagagcatcctgtgtgagtaaatccccataacaccttgattgttaaatkataataaagctaattatcattcacata

SEQ ID NO: 911453 - DNA, 702 bp, Homo sapiens
tgagcatgttttcatatgcttgttggctatatgtatgtcttcttttagaaagaagaaacctgtctgctcacgtcctttgcccactttttaatggtgttgtttctttttttgtttgttaatttgtttaagttctttatagatgctggatattagacctttgtcagatgcatagtttgcaaatgctttctcccattctgtgtgttgtctacttacttaatagtttattttgctgtgcagaaactctttagtttaattaggtcacatttgtcaatttttggtttttgttgcaactgcttttggcatctttatcataaagtctttgctagggtctatgtctagaatggtatttccttggttttcttcaagggtttctttttagttttaggttttacatttaagtctttaatctatcttgagttgatttttgtatatggtgtaaggaaggggtcctgtttcaatcttctgcatatggctaaccagttatcccaccaccatttattgaataaggaatcccttcaccattgcttgtttttgttagctttgtcaaagatcagatagttgtaggtgtgcggctttattyctaggctctctattctgtttcattggttgatgtacctatttttgcactagagccatgctcttttggttattatggccttgtagtatagtttgaagtcagataatgtgatgcctctagctttg

SEQ ID NO: 911454 - DNA, 564 bp, Homo sapiens
tctcccatctctggttatcttttcagatccatctatttatctattctgttttattttgttgcttctgctttagytgttgcatttaagaaactattacccaatccaaggtcatgaagattgacacctatgtattcttctaacaattttatacatttaggtcttctaattaggtgttttattcaattttaattaatttttatatgtcatgtgaagtaagaatccaacttcattattttgcatgtgactatctagttgtcccagcacaatttttatttatatcaactaatatattttatttaaaaatttatttttggagcctgtaaatggataaattctaaaattacagcaatacagagtatttaacaatatttaaatatttcttcttactcagcctttgcttgcgttttgcgttttgctttccataaacaaatatgctggatgaaagcagcaatatgcctatctttaagttcaatgcatgagttccttgaaagccatttcaatttggagtttaataattactgaacttcacgttattctgtcacagatgataatcaagtggcctac

SEQ ID NO: 911455 - DNA, 622 bp, Homo sapiens
actccagacctgcgtatctgtgagtcagttaaacctctttcctttataaattacccagcgtcaggtacataattataacagcttgagaatcgactaatacaggtggatatgttgattatctaaggccatggcatgggtctatggataatgtcaggctcacactcaatgtatactttacattttgttgcctctataatattgattagagatgaaatgcatcaaggaagcatttataatactgaaaaaaattatcataccactgtccacatgtgtcaaagaaatatatacattccaagatctttaagggtaactaaaggaggggaaaatttaaacaaattgataatattgatttcattttttcaaatgcatgaagtgattaccttttcaaattacagtaaggaaaaaatttaaaaaacaaatcagtatgcatactttgagattacaaataagaattatgtgaaactgtgagagatgacagatgaaaaataaattatattaaaagtcacataggcctttttctaacccaccttcttggaatgatttaaatgaacaaggaaaracattcctcagcccttgagttaaaacttaagacattattattattacaattacagaaaaacaa

SEQ ID NO: 911456 - DNA, 636 bp, Homo sapiens
ggatgtctaggctgcagtctgctgcaagggtggagccctcatggagaacctctgctagggcagtgcagaagggaaatgtggagttggagcccccacacagtgtcccatctgagacaatgcctagtggagctatgagaagagggccaccattctccaggccccagaatagtagatccttctacagcttgcaccatgcacctggaaaagctacagacacaaaacaccaacctgtgaaagcagctaggaggtggctacatcctgcaaagacacaagggtggagctgcccaaggccccgggagctcacctcttgtatcagtgtgcccatgtgaggcatgaagtcaaatgagatcattttggaactctaaggtttaatgactgccctattggattttgtacttgcatgggatatgtaggccctttgttttggccaatttctctcatttcgaatgggtatatttacccaatacctgtacccccatataggaagtaactaaattgttcttgattttacagggtcrtaagtggaacagacttgccttgtctcagatgagactttggttatggacttttgggttaatgctggaatctgttaagactatgtgggactgttggaaggtcatgattgtgttttgaagt

SEQ ID NO: 911457 - DNA, 605 bp, Homo sapiens
tgttacgctgaatctgatgaatttaatttatgtgccgtagctggagctgaacaagcatttgtaaacactgccatgtgagatgagcatttcaatactgtgaaaatgatcttattttgttaggtgattttcgagggcgaaatcggaaaaggaaaccttggtgggattgctgtggatgacattagtattaataaccacatttcacaagaagattgtgcaagtaagtatgagctgctgtagaaaccaatggagtgcttgcccagggcaagactcttgccaatatgatggtctttgttttgctcatttctacctagaatttcggtgtggcctctcggcacatcataggaaatgcgtattctggtgcaacagggcatacaatcagcccaatttacctgtgtctgccccgtcacctaccctaggtccttcataatggctgcttgatacctataaaactccacaaataatgcagaatccaaagatgatagctaagaagacccagcttacaagctatagatgccataccgaaacattytgatgaacagtggaaagtcagacatctggataattccaaatatctgggtgtataaacaaaacagcaggcctctgaa

SEQ ID NO: 911458 - DNA, 654 bp, Homo sapiens
acagtgagtcagaggcaaggaaccaagtgcatgagaatcataccaaattcttcctttttgtaagtttaaaattaaatgtcattcattttgaaataaacaatttataaatgcactcatttttataaaaaatacaaatgatatcccaaaaattgaaacaaaatttcctattaaccatcacttagtctcaccctttctacaaaggtaactattgttatcaatctggtgtgtatatttctgaacattttgttttgcatatgcatgacataatttacacgtatctgtaggaatttagttttcccatgtgtattgggaggtataaggtgtgtgcagttcagcaattggtgctttttttgtttaaaatgtgtctttttgggaccatatacatgaatcttcagtctctttaactgccttgtagtattcaatagcacactatttttttgttacctctatccaattaatgtacatcacatagtgtcttagttcatttttaccctgtgataaagaactacctgagactgggtaatttatgaagaaaagargtctaattggctcacagttccataggctttacaggaagcatgactgtgaggcttcaggaaacttacaatcatggcagaaaggggaagcaagcacgtcttcacaaggcagcaggag

SEQ ID NO: 911459 - DNA, 629 bp, Homo sapiens
atgattttcccaaggggtggctcctctctcatcctaagtgaggccttgctggcttaactataacgagtgcgaatcaccctgaacactaatccttttcctttttcaagacgtattcttcataatgtgagygcactcatagctcactacttgcctgaagaatggtagaaagtggggtggcagctgcagtataagcctaactggaaccccaaaggagatcgctagtcccatgtcttctgtaatgttaacaatgaatctccactagatttccaattctgtgggttccggtggaccctaggaggggcttatgtagacacttgaacatagcagggatgactaagcagctacctcaaactttgtaaggctaagcactaatacttcaagatggaaaacagccaacaagagcttaatgatttattggattcaaaaatggagaggcaaacatttaaggaaaatacaacatgacacatgtcttttaatcttttaatctctgtgcgtgtgttctgtatttcaaccctatttgagcttcttaagaccaatgtcgaatctgttaaagtgttttcctgtcacctaggttaatgcccaaggatagtgtacttaataaatttatgttgataaaaatcaccttgcaa

SEQ ID NO: 911460 - DNA, 662 bp, Homo sapiens
acatgcctgtaatcccagctactcgggaggctgaggcaggagaaccgcttgaacccaggaggcagaggttgtggtgagccgagatcatccacataaatggtgttctctggctataccaaaattaaataagaaatcaataatagaaaactcccccagcctgaccaacatggcaaaaccctgtctctactaaaaatacaaaatgtcattgcataacattgtatgcaatgtctaatgttattagacataatgttattgcacatttattagactataatatagtataaacataacttttatttattattgtttttctttttagacgaactcttgggcgtgatagtgcgcgcctgtaatctcagctattcaggaggctgaggcaggagaattgcttgaatccaggaggtggaggttgcagtgagctgagatcgcaccactgcactccagcctgggtaacagaacaagactctgtctcaaaaaaaaagaaaaaaaagaaaaaaaagagaactctcaaatatttagaaattgttaatatacttctaaataatccatgggtcagagaaaaaatcttaaagtaaatcagaaaatatttgaactgactgaacatcaaaacaaaacatatcaaaatttatgggttgcagctaaygcagcgtgtacaggaacat

SEQ ID NO: 911461 - DNA, 638 bp, Homo sapiens
agtagtagggggatctaagcttgccctaagttggccaggataaatattttggtttctcaggtgatgggtggggccataaagctcccaagagtttctttcttttttctttttcttttttttctttcttttcttttcttttttttttcttttttttttttttttgtgacagtcttgcactgtcgcctgggctggttcagaagcatgtagtttaatgtccatgtatttgtgtgttttccaagactccttctgttattgatttctagttttatttctattatggttagaaaagatacttgatattatttcagtcttttaaagtttgttaagacttgtttgtggcctaacatatgatctagcctagagaattctttgtaggtgctagagaagaatgtgcattcttttgcagttggatagagagttctatatatgtctgttagatccatctggtctaaagtgttgttcaaatccgctatttccctattgattttctgtctggatgatctgttcactgttgaaagtggagtatttaactctcctagtattgttatattgtagtctatctcatccttcagatctattaatattgcyttatatgtttatgtgctccaatgttaggtgcatatatatttaaagttgtt

SEQ ID NO: 911462 - DNA, 597 bp, Homo sapiens
gggtattaataccttatcagacttatgatttgcaaatattttctccaattctgtgggttgctttttttactctgttgataytgtcttttgatacacaaaagtttttaactttcatgaagtccaatttgtctattttttcttttgttgcctgtgccttttgtgtcacaaccaagaaatcattgccaaatccaatgttatgaagtgtttgtcctatgctttctcccaaaggttctatagttttgggtcttacatttagatcatggatccattttgaactaattttttatacagtgttaggtaatggaacaactttattcttttgcatttgaatatccaattttcccagcactatttatttttcagactgccttggccaggcatggtggctcatgcctgaaatctcagcaatttgggaggctgaggcaggaagatcacttaagcccaggagttcaagaccagcctgggcaacatactgagacccatctctacacacacacagacacaaaagctgggtatgttggcacatgcctgtagtccaagctactcgagaggctgaggtgggagaataactcgagcccaggaggttgaggctgcagt

SEQ ID NO: 911463 - DNA, 562 bp, Homo sapiens
gggcagattgcttgagtacagaagttggaaaccagtctgggcaacatggtgaaacctcgtctctacaaaaaatacaaaaattagccaggcatgggggccatgtctgtagtcccagctactcagggtgctgaggcaagaggatagcttgagctcaggaggttgaggctgcagtgagccaatatcacaccactgcactccagcctgagtgacagagtgagaccctgtctcaaaaaaaaaaaaaaaaaaaaaaaaaagtggagttatatacaccattgttacaataatactagctcttataattactcatgttttcacctttactgagatccttattacttcatacagctttcagttactgtctagtgtccctttgtttcatcttgtaggactccctttaacattttctgtagggcaggtctagtagcaatgaattccctcagctttactttttctatcaatgtcttaatttctccattaatattgaaagtcarttttgtcagatatggaattcttggtttatagtggttttttaaaaaaagcattttgaatatataagcccagt

SEQ ID NO: 911464 - DNA, 571 bp, Homo sapiens
ctgattatggaagcccccaagccaaggcggcccctcggctctgcctgcggaaagttttcccttcacctgcgcagaccaggccgatgtggcctccagaatggaggggtcagcctaggttgcctgtgacaactctgaaaggccttaggaggcacagcatctcaagtgcacacccgagtatggcgtgatctgcaaggggaataggggctggggggagacataggctttgaagatgaatcaggctggagcagggtggaagtgggctcagggagatggagcaggaggggttggtcagggaagagggagctcaagggaggagacataagcgcagagagtgagatagatagggacccagcagcaagtgggctcagagaggggctgtggtgcagagagaatgagactcagatgggggctgtagactcagagagagagatggggacaaaaggggagtgggggctcaggcaaagggatgaaggcagagatgggaaaattgggagggaggggagcatccrttttgggagggaagtgtcagttttgagcacacacagtcctctgcagcttgaggaggaggaag

SEQ ID NO: 911465 - DNA, 556 bp, Homo sapiens
aagactctgtcttgttaactgttatatattcagcaccaagcacagtgtctgccaaataatactactaaagaataattattgagtgaattgataaatgaacaaataratgaatgcatgacaaccaaaggaaaacactggaagagctcaatgcctatttcgtgtgctggttttattagtcagggtcctccacagaaacagaaccaataggatttatatttgtgcatgtgtgtaaagaatatatatgtgtacacacacacacacacaagatttattacctgatttacaaacacagatgattatggatattggcaagtcccaagatctgcagagtggagatttgggtggagatttggtctccaagctggagacctaggagagcccaatgtttacttactatccaagtccataggcctgggactgatagctgatggtacagttccaatcctaaggctggcaggctcaagacccaggaagaactgatatttcagtttgagtccaaagtctggaaaaaaagccaatattcctgtttgaaggccatcatacaggaaacattctc

SEQ ID NO: 911466 - DNA, 595 bp, Homo sapiens
ctttgaccttgtgcccaattccccttgtatatccaacctacctaatgaaccttcaagaatcctaatagtttcagcaagaaagatttccccgaccctgtcctcctttccccrgtaagacaccccctcactgccaccagaattccttgtgtgtgtgtatgtgtatgtatctcttaaagcaatacagtggacctcacttgcccactgtctgtaagcttcccagggtccaaaaccaggccatagcccttaagacctaccactcaaggagggggtgttgaatgaatgaatgaacaaaagtgtccctttgtcaaggcattttgagaagttgcacagcaagaagtataccctcaggactgtaatgcctctgaagaaagcaggtaacatttttgtagcacattataaaatggatttacaaatagtatctcagtcgtttctcacaacagtagtattcattgcattttgtaggtgaggaaatgaaagcctaaaattagtctgtcattctgccgcagcacagtggacttgctaaaggcgaacctgcccagaggcacactccatgcagtgtatgtacagagcaggattcaccgagttgtgttttagg

SEQ ID NO: 911467 - DNA, 615 bp, Homo sapiens
gacttaccatgtctggtgagcatcctgctgtttcagattattctgtgaggcttgactcagttcctcagcttcccmtgatcaggtagttgaggtgaggtcccagtgatgttcttatcatgacccaagtggagtcacgatattatctttattgcaaaaccacttctcttcttgctctactatcaatgaaaaagttactggatgctgctacttctcttttttgttgacagcaagcccaacgtataaacatctttctcaagaacttgtgtaaggattgaaataaactctcccttctgcttttcccttaagagtccatcaggatcatctatttattcaggtctatcatgaagttatattaataataacagtcaagatttcacttggctcatgtgggatcttgtattgtttgaaaagactcatctccatctataattttctgggggctcccaatgaatgttttatatattttcattgacagatagactggatgatcacatgttatggagtgggcagtcttgtcatgtctactaaattgtactgtattttctggatcctgttgtgctctttggaacgacttttgtttcttctgagcaacgaaatgcccaccaggcgctactg

SEQ ID NO: 911468 - DNA, 616 bp, Homo sapiens
tgttgttagacatattccagttctcagtagaatttaaatagcagaaattagctactagaaatgaagtcttttaaaagtagaaaattagtagaaatgtgtataaattaatttgatagaaattargttttgtctgaaacgactttctgattaaatcttctttggacaagatttctggaggtgcatcttgagacacacagacttttccttgcttactcttaaattggttcttaagttttggtcttttaaatatgaggaacagattatgcttagatcctttatcaacccttctaagtctacgaagccgtgttttcacagaccatctaattttcataagataaacttagtttcttgattccttttccaaaacagccattttctaaagggtttccaggaggagttatttcttgtctctttttgtggtctttctagggtcctttataagacctcattactaaagccccagaaaagacattgacacaaaatcaagtgacttttcaaagatccatgaaatagtgtcacagattatctttgatgtgtgactgttatttgctagagaatcataccaggttaatggcttaactctctggagcctattgaatttatgcagatacagggc

SEQ ID NO: 911469 - DNA, 646 bp, Homo sapiens
cctcctgaattaatcacctcttaaagractcactgcctgataccattacaagggcaattacattttaaaatgagttttggtgagggcattcaaaccatactaacatgccaaatcaatatagaattaactagaaggccagaaaatttcaaatactgagggctaagtattaggtttattagatgactatgtttctttttaaatttctttcttctggttttctggttgcctttgagatatttaaatatccatcagcatgtccaacaaagaaaaatgagagaaatctcaatattgctgcagccttattaatctgataacaggtctacagttgtaaactggaaccagtagtaaaaatagtatttttgagacatttgtagatttaagttgaagttaatctggaagcatcattcatttgtccatgcattcgctcatgctgaggaacagtgtagaacaatgcgcagggatgacagactcatttgtttgaatcctagctctaaaacttctgtatcacataacaggtaagatgtttgactttcctctctatatttcaggtcatcatcacaaaaatgagtacaataatagaacttcccacctaaggttcataaaaggattaaatgagaattccatttgggtagtactcaattagaac

SEQ ID NO: 911470 - DNA, 787 bp, Homo sapiens
agaaaagccctcaaaaaccattacttttaatagataacacttggtttgtatttactgtataaaagtattatgctagaagcttagaatacagtaacatatgatgcagccctaaattcaataaatgcagcttcatcaaggaaacagaaacaaacaattataatagagtattcatgataaaaatatgtgcaaggttttataaaggcccttcacaaaagcaggagatgtaaagaaagaattccagaagaagataccatgagggcttattttaaaagcataagtaaataatttctgaaaggatccaatttggatcctctattgctactggaagacttgatatcattttccaacctctttcctatcttctaatttttcacttgtttgtatttgcaatatctgaaaaaaatataatatgcaccagaaaaatacaaacgagaataaagaaaatcaaaaattggtcatggataacagcttgcattcccctttaattgtacctccatgaagacttagtgacaggtgatagggttgggatatttgtctccttcacatttcatgtttaaatgtgattcccagtattggaggtggggcctagcaagagatttttggatcatgggggtatatagctgcccaaggctgcccacttcttgcatcagtgtgacctgaatgtgagacatggagtcaaaggagattatttcagagctttaaggtttcatwactgcctcattggatttcagacttgcatggagcctatagcccctttgttttggccaatttttcccatttggaatgg

SEQ ID NO: 911471 - DNA, 787 bp, Homo sapiens
agaaaagccctcaaaaaccattacttttaatagataacacttggtttgtatttactgtataaaagtattatgctagaagcttagaatacagtaacatatgatgcagccctaaattcaataaatgcagcttcatcaaggaaacagaaacaaacaattataatagagtattcatgataaaaatatgtgcaaggttttataaaggcccttcacaaaagcaggagatgtaaagaaagaattccagaagaagataccatgagggcttattttaaaagcataagtaaataatttctgaaaggatccaatttggatcctctattgctactggaagacttgatatcattttccaacctctttcctatcttctaatttttcacttgtttgtatttgcaatatctgaaaaaaatataatatgcaccagaaaaatacaaacgagaataaagaaaatcaaaaattggtcatggataacagcttgcattcccctttaattgtacctccatgaagacttagtgacaggtgatagggttgggatatttgtctccttcacatttcatgtttaaatgtgattcccagtattggaggtggggcctagcaagagatttttggatcatgggggtatatagctgcccaaggctgcccacttcttgcatcagtgtgacctgaatgtgagacatggagtcaaaggagattatttcagagctttaaggtttcataactgcctcaytggatttcagacttgcatggagcctatagcccctttgttttggccaatttttcccatttggaatgg

SEQ ID NO: 911472 - DNA, 639 bp, Homo sapiens
caaatatcatcttgaattctcacatgttgtgggagacayctggtgggaggtaaatgaatcatgagggcaggtatttcccatgcggttctcatgacagtgaataagtttcatgagatctgatggtcttataaggtggagtttccctgcacaagctctcttctcttgtctgctgccatgtgagacagtcttttcacctttcaccatgattgtgcggcctccccagccatatggaacagtgagtccattaaagttctttcttttgtaaattgcccagtctcgggtatgtctttattagtagcatgacaatagagtaacacaccatctctctggagaagcctttctagatatttgaaaggacttgtgtgttgtgatataagctgtatctgctttctgtagcaccgcaaacccagtaatgctatggttcttgaagacttgtagaggcaccaccattattgtcttggacaagatttaaaagaattatgtggtgtgccaggaagagactcttgttctcttcccttactttctcccaaacaaatggagtatctctttgtgctgagccacatgtagctggggctggggtgacataagcaaccctataggtgccacctctgagactgtgttggaacagacctgaagcca

SEQ ID NO: 911473 - DNA, 624 bp, Homo sapiens
aatgtgattctcttttttctctcttttcttcaayatttattaattagaattctactacaaggaagttatcttttctatttatttatttaacccatctatttatatcagcttgaactcatgaatattttatttcaaaagttagcaaactttttctggaaagggctagagagtaaatgttttacgctctgtgggccatacagtttctgtcacaactactcaactgggttattataacactaaatcagccatagataatatgtaaaccatgcattcccattgggagcaatatcatctccgaaggggcaaaaattagttcttaaatgcatagaggtctgattgcataaagcacagaaatacattcaatataggaactgatatatagcatatctgagctattaaaattttgtagtgggtgagggcattgatatagttggatctgtgtccccaaccaaatctcatgttgaaatgtaatccccaatgctggaggtggagcctgataggagataactggatcatggggtagcttctcatgaatggtttacaccttcctctgggtgctgttctcatgatagtgagttctcatgagatctccccacctcgcttccttctactctagccatgtga

SEQ ID NO: 911474 - DNA, 546 bp, Homo sapiens
cttggggaatggttatgttttcctgttcggtggaaaggaagcatcaacatagaagattaggtaggagctcatgtacactaaaaatgaaagtagattagaatgagccgggttggaagtgggagaaatgtccccaaacacaggtttagagttggccttgagaacatcagcggtatggacagatgtacggacactggggcctgataattcttccttatggcgctgtcctgtgccttgtaggatggttagcagtattcctggcctctccctccccagttcctctccctccccagttatgacaaccagaagtgtctctggacattgccaactgtccactgggaagtaaaatcactgccattcagaaccaccagcacagatgctaagatcatgggtggcatttttctttcctttttcttttctgtggtttccaactttccttgaataggcatagatcgcrtgaataagtaggagcaaaggagctctcgttgggatgaccatgccactctcctgttcagaaccttccagcaaattcccaatacacttagcttc

SEQ ID NO: 911475 - DNA, 619 bp, Homo sapiens
gcaggggtttcaacagacagagtaacaggggacataatgaagtcacaggcctaaaagaaaggatccaatgactttgcaaggggctagcaagaaagcttggagactaaagtagcaaaaagagcwtctattaatgcttcctaaaacaatggcaggaaatcaattccatggggcttaactgatgcaggcctggaggcactaaaacccattttgcctggtgaagtgagcattttgtgggtcaccaacagttcatcatgatccatttggattggccaagctatgtttaaaaagggatcagtgactccaaaccaacctgaactgcagggcatattgacagaaagggagtgactaatttgtaaatgtgaatgaagctgtattttatttaagattaaaaagtgatgaacaagagagagaactaaattacagccttgtggacggctacattacaggaattcatcacaatttcccttctggggcttcagagcttgactctgacttatgctttttggcatggaagtccgaaaatccaatatgggtaattgaatgagtgtacttgtattagttaggataggctaggtttgttgcaataatgaacaaccctcggatcacagtagcttatcaa

SEQ ID NO: 911476 - DNA, 633 bp, Homo sapiens
cagactggagtgcagtggcgtaatctccrtgcactgcaccctccaccccactgaggtcaaccaatcctcctacctcagcctccctggtagctgggactacaggcatgtatcaacatgcctggctaatttgtgtattttttgcagagatggggtttcaccatgttgtccaggctggtctcaactcctggactcaagcgctccacctgcctcagccttccaaagtgctgggattacaggcatgagccaccaggcctcgcctataaagctctttaataaacttttttttttttttgagacagggtcgtgctctgttgctcagactggagtacagtggcacgatcatggctcactgcaaccttgacctcctgggctctagtgatccccacctcagcctctcaagcacctgggactataggtgcgcaccaccacacctggctaattgttttctttttcttttcctttttttctttttttttggtagagatagggtcttgctatattgcccaggcttgtcttgaactcctggcttcaaggaatccttccaccttaacctcccaaggtgctgggactacaggcataagccatgcacctagccaacaattattttttatcacaacacagcgaggttcctgc

SEQ ID NO: 911477 - DNA, 587 bp, Homo sapiens
gtgagaggtgtaaaggcctggtgcagagtaaaagcttagtcagtgattggcgttattggcgttgctggttctggatcacaaaagtggagaactgagacctgaactctcagggcacttagggtgagatgagagaaggtggcattgggatgggcaccaagtcaactgacaagctagaaatcggacaggaaaagggatttgttccatctttaccctaactggtctgaccccacctggatgttctccaattcaactcagatattaagtacccagagttaacacagatcccacaggtgaagggcaaagtcatccacaagcctgccctcacttcaaatgccagctgcacttcaagggccccaggccacttccgaccaactggctgtaaatttgggagttctcgtgaccctctcagtttccataattcactagaatggctccccgagctcacagaaagcaatgtacttatgattgtacctttattattaaggatacatgtagaggaagatctggaggggtcttggatgcagagtttccgtgctcatcagygtggtcatcaaccaggaaactccaccatgcctcgatgtccagag

SEQ ID NO: 911478 - DNA, 514 bp, Homo sapiens
gaagaagaaacagtatgcaagctttaataaagctatttgcaggccaactcccaaatttctagtatttaccgctcctttgcagttcctyttacatttgtaacagttgacctactaacaggttcccagaaacacagattcaaattttggcaggcttacctcacctctttgtccttccaaagtacataaatgctaaactgggttcacagtgagaatgagagtcattctaacaagacttttaaaaccaagaccctttctgctccctaccaagttactgccatcttctccgaagaaataaagttttgtcagtgtgcccttggcataatttcttcagcctggattaaacacaggtgactgagagtccgccttatctccacagggcattagtcactctataaaagttaaatttattatgaaatgctttgtttgtgttaacatatatcttctctgggaagctggaaacaaaggcatgtcctttaagactccatatggggaaaacacatcctcctttggaatt

SEQ ID NO: 911479 - DNA, 686 bp, Homo sapiens
tggtattcaaactgtctgatggcaaacaaagactggtctttaaaccactctgctgatctcctatcaatgagtgggagctgctaacggtgctagygagatttcaatggaagaggtcaagcaaaaactgaccaacaacttaacaagacatgtcaagtctcagaagggtatatagataaggttaacctagagttctttaactccagattatttgctcctataacccagatcagggtgactagatataggacagggtgatgatgatggaaatacagacacagggagaaaaaaatgttgtgtgtcaaaaacacttttaattttaaagcaatgcaaggaactcactggaagacattcaataatattttggtggaaagttaacatacttatccatgtcgtatcaggcctcagagtcagtcatgcctttattttaatacaattccatagcattttcaatacatacctattccttaattgtttctactaagctgggttccatttgctttcttcacatggcactgtattgcagactttattctagggtattgtgttcaaatctaccaggtgtattgttagctgttttctcacattgtatttgtcatattatgtgctataatttacctaatctgagctctttaactgaactttagactattttaaatttttcttttttataattgataaagccaaat

SEQ ID NO: 911480 - DNA, 603 bp, Homo sapiens
tggctacttgctggtcagttttgtttcatttaattgtatcaacaacctattgtttaatctcatgcctggaaaagagatgggattctccttggatattttgctacatatttttcatgaaacacccatgtgtcaatccctaaaacacagagactgtgttctacgctgcataccctttaacaccatagcattaaatacagtgctaagcaaatagtgtgcactcacttttttcttatttaaatgtttttttttactttgcttcagtttctttatttgcaaaattgaaatagtattatattttaaggtgatacctaataacaacataatatctaataagaggacaatatctaataatcagtttgtacatgctattagtataaaaaatccacttattaagcacataatacatattagctactattattgttgttgtcctgttgatagccagaggatggtagggaattcctaaatcacttttacttttctrtaaatatcttggtcttctcctgactggaacagatacagatgaaggtccttttagccgtcatggtctattagttttgcctctcctccattttcaatggctttttctcattttctgtaaat

SEQ ID NO: 911481 - DNA, 639 bp, Homo sapiens
acacaataaaagtgagagactttaataccccacggtcaatattagacagatcaatgagacagaaaaytaacaagcatattcaggacttgaactcagctctggaccaagcagacctaatagacatctacagaactctccacccaaaatcaacagaatatacattcttctcagcaccacatcacacatcacacttattccaaaattgaccacatagttggaagtaaaacactcctcagcaaatgcagaagaatggaaatcataacaaacagtctctcggcccatagtgcaatcaaattagaactcaggattaagaaagtcactcaaaaccacacaactacatggaaactgaacaacctgatcctgaatactactgggtaaataacgaaattaaggaagaaataaagatgttctttgaaaccaatgagaacaaagacacaatgtgccagaatctctgatacgcatttaaagtagtgtttagagagaaatttatagcactaaatgcccatgagaaaaagcaaaaaatatctaaaattgacactctaacgtcacaattaaaagaactagagaagcaagagcaaacaaattcaaaaactagcagaagacaagaaataactaagatcagagcagaactgaaggaga

SEQ ID NO: 911482 - DNA, 561 bp, Homo sapiens
agggtagagggagtgtcagtaacatgtgagccaaatgggctcaatatatgcagccacatataattactacatacatagtawaattccagtcctgttataaatttttctagctttattgaggtataaactgaccaataaagtcgtatatatagaatatatataatgtgatgttttgatatatgtatgcattgtgaaatgactaccacaatcaagctaattaacatatccatcacctcacagagctatcttttgtgtgtacatggtgaaaatacttaagatctactctcttagcaaatttcaagtatataatatattaactacagtcaccatgctgtatactaggtctccagaacttatttatcttatagctgaagatttgtaccccttaaccaatgtcaccccatttctcacacccttgtcccctgataaccacccttctactctctgtttttatgaattcaacatttttagatcctacatataagttagatcatacagtatttgtctttctgtgtctggctcatttcctttagcatgacatctctaggttcatccatattg

SEQ ID NO: 911483 - DNA, 584 bp, Homo sapiens
caatgccccaaaggaatcagaagcatctctatttcattgtgtgcgaagggttacttttcaggtgaaacagggcagttgcctctctgaaaatagggcagctggcctctccccaccaggctgtgcaaagatagttaacagaatatctcacagagaagttcagttaccaaacaaaatctgtttagaagatgaatattttctcaaaggttgagaaacctatcaaaaataacaactacaactttacaagacatgtatagtctagtaagatataaatgcaaacaacaaaaagttaaaaagcagagggataaagctaaagttggagttttcattagttttatctttacttgtttgttagtttgcttatgcaatcactgttaagttgtcatcagtttaaaataatgggttataagatatcatttgcaagcctcatggcaacctcaaatcaaaaacaaaacaggccaggcgyggtggctcatgcctgtaatcccagcaatttgggaggccagggcaggtggatcacaaggtcaggagtttgagaccagcctgaccaacatgatgaaagcccgtctctactaaaaatacaaaaa

SEQ ID NO: 911484 - DNA, 665 bp, Homo sapiens
gaatgtacaaaggcacagcggcaataaagagtacagctggttgragaagttgtatttgggtccagttagagaaaaggatcatcatgagacatgaaggaccatgagttaaggtcagatcttgagagggcttgatcaagctaagaaatgtgtacaactttatcacacgggacaataacaaatcactgaggggtactaggaagaaaaatataataaaaagtaagtggattgtggaggaggaaagttagaaagaccaagtgataaaacgaagacttggattaggctatgacgggtgaagatagaaaagaacggactgattcaagaacattttgaggatatacacagggtgattgctgtagattgttatagtattggtccctaatgattcatgcatcttccatccatgcttttggtaatacccacctatcttgcctctgaacttggctattagcaaccacacaagcagaggcttggaaagaactcatgcattgaggcttcacctcttgctcatgctggataccttgagaccatcaccaggaggctaagaccaggctagcttgttgtagatgtgttaagcccattatttcagctgataaccagttggtctggctagctattaaaaactgctagccagaaagaccccactgccagacatgtatgtgatgcaa

SEQ ID NO: 911485 - DNA, 667 bp, Homo sapiens
aactgtaaacttgagggaatcgtaatcagatatcattgagggtgctcagagtccacagctatttgaaggaggctmcccaaagcaaattttgcaggcttcagttttaaccaggatggtgctggggggtggagggaaaggcatacagaagatgagaaaatatgaaaagcattttgaaataaaaggacaaagctaatgcagtttgtatgaaagagatggataatgtaaaacataaccttcaaagttatttgaaaactttattatggctgggatgactaacaaaaataaaggggctataaaaaggaacccattttagaagtaagagcctttattttcccttccaattagggcacagctgtaccctattggagatgcacaattggttcgagtgtaaaagtaggattatatatgcagatttgagagtcattcatcataagtgattgctgacatcaagatctgtgtgggaaatgaagagcaaagaatacagctttggctctgggaaacaggaataagatataagagtaagagtagatatagaaggtagcccagccagaaaaaagagcagggaaaaaaaaccagcccattgctatgaaaccaatgagagatttttttttaatgagtagtcagcattatcaagtgtctgaaggagtcaaagttgataggaactgaa

SEQ ID NO: 911486 - DNA, 593 bp, Homo sapiens
ttggaactggaacctaaaatatttmtattattctttaagttctattaccaacttactaatgatgacatttgtgggtgactttgattgacggaaaaatagcaataaagatgtgaaaagactcccattcgtggaagaataggaatgaggactgagagtccccctgtggtccttttctgatttaatcatagaattgtaggatttgataattaataaaccaatgggtgggtatcattttttaatatacaaaaagccctacacttacctgagctcttgatttaggagaccctggagaaaaatatatattgtttccaaatagtttcagagagggggctctagtttctctcaatataaccctttctggtcttaagttcctttatcaccaaatactcatttctatctaacccaaatcctgactgctgtcatttgagcccaaatccttttgttcagtaggagctagtgtaaactttttatttatagctttggaaaggtgcaggaaatatatttgaatgatttctgactgctgacaagccttaacaaccgatagtcctaggcactgaactgaatgtctcttggcagggacggctgttttgagg

SEQ ID NO: 911487 - DNA, 593 bp, Homo sapiens
ttggaactggaacctaaaatatttctattattctttaagttctattaccaacttactaatgatgacatttgtgggtgactttgattgacggaaaaatagcaataaagatgtgaaaagactcccattcgtggaagaataggaatgaggactgagagtccccctgtggtccttttctgatttaatcatagaattgtaggatttgataattaataaaccaatgggtgggtatcattttttaatatacaaaaagccctacacttacctgagctcttgatttaggagaccctggagaaaaatatatattgtttccaaatagtttcagagagggggctctagtttctctcaatataaccctttctggtcttaagttcctttatcaccaaatactcatttctatctaacccaaatcctgactgctgtcatttgagcccaaatccttttgttcagtaggagctagtgtaaactttttatttatagctttggaaaggtgcaggaaatatatttgaatgatttctgactgctgacaagccytaacaaccgatagtcctaggcactgaactgaatgtctcttggcagggacggctgttttgagg

SEQ ID NO: 911488 - DNA, 562 bp, Homo sapiens
taaggtcagaatattctattggtttgtgttagtgtcttgtattcatccattttcatactgctatgaagaaatacctgagactgggtaatttataaagaaaaaggcatttccatacatcctctgaaatctaggtggaagttctcacacctcaattcttgacttctgtacacccacaggctcaacaccatgtggaagccaccaaggcttggggcttgcaccctctaaaacaacagcctgagctgtatgttgacttctttcagccatggctaggacatagggcaccaagtccagaaactgcacaaagcagcaaggccccaggcctggcccatgaagccatttttcactcctaggcctcctggcctgtgatgggaggggcttccgtgaagacctctgacatgccctggagacattttccccattgtcttggcrctaacatttggctgctccttacttatgcaaatttctgcagccagcttgaatttcttctcagaaaatgggtttttcttttctattgcattgtcaggctgcaaattttctgaacttttatgctctcttccctttt

SEQ ID NO: 911489 - DNA, 650 bp, Homo sapiens
aagaatagccaacagctggaaatattttattgggtttaacatacaatggactttagcataatgtcaagcctttgaaaatatatgtaattaaggtatttaaaacataaaaataacaaaaataaaacttttcagaaagttatctaaagactttttcacacgtctaatgattctaaagaggaaatgagattagaaaatgtttagatagcagttatatttcaaagaattttcatattggtatcaaatttaaggctgatagtctgtttagtaaataaaaattttttaagttatatttcaaaagacatacaattatcagtactgattttaatgcttcagggataaacttttctctttcacattggaaaaggtagctccaatatcacatatattaaatctttgaatgtaagcatagagcatattttcagaaaacttttttaatatagtctttgagttttctgtagtaaatacatgtgtatagtaatcgagggttttttaaaaaatgcttttgattcattgtcttgctactgaaacatactattttgcataattttcaaattaattttgaacacttcctgtactgatgctgagtgtataaatttacagcaactttacaggggaaaatttgacartatatattaagagctttaaaagct

SEQ ID NO: 911490 - DNA, 633 bp, Homo sapiens
acaaaacaattatcagccaataatcttgtatccaaggaaattaagtttcataaataaagaaaaaataaagcattttttagacaaatagatgctgagagaattcaccactgccaagataacactacaagcacgctaaaagaagttctatatcttgaaacaatacctcaacatacaccaaaataggacctcaataaagcataactcccacagggcctataaaacaataacacaatgaaaaacataccaaagtattcaagtaacaactagcataatgaacagaatagcacctcatatctcaatactaacggtgaacgtaaatggcctaaatgctccacttaaaagacacagaatggcagaatggataagaattcaccaaccaagtatctgttgtcttcaagaaactcacctaccatgtaaggtctcacataaacttaaagtaaagggatggaaagagatattttatgcaaatggacaccaaaagcaagcaagagtagctatattcttatatcagacaaaacacactttaaagcagcaacagttaaaaaagacaaaaagggaccttatataatgataagaggactagtycaacaggaaaatattataatcttaaatatatattcacctgacactgga

SEQ ID NO: 911491 - DNA, 536 bp, Homo sapiens
tgcccttcaagtatttttaatattgtcatctagtggaattaatttaattgttgtttcctcatatcgagtgcacaggcatgaagtgattagacttactaattactgggctaagtagttgtttatgtgatttcagttattgcacatacatttacaaaaatttgtttttgacaggtagtcaactatattagatgttttgagaggtagatgttctgcatttgaagattacaaaaaatactgtgtgtttggttggtagtttttttcacttaacccttagaagtttggttcagcaggctaacatgaatacttcaaaactgaaaacattttggaaaaaatgtctcaaacatacggtaatgctattatatgactgtaaaagtgcgctgcttttggtattttagataagttaaatattccagaatgcttaaaatataagaaaaacaagtatgccgtttttcatcacttcattctatttggtttgctatattattttatttgaaatcaatcatactatayatatatagttacttaaatttgggcat

SEQ ID NO: 911492 - DNA, 638 bp, Homo sapiens
aagacttctcaatataaatttaagtaatttctgactaggtttaatatccacaatawatattttttaaatccttgagtgtatatagtaccgttcaaacgaaaagttttcggtacttctcaggcattatttcatttactttcacaatttcccactggacaatgtgttttgcactgaattgaggatggggcaccaatatttgctgtttctgctcctgcttctctacatctaagtctattagagagtaagatcacatgaaattgggaagtaagattgttttgttaattaatttctgcttacattgcatggatttatactgataagaaatatgtatgagacaaggtgctgtgtattgtggtagatatcaaagttggacacaaataaaaacataaaaaacgcagatagtgtgttacagaatatgctatggcaaaattcacaagtgaactcaggtagcgagtcagcaagctctaacagaagacattggtttgaaccgggaatctacaattagtaactgtgtgaacttgagtgcatttttaaccatttacttccttgattcttagacttaagttatgtagaagaggaaaaacaatgcctcgctaagtgacttgcatgaatattgaaatagatagtatgtggaaata

SEQ ID NO: 911493 - DNA, 611 bp, Homo sapiens
cacaagtgtattgactcgaggcctttgtcattaaatatatactgaataaatgcccacagcaccagctggtcagggctgggctgctgactctttacagcaccctccttggggtctgtaagcagcygtgtcccctagccctctctttcactgggtatctgtgtctgagtgcatttgttcatccattgtttggccagggtctgcgggtcagacctggtagttttgtttgtttgttttgttttgttttgtttttgagatggagtcttgctctgtcgctcaggttggagcacagtggtgtgatcccagctcactgcaacctctgccttccgggttcaagcgattctcctgcctcagcctcccgaataactgggactacagatgtgtgccaacacgcctggctaattttttgtatttttagtagagacagggtttcactgtgttagccgggagagtctctatctcctgacctcgtgatctgcccgcctcggcctcacaaagtgctgggattataggcatgagccaccatgcctggccaatttattgtatatttttaaatagctagaataaaagaattgtcacattcccaacacaaggaaacagtaaatgtttgaggt

SEQ ID NO: 911494 - DNA, 473 bp, Homo sapiens
tttagtttactgagaaacctctacactgttatccatagtggttgtactaatttacattcccatcaacagtttataaagactctcttatctccacatcctcatcarcatttgttattgcctgtattttttatgtaattcattttaactgaggtgagatgttatttcagtacagttttgatttgcaattatctggtaatcaatgatgttgagcaccttctcatgtgcctgcttgtgatttgtatgtcttctttcatgaaatttctagtcaaatcttttgcccattttttttaatcagattattagagtaatatagagttgtttgagctccttatatattctggttcgtaatctgttgtcaaatgggtagtgtgcaaatattttctcacattctatgggttgtctctttactttcttgattgtatcacttatgtgcagaagctttctaacttgttgtgatgccatttgtctatttt

SEQ ID NO: 911495 - DNA, 559 bp, Homo sapiens
agcctcagcctcgctgttattgcttctacttaggtgcaaatgttgctcagacaaaaaaaaataataaagggcaatgtatgataatcatgtctccttttcctacataaaaggcagttatcaaaaaatcattgagctggtccccaaaggtgagcctgtaaacagaaaactgtcccgtcctcaggtctcactgtctctaaaggaggctcaatttaaacagatgtatttgtgtgtgtgcgcgcatacaactataaatcaatttttaaaaggaaaaaagttgaaatgtctttgagcagtgatttttaaaaatgactaggagttaactgggccaagaaggcatgatggacatggaggtgcaccaccaagattgaccttcaaggaagggcttgttgctccagctgtggtcaggcagcttctagttgttagttctctcaggtaccacctgagttgcagagtcctgccagccaatgtcacaccctctctagggcaacccactactattgactgatgaaggggcakagtataaacactcagccattttaaccccatttgagacaactct

SEQ ID NO: 911496 - DNA, 603 bp, Homo sapiens
gatcaaaatcttttttgtgacactgacctaaacagtatcgcaagaagcatttttaaagctcctagtgagttatctgcttttaggagtgtgttctcagcatttcaaatagtaactgctctccctccatatgagtgaccaaccagtgggcctatatattgaagagactctcagtctttctcctcaactgtctaaagaaagaatactaacacctggtttagaaacaactgatggtaaaaacggaagagtttatccttgagcctagtttcagtcatatcttatattggaattgagacacatgattcaatctgaattcacagatccaggctgaaacacaagattcagggctgcattaagaagggctccaacccaatattcctgtcaataaatgtcaattagttaaactgctgacttacgttgttgaaatctttagcataggcttggtagaaccctaccaatgctgcacaaagcagtacagtttaaartacaagctaggccgcaggcagtagctcaaactgcatgtcaccagcaggtagcagtgccagttaggaagctaaagcaagagaaaaaagatccctggtggtagtgaagagtgcctagatatcc

SEQ ID NO: 911497 - DNA, 715 bp, Homo sapiens
aattgtcaacttccacttttttaaatttacttgtattttttctttatgtaattamatcagcttagagaataaaacatgaacaaaagcatcaacattatttcagtaataggcatttttttttaccctaggaccacctacctgttcactgcttttataggcatcccagattaggcatgatctgctgattcgaaccagcctcagagagttgtttgtgtatgtctcttcatatcatctttcctctacatgtgtctgtttcttttcacatggcattctttttatagggacaccagttatattggattaagggctcaccctacccccttatgacctcattttaacttaataattacatctgccatgactttatttccaaattctgaggtactgaggttgggacttcaacatatacattttgcatggtacacagctcaccccttaacgccagggctttacttttgcagagagccagttgttaaacatttaccaggacactactgcacacaaccctgagattgttctctttctcaattaggattctgcagaaggatgagaggcaagcaatttcaagcagaaaggcacagaactgatgaatataagttactagtaaactagtggtactatgactatgaacccagtgtttctcttaacctaagatacttaagaaatgtagaacaagtagataaaactcccccacaagataagagagtattaccta

SEQ ID NO: 911498 - DNA, 617 bp, Homo sapiens
tataggtaaatatgtgccacagtgatttgctgcacagatcaacccattgcctagatattaaggccagcactgattagctattcttcctgatgctctccctcctcccaacaccatgacaggccccartgtgtgttgtttccccccatgtgtctatgtgttctcatcatgcagctcccacttataagtgagaacatgcggtgtttggttttcattcccggcatttgtttgctgaggataatggtttccaattccttccacggccctgcaaaggacatgatctcattcctttttatggctgcatagtattccatggtgtttatgttccacatttttaaaatttgatctatcattgttgggcatttgggttaagcccatgtctttgttattgtgaatagtgctacagtgaacatacacatgcatgtatctttataatagaataacttatattcctttggatatatacccagtaatgggattgctgggtcaaatggtatttctgcctctaggtctttgaggaatcaccacattgtcttccaaaatgattgaattaattgacacccccagcaacactgtaaaagcgttcttttttctctgcaacctctccagcatctgctggt

SEQ ID NO: 911499 - DNA, 656 bp, Homo sapiens
gtggctcacgcctgtaatccctgcactttgggaaaccgagggggggccaatcacctgaggtcaggagttcgagatcagcctggccaacatggtgaaaccctgtctctattaaaaatacaaaaattggctggacrcagtggctcacacctgtaatcccagcactttggggggttgaggcaggtggatcatgaggtcaagagttagagaccagcctggccaacatagtgaaaccctgtctctattagaaatacaaaaatttgccaggcatggtggcacacacctgtagtcccggctactcgggaggctgaggcaggagaatcacttgaacccaggagatggaggttgtggtgagctgagatcgcgcccctgcactccagcctagcgatagagagagacttcgtctcaaaaaaaaaaaaaagaaagaaagaaaaaaaaaattagccaggtgttcaggcacctgtaatcccagctactagggaggctgagacaggagaagcgcttgaacctggaggtggaagttgcagtgagccaagattgcgccattgcactccagctgagcagcaagagtgagactctgtcaaggaaagggaaagggaaagggaaaaggaaaagaaatcgctaactaggccgggcgcggtggctcacatttgtaatcc

SEQ ID NO: 911500 - DNA, 658 bp, Homo sapiens
cactcctgattaactttttttttggttgctctgaaacaaatgtggcacaataaaagaaattggcttcccagaagatgtatagaatcttctgtttacttgttcatttttccttattttctaggagtgaacaatgccccatttccaggtgaatggcaatggagtagttgtccgagggtactcaatactcaagagtcagctgatcatgtccttagatgcaccagaaatgatggtaaagcttgggagtgcggatacctttgattctaattattagcgaatgcctcagctcagcatcactgggctatatggggcctaaagcagggcagagccaatcaagaacactcaaagacagacagatgcagaactgggaatggacgtgtagggacgggaagctggagaaagatgggagcatgaatatgcatgtaagggtacatagatttggccgggcatggtggctcacacctgtaatcccagcactttgggaggccgaggcaggcagatcacctcaggtcaggaattcgagaccagcctggccaacaaggagacaccccgtctctactaaaaatacaaaattagtcaggcatggtggcgatgcctgtaatcccagctacttgggaggccraggcaggagaatcgcttgaacccggacggcggaggttgc

SEQ ID NO: 911501 - DNA, 636 bp, Homo sapiens
tccttatcattgtgtaaagtaactctcatatcctgcagctggaagatgacaaaaatatgagaaccaggcctacgatgtaattaagaaggtagcagagcttcagagaaggtggtcaaattattagtcatcttgagatccttcagcacactggtccaccatattgatgatgtcatgctggttgggctaaattaacaagaattaacaggtgcactagagtcttggtaagagacatatgttccagagaatgggagtaaactctacaaagattcctacataagtaaaattttgggggaggtccagtggtgtggggcatgctagatatttcactccaagtattgtgcctcccacctttgaccactaggaaggaagtttcattcctggtaggactctttagattccagaggcagttatccaacacttggcatacttctctgacccgtttactaggtgacatggaatgctgtcaatttcaagtgggttccagtgggaaaggactattgatctagactgtggtgtaaataaccctgctgcttagccyacatgttccatcagaccctaaggcatttgaggaacttatgagggcaaaagacactatctggaccttggtaagccctaataagaataatcactttagac

SEQ ID NO: 911502 - DNA, 505 bp, Homo sapiens
ccacccacgttgggtgagggtggatcatccttactcagtccactaactcaaatgccagtcttttccagaaacacccttgcggacatacccagaaataatgctttaccagctatcagggtattccttaatttagtcaaattgacacttaaaattaaccatcacaacaatgttccatgagagcatgaacttccaaagttaattcagatagaaaatctgaacagaccaataaccatttaagaatttttaaaagttatcgaatgatcatctgtttaataacaaactattaggaatcacaaactataatttttttggaacttaacacaaatttatttggttttcatgtaatggggtgtgtgtgtactttagtttctttttcaaaattttattttattttattttatttgaagttctggggtacatgtgcaggamgtgcaggtttgctacataggtagacatgtgccctggtggtttgctgcacctagaaacctatcacctaggtattaag

SEQ ID NO: 911503 - DNA, 602 bp, Homo sapiens
aaaaattttctcctattctgtaggttgtcagttcactctgatgatatttccttttgctgcgcagaagttctttagttcagttagatcccatttgtcaattttggcttttgttgcaatggcttttgatgttwttgtcatgaaatctttgcccgtgcctatgtcctgaatggtattgcctagattttcttctagggtttttatagttttgggttttacatttaagtctttactccaccttgagttaatttttctataatgtataaggaaggagtctagtttcaattttctgcatatagctagccagttttctcagcaccatttattaaataggggatcctttctccattgcttgtttttgtcaggtttgttaaaaatcagatgattgtagatttgttgtattatttctgagatatctattctgttccattggtatgtctctgttttggtaccagtaccatgctattttggttactatagccttgcagtatagcttgaagtcaagtagtgtgatgtctccagctatgttctttttgcttaggcttctattggctatacaggctcttttttggtgccatatgaattttaaagtttttttttctaat

SEQ ID NO: 911504 - DNA, 590 bp, Homo sapiens
cctgcagaggaggaatcctgcgttttcctattgtatatacagagatctctrgaagaacccacaaggagctggtaacagtggttacctctggggaggcaaccaggtgactgggcaaaggggtgtgagagagacttaattttcaccttacatgcttctgctttttaaattctgaaccatgtatctatattatccatccacaaataaaataaaataaaataaaatatacccccagtgaaagaaaataaattttaaaccacaggcaataagaactaacatacacacacactcacatacacacatataaatatatacagacagtccctgatttaagatggttcaatttacaattttctaatgttatgattggtacccatataactattctgttttgactttcagtacagtattcactaacttacatgagacgttcaatactttattataaaataagctttgtgttagatgattttgcccaacagtaggctaatgtaaatgttctgagcttgcttaaggtaagctagactaagctatgatattcggtatattaggtgtattaactgcacttttgacttaaagtattttcaatttgt

SEQ ID NO: 911505 - DNA, 535 bp, Homo sapiens
cctgagaagcctcgaaatccctgtggccccagttttctcatttattaaatgsacataattatactgaccttctggttggtggacttaatttaggttatgttagagagtccagcatagggcattcttagctttaagtgcccagtaaatatttgctgttaacattaatgttttaattgtcatttctttatctatgtaattgaggaatttggcattatattaatcagtattaatcagggttctccagagaaacagaaccaataggatcaataggatgtctaaatagacatagtgagagaaaaagatatttcgtttaaggaattggctcgtgacactgtggtggctgacatgtccaaaatgtacagagaagttcagtaggctggaaactcagggaagagttgaggttgcagctcaaatttaaggcagtctgaaagcagaattcctttctgctcaggagaactcaatgttttgttttaaagccttcacctgattggatgaggcccacccacatcatgaagggtactctgcttaaaactct

SEQ ID NO: 911506 - DNA, 626 bp, Homo sapiens
acctgtccctttccttactttagtctttttcctccataacctttagtgtcttctaatatctagaccattggctgactcgtttgttgtcmatctccctctttaaaattgaagttccatgacagcagagatttctgtctgtatcatgcatggacatcttcaatgcctagaacagtgcaggtacttagtagtaaacatttgttgagtgaatgaaacaaatgctgttagaaacttctttttgagtggaattttgatttccttgagatcagctgtcaataatttctatctttatattcaggcatagtcagtgctcagtaaatgttgaataagcaaatagaacctgaaatataaaatcctaacatttcacattagctagttccagaaagtttcagtactaaatgtaacatttaaaaaacggtggaggggagggatggtggaaggatagttttggtgcatttagcttagcctccactttcgacttcagaattcacattgcagtttggcaattctttcattattactatgattattaattggatgctatttaaaaatttggcttttaaactctcagctgatgttttaggagattatactatacagggtacagaaattgctggggctgactgtaa

SEQ ID NO: 911507 - DNA, 637 bp, Homo sapiens
tagctgtgtgaccctgggcattcactctgagcctcagttgccctatctgtaaaatgaggagaataaccctatggggcaaaagtgcttggtgctgcactgtgaatgatacagggtactgttactgctgctactacaggtgctcaaaggatcccaggatctttgggtgtgcccaggtttgggaaattccacctgtagctacggaaacacccttgggccaggaaaatcattactttaagatacattgcctttcttatgctcctgaacaattaaaagcatgtttaacaagtgctactgccccttctcctaatggtactactagtattatggctctcatcttgttctctttcataggggtagatggcattgaccttatccatacaaagcagcctgagaaaattcctataaaatttacaagggacacttactttgccactctgcaagtacagaaagtttcagtcaccccacaggaccaccatgaagtaccagatcttcctttggacttgccaagcccagtgactgcattyggacagagggacctaatattaactcagtcctaatagcttcaaaattctgtgactttggtgtttcagaatataattcagtgagccagatgctgtccccagggtatctgtctccc

SEQ ID NO: 911508 - DNA, 637 bp, Homo sapiens
attatttcaacccattattatatttctagaagtgatgmttacagatttttttttctttttgagaactgcatgcttttcataaagtctcttggaaaagtaatctctatgtagttttgcttcttcattcattcagcatttgtcaatacttgttactggcttgcttcctgaggtctaggagtttatgttgtatcaagagagatctacagataatagaagttactgtagaattttaagttccacagaaggtgcatttctgaggccctataaagcagcatttgaatcaggtcagctcttcagccctcgagaggtattttcatgttcttgttttctgttttttagtgatgttccatttctggtgtttaatctaggcatgccactaaatatttacttttctttgtgagacaggttaagactgtcttaacttagaagattcttcatttctttggtcactggaatagcattgctgtcttttttgtcatcattccgttttgcattgttatcattctcttttgcattgttaatatcagaatgtaatggtccttaggaaagcacagtgtggctcggtagagtgatgtgccttgttgtttctgatgcttttttgattctctctgaagcctgttggtgagcctgttgggtg

SEQ ID NO: 911509 - DNA, 703 bp, Homo sapiens
aattttcctggcataactcatcaaaaaagtattattaataatatatccatttgccaaagccaaatgatgagttacaaatctttcctttgaaagggataggaaatccaactcaagaaagcttgaagaataagaggacatatggacttctatcactataaaggtgaagggcaggaccagcttcaggtacagcttgatctggtgacatcaggacgagctttgttcccttccatttttttctgtctattttccacagagtcagcctattcttcaggcctcagataggttcccattgccaattccaaagtcttccatttggtagcaaagaagccattcaagtcttcataggttcacaccacacagaccacagaaggaatggctctcctcctatggctgtcaaggaggagcaagttccctctctttccccaagaagctttaacaaacttttctacagatttcgttgcttctaagtttctgcccatcatggatcaaattatggttgccagaagggtgagatgagatgagattattgactttagccagtcctgagagctggggaaagggtcaataccacaagaatggctgagcacgggacagaattaactgccccaaagcaaactccacgtggtattctcttacaggggaagatgaatasaagttaggcagcaaaggacacttgagtccactgcaccaaacaattctggat

SEQ ID NO: 911510 - DNA, 623 bp, Homo sapiens
tcctatgacatgtatggtagaagcattgtcccttgtgagcagtaatgtcctgtccctctccctgatccctaatcttgaggtgttggttaagcttagagtgatgttattctrtggtcgtattgctgcatcctaatcatgaatcatttctctttctctactcagatgaactttcccacattttctagaaacccccaagataattgggtttcatttcccattgcatgttgaattcaattaaaaagctgtaagagaataccatataatgtggctgagaatataatgacatttccaaaatattttttaaggaacttgaactctaaatcaatttagttctgctagtaaggacagagatttagtcatggaaaaatattaatctgatgactagtttttatcaaaattaaggatcaattatgactagttactttcagaaacttagttttggagatgaaaacaagtgatttgttttctgaactcctgcagggaacaaaaaaaaggtaatattggccccatacaatacataatttctgtctacgtgtgattgaagtgtcaaatgataaatcccaatcccctgttagaaacaacagtttagtcagtctgttcaggactttactgtatgtacttga

SEQ ID NO: 911511 - DNA, 608 bp, Homo sapiens
gagggtcttgactgcaagttgtccaggttcttgcattttgaacaaagaattggacaaaatgcacagcaaagtaaggaaagaacraagcaatgaaagagcagagatttattgaaaatgaaagtatactcttcagtgtgggacccggcttgagcagcagctcaagggccccagatacagaatcttctcgggttcaaatacaccctagaagtttcccattggccacttggtgttcacctcatataaatgttcaccttcacataaatgaagtggtggccccctattggttgcttactgcaaccaatcagaggctggagtgaagttacaaaggtcacacacctatacaaacatctggctagttgtggacagcaaccaatcagaagctgaagtgaagttacaaagttacagtcttatgcaaacgtctgtttgcgtctggttgcaaaaagcaaccaatcagaggtactttcaatttcctatctgcccatgaggaacaggtgggagtttgcaaagggtttgcctctggtccttttgctacttaggcatggaaagttagggttttactttcagtttagtcctaggaagtcagcatgaaacggccttaggttccctgc

SEQ ID NO: 911512 - DNA, 557 bp, Homo sapiens
aactgctcccacctccactcttccaatccctttttcttatgtttctcattagcatgtgctgatactgaaaatccaattgatttcattgtttattgtctgtccgctcatgtacacagaaatttttatctactcattccactattgtatcctgagcgttgggaatggtgtttggtgcatagatgatgctcctcaataaataccgaatgagtgaatgaatgaagtggaagagggaaaccgcaaaagggaaggtaggcatggaaacccagcatgctatcttgccagcagacatggtctcaattgcatcaactttttgctaggaggtcacgtgcaagtcaggtatttggctatcttaaagctctccaggcccatgtacaccgtcaaaaaacagggctccccatggcagtgactactactccagtttaaggtatctagtctaggtagttcacaaggcctccccactaytacattttgtgactctatgagcccttggataggggcactataaaaagagcctgtcttcagacaggcaggagtcattattttccccctccgttacc

SEQ ID NO: 911513 - DNA, 641 bp, Homo sapiens
catgcctggagtgtggctttcaagtgctcagcaatattgcttggtggagtcttcaaatcacaagcatccctcacttttatggggctgtctgctccaggcatccaatttgtattagcgaaagctccctctccttcataggagggtgtaacaaaagggaacccaagacatatagatattttctctgtgcttgtctgggggctgactgttcccagatcttattgaaagaggccaggcatggtggcttacgtctgtaatcccagcactttgggaggctgaggcaggcggatcacctgaagttgggagttcgagaccagcctggccaacatggagaaacctcatctctacaaaaaatacaaaattagctgggcatggtggtgcatgtctgtaatcccagctacttgggaggctgaggtagcagaatcacttgaacttgggaggtggaagttgcagtgagtcgagatcatgccattgcactgcagcctggacaacaagagtgaaactctgtcttaaataaataaataaataaataaataaataaataaataaatarctagctagctttggggcctgaacctgacttctcctaaaactgttggtctgctatgttactttcaaccccttcctatagcaatttgtgaaat

SEQ ID NO: 911514 - DNA, 641 bp, Homo sapiens
catgcctggagtgtggctttcaagtgctcagcaatattgcttggtggagtcttcaaatcacaagcatccctcacttttatggggctgtctgctccaggcatccaatttgtattagcgaaagctccctctccttcataggagggtgtaacaaaagggaacccaagacatatagatattttctctgtgcttgtctgggggctgactgttcccagatcttattgaaagaggccaggcatggtggcttacgtctgtaatcccagcactttgggaggctgaggcaggcggatcacctgaagttgggagttcgagaccagcctggccaacatggagaaacctcatctctacaaaaaatacaaaattagctgggcatggtggtgcatgtctgtaatcccagctacttgggaggctgaggtagcagaatcacttgaacttgggaggtggaagttgcagtgagtcgagatcatgccattgcactgcagcctggacaacaagagtgaaactctgtcttaaataaataaataaataaataaataaataaataaataaatagmtagctagctttggggcctgaacctgacttctcctaaaactgttggtctgctatgttactttcaaccccttcctatagcaatttgtgaaat

SEQ ID NO: 911515 - DNA, 670 bp, Homo sapiens
gttggctgggttttacctgatctaggttggactcaattgggtgtctctaagcagcaggttggatccagttctgctccatgtctattttatcctctttggaccagtggaccagccatggcatgttctcatgaaaatggcagaagcaaaaaggaacaagaagaggcatattaggcttcttaaatccttttgggaaccagcatcctgccacttccactggccaaaagcaagccgcatagtcaaatccaaagctaatgggctgggatgcacatttcaccttaaaggcaagagttgtgaagtcacatggtgtgttagtccatttggattactataaagtaatacctaagactgggtaatttataatggaaaatggtttatttggctcatagttctgtaggctgtacagaaagtgtaccacctgcatctgctcagcttctggtgagggcctcaggaagtttacaatcatggtggaaggcaaaaggagagcctgtgtatcatatggccagagggagcaagagagaggggagaagccagtctcctttaaacaagcagctcttgcrtgaactcaccaagcaagaactcactcattaacatgaggaaggcatcaagccattcatgaaggatccatctccatgacccaaacacctcccaccaggccccacctccaacactg

SEQ ID NO: 911516 - DNA, 602 bp, Homo sapiens
agcacatccttctggtgtgagaactgaaaaagttctgcccttctttgctgcttggagcaacaaggctctacctactcagcctgtgacctgcttgggtgagagtcccctggtgcagtcctttcactcaaatgatgatgggtatgttgcttagaggagaaataaacctttgctgtttggagccactgtggttaggaagctttttgttactatagcatagcctcgcccaccgtgactaataaaaaatactgttttcttctttatgcaaaaataaagtataacatcaacattttaatatgacagaaacttgttgaactcacccaaattcttactactaagaggtttgtaatgtttcagagtatgtccctatattcttccagggtgtgtgcgtgtgtatgggcatgtagagagaggaaaaggtatgtctatttagatgtgtggacataaatataagagacaaagaaagaggcctctgtatctatgcacctgactctgactttatcattgtggccagtccttagatttccragtttctaacctgtcaagtaagtgaatttgagcccaaggcggggtctcgatacacccaaggtcttggagtttaagag

SEQ ID NO: 911517 - DNA, 626 bp, Homo sapiens
tttcgaaggattcatgccactgtaatgagagaggcagtgtaggcaaatggtctgagccttggatggagattgaagtcctgactttagctgggaaatcttggttaagagtctttctgtaccttaktttccctaagtgagaataagagagttggacaagacgaatgtatctccaggttccaatttttctgagaatggttgatagagaagctgctctctccttaaaatgcatggactcaatggcttgaagatattccccatggggaaccattgccacggaggccttgcatgcaagaagtttgggtggggacagtgaggaactgaaacacaagcaccttccaccaattattgctgtgaagaacctgagcctgaagaagctccatctaattttttccccagagttccagattttagggtgcaatcatccagcctatacatgtggctcatagttcaaaaaattaaaagcaaaaccagaactctccagtaggaatggagaaaacctatctgtaggctgaactggctcctttgtcttaggaggcactggtcaggggaaaaaagctgtcttccagacccctcctttctgggtggctactgtggaatcaacggggtcactggctgtaaatcagtaa

SEQ ID NO: 911518 - DNA, 610 bp, Homo sapiens
aacaatattgtgtgctctccaagtgttttgcagaagcagtggggctcctgctgagacgtggtcttgccaaaccccctcaagctccaaagatggtcttttcaaaatctttctcctctattgccccgggccatgttcttccagaaaactgcctgcaagcaatttccttaatcgggttgctaagggcaaccccaaagaaacaacataccaagctatctgtctgtccatccgaatcccaaaagctttccttgtgcttcctgctctgaccaaagaggcatttgaggcacatgtgagagaacagctttccagaaaccacacttgagtccacagcagagcggaaggggcaggaggcatcaggaccatttccagatttctctctggccctgattgtctagatttgcatccaatcactgcaagagtttatacaaaagttgttagaaagatttgggtttcacacagagttatgaaaacaaggtagaagcctsatgtcttcatttcccatgaaatcttgtgggtgtaaatgaaacatgttttagtctcaaatcctggagctgtggggttcacaatggagaaatatccaggtctcttgaacaagactggacgataaccaggg

SEQ ID NO: 911519 - DNA, 555 bp, Homo sapiens
cccagggaattattccataccttggggacccgggraaagactgcgtacctggccaagactgatgatcaaccaagtgggatgctttatttcctctttagttagaagtttcaggatcaaagtgagcctttgagctatttgtcattttccctctaaatatttttgtcacacacacacaatttgtatagtggcttcttcagaagcctgtggcaatccttcctggctgtgaaaacagatggcctcacacaatgtggtccaaaaccagcagcatcagcattctctgggtacttgttagaaatgcaaagtagcaaagtatcagcccccaagtagacctaatcaatcggaaactctgggaatgggcctagcaatttacattttgacatgctgaggattctgaggcatgctcatgggtaaaaacgattgatctgtataatgctaccttacaaataagtaacttcagcttaaaactctttttttttttttttttaaatcctggaaggattctgctcttgggcaacacggcaagccagaagtgtccaggaaattaacacctacaaa

SEQ ID NO: 911520 - DNA, 629 bp, Homo sapiens
ttctcattttacagaggggaaacagaggccctttccttcttacaggagtccaaagctattgatagaaatttttaaaattttgtttaaaaatgtttgagtacttttaaaaaatatcttttcattttgaaatagttttaagactcacaagaagttgcaaatatagtttagttttctcatatacccttcacccagcacgctccaatgaaaacattggattcttttagggtttagggttggaaaaaatcttgaaatgatgattagttttaaatgctcattattcatgcaaacgcttagcctattcagaaagtatctgatactttctttttttgagatggagttttttgctcttgttgcccaggctggagtgcaatggtgcgatctcggctcgctgcaacctccgcctcatgggttcaagccattctcctgcctcagcctcccgagtagctgggattataggcgcccgccaccatgcccggttaatttttgtatttttagtagagatggggtttcaccatgttggccaggctggtcttgatctcctgacctyctgatccgcccacctcggccttccaaagcgttggaattacaggcatgagccactgcccctggccttatctgatactttctga

SEQ ID NO: 911521 - DNA, 555 bp, Homo sapiens
ccctgcctagaggtctgtgtggagcactcttcaatgttgtgagctgaattctgcctttagttaggccaaccctcctagcaacaggaagccagaatgggaatcttttcccacacatagctcagcagtgctaaaatttcccagacagagggaaaaatgatgatcttccctcatctctggctgtatttatctataaggcagctatttgatatgttgcattcctctgttgtaaataaatcaatgaagtgagccttccaggttatagttttactgtcaagtatcaggtgtcatgatccatatcttgatacaataaagttaagactctagatctagttagagtcacctgtcaaaatagctgggctgtgctgatgaacagcctggcaggactggtgctatggccttaaagaggcaagcagtataaaaatcaatagacattttgttgagttaccatgatttttagggtgccttgcaagragataaggaaaacagccaagggcaggcatatggaaggcctttttgtcacattctatgcccaagtcttccactattctctgctga

SEQ ID NO: 911522 - DNA, 654 bp, Homo sapiens
tttttttctcatatatttctaactttattttttgttatgggggacttttccttaytataatgatagcacaagtgtctggagaaataagcaagatcatagaggagctttcttaattgactgaagccttgaataatttgaaaccattttgaactacttgcatcatggacagctcattataaatgaaggcattaatttattgggtgagtttatgtagagtttcaatataatgatgtaattgctcacattattgtaagttttaagacttcagttttctttcagtagcagcatattttcataacataaaagtctatcttttctattttttaaacggaatgttttcacatgtatatgagtgtgtataggtgtagaaatagatataggtagccgggtgcagtggctcacatctgtaatcccagcactttgggagaccgaggcaggcagatcacaaggtcaagagatccagaccatcctggccaatatggtgaaaacctgtctctaggagaaatacaaaaattagctgggcatggtggtgcgcacctgtagccccagctacttgtgaggctgagggaggagaatcacttgaacccaggagatggaggttgtagtgagccgagatcatcacaccactgcactccagtctggcaacagagcaag

SEQ ID NO: 911523 - DNA, 654 bp, Homo sapiens
tttttttctcatatatttctaactttattttttgttatgggggacttttccttattataatgatagcacaagtgtctggagaaataagcaagatcatagaggagctttcttaattgactgaagccttgaataatttgaaaccattttgaactacttgcatcatggacagctcattataaatgaaggcattaatttattgggtgagtttatgtagagtttcaatataatgatgtaattgctcacattattgtaagttttaagacttcagttttctttcagtagcagcatattttcataacataaaagtctatcttttctattttttaaacggaatgttttcacatgtatatgagtgtgtataggtgtagaaatagatataggtagccgggtgcagtggctcacatctgtaatcccagcactttgggagaccgaggcaggcagatcacaaggtcaagagatccagaccatcctggccaatatggtgaaaacctgtctctaggagaaatacaaaaattagctgggcatggtggtgcrcacctgtagccccagctacttgtgaggctgagggaggagaatcacttgaacccaggagatggaggttgtagtgagccgagatcatcacaccactgcactccagtctggcaacagagcaag

SEQ ID NO: 911524 - DNA, 555 bp, Homo sapiens
tgtcattttctctgtcttcaaggtgagccttcacagactaaagtaaaaagttctcagcctgtttttatgacgatgttggctatttgttctacattgaaataatttttatgaccractctgagaaaataggtagccaaatgaatcctagccaaatgattctagaatctatggaaactgatgtcatccacaaaatgtcaagagatcacgccactgcactccagcctgagtgacagagcaagactctgtctcaaagattacgggatttgaatttgaattcaatgaattccatagcagtttggaaacattctccaacaatagcaattcttggacatttctatagctaaaatatgagagaaacagggaagttattctcaccacaattttagttatttttccaaattcagaaaactacaaaattttccagactaattaacatgctcctgattcaggacagaaagctgcttagagatgtgataacatcttcatggattcagaaatgaagtgcctactatgttctgggctctgagagcaccacagggtatctgtccttaggaa

SEQ ID NO: 911525 - DNA, 652 bp, Homo sapiens
ttactgtgctcttcagtgtttgttatagaattattttgagttgtaaatatttctccaattcctgtgccataaaacacacatatatcttagatcaatcacttggggcagatgcatttcttatggaaccatattctacattgtatcaaattttctatcagaaagaagtttataaactaatcagtttatgaacattaaggtcagtgaagtatattagacttagtattgtgttgacggaaacctaatagttcattacttccaatactcacttctacttttaccaatgaagagtctatgatcaacttttaccttccttagcaccatatccaaattagctgagataaatggatacaagtggataattaataccttcgtgtgtgtgtgtgtgtgtgtgtgtgtgtgtgtgttaggttgaatttcttggaaacacaaagttgcctttacaggttttccaggaagggctctttggagacgtgaagatggcaggatggggcagaggaagaaagtgaccaacaacttggttataactgaggcctcagctcacccagaggaaacttcaatggktctttgaagtgagcccacattgaagcatagggaacttcgctagcgcctctcagctctccccaccccaccttatgtgggacagcatggttag

SEQ ID NO: 911526 - DNA, 633 bp, Homo sapiens
cctatttagggaacaagtgattatgctacttttgcatggtcaggatactgtggctgttgaacaaatgtcactgggcaggcagtgcctcaaatactggtaatgctagaggtgtgtttttggtaaacaggcagagtatgatttgccgagttccttttactttttgtaatctttccttagagcatacctgtgttgggttaacagtgtaaataatagggtgtttattatattgtttattaatattaggctgttaactgtcagtggattattctggtctgatgtaagcttatgcaatggagaatgtcttcatgttacttatactaacattattgtgtctattaagtaatagattagtccagtgtgatgttaggagttcagtagagtgattagaatttaagatagatgttgaacttaaacatgttcttaattggtggctgcttttgggccaactgtggtggtaatattttttattttctgtaggaaggttgtttcctagggtctaaagagctgtccctctttagactaacagttaaacttacagggaggttaagtaattctgtgtataagcttaaagttgaactaggagtctatcttgracaaccagctatcaccaggctccatagccttgtcacttct

SEQ ID NO: 911527 - DNA, 532 bp, Homo sapiens
gggctcccaacttcccagccaggtgcttctgcaggcccacatcttgcccactggccaaacctttaaataactttgacycgggctactcttatgctcaaagacgtcaggggctctcccaaatctctttaccctgccagaaagtcttctatagtacggcctccacttagctttcacgcctgatcttccatcgcatcctgctcataacctgccactagtgaacccctgctgctccggctccacacttctcatgctggtccttcctcagtgctcctggggacacctcttgcctgtcactgtctgttggaatcctggacattcttcaaagcctctctcagatgcctcttcttttttcctttttatttattttttttgggatggagtctcattctgtggcccaggctggagtgcagtggcgcaatatcagctcactgcaacctccacctcccaggtttaagtgattctcctgcctcagcctccccgagtagctgggactacaggcgtgtgccaacacacctggctaattttttttttt

SEQ ID NO: 911528 - DNA, 322 bp, Homo sapiens
tgccagcccggcccccaggcgcgattcgcccgccccgccccgccccgccccagcccgcccsgctaactggggctcaccttccctaagccttggcggggaagggcgaggcaggttctcctcacttcccaaactgggaaactgacgctccgggatggcgctcgccggaacccggcccctacccagcgctgggagcccgctctccccgccaccggagcggttcacctcccaattctttgcatggcttgccctagcgatgcaaagaattgggaggtgaacccagcctactcagcccgtaagtcactactgaaatgtcacctcctca

SEQ ID NO: 911529 - DNA, 642 bp, Homo sapiens
ccaaaatgttgacagtgatattgacaataaaattcagatggaggtgatctcagatggagatgaggaacttgttggaagctggaacaaaggtgactcttgtcatgttttagcaaagagactggcagcattttgcccctgccctagagatttgtagaactttgaacttgagagagattatttagggtatctggcagaagaaatttctaagcagtgaagcattcaagaggtaacttgggtgctgttaaaggcattcagttttataagagaagcagagcataagtgtttggaaaatttgcagcctgactatatgatagaaaagaaaaaacattttctggggagaaattcaagctggctgcagaaatttgcataagtagcaaggagcctaatgttaatccccaagaccatgaataaaatgtctccaggtcacgtcagagaacttcttggcagcccctcccatcacaggcccagaggtccagaaggaaaataatggttttgtgggctgggccccgggtcctcacactgtgkgcagtctagggacttggtgccctatgtcccagttgctccagctgtggctgaaaggggccagtgtacagcttaggctgtggcttcagagggtgggagcaccatgccttggcagcttcc

SEQ ID NO: 911530 - DNA, 584 bp, Homo sapiens; identical to SEQ ID NO: 902406

SEQ ID NO: 911531 - DNA, 602 bp, Homo sapiens
taagttaagaggttgaacataaaaataaaaatcactcattttgtatgtatmtcttgagtacctactatgttccagtcactattctaatcattggggtatgtaaagaagaacatagacataggccctgtcctcatgtgccttacattacaatggaaagagagaaacaacaatatattaaataactttaacagtaaataaaaatatttaaaaaataaaaagcaaagaaaatctttaaaactagaactatatttgtgaagaataataatgaatttatatttgaaattcattaataaattagccattcaagaaaacattagtggatttgtttattcatacttttaccaattaattacaaaggaattctgggaggacagcagcatgctcactcatccctgactccttcttcctccaatcttccatgttttatggaataatataacaaaggagggcataaaagccactctcaggtgaaatcattcatctcccctgagcattataggtaagaaaataggcaccggatttttactacctttgatgctcagagagagtgaagggaccaatttttaagcaaaattgccattttttttctttttcttgcaaga

SEQ ID NO: 911532 - DNA, 584 bp, Homo sapiens
agtcaatcttttgtgtcctatgtatgtcagacactgcctcctcaagctcatctataaaatccccttcatttcaccacagaagcagaaaacccatttgggacccttcactctgcagcagagagagctattccctttccttcacctattaaacttccgctcttaaccttactcctggtgtgtctgcatcctagttttccatgatggctgtgagacaacgaacctcagggaccatcccagacaatgaggctgtttaaaaaaagaagtttattcctagacttctcctcaagtctcatgatcacccttggatgatatgcccattctttaaatagtcgctggctaaaggaatactatagtgagctataactattcagcattctcttctggtaatttagaagaagtccaacacaaggctgcccaatatctgaaaaaaagtttctatatgcaagaaatatgaggaaaatggcatttgggtaggcaacaaatgagcaatttctgccacagactataagctccwtgaaggtaatctcatacatttcttattgagtgcagtatgtaaaaggcttaacacagagcctggaatatag

SEQ ID NO: 911533 - DNA, 615 bp, Homo sapiens
tgtcaaaaagattaaaatactcatgaataaattttataattgtttaaaaattaaatgacacttaaataaaaaatattttatattgatggatcagaatgacttaatgttaaaatggcaacacttctggcataggttgaaggttaaaaaaacaaatgtgttaagtacagaattctaggttggcatttattttctctcatgagtttgaagatataatttcactctttgaatagctttgattttgttgagaaatctgtcagtttaatactcattcttttatacatgaacttttttctcttttttaatttcaaaccacttttttgttatagttttattacagagtttccatttctttttgcttttgtttatgctgtttgttataaattgtcattctgtagacttttatctttcttcagttctggaaaattcttaacattataattataaaagtaacttcgcctttattctatcttaatttttgaagacrctcagacaaatactaggcattcataattttccttcttatctttcaaactttaaaaaaatactttcaatttcttttatctaagtggtatactatagatttttttttcagatattctgttcactagtttcctt

SEQ ID NO: 911534 - DNA, 615 bp, Homo sapiens
catgctgcccttttgaggttagtcttccccacaccccaaatcccagtccctggcaaccactgatttatttactgtccctaaagttttacctttcccagaawgtcatataaatggaatcatacagtatgtagccttttgggtttggcttctttgacttagcaaaatgcatgtgagattcatccatagatgtccattcacaggtttgaggacattcaggttgtctccaggttgagcaattttgaataaagttgctattcatgtacaagtctttatatagacacatgctttcatttgtcttgagtaaagacctaggagtaggattactgggtcataggtaagggtatgtttaccttaataagaaaatgccaagctctcccaaagtgactcaaacattttgcattcccgccagcaaagtatgaggagcatctcagctgtccaacatctttgtcagcgcttggtattgtccgtttttcttctaaagccagtctaataggtatgtagtggtacttcgttatggttttaatttgtatttccctaatgactaatgaggttgagcatcttttcatgtgcttatttgctatctgtatatcttatttggttaagtactcaatgctt

SEQ ID NO: 911535 - DNA, 352 bp, Homo sapiens
cttattttaggatgacaggaagatatttgaggctgggcatggtggctcacgcctgtaatcccagcggtttgggaagccgaggtaggtggatcatctgaggtcaggagttcgagatcagcccggccaacatggcaaaactccatctcgactaaaaatacaaaaattagccaggcttattggtgagtgcctgtaatcccagctactcgggaggctgaggcaggagaattgcttgaacccaggaggtggaggttgcagtaagccgagatcgtgccattgcactctagcctgagcgacagartaagactccgtctcaaaaaaagtagaagatacttgattctagaattctgaaaat

SEQ ID NO: 911536 - DNA, 559 bp, Homo sapiens
ccaatactattagaaactatatttcaaaatgtgaaataattgtgttttgtatcctccacttctttaactttttatggctttcttttagccactgtatgtagaattgtatatggagcacggrgaacaagattgctttgaagtattttgaactatctatgtgaaacaaatggaattgagaacacagaaaaacatgcccaatggggagatgacagaagaggagcaacctggaaagttgcccggaacccattaatgagccctatttgtggtatatggtttgcctttagggcagaaataatcttggcttgagaacatggaaaggggagggaagacgggctattgttagtcctgtgagtcataggatgataaaaataggacaaatatcgaaagaaggatgaatctcagctcagcacgggcgaatttggctgctctagtgcaccggtctcccgtaggggaataacaaaaatgaaaacattccgaaacactgatgaaattcttgatgcagtttttaaaacttcttggagacaggtggccggttagctcagttggttagagcgtggtg

SEQ ID NO: 911537 - DNA, 442 bp, Homo sapiens
acatgagatgggtcacctgaatacagcacactgttgggtcttgactctttatcaaatttgccagtctgtgtcttttaattggagcatttagcccatttacatttaaagttaatattgttatgtgtgaatttgatcctgtcgttttgatgttagctggttattttgctcatcagttgatgcagtttcttcctagcattgatggtctttacaattcggaatgcttttgcagtggctggtaccggttgttcctttccatgtttagtgcttccttcaggagctcctgtagggcaggcctggtggtgacaaaatctctcagcatttgcttgtgtgtaaaggattttwtttctcctttacttatgaagcttagtttggcgggatatgaaattctgggttgaaaattcttttctttaataatgttgaatactggcccccactctctttt

SEQ ID NO: 911538 - DNA, 445 bp, Homo sapiens
aaaagagagtgggggccagtattcaacattattaaagaaaagaattttcaacccagaatttcatatcccgccaaactaagcttcataagtaaaggagaaawaaaatcctttacacacaagcaaatgctgagagattttgtcaccaccaggcctgccctacaggagctcctgaaggaagcactaaacatggaaaggaacaaccggtaccagccactgcaaaagcattccgaattgtaaagaccatcaatgctaggaagaaactgcatcaactgatgagcaaaataaccagctaacatcaaaacgacaggatcaaattcacacataacaatattaactttaaatgtaaatgggctaaatgctccaattaaaagacacagactggcaaatttgataaagagtcaagacccaacagtgtgctgtattcaggtgacccatctcatgtgca

SEQ ID NO: 911539 - DNA, 603 bp, Homo sapiens
cattgaaaaatatagacaaaataagacattgatgaataaagaaatgacatatcacagctacttttaggctcctcccaacgmgtaaaacaagcaaaacaccagatatcttggcataaaaatggattccctgactatgaaatgactttttccttgcatctactttctgtcttccatgagaaattgctatttttgcctgaggtcccaaaaactaatggcaaaggaagcacacaggacaatttaggggaacaagtcattttcaagaattatttgggaaggattcttaagttactttacatagggtgttttttcaaaaaaagaaaaacatgactcaggaaatgccctttgcagagcaagctttctattttcttactcttaatgtcttacaggcaagaaaaccttgatctaacaaactgaaattagataaactgtggttgtcacttttattttgtcagatcaatgtgttgaataaatttatgcagcatccaattccaaacctaatattgtgcaaacataggccactttctctaaagatcagaaaatacagaaacatcagtagagatgtaaaaaaaaacccacttccaaacaaatgtacaatgctaagaa

SEQ ID NO: 911540 - DNA, 558 bp, Homo sapiens
attaatatgtcaaacaaagtgttttaggagaggtaaaattgccaaagtagacaacctgaaagagaagacwtctgtttccatgaataaacattgtcctagacattgtcttagaagagagaattaaaatgacagacttggttattgctgtgaaacttataatttataaacaaaattcacaaattaaataacaataatataagatatgcttccctaattgtaaaatagatctttaaaatactttgatactgcctctcattcccacatttcctctttcaaatattcacaatcccctactcagcctacttgaatcagctaattttaacttccgtctctcaaatggatttcacttaagcaggagaatattcattaatttttacacagcactcaggaggtaatagtgagcagtactactagaattgttacttagggtttcacttttaatatttgggtttttaccttttccagtttcccaaattttattctcacatctagcaaatagaatttcctctattacagtctccaattttttttttttttttgcctattcagttattttgt

SEQ ID NO: 911541 - DNA, 595 bp, Homo sapiens
tgccactttctcctgtttctgtctagcctctgaagtcacacaaaggctacgaatgcataatcatggagcaaccccctagccaaggatatagatttgttttagtccagctgcaaatccattcagcctttcagaaccagttccaggaatgggatccagaagttttagacatttgggtaaaaactgaaacctcagttggaatattaacaccaaattcacattatttgggcatcaaaactacatcagtttagtttacggtttgtgctgaaaagtcagaggcttcatggaacaatcaatatgaacttgatctattccatgattttcaagttactataaatgtcagggtaaataaactctaaaacattcccttttttgtcatggaaaataaaaataaacaccttaatgttttgatatattgctacaaaagcagaaaacaaagatttataaaacttcaagccataaatctcaaagctttcatgaaaggggcaagatgaaagagagaaaacgaacaccaaarttttttgtagtacagctacaagaaatgactattacttctgttgtatacactattgtatgaagaagccaaaggactccaagg

SEQ ID NO: 911542 - DNA, 605 bp, Homo sapiens
tttgacaatagagtcagactaaagttagctgacattgactttaaaagtacttgcctcaaagtacttgaaattcggtggcttcatattttcttggattagggattgatttctctgctcagacttcttcagaatacaaataactttgtaagggctaatctgttaaaaagtttgtgttagctctcttggcaagagctaggatagcagggtagaaggagaactgcgaaaacaaacaaacaaaggagagttaaaaatgaaagggcaaacactccctacttactttgctttgctttcattattttgcctaaactgttgtggttgacacacgtggacagtagattataactagattctgagccccagatgcccacagctaacacttatgtaatgctcattgtgtgccatgggctaagtgctataaatgaatgtatatataatataaatgcattaactcatttaattctcatgacgatttgatgaggtgagctctatctcccagtttctagatgagggattgmccaacttgtgggtaggggagcagaatcttaccccgggaagtgtggcttgagagttggcaattgtaactgctggacagatttgttagaaaa

SEQ ID NO: 911543 - DNA, 600 bp, Homo sapiens
tcaaataaaagacaacataatctaaaaaatccagatatcccaacattagcagatttcatttctgttagatgagaaaactattactattctttaaatacacaccaatgacaaacccacaagaccttcacttayttttttaattttatattttaaaagaggaacaaaaattgcatttcacaaatgaattatttatgagataataattctaaccctgcagttacattagaatgttttattgcttctacttggtaggcattcttctttattgtaatcctaaatgtaattaatttgtaatcttaagactagtgaacaatttggcttcatcaaaacaaaatgtttgctattatcaaatattaaaattcaattagaaaacactgaaaaaactattccccctccttttctgtgtctgagatcaattttgcttatctcagtggtggctaataacgttagctcctaacaaattgcatttctgtataaggtttctttctgtgtgttctttgcgtgttgggggtgggggtgggttttcattttactaaacagtttttgtttctattttctttctttttctcatacatgagctaaaatctctccagatttggt

SEQ ID NO: 911544 - DNA, 567 bp, Homo sapiens
gctcattcccatcgtgtaaactttgaaccttcctattgtgtccacagttggttccttccagtgggtttgtggtcttgctgacttcaagaatgaagccgcagtccttcacggtgagtgttacagcccttaaagatagcatggacccaaagagtgagctgtagcaaggtttattgtgaagagcaaaagaacaaagcttccacagtgtggaaggggaccagagcgggttgccactgcaggctggagtggccactgctggctggggtgcccagcttttattcccttattggcccctcccatgttctgtttctgtcctatcagagtgtccttgtttcaatcctccctgtgattggctacttttagaatcttgctgattggtgtgttttacagagcgctggttggtgcattttacaatcctcttgctagctacagagcactgattggtgcattttacaatcctagctgcagagtgctgattggtgtgtttttacagagtgctgattggtgcattttacaatcctcttgctagctacagagtgctgattggtrcatttttacagagcactgatt

SEQ ID NO: 911545 - DNA, 638 bp, Homo sapiens
catataaatttgcaaatattcaagatgttatttttttaaaaaccctggacctwccagaacctaggttcacttcaaccttactctggagctgcctttggcagacagtacatgcccaaagggtatgctgattaaattgcatttgagctggagtgtgcaacccaggttccgattgctagatagcattttggctaactccatctgtccagaaacttattgcaaagccagggactgcgactggtatagtaagacagtaagacaatgcagtttgaaaactagtttagcctctgctatgtgcccaacaatttacgtgcaaaaaaacttagaagatcccctagcaaaagatatcaaatacatgttactattgaacagaaaggtatgcctttattcagagcatactcatgttttatttgcttttcatttttttttctgaactttgattttaggtttgggggtacatgcctaggtttgttacatgggtaaattgcatgtcactggggtttggtgtacaaatggtttcatcactcaggtagtgagcacagtaatagtatccaacaggtagcttttcgaccctcaccttcctcctacactccctcatcaggtaggtaccagtgtctattgtttcctttgtgtccatgtat

SEQ ID NO: 911546 - DNA, 399 bp, Homo sapiens
gtgtagagatcttggacttgttttgttatagtttttacttagaaagtattaatatattattaattttgttacatttattatatattatatatgatagtagatatataatagataatrtaatatgttatataatatctattattatattatatataattatattattttgttgtatttattacttagaaagtattaaatataacaaaacaagcctcgattaaaagtaaaaatatacccttggacacaacattcctactttgaaaaatctatagccttaagaatatctgtatgtaaagacatagataccaagaagttatttgaaacactgtgtataatggcccccaaattttttattaaaaaaataacctcaacaagaaaaatgtctatcagtaggggaaa

SEQ ID NO: 911547 - DNA, 507 bp, Homo sapiens
actgtcctagattataatattacatcatacctgacatcattcttttctctgtactccacatcaaataatttaaaytggttttgcagtaatgaaactgttgaagaatgtagtatgaagattttggtttattgcaatataaggctcattgaagaaaatgtaaaagtacctgtatgattcaaaccttagatatgagtatttctgtacctgtattaatatttaatcttattaacagtgaaaactttaatactttgaatcatagtacttcatggctttaagctatgaatgtattataccatataaaaatatatgactataatgaatgcatttgaagataattcaagttgccctaatccagttgggcagaggttttactctggtcaaataaaatatgaaatctcatcaattcaaggatggtgaggtcagaagatttaattttttggcatatcaaatttttatatgtcaatggcaaatttaatattggtgatgaataataaaatgtaattgtat

SEQ ID NO: 911548 - DNA, 602 bp, Homo sapiens
cttcataaaaagactttatcaaatttgggaaactcttatattaaggagattaccattaaatcaaagcaatgccttaaaaacacaatactggtctgtaatttaaggaggatcrtatttatataagaagaatacattaaaaagacattgagttggataatttaaatggaagaaattagaatgtgcatttttgacatcagttattccacctgaagctagaaatattttttgatcagcaaagtcattgcaaataagttatattagtcttaatgtaatttgcataatttgagacaactaaaatatattattaaatgaactaataactgtcactttagagcttttatatatatgcaaataaatactgttcaactaaagtaactcaagaaaaaccttgctagtgttcccttaagtgtaggatagaggaataccaaatgaatgaataaatgaataaataaacatgtatacacatatattttatcttggttaaatagataactgtgaaatattatacttaggaatagctttgacttttcaagtttttctcacttaaaatatgttctgtgtctatctagtttttattatgcagcgtgtatttaaattatatt

SEQ ID NO: 911549 - DNA, 709 bp, Homo sapiens
aaaagtctattttggaatttcactgcctcttttttatttttttattttttggtgagaggttgctagagcagaggggctgtctccaagaccatgtcttcatcagaaactggggtttaatagaygttagaaatggtatatatttcttccaccatctcttaagctcttctgtttattacctgacttttgtttatcaaattccagagttgcttacttttgttttgttagctaataggggtgcttcgggtgggttaagagaagaaatacttttttcaaaagtcaccatcattctgtgtgagagagaatgtaattcctatagagaaaagtaattagttagcttggtgtgttgtaatggcagctttgctatttttttgtactctttctctttcttcgtttcacaaagaaggttgacaagctacttacctttctatgaatgcttttctttaaaactatataattgaatgcctagagaaatgaaccttggctttagcagtactgaatggcaaaagtggaaagaaactcatttttcccttccttccttccctacttctctttctccttccatgctttccttccttctttccctgtttcttaaaaaatgcgatttgaatctagtttgggtaaagttgacctgtggggagttgaatgagaaaactgaaattaagtatttttcttctgagtattgtgttaatttgctccaaatgacagaatt

SEQ ID NO: 911550 - DNA, 605 bp, Homo sapiens
atgctttccttccttctttccctgtttcttaaaaaatgcgatttgaatctagtttgggtaaagttgacctgtggggagttgaakgagaaaactgaaattaagtatttttcttctgagtattgtgttaatttgctccaaatgacagaattagcctaaatgttgagaagtgctaagtttcagcaaatgaaattgagcttaatttgtatttctttatgtttactgtgtatgtggtaaaattagataattaataaaggtttaaagggattctaactgataaactcaccgtttcaccttcttaaacctaagaagcataatttgcctaaattatgcaaaatgctaattaaagggtttaatttgctaatcatatccatttgattagaggcagatgctgattatctgcacaattctaaatggacctttcaaagatggctttcattatttaaaatcaacttgtcaaattaaggcataaacttaaggaataacaaataccagtagttaactatgtacttccagtgtaacgcagggcaagatgattcacaaatgctgtgcatcaaagacttggtgtattcaatgtcattatgaatttcagtagtcccaaagtttaa

SEQ ID NO: 911551 - DNA, 610 bp, Homo sapiens
cattttaaactatttttaagtgtacagttctttgtcattaagtgtattcacattgttgtgcaaccatccccattcatctccagaactttttcatcttctccagctgaaactcattaccctttaaatactaactcctcattcttcccctgcccacctcttgatgtgagtgggttttggcaaatagagtatggatggcagcagtgacagagtaccagtgtctgggtacaggctttaagaaactgggggcttccactttctgtctctggtacacagtcttcaggagctctgggatgccattaagaattctaagtagacttgatggagaatctgttctgaaacctggcagtaactagtaattgccatgctggagaggcatgttgacattcccacctgagcccagccttttaagcatccctgtcacggtgccatacatgagagcagagccatctaagaacctccagattaatctgttcaccagctcagtacctctggtgacttcatttggtgccacatggagtagagacattgycagcagcaccctttctgaatacctgaccatcagaattgagagctgtaatacaatggctgttattttaaactgttaagtttt

SEQ ID NO: 911552 - DNA, 535 bp, Homo sapiens
tttgttcttacctatattgtttttattcatggagtctcatttcctggtgtgctttgttactgttgtatgctggagattgtgtttcgaaagttatktgtggactatattgaagcttaggaggattatatctttctggaagggttttcatttgttttttttttttcattggcctggggtcattgctggtccaggctaattttaatttaaatctgggatctgagatctcagaatcactagataagttgaaaatgggttgtagatccatgtgaaggctgataaggttctggttcatcctcaagtaattgttcacagctacaggaatttcaggggtttcttcctgactccattgagttttaaatttctgtgcctaaattttttttgtctatttctagaaatttttttttctttttcctctttttccttatataggcctaatcatctctgaaatgtcatttcttacattcatctaaatgtgtgtttggaacctgtttaataaaacacaggtttcatttagtgatataaaacaacacatcac

SEQ ID NO: 911553 - DNA, 674 bp, Homo sapiens
ttataaattacccagtcttgcctaggcctagtagcttacgcctataatcctygcactttgggaggctgaggtaggtggattgcttgagcccaggagtttgagactagtctgggcaacatggtgaaaccttgtctctataaaaagtatgattaatgaatgtggtggtgcaggccagtaggcacagctacttgggaggatcacctgagcctggagacgtcgaggttgcagtgagctgtgattgcaccactgcactgcagcctgggccacagagtgaggccttgaccatttattcatctactgggttgacaatattgtttaaattttttaaaatctgtgaatgtgtacttgattacattgattaaaacaatattaagtcaattttgcattcctgggataaacctactatgtcaaggtatattacctttttttatatattactgaatttttgctttactgccaatgagggatgttgatctagacttttcctttcatgtaagggctatctgattttggtatcaggtaatgctgaccttgttaatgagttgggaagtatattccttcttaagtatgcaatttatatagcagcatagtataaataatacaatttaataatgtaatatatagagttgtttaaattgccaacatttttctctattttaaagttttgtctaaaa

SEQ ID NO: 911554 - DNA, 365 bp, Homo sapiens
gcgtcagcccgcacccccggtccccggcccctggccccccgcccccggcccccggtgcccgctgggtcacctgtaattgtaggcgctgaaacgcttgctctctctcagcatcgcccggtacagagmtaacacttgtgcgcgactggaggctgccattttggaaagaaaaaaaaataaacgggtcctcttcgccgaggtcccaagtacgacccaacccacgaaactccagcctgtgcggaaaccacgaacgaaataaaatgctgcggctcggctttgccagcgggccgggcctaagcctaagcgggcagccctgcggatcgcggacggcgccaggcgtcccgcgccgcttcgggggcgggcgcagg

SEQ ID NO: 911555 - DNA, 365 bp, Homo sapiens
gcgtcagcccgcacccccggtccccggcccctggccccccgcccccggcccccggtgcccgctgggtcacctgtaattgtaggcgctgaaacgcttgctctctctcagcatcgcccggtacagagataacacttgtgcgcgactggaggctgccattttggaaagaaaaaaaaataaacgggtcctcttcgccgaggtcccaagtacgacccaacccacgaaactccagcctgtgcggaaaccacgaacgaaataaaatgctgcggctcggctttgccagcgggccgggcctaagcctaagcgggcagccctgcggatcgcggacrgcgccaggcgtcccgcgccgcttcgggggcgggcgcagg

SEQ ID NO: 911556 - DNA, 588 bp, Homo sapiens
acagaattttctggggtttaaataccctctagagggttccyactggttacttggtgtacactctgtgtaaatgaagtagtggtccacgaccagtctgattggttgcggaaagggactaatgagaggctgaagtgaagttacaaagttacactcctatgcaaatgaagacttggcctgtgaccagtctgattggttgcaggaggggactaatcagaggctgaagtgaagttacaaggttatactccagtgcaaatgaagacttggcctgtgaccagtctgatttgttgcaggaggggaccaatcagagatactttcaatttttcatctgccacatggagaagagcagggaggagtagcctctggttcttttgttacttgggcatggaaagttggggttttccttttgatttagttgtaggaagtcagtgtgaattggccttaggttccctgcctccaaaccctattctcctgcctcagtttgaattcttgcaccagagaaaatccaaaacagaaggaattccactcttttgtgttcatggttcttttcaaaagctagttagagagtgtaaaattttcaatatttatatt

SEQ ID NO: 911557 - DNA, 481 bp, Homo sapiens
aaatatcagagcatgtttgctgatggaaatggcttgtggagcggaagagtttttggagtcatgtccttggataggtgagaggagataaggtccaaagacagatggaagaactggccttgaacaggagcatggcagttcattcatagtagcagaaaggacagcgtggtggctcacatctgtaatcccagctctctgggagacctaggcaggcagataacttcagctcaggagctcaagaccagcctgggcaacatggtgcaaccttgtctccacacaaacaaaaaaattagctggacatggtggtgagcctgtagtctcagctactcgagaggtagaggtgggaggagtgcttgagcctgggaggtcaaggctgcggtgagctgtgatcatgccactgcactccagcctgggcgayagggtgagactgtctcaaaaaaaaaaaaaaaaaaaaaaagtagcagaaaggaagtcagtgtacaag

SEQ ID NO: 911558 - DNA, 663 bp, Homo sapiens
atttctttcatggatcatgtctttggtgttgtgtctagaaagttattgctgtaccagggtgatgtaggtttttatcctatgttaacttttaggagtcttttcagctttgtgggtctattayccaccttgagttaatttttattaggagtgtgaggtttgtgtctatattcatcttttagcatgtaggtgtccagttttttcagcaaaattttttgaaaaaactctttgctccaccatattgcctttgtatctttgtcaaggatctgttgactgtatttatatgggtctgtttctgggctctattttattgttttacatgtctattctttcactagtactacactgtgttgattactgcagctttattgtaagtcttaaagtcagaggtgtcagtcctccagctttgttcttcttttatattgtgttggctatcctgggctctttgcttctccatacaaaacttagaatcagtttgttgatatccacaaaataactgactgggattttgattgagatttcattgaatctatagattaagttgggaagaactaatatctttgcaatattgagtctttctacttgttaacatgtaaatagctcttcatttatttagttcttctttaatatctttcatcagagttttgtagttttcctcatacggat

SEQ ID NO: 911559 - DNA, 652 bp, Homo sapiens
accaaacataaatattttccaatcagagctttttccaatgagatcaaagtttctgttacccaatagtggatgggtccragcagagactggatgacaacctgccagatttgttgaacctatgaaggttctctgattctctggaagacctctttctccctgcacatgtaaaaatcctccctactgttcagtattcagtccataccccacttccttttttgggtaccacagcttaaaatcatcttttctatctctacctttcttatcattttaagagcaggttagcatttacattatgctacctgcattaatgttttttctcagtggtctaatccttagctttttgagttaatgctaacctgcttgaagacacggaccacatctgagctaagtgacaaatgattctgtattgttatcttttagcattgaaggtgtatgtaagactcttttatcctttccacacagtgttaaatctaacccttgttgatctacctgcagtaactaaagtgcccgtgggagatcagccacaatagctctcttgctattgaccttgccatttcatcttcaagagtgaatattaaatgtttatgatgggtaatggtagtaaagctaccaataattgccacatctggctttttttttttttttgagatgg

SEQ ID NO: 911560 - DNA, 661 bp, Homo sapiens
cctggccaacatggcgaaacctgatctctactaaaagtacaaaaagtaggtgggcatggtggcatgagcctgtagtcccagctactcaggaggctgaggcaggagaatcgcttgaacccaggaggcrgagattgcagtgagccaagatcatgccactacactccagcctgtatgacagagcaagacttcgtccaaaaaaaaataaaaagaaggaaacttgaaacattagaaataaagaaataacaatgaaaagagttaaaatatgggtaaatgtaatggattgtccttctcctcttgagtgttctgaattatgttcaacaattgaagcaaaacttataatcttaccgatatggttctcaatgaatatagacaatatatttaagacaagtataaagatagactaataaagaaacctaatataggtaagttttctatacctagttcaactggtaaaatgtcaacactgataggtagatcaaaagttatgtatgtaaaatgcaatatgtacagcaaccagtaaaaaaactcttcaaaaagatacattatagataaatcaaaatggaattataaaaaatattccagtaacacacaggatggccaggaaagtgaaacagaggaacaaaataaacaaacaaaagcccagaagaacaaagagaaaata

SEQ ID NO: 911561 - DNA, 671 bp, Homo sapiens; identical to SEQ ID NO: 905621

SEQ ID NO: 911562 - DNA, 566 bp, Homo sapiens; identical to SEQ ID NO: 905622

SEQ ID NO: 911563 - DNA, 657 bp, Homo sapiens
aaaaaaaataccctaaaatattcattctcatgacctaggatgttacaggattttatggcccattggctaatggctattctgtgcaatgcactgacctccaagaaaagtagtagaaagagagttttcagataagagattcaggaactgtcaaaacaaattaaaattgactagtcctgttcttccacagtaaatgagaaaggagatatgtttattctggtcatattggatagctttagtagacagatgaaggctttctcaataaagtacaaaagagctaaactaatggcacagatttaagtctaagaaatcttctcttaccctggggtccccacgaacatgacctcagacagtgggcagactcatgagagagctgtctcaccagccacgtctcatggcatatgacaaaacctagcagattttgctctcctctggcctgttccccagccttcacaccccagccatctatcaggaatcagcctcatgaacagttggactttgtgccctttctagatctttactctttggaagttcacttctagatcattgaactctttgtcagataccacttttctcagcctcctttcatttgtattaagttcataactgtggtttcatgattctcctcacatcagaaaaarataagaacatctcaactaa

SEQ ID NO: 911564 - DNA, 621 bp, Homo sapiens
tggggcataggcttcaaaagcacttacagcatctccaggaatttgctgagaattgttttgcaggcaaaaatataagataagttcaaacatctatgataaaagtmattgtggcatacaactaaaaatccctattcttgtggtacaggtcatatcattaagtggttatcactagatagctttccttcaatgatgttcttcatctaggaacacagaagtctccaggggaaaatggcgattgaagttttggatatattgagttcgaaagaaagtcacccccataaaacttagtgattggagctgtcacccttgcaaatttctaaactctgcaagatagcagcaacatttcaaatgatactctgacagaggagataatgggctaacgtagatttccctccagatgtatttattgcacaaggacaaaattcacatttcactgggagatttctcccactctagtttaagatcacaggttgcagatcccagacagctggtatcaactggccagtatcatgttaagactaaacccaagactctatcacactgcagccttaagattggatttctcctactgttcctgggaagaactagatataacctaaaggtcactattctcctgagata

SEQ ID NO: 911565 - DNA, 533 bp, Homo sapiens
ctgacaaagggaagggtctggcagtagacaaaacatggcagaggcatcaggagagcaaacggtcctgcttgtaccccaagaaggaatttctccagccttgaatttttcactctgaattttactctcactgttctttagcctttgttgccagtttcagttaaactggcttattcttaccctttctcagaaaagctgattctaaacagccagtcctgcacctggggtacagggtacaaaaatggcacgtgggatgggcaggtttgagccttcactagaagcctggccttagatctctccttaacctcttagcctcagtttcctcaccaataaagtgggactcagaatacctacctcttgagatagagatacaaggaaataagcaagctgtgagccgtatgcaaattataaagcacaaatragagtagagtatttatccgagctccatgtagcatggtgctcattttgtgggttaattccaggtgataactttactggcagcataactacctgtggatttcagagaagcctgaaga

SEQ ID NO: 911566 - DNA, 565 bp, Homo sapiens
tctactgtggctccaataaaagataaactaaactccaacttcagactcttgatgtcaagccaccgcttgcctcccagcgcaaaaatcataccttccagatgtcaccatagtcatcattttgaaccttgtgtgcaggctgatgagaacattcagagccctcctgtccacctcaaagaagaagtcctcttgagagaactagcaaagctggttcacagaggtctgtcaggacagaattatccagcacatgccttcccacaatattttcttaaccataagattttccctgtatccagaatacaatctcttcagctcaccaccgggtctactattacagagccatttcttgccaggtgcccaaagtgcagcctcattcgatcctcatcccttaaatattgggtggtttttgcaaattgtggctttccaacctactttaaattcagacacattggcttaaagaatcttgtcatgtagtctcaccctctgattcccagatcccagtctcttcaggaccatagcacmccactgctggcctggccctccacattcagtctactctgatgccttt

SEQ ID NO: 911567 - DNA, 615 bp, Homo sapiens
aaatagttccatgaataacttgggcaaatcacrgtcaaatttaagcaagcatacaaggaatctaggaacccaggataagaaccagcagaaacaaccaaccaccgaaatagaaccacacaacttaaggtttcataattgtcagacagattataaaacaaaaccctctctttaaagaagtaaggcaagcttcaaaatgttttaagggaataggaaactaaaatcctagcagatttgaggaaaaaatagaattcagagaaatcattaaaaaaaaaaaaggaattaaaccaaggggctgataacaaaggcttaatgtgtttcgtgctctgaataaccttgtttattttttgataagagtagattttgtgaaatgtactttatgcagttaatttcagattcaaattagtgaataacatgcttcagttaatatttacattctagattgtcgatatataaaggtaatttaaagtacagtaaacttacattaagtttatatttcagtgtccgcatccaactgagagattgatttagtgatttgtgagctctccaataattgagcaaaggcatgatattgatctcaattatctgaatatatcatgaacacttgtgaattttgag

SEQ ID NO: 911568 - DNA, 564 bp, Homo sapiens
aactattcaaaagtgccctttctgcctcatccttttctgtccattttttaaatgttgaaagaatatcttttgttagagacttacttttcaactcccttttttccctcaccacaaatcgttttggaaagtaaaactgactgggagaaaaaatgctattgaagaaaaaataatggatctttctgctcaaatgaccagatgttgcttgaattccacagataaatattcatctttgcttctatagacttaagttactatgatgaaagtttgtaatgaaactgtagtcataaagatgtcaaagctatatatttaaggtgtttattaaggttaaagtaagtttacaggaccttatctttcccttttttatcttactatatttactccccaaagtcaatttcctccttgttttgttttttttttttttttttgctttttttttttttttggktctgctaattttagtagaggcatttactaaaaaagatactttttcttctgtgaaggttattttgagggagactcaagaaattcacagagaattctgacaatcctctatgcatagatttg

SEQ ID NO: 911569 - DNA, 615 bp, Homo sapiens
tgggtcatcatttcctccataatcctctctcctcttgcctgactccatttcccaccactstcacctgttttatctccatcccttccactttccaagccagtgactctcaaagtctggccctcacaccgcctgcatcagaatcatctggggagtgtgttaatggtgcaaatttttgggaacccttccacccctatgctaattcagagtgcctaatagcagtctgcgggcatttgcattttaacaagttccctgctatggagtttgagaaatgccatcctatacgctttctttccaacaagagtcaaagacttagtcttccagcgtcccagtgtagagtggtacagaccagaagtcagccctagaagggacaccaacagtgatgtaccagagctggcttgtacctgattgcaaaagtacaaatttcaggaaattagaaagctggttgttaaaccattggtagcttgaaagttagccacggaaggaatatttataccacagacattatcaaacactattaatcaaggctttcacttctttttttcactggaaacatttcaatgattattgttgagcacacactttggaaattttttacttcaaatgacaacaagttaa

SEQ ID NO: 911570 - DNA, 561 bp, Homo sapiens
atttctggttctagatccttgaggaatcgccacattgtcttccacaatggttgaactaatttacactctcaccaacagtgtaaaagcattcctatttctccacatcctctccagcrtttgctgtttcatgacttcttaatgacagctattctaactggcgttgagatggtatctcactgtgattttgctttgcatttctctgatgaccaatgatgatgagctttttttcatatgtttgttggccacataaatgtcttcttttgagaagtgtctgttcatatcctttgcccacttttcgatggggttgttttttttcttgtaaatttaagtttcttatagattctggatattagccctttgtcagatagatagattgcacaaattttcttccattctgtaggttgcgtgttcactctgatggtagtttcttttgctgtgcagaagctctttagtttaattagatcccatttgtcaattttggcctttgttgccattgcttttggtgttttagtcatgaagtctttgcccatgcctatgtcctgaatggtattgcttaggttt

SEQ ID NO: 911571 - DNA, 579 bp, Homo sapiens
ttctagaaagaaaaatagcagtctcctgccatgctcytcccctcccaattctcacttctgactggcaacatttttaactttagccgttccttacactgctgtttcttgatagttttaatagtttggaaatccttgccatttactattttaaaaatggtttcacgctcttacttcccatatctctcaacatgtttttctttccacactcatattcctttctacccaattaggttgcacagtaatctttacatttaatgtttatattatgaccctataaatatttatggctgagctatttattgaaccctgattatattttctttcttggacaaattgcatttttctggatgtactatgtgtctctgctggaggcatacctctctctcaatactttagcagagaaaacctaccagcttctttcttatccatggagacctccatcttgcacccttctgccaccttgccctgtatggagaggttgccctctgggcctgttgtacaaacaccatcttctgagctctctcacatcatcctggagatggcttcactctctcttgttgaagcacccggtatataagt

SEQ ID NO: 911572 - DNA, 565 bp, Homo sapiens
atagcagtctcctgccatgctcctcccctcccaattctcacttctgactggcaacatttttaactttagccgttccttacactgctgtttcttgatrgttttaatagtttggaaatccttgccatttactattttaaaaatggtttcacgctcttacttcccatatctctcaacatgtttttctttccacactcatattcctttctacccaattaggttgcacagtaatctttacatttaatgtttatattatgaccctataaatatttatggctgagctatttattgaaccctgattatattttctttcttggacaaattgcatttttctggatgtactatgtgtctctgctggaggcatacctctctctcaatactttagcagagaaaacctaccagcttctttcttatccatggagacctccatcttgcacccttctgccaccttgccctgtatggagaggttgccctctgggcctgttgtacaaacaccatcttctgagctctctcacatcatcctggagatggcttcactctctcttgttgaagcacccggtatataagt

SEQ ID NO: 911573 - DNA, 541 bp, Homo sapiens
ggagatgaaagaattcaacaaatatttggaaggcagaaggcaggtgcagggaggctaaccggcttgaagcagaggaaattgcaagcaastgccaacaaggggagcttaccaacaagaaaccagtcaattcagccagtttgacctctaagaggcttaatgcttgaaagcacaaattaccactgaaggtcagaaatgaggtatggagcccaacctagggggattcactgacctctgtgtgcagagcacttgcctgcactccagaccctcaaccgccaagaaagaaatgactctaaactttcttgctgcatgaagaggaaggaagttggactctgtaggcctccttgcacagggacctcaggcagggcttgaagggcaggaatgagacatagagttgaaaactgatgagtagagggaaggtctacacacagcattgtgtgagcccttcccccacctgactcccaacatgccatggcgaggtgtctgtaatagcacccctgctctctcaccctccctgggaaagtaggaaagtcttctccagaga

SEQ ID NO: 911574 - DNA, 498 bp, Homo sapiens
attcactcaacaaccgtgtgtggatggggccacccaatatgtgccaggagttgaggacacgcagggttatgatgatgaaatagataaggggcccacactcacggaccctgcaggacagtggagctgtggacccagcatgcgagtaaagacccagtgagctcaccagacagatcatttaaatcaggtgataggacagtgaagggcgggggctgcattagttttggtggcaagagaaggattatcttctgagaggatccacaaagtaaagagggccggtatgactgggtagagtgaggaccgtggttgaggcagaagatggagctctttattgagctctagggagcccgtcggatgggacctacggggcttgagggagcccatcggatgggacctacggggcttgagggagcccatcggatgggacctacggggcttgagggagcccatmggatgggacctacggggcttgagggagcccataggatgggacctacgggg

SEQ ID NO: 911575 - DNA, 671 bp, Homo sapiens
tcattgaaaaacgggagatatatagccctgacagtcctttcaagatttagattctgtcttttccacttctttcttagttcttctttctctttcattcagtgctgataagctgtgtagttggtttgagagactgacaagtaataggacatagttgccactataacccacatttattcaagtgacaccagcctgggtgactggggtacaggatatcaatgaagagacagtttaaagaagatacatgaaatgaggacaatctcttgatctcatgggagaagttggaagtggctagacgtgaatgtgtgctttaaactaaaaagtactaatattaaaagtaagtaattggccaggcttggtggcttacgcctgtaatcccagcactttgggaggctgagatgggcagatcatgagttcaggagatcgagaccacagtgaaaccctgtctctactaaaaatacaaaaaaaaattagccggatgcggtggcaggtgcctgtagtcccagctacttgggaggctgaggctggagaatgatgtgagcccgggaggcggagtttgcagtgagccaagaccgcaccactgcactccagcctgggtgacagagcaagmctccatctcaaaaataaataaataaagtaaataatcatacataatataaaaaatagagaaaatc

SEQ ID NO: 911576 - DNA, 622 bp, Homo sapiens
tgaatgtatctcaccaaaaaaaaaaaaaaagtgttaaaaacttaatctctaatgtaacagtgttgagaggtgtggcctaatgggaggtgttgagtgtcatgaaggctctatcctcacaaatggattagtgtcagttataaaaagacttgagtctgtgagtttgattccttgatttttctcttgctctttctctcaccttctgccatggtgtaatgcagtgagaaggcctttgtcaggtgctagcactgagatatttgacatcccatgttccagagctgtgagaaataaatttcttttctttataaagtctgtgctattctgctatagcaacacaaaacagactaagacacaatcattcacaaactctcccaaaacagaaaaagagagaacatttatcaactcattttatgaagccagtattaccctgacactaaaaccaggcaaagatatcacaagaaaataaaactctagaccaatatcctttatgaatataaattcaaatgtctgtaacaaaatactagcaaacyaaatccagtatccattaaaacaagaaaatttcctaatgatttattctaggaatgcaaggatggtcaacatacaaaaataaattgatgcaatacac

SEQ ID NO: 911577 - DNA, 601 bp, Homo sapiens
cccctttccttagtcttccccactaatataatagctaacatttcttaaacacttactatgagctcagtatcttatatgcttctttcatttaatcctcataacaaccctatgaggtaagcactgttgttactaccactttacagatgaggacactcatgttcaaagggattaaatagtaccaaagccagtcacctaatcagtggccaatatggagtttgaatccaatggcctacagtccttagcaccccatctgtctctaggacaaaaactctgacttggatctcatctgactgtctgggtccctgatagcctgctaaccccttcttagaccctcagcctgagagtggaatctttctgcatgctctacaatctcaagatccagggaagaattctgtcttcattggcagttacaatttccttcctgaaagtttcaactctggcctccctcaaacagttctctcgctgcttctaagcttacaatatcctttggacaccgtgtttcraactgtacaactgcttttatgagtaccagctgccaaatctcaaccagcctctcctggtcagtcctggcgcttttgctgttgtcaacagaaactttggc

SEQ ID NO: 911578 - DNA, 582 bp, Homo sapiens
ttcaggtcagtctttgtcaatgcaaataacatacatacttcacatactagagcaaggatattaaatgaaatggacccagaarttgagatattatacatcccaaatgggcttatctctgggtacacccataatgagataaatactatatttagctactatatttagcacatgcctaacacatagaaagtgttcaataaataacaatggtgttatcatattgccatggttttactaacacatctttcctattattctagtcaagtttttatatttgattctataaaacacctcgttttttataccttgtcacttacaattgagttcatgtttaaatggttcttattctgttttcccaatgaatttttaattttatttctatcttcttctacatattcccatctccatcactccatgaaaaaaaatctatttggaaggatgagtaattggcttgtggcttcagcaagagtcaatatgtcattaagcgcttacatttccaaaagaaggtacatcagtaagaagttaaaagacaatattttgtagaatgaaagtttactgcttaagaaattttctttgatggcttga

SEQ ID NO: 911579 - DNA, 610 bp, Homo sapiens
ttctgctctagaaaggatttatcttaattaaagttgttctttgccttggatagatctttaccacacctggtagcacactcttgagaggataaatccttcgttccattccaaatgtctttagaaagatccgttttctaatgagccagctgacaactcatccattcacatatttttgcgtacaactttcacatggatttaagactcaaagtggacgttgtcagtttattctctataagtttaatttcctagggaacatgtgttctattttattgaatgaatccttagtggataaggagaaggattttgaggcgattttaacacggattagtggaggggaggagtgaaggcttttacttaaaaattacaagtaatttgtcatggtgttagggaatttgacttgttagaccctatctcatggagaatcacatcattttattatgtttttaaaaatactaaaccaacctgcatctctaggataagtacagcttcatcattatacatgattttatatatacatatgtgtgtgatatgtattttatatatacatatgtatacatatatatatatakagagagagagagacagagctatgttgctttttggacaaatt

SEQ ID NO: 911580 - DNA, 625 bp, Homo sapiens
acatggctgagagctcctgaagggcagaagctattataataatatractatgattataataaaaatattattaataactaacacctataatatagtataatatagtatagtatagaatagaatagtatatgccagacactgagcaaagcaaagaatatcagttatctcccaaacacctatgagttttacagatgagtgaatgggtgcttaaagtgtaattacttaaactcacagagacagtaaagggcagccctagagcttggccctgattctagtttaacttcactctaggacctcagctgccaccctgcaatattgctgagcaccagagaaatgtgaggcatatagtaggtggtcaagtttattacctctctggtggaaactaccaagtattgccccagaccgtaaatgcaaatggcttaggaagctggtggtcccaaaggatgctagatcaccattcatacagctgaattaacacactattgatgaaaaggactcccctaaactgtgcctctctaattatttgactattagacaattagagggatattgaaaactggacatgtccacaataatctgagtctctctgctttctaaagttagtgatgcatagttttaatcatgg

SEQ ID NO: 911581 - DNA, 584 bp, Homo sapiens
gattgcttgagcccaggagttcaagaccagcctgggaaacacagagaaaacccatctctataaataaataaatraataaataaataaataaataaataaataaataaataggtgcacacctgtagtcctaactacttgggaggctggggcgggaagatcacttgagcccaggaattcaaggctgtggcgagctatgatcgcaccactgcactccagcttaggcaacagaataagatcctgcctctaaaaaataataataaagtaaaaaattttaaaaatgttactgtgtaacacaaaactccccagaatagctagagaaccagactcatgtgctatacagcaagaagcaaaaaccaaactcataccacagatttggtagtcgagacaccatcactacaaccaagcactgaggactgcagctcacatcactatcatgagcactaccacaactgccctacaaactctatcttactttaactgtcacctattaacagataggattctttctagggcacacttgctggtgtcactcattccaattcaaaatcttgggtagatatatttcattaaagaagcctatgaca

SEQ ID NO: 911582 - DNA, 584 bp, Homo sapiens
gattgcttgagcccaggagttcaagaccagcctgggaaacacagagaaaacccatctctataaataaataaatgaataaataaataaataaataaataaataaataaataggtgcacayctgtagtcctaactacttgggaggctggggcgggaagatcacttgagcccaggaattcaaggctgtggcgagctatgatcgcaccactgcactccagcttaggcaacagaataagatcctgcctctaaaaaataataataaagtaaaaaattttaaaaatgttactgtgtaacacaaaactccccagaatagctagagaaccagactcatgtgctatacagcaagaagcaaaaaccaaactcataccacagatttggtagtcgagacaccatcactacaaccaagcactgaggactgcagctcacatcactatcatgagcactaccacaactgccctacaaactctatcttactttaactgtcacctattaacagataggattctttctagggcacacttgctggtgtcactcattccaattcaaaatcttgggtagatatatttcattaaagaagcctatgaca

SEQ ID NO: 911583 - DNA, 626 bp, Homo sapiens
tggttatcctaagtatcatttacagtaaattttaagaaaaaacaaaattacagtaagctcttaggaacagattttatyaacatggcctagacccaagatgaaattgaaagtgctctgagtcctttgtaaatgcttcaactccacaataaaccaaattttagcaggttttgtatgtctgtgccttgttgatcatttggggcaagatcctttgggtcaaggtttcttaacagcagtgttattgactttgttattgtggggtctgggggaccactgttctgttcatcataagatgtttagcagcatctctggcctgcacccactagatgccaactgagactaccgaaactgtctccagatattgacaaatgtcccctggaagtggggaaacagcgggagggaaacaaaattcccctcagttgagaattgctgctttgaagggtaagatgtcatgtgactgtattttttataatgcaatatttaataagcactttttgctaactagctggatcaactcaaagaatttaaggtatttgttgaaggctgatgcctctatttgactttatagtacttagaaggaaattatgatttactacacatgtaatacaaacagttgatacaatgtatga

SEQ ID NO: 911584 - DNA, 608 bp, Homo sapiens
cttttgggggataccatgcaacccacgagaaggaggccaggagagagaccctcgagtgagacctggagggtgaaaccacctcagccccttgcagcacgtacacacacatggttgytctccactgcacactgcatggcccggggcagctaccagcctgctgctgctccacctggccctggctcctcctacagcttctccaggtccaggtgtgtgctcagcttcgtgataaagggcccagtgctggtgacatcctcatcatcatggtgagaggcaacaagaatggatgcggggctcagtctgtcctcagggcaccagctcgtgccgtcggtcccagcttctccctcctctccccattttgcatccaccttcctttcccaactgtctgttcttctgactccacgcacctggacctgcccaggtctcttcgggtccccctttctgcttttgtgctctgctcccaacttccacagccggtgcccggtgctctgtgccacagatgctccccctgcaggtgcagggagcgggacacacctggtccccaccttcccgaagcctgtagccagagactgaaagcctagccctgccttcaggcaggccaagctctgggt

SEQ ID NO: 911585 - DNA, 671 bp, Homo sapiens
catatatatttctaaaaagcaatgtacagctaaataactttaatctgaaagtttttttaaattttgacatctttaaaaattataattagtgtgactgttggtattgttggatttatattgccggtattcttattgtgcttttttcatcatcacggtttttggggtttttttgtttgtttgtttgtttttagcttgctttcttcttttcttgccttctgtaggactgattattttcattcacttctttctactgattgcaaaattacatttatatccatatgtgtggtgattattcttaaaccattatcacagaatctccattttaagtgtaaaattaattaacaattctggttgccatttgtaaaataaatatccataaaacactttaattatagccctcctatcttaccttattttgtctattattttactttctacctagtttttttttattctccccaaattattattatggtggtggctattttgaacattaaatgcctggctggttaactgatttatatgattaactcattcttkgctcagtcgcgcttgttgtactccactttttccacaaagatcaattttcttgtttctcaagattaggccttttgtagttctttcagtgaaatatcacagtcttcaatacctttacttcaccttttctctac

SEQ ID NO: 911586 - DNA, 618 bp, Homo sapiens
gaatcccaaaaagtgacagattataagccctgaaaggaatagagaatgaggggctttggaaaaagatgattgagtgtcaactaytgggagtgcctctactgcgtatcaccctttgtctttacctttttcaaaaattggaacttggctacagaagaagtatttgatagtctgagaaaaggagttccagaatgccatacactctggtcaggtattgttcagaaacacctagcctttgatgatgttcagtctggttcaataaccaggaaagctcactgtttataaatattcttttaaatatagactgaggcgttgttagttgaagtgcttctgaaatgatatgggactacgtataaagagacagtagttagaaagaggccagcttcccaaatgaggcttgatgaagtgtacactgcatagacagtttcattgccatcgggtgtccccagcaagaactctggaaggcaagaaaatctaggctgagatatacaacatctgcatctatctgaacaccattcactgccaagcttttaactttttttcactttttattttttattaacttttattatttgtaactattatttttaacttttcattagttaattcagaacttaattt

SEQ ID NO: 911587 - DNA, 666 bp, Homo sapiens
tttcttcatctttgccccaacaccagctgccctcatctagcccatctgcattgcctctgactctcaccatatgtaaattcacatcattcctagagtamaacagaccttttcataagtgatttcataatcacttgtctacacatggtttcttctgatagagtatgcaccccctcgtttcttcacccacctgccaaatgcttgctcatccttcaatatctcctcctctatggagcattttcccaaatctccaaagaggagttgttctactctgcactcccacaacaccattttaaagccaatatccctaacatagcacttagcagggtgtatttgtaaactgctctgtttacatgtctgattcttccactggagcatatgcttttgggggtccaaggaccatgtctgtcatctccaaagagtacaataaatacttaatgaaaaaaactataagctgtgcatttccctcaggggagaaaatatatgagcttttaggagtccaaagggcagatcagttcccctgctttgttctctatgtgtttaagacaagaaaaagcccccgatggagtcagaaggaagggttcccttcagcacacacctaattacagtcctcacttgattccatcttataaatgacaaccatcagatgccaagttgtggcagaatgac

SEQ ID NO: 911588 - DNA, 572 bp, Homo sapiens
atgcttctgcagactgagttaaaaggctgttgccacaggtawtcagaagtatctgactattaaaccacaacagcctgaaaggaaaggagtatttagtgctcacacagattttgctcttttaagaaacagtaatcagtctgtgtatgtaatttggagagtaacataaattcagatggggcttgtttataattgagtactaatgtgggagtattgtgctaatgaaagagtcaagagggaggcagaggctgctttaatggatggtttgtaatagtattaatagtaagacacagcaaatttgcctaacctgtaagccactggttggtttctaaaggcttattacatttttctacagcatctttttaatcatggtgcattggtggtgaattggcctaggtttagctgggggatggatccatggagtagttatttctttctgagagtagaatgtctcaagaaacaggtgccctaggtgatgccaaatatcactacacagagcagtaacagcagagggtaattgcctgtgtaaatgagaggcagtggagagatggtaaccctggggctgcattactaag

SEQ ID NO: 911589 - DNA, 621 bp, Homo sapiens
gtgctcagcttatcttgattttgtttttagtattttgatttccaatgccttctgaatgctcattcctggggctcttttgacacccacatattctgaattaattttcagcaataactacatctatgtgtactctagcaaccagatagaatatatgctacattataaagaagtctgttctctttctgttcaaccatgttgttcaatgatcccacacaccatgagaaaaaaggcctgccatggttgtgtgttatcccatggcacctcatcttcccaatttttttcccccagaaagaatacagaataatgaaaacctttctgacagacccatcttgataatagctgtgcaaattattgagtgttttgaggaattttgaatgctaattacctttaaatagatcatctctacatgtaattcttaccccaatacacaagaaatttgattttcatcataaaaagctggcaatttgtcaccatgtgcttgtgaattacatctgcatgaaaaatacatggtgcttcatgtcatttattcaatgtatactcagtaccagatactctgtcaactactatayatgcctttaattctgacaaccaccatatgtgttagacatcattgtccccatt

SEQ ID NO: 911590 - DNA, 531 bp, Homo sapiens
aaactggccaggcgcggtggctcaagactttaatcccaacactttgggaggccaaggcagatggatcacraggtcaggagtttgagaccagcctggccaacatggtgaaacctcgtctctactaaaaatacaaaaattagctgggcatggtggcatgtgcctgtaatcctagctactcaggaggctgaggcaggagaatcacttgaacccgggaggcggaggttgaggtgagccgagattgtgccactgcactccagcctgggtaacaagagcgaaactccatcaaaaaaaaaaaaaaaaaaaaaaaaaaaaagaaagaaagaaagaaagaaagccaaaccaacgaagatataaagagaaatgaggatttggaaggattctgagtaacacagcctccttctctattaatctctcctggccaaaatattttttttatcaccaaaatgatgctgcaaattccacagttgtggctagaagttcatatgacactgccataaatccacgtgataatttgaattctcacaacatact

SEQ ID NO: 911591 - DNA, 639 bp, Homo sapiens
gtgttgaagtctcccactattaatgtgtgggagtctatgcctstttgtaggtctctaagaacttgcttcatgaatctgggtgcccctgtgttcggtgcatatacatttaggatagttgcatcttgttgttgaatcgtaccctttaccattatgtaatgcccttctttgtcttttttgatctttgttgttttgaagtttgttttgtctgaaattaagattgcaacctcagcttttttctgttttccatttgcttggtagattttcctccatgcctttattttgagccttttggtgtcattatgtgtgagatgggtctcttaaagacagcataccattgggacttgcttttttatccatcttgtcattctgtgccttttaagttgagcatttagcccatttacattcaaagttaccattgttatgtgtggatttgatcctgtcattgtgttgttagctgattattatgttggtttgtttgtgtggttgctttacagtgacactattctgtgtgtttaagtgtgtttttgtattagctcgtagtgatcttttctttctatatttagtgcttcttttgagatctctagtaaggcaggtctggtagtaaagaattccttcaacatttgcttatctgaaaagaat

SEQ ID NO: 911592 - DNA, 639 bp, Homo sapiens
gtgttgaagtctcccactattaatgtgtgggagtctatgcctctttgtaggtctctaagaacttgcttcatgaatctgggtgcccctgtgttcggtgcatatacatttaggatagttgcatcttgttgttgaatcgtaccctttaccattatgtaatgcccttctttgtcttttttgatctttgttgttttgaagtttgttttgtctgaaattaagattgcaacctcagcttttttctgttttccatttgcttggtagattttcctccatgcctttattttgagccttttggtgtcattatgtgtgagatgggtctcttaaagacagcataccattgggacttgcttttttatccatcttgtcattctgtgccttttaagttgagcatttagcccatttacattcaaagttaccattgttatgtgtggatttgatcctgtcattgtgttgttagctgattattatgttggtttgtttgtgtggttgctttacagtgacactattctgtgtgtttaagtgtgtttttgtattagctcgtagtgatcttttctttctatatttagtgcttcttttgagatctctwgtaaggcaggtctggtagtaaagaattccttcaacatttgcttatctgaaaagaat

SEQ ID NO: 911593 - DNA, 646 bp, Homo sapiens
tctccaaggaactagccaagggtcagccttttytttgtaatgtgtagggtttgaataacccaggcctgttgagttaacccattactgcacatgcattgtatttaacatgctaaaatcctgccaatctttggcatctggattatcttgtatctagttacgatctcccttcacctactggcaataacttctaactctgtgtttcaaacgcactttatattgaacgtgtcttattatcatatatgcaataaggtgaggagttataaattaagatgatatacagtgctttccctcagcacctgggacaacagcttgtgtatataacaaaggtgatacatatttattgaaatgaatgattgttgtctctgctcatgttttggcattcctattaactggtgaagtcttcataattagagaccatgttgtgttcatttgtcttccacagagtttaaggcctttcatggatcgagggaatatatgtatatgtattgaatgatatattcatgaagcattgcttgtatgtaaaatctcatttaatcctcacaaaaccctatgtagtaattactgttattattttaattttatagataaggaatatacctatagccacttagccagcaagcaacagaactggaattcagctgcatag

SEQ ID NO: 911594 - DNA, 670 bp, Homo sapiens
tcatttatttctccactggcctctgtgttgctaaggacattaattttgtcttggtcatcttagtatcaccggcattaagcatagtactttacctataggaagaactgattaaccactgaatcagtgtaaaagcacgggactcatattcaagttgtagatacaagatatggcaaaaagatggtaaccataaaacggaaaagcatgtcaaaaatgtggtgctttccctgtatgaaaggggagccatggaagatatttgaatgtatgtgtattggggaaggggaggtgagcagtattctgaaaaatgtcttattttggcatttcttgaagaattggtaatttattcacagaaaagagtgcttatgaggaaggacgctctagaacctggcacaaaagcccctttctagggaagattggctttggagaagtggggggtatcttgggtgacagtgatggttcaagaaatgatggtatgatatgtgacggtcatcaggatgtgacatcagtcacctcattgatagcaaggttctattcagccgggttggctaggttaagtccccttcctctcctataygcacgtgtggtccctatcccagaagctgtgagattggtcaaagcaagtggtctttccaattggaggaggtctacccttggtcaaaggcatgcgagtctg

SEQ ID NO: 911595 - DNA, 601 bp, Homo sapiens
taaatatattgcttagggatactcacatatgttacaatagtctttattaaaggaaggaaaagctgaacacaaaatttagkatagaagttacctcccagaaggaaggcagtggattgcaataaggaaaagcacaatggtattgatgatattctagtttttaaattcagtcacggatgtgcattttattactagccatcataacttatatcttgcatagttttatatgcagaaaatattacataataaaaatttcaaacaaatcatacataaattttattattctaccaaatccatagaatgacaattcagaaaaaaatttaagttgtgaaaaattcacgtttgaacacaattatataggaaattagataagatttatgccttaaatatttttctaattgatttgaaagcagagaaggcaacaacactgccaaagaagtcaagcaaaggacacctggcccttctgtttcttggctgttcatgaatgtaagaatgaaaattttgtcttttctcaaaaataattaataaccaattttcccagaggaattataagtttaagaagtaggcttggatacatttcaaaatggaatgtttttcgtacata

SEQ ID NO: 911596 - DNA, 644 bp, Homo sapiens
ttatatgtattccagatatcttctaaatttagtttcactttttatttactttatgaatattttgagcagaagttctttattttaatatgctcattgatatattttggggggatcttcctttaaaagccttctctgtgctgtaggcataacgatattctccatcattacagcagttgaaaattatttttatgtttgggtttaggtccaattttatttttctccataattgttccaataccttttctgttttagtcccttaatcgtcattaatataaaatgtcaacacatcatcaagtgagtttatatatgttttattctgtttcagggcactcttctattttgttgactggcttagttactgtagtgttataattatcccttacaatttatctgaataagacacctttattcttttcaggggtttctgggctacttagggctctttgctcttcagtataaattttagaatcagtttgttaagttcatcataaaataaaagacaagcaaacaaaaaagaaaatgygtcagaacttttactagaattgcactgaattcatagataaatggaaaagacaactgatacctttataatatcgtatttttcaatcataaacatggtgtgtctctccacttatttaggtctt

SEQ ID NO: 911597 - DNA, 698 bp, Homo sapiens
aataagacgttatccgtataagagctaagatattcagcaagaactataaaacctccttcctgaacatacacacaacttgacattttgctggtgcattcatgtatatatcrtagttttcgtttcagatattagatcactgcaaaattaattgtggtttttgctactgaaagtaatggcagaaactgaaattacttttgcatcaaccagtagtaaatttttaataaaacatttgcaagtcattactgcaaatatctaaatgttgagagttgagaagagaggggtatttatttggatttatttctactatcctatttttgtgctatttgtccctctttatctgtttctttttctaatttgttgttttgggttgtcttcttaaatattgaatagatattttcctcactcatgttttcctccacagatttgaaagttacatatactatttctatgttttattggttaccttaacattttcagcctgtatacttaacttataaaaatctgaatgtactcctttaaataatgattttattaaattttaagtctgatcattcctttctaacttatatgtaattattgaataccacagcttaccttattttaaaccccccaaaaagtattgttttaggcactcagtgttgtttatatttatccatatatttaccactttctttgtcctttaatcctttttgtatttt

SEQ ID NO: 911598 - DNA, 593 bp, Homo sapiens
cacactaggtgtatatatttattgggtacctaagatgttttgatgcaggaatgcaatgcataataatcacatcatggaaaatgggatatctgtcctctcaaggatttatcctttgtgttacaaaaaaatccaattatattctttaaattatctgaaaatgtacagttaaattattattaactatagtcaccctgttgtgctagcaaatagtaggtcttattcactctttccaactattttttgtatccattcaccatcttcacttccccaacaccctccattacccttcccggtctcctgtaagtattcttttactctctatccccatgagttcaattgttttgatttgtagattcccacaaataagagagaatgtataaagtttgtctttcagtgcctggcttgtttgacttaacatgatgacctccattccattcatgtggctgcaaatgacaagatctcattctttatggttgaatagtactccattgcttatatgtaccacrttttctttctccattcatctgttggacacaggttgctttcatatcttggctaatatgaaaagggctgcaacaaaaatgggaatggag

SEQ ID NO: 911599 - DNA, 666 bp, Homo sapiens
taaccttagtcatatcaaacccatgtctgccatgcaagaactgcagcaattactactgctggcaagtccacaagcacttgctttgtatgatctctcttaatttacacaataaccttacggggcatatgcagttattattaccttttatagatcgggaacctgaagcacgcagcatcttaataattttgcaaccataagtggcagaactgagactcactccggtcttcctgctctgtgtttgtaaccatctcaatcccggtgtaaggaccaatgggccatagtcaacacccactgcaatgtattgagtaaacccaatgccaggcatttgaaccttgaatcctttcaaggtagacatcaccattccagggcaaaagcactcagtttagtttactcagttaagtaaaagtgtctccactagggccactgatgtttgtttttcccttggcaggcaacccacaaggctgtgctggatgtcagtgaagagggcactgaggccacagcagctaccaccaccaagttcatagtccgatcgaaggatggyccctcttacttcactgtctccttcaataggaccttcctgatgatgattacaaataaagccacagacggtattctctttctagggaaagtggaaaatcccactaaatcctaggtgggaaatggcct

SEQ ID NO: 911600 - DNA, 599 bp, Homo sapiens
gggtaacagagtgagaccctgtctattaaaaaaaaaaaaaggactaatgtgaatgtttattgaatgttttatttttgtgtcaaaaatacgggtccttgtgagaacatcctgagtgctaagccaataacaacactatttttgagaagagagagaaaatgattttgcagcagtgtagaaagatgataaaacaaaaggaaaggtgatctgcgaatttggccccattttctctcctcttctgtggccagagctttcaacttcgtggagctggggctttcctgtgtttgctgaacagaggagctgaggctctggacctggtggggtggtgagaagggaggggcgttgtccgtaataggatgattcctgcttctcacgcgtccctccctagggaagttgctgggactgaagcctgattgttgctggcctttttcccctgcccctcccccttgtttttgttttaagctctctgtacccgttggcaggtagaggacyactcaaggccttggaagcagtgtgctttaatggaataagtgcaggcttaggagccagtcagactggtgttcatatctgaactctactacaagtaactgtgggtctgggat

SEQ ID NO: 911601 - DNA, 630 bp, Homo sapiens
cttctcattaagtttcatcaacctactgccattgatgaattttcatttttcagtaacaccagctaatcaaaccttaactctttggggggccagccaagtggagggtgtcaaattgattgcatgtgacatatttaactattaaaggagcttcagtttttccatattggaacaaatagctatattggtttggactttcttgcccagcctatcctgctttttccaataacaatccatgaaattactgaatgccctatcccacacaatgatatcatttatagaattaattattacttacagttatgcctaagacataattaaggcaataaaataattgtcattgactttactagtcttaccacttactgcttcatccagaaacaactggttgcataaagcagtatgatgtcttattaaagtatattttacaatattagctacagacaacttacaagactgatgtatcatcttacaaagtgatatatactctgaaccaaaaccaaatacccttacttctttwcttctaaagtcaatatttagaaggccccaaatcagtgtgtgggaatataaggtatttctttttaaacagagtatctttgaaagaaggacctgaagccgggtgtggtggcttac

SEQ ID NO: 911602 - DNA, 645 bp, Homo sapiens
cttacctgccctcttaatacttcttcctcaatccaagtcacctcctatscctttctcctgtttctctgccccactgccaagactccttccacccctttctcatgtgtatttcctttcttagacctagttaaaatctattaatatcttcaaattaaaaaaaagatgcccactggtcctatagtcagtttctaattgatagcaactattttaacttgaagctaaactctctgttgccaagtgatacttttattgtgaagaaatcctcatatgaaagagaactttcttataaaataaccaactttaaaaaatgaaaaggcattaaaaatccatttcaacccaaccatttcaagtaaatgctgaccactaggctgaacttgtggctagtttgctggtcatggtttgtgaccagaaagggctctaaaataatccatgatctttccttactaatagtctccagtgcacatttctgctgaaatgggtggcacacttgccagaggtgatattccagggctgtggcgtgcatcagagcttctcttttgagggcagtggctttttgtttctccttgtgtttgtatgtgtttgtgcatgcatgcagttctcaatctccacgagcccattgccctctgacacatgcagcagctgatt

SEQ ID NO: 911603 - DNA, 539 bp, Homo sapiens
cttataagagaaagaaaagaacacactgtcacacagaagaaaaagctgtgtgaaggcagggatgggagaaatgaagccacaagctaaagaatgcctggagccaccagaagatggaagaarcaaggagagattctcctctagggcctctggaggtaatgaggccctgatgacacaagatctcagacacccagcattcagaaccatgagagaataaatatctgttggtttaagccacccagtttgtggtaattggttacagcaaccttatgaaatgaacatggcgagagcaggaataatggaggctggagaattacttaggaacaacccaccaacaagacctattgatagctgtgaagtacagagaagcctctgaaagacaatttgccaaatggcaacaagctcccctatcatgggaatcattttaatactcacaacagagtaatgatcaaaacaaagtccttgtcctcaaaaagcccaatatctaatagttagacaaacaaaccaaagaacagaaaaccccaacacaatggtgacagtgc

SEQ ID NO: 911604 - DNA, 624 bp, Homo sapiens
tgtgtgtgtgtgtgtgtgtgtgtgggcatgtacacatgcatgcatgtgcatgctgaagaaaaagtcatattgcatatttgattgtattgatgtgaaagggataaccatctgtttttattttaatgtgtcatttctagaggtacttgggaaaagggaggttatcatggtatgctctcagaatctgaatgactgtaacttacgatgttttgacagttagcataatgcaagcgtgaaagtgtgcttggatattttgagatcatggacctttctgagactttaaagaaagctacagactcttcccaaggaagtgtgttaaaacaaattcaagcaaataataagcacaattcatttttatttgctagtaactgtaatagacatgggaatgacacaatatgagacatatgataataaataaggtaaatcttgtcccctccaagtgagagatggtacagtaaagagatattataatccaacatgactggtgctatttcctgggaggacagtgtgctctcacataagaggagcatctaacmcatgcttgaaagaatcaagaaaggctttctagagaaaatggctctaagttaaggcttgaagcaaaagtataggcattgaccagttgatgaa

SEQ ID NO: 911605 - DNA, 632 bp, Homo sapiens
tatgtcaacatttaaaaaaggatatcgaggagagaggacatcaaggcttcatttgaaccatccatctcaaaagaatttagaaatgagaccayccattcaagtcatccatgtgccttcttagatggtcccaaaaatgtatcatccagagagaattagagaagttttgtatgataattataaccattctgaatttttctggttgataagctttagactagatactcagttcaatatggaggaaatcaaaaaggagggaaaagaaacgagattcagactcaaagttggagtctataaaagaaataacagagtttacacgtatttgaaatgactggattttatatcactgtggttgagaaagggaacagctcgctgtgatagaattatgatccctgtcaccgaggagcaaagagtatttgggtcaaatattttcccacgaatgttaacaaacttatggagtggatgtccataaagggttctctaaatgaggaacattaatgagctcagcagacattcatccagtgactcaaacagtgacattaaatgctattcctgctacacacaaaaacaaaaagtttgatatttacggaattccacacactgaatccttaaggcttattccttctttaaaaaat

SEQ ID NO: 911606 - DNA, 632 bp, Homo sapiens
tatgtcaacatttaaaaaaggatatcgaggagagaggacatcaaggcttcatttgaaccatccatctcaaaagaatttagaaatgagaccatccattcaagtcatccatgtgccttcttagatggtcccaaaaatgtatcatccagagagaattagagaagttttgtatgataattataaccattctgaatttttctggttgataagctttagactagatactcagttcaatatggaggaaatcaaaaaggagggaaaagaaacgagattcagactcaaagttggagtctataaaagaaataacagagtttacacgtatttgaaatgactggattttatatcactgtggttgagaaagggaacagctcgctgtgatagaattatgatccctgtcaccgaggagcaaagagtatttgggtcaaatattttcccacgaatgttaacaaacttatggagtggatgtccataaagggttctctaaatgaggaacattaatgagctcagcagacattcatccagtgactcaaacagtgacattaaatgctattcctgctacacacaaaaacaaaaagtttgatatwtacggaattccacacactgaatccttaaggcttattccttctttaaaaaat

SEQ ID NO: 911607 - DNA, 640 bp, Homo sapiens
ccaacaataaaaaaaaaaacccagtaccaatagcttcaccrctgaattttaacaaacatttaaagaagaactaataccaatcccattcagactctctaaaaaatagaagaggagggaatacatccaaactcattctatgatgcctgtattagtccatttacatgctgctgataaagacatacccaagcatggcaatttacaaaaaaagaggtttaatggacttacagtttcacatggctggggaggcttcacaatcatcacagaaggcaaggaggaggaagtcacatctaatgtggatggcggcaggccaagagagagcttgtgcagggaaactcccatttttaaaataatcagatctactgagactcattcactatcatgagaacagtgcaggaaagatctgtccccataattcaatcacctctcactgggtttctcccacaacatatgggcattgtgggaatcacaattcaagatgagatttggatgggaacacaaccaaatcaaagtcttaactcatttcagcattaactcaaaagttcatagtccaatgtctcatctgagacaaggcaagtcccttctgcctatgagcctgtaaaatcaaaagcaagctagttacttcctagattcaatgggggta

SEQ ID NO: 911608 - DNA, 618 bp, Homo sapiens
atgtggactccatagatatggaccgatggaagggttttttactgaaaccaagrcagggaggcacaaagagcaagaacattttgccttgaaagtagagaacaaagaacaaggaaactaaacaagctaaaccttgaagaagaactttttcttgtatctgacaggagagaaaagaataaagcagaatggatggatgtccataaactatgagataactttaaaggttttatagacccataactgaaatactaaaaaaagaagaaagattaaaaaagaagcaatattttaaggaatattaggtaaaattttttcaaaattaatgacagatagcaaactacagagctaagatgctccaaggacacaagcaggttaaagagagaattttggcaaatcaattatatctatccatctatctattaatatgtttatatattaataattttggcaaaatatacttcatacagaatgaataagttattttttatggtgaactcaggtggtaggagacatcttagttcctaaagggacccacttaatataaaatagtatagtaataggagtgtttttgtgacattgaggtcaaatttgatttaattgtaggacctgttgtttggtcagtta

SEQ ID NO: 911609 - DNA, 600 bp, Homo sapiens
gtgtaaatatttgtgataagtcagtatacaccaataagaataagtgtttgctgttagtttactgatatgagccacttaatcttaaccwacttaaatatatcagtataaaatgtataaaaatctaaattcaacaattaaaagattttccataaaacatagaatctgttatacatttgtatgagaatttttaaagttaattatgttagtttagtagtctagataatgtattttactatttcattaatttaagtaaaatatacttggaaatcaattttttgatattcatatttcaataatggtgatgtatgtgattgtataacaagttgtttccaaattatataacatagaaatatctaatagaaaacaattgtctcaaaaataaaacaatataatattgttgaaacttcaacttgataatcaaacgtaagagcttcaaaatgagaatgcattttttagccaaattaacctaatcatagttgcctgggatgtaatcgagctgccatcaagatatgcatcacctcaggttagctttcgtccaactcttcataagtattaaacagtatattttggtagcattcacagagttgtgagtttgattta

SEQ ID NO: 911610 - DNA, 672 bp, Homo sapiens
ccatctccaagtttgtcatggaattctgcttccaaatttatatggaattcagctttaactttacatgtaaaacaaatgttcaagcagcaattaagactcaggcgtctacattaagctaatgccttattcaataaaattcccactgatttctttttaggtactatatattgaagggaggaggaaataatgcttttctactaatagagtagctgtcccctcttcatgtcatataaacacgtaaagtgttgtaaattctcaataaatgtgcttatttcagtgacttcttagaaaatacaagacatacataccagtaattgaacataattacagtgacatctccagaactataaaataaagttaattcaaacattcaaaatgcacacgaagatgcctcaataataattttatcatatatatatataatatatatatatattttttgagatggagtctcactctgttgcccaggctggagtgcagtggtgcgatctcagctcactgcaacctctgcctcccggattcaagcaattctcctgcctcagcctcctgaatagctgggactacaggcatgtgccatcackcccggctttttttttttttttttttttttttttttggatttttagtagagacggggtttcaccgtgttagccaggatgttcttgatctcct

SEQ ID NO: 911611 - DNA, 549 bp, Homo sapiens
ttacaattaaaacacagcaaactgacctactttcttaagggtgttcaggaatagggatgaacagatatgtctttagttttaagtccagacagaagagtactatgaatagaatctgcaaagaaattctargactccaagagcctggagctcatgagtgggataaagcaaatagcctgctgactctgaccttaatgatcaaccaggcacatatggtcatcacagaagatctaacaaatttcctgggactcattcattagccaagtcatcagtgactaatataccatttaagttggtattgggttttatggggatttaattctggaatgtataactggagggctcagccacctgagccaggcagccaaaaccactgactgaggactactccatcttaagctccaggtcacaatagattcttttatcactgatgacggaagccaacttgtactctgaagtagagtgtgtagggggtagaagagagatatctacaagatagcagcccaagctgaggtcagagcacttacggagtagaacaccctggagccagca

SEQ ID NO: 911612 - DNA, 643 bp, Homo sapiens
aattgcactccacaatccccaaggccacctggccatagcattcatatttatttcagccatggccctgtcatgttgattacatagttaaaaccaagattgttttgcataggttttctggggcagctcagctgcttagctactcacaagcactaatgacctggaatcagagtgacaggatagtctcaggccccattcctctactgtgagctcctgccaatgtctttttttcttcaaaagagcaactagaaaataggaaatttgtcttaatgttgtcttttgtgtacattttgtctttaataataaaatgtgtatactgctcgagggcttactctgtgctagaagccctgtgtacatgatcttcaattcttacaaccctgctagatattttggtttccattttgaaggtgagaaaaccaaggctccaagagtttaaggaatttcccaaggccacaaagctaaagctgctaaagccaagatttgattccagtctgcctgatgacatgagttgggcttgtcctccctgaaaacacttcccacagtctccwttcgcagcttccatgagagcagtgggtgtatcttgtccagtgttagtgaccagcatgatagaaggaagcacagagagtaggggttcaggctaagaatg

SEQ ID NO: 911613 - DNA, 718 bp, Homo sapiens
gacatggttttttgtcccaccayttgcaatggcagattctaccttctaatgggttagtctacctgttaagatactgacttctgatacaacatggatgaacctcataaacatatcctatgttgtattaactagggttctccagaaaaacgacaaaaaatagaatatatacgaacagataattgagagaggatttattaggtgaagtggctcacatgattttggaggcagagaagtcccatgatgtgccatttgcaagctgaagaaccaaagaagatggtagggtggctgagtccacttttcaagtcaaccaggggagctgatggtgtgattctcagtttgagaccaaaagctggtggggaagggtagtggctagtgcgagtcccagagtcaaaaggccagagaacctgaagttctaatgtccatgtgatatagtttggccgtgtccccacccaaatctcatcttgagttgtaactcccataattcccacatgtcatgggaggaacccagtgggaggtaattgaatcatgaaggcaggtgtttcccgtgctgttctcgtgatagtgaataagtctcacgagatctgatggttttaaaaatgggagtttccctgtatagtctctctctctctctttgcctgcctccatccatgtaagatgtgacttgctcctccttgccttctgccatgattgtgagccctaccaagccatgtggaactgt

SEQ ID NO: 911614 - DNA, 629 bp, Homo sapiens
ctttctgggagacagggataaaattctacatttatcaagcaactgttaattggaatttccttgtctctgkcatctaagctaattctgcctcataaaatcaacaaagctaaagaatggctcttggaaaagtaatatatttgcaaatctctaggtacattcacccccgtttccaaaaaaaaaggaaaacaaaaaatgagagaaagaaagaaggctcaaatttgcaatatgagggaatacaaactggtacctaagttctactgtcatcaggaagataaaaagaagatatagaaaaagttgtatcagtaagcttgaaaatatagatgaaattctaagaattttattatcaaattgacttaagaaaagatagaaatcttgaatagtcttataaccattaaggaaatttaatcagtattttaaaacttccccataaataaaccaccgaaactattttatatgtaagttctacaaaatatttaaggcatagaatattagtcaatttttgccaggttatactacatacaagaaatcttaaagtagcagtgtcttatgcagcatgtcatatttcttgctcacatgataatattattttgctgcagctttgctgtagctcttctctagctgtgctttag

SEQ ID NO: 911615 - DNA, 545 bp, Homo sapiens
agagtcaaggttctaccccagatctccattacagtcaaggctgtgctgtccagagtggaagcatcttatctccctawaggatgctgccttaaaaaggtatattttggccccagtatctgtactctcaagtgatcttaattctaaactctgcaactatctgtgtgcatacccctctgccccactagaccataagctcctcgagagcataaaccacttattatccatctcggtacaccaagtgcctggcagacagcaagccaaggtttctaatgaatccttattgagtgactgaagcagatagaaactcttctcatgtcccataccacctgcacttcccccacccccctctaccaccaccaatggccagggccattctggggcatgactgcttgtctacatatccttcctcagaagactctaagagccacggtggctgtgtctaagttgctgtcagtcacatttctgcaatggaatggaatgcctagcacatagtaggtgcttgagagctagtagctgaaaagtggttgacagccatgtaacagcgc

SEQ ID NO: 911616 - DNA, 593 bp, Homo sapiens
accaaaaacatagaataaataaataagacctgctrtttgataatgcaatagggttactatagtcaacaataactttattgtgcatttctaaataacttaaagaataattgcattgtttgtaactcaaaggatgaatgtttgaggaggatggatatcccattctccatgatgtgcttatttcacattgcaggtctgtatcaaaatatctcatgtactctacaaatatacacacctactatgacccacaaaaatttttaaaaaggaagacctaaggaaccaaccttgggttaagatgaggtttaatggatattttgtagacatacatgtgccttcagaggggaaatatataaactataagatcaaatgtcttcctaattgagagctaaatcagaatcataagaaattaactaggtaacttaaaattgcccatctgatagtcagcgacattgttcctcagcatcaacccaggcttttttaacaagtggctaaattttaaaatgaactaaatacctaaatgttgggaagatttagtgctcttaaatctgtatctcttgaatttggaagaaatcagagtctcacacagagtttttaca

SEQ ID NO: 911617 - DNA, 649 bp, Homo sapiens
ggacaaatggcattttccctcagactcccaccctctcatgcacacttgtttctggctatttgctgttgartgcattttccaagatattttctaatcacccttctaaacagaagcaggttgttatgagcacagacagatgataccttggtgcatgggaccaattctgccctgcagatgccaagagggagctcagcctgttccaggccaccacacaggtgtgtggagccctgaccctttgtgaaccaacaatggcatcgtgtgggcagacatgctgcctgcatggacgcattgctgctaatgggtattcccaaggcatgggttgttatttgcattttctcattgtcacgagcacccaatgttctgaatattaatgaaacaatttccagcctcctttgcaggcttaaaatattgagcatcagacatactgctttgttcccatttcagccaagtttaatttctcttaaccagctttgttgttgtaaagtaaaattaatgtatgatttcagtgtttaaatctcaattctcggcaattcacgacagattgcaagtgaatgtgatttgttcgttaacacctaatgggttgaaataatttattgcacaaacatttccaggaaaacgaagccacttgagcaagagcaaagcaggaaat

SEQ ID NO: 911618 - DNA, 632 bp, Homo sapiens
ttaaggaagagcccctgaacaaagaacagatattaccatctccattctaatatagctgatttctagtaattgtatagcagatgctygttcaagcacctatttatgtgtattctaacaaaaacatggtattcaggctcagagaggttacagttttttaaaacactttatccaacttactagcattctctttgttttgtttagattgattttactatcatctaagtctcagaatttgctaattaggaggaatgggtggtgatgtctaagtaatctgttgctttgagagtgtttagtagaaactcagacggaacaaaaggagtaagaaggagaaggtagaacaggtactctaagaggacccctagtttaatgccttgtttgccacgtgtcttcccttggtcagtttttcaacaaatgcttattgaatagcaaggtgtgcctcataagtctgatctcttttactatattctctgtttttcaaagactttataactaactttcccaagttggtctgtccacttatacatagattataggttggacaaaaccatctcatgacatagatatataggttcttgagcaatctcaaagaaatgacaaagaaactttttcgtggtctgtgggtgagaaggtca

SEQ ID NO: 911619 - DNA, 690 bp, Homo sapiens
cattaaattcaggtgtaggggcttttcatttcaaaaccagtaaacctgccagaattcttaaggaaaaagaagtcccaaaggtgaagttctgtcttctttgctttacacagttacaggtgggaaaatcartgaggtggtataatcacacagaaaggattaatgccacatgaatattctcctatgattgtgtagctggtgagcctccttatgcttattctcagaaggctgtcttgataactttgccttacaaacctctaatgagtgagtgacagaggatgagggaaagtggaggagagggcagcaagtgaaggttgatctactgccaataactagccaggctctgagcagggatctacccattgggagcaagcctggaaaagcgcattaggactttttctggagggtaagctgtaaactgtcagccatagctgttttaaatgactagcaaacacctccagggtctcctttgtcctttgaaggaagattatttttggtttaaagtttggagtagtaaagccatgtacaatgtagtgtgtaaatgaaacagtaaaactaactttggcatacaacaatttagtggaaattgatgaatatcactaatgctatttggcactttttaagaaggtccttgtcaaggggctttataatttaaacaaaaaagtgctctgtccttgtaaattatattctggt

SEQ ID NO: 911620 - DNA, 689 bp, Homo sapiens
ttgtgtctagcagtgagcaaactcccaactaatatgttctacttatgcagagcatgaggaccttcacacgggcgtccaatacacatacttcctcctctgctcaccatctcacctaatgggaaaatgcctaatrtgaaactggagaaagcttagaatgattaaaaaaaaaaaagcattttaagggaggagagagggcatttgaaagggaaatttcaggaggataatccttttattttgtgaaatatatttttcaagtgagaactgaagaatagtcttgacaagtttagagaagatgtaaaacaattcatattgcccctttcttgatgagtcacttggggtaccatcaaggtcacatggaaagattttataagggttagaatcagtccatttttaagactagcctatcttgggcaatagataatagaggtggcctggttatagggcaaggcatgaaaaactagagagaaacttaatggatgacagagtcattcagatgtcattcattatatttaggctcttatgaaggtcagatggaccaggagggtctgatatcctggaagatatcagtttggtattgcaacactaagtaaaaagcaagtttcataagaggatggccagacaatgggctctgggttcaagtgttaaggagtaacggttaaaaatgatgtacacttctgaagaatggactc

SEQ ID NO: 911621 - DNA, 563 bp, Homo sapiens
ttaatgaacattaactcatattaatgaaaggttagccttaagtgcccaacagtagtcgtatgaaccaaatatattcttataattgaagtatgagagctgtctagttaaaaagtagatcatccagagttacttcctgtgaataaatccagtatgcatgtgttatgtccttcttttaattcttaacttctttgtttggtctcttaaaaagaacttatgtttctgccaagtgctgctacggtgtttttgagatccggagaccgtgggcatacatcctcaatggctgggagttgatatttagcaggatttgggggttatctttgagaaagttcatcctctggatagcttgccagtaatcgaatgtgtgtcacagtgttagggtctctctatgcatagtatcttagtgttctttttccttttctagagtgaaatctgaagtcattgatttgaaacctttcctcatktttatataggtgtttggtgctataaattatctcctaagtcctgcttttagtgagaatctcatgttgtatgtttgttttcattcatttaaaatgctttctcat

SEQ ID NO: 911622 - DNA, 591 bp, Homo sapiens
ttgttgtatgaaatcagaaactgcattagtaatgrgacaaaagccttaattacagaattaaagatttaacaaattaaaaatagttaatcgtaatgctgtttttttagtgtgagggagttttaaatcaaatcagcctatccagaattatgaatagtaagaaagatgggcacttaacagctcgcaaacaccagtgggagcaggacttggggagaaaaacatgcagagggaggagctgatgctatctctaatgataaagtttggacattcattaattttctccttcaaaagggtggggccaaacagaaactggtcttgaactattatgtatttgcaaattcagtagtttaccttcctttgattcatcaatatatgtttaacacaactggcttattataattaattattctacttaaaaatatttattgagcatctaccatgagttagccactgtggtaggtactggaatgatagcaaaaagcaaaacagacattcgtggagattttacttttacattattttgatcccagaaattgtattacttaaggctttgtttatgaaattcttattaaatgaataatatattatttttaa

SEQ ID NO: 911623 - DNA, 529 bp, Homo sapiens
aaaggatttcatgaataatgataagtgctatgttgtaaaatttggttttctgtccttgcgatagtttgctcagaatgacggtttccagcttcatccatgtccctacaaaggacatgaattcatccttttttatggctgcatagtattccatggtgtatatgtgccacattttcttaatccagtctattattgatggactcataggtgggaactgaacaatgagaacacttggacacagggtggggaacatcacacactggggcctgtcatggggtggggggagtggggagggatagcattaggagatatacctagtgtaaatgaccagttaacgggtgcagcacaccaacatggcgaacatatacatatgtaacaaacctgcacattgtgcacatgtaccctagaacttaaagtattaaaaaaaaaaacttgatttaattaaaaccaagttcttggtcatggtgtaaaaatgtatttytttgaatcaacgccataacagtttgatagtgactgctttaggccattccca

SEQ ID NO: 911624 - DNA, 606 bp, Homo sapiens
cagccaaattaagcttcataagcaaaggagaaataaaattctttatagacagcaaatgtggagggattttgtcaccacaaggcctgccttataagagctcctcaaggaagcactgaatatggaaaggaaaaaccagtaccagccactgcaaaaacacaccaaaatataaagaccaattacactacgaagaaactgcatcaactaatatgcaaaataaccagctagcgtcatgatgacaggatcaaattcacacataacaatatttaccttaaatgtaaatgggctaaatgccccaattaaaaaacacagactaaccaattggatagagccaagacctattggtgtgctgcattcaagagacccctctcacgtgcaaaaacacacataggctcaaaataaaggtatggaggaatatttaccaagcaaatggaaagcaaaaaaaaaaaaaaaaaaaaaaaaacccggggttgcaatcctaatctctgataaaacagwctttaagccaacaaagattaaaaaaaaaaaaaaagacaaagaaaggcattacataatggtaaagggatcaatgcaagaagaagaggtaactatgctaaacatatatgcacc

SEQ ID NO: 911625 - DNA, 664 bp, Homo sapiens
caggccatttcccacctaggatttagtgggattttccactttccctagaaagagaataccgtctgtggctttatttgtaatcatcatcaggaaggtcctattgaaggagacagtgaagtaagagggrccatccttcgatcggactatgaacttggtggtggtagctgctgtggcctcagtgccctcttcactgacatccagcacagccttgtgggttgcctgccaagggaaaaacaaacatcagtggccctagtggagacacttttacttaactgagtaaactaaactgagtgcttttgccctggaatggtgatgtctaccttgaaaggattcaaggttcaaatgcctggcattgggtttactcaatacattgcagtgggtgttgactatggcccattggtccttacaccgggattgagatggttacaaacacagagcaggaagaccggagtgagtctcagttctgccacttatggttgcaaaattattaagatgctgcgtgcttcaggttcccgatctataaaaggtaataataactgcatatgccccgtaaggttattgtgtaaattaagagagatcatacaaagcaagtgcttgtggacttgccagcagtagtaattgctgcagttcttgcatggcagacatgggtttgatatgactaagg

SEQ ID NO: 911626 - DNA, 673 bp, Homo sapiens
tacatgttatttttcctttttccaatattgaacaatattagtgtaaattagaaattagtttatttcttccayagtgagatatttctataatttttattatcttatttttatcatttattgaaatattattcatgtctgtgtaggaaatggaaaaaaatttctcaaacttctaatgacccatactttgactacaaatattatctttaaatattgctgttaatgttttatacacacaaactacacaagaaaaatatgaaagacatttgattttggaatcactagcagggtacctggcatatggatgttacaaaatatttaaaatacatcattacataatctcaactgcagaggaaaaaaatgagaaacttctacttgcttattgagaactacttctaatgtttatacaacttcttctaaatttactacatttggtattattttgaggacccaatgtaagaaaaccatgttaacctattttaaacataaagttacaaaatatcctaatagtaagttttctgcactatacttttgaatataactcaatatactataaatataaaatattactggaaaaattatcctaagattagattgaacctcttgtgaacatatgtacatgtactaatggcaagcatagatttctgtttatttccctgtttcagtggtagatgga

SEQ ID NO: 911627 - DNA, 685 bp, Homo sapiens
aaaaagtgggctgacatgaatagacaattctcaaaagaagatgtacaaatgatcaacaaacatttgaaatattgctcagtatcgctaatgatcagagaaatgcaaaccaaaaccacaatgcaataccactttactcctgcaagaagggctataataaaaaaaaaaatcaaaaaataataatgttggcatggatgtgataaacagggaacaattttacactgctggtgggaatgtaaaccagtgcaaccactatgggaaactgtgaaattccttaaagaactaaaagtactatcatttgatccagcaatccactattgggtatctacaaagaggaaaagaaggcattatatgtaaaagatacttattcacacatgtttatagcagcacaattcacaattgcgaaaacatggaaccaactcaaatgctcatcaatcaatgagtggataaagaaactctatgtaaaaattgtaataaattgggttatttattactttctaatattattgctttttgtcttacagtcttatatttttctaaatgaataatattaagaagataaacaatatccaaatcattttcttatttgtacttcaatatgtcattataacaaatgtaataaaaacaaaatagcataagtttctgttrtagtaattttcttgctgctacaaaaaggcacatgttccca

SEQ ID NO: 911628 - DNA, 638 bp, Homo sapiens
agagattaatgttatcactaagacaaggaacaggaatacctttgattttcttttgtccactacacatgtgtttttccccactctcagactcaygatgaaatatgaaaggagatttagattctgcccaactagaactcatattcaaactaaaagtagaaactgatcaaagagtttgttgtttgggagcaagattaagaaggaggtaggtatggtgagaaagggaatttcttaaagtcatcttataatatttagtttctttcctacacaagtattaacatgaatttttttttttgaaacggagcctcactccgtcgcccaggatggagtgcagtggcgcaatctcagctcactgcaacctctgcctcctgggtacaagcgattctcttgcctcagcctcctgagtatctgggactacaggtgtgtgccaccacacccggctaattttgtatttttagtaaaggcagagtttcactatgttgaccaggctgttctcgaactcctgacctcgtgatcctcctgcctcggcctcctgaaaattttcatataaaataaaagaacaaaggaaaagtctttctgtttcattcaaccatgactttatttaacatcattgtaattaaatacatattaaatttttagac

SEQ ID NO: 911629 - DNA, 641 bp, Homo sapiens
gccaaacttatcaccacgtacattggtacagctttgtcttgccttccttgagatctgctactagagtatgctggtctttgagaacttgtccaatctctggatctattttttaaaaaatgtcaaaggtccatccaccataataatataatcatattcaggaaccgagcatattagaaaaaaatatgtagcagctcaggaccatcagcagaaggtggtagagattgtggtgaactggacaacacatggtctgctttgtctcctaataattcagaatatcttacaacacagaacttggcaagccaaattctgtggaatgccagtttggaccaccatcctcctaagaggaattttgttttatctgctatagtaaactctgacaccacaggtattccacttttaattaagttcatggttccatttgtggctactttccttcaattagggttggataatcaatgttggaccatatgtatcataggccacgttttagctttctggtatctgggatggtggagagttgggaaatacaacaatgctattcaataaatatgattcaaaagctaaattgttcttcaattttacattakgcctgattaaaaagaaatgcaacaaaacagagacgaaaagaaatcaagggaata

SEQ ID NO: 911630 - DNA, 612 bp, Homo sapiens
ttcttttactttgctgtgtatatagtatatataaatgggcaaacgtatcctaatttacaacatctagtctttctaaatgttaaagagtttgmcagtgtatgacaaaagcagaggttagtaaactaataaattgagaacattttgttttaaaattcataagaaagactattcttaaaaacacttaaagaagtgaaattgttaaatcttgtctaagcattacaaatgcttatacctgtcaactgtgttgatagaggtaggaaggggaagggttctaggccagaatgttcttatttagaagacactttcaaatataacctgtgttatgtgcaccacttatttaatgctactgtgtctatggtggaaaacttaagtcctatttgaaatatctagtcttttcacatgcttaaaattgcacaacatagtttaaaactagagggctaaagtaacaccctgaggtagttttttggttaattcctaggagtggttgtgcttgggaatgcaattgttaagcttgatgtttggagagtatgctgactgtttattgggtggcagcaagtcaggggaggagaaagtatgcatgcagaagtgttccgtgcctgtaagtttgattag

SEQ ID NO: 911631 - DNA, 530 bp, Homo sapiens
aaatgggagttcctgcgcacaagctctcttgcctcccgccttgtgagatgtgactttgttcctcatttgccttctgccacgattgtgcgacctccccagccgtgcggaactgtgagtccattaaacctctttcctttgtaaattccccagtctcgggtatgtgtttattagcagtgtgagaacagactaatacagtaaattggtaccaggtagtgaggtgttacagtaaagatactcaaaaatttggaagcaactttggaactgggtaataggtagaggttggaagagtttggaggtctcagaagatgacaggaaaatatgggaaagtttggaacttcctagagagttggagggctcagaagacaggaagatgtgggaaagtttggaacttcctagagagttgttgaatggctttgaccaaaatgcygatagtgataaggacaataaggtccaggctgtggtggtctcagatgcagattaggaacttgttgggaactggagtaaaggtcactcttgttactttagcacta

SEQ ID NO: 911632 - DNA, 598 bp, Homo sapiens
ataataacacctaactcttgaacaattgcaacgtgacttatgaaactaaaacacctaacttaattgatttcattgtaatttaatagccacaggtggctagtggctactgtattggataacagagttttcagataatccttcagatggtatgttccctcaaatcaagggaccaccatcctaattttatattaaaatagagctgttaaatacactgcactatataaatatattgagcaaataactattatagataagaaatacaaaaggcatcgctttaatatatatacaatagaaaaacaattatattgttgcaaatgtgtatttgaaattcaggtgatttttaacctataagtgggtttgagttttctttctctaatcctaagcaattgatgtttcctttcttctgtgctctggatgaggcatgtctctttgaactggcttatcttatattgtctgttttcttgagacacaacctgacctgatgaaatgtgacaygcttgtcactttttgttaaaagtgaacaaatatttgttaaatgaacaaatatccatgtaactagaatgttttcccattactggttcctggcaggtatttgtct

SEQ ID NO: 911633 - DNA, 646 bp, Homo sapiens
ttccacagtaaaacgtaagtttcataagggcatacatttttattcttttatttaccactctatccctggytccttcaacaaagcatagccatactgggtgctcgatatggtttggtcatgtccccactccaaatctcatttggaaatgtagctcccataatccccatgtgtcatgggagggacccagtgggaagtaattaaatcatggggggtgtgtttttcccatgctgttctcatggtagtgaataaatctcatgagatcagatggttttataaagggcagttcccctgcacatgctttcttgcctgccatcatagaaaacgtgactttgcccctcattcgcctttccccatgattggattttaaggtctcaccagccatgtggaactgtaagtccattaaaactctctttcctgtttaaattattggcaatgtgagaatggactattacagtaaattcatactgggagtggggcactgctgtaaagatgccccaaaatggggaagtgacttttgaactgggtaacaggtagaggatgaaaaagtttggagggctgagaagaagataggaaaatgtgggaaagtttgaaacttcctagacacttagaggactcagaagacaggaagatgtgagaaagtttggaa

SEQ ID NO: 911634 - DNA, 617 bp, Homo sapiens
ggatttcataccagtcccaaggtgctctgaggccattatttgcacataccraatgagcatctatttatataggtggctacagaaacaccactctccaggcatttggtaaaccatatctaatacatttatttttcatatgtttattcttaaggctggaggaagaagttggccatcagggttatctattgtccctgtttgcagatgacatgattgcatatctagaaaaccccatcgtctcagcccaaaatctccttaagctgataagcaacttcagcaaagtctcaagatacagaatcaatgtgcaaaaatcacaggcattcttatatgccaaaaacagacaaaaagagagccaaatcatgagtgaactcccattcgcaattgcttcaaagagaataaaatacctaggaatccaacttacaaaggatgtgaaggacctcttcaaggagaactacaaaccactgctcaacaaaataaaagaggatacaaacaaaaaggaagaacattccatgctcatggataggaagaatcaatgtgaaaatggccatactgtccaaggtaatttatagattcaatgccgtctccatcaagctaccaatgactttcttcacagaactgga

SEQ ID NO: 911635 - DNA, 583 bp, Homo sapiens
gactaatttttgtttttcagtagagacgggatttcactatgttggccagggtggtcttgatctcttgacctcgtgattcacctgcctcagcttcccaaagtgttgggattacaggtgtaagctactgcgcccaggctttaatgttttatttcaacaaaaaatttacttaacacaaaacaaactgcagggctgatgaaaatatagttcagaagaaaagttttagcttcatcttttcctctcttcactgacctgctataccagtaaagatattgtcccaaaattttaagttctatattggcttcatggagactttagtcttcaattttacttatggtaaagagaggttaaggacatcagttcatacgtaccaccacaataataacttcaagtgaaagccactataaaccacaatagaacacttacatgtcttaatttttatatggttgtacttttttccccttaaatctctaagttattttattgagaacagtcatgtgtcatctagtgacagacatgcagtcagagaactgcatcattaggcaatttcattgytacaggaacatcatagtgtgtactcacagaa

SEQ ID NO: 911636 - DNA, 549 bp, Homo sapiens
ctgaagttatctgacatggctctcgagtcccttctaccccaygactccccttttttccctttatccttgtgaattatctgttgaagaagccaggtcactggtgtgcagtttcctattgtctgggttccactgactatgtccagtggtgtcaccgagcctgtgcctccacccctgcatttttgcagactggccatccaattcggctgagcccatatggtttagttcatacttacaagataatattttttttgagatggagtctcactttgtcacccaggctggagtgcagtggcatgatctcagctccatgcaacctccacctcccaggttcaatcaatcctcctgcctcaacttcctgagtaactgggactacaggcacaagccaccacacctagctaatttttatattttttgtagagactgagtttcaccatattggtcaggctggtctcaaactcctgacctcaggtgatctacctgcctcggcctcccaaagtgctggcattacaggcgtgagccaccggcgcccagccaagaataattttttta

SEQ ID NO: 911637 - DNA, 601 bp, Homo sapiens
taccctgcctgtgtgggatatgagggagaaatatgggagcctcctcacttcaggtgtcactgctcagcatatatccaggctttgttttcatattggtcttgcaaagagccttttgggaacagttttcttattgaaacatactcagtgtttaaacctgcaggtgtggggtggtggcagtccacatggcatcctttgctctgtccctgttctcctgtctctggctattcaggttcccgtgaggatactgtcacccttgaataatggagcttgcataagaccaagcccctgtttttggagtccttgtgctgaggccacaagaacttccaaaaagttcactgaacatctaggaggaacaacagagggtaattggagcataaatttagttggctcagcacattcagatgtctgatcttggtggagttagtgtcctctggggcctgtcctattccatgaggaattccaaagagagagctcatctagggatttctcctttcttagttcttggatttatttcctcaccrttctccctgggtttccttactttcaagagcaacactcaagtcctgaaagcagagagatgcagcgaaggggtggttggttg

SEQ ID NO: 911638 - DNA, 651 bp, Homo sapiens
catgatgatcacacttcttttttatttaggtgacactttcaggaagggattccctaaacctgtgtcattgtattagtctttttttacactgctataaagaactgccttagactgagcaatttataaaggaaagagatttaattgactcacagttccacatggctggggagacctcaggaaattaacaatcatggcagaaggtgaaggggaagcaaaacacattcttcagaaggctgcaggaaggagaatgaacacaggaggaactaccaaacacttataaaaccatcagatctcatgataactcactcactatcacaagaatagcatgggggaaactgccctcatgatccatttacctccaaccggtctctcccttgacatgtgggaattatgggaattataattcaagatgagatttgggtgggatcacaaagcctaaccatatttttctgtccctggcccctcccaagtctcatgtcactttcacatttcaaaaccaatcatgccttccccacagtcccccaaagtcttaattcaaygcagcattaacccaaagtccaagtccaaagtctcatctgagacagggcaagttccttcttcctaggagcctgtaaaatcaaaagcaagttagttacttccaagatacaacag

SEQ ID NO: 911639 - DNA, 623 bp, Homo sapiens
cctgacccaattttatatgtcactgtccaaagcataaacatcaaatgactttcaaagctttcacactctggaaaagaaatgaacaagcacatattccacaagtatcaggacaatgtctgaacaggtttgtactcactgtaaacctagctggctaggagaaagaggaaaggattatttgaagtagtcctgtgatgaagaagagaacaattatcctgattgtccccaattgcctacttctgtaagagccaagaagctcttatatacccatggaggatgggattaatgatgacatccttttatccataggcgtgaaagctcagaatggacagacgtttgaacatccccgactgggaatcctgcccttaacaaatacactagatgcagatacatggtttcttggctgcctatactcacgcccatctgtcaggatggcagtatgcctgctcacatgttggtcaaactgtcactagggcataggtgccaagcaatgatagttttamatgggcagcttgcatagcactataagagcttgctcttctgcagaaaaaaaaaaaaaaaaagaaaaattctctgtgataatactgaagggctgcaaatcacaagtgaaatattcttggtcaatc

SEQ ID NO: 911640 - DNA, 639 bp, Homo sapiens
tcttctccatcaccctggtccaygtcaccatcatctctcacctgggtaatcacggttacctcctcactgggcttagagctactacctgctcctcctccagccctttctcgtcacagcagcttgaataatcctttcaaaacggaattggagatctgttctatgccaaaactgcccattagcgacacatctcacccaagccagcgtcctcgaagtgacccaggggtcacaactcatgttctcttagacctcatctcctctcctctccatcccccttccctgttcactctgccccagccccaccatgaaatgtagaccggccttttccagctcttgaatctgggcccatttaggaagcatgtctaccacaaaactaaaagccaccatcctcagtgaggttgctcctgttttcatgattctccccatggttgcaagatggctgccatgactccaagaataacattacactgcagcccccaatgtaagaggcaagaaggggcgctccccatatccacctctctctcctcatcagagaaggaaatccttcccagaagctttcctatgactttcatcatccaaacccagcacacatgaccacctttagtttcaagggagcctgggaaagggcatgttagggtcttt

SEQ ID NO: 911641 - DNA, 653 bp, Homo sapiens
gagatctcaattttgagtacttcttataagcatgtcctttcattacttcaagaaattctgctgggcaccattcaagacatttatatgacaccaaatttccttctgtatcacttatagtaaagtacttatatatacagagatcaaaaaatagtatgtgtgcatcactgcccacatgcaaaagctggtcatggggctgataaatgctacaatgtaaagtctaaaatgccctgtatttgctatgcctatttacaaaagggctgttttctgcacagaagctattcagacactcaaattttaatatgcagtggttcttaactatgtctgcataatgaaatcacctaggaagttttttaaaaatcccgacggtcccacccttatagcttttgatttacttggtctagggtgcagcacagatacttaaaagctcccaggtgaatttattataatatgcaactaaggatgccacccacagcctcacaagcacctccattaaaatgatctgaggtatttgtgtgttaatggaccagaaaaagaaactggagaagcagtgagtcctggcacctaaaaaacaagctatctggccacaaatttcactcatttctgaaatcactggaagtagatgtcygtaatgaaaattctattaaactaacagg

SEQ ID NO: 911642 - DNA, 634 bp, Homo sapiens
ctattttaaaagtttaatgtatttatttattaattatttttgagacgaggtttcgcccaagctgtagtgcagtggtgccatcattgctcactgcatccactaactgctggattgaagtgatgcttccacctcagccacttcagtagtagctgggattacaggcacgagctaccatacacaactttaagttttataatattacattttacatttaagcctgtgatttatgtgagctaaattttatataaagtataaatttaggtcagtcttagtttttgtacctgtgaatgtccaattgctctagcaccatttgttgaaaaagatatctttcctttaaactgattttacatccttgtaaaaaaaaatcagttgaatatagtgtggtctgtcatcttttaataagataaaaacattggcactcaccagatatcaaagtttagatatttttttaaagctgaacttctgaaaatagaataaaaacaccttcacatgtcaaattagtcaatttmtataggactaattcatttaaatatattaaaatacaaaataattcaaaccagtaaagtgataatacaagcctataaatttaaaggctaattattaagtcaaattgctgtattctacgtgttagagt

SEQ ID NO: 911643 - DNA, 612 bp, Homo sapiens
aagactaacttggttctattacttaacatattatttattcaggtagtcaccaaaaccagaatttaaaatctattcagttaacccatttaaagttgatgtgttttactcctttttttkgtagtgatctttttaactgaattactggacatcatggggagttctactcctcctatttggaaacttaggctatcttaccaagttcaatattcaaagtttttctttctgccattaagtttgtttaattttatattaagctcagtttgtattatgatatcaaattcagcctgagggattacttaaactttcctaaggtatttacagatttaatttgttcttacagtatgtaaataccaagagagcattccatttaatattatttttattaaattaactttggagtaaaaagtccaagaaaagccctgtactgaaatcacatgtttactaaatcctggattttctgtacagtccctacatatttctactttaaaattcttctgtcatgtgaaataattcattaaaagaagcaggcagatgatgacaggtaaactttttaatgatgttctaatgttgacaattgcagttttattttgcttggatcataatggcgtgtaa

SEQ ID NO: 911644 - DNA, 552 bp, Homo sapiens
aaaacatatccccactttttctgagctttcatctgagtcaatttataaacaaaatgggccgggcgcggtggcctgtaatcccagcactttgggaggctgggtygggcagatcacaaggtcaggagatcgagtccatcctggccaacatggtgaaaccccgtctctactaaaatacaaaaaattagctgggcgtggtggcgcaagcctgtagtcccagctactcaggagactgaggcaggggaatcgcttgaacctgggagacaaaggttgcagtgagccgagatcgcaccactgcactccagcctggcaacagagcaagaccccatctcaaataaataaataaataaataaacaaatgttacataatatcatgtcaggaagtgataggtgctcagtgataaaaatacagcaggaaaagagagggctgggggcgtgctgtgctgctttagctaagccagtgaggaaagaactgcctgagactggaaagagaggctggaaggaggtgagggagggaggccggcttctacctgaaagagttgcagggagaggttt

SEQ ID NO: 911645 - DNA, 403 bp, Homo sapiens
ctgggaaaaatgccatttatctatcttttcaacttgaggggacatgctttcttcacagatttctttgggatggaaagttctttctttaacctgattactgtttctaggtgctgtaaattgctgatcattytcagtaaatcaccagcattctgttctttctcagtcttgacaaagttgccattgtgcatatgtgtatttgtgtgtgtgtgacagggaacatgcatggtttctgaaaaaaaaaaaaaaaaaaaaaaaaaaaatccttgccccttttagatttggaaattagcatagctaggctagccagatccctcttttggaggaaatgggaaagattggattgagcccttgtgtcaaggaaattgacttggctggatttcagggatccctgtggactggccca

SEQ ID NO: 911646 - DNA, 614 bp, Homo sapiens
acacaccactcttgaaggtcagggactaggaaagaatatgattgaaaaattggttacaatgaaatctggagaagaggtttttagatggacccctctgaatgagcaaataatgtgaagatatttacatcccatgtcatgctcaccaaagggtgacctcagcgaggaggattttaataatcaaattgataggataggataacctgctctgtagatgcacgtcagcttctttctccaaccacccctgtctttgcccagtgggcttctgagcaaagtggccatggtggcagggatagaagttatggcatatgctcagaagcaggaattttcactcaccaaggctgacctggctatggccactactgagtgcccaatctttcagtagcacagaccaacactcagcccttgatatggcaccatttcctgggggtgatcagccagctacctggtggcatgttgattacattggaccactgccatcatggaaggggccaggttttgttcttactagaatagacactctggatgtggstttgccttatttgcacaaaatgcttctgccaaaactaccatctgtggacttacagaatgccttatccaccaccatggcattgcac

SEQ ID NO: 911647 - DNA, 572 bp, Homo sapiens
gtgggggccccttcaagatggctcctgtgtccatgtggcatgttcccatcacttacttttgacaaatttttcastttctggcataacaatgtgatcaggctcatcttgtatatactctagccctggagccatctgttcctttgaggatcccagattccttttagtggagaaagggtataggcagtatggtctgtgttttccatttgcttctgtgctgtgtgaagtgttaggcccaggctttgggaactatccatttcttggtagatgttgggtcaagtggaaatgttggggtactgaggaagaacaattttgatttgcaattggtaaatgaggaatatctgttcagagtgtgagtgagatgaaaattgttcttctatttaatttgtttgtaaaccttggctagagttggcctgacagattgtgtccctttccctctggccatactttttttgggagggggctggcctgcattttaatgaacatgcacattttggcactctctcatgcttgcatttttagttgtgttctcgtctcaccatgctctgtaggtgcccctttaacattggttcatc

SEQ ID NO: 911648 - DNA, 621 bp, Homo sapiens
tattgctgaaacaagttttatgaaaaaaggagagtattagcctgaggacaaaagtagtttggagttctgtagaggagctgccagtattaatgaactatcacttggarcctgcaacctgtcagccttgacttttcctctcctgggtcagccatcattggtcctccacattgcttttcactttgccagctaaggcttttcagtggcttctgatataggtcttgtttctcaagtgagtgtgccctcaggaggggaactgggcaatctgggaagggagctttgatttcacaaccatgtgggaatgccagtagaatgagacgccatgatgagtgtgggtacctgcccttcttggcaggagtggactagaaatcagttggtgttactgcaagcccagtccattgatgtgcacatccattgtgggaggatactactctcaatggctgcactgctgccagtgacgttaaaaagtcatccatgtaaaagcatgggtaactgcttaacatgtattaaatgaaaaagcaaaatacgaaatgatctaggtactgcacaagtgtcctaaatgttttgcatatcgtcaaaataatattaatataagaaagtgtaaatagctgtaataagttatgg

SEQ ID NO: 911649 - DNA, 654 bp, Homo sapiens
agtagaatgagacgccatgatgagtgtgggtacctgcccttcttggcaggagtggactagaaatcagttggtgttactgcaagcccagtccattgatgtgcacatccattgtgggaggatactactctcaatggctgcactgctgccagtgacgttaaaaagtcatccatgtaaaagcatgggtaactgcttaacatgtattaaatgaaaaagcaaaatacgaaatgatctaggtactgcacaagtgtcctaaatgttttgcatatcgtcaaaataatattaatataagaaagtgtaaatagctgtaataagttatggtgagattaaaagccatttctttttcttttttgcaccaacgtgttctttagtgttttggcacatttgtagtagagttttgaagttatttttataaatcagatatgtaggattctaggtctgtgaaatgaaattgaatgaagaggatttgacagtcttcttaaacttctgggaaataaaggctgaaaacagcaggctttcatctgtgtatcttctgaagctgaaatgaacactatgcccattttgctgtatgtccatttgagtattttctaatacctttttggggagtaggtgtatsttcagctgaaagaatatttctaagtatccaagtccttaagg

SEQ ID NO: 911650 - DNA, 661 bp, Homo sapiens
ttacttaagaagaagtatctagcatgggataaccgtggattgaraagcaccaagtgcatcttatgaatgcatttctaggccctagcacagaacttgccactgtgggcagcatgggaatgttaggtaaaggtaatggatgaatggtctgtgttctaataacctgcctgacctgtctggaatttccaacatttatcccacacccaaaactcccatctttccaaacaatattatattgcccttcctgctaaactgtttgtgtacggaaaccttatgatatataacagcatggcataacctgatccatctttgcattctccacgttgatcatagctttacaaaatgacctttttcactactggagtcatgtcacagtacaacttccagcagtgttgctgttttgataatgataagggaaattaggtatcattttcttttgactcaggaagattattttcccattgtgcaagtttactagccatagagttaataaccctcatcacccttatatcaactggaatttttatattattcttggaaatgattttaagtggatatttaattcaaatcttgttactcttgtgtccactgtacgtactacttacctagtccttggtttagtctttaatgcccaaaccaaaattaaggccagttctctacttat

SEQ ID NO: 911651 - DNA, 661 bp, Homo sapiens
ttacttaagaagaagtatctagcatgggataaccgtggattgaaaagcaccaagtgcatcttatgaatgcatttctaggccctagcacagaacttgccactgtgggcagcatgggaatgttaggtaaaggtaatggatgaatggtctgtgttctaataacctgcctgacctgtctggaatttccaacatttatcccacacccaaaactcccatctttccaaacaatattatattgcccttcctgctaaactgtttgtgtacggaaaccttatgatatataacagcatggcataacctgatccatctttgcattctccacgttgatcatagctttacaaaatgacctttttcactactggagtcatgtcacagtacaacttccagcagtgttgctgttttgataatgataagggaaattaggtatcattttcttttgactcaggaagattattttcccattgtgcaagtttactagccatagagttaataaccctcatcacccttatatcaactggaatttttatattattcttggaaatgattttaagtggatatttaattcaaatcttgttactcttgtgtccactgwacgtactacttacctagtccttggtttagtctttaatgcccaaaccaaaattaaggccagttctctacttat

SEQ ID NO: 911652 - DNA, 603 bp, Homo sapiens
ctatctcctagtagtgtttccaagcaaacagtttttccagtctctcagaagttcatttcagttaccatctcctcactattcctggagtgtatgttgcttatggtagcagctcaagggacagatgtatgaatgagagcaatccataaatgtttgaattcaaattatagtttttttaaaataaattctgctataaaaagaaatgaaatatttgtccatgctaaaacatggagaaaccttgaaaactttacttatttatttttattatactttaagttctgggatacatgtggagaatgtgcaggtttgttacattgatatacatgtgccatggtagtttgctgcacccatcaacccgtcatctacattaggtatttcttctaatgctatcccttcccttgccccacattccctgacaggccccagtgtgtgatgttcccctccctgtgtccatgtgttctcattgttcaacacmcatttatgagtgagaacatgtggtgtttggttttctgttcctctgtgagtttgctgagaatgatggtttccagcttcatccatgtccctgcaaaggatatgaacttatccttttttgtggctgcatagtat

SEQ ID NO: 911653 - DNA, 705 bp, Homo sapiens
tgttcagttttcatgtagtcgtgcggttttgagtgagtttcttcatcctgagttctaatttgattacactgtggcttgagaaactgtttgttatgatttccatttttttgcatttgctgaggagtgctttacttccaattatgtggtcagttttagaataagtgcgatgtggtgctgagaagaatgtatcttctgtttgtttggggtggagagttctgtagatgtctattaggtctgcttggtccagagctgagttcaagtcgtgaatatccttgttaattttctgtctcgttgatctgtctaatattgacagtggggtgttaaagtctcccactgttattgtgtgggagcctaagtttctttgtaggtctctaagaagttgctttattaatctgggtgctcctgtattgggtgcatctatatttaggatagttagctcttctcattgcattgattcctttaccattatgtaatgtccttctttgtcttttttgatctttgttggtttaaagtctgttttatcagagactaggattgcaaacgctgctttttttttttttttttttttttttttttttgctttccattgcttggtaaatcttcctccatccctttattttgagcctgtgtgtgcttttgcacatgagatgggtctcctgaatacaacacacygatgggtctcctgaatacaacacaccgatgggt

SEQ ID NO: 911654 - DNA, 609 bp, Homo sapiens
tctttgaatttggaattacaaatgaatgctgttttcctcactctttgtagactttttttttaagtatctgtttcttttatatttgttttcttaattgtctcctaaagggttatgacattttattcaatttttttttcttagaatatcaaagacagtcataagaatctggagattatcttcattctttaaaaaaatgatgataaatggaagaggtacatttaggcaaatgttgtcctaggatgagatcagtgatacacactcctgtactgcctcaggagaatgctaaattactattattttttctttttttaaaaaatttattttaagttctgggatacatgtgcagaatatacaggtttgttacctgtgtgtaccaaacacatatacatgtgccgtggtggtttgctgcacctatcaactcatcatcatctaggttttaagccccgcatgcatcaggtatttatcctaatgctatccctccccttkccccctaccccgctataggccccggcgtgtgatgtttccctccctgcgtccttgtgttctcattgttcacctcccacttaggagtgagaatatgtggtgtttggttttctgttcctatgtaag

SEQ ID NO: 911655 - DNA, 638 bp, Homo sapiens
ggtttccagcttcatccatgtcccagcaaaggacatgaactcagagaaggctaaattattwttacactttaattgcaaaaaggcttgcaataatctaagttaccatcatgcatctacgataattttatcctggagttttgggagatgaattttatgtactatatcagcaagtcgttgaaaaaaacaagctaatgtgggaactctaaccagtggttccataacatcgtcgtgtctaaaattctcccatagtaagtaaaacaatattttgattcgatttggtctttaaaaagtatgtcacatattccttccttctttctcctaattttattagaaaaagcaatatagtatggtagttaagtacataggctttagagccagacaaactcaagttcaggtctaattcagcctcttatttgctgcttctttcttcttggccaggttgctacttaacctctctgaatctcatctgaaaagtgggtataatatttctcatagggtttatgaatggaaagcacttagcacagttgaataaatgacaggcattattattatttgggggaaaagaaggaagggtgaagtgaggagtatcaccaaacaatactgtaaattgtgaattacagctccaaggagattaataa

SEQ ID NO: 911656 - DNA, 617 bp, Homo sapiens
ctagaactgtaagataatacattttatctaatttaagccactaagtttgtggtactttgtgactgcaacaatagaaaacaaatagaatttgccagaaatctgtttagaagttttacatctatgttcatgagggatattggtcaaaagatacacaatcaaagctggttcaatcagtgtaaaccaccatattaagaggctaaaaataccccacaatcataaaatttgatatagaaaaagcatgtgacaaaaattggcactcatttattttaaaaaaaactcagaaaactataaataggaacttctcaatttgataagaccatcttttaaaagcctacagctaacattgtatgtaatgatgaagaccaaacacttccccctataatcaggaagaaggcaaagatttcaactctcaccactctctctcaacataacgtgggaaattctagccagcctaataaggcaagaaaaggaaataaaaggcatccagattggaaaggaaaaagaaaaataaccactcaaaacaaaaacaaaaaactttacagaattaatgagtccagcaagatctcaagatrcaaaatcaacatggaaagattgtgtttctatacactagtaagcta

SEQ ID NO: 911657 - DNA, 564 bp, Homo sapiens
tgtttaatgttttccaatgtcatttcatgtcagatatctctcttgattcttagtaacaatttggacaagacagcaaatgctattgtccaagttttctaaagaagaatctgaagtgaaatgayatcaagagacctatcaagacctgtatccaggaaaaggtaaatctgagctgaaattgtatccgttgtaaattacctacgtgacataccagatagtgttcatgatccatttagtactctgttctaaaaatgaaacaatatccatttattcatttgttcatttatttagtgtttgttcagcccttactgcatattccaggcactattctgactgtggcaggagtgaacaaacaggcatggttcttacttgtatgtaattacagtcttatagtgaaaacaagtgttaaacaacaaaatctcccaattattttaaaattataaacttgattcgatactatgtggccatataattgttcctaatttggttggagaagggaggcagttagggaagccttccctgagttagtgccattcaacctgaattatgatagatgataagtaattt

SEQ ID NO: 911658 - DNA, 633 bp, Homo sapiens
aacctcataaaatgagttgaagtgttctctcaccttctgtattctggaatattatataacattggtgttaattcttctttaaatatttggtagaattcaccagtgaaaccatctgggcctggagatttattttatgaatctttaaaattatgcatgtaattgttaatgatgataaaactattcagattttctgttttatcttgtgtttttgtcatttgtactttttaaggaattggtcaattatttctaagttttcaaatttattagcataaaagttgcttgtagtagtattttctttttaatggctacgagatctgtaatgatgttctgtatttcgttcttgatgttaatgtcttctcttttttagtttttgtcagtcttgctaggagtttctcaattttaatggtattttcctaagaaccaactttttgtttggtaaattttcccaattgttttcctattaccaatttcactgatttcggctcagatcttttctatttccttccttctgcttgcttggatttattttgttcttctttctctactttcttgctgtaaaaaaattattaacttgaaatttttcctcttatcataagcatttagwactataaattttcttcttagcactattct

SEQ ID NO: 911659 - DNA, 660 bp, Homo sapiens
atggtggagaaagctggcagcatatgtagggaccacactgcagaggttgtgatcaarggagaagagtttgtacttaattttgttgcatttgggagcaaccaagtgtgtttaagggggctaagtctgacagcacacctgtacgccactggcatggagaaacgggaaatagaagataagtcagtagagagtaaagcgctgcaatagaccagggggaaaaaagaagcttgaatttggtcagtgagaatgaaaagaagcatgcagtggacattttcaaggtcaaatcttaaaagtatgaggggcaggtaaagcagaaacaatgaggacacagattttcttgcaaaaccaacatattgtctcttaactgggctgtataaccccctccaatggtctcctcacatgggttcctgcccttctccaaatgattttccctactagagttggattaatcttttaaaaatgtgaatctggacactctgcctgctgcctaatggaacttcttatggacctccccactgtctttaggatgatgcccttgacctgcccccacatgattgacaagtgtttaccagcctggcctgcctctctgcagcttcactggattcaaatgccctttttgaattccataccacagccatatttgtcatctttacttccttcccc

SEQ ID NO: 911660 - DNA, 665 bp, Homo sapiens
gggggactcaaaggcctctgctcttgcattggccaagaccagaacaggagcagcagtggaggggagagccagcctgcacccacccccactttgwacccaccaccctatagtcgtaagggagatcctgggaggttttggggaggagcagggagggctgtccacaatccacaatccctggctctctctaccttaagactcagcttgcttcaaattttccttttttttttttttaaccctccattctttcttctttaaaaaaaattgcttttgctgggcgcggtggctcatacctgtaatcccagcactttgggaggccaaggggggcggtttatctgaggtcaggagtttgagaccagcctggccaacatggagaaaccccgtctctactaaaaatacaaaattagcaaggtgtggtagtgggcgcctataatcccagctattcgggaggctgaggcagagaatcacttgaacccaggaggtggaggttgcagtgagctgagatcactccactgcactccagcctgggcgacagagcgagactgtgtctcaagaaaaaaaaaaattgctttcttctcttacacagtttcattcccactccatgaaaggctagaagctttgccatgaacttttcagggtgaaacattaatgatggtgatctatactgg

SEQ ID NO: 911661 - DNA, 559 bp, Homo sapiens
aaataaattgatattaatattartatctattttgtagtattgtaagaaataaattacacaatgcatataaagtttttagtaaaatgcctgtcagagagtcaaattttcaatattatctgattttataattgttcttattttaatctttatattttcatgtttatttaccatttattactttaataatcagaaaacaatttagtataacactctgaataaggacatttctgtgctgtggaacaaaaccacactggtcataaagaagatgctctgaaattttaaagtaaaatgttgatactgtcaggtcaagtttacggtatgcaataattctccagtcaagtttcaaatcactttcaaaatatatttctttaatttttaattattatatattatatattattataaatatatttatttactttctttaatttttaattattcaataatcactcaccctaagacaacttgatacatatacttagcagtcatttttagagaggtattagctgcagcatgtaaataaaagctaagaaaacaccacggatatatctagggaaca

SEQ ID NO: 911662 - DNA, 481 bp, Homo sapiens
tacaagatgaaattatgatggtaagaacagaaatcaatgtaagagaaacctgagaaaaatagagaaaatcaacaaggctagaagttgactctttaaatagaacaataaaatcgataatgtactagaaaaactaaagacatatggaagaaatgaaaattatcattatcaagaatttaaatatgatatcactatggattctattaaaagtaataaggacatatttccatctactttagccaatacattagacaaccatcaggaaagaactttgaaaaatataatttactaaaaatccctgtatttgtaaagcagtgattcttaaaatattattgctggattagcagcagcagcatcacctgagaatatggcagaaagacaaattctcaggccttaacccagatctactgaatcagaaactttaggagcaaagcttgttsatctgtgttgtattgagctctaaagctgataaagttggaaaacc

SEQ ID NO: 911663 - DNA, 636 bp, Homo sapiens
ccctgccctagagatctgtggaactttgaacttgagagtgataatttagggtatctggcagaagaaacttctaagaagcaacrcgttcaagaggtgacagagcataaaagtttagaaaatttgcagcttgacaatgcagtagaaaagaagaacccattttctggggagaaattggaaattgtgttttattaatagacttcggagtatgtatggaaatgcctggatgtccagggagaagtctgctgcaggagcagacctctcatggagagcctctgctagggcagtatggaaaggaaatgcgggattggaaccccaacacagagtccccactggggcactgcctagtagagctgtgagaacagggccaccattctctaggccccagaatggtagatccaccaatggcttgcaccatgcacctggaaaagctgcaggcactcaacaccagcccatgaaagcagccaggttgagggctgtaccctgcaaagccacagaggcagagttgcccaaggtgtaggagcctacctcttgcatcaacgtgacctggatgtgagacatggagtcaaacgacatcattttggaacttaaaggtttaatgactgccctattggatttccaaattgcatggggcctgta

SEQ ID NO: 911664 - DNA, 636 bp, Homo sapiens
ccctgccctagagatctgtggaactttgaacttgagagtgataatttagggtatctggcagaagaaacttctaagaagcaacgcgttcaagaggtgacagagcataaaagtttagaaaatttgcagcttgacaatgcagtagaaaagaagaacccattttctggggagaaattggaaattgtgttttattaatagacttcggagtatgtatggaaatgcctggatgtccagggagaagtctgctgcaggagcagacctctcatggagagcctctgctagggcagtatggaaaggaaatgcgggattggaaccccaacacagagtccccactggggcactgcctagtagagctgtgagaacagggccaccattctctaggccccagaatggtagatccaccaatggcttgcaccatgcacctggaaaagctgcaggcactcaacaccagcccatgaaagcagccaggttgagggctgtaccctgcaaagccacagaggcagagttgcccaaggtgtaggagcctacctcttgcatcaacgtgacctggatgtgagacatggagtcaaacgacatcattttgkaacttaaaggtttaatgactgccctattggatttccaaattgcatggggcctgta

SEQ ID NO: 911665 - DNA, 636 bp, Homo sapiens
aatatgacattcatagagcctttatcggagcatctgaagataggtagaagagaaaggacttggatgatatgatttgagagaaacaatcaagaactccttgcccaaaagcatgtctttccaccatgtgttgatgtgtaagtcttaatatttcattgttttcagggaatttattttttgataagccattgattgaaatattacatacatacagagaatcacatggacagcacattgaattttcacacagtaaacccacccatgtaaccatcaccaagttccagtaatagaacattatcagcaccctgaagcactgctcccacccctggggtttagatatcagttcatctccctttccccaaacttggccattacctcacttctatcaccatagattagtttttgaactttaaccaaatagaagtatacaaaagaattcttttaactcttttaataaatgttatgtttctgagattcatccatgctattctataactacacttcaggcatttttatagccatttagaatccatagtasaaatctgccaccatacaattatccattatactattgcttgctgtatacttagatcatttcaaatatggaattgttctgtgtatgtctttgggtgtagataa

SEQ ID NO: 911666 - DNA, 650 bp, Homo sapiens
gggcagagcccaccaagctgcccctctgccctgtcctgcacagcatggcaaactcagtctctaaactcatgaacattcatggatgtgccactgctagtaataaatggcaatagtgcacattcatggggcattgtrtagtgtgtttatatctgctatggtgtgaatgcatcccccaaattaatgtgttggaagcttaatcctcagtgcaacagtgttgggggctcaggcctcatgggagggctctttaggtcataaggcttctgcctcatgaatggattaatgctgctatgaaaagagcttgcaggagtgagtttgttctcttctgcttttttgccatgtgaggacacagcattcatctcctttttgtcctttcaccttctcctatgtgagcacatagcaagaaggccctcaccagacaccagatgctggtgtcttgatcttggacttggcagcctccaggactgtgagaaagccatttctcttctttataagttacccagcctcaggcgttctgttatagcagcacaaacggattaagacaacatccattactctaatttaagctgcagcaaatttttgctcaaacaaagatagaagttataggttaactagaaacaaacccacttttataatctttacaataacagtat

SEQ ID NO: 911667 - DNA, 649 bp, Homo sapiens
agagcacccattctgtgagcacccttatctgtaaaaggtccctggtgtctcccctttgggctggaataaaatgagactttagttatggaagagaagaaagaaagtggtttttatgataggaggaggctgaagaaagggaagcagggtgaatggcgtatactcagggaggatcagaggtttgagtggagataaatgaacaaaaccatcttggagaccagatttttcagaggatgggggcatggaagagaccatcagttctttgggcagaagtagaggagttcctctgcaataggagagggggatgttaaggggattagcagtgttatctgttttgggatgctgaaggatgttttgccccctttaaatggtgattgatctgggaaagaccccaatatatgaagcagaccctcaggagtataggtctaaagccccaggaatgctcaccacacctgggaggctctgttactgggaacagtggtgctaatgagaaagtcaatcatgccttttggggttactgctattggtggcctgctcagagcccctttattgggaggtgtgcccatcatccctcagctactgggagtgctgtagctaatggtttctacctaagaacttacctaagaattgrccctgaatgactgaaggtata

SEQ ID NO: 911668 - DNA, 545 bp, Homo sapiens
tcactgtgacctccacctcccacgttcaagcgattctcctgcctcagcctcttgagtagccgggactacaggtgtctgccactgagcctggctaatttttgtattttttgtagagayggggtttcaccatattggccaggctggtcttgaactcttgacctcaggtgatccacctgcctcagcctcccaaagtgctgggattacaggcgtgagccacaacgacggcctatttttatttttatttatttattttttagatggaatcttgctctgtcgcccaggctggagcgcggtggcgcaatctcggctcactgcaacttgcaccttctggttcaagtgattctcctgcctcaggctcctgcgtagctgggattacaggcgccactaccacacccggctaattttgtgtatttttagtagagacagggtttcaccatgttggccaggctggtctcgaactcctgacctcaagtgatctacctgcctcagcctcccaaagtgctgggattacaggtgcgagccactgaattctgccctatttaaat

SEQ ID NO: 911669 - DNA, 637 bp, Homo sapiens
ttgctgtatgtcagaggttttgataggttgtgtsacttattgttcagtttgaaaaaaattttaatttccatcttgattccattgttgacccaatgatcattcaggagcatgttttttgttgttgttttctggtgtatgtgtgtgtgtgtttgtgtgtgtgtttttgtttttttgtttgttttgtttttgagatggagtctcgctctgtcacccagtctggaatacagtggcttaatctcagctcactgcaacttctgcttcctggattcaagcaattctcctgcctcagcctcctgagtagctgggactacaggtgtgcaccaccatgcctggcttttttttttttttttttggtatttttggtagagatggcgtttcaccatgttggtcaggctggtctcgaactcctgacctgatgatccatccaccttggcctcccaaagtgctgggattacaggcgtgagccaccgcacccggccaggatcatgttttttaatttccacgtatttgcatggttttgagggttccttttagagttcatttccaatgttattccactgaggtctaagagagtacttgatataattttgattttcttaaatttactgaaacctgttttgtggcctatcatatggtg

SEQ ID NO: 911670 - DNA, 585 bp, Homo sapiens
agagtatattttgacagaccttcacaatatattgtcaaatgaaaaaaatcgggttaaaaataggcacagtggaatctcattcatgtaaaaactgtgtgtgttaaaaataaatacttttttttttgagacagagtctcattctgttgcccaggctggagtgcagtggcaggatctcccctcactctaacccccgcctccccggttcaagcgattctcctgcctcagcctcccaagtagctgggattacaggtgccccccaccatggctggctaatttttgtgtttttagtacagacaaggtctctccatgttgaccaggctggtctggaactcctgacctcaaatgatccacctgcctcagccttccaaagtgctgggattacaggcatgagccaccgcacctggccaaaaataaatacactttttaaaatgtctgagtggtgagaatatgagtgacttttgtttcctttttcatgcttttgatatcttcttatatgtctacaataaatactttgtagaaaaaataaaattacaagaaaktagatttttggatagaaaatatatatacatttgtacctagggagcc

SEQ ID NO: 911671 - DNA, 631 bp, Homo sapiens
cagaccccattttctagttagttgcctaatttagagaccttgtcaatttrcattacatagaaataatgcaataagacttcaaagccacttagaaccatgccctacagcccatctctgaaacttccaaagtgggttggagcaattttaaattatttgacagcatgaaacttctcccttgcaattttcctgtgatgacaggggtaggacagtattgggggtaatcacgtagaaactaagtggccaaaaatgtgctatgttctactcataaatggaagctgagtgaaataaaccttttcatcataatggtttagattattctgttgctgttgctgctcttgtttatttctttcctttctcttacttcttttgtttgtaatctaataaattcctgttcaagtttagatgaaatagttagaatgcacaaatgaaacctgcaccctgattttttaaaaaacaagaacattatgagtgccctagaaaccctatagccatgatgctttctagtcactactctcccacctccaagcatacataaccttacttttaagggcattgaatagtcttgactgtttctgtacttcacgtgaatggaattttacagaacctatggttttgcgtctgttttcaccca

SEQ ID NO: 911672 - DNA, 675 bp, Homo sapiens
caactgaggactcttaatgtttacaacagccaaattaataagaattcccctaaataaaaataatcaaatgataatagtgagaaaacatgagtatgtggtgagaaaaaatattttagaataagaatatttagaattgaaattataagaagtagaggatttctgatacagacactttaatattagtttttgcttgcctaaaatacagtgaaaattattgtaattaacaaattcaaaaaacactgagaccggaattttagaagaatcttcactgtgcatttttaagatcttgaaaatgatagtagtggatgagttgtattaagaaaattgtgatccatgagctgaaaagctgaaggaaacgaatgagtttcctagagtttggtagatgactccaatgaggaagatagtaaaaaagtggtatcagaatgcaaatcacaaggagaggagttgttgagaggcagcaaatcgggtggaaaattaggccaaaacatattcagtttctttttcatagatatgcttatgaaaaagaaattgggagaaagagcaatttactytggggagtatctcaaagaaatagcaagagtagaaaatattacaattaataaaagtttgcatattaaatagaaaatacaaaataataagggaatttgttcatgataaaggtgttatcacagagca

SEQ ID NO: 911673 - DNA, 616 bp, Homo sapiens
gaattcaagatgttctttgaatccattgagaacaaagacacaacgtaccagaagctctggtacacagctaaagaagtgtgagagagagaaacttacggcactaaatgcccacatcagaaagctagaaaratctcagatcgacaccctatcgtcacaatttaaaagagctagagacgcaagagcaaactaatccgaaagctagtagaagacaagaaataactaagatcagagcagaattgaaggagatagagacacaaaaacccctccaaaaaaatcagttaatccaggagctggtcatttgaaaagattaacacagtagatagactgctagccagactagtaaagaagaaaagagagaagaatcaaatagacacaataaaaaatgataaaggggatatcaccactgatccaacagagatacaaactaccattagagaatactataaacacctctaggcaaataaactagaaaatctagaagaaatggataaattcctggacatgtacaccctcccaagactaaaccaggaagaagttgaatccctgaattgaccaataacaagttctgaaattgaggcagcaattaatagcatactaaccaaaaaaagcccaggac

SEQ ID NO: 911674 - DNA, 631 bp, Homo sapiens
gttaagttttctgtcttatattgggtaygatttgtggtgccccaaaacaattacaatggtaacatgaaagatcaccgatcacatatcactgtaacagacacattaataatgaaaaagtgtgaaatattacgagaatttccagaatgtgacacagagacagaaagtgagcacttgctgttgggaaaatattgccagtagacttgctgcatgcaaggttgttacaaaccttccatttgtaagaaacacagtgtttgtgaagtgcagtaaagtgaagcaaaataaaatgaggtctgcctgtacatgcatatactgatgtgtgtctgttaatttttcctgcctgttacggattgagcacgtcatgtagacacagtccattggatactgcaattctgtgcatacattgccatcgagaccccaagactgtgtggttataagaaggaagtgccactgcttactcctctcctctcccttctatcttacctgcttttgttgcctttctcctcttcctccccttacttggtctcagtttggtttgtcctgaatgacaggcagtatggctcagtggttggaagttcagtctttggaattagaatacggagctcctaattgaccttaatactttctcactgtg

SEQ ID NO: 911675 - DNA, 622 bp, Homo sapiens
tgcacatgctttcatgcctgctgccatgtaagacgtgcttttgctcctcctttgcctccccagycatgtggaactgtgagtccattaaacctgttttataaattatccagtcttgagtatttcttaatagcagtatgaaaatggactaatacagtaaatcggtaccagtagagtggggtgctgctctaaagatacccgaaaatgtggaagcaactttggaattgggtaacaggcaaaggttggaacagtttggagggctcagaagacaggaaaatgtgggaaagtttggaacttcctagagacttgttgaatggctttgaccaaaatgctaatagtgatagagacaataaagtccaggctgaggtggtctcagatagagatgaggaacttgttgggagctggagcaaaggtgattcttgttacacttaaaaaagagactggtggcattttgcttttgccctagagatctgtggaactttgagcttgagagagatgatttggggtatctggtggaagaaacttctaagtggcaaactgttcaagaggaggcagaatataaaagtttggaaaatttgcagcctgatgatgaagtagaaaagaaaaaccaattttctggggagaa

SEQ ID NO: 911676 - DNA, 600 bp, Homo sapiens
actgtaacctctgtcctctgggttcaagtgattctcctacctcagccttccgagaactgggattacaggcccctgccaccacactcggctartttttgtatttttagtagagatgaggtttcactattttgaccaggctggtctcgaactcctgacctcaagtgatccaccgggctccgtctcccaaagtgctaggattacaggcgtgagccactgtgcccagccagtagcatctaaacttctaagggaccttgcctatcataaaacctacttactctaccaatgacccacagccctgataacttctctttttaaatttttaattttgagattgggttacattctgttgcttaggctggagtgtagtgctgtgatcacggtcactgcagcctcgacctcctgagctcaagagcctcctgagtagctgggactacaggtgcgtgccaccatgcccagctaattaaatttttttttttttttttttggtagagacagggtcttactacgttgctgaggctaatctcaaactcctgggctcaagcgatcctcccaccatgacctcctaaagtgatgggcttacaggcgtgagccactgtgcct

SEQ ID NO: 911677 - DNA, 591 bp, Homo sapiens
gcttacatctataatcccagcactttgggaggccaagggattaattgagctcaggagtttgaaaccagcctgggcaacatagtgagacctcatctctgaaaaaaataaataaataaaattaaatgaaagtacagttcaatagtgttaggtacattcccattgttgggcaaccaatctccagaactttttcatcctgtaaaaccaaaactctatactcattaaacaactccctgtttccccttcgttccccatcctggcacctgcaaccaccatttactttctgtcttatgattttaactgggtaactgtcttatgatttttactaggtaacttgtaaaagtggaatcatacaatatttgtccttttgtgactgacttatttcacttagcataatgtcctgaaggttccttcatgttgtagcatgtgtcagaacctcctgcctttttaaggctgaataatattccattttatgtacatacttccttttgtttacccattcatctgttgatggatactyggcttacttccacctcttgactattgtgagtagtgctgctgtgaacatgggtgtgcagaaattgtcatttttga

SEQ ID NO: 911678 - DNA, 617 bp, Homo sapiens
tggattatctttttgttttttgccttgttttatgtatgtgtatgtgtgttcatactttttattcaaygccaaacataaaggaacagtagagactgaggtaaatagtatttatacccagaattaagcttgccttttctaccagatcataagttgggggctgggggaacaggctagatttggggtttgttttactgaattaacttgtaatgcatcacactcctcagattctttccacgatgagctgctgctgccttgtgcttactgtgaggcctggagggccagaggggctattccttgtttcttctctactctcagctctcagcatgcctgtgccacatgcgtggttctctctgtgtgctccccagcagtagagaccaactcatcccggtttgcggggaacttttgcagtttaagcatggaaagtcctgtgtcccaggaaacccctcagtctggggcagaactgggtgcttggtcaactgagtatctgaggctcccagggattctaaactcatgctaggccccactcaactattgataatttgttgaaatttcccttcttttcttctttgctcttgctcactattgggtgtgaggtgtatgctggacttaggatagtt

SEQ ID NO: 911679 - DNA, 615 bp, Homo sapiens
cccaaaactaccatattttgttgtaaatctaaccaaacatgtacaagggttctatagtgaaaactccaaagaattaataaaataaattaaagatcttttttaaatggtgacatatcatgttcatggattaaaagactcaatatagcaaggatattaattctcccccaaaatgacaatgcaatttttattacatcccagaaatttttaaaaaatatagacaagataattctaaaatgtacacatgctcctcaacttacaatgagattacttcctgataaaaccattgttttcaatatatcagaagttgaaaatacatttaatacaactaacccaccaaatataacagcttagcttgctttaccttaaacttactcagaacacttacattaacctacagttcagcaaaataatctagcacaaagcctattttataataaagtgttgaatatgtcatgcaatttatttaatagtactgtgctaaaagtgaaaaacagaacagtgtgtggacactgygtatggtttctactgaatgcattttgctttcataccttcatatagtcaaaaagttttaagtagaactgttgaatttcagggaccatctgtatacagaaagtc

SEQ ID NO: 911680 - DNA, 437 bp, Homo sapiens
tcttttaaaatatttgcactaaatgttatgaattcaatgttagcattgttcataatagcaaataaattgaaaataacccaaataccaattgataggacaattaataaagtttgatatatttacacaatgaaactctatacattggcaaaaataaatgaactaaagccacacacatcaacaggggtgatactgaaaaacaattttcagaaaaatacattccatataaaaagttttataagcacagaaaaggaacccgcatgatacatggtttagaaatacaaaactgtgtagcaaaaccttaaggaaagccaactgggccttgaatggtggactrggttattcagaccaacccttccactgaagacagataaaaagaagtggtgaaatgtttttgaattttctttaagcatcagagaaccaacaagatgttagaaaac

SEQ ID NO: 911681 - DNA, 531 bp, Homo sapiens
agtcagtgccttctgtatctctttacaatttttgtaggtttgattttaaattaaataactatatatttcagtttaaagttatcaaatcmatgtctactatctgatcatatttatttcaggaaaaaactctgtgtatttgaaattaataaacaacctataatgttgtttactatgtattaatcacgattttaaaaacgtacaacaatagcaaacaaacttgaacaaagacatgcaactcattccagaggaatgagagatgttttttccaagaaactaattttcatctcattatttattttaatgtctcatttttaccaaattatacaaataatatgcaaataagtgattaaaataatgtgacaaaatcataatgacctctaaaaattatgatgagctgcaaaaagaatactcattaacaaggttgtacaattaatttcataaaaatgttccaaatgcaatttggcagaagaaagatgcacaggttccagaaacaatttatagtgtttattgaaacatgcatatttcccaatt

SEQ ID NO: 911682 - DNA, 498 bp, Homo sapiens
tttccccattagtatcctaaacaatgtctgcaaaattggttttcatacctggataccttgtcttgtaagagacacggcagagaaagatcataggaaaaaagtcaatatcaggcacagctaacaactagcaaacccacagtctttaaaagactgatcctttgattcctatctctcaagtaaagaggtttaggtcatcttcatgttacaggaaagtatccctaccaaaaacttctaactaatgactcttaggattcttccaaaagcaaatagtctttgggagaagacagcttccatcaaatgcctttggatcaagtgaatcactatatgagatatcggtatctgcaaaccaagatccacataaaaagatccattgtttgtcatatttaatctgtatatcttgagttttcattttcctagtkaacttttttttatctttttatgcttaaggttacatttaattactttacctataaagctactattcctaattcctctatg

SEQ ID NO: 911683 - DNA, 556 bp, Homo sapiens
gggggacactgtgagttaagggccatgacagaagtcttcataagtaaactgttattgacacaagctgctacctgcccaggtgagcaatctgttggcccagaggagagttgcttactgacataaattgatttgcagaaatttcctgaagcaaacaataagttatttattggtttgcagccttactttcctgaaaaataattttctggaatgaattgtgaaatcatgttgacacagatggcctcaggtttcagttcggataattaagctgtgtaaatatagaaagtctaaggtttctgtgtgctgttgattcacagtatgcaacagtgatcatattacttttatttactatgagcttcagctgaaaagtccaaaagaaactttaatttcagatatttaatgaaatcattatagctgtggtaatttcctttagctgggtgtgagtgtgtgatgtgagcgtgtgattgtgtgtgtgtgtgtgtgtgtrtgtgtgtgtgtactctggcagcatattccaaatttctgtaaaatttcagtttgaaattaatagaagacatat

SEQ ID NO: 911684 - DNA, 660 bp, Homo sapiens
attcctgaagattgaggattgtaaggtatataaatgtttcactgaataccaagagcctgaaaaactgcttgggtgatttggctaataaagaccagtccactatcggactgtatagatrtgggaaggccaaaccgaggaattatgtctcacagaagggaagaaatgaccacagtggccttctcagaccctgtgggaaaggcctctacccatccagtgaaagtgtctacctagaccaagagttattttagttttctgactcggggcatgtgagtaaagtcaatttgccagtcctgggcaggggcaaatccctgagcttgatgtgtaggaaagggaggaggcctgaacaatccctgaggagtagtagaatagcagatggaacactgagaagttatttccttgaggatagatttccacgatggaaaggaaatgagaggttctaaaaggcggactagtggcttgtaacctacatggaagaggttatgaaatgatgacagaatagaatgggcctgtgaggctggaaggggatattttctttggtccaagaaccatttgccttgtgtgggaagagattgatagatggaagtttcagtgagggagtgggtgagagtggccagatgagaaggagaaaatctgcacgagggatagaagttggaatgctag

SEQ ID NO: 911685 - DNA, 607 bp, Homo sapiens
ccagatggcattcatattttggcctttgctctgtcacagctcaagtcatcgtcagtgccaagtagaagaagtaaaggaggcttagttctcttggggrgagtgccaattttgtagaccttgatggtccaagaactgcccaggccatgagaagatacaatgagggctgtggtagaagcacaagtttaattttgatgcccagccctagctgacgaggtttgtagaggagcctcaacctcgtctcccaccttgtccagctcatagcacacacttggctgtgcacccagcgtacccccacattcccaccgtacgtgaatcatcatccccagtgtgtcccccagtgacaggctgcacaggtgtgatattcatagctgccgtttgaggatgtagacgggtgactgctggtgtttctggaaaagccagctatttcgtaattgtaaaattgacctctactccacagcttcactgcacactggagtatttcctggcagatccatctaacccaaaatgagattacatttcctggcaagaagtgggcaactggtttaaaatctcacagcaaccgcatggctcaacttgcaatatttctttacattcacttacccaggtc

SEQ ID NO: 911686 - DNA, 566 bp, Homo sapiens
aagttgtgaatatgtcagcattgtttttaaccctcttccctattattctttcctgagagggactgggaaccttccttactgttgtttgtttatgctatgtggtgtttgttttggctgtgacactgaagctgaactaagattgggtgagggctgcatggaggcactctgcccaagggtgggtgcttcctgggctagattgggtgacatggtcatcacaaagtcatctatctgggttgccatgatgcaggaacaccacaaaagcagcatccaggaaactaagccatggccaggagctggaagttagcctatcaccggatgaaagtagaaaagcaagccagagggtgaaatgatgagcaggcaaggttgaaaatgaggcctttgaggcctggagcagagcataagcaagtaggagttaagattgcttaactctgaacacccagtaggtgttctatactagagtagacacttgaggggggcccactgagataggcaagggtatagtgcatgtttgagtttgtctctgttcmacacttgaatatcgttcaacgttgtcctgaacacatcat

SEQ ID NO: 911687 - DNA, 611 bp, Homo sapiens
ttgggattatttacattgccatcagatgtttgcaggacatcactgaaatgattggaaaaggaatgtcagagtctaccccaaattgcttagattcttctattgtgtgtaaacatgcgtagtaaattccattgttcttactgcttaagtctttgttaattgagtctctttgttggtttcatgaagtgccgagtaaaagtactctttctggtattgacaaatataggctcctgaactgtgggtgctgcggactctcagattcactatcctactcttcaagtggatgctgcattctcagggaggcactgtcatacagtgccatagcacaaaagcttggcagagaacttggatccatggttgtccctccctcttcatagctttgtaatgctgggcagtgccttcacttctccacgcttcagttttctcattcttaaaaggggagctgatatagtacctccctctgggacgcctatgaggaaaarcttagtagatgcatacaaaatgccaaggaaagtaagtggccagcttaaaagaggcactcactgtttcctggttatccttaataactagtctgaacatgggttgtttctgccttagtgttccatgtgataatc

SEQ ID NO: 911688 - DNA, 620 bp, Homo sapiens
caccatctgttgaaaagggtgtactttcccttcatgtttttgtttgctttgtccaaggtcaattggctgtaartatttgagtttatttctgagttctctattctgttccattggtctatgtgcctatttttataccagtaccatgctgttttggtgactatggccttatagtatagtttgaaatcagatagtgtgatgcctccaggtttgttctttttgtttagttttgctttggctctgcgggctcttttttgattccatatgaatttcagaattgctttttttctaattctgtgaggaatgatggtggtattatgatggggattgcattgaatttttagattgcttttggcggtatggtcattttcacaatattgattctacccatccatgagcatgggatgtgtttccatttttttgtgtcatctctgatttctttcagcagggttccatagttttccttgtagaggtcttttgacgcctttgttaagatatattcctaagtattttttttttttttttgcagctattgtaaaaggggttgagttattgatttgattctccacttggttgctgttggtgtatagaactactactgatttgtgtacattattcttgta

SEQ ID NO: 911689 - DNA, 595 bp, Homo sapiens
tcagcatctctcaaagttatcatttgcttaggctgttttgaacctytttttgccatgtgacaatttttaatattctttgaacttaatttccatggggtacacattacaagattctaatttgacaaacacttacatggtcctgtgtgcaggaagctcgcctctgtatcactgtagtattcataaaacgacagtaactatctaggtctttggccttttcgtctctcctctaagccacaggtctgaaaactttttctgtaaagtcccagatagcaaatctttttggctctgtgggccatacaatctctgtcacaattactcagttccgcccttgcagccacagacaatatggaaacataatgaccatgactgtattcccataaaactttatggctaacgaatactggattccatgcacttttcacatatcaatttttttttccttttgatgtttttcaaccattctttactcatgggcaatacaaaaacaggcagtggattggatctggtccatggaccacaacttgccaacccctgctctaaactaaaatgggtaacctagatgatatcagtacttctttccacactagccagatca

SEQ ID NO: 911690 - DNA, 617 bp, Homo sapiens
atttttccttcttccatcctatgttactgctttgttacatgccatgagaagaaaatttttaaaaatgttttcctcatattttctatgttgcttcttaatatctcacctttgaaatactaktcatttctgtcctagaaagctttctattaactaatgtggttagtcagagaagtgctactgaggggattatattatatttgcagctactgacttaccacaaactaaaaaatgctttgtcctttatctactattcctttatacttgacacgtagcactgtcttattttctctgtggtaggcacacaaccattcattcattcaacaaatatatattgagcatctactaaatgttaagcactggggatgcactggtgatccaaacaggcatcattaattcttgccttcatggatgattgcatgtgttgggccccagcacacctcccagactgtgaaaacacattggcaaactgtagacatcagctggtttgttttgcccaggatgaaaattactgagtgtcaaataataaaatcaagagaaaagaccatcccagtgtaatttgctccacctacaaatcttcacccacttaattaatcttttacaaatatatatgtatcttc

SEQ ID NO: 911691 - DNA, 630 bp, Homo sapiens
tcgaatgccatgagttcaatgctaatgaatcaayaatatatattaaacaagattacgtggatatattgatttaaaaagttgtgatcagaggtgcacagcaacttaaccttgtatttctccttggagcaatgattcagcattcactaatccaatgtttgtcactaccttataggatataacttacaacatcttatggaatagaactactatgaataatgataatgaaatgtataagggttagaaaggaaagaatgaaacagtccttatttgcaaatgatattagtattaacatagaaaatccaaaataatccataaggattataattaataagtacatttaataagtaaattaataagtaatatttctatttacaaatttattatataaaaatcaattatggggggagggataaaagactataatttgggttcagtgtatactgctcaggtgataggtacaccaaaatctcacaaatcaccactaaagaatttactcatgtaaccaaacaccacctgttccccccaaaacctatggaaataaaaaaataaaaataaatacaaattaaaaaataattttaaaagtcaatttcatttctatgtaacacaaaatagaaacgtaaaatttaaaaa

SEQ ID NO: 911692 - DNA, 630 bp, Homo sapiens
tcgaatgccatgagttcaatgctaatgaatcaataatatatattaaacaagattacgtggatatattgatktaaaaagttgtgatcagaggtgcacagcaacttaaccttgtatttctccttggagcaatgattcagcattcactaatccaatgtttgtcactaccttataggatataacttacaacatcttatggaatagaactactatgaataatgataatgaaatgtataagggttagaaaggaaagaatgaaacagtccttatttgcaaatgatattagtattaacatagaaaatccaaaataatccataaggattataattaataagtacatttaataagtaaattaataagtaatatttctatttacaaatttattatataaaaatcaattatggggggagggataaaagactataatttgggttcagtgtatactgctcaggtgataggtacaccaaaatctcacaaatcaccactaaagaatttactcatgtaaccaaacaccacctgttccccccaaaacctatggaaataaaaaaataaaaataaatacaaattaaaaaataattttaaaagtcaatttcatttctatgtaacacaaaatagaaacgtaaaatttaaaaa

SEQ ID NO: 911693 - DNA, 563 bp, Homo sapiens
ctgcttcatgtgaaataaataaataaataaaaagtttattgaccaccagatgtcccagcctgtaatgggtgctggcagatttcaggtcactcagagttcaggcagatttactaaatatccttatatttttggtagcaacactaccttggaaatcatacctatataattgtttcagtcagagcccagagataactttcttgccctctttcagtcgtgagatcttaaccaatggatctcttttttgtgaagcaaagtctaacagataggctgttggttaaggatgctgggaaaggacatatgggaccttttcatttttcattaaaaacttggcagaagattcgtgaggctaggcgtcattaagcctttaccaacccaagcaattcacttggatatggtaactgagaaccattttctagttgagataactcatgtacagggggggtcacatgactcaacaacacacagagcacagaagagaaccaacaatcataggcaatcctcttagaccacatgatgcaataatgtgcatgtatagtgtacmtatgtgataatgtactaatgtt

SEQ ID NO: 911694 - DNA, 633 bp, Homo sapiens
ggtataaaaaaaataggcacatagaccaatggaacagaatagagaacgcagaaataaagccaaatacttaacagccaaatgatctctgaagaagcaaacaaaaacttaaaatgggggaaaggacaccctattcaacaaatagtgctgggataattggcaagccacctgtaaaagaacgaaactgggtcctcatctctcaccttatgcaaaacatcaactcaagatggatcaaagacataaatctaagacctaaaaccatctagattctagtacagaagacagcatcaggaaaatatttccagacattgacttaggcaaagacttcatgaccaagaactcaaacgcaaatgcaaaaaaaaaaaggtaaatagataggacttaattaaactaagacgcttctgaacagcaaaagcaataatcagcagagttaacaaacaacccatcaagggggagaaaatcttcacaatctatatatccgaaaaagaactaatattctgaatctacaaataactcaaatcagcaagaaaaaagcaaacaaccccctcaaaatgtgggctaaggacgtgaatagacaattcccaaaagaagatatacaaatggccamaagcatacggaaaaaatgtgcaacatcac

SEQ ID NO: 911695 - DNA, 624 bp, Homo sapiens
ctttctacaacaacacacactgctatcctttttaataatagaaaatctggaactctgcgtgtgtgtgtgacctatggccacccttttgtgaagctgtgcatatgcacaaacaagggtgggtgcaagtctcagaattaggaccccaaaggtggccctacaagttgattcctcttccagatggggtgcagcactcgcagaaccataaaggcagcatcccaagcctgccttgtaaaaaaactgactgctgaatcaaaaaccaagagcagcccttccctttcagggttatcttgattctttaaaataaaacaaaataaaataaaataaaataaatcgccatctttacttctgtttctagagtctcgtcaacttttcagtagtcctctaaaccttgtttgtgatttgtacagtcagccattttggcaacccacatcacttaccttttcccttcactatttgtatggaggagaagcattccttatgagtcatttgagtattaaaaarttttttttgcgtatatctatttaagatatacaacatgatgttatgaaatacatatatagagtaaaatggtcattacagtgaaacaaattaagatatctatcatgtcacagttatccatttttc

SEQ ID NO: 911696 - DNA, 561 bp, Homo sapiens
atagtacaaccactttgaaaaatkcttaggcagtatttaataaagttgaatatatacgtatcctaagacccagcaattccattcatggtatgtacccaacagaaatgcatacaagtgtgtaccaaaagacatgtataacaatgttcatagtagcattatttgtaatagtcaagagctggaaataagccaattgtacatcaatggtagaatggatgaataaattgtagtgtattcttacaatgaaatactatagagcaataaaaataaaactatggctatatgcaacaacatgaataaatcttaccaacaacgttagataaatgaagtcaaaccccaaaatgcacatattctatgaatccacatatgcaaagttcacaataggtgacagtggctactcctttgggaagcagtgaggaaagaactaagagagtactacagagggggctctgggtgtctgtaatttctatttcccaatccaggtggggtttacatgaacatgttactttgtgaaaattcattgagctgtaactaaacatctggaattatttatgaatgaaatta

SEQ ID NO: 911697 - DNA, 561 bp, Homo sapiens
atagtacaaccactttgaaaaattsttaggcagtatttaataaagttgaatatatacgtatcctaagacccagcaattccattcatggtatgtacccaacagaaatgcatacaagtgtgtaccaaaagacatgtataacaatgttcatagtagcattatttgtaatagtcaagagctggaaataagccaattgtacatcaatggtagaatggatgaataaattgtagtgtattcttacaatgaaatactatagagcaataaaaataaaactatggctatatgcaacaacatgaataaatcttaccaacaacgttagataaatgaagtcaaaccccaaaatgcacatattctatgaatccacatatgcaaagttcacaataggtgacagtggctactcctttgggaagcagtgaggaaagaactaagagagtactacagagggggctctgggtgtctgtaatttctatttcccaatccaggtggggtttacatgaacatgttactttgtgaaaattcattgagctgtaactaaacatctggaattatttatgaatgaaatta

SEQ ID NO: 911698 - DNA, 620 bp, Homo sapiens
ctctagctggatgggccttgaatgaggacacaaaaggcaccgtttgaagtccccagamcactgctggctcctccaactcagcaggcagggaggacaggagcctgcagcagaatcatttctcatctaaccacctctctcaaccagtgctccaccaggcagcacatctgatttctcagattcctcagtcccagcatttgtgaaactggattttatctgtgttgacaatcaataaagcttttaagaatagagacagctcttgttctggagagttctaagtgctggtgagcagatctaagaatgcagaaaaatattaatgaccctcaactattaacattcccaaatagtttgttcattttcatacagttgggtgcttattagtcagactggcacaaaactaatctttatttttaaaccaccatcttcctttagtgttgcattcatttctattttttaagaaatgaattaaatttcattactgtgagcagtagtatctgaatctccaagtttcatgtacccttaggcacttccttgctttaatattttcttattttttccaccaagcacactgttggcctacttggccacctctttagaataagttatattcctttaaaactacc

SEQ ID NO: 911699 - DNA, 661 bp, Homo sapiens
gatatttattccaaaatgagagggcttagtgaattttgtcatgtttgattaaaaaccaaaaaaaaaaaaaaaaaacaaaaaacccagtaattctttggaaaacatgggtgatgggaaaagtggacatcatctagaaaagttccaaggtcaaggatcagtcagaccaatttaaaaactaaaaacaaatcagtgtcagatattagccaacttgtaaaaactgcaagtgttcagaggtttggaactatagctaaatagctttgataatcagggtacacaaaactttgtacccttgagatgacggagtaggctctttgaatttactttcatgataattgacgggaagtattcaacttttttttttccagataatatatgttgatctgtagcttgaatcgttacacacaaaaatatgttgggtattacaaaattgaaagaaagatagaaaatactagtgcacttttaaaaagaaagcactaatgttataccatactgctttttaaggcactagaaccatatgttcatgataggggtgggggtagggggttggtgagaatactatgtttagacctcaatgtggattttctttcagmatttgaaaatcactgccaaaaatatggtctagtatacactgacatttggagagagtacaactggatcaaag

SEQ ID NO: 911700 - DNA, 627 bp, Homo sapiens
aggccacaaaccatagcatcccccaaacaatgtacatcaggcactggactgctcctacctccattatggaaattacctcagcctttgcccaagctgccctctggcaagtagaggtcacaagtattaaagaactttcacttgggttgatgactcaaaatatcagaacacattcctgggaaaaatgcctatttacgtatttgtatccattcacaaaggtgatatctctacccctcacatttaccaggttgataagtggtggtggggaagctggctcatttgaagatgatcagaaccataataaaacaatagctaatgcctgtttatgtgtttgtatccattcacaaaaatgatacctgtacccctcacttgtgccaagttcataaggtagtggtggggaagctggctcatttgaagatgatcagaaccataataaaacaatagctaacatttattattactatgtcctgagcaccaagttaaaaagcctatgaggcaggcactrctattatccccagtttacagccaggaaaactgacactcggataagttaacaggttaggttaattgttctctgtttgcccctccatatcaaatcttcactctcttcactctgctgtatgctccagg

SEQ ID NO: 911701 - DNA, 647 bp, Homo sapiens
ccctagtgagacacggaacaaccatgtctcgttctattctgtgttcttatcatttcacttcctgcccagggccctgctaaagtaggctcttcataaatatttgctgaatgcatgtatacrtgcatgcatgcatgaatgaatggacaaatgaataagtggaatggaatagttaaatgagccaattttgatattttgctaataaccctgaccaagctgttggtgagttcacaggttgaaaccagtacaggcagttcttaacataggaatgtgttgagttccaaaagtttgtttggaaattggttgttcagaacttggaacatgttttcccatataaagatgttataaactaaactatgcttaactattcagcttagtccacaaaaatattatttgaggcatcatgtcactgaaataaaattagaaaataactgaggtgtcaccttttcattttattaaaatattttaagcccacatttcatctcaagaaactctaaaagacattttctggcactgtgtaatgttataaatgaaacaaaactgaatgctggtaaaggcttagtgtgggtaaagcagggagataaagagattgtgaaaattttatgggaaactgagtgtttttaagagcatcaattctttactatttttgt

SEQ ID NO: 911702 - DNA, 649 bp, Homo sapiens
tatatttgcacttgcgtgtttggaatagctaaggtatatgtaggtcaagccctaggcaaaaccatgaaacaagcaaagctcaccaaagctctgtaactatttgtattcagcagcagtctagacattggatgctcctagctgcagatttttctagtatcgtccctcccttcccctccttctcctatctcattgccataagagtcacatctctactcaacctaaaggccgttcataagtgatcataggtcatatgatctcctgtccaacctcttccaccctcctttgcaggatatcttttagaaaagtgacctagaagagtaagtaggtatcttaggcacggtggcagagtaaattgtgggggcagaaattttgggggcagggctgtcttactcagcaactctaagatctccttgtgtaaatgcgtagtccacctacccagcctgcattatgcaactgaccagagtcattctagttcacttggagataggaacatatctttaagaataagaaacagtccyatgaaaagatgttctgaaatgtggggcttttgagaaaggatataataattgctagcttcactccataaattactgtatttccccaaaggtagtgataatcaatgtgctttgacactcagtttcagctggaa

SEQ ID NO: 911703 - DNA, 506 bp, Homo sapiens
tttggtaatgaaagtgctacactgaaacagctggtttaaaaaagtactatcattttgaaygataatgatgccatttgtagattttcagccatgccctagggctcagtagactgagcctgaagtagcgatttcatctatctttcatgtaaaactactacttttttattttttgcatatttatgttaaaatacctgtagttatattatagacttaattctacattctgatttttttccagttaatgtaaagttgccatgagtggttattcattcttcatgttgtgtcatcatttttgtggctgtgtaatattccgtctagagactgtactgtacttaaccggctatgcctttaatatttaaattatttcaaaggcgttttaggttattttgaaggatattttctgtattctaaataacctgctataatacataatacagttttcccttgttttggattatttccttaggattatttttgaaataaatcagtgaaggaagtgaacatgt

SEQ ID NO: 911704 - DNA, 605 bp, Homo sapiens
gtacataattaaaatcacttacttatcaggtttttcactaaaaataaaagttgctaagagttaacattgtaacatgttattgagaccactggagaaacagttttacatataaggtgtgtagggaaygtgtttttggtaaaagattataagaaggcatggagatacggcttttgttaaaaggaatgtaattttgtctagttcagagggttttaaagattgtcttaacctacaagtgtaatggaacaaaactgaaggttaagcaaagtgaaaagggcttataaagggttgatcttgtaaaaaacattctgtgggtataaacaagatggctaagatttgattgaaattatttagctttttttccatagattaaaacattaaaatcatactcatgtggggccagaatctgggaccatgtgtctgaataaccaggttttcttagaaaattgatctgtttgatagaaaattgtaaagagttctaaacagtttatgaaaatcttaccttatgaccaaactaattaaaaacggatataaaattttattttaaaaagtagttttaacattaaagatgcactaatgcaaacatgaaatttggttttctcttttga

SEQ ID NO: 911705 - DNA, 690 bp, Homo sapiens
tttgtggtcttcctctcctctcaggatatgaatttatagcctggaatccttttgctcagagatgctaggcatgatgtaactctgtcacctagagaaggcactgcacagactgaccatctrtgtaatggtacaaactcatgctgctttcaactgcatatgcctggtgaattgtgagacacatctggaatgactttttttttcttcttagattaggaagaaatagaaagagagttggattgtttgtgaattctctccaggcccttaccaccactgttgactgaagttgcctaatgacctaagaagagctccctgtgaacagggttaagctccaaaagggatggagcctgcagcttgctcttcctggaagcccagcattgccctggctggggcagtctttgatgacaccctcagataaatgatggtggtgtgataaataagtagacattggacagctggaaaaaggattccagccctggctctgatatttgctagtcttacagggcttcagatgatggctggctacactctctgagtctcaagtttccttatctaaaaaatgaagataaacagtgctaccttcatgcttctattgaaaggagccaatgtatgtgaaaacaccatgaaagagtgtcagtgcaagctggtgacctttttttcactcattcattcaatcatttattttctttttaa

SEQ ID NO: 911706 - DNA, 578 bp, Homo sapiens
aatagatatgtctaatgaggagattaactagagttgtactcattacaactatttaagaktctctgacaaattgaactggcttatatactcaacttataaaacaaaaaagtactttttttccctgaacatattttgtctgtggctaccaactatatgtatcaccaaaagttacactgtaacatactatttgattcagtaattctacaatgtaaaccctgacatgtcaaaataagtgtcaagattataaaacagaaaactattccacacagaaaataaggtaaaatcccccagttcatctctcttgggacacatattaatgagtaaatgaatattatgtgtcattgtgctgtttaatgagaaaaacacacaaagaatagcaacatccatgaaaaagataaaagatatttgttaaaatcttttaaacaaaatgttacatgattaagaaattataatcaaactgtgcattactccttttttatggtactcatccaccattaattttgtggtaataattctaaacttaaagagcatagtaattggtaacttaagtatactgttaaaaaaattaagacagtcta

SEQ ID NO: 911707 - DNA, 543 bp, Homo sapiens
cattacaatcctatgaagttggtatataggaggaaaattgaggtactaacataagactaaaaaatttgaagtttcccagctagtcaaacaacctaaatgattgtataggttgtccggggtggagccaagatgactgaataggaacagctccagtctacagctcccagcatgagcgacgcagaagacgggtgatttctgcatttccaactgaggtaccgggttcatctcactggagagtgctggacagtgggtgcaggacagtggatgcagtgcaccatgcatgagccaaagcagggtgaggcatcgcctcacctgggaagtgcaagtggtcagggaactccctttcctagccaaagaaagaggggacagatggcacctggaaaatcggatcactcccaccctaatactgcrctattccaatggacttatcaaatggcacaccaggagattatatcctgcacatgccttggagggtcctacgcccatggagcctcgctcattgctagcacagcagtctgagatcaaactgcaaggcagcagcga

SEQ ID NO: 911708 - DNA, 470 bp, Homo sapiens
acacccttacaccaggaagaccccacctggtcattcttttccccacaatcctcttctcccctaggataccaatgcctcttcttccctcagagttaatgcagttacaactattckagaactttctgacagcattcctactccttcagccacccccctccatcgccgggcaaaaatgccatggtccagcagccactcagctcagtggggtggtacatacaggggcgcgtgacaaggatgaggtaagtgctggatcaccaacctccctgcccctcctgtggctgcgtgtcagatactgtgtgccaagctcccttcagccactatctcatgtaaagctcagaccccacgatttccggagtcctagagtagtctgggtgtcctcgtggtgggaactggctgtcctcctggccccttgctcccaccctcctgccttcttggttcagtgataaggccttagatcaggagggtgtggc

SEQ ID NO: 911709 - DNA, 670 bp, Homo sapiens
cattgattctgtgaactttgaaagtttttgaaaatgtgctwtgatcccaatatggtattaagactattttatgtaaccaaagaaaaaaatacaccactaaattataaaactctggtgcttatatgcttggctgtctgcaaggaattatagagactattggagacacaacctctacctcaagggaatttctgcctagacaaggaaatcaaacattaattcacttgatacagtacgaagtccatgtacacaaatcgtcactgatgaaaggataggaaggactccaaatccttagctatctatttcaatagtccccacccccccgggaagaatatgtggtttactttcctgaaaatgcacatttgttaccagctataacttgaaccccaatatctcatccccctcatcaacttagcaggaagttgctggaagactccttttctatatgtagtttatggccttggttggaaacaatagaattatgcaaattagttgtcacccctacttagattaaccaaatcatagttcaataccctgctatatattcaataggccattagatcataaagctaatctaagaaggtatataaagtgtttatcacagtacctgcctgcctagcactaggtgctaaatacatgtcaacttctttctcttttatctatttcctctctt

SEQ ID NO: 911710 - DNA, 607 bp, Homo sapiens
aataggcacatctgtaaaaaaaagaatattttaaacaatgtggaagttgacacacaatcaagcctgagacttatatacctgtaactgtcacaggwaacatgcttttactaagggagtctgggcctgaatctgataacagcaggcagaggaagagattattctttgcatttacttaggaggacatgaatgtttctctcatgcaaagaggagaatcgcttgctctttctcctacccaggatggtaattattctgcaaagatgtgtagaagatttcatcaaaggactagtattcaaagcagtggcctttcatcccatttagaatgtaatatgtaaataggatacacattggacatggtttggctcctcttggtaacggaaaggacatggattgaagcaaggagcttcccatccacagcgatgtgttattgatgagctggcatttgccctgtggccctcccagaggattgcttacatctattactcacacacatcgattggttaatttgataattctatcaccaatcagctggtgtctgacctttcaccatggcaatgatggcaggctcttcatttttacattgcagacctgttagattgacctttttgag

SEQ ID NO: 911711 - DNA, 639 bp, Homo sapiens
agcatgaattaacgacataattatttcagcttatactttagctaccaagtcctggcataggtgtaataggatagagtgctaggaagcacaagcctctaaaagtgagaactcagatgttcaaacacagaaacccaacaagcctgaaaaatattgccctacgagaaattagaactccaaagagttgctttccaaagttaaaatttctgtggtacaacattttcattctcatgaaaatgataacttcttagaatggataccaaaaaatagcaactgggcacagctggatggctgcctggtctttagtgcaagagtcctgatgtttttcagacaagaggccagttgttattgagtttcagagagaaagaattatttagtgcaggtatactccttacccatttgtgtatatgcacgttttatgtatagctctgttctataactgagagcttatgacagagagtcataagtctcttgaagaagcaggaagaagaaatgataaaagggaagccaaggaaagccctgcctgacaaatagaacacctgtcaggkcaacgttccatgggatctaacagtacacactggtgcaggcccaattagctaggcaaatgatttaggtattaaagggacataagtcatgagaaca

SEQ ID NO: 911712 - DNA, 639 bp, Homo sapiens
agcatgaattaacgacataattatttcagcttatactttagctaccaagtcctggcataggtgtaataggatagagtgctaggaagcacaagcctctaaaagtgagaactcagatgttcaaacacagaaacccaacaagcctgaaaaatattgccctacgagaaattagaactccaaagagttgctttccaaagttaaaatttctgtggtacaacattttcattctcatgaaaatgataacttcttagaatggataccaaaaaatagcaactgggcacagctggatggctgcctggtctttagtgcaagagtcctgatgtttttcagacaagaggccagttgttattgagtttcagagagaaagaattatttagtgcaggtatactccttacccatttgtgtatatgcacgttttatgtatagctctgttctataactgagagcttatgacagagagtcataagtctcttgaagaagcaggaagaagaaatgataaaagggaagccaaggaaagccctgcctgacaaatagaacacctgtcaggtcaacgttccatgggatctaacagtacacactggtgcaggcccaattagctaggcaaatgatttaggtatwaaagggacataagtcatgagaaca

SEQ ID NO: 911713 - DNA, 498 bp, Homo sapiens
ataaggggcctttcccccttttgtttggcacttctccttgctgctgccatgtgaagaaggatgtgtttgcttccccatttgcttctgccatgattktaaggttcctgaggcttacccagcctctgtggaactgtgagtcaattaaacctctttcctttataaattatgcagtcttgggtatgtctttattagcatgtgagaacagactagtacagtaaattggtaccacagagagtggagcactgctgtaaaaatatccaaaaatgttgaagtgactttgaaactgggtaacaaacagaggttggaacagtttggtgggctcagaagaagacaggagaatgtcagaaagtttggaacttcctagagacttgttgaatggctttgaccaaaatgctgatagtgatatggacaatggtccaggctgaggtggtctcagatggaggtggggaacttgttgggaactgtagtaaaggtcattcttgctatgcaaagagactg

SEQ ID NO: 911714 - DNA, 671 bp, Homo sapiens
gacatttatacactgaaaaaacaaccaccaccccttccagtctttatggactatcttcatacagagaaagaccttcatcaagcagcccagctaaagactgtgagggtttctcaaaccttttctgtggattcattttccctggagtcgtgcatataaattcccaaatagaaggatttactggtttctttttttcaggagccctaatctcttgctctctttggtgtctgtctgtagtgctgttggttctctagagcttatccaagccactcagctcttggtttttctcagtgccccctaggcttctagagtatgttgaatcctatgagcaattcaagtcaggtaaggcagaaaccagttctttgggcagctccctgaaaagccagagcattggatgtataatccactgtttccttctgtctttaaaggagaggttgctgagctgtatgacttttgtctgctgttgcacaaatcctctggagcagcaacaaactgtctagctatcttttgttgtcagtggccctgacaacgaagtatctataacatactacattttgggcrtgctctgaggcaggagagacagaaatcagtcccctgaaaagccagaacattggatacatgttccaagtctttcccttcccaggaagaagctaggagttgagggttttcttcca

SEQ ID NO: 911715 - DNA, 563 bp, Homo sapiens
taaaataaatatgtagaaaggatatacaggttagtgataaataccaggatggacataaaacggattggtgtgattagacaaaaggtggaagctattacttctttttgcttgattaargatctaataaagacttatactcaatctgagaccagagtaactaaaaagagacagccatggaaagcccattaaaaaagggagttctggaaagaggaatagcatgtgaaatatcacttatgtgagagcagaaaggtggtcagtggttttgaagaggaagttcaatattatgcgaactggagaggtggaggcaagatcatgttgggccttatcagccacattgatgacattagatatatagtcatatgtcacttaacaagggggtatgttctgagaagtgcatcctttagtgatttcatcactgtgcaaacattatagagtgtacttccacaaactgagatggtagagtctgtaggttactgtactgaaaactatagttaagtgtttgtatatctaaacatacctaaacagaaaacatacagtaaaaattcagtatagaagattaaaaa

SEQ ID NO: 911716 - DNA, 675 bp, Homo sapiens
tttattggaaaggataaacaaaatcaatagactgctagatagtttaaccaaaaaaagasagaagactcagataagcacaatcataaatgataaaggtgacatcacatctgatacatgccacagaaatagaaaagatcaccaaagattagtgtgaacatcagctgtatgtgcacaaactagaaaacttaaaggatgtaaataattcctggaaacatacaacctccgaaaattgaaccaagcagaaatgtaaatcctgaacagaccaataatgagtaataaaattgaatcaattaaaaaaaaaattataaaaataagcccaggaccaacagattcagagctgatttttaccagatgcacaaacaagagctgctaccaatcttactgcaactattccaaaaatttgggaagggattcctccctaactcattctctgaaacaagtatcactgtaatactaaaatcatgcaatgacaacaccaaaaataactacagaccattatctctgacgaacatggatgtaaaaatcctcaacaaaatgcaagtaaactgaatctgacatcaaaaagatgattcatcatagtcaagtgggttttattccagggatataagggcaattcaacatttgcaaatcaatgaatgtgatccaccacatacaccaaattaaaaacgaaaacca

SEQ ID NO: 911717 - DNA, 665 bp, Homo sapiens
agttactggcaaaagaaaaaaaatagacctatcaagattttgagtagacatgttcaggaaagaggraaaggacttggatgaatgtttggaaaacaatggaaagcttttacacctattcttgacttccattttgctggattgcacatagctccccaaacctcactttttcactcataaaataatcatagcatttgtctctacttagtttttagtactctattaatattttctgtgattattcccataaagctgtttgaatcacttggaagaaatatatatcttctcattttttagacttttctgtcgcagcctattatgctctgatgatcaatatacaattacatataatatattgttatcagatgataataggtatataatgtgaggaatctaaacattacaaaataaccagagggagcccatgaacttattcttagattccataaacaaaaagaaaaaaaaaaggagtatctatcctacataaaccaactaggaaaatgcctctgtgacattgctaagacttaatgacaaaagtgatggaagaaaccaagtaattacaccgtgggcttttctttgtgtacaaaaaaaaaaatctggtacagtgatttcgtacttaatgttgtcaataggttcttgaaaatttcagctttaggtgaaaggatata

SEQ ID NO: 911718 - DNA, 611 bp, Homo sapiens
atgtacgggaggaaaaccgagagcccacagcaccctgacaccgtgtctcaatcataccctgcctgtctcaggagtgagattggtctcgactactcagcagcatctcccagaacaaagacacatcttaaaatgyttcttcagtatccacttcaccactacctgttacccaagtaccccaaggaagaaaagtcattgtcttcaaaataccccaaatgagctggccacttctaaagtgattcctgctcaaacagctcacctgctaatgtcccctccatgtctttatggatctcacgctcctgaatataccacagtcacaacacaaggtgaacggaaagcaaatcagttgcaaaaggaaactgcaaatcctgcaaaagatgcagggttttatgacatcagtgaaagtgatgctggagaaccacagctggctgccaggcaaagctataaacaaataaagacccaggagtcgctggctcacaatgagagtgaagaaagcccaggaagaccacataagaagttccaaaggaacttttctgaccatcagagagtgcacaagaagtccaaaaacgggctccaggggttttgcaaaatgactctttatcatcatgctataa

SEQ ID NO: 911719 - DNA, 594 bp, Homo sapiens
cttttgaggtacttataatctagttggaggcaggtgatgtgtatggggtggggtaggtgtgtgcctatacacacacacacacacacgaataatttatattgataaagagtagatagacatatagatagataaacacataccacacacacacacacacacacacacacacacacacacacacacaaactaaaagacactagataaacaagaaagactgtaaaggtaccaatctgtatgttatagaatttaacattaggggaatcaaactaaaaatgaggtgacatcaactagagaaggtctcatgggttgaattgtatccccaaaagatatgttgaagttataacccccagtacctcatgtggaaatagaatatttgcagatataatcaatttaagatgaggttataccaaattaaggtgagctcccatccaatacgactggtgtcctttgaagaagaggaaaacagacagagacacagctagatacacacaaagggaacatactatctgtcaatagaggcagagattgaagtgctgcagcttgtaagtcaataaacaccaagagttggcrggaaaccaccagaaactaggaaga

SEQ ID NO: 911720 - DNA, 593 bp, Homo sapiens
tgtcagtcttttccgctgctcatgctgagtaaggggcattgtgggccgcttcataccaggggtgaccacgtggccccccataagtcaaaggttaacttaatatagagttttcttctgaaacacaatctttctctctccaggcctcacttccaccaaagacaagtaacagcaggaccaacctacatgcaaaagaaactttagtcccctacaggtagcctgatgacccacacaaagcgcagcaagaatccttgtccacataggctttcctagattggactggctggaacctctcacagggccatttcagtcaaagccctgggaaaacagccagttcctccactgtgtcccagtatacaagaaaacagattcctattgaagttatgcaaacaaacacattgccatgaattaagaatattcataaatgaattacaaattctggagaaagtaggcagagaacaaaatatgccttaatttcagtttacaaaagtataatctactcaattgttaaaggctataaatagctcaaaaggaaaaaygttctccagactctgaagaatcagcaatgtttcaaacaaacaaaaaaggccatgaaa

SEQ ID NO: 911721 - DNA, 647 bp, Homo sapiens
gtggcatgatctcggctcactgcaacctccgccttccaggttctagcagttctcctgccttagcctcccgascagctgggattacaggttcctgccaccatgcccgtctaatttgtgtacttttagtagagatggggtttcgccatattggccaggctggtcttgaactcctgacctcaggtgatctgcctgcctcgtccttccaaagtgctaggattacaggcgtgagccactgcacacagcctacaaaagtgattttacttcaaagtttgaagtctgaagttttcctcttcattctaaattctctgtccttcttgggaatgattgcaacctcttcataagagtatgactccaaataacattgccacatcaaaagcctctgaggtcaaaatcaatacatgctggttccctccttcccttctccctttcctccttcccttcctccctctctccttccatccatccatccctccttttcttccatccctcagtatttgattctctactatgtgccacataatatagtagtgaaatagacagatgttgccctcatcctcacagagtttacatctagtggagaaacagaaaaaaacaaagtaattatggttcattgtgatgaatgtaatgacaaaggtaagctcaggata

SEQ ID NO: 911722 - DNA, 590 bp, Homo sapiens
tctccagtgcagagcctagcacatggaacttgctagggtggcctccctctgtgcctcagttgccatgaaatggtggagcccagtgatgaggccagccagaataatgctcccaaccctgtaagrgcagtggttaaagccagtctcaatcaaggtgggtgttaagggtcaactctggcctgaatcaggaatgccaccttcttacacaaagccagcattgccttcaaggtgacttctgcaaaagagacggatttttctgcacgctgcttttctcatggcatccgtggcacatcctctctccctgtcagcaaacctaggctacctagattttgagacagttgcaaagtatttattctgaggattcccaggacaacttgatggatcctgccaaaaacatctttgaacatataacttgacacacttttgtgaatttattccccaagataaattcctagcaggggaattggtgggtcagtttgcatttctcattttgatatatgttggcaaatggccctcctgaaagaattcagctccctcccacgaagtctgagacctatctatttcctcataacttcagcacctatctgaccaaa

SEQ ID NO: 911723 - DNA, 595 bp, Homo sapiens
tctatgtgtcatggcttcattcatcctgatttactgcagatcttacagctgtacataattttcatactgaaaggttgtaacaagccaggatgaacacaycattcacttccattctgttgcacataattccaacatcacagattgtaccaattctgataaaagtacagcatttagcattccaatgatggaagagttgccaaggagttttgtctctatataaagaaaagatacctgatagagctgttcattcatagagctgtttgtctagagcatcatttcaagtacagaccaagtagctctatagtacttggtacagacaaagtataaaaggtgcttcatttgaaagagaaaaggtgggatgataggccttaatgccttctctatcttaagagattttgtttccaaatattttggaaaaagaaaaaaaaaggtgtactggggtttatgaactttccaaaatcagaatattttcccattgtgaatgtctttattcagtggggcagacacaaagcaccatgtacaaatagcagctaatttaaatagatcatatttttacaccaatatttcttagaaagaaatagttataaagattcaa

SEQ ID NO: 911724 - DNA, 524 bp, Homo sapiens
agatttgggtggggacacagccaaactgtatcaccagtagtactgttctgctacatgggcttatgacttgtgctcccttgattcccagtgtcttagagatacttaaatagaatcacactttgtatttttacttaaattttttgtctagaggactgagaaaatattcatgggagctggaccttgaaaaagcaagaattaggcaaaaatttatttccctgactgaaccctggttatggtgattaaaactgctctttgtgagctaaacatgtttcctttgattctactgagaggttttgaaatgactgcagaagccaacacctgctcacctaaataatgcatttgtgtctcattgaagatttgcctcaatgtctaaaatatttagctgtttaaaaggtcaggtgggaagcttgtatgaatagtatgactatatttggaatttttccacctgtgatattgagtaatgctcwttcctgctattgtatttttttatttttaatttttttatttcaataggttttgggggt

SEQ ID NO: 911725 - DNA, 639 bp, Homo sapiens
cttcttccctttctcttctgggtctagcttttcttggggtatggcagagagaagaaaagggaaactaaagaatcwtcaggttttacagacctggccgtgtattggtggtggggaggcaactctggtgccatgcaggcttcatctagagaccccagtcctactccggcacaaactcttcttttctgctgctagtggtgtcatcaccttagatgtttccctgctgctgatgtggatggcttccttagggtgatctttagaacattcttagtgagacacagacacatctccctataacccacctatgccttaggctcattcatgggcctttatcttactttgtctacttatctcctgggtggggaccttgtctcctgccctctcccctaaactcatgtttcttcacataaaaacacagaaataggaactcttttacactgctggtgggagtgtaaattagttcaaccattgtggaagacaatgtggcaattcctcaagaattgcccgaaataatatttgaaccagaaataatatttgacccagcaataccattactgggtatacatccaaaggattataaatcattctactataaagacacatgcacatgtatgtttattgcagcactgttcacaataggaa

SEQ ID NO: 911726 - DNA, 691 bp, Homo sapiens
tgataatgtccatgtttcttagcacagcattcaaggcccttacaggctggcttcaytatcctctccttattttatcctcctctatatcccactttatattttagccatattagactgccccctgttcctagacatgtatgagctgggggtttcaagtacagatggactcagactgtttggtgtcaaatttccatctttgttagctctgttatcttggataaactacctgacctctctgtggcttgggtatttcatttctatactggagatgttggttcctaccttctacagttatgataatgatttaagagagttaatacataggaaacttttagcacttaataaatgctcagtaagttttaggtattgttaatttcccgccaaatattttactcatgaagttccatcagttgagcataacttttttgttttgtttttttgcctggtgcacttctacctctttaatattcaacttaagtgttacatttgggaaatgttttccatttcccccatcagaattaattactccttttgtttatgtaagtactcatagcctaatttggttatacctcttttatggatttgccatatctcccactggattttcagcaacttcagggaaaggagcatgtcttacatgtgactttatgttctgaatatctagatgagtgcagtacaaatagtaaatgtt

SEQ ID NO: 911727 - DNA, 529 bp, Homo sapiens
tgtctttcttttgtaaattgcccagtctcgggcatgtcttgatcagcagcatgaaaagggaccaatacaccttcttacttgttagaagggtataaccgagagccttcaggattttgttgatttaccttccttctctcaatattgcctcaacaatgaactattatagattattgggtaacttttgagattgaggtagacttggagatatcttattaggtctaacagaaattagaaaaacactgtcaccaagacaagacagaggctgtgtttttttgtttgttgtttttaacacacagcattttttattgtatagtttaaaatttcttctgatctccagtttcttctgatcttcagtctctgatacgattttaaatgacgaagtttctgatataacttcaaaaagcatggttttgcaggcctcaatattttgtccttgatgttcamcagcaaaagcagttttacagttatacaatctcctctattggtccttccttgtttgagaataaggacagaccacaaaatcctgatg

SEQ ID NO: 911728 - DNA, 587 bp, Homo sapiens
tgtccatgaaggagaggagaaaaagactggtatggggaaaaaaatcccagcactttgggaggccaaggtgggtggatcgcttgagctcaggaatttaagaccaactgagcaacatggcaaggccctgtctctacaaatacaaaaaaattagccaggcatggaggcacacacctgtagttccagctactctggaggccaaggtgggagggttgcttcagcctgggaggtcaaggctaaggtgagctgagatcatgccactgcactccagtctgggtgacagaatgagaccctgtctcaaaaaaaataaaaaataaaaataaaaagaagaagaagaagaagaaaggaaagaaataaagacggaaaagcctcaagtttggtgaagacgtaagtttacatattcaagaagcttaatgagccctaaacaagataaagatagagaaaaccatgcctgaacacatcataatcaaactaccaaaaatcaagatsataaaatattaaaagtggtcagagaaaaacaacactgtatatacaagggtacagtttgaatgactgctgatttctcaacagaaaccacagaggcaaaagaa

SEQ ID NO: 911729 - DNA, 706 bp, Homo sapiens
atgggaaaagaaagtaaaataggaatcattttaagttaacttgtttctatgcatgtaacacttgtaaaggtcttggtaaaagtcaaatgtaattgaaatttatatgtatacatatacatataaacttgaactaaataagtagagtagataatacatttaggtcatatgagtaatagtgcacactggctgtcactaacttctctgaatgctctgcagaagggatagaaataatggatttaacatcagaattagaatataggcggggcaaataccatatttttagctgacaaagaagtggatgagatgtaagtacagggaagactcttgtagaaggattttccattttatctgtgaatattgaaatgagctgtaggatctacacagcaaatagtttggaatttctgacttcctcatgtgaaatagtgatagagatagaaaagatagaccaagaaataaaaaattaaaacttgttatgcagaaaacacctagatttcaaaaaggaaacactataaaaatataccagtacattggccacttactgtaggttagacagtgggctctccattttttcatctmatttaattatcaatatgtaaagccagtgttattcttcatttatagacaaagattttattacctgtgcaaagtctcccagtcagtaagtgatgaatccaggattttaacccacgttttcgatgtcaatgct

SEQ ID NO: 911730 - DNA, 594 bp, Homo sapiens
tgggaaaaggaacatctcagagcgtttgttcctttcacattggaggacaaatggtgttatttgtggtagtaggtttgagctctgtctgactccactagctttttgaatagggtgacgtgaggattaagtgagayagtgtatgtctggggtcggcaaatttctcctgtatagggccggatagtaaatctttttggttttgcagcccatatggtctctgtttgcaactatgtaattctgctgttgtagccaaaaaaaatccttgacaatatgtaaacaaatgaatgtggcagtgttccaataaaactttatttacaaaagtggcattgtgctggatttagcctgtgggctctagtttgccaattcctcatatatgtcaaagaatttagtaaactgtaagacaaaatttaaatgcaagctgttgactatattcattttaatattttacttagaaacacttctaagtgttttacatttaaaatatttgtgctttaaatatttcctaatgttgtgtgtgtgtgaactcattgatacctaaacattttctacaactctttacagcctaataacgttactatttttattctttctgcaaaa

SEQ ID NO: 911731 - DNA, 465 bp, Homo sapiens
aaattagccagtgatgtttgcaatcctttgtatgtcctttatacagttgtaggatatcagagccatctcaaartctaagtcaagcccagacacttcagcccctacttacaatagaaatcaggacatattttatcactcagttacacataaggcatgagacttaatatatagcccaggctgtaggagttattaaagaatgaagttattttgccaaccttacttatacaacacaacatataatattttggcatagatactctttaactcactacatattggcttatctgcaaagtccagtgtcaatgtggaaattataaatagtagatctgtttggcaaagtctctgagattaatgagtgttattgtcccacagaagaagaaatacctcaaaattatattacaatattcccacagctcgtcagtctgttccaatgccacattctgttcatggttgcttttggcagtt

SEQ ID NO: 911732 - DNA, 608 bp, Homo sapiens
cttccttgttctcagtgactgactttataatatttaacagaaatgtgaacttataaaataaacttatawtaatagaatatttttatctgttctggatatattgaggttgcctataaggtttatcttgaaaagggttccactgcttaacaaatttaaaacagtgatactaaagtctcttctagctctaacatttataatgctttctatttttatatgccattgaaagaaagactaactcctgattgcatataaatggtgcaatgcaagttaagttattttccttagtagaaaagttaagttgcactgggaaaactgttgcataatgtgcttccccaacctgtaacttaaatcacttaaatacattattttagaaattctcagagacttgaaatcttctgaggtgtctaccaactgataatccatgcaaataatttccacagcttgtttgatatttgcaagtgaaacacacttttgcttgttcgtaactaagctcatctctcctgcattaactataatgtcaagtttgggggggggggcggctctttaattaaagagccccagacctttcaaggatcagcattgattgtcttctgcttcagatcccttct

SEQ ID NO: 911733 - DNA, 608 bp, Homo sapiens
cttccttgttctcagtgactgactttataatatttaacagaaatgtgaacttataaaataaacttatattaatagaatatttttatctgttctggatatattgaggttgcctataaggtttatcttgaaaagggttccactgcttaacaaatttaaaacagtgatactaaagtctcttctagctctaacatttataatgctttctatttttatatgccattgaaagaaagactaactcctgattgcatataaatggtgcaatgcaagttaagttattttccttagtagaaaagttaagttgcactgggaaaactgttgcataatgtgcttccccaacctgtaacttaaatcacttaaatacattattttagaaattctcagagacttgaaatcttctgaggtgtctaccaactgataatccatgcaaataatttccacagcttgtttgatatttgcaagtgaaacacacttttgcttgttcgtaactaagctcatctctcctgcattaactataatgtcaagttkgggggggggggcggctctttaattaaagagccccagacctttcaaggatcagcattgattgtcttctgcttcagatcccttct

SEQ ID NO: 911734 - DNA, 608 bp, Homo sapiens
cttccttgttctcagtgactgactttataatatttaacagaaatgtgaacttataaaataaacttatattaatagaatatttttatctgttctggatatattgaggttgcctataaggtttatcttgaaaagggttccactgcttaacaaatttaaaacagtgatactaaagtctcttctagctctaacatttataatgctttctatttttatatgccattgaaagaaagactaactcctgattgcatataaatggtgcaatgcaagttaagttattttccttagtagaaaagttaagttgcactgggaaaactgttgcataatgtgcttccccaacctgtaacttaaatcacttaaatacattattttagaaattctcagagacttgaaatcttctgaggtgtctaccaactgataatccatgcaaataatttccacagcttgtttgatatttgcaagtgaaacacacttttgcttgttcgtaactaagctcatctctcctgcattaactataatgtcaagtttkggggggggggcggctctttaattaaagagccccagacctttcaaggatcagcattgattgtcttctgcttcagatcccttct

SEQ ID NO: 911735 - DNA, 644 bp, Homo sapiens
actttatattattacaagaaagcagtaaataatatttttaatattaaaagttcaatgttatgagtaggcatgtttgaagccaacaccataatcatgcatttccttagaatatactttaaaagctactctcaaccaaaaatataattttatttatagagtttaaatgtataaagaggtatctttttctgcttgcaaatattgttaccacttatttatggtggtttgttgaaacatggttccaatcatatgagattcttcactggcggtgaacatttggtctcacacctggtgtgggtctgcctttttttctttctggagttagctacaaagaagccagtcaaagaagggcaattcatcattattaatatattatatagttcaaccttgaaagagctcaaattactttaaaagtttgttttaatcaacaaaataattattaattttcacaacattctttgtgaggcaggtgtacttgaaacagtgtattaacatgtgtctctttttcctcatagggttccctggggatacaaggcccccaaggtccacctggaaaagagggtcagagggtaagtaaasctggaacaactggtgggcattactaacttaggggatacttatttgggaacactaatgaaaatgaaacc

SEQ ID NO: 911736 - DNA, 644 bp, Homo sapiens
actttatattattacaagaaagcagtaaataatatttttaatattaaaagttcaatgttatgagtaggcatgtttgaagccaacaccataatcatgcatttccttagaatatactttaaaagctactctcaaccaaaaatataattttatttatagagtttaaatgtataaagaggtatctttttctgcttgcaaatattgttaccacttatttatggtggtttgttgaaacatggttccaatcatatgagattcttcactggcggtgaacatttggtctcacacctggtgtgggtctgcctttttttctttctggagttagctacaaagaagccagtcaaagaagggcaattcatcattattaatatattatatagttcaaccttgaaagagctcaaattactttaaaagtttgttttaatcaacaaaataattattaattttcacaacattctttgtgaggcaggtgtacttgaaacagtgtattaacatgtgtctctttttcctcatagggttccctggggatacaaggcccccaaggtccacctggaaaagagggtcagagggtaagtaaagytggaacaactggtgggcattactaacttaggggatacttatttgggaacactaatgaaaatgaaacc

SEQ ID NO: 911737 - DNA, 629 bp, Homo sapiens
acagtggggagtgagacgggtaaaaaatgtyttaaatgctcattaaggtaaaaggtaccttaccttaaggaaaacattccaacagaatgtttgtcaggtacagagcacttatttttgtatctctaatttcccagaataatgccaattcataacccacagtaggtgttcaatggatgcttattaaattaaatcaccttgatttggatctctcacgctgactggaagaaagggtctgtcgcatcctcagtcccccaagatctggccttcgcacaggtctctctgcaaaccaggttcggtcacatctatgaatccaactttcatctccacggtttttaagattcccaagtgacatgtttgcatttaggggcatactttaattagtatatgacgtcttcatgctgatgtcctagaatgtattactaatatttctattactattccttaatggtgatcaactaagaaaaaataaattatgaagtccatcttgaccaagaattcctccccaccaagatttgtaaaactttctgccacacatatctgaagatgatcttttttgactttaacacctagaaatgtatattttaatttaaaatagaattttagaaacttctaagaaatcagtaattttc

SEQ ID NO: 911738 - DNA, 604 bp, Homo sapiens
ctctcatgtgtcccatccatgatcagtgacagcagatcccactaaagcagagaggcaatggctaatgtgtccccagatgacccaaaccttggcaggtggccagcttaacgaggtgttaargagtaggcagataaatctggagagctataaaaagaaggaatggcagtgagaaaggcaaatgaatgcaaaactcttgaaagttcttgaactcacagcttatgacaacgggttgcgtgtgttctctaactttgttcaaaatttcaaagctgaaatccctggcatgatctttaagcaatagccagactctggtccacaacacaaaaggaaaattggaggtacgattctttgggtataagtatattgaaaccttgaccctatttccactttacatatgcgaagaaagtgacttcaatacaaaatgagcctgaaaacatggtaagaaaagatagtaaaggacagttatgaaaaatgaaaatgattcagtgaccacaattttaagtgtattcaaacagtgctcctaaaatccgaagatttagaaatatcctaagacacttctgcatcattttcctttctctttaaataggaaatattcaagttacccaat

SEQ ID NO: 911739 - DNA, 604 bp, Homo sapiens
ctctcatgtgtcccatccatgatcagtgacagcagatcccactaaagcagagaggcaatggctaatgtgtccccagatgacccaaaccttggcaggtggccagcttaacgaggtgttaaggagtargcagataaatctggagagctataaaaagaaggaatggcagtgagaaaggcaaatgaatgcaaaactcttgaaagttcttgaactcacagcttatgacaacgggttgcgtgtgttctctaactttgttcaaaatttcaaagctgaaatccctggcatgatctttaagcaatagccagactctggtccacaacacaaaaggaaaattggaggtacgattctttgggtataagtatattgaaaccttgaccctatttccactttacatatgcgaagaaagtgacttcaatacaaaatgagcctgaaaacatggtaagaaaagatagtaaaggacagttatgaaaaatgaaaatgattcagtgaccacaattttaagtgtattcaaacagtgctcctaaaatccgaagatttagaaatatcctaagacacttctgcatcattttcctttctctttaaataggaaatattcaagttacccaat

SEQ ID NO: 911740 - DNA, 630 bp, Homo sapiens
ccatggtagattcctcataagctattagtacacattattcctcattaaacatggtgctactaagcagggtgtacactcattagcagggttcatgatacaacacccttgctttctttgtattgcaagttctctgggatttaggagatttttatagctgcaagaatgaaaggcccatcctccattatttaggatatggccagtcctccagtaatcatagtctatagaaaatgtcttgtgtgtcctgcctttaaccttgcagcaacaaatcaaattaggcaaaaagtggtgctaagaacagctatgagatgaatctctaactgcctcttggaaaataaactgatattgcctaaactttatgcagcaaaagggaaaaccctggcaaaagttaagaaacaaattcactaatgtcaccaccaaaatccaaataatgcattttcttcaaaaagccaacctaccagccaggcatggtggctcacaaccgtaatctcagcactttgggaggcagaggcagaggcaggcggattgcttgaggccaagagtttgagaccagcttggacaacatagtgaggccctatctctaccaaaaaaaaaaaaaaaaaaaawaataataataataataataaatttgcc

SEQ ID NO: 911741 - DNA, 641 bp, Homo sapiens
tcatatatcagtgctgtcagttttcctgtcttgaatcattttcctagcttcatcatctccctttctagcctctttcagttacgtacacccctcaccatgtaaaacatactatccatcaatgataaactagtgtaaagacagcagagggctttatttcatagtgcaaccactagtcaagtaggaacagatgtcagtggtcctgtgtcaagaaggattctgaggttgcttccaggcaactggaactgaataataatgcctcttatgaatatacttgtgtgtggatgtgtagggtaggccagggtagggcctgcggcactgatgcagttcagattttgttcctctctgatatacgtgcaaagctacaccattctctgatgttgccttagtctttctgttttctagtaacttctattcccttctttaactgattttacacccttcaagactcagcccaaatgcccctgcctcagttattccttcctctttgttctcataatatactctttatataagtctacttttgctctaaattataacttttsacatatttgtacttatatgtcttattaaagtgtgccttattaaaggtttttatctctgcagcttaaaacagtgtctattgaataataggcaccaaatct

SEQ ID NO: 911742 - DNA, 641 bp, Homo sapiens
tcatatatcagtgctgtcagttttcctgtcttgaatcattttcctagcttcatcatctccctttctagcctctttcagttacgtacacccctcaccatgtaaaacatactatccatcaatgataaactagtgtaaagacagcagagggctttatttcatagtgcaaccactagtcaagtaggaacagatgtcagtggtcctgtgtcaagaaggattctgaggttgcttccaggcaactggaactgaataataatgcctcttatgaatatacttgtgtgtggatgtgtagggtaggccagggtagggcctgcggcactgatgcagttcagattttgttcctctctgatatacgtgcaaagctacaccattctctgatgttgccttagtctttctgttttctagtaacttctattcccttctttaactgattttacacccttcaagactcagcccaaatgcccctgcctcagttattccttcctctttgttctcataatatactctttatataagtctacttttgctctaaattataacttttgacatatttgtacttatatgtcttattaaartgtgccttattaaaggtttttatctctgcagcttaaaacagtgtctattgaataataggcaccaaatct

SEQ ID NO: 911743 - DNA, 679 bp, Homo sapiens
cagttagggtggggcaggaacaaatcacaatggtggaatgtcatcagttaaggctgtttttacttcttttgtggatcttcagttactttaggccatctggatgtatacatgcaagtcacagrgatgcgaaggcctggcctgggctcagaggcctgacaattaagccttcagaaaaggaacaaaattccctgaatattggctattcaataatttgaatatttggcaagttgaccagggcattagatcagtaagtcagtaggctgcaactaaaatatcttcaggaagaagaaaaggattttacaaaaatacaaaataaaccagaaattgcattattaggaataagatgggaaaagtctatgttttatctcatgagtggaaaggcaaagcaatcagaaactccaggggaggaaaattctgtagaagtaaactatgaatctgatgattatgaagctaaaattcagcatggttttaaccatctgaacggtttttctttaaaaacgaaaatccatttgatcttcacataaggaatagtcttgattgagtggcataaagtgaggaatggggcagcactgggaccatcagggaaggaaattatatcatagcacacagttgaaaatgcagaaagcgggggagtgagcttcaagtatgatcaggacatgactccacgtttctgtaattc

SEQ ID NO: 911744 - DNA, 600 bp, Homo sapiens
aataataatagttgaaatttaccccaaggagataatcccagaagtgtgtagcaatattgtttacactggcaggaatttggacccattctatctatacrtcagaaggggactgaaacattagtgctaaaaacttacaatgcactattttttccatcacctaacatggtgatacatatctattttcattcacatggaaaaatgcccagaacatattattgagagaaaaaatgttagttatgcatccgcatgtatatacaaacctctttatgtaaaattatatattgaaagctatgtgtgtatgtgtgcataagaagatgaataaaggaatgttagatgaacttgtaattattatctctagatggtggaagttcagatgaactttacattctcctttctacttttctgtactgtttttaaaactctgcaatgtatctgtatctgctataacaaaaataatttcacagaaataaaaaatttaaatgacaatgacaaatattactaatgtatagcaaactgggaaaatatttataataatttatgagaaaaaaatcacaaaattattacatctacactatgcttgcatctccaaaataggtaggt

SEQ ID NO: 911745 - DNA, 650 bp, Homo sapiens
agcagttgatacaagggaaactagtaagtggcagaacaaggatccaaacagaatagaaccaattccacacctttgctttacctctaacccttattgcctcctctgaaaatggagctagattcagattctagctctgccctccactatctatattacccaagcaaatcacttaacctgctggcttcttcatttcctcatccacaatattgcaattataactactttgaagcgtggttctaatgaaatatgagataacacacaggtgagctggaatgcattatgcaaatataaggtatatttactgctgttattttggaatacaaagactgtacttcccatgatgcttttcactctcctatttcttaatattcaccaaggagagaaggaagagatgtatctttggaacaatgttaatttcatcctacggcttttgattattcatccctctgagtgatccagtctcattacattcagtcattcgctctaaatgcttggcaggcatccaaacagttatttgttcaactcaataatctaagtttattgtcttaaataaatcacacctgacaaataacccrtgcttcaaaacgatctttaaaagtgggtgctaaagtgacactgtcaattccaaaaatcatgggtgatgttaaggc

SEQ ID NO: 911746 - DNA, 650 bp, Homo sapiens
agcagttgatacaagggaaactagtaagtggcagaacaaggatccaaacagaatagaaccaattccacacctttgctttacctctaacccttattgcctcctctgaaaatggagctagattcagattctagctctgccctccactatctatattacccaagcaaatcacttaacctgctggcttcttcatttcctcatccacaatattgcaattataactactttgaagcgtggttctaatgaaatatgagataacacacaggtgagctggaatgcattatgcaaatataaggtatatttactgctgttattttggaatacaaagactgtacttcccatgatgcttttcactctcctatttcttaatattcaccaaggagagaaggaagagatgtatctttggaacaatgttaatttcatcctacggcttttgattattcatccctctgagtgatccagtctcattacattcagtcattcgctctaaatgcttggcaggcatccaaacagttatttgttcaactcaataatctaagtttattgtcttaaataaatcacacctgacaaataacccgtgcttcaaaaygatctttaaaagtgggtgctaaagtgacactgtcaattccaaaaatcatgggtgatgttaaggc

SEQ ID NO: 911747 - DNA, 689 bp, Homo sapiens
acaataagtattcatcatataatgaatggttatcatggtaacaataaaactatacacaaatattacatttatgttgcagaatattttgttatgagtaaatgctcacratttattgttaaatcagaaaaagtagtaatgaagtagaaaatagtgaataatcttaattttttttaaaaaagttatgtaggtgcctgtcgaggggtcagggggagggagagcaacaggataaatagataatgcacgcagggcttaatccctaggtgatgggttgataggtgcagcaaactaccatgacacatgtttacctgtgtaacaaacctgcacgtcctctgcatgtatcctggaacttaaaatagaataaaattaaactttaaaaataaaaataaagagcaaagatctctctaaaaaaattaattacaggaaagatagaacaaactttagtagtatatacttctggtgacagaattatgagtaataactggttttttcttcatgctttgcttcattgattatattatatattgaaaactgaatattcatattttgcaaacatgtaaaaaggtgactgctgccataaaaataaaaacaaaataatttgctctaaaaggcaggagagagctgagcactgtggctcatgcctgtagtaccagctctttgagaggctgaagcaggaggatcacttgaggcca

SEQ ID NO: 911748 - DNA, 649 bp, Homo sapiens
gagaccaagattggaggttatagtgactttgattgcaccactgcactccagcctgggcaacagtgcaagaccctgtgtaaaaaaatcaaacaaaaaataagcaggagatattccttccagctgggtggattagagaaatctgcatagaagatatcgcacatgaaatgaaccccaaaatacatgcaagatttggccacacagggataagaagggcaattctgaggaaaaggatagagcaaaatgcaaagatataaatgtttgaaacttgtttagggaacaacacatagaagttcagtttccctgaaatgcaaggaaggattttctgcatccagatcagagacaatatgaaggccaaggttaaacatctggacattgttctaagccctacagcatgttaataaagctccaggaataaaatttttttaaaggatttatagtcaaataaaaaaaatttcatgttttacccccttcagagattctccatgtgatttagtatatttaaagctttgtgaaattgtgcttttaaaaatatttttwaaattttattatgttttattttttaattgacataattatatacatttatggggtacatagtgatattttgatacataatgtatagtaatcagatcagggtaattagcatatt

SEQ ID NO: 911749 - DNA, 580 bp, Homo sapiens
actttttaataatagccattctgagtggtgtaaggtgatattttgttgtgctcttagtttgcacttctctgatgattagtgatgctgagcatttcttatatgctttttggccacttgtatatcttcttttgaacaatgtctattcatgttttgggggaggggggttttaagaataaataaaccaatacaaatgaagctccatttccagtgtaggtgtggggagctgacagtgttttggtcaggaggagtggggagcgggtgtaaagggagaggaggaacagacatgacttaccataacaggagaatgatgtcctgcctggggtcccatagagggaactgctgcaggcagcatggctttctcagagaatgtgctgagtcctctatcccccatttgtgtttgaatgaatagaggtgtgggattggatcagcctagccaagaaatggcccaagggatatccccctacagtagtcctcctgttagctacacttttctaggggckagaatgaatgtcaggtgtctgcaattatattggccttggttagacagtgagagaacatacactctcaaagctgcaaagaa

SEQ ID NO: 911750 - DNA, 654 bp, Homo sapiens
tatgactcaacattcacagatctcatagagactgctacagtaatggtgtagcacagaaaacactggctaaactggatatttctactcagtctttcatgagaggttatactggctaaatgatcaaacctcacattaaagagacttcagtttttgcagattgatgctcttttgcttatttcttgttttagctttaacagggaaaattattctacagaattaacctatataatttatcagattcatagaaaattaaaatgtacaattttaggatgacaaacctttaagatttttgaggttcagcgttatctagccattatcgttttatactgttgggtctgcagcaaccactttatgtatgtatatatttgatttcccaagtttatttgcctagagttagtggtagagcccaaataagatgcaatcaaagcttactttccactcttctagaccagaggtcagcaaactttttatataaacagccagatagtgaatgtttcagttttgcaggttatgtagactttgtcacaactacttawctctgcacttactgtatgaaggtgaacacagacaacacataaaagaatgtatgcagctggattccagaaaacctttatttacaaaactggcatagttttccaatgcgtttaagtctag

SEQ ID NO: 911751 - DNA, 538 bp, Homo sapiens
cccccacttctcaccatgctaatctcttctactctctctgtgattcttctaatccaccctactttatgttcaggaagttggccaaactttctaccactttaaagactcttcatttgcattccctctgcctaaaatgcttctccccaggctgttctcaaagcacgttctagatttcagctagctcactgttacatctgaggatcttccatagttattctttatcacacaccatcctattaattctttctatggaatttatcacaatataaaattaccttgttatttctttcttactgagccgtgctcccattagaatgtaatctctataaagacaaatgccttttttgtttttgttgttgttgctgttattcactgttgtgtccaccagatcctaatactgttcctggcacacagtaggcaataaatgaatatttgttggaacatgccacttattgaaatatatccttttgagtataaaaaakgagttattttacttgtttttgatgcttaatgagtaggtgggtttgattttaagata

SEQ ID NO: 911752 - DNA, 598 bp, Homo sapiens
gctacaggagaggctgaggcaggaagattgcttgagcccaggaatttgaggctgctgtgagctatgattgcattactgtactctggcctgggtgacagagccagaccccarctccctattttattttatttattttttgagacagggtctcactctgttgctcaggctggggtgaaatggtgcgatcttggctcactgtagcctccacctcccggattcaaacaattctcctgcctcagccaccagagtagctgggaggcgtgcaccaccatgcctggctaatttttggatttttagtagagatgaggttttgccatgttgcccaggctggtcttgaactcctgagcttaagcaatccacccaccttggactcccaaagtgctgggattacagacatgaatcaccgcgcctgggcagaccctggctctcaaaacaaaaaacaaaaacgcatgctgtgacatgaagagaacagggcatcatctgcaaaaatccaactctaaatatccctgagaaagaagattatgaagcacatggaataaaaagagggcccattttatataaacttaatgctgaaaaaaattctttttttaattgcact

SEQ ID NO: 911753 - DNA, 547 bp, Homo sapiens
gggggtgttcactctggcttcagggaacagtgagcctctgcatataccattctattcacccactcaatcaacaactaatattgaacacctattctgtgccaagaactgtgctaaaccataggactgggacagatacataccctactttcaaagaagcttacattctagtgtgagaacacaaatccccctccccaaaataccccaataaataaactataagcaaccctcactacttaaacctatgagagtttgtacacaagtctagttagtgaaggatgccacctcacgcattcagggctctctgagcttcaaaagattaaccaaagttctttagagtaatcaaagatcagatggtagcgatttacttgataagtaactgaatctactcagttcctgagtttggacacagaggytaacttgctgatataagatggatgaagaaaacaaccaagaaactgaaatgggaaagaggaaggaggaccttttctatgcagcagaatgtcaagtgggatttgtattctaattgttcagtgcaatggttcagaaa

SEQ ID NO: 911754 - DNA, 585 bp, Homo sapiens
agtattttttaaaaatgttcccaagtaattctaaaatgcattcacagtacgaatcgatgtttcagctcacaaacttctgaaggcaaggcagaaaagaatggccaccaaagctgagatgctagaactttgctagaacatctcattccccaaagctccttgtcatccactcagtcattcaacaaacattcaagaccgtctggatgttggctgctaaggatacaagaatagaccaaaaaaaaaaaaaaaaaaaaaagaacaatagaccatggtccctgcctccagggctcatcatccagcaacctgccccccacctagtgggctagacttcttggtcagtacataccaccttccatctcacagtcccacccctccaaattagtctccatgatccgcaagagtcttgcagatgatctacagctagcgctgagaaaaagagatggttaataatcttctcaaataagattgtccttgcttggaagctgatctcaaaagtttgacatctaacaaaacaacyagactttccattattagatgttatcttttccccatcagcgggcctcctaaaggtcgaggcagagtggaaaa

SEQ ID NO: 911755 - DNA, 646 bp, Homo sapiens
ggtgggtccccaagcagccatttcttacttgtgtgtaatgcttctataagcctcagagtagcttttgagtctcatttggttctttaaggatgctgctagtaacataaaaactaggtgggtggtgtgaaggaaggatgtttctgttaagggtgcacaatctctgcagaagaaaagtggatgttcttcctggttttttcactcaatcataacatatccttctacttttagtaaatggagtaaaacacaggcaaatatgtgaactgggataataagctggtgcctttgggattctaggtagaaataataattggagaaacaaaaggatatggagcctggactgggagtggtgactcatccctgtaatcctaacactttgagaggccaaggctgggggactgcttgaggcaggagtttaagaccagcctgggcaacaaagcaagaccccgtctctacaaaaaaaattttttgaagtagccagatgtggtggtgtgcctgtagtcccagctactcaggaagctgaggtgggaggatgacttgagcccaggagatagaggctgtaatgagtgttgatcaaaccactgcactctccagcytgagtgacagagcaagatcctggctctaaaagacaaagatatgaagcccgaag

SEQ ID NO: 911756 - DNA, 611 bp, Homo sapiens
aggaggtttgctcaaaatgaccagaaaactgatttgcaatggtcatactaytacaatgaagcattctgaagtccttgaaaatagcacccataaacaaatggtatctgtctcttttctccttacctatttgctttagtcagcctctgtttctccatggatactgcaaagataaatttctgccttatcatatgataaattcctacttggtaagaaaaaaaactgggatgtgtttaacagttcttagaagaccactttgtggatgtccacttgtagacaaaggtgatggattattaccaccatatgacagcaaaagacctagccattgatgttggaaacagcaattcagcaaatcagcctgacatccctggaattctgaattttgatagaatctacaatagtatgtgaaggactcagtaataataccattttattcggtctacccaggtcagctagtgttattcagcccaaaaccctcctcctcttctctttttttttttccatagttttcttaattatctccatatagtgaatagagggtcattttaaggaaatcataggcatagtaagacaaaggtatgggcggaggaggacatgctgcctacaagcatgtt

SEQ ID NO: 911757 - DNA, 608 bp, Homo sapiens
tataaagaccaatactgtaagatctcttctataagtggaatctgaaaaagtcaaacttatagargcagagtagcatagtggttcccagggactacagggtggaggaaatggggagatgttggtcaaagggcaaaaacttttaattacacagtaggataagtaagttctggagttctaatagacagtgtggtagctaaacttaatattactgtattgtacacttgaaatgtgctgagcaattttaaatgctctcaccacacccacacacacagataactgtgtgaggtgatggatatgttaattagcttaacagcagtaatcatttcacaatgtatagatatatcaaaatatcacattttgcaccttaactacatacaatttttatttagcaattagaccttgataaagctggaaaaaaacttaatcacaacttcttactcaaagcagatggtagaaaggttaagaactattaataagcataaaggaaatctgactactgaaatcaagtttctgttgggatggcagaagaccttaaaatatcatgaagccttgatttttttagtttctagaatacactagaactttcttcctggcaaagtgttctgaat

SEQ ID NO: 911758 - DNA, 638 bp, Homo sapiens
tatttctccttcacttatgaagcttaatttggctggatatgaaattctgggttgaaaattcttttctttaagaatgttgcatattggcccttactctcttctggcttgtaggctttctgaagagagatctgctgttagtttaacgggcttccctttctggataatccaacctttctctctggctgccgttagcattttttccttcatttcaaccgtggtgaatctgatgattatgtgtcttagggttgctcttctcgaggagtaacttgtggtgttctctgtatttcctgaatttgaatgttggcctgtcttgctaagttggggaagttctcctggataatatcctgaagtgtgttttacaacttggttccattcttctggtcactttcaggtacaccaatcaaacgtaggtttggtcttttcacatagtcccatatttcttggaggctttgctcattcctcatcattcttttttctctaatcttgtcttcatgctttattttatcaagttgatcttcaatctctgatatcctttcttccgtttgatcgatttggctattgatacttgtgtatgcttcacaaagctctcgtgctgtgtttytcagctccatcaggtcatttatattcttctctaaact

SEQ ID NO: 911759 - DNA, 586 bp, Homo sapiens
tattttttaaacttttatgtagtcaaatatgcctgtcttttattctgttattttgaaagctgctcccttcctgaggttacagagtcccctagattttctcctaatgttttgtttttattcagttttcagctttgtcaaggtataatttacatacaatatagttcactcattttaagcatacagtttgatgaattttgtatggtgcatggtcacataacctcaacaaaactcaagatattgaacaaatccatcatcctcaaatgttttcttctaccacttcacaatcgatgacctctcttgacccttgatcccaggcaactactgatctgctgtctgtcactatagctttgcctttcctagaattttatattaatggattcatagaaagtgtggtcttttgtgtttgttttctttaatttacatatttgagaagcatctgtagtttcaaatatattaatatttaatttatttttattgtcaaatagtattccatagtgtggaaaamctacaactggattattcatctatcagttaatgaatattacagttgcttctagtttttggttattatgtgtaatattatgaa

SEQ ID NO: 911760 - DNA, 249 bp, Homo sapiens
ttaagaccattagatctcatgagacttattcactrtcacaagaacagtacaggaaagacctgcccccatgattcaatcatctcccactgggtccctcccacaacacatgggaattcaagatgagatttgggtggggacacagccaaaccatatcacagacatttcatccaataaatcttttgtacatataatcctgtcttggcttctacttcttagaagacctgaacagacacagttggaaccaggagt

SEQ ID NO: 911761 - DNA, 690 bp, Homo sapiens
attttaggctgggagtctagaaggaaggttccacttgaagtataggtcttaaagaagtctaggagatttctagagaagggaaagaacaaaagcagagaagtgaactgaagggcatgtttggggaacaccaagtagtttcatttacagcagagttcaagaagagaaaaaagttaaggaagaaaagtaagttcagggctataccgtgaagatccttaagtatcagagtaaacagtttgtaatcagcctgtgtggggaaggggtttgaggctccttcctctcaggaggttggtatttttcattaactctgccatgtgtctgtactgtctctcccctacaggtaaggtcttttgtcacatttattttgatttatagcacgaatgctgaaaattccagatttgtttaatatattggtttttggctatatataaatcactgtgactatatagttccctttacattttatgtactgatgtttatttctggtactatatgtaataaatatttaaaaagtttgcttcatgcattatacatatgtcagtgtgtacatggtttctgtaagctgagttagtttaagagtacatttgcttaaagcaggtaacaagtcttctttctacatatttcaaattcaataaataattaacasgttgccaaatcaggtctcattttttctaatttgaattcagccatgaa

SEQ ID NO: 911762 - DNA, 714 bp, Homo sapiens
tactcatatttagctttcatggagataccttatcaattattgtaaatgtttatcatagatttggggggcttgggatttttctatctaattgctctgtttaattttatgatggtacttggagaaattaaatttctcaaacattgtaagtggtagacgtcagatataaatccagtcattttgcctatgaagtccatactactaaccactctgcaaggctgcatctaagtgtcattagctgtcagaagaataagtagaaattaaacaaatgaaaaatagaaatagaccagttctaggttaagagaaagggatagacaaaggccctggggcttctgtgctttagagaaatggaaaaaagccagctacagctttgtgagacatgggagcaaatcatgaaaggatgcatgaaaaggaagccaaagcagataattcaggacactgcaagccagggacaggattattttatcttacatgcaatgcaaagccatcagaaaagctgtaatgtgcatgcaatatttcaagagagctcagaagagggatcactttgcttcacttaaagaactaaattaggcctataatcccagaactttgggaggctgaggcaggcctcgaggtcagcagtttaagaagagcctggcgaacatggcaaaacctcgtctctactacaaatacaaaaattagctgggygtggtggtacacgcctgtaatcccagctac

SEQ ID NO: 911763 - DNA, 587 bp, Homo sapiens
atctgggcagaaattctagttggctctccccttttatttttcactggtttgtttatccctaacaaagagtagatgagcagttctgggaatcattattaaaaacattaaaaaaagataagcctgcatgtaaagaaatcctttgctgttgtatttgatgagatgacatgttttattcaaataccccattacctagtagaatctttggcacatagtaggtgctcaataaacagtgattagttgattgactgaatgtattaattgccttttaatggtatttatctttctcctctcataagaggacacagctgtacctcccaacattcttatgtggcttgtcaaaacaaaaacagactaggcttgaattggccaccctgattaatctggtcttgatattttttcagaagccatttttgtcatcagtgtagctggtgaaagactttatctgcaggtacgggggatacaggccaaacttgcccaaaggtagcaaggtggatgcccaggcagtgccaattcttggtcaaaagtaagaaatgtggcrgagggggaggagccaagatggccgaataggaacagctctggtctacagc

SEQ ID NO: 911764 - DNA, 590 bp, Homo sapiens
ttttcctctcctcacagtgcagagtggtccatatctgtgttttccttctcatgtggagataggggagtggggaaatgtcccttggagtcttggggcctttgkaactaggccttggtgggtctgcttctcctgatactaatagcaggcccagacacatggtcatactccttctcgcatcctcataattaactagattgtgtgcttccctctaagggctgttgtggtgccagtgtgctcactactaacagaacaatttcaatcaatggccttgtatgctcaaaagagagtctccccagagacctggcaacccccagccttttggaattagacagattgcttttttaaaatacgattattcagacaacaacccatgaacacttcaaaaagaggaaaactggaacaatttattacagcctttcttccctttatttgaatttcatgaaacaagcggcaccaaaaacatgtccaaagtgaccattttcgtcctctcacctgttactcagaaatcctagagatggaaggtgctttaacaagggagcttattcctcacttttcctgtgtttcaggctttttaaaatcacagattgctc

SEQ ID NO: 911765 - DNA, 479 bp, Homo sapiens
actcaaagcaatctacagattcaaagcaattcctatcaaataatcaatgtsatttttcacagaattagaaaaaaaattctaaaattcacatggaaccaaaaatgaacccaaacagccaaagcaatcctaagcaaaaagaaaatattggaggcattacattaccttacttcaaactatactataaggttacaataacccagtgtgctactggtataaaaatagacaaataaaccaatggaacagaatagaaaacccagaaataaagccacacacctacaaccaactgatcactgactaaagttggcaaaaataaacaatggggaaaggacattctatttaataaatggtgctgggaaaactggctaaccatatgcagaagaatgaaattgcactcctatctctcctatctctcaccattacaaaaattaagtccagatggattaaagacttagatgtgagatctcaaactaaaaaaaaat

SEQ ID NO: 911766 - DNA, 528 bp, Homo sapiens
cttaccaactacagaaatttatttctcacagttcttgaggctggtaagtccaagatcaaggcaccaatagatttgatgtccaatgagggttcacttgctgattcatagatgacacctctgactgtttcctcatgtggtggcaggagctagctagctctctgagatgaatctcttttataagagtactaattccaatcataagagctccaccctcaagacctaatcacctcccaaaggccccctcttctaataccatcaccttcgggattaccatttcaacatataaatttgggggcgacacaactgttcagaccatagcatctgccaaagaaaatcccattgacatcctccaacagagaaatttaaaagaaatcagaatactttcgcttaaattcataagtgccttatgaacaattttaaattccctgtaggctaaactacratggtcatttttaagatacattcaattaacaatagtatagggtaggataatgaaaatcacaataaaaccttgtaactactgatatc

SEQ ID NO: 911767 - DNA, 600 bp, Homo sapiens
cccaatagccagccataatgagaagtcaggaattccaaaacttgaattttagattttatcaaagaagcaggtggagatgaaaattatgggttatctgatatatttaattattcaaaatcgtaaacaaacgtactacacagaactctttataacaaattcttcatttttcagcatacactcacccaaacataaacctacaccactattctctagccggagccatagctgaaggtatttttaatgcctttcatgttagtgaaaatatctctgtagtagctatggacttgaactcagcagaccaagatatgagtctctattttctattaccagcaagcaagcactgacaagctgtttatcatctcctatcctttgtttcctcacttttaaaacaagcatagtcacactgcaggggcttttgaaaggaatatttgaaaagctcctgcacaagtcttagcaaagtaggctatcagaacaygaactttaatctgaatctcttctgttgtgtccaagactaaagaggagtctgacttgatctttggctcctttgacattgggagatcactgctacaaacaatcatactgtgagaagcccctgggatt

SEQ ID NO: 911768 - DNA, 509 bp, Homo sapiens
tttagacagatacaaacttagccatcatagttttgggtaaattttatattcacagttgtctgatttggtactgttcaaagctttttatgacaagatcataatgacaaaacttttaggtctcttggcagggaaatcaagaatgttcttggagcagctagttattttatatatagagagatatctatctatcgatataaataaaacatgtatacatatatatttatatataaaacacatatatacatatatacatgtaaaagtctatgtttacatatattgtttatctagttgtatgatcactctgcccttaaatgagataatttgattatatttgaaatcatgaaacgtgaaacaaatatgaaatccagattgttatagcatgatgtaactaaaagataattaatttccagatgtttttattcctttttatagtaatcttattttrctgcttatacttattgacatttactttatacaagctttgttctaatttcatctatctctctaga

SEQ ID NO: 911769 - DNA, 622 bp, Homo sapiens
acttgctaatgactaacttccttcccctccatgtgtccctgcagaggaagtaggcaagagagagcaagacccttggctcaacttcagccttttcccctytttcctttcccaaataccctctcctctcactccattagcattcttgattcttgaattcccatcaagttttcaggggaaggggaaatactatttcttgcactttttgttggcgaagaaactgatgctgtctgcctttcattgttctacccagcatccggtttggacttgactgagggcagtgatgaaggtgaacatccagttgtgtcccatgtcctttgaacaactgtctttacacagacaaaccattttggagactgtttatgcttacttgaagtatcagtagcaaactcactgcattacccccagtgagggccactgatggcattcaaaaagctgcaaaaacaaaaacaaaaatcaaactcataactaaaaaacccacaatgtcctcaatatattgattaaactttctgtatgactatagacatggaggagaagaaatcaacagagagagagaaataggctctagaaataggctctgctttcccaacagcaacaatggttgtgccttatcatgtgaataaca

SEQ ID NO: 911770 - DNA, 622 bp, Homo sapiens
acttgctaatgactaacttccttcccctccatgtgtccctgcagaggaagtaggcaagagagagcaagacccttggctcaacttcagccttttcccctttttcctttcccaaataccctctcctctcwctccattagcattcttgattcttgaattcccatcaagttttcaggggaaggggaaatactatttcttgcactttttgttggcgaagaaactgatgctgtctgcctttcattgttctacccagcatccggtttggacttgactgagggcagtgatgaaggtgaacatccagttgtgtcccatgtcctttgaacaactgtctttacacagacaaaccattttggagactgtttatgcttacttgaagtatcagtagcaaactcactgcattacccccagtgagggccactgatggcattcaaaaagctgcaaaaacaaaaacaaaaatcaaactcataactaaaaaacccacaatgtcctcaatatattgattaaactttctgtatgactatagacatggaggagaagaaatcaacagagagagagaaataggctctagaaataggctctgctttcccaacagcaacaatggttgtgccttatcatgtgaataaca

SEQ ID NO: 911771 - DNA, 566 bp, Homo sapiens
ttttcctagagtcatcagccttgagggtgactctgagaggtcctcggtttatacyggaggtagtagagtgaagtggttgattatacaggctcggaaatgaaaccagccaggattcaaatctcaactcttatgtcttaaatatgagatatgtacttagttactgtaatttcatggattttaagcttctttataaaaagagtaaaacttctaattcagagagatgttgtaggactaaacaagatattatgttttgaaagccttttgcagtgtttgcaaaacatatagtaaactgtcttgttcggtcttgttaataccgaatattttaaagcatatgattttaataataaatgagtgttattggttatggtctcattatcatcatccattcatccaaccatccatttcctcgtagatgatctacaggagtcctaatcatttctaagtcacattacacaagatttccttggtcaggaaaaggttttcacttaggacagaccattatctcctttattctctttcctctgaaattgccatgagaagaaaatgccacgaagaaccatgaaagg

SEQ ID NO: 911772 - DNA, 571 bp, Homo sapiens
cccctaggggagcattcatctgttttaaaaagcagggagagaaaacaagttctgtcaaacagtgaggtttggaaatyagaactgtacttacttgcctttcaggaggacatattctaaagagttgttttttgggtggaagagaaggaagtcatctcctctgcccccactccacccaaggcacaccacacacacacacacacacacacacacacacacacacacacacacacattttcacctccacccagaggttccttgtggcagatgtgaaggagtttagaacacagggttcccattataacccctttgttgtacgagaccaaacgtggcttttcagccctagagtaaatctttttctggcaggccactttcttggcctttatatccatgtctagggccctgggctggcattggccctgaaggccagggccagcctttggggattgcacttgagcatgtggtcagggacagcatctgagggcattttggacaggaaagatttctgattattaggctgttttcatcacacctatgcttcagggtcatagaactgaggattgccagggactga

SEQ ID NO: 911773 - DNA, 647 bp, Homo sapiens
gtttcaaaacatttatacattatataatgataaaattagagtaattagtaaatctgtcacctcaaacacttatcatttccttttggtgataagattcaaaattctctttcagctgttttgaaatatacaatacataattgttaactatagtcaccctactgtacaacagaacaccagaacttattctgtctaactgttggtttgtactctttgaccaacctcggcccatctccccactccctacccctccctagcctctggtaaccactgttctacttctatgtgatcaacttttttatattccacatatgagtgagattatgcagtatgtgtcttactgtgtctatctcacttaacatatcctttaggttcatctatgatgtctttaatgatggaatttcattttttatggccaaatagtattccattatatatagataatagattttctttatccattcataaattaatggacacttaggtggttttcatatcttgcctattttgaacagtgctggaataaacatgggaatactgatatctcttaaaatactgatttcatttcctttggctrtatacccagtaatggtattgctggatcatatggtagttctatttgtaatttttatctccatactgttgtacat

SEQ ID NO: 911774 - DNA, 541 bp, Homo sapiens
ataaaggggtgttgaattttatcaaagcccttttctgcatctattgagataatcacgtgatttttgtcattggttctgtttatgtgatgggttacatttattgatttgtatatgttgaatgagccttgcatcccagggatgaagccgacttgatatggtggataagctttttgatgtgctgctggattcgatttgccagtattttattgaggattttcacattgatgttcatcggggatattggcctgaaatttcctttttttttgggtctctgccaggttttgttatcaggataatgctgacctcataaaatgagttagggaggagtccctctttttctgttgtttggaaaagtttcagaaggaatggtaccagctcctctttgtacctctggtagaattcggctgtgaatccatctggtcctgggctctttttggtgggtaggctattaattactgcctcartttcagaacctgttattggtctattcagggattcgccttcttccttgtctagtcttgggagggtgcatgtgtccagg

SEQ ID NO: 911775 - DNA, 633 bp, Homo sapiens
gaattgattaaaactgtgttgtattaatacatgcgcttacaaatggagctgtccaacaaagtcgtaagcctataaaagtatagaatagcatcgctaatcggtgcagtgtgaattgactatatgcctgatggtgtaaggaaagttagattatgatctgaagaaagataaaagttgggtttctacatcacgcaatagatagaaataaaacctttaaatgtattaaaattgtaaatataaatggaataatactagaaaaaaactaaatgaaagaaaatatatttgtgaccttggggtagggaagaagtttttaagaccccaaaagcataagctacaatgaggaagtttggtggatttcactgcatcaaagtcaaaggtatttgttccatggatgacactacacacaacatgaataaaatggtgacacataagaagatgtgtttgtaatatcaaaaaaaagacaagaaataattatcacctagaatatataggagtttttgtaaatcagcaagaaaaataggaagctcagaggaaacatgggattaagggtaaaaacacacatttcacagaatagaaactcattcagttaagaagagtagaaaaaaatacarctaactttaccagtaattagattta

SEQ ID NO: 911776 - DNA, 588 bp, Homo sapiens
tggaaaattcatgaaatataagatgactttgtgcctgccatttgggggatgaaatagaaatttcagagagagaattcaagcaaagagacattacaataatttatgataggagttttcatktttagttttttatactgatggcagtggcggcccatctggaggagccactgcaaagacactggctgcaatggctaggtgcaaccatggctgtgtgctccatagagccagtgggggccaggaacaggcgggagccccagcccctaccaagttgatggggcaggagcccagtgttcctgggtgcaacagcagctgcccgactgtggctccagacctgggaatctctgcactctcggaggcctgggaagccctcctgccccaacaggcttagaagtgcctgcttctgccccctggcctctccctgctcccagtaccctctctgctgcagagcaaagttgtggctgaggctgggtgctgttgcaatgtggccaggtatgtgtattctcagaggtgctgacacgccagccccctgctgccttggccccctctagactttgggaacccaggagcatgggagggaagcaaaggagg

SEQ ID NO: 911777 - DNA, 644 bp, Homo sapiens
agaaattgcaacatcagtcaagagcaagatgagatttgagcccaaatattttrgggaaaggtcagttatgtcaaggaacacagagctgctctctccaaagcatatttaaataaaaatattcacgttttttccacctgccacaaactctttacactgccttcttttaaaatgatatagttgatgtttcatacctaagctacgatgttcaaacttaaacagcttggtgccacaatggggttgttgttcatgtgaaaaataatgcctcgttgttctatcaacaaaaaagtacatattataatgagttaaatgtaacatgccctttacacaacataaaaagtatttcttgcttcgtttttattacttttttatttttgaatcttttaaaatgcatcacacacttactttcctcctcaacagtatccaatttagcctttcgttgaagactaaagattgtcaggttaaacatcaattatgatacttccaactggattcaacacgtatttactcagggagcactcacagggaggcattatgccaagagaaatggcaatgctattcagtgtttatgatcccaactggagaggaaaggcagatgcataatttcaaaattcctggcagaacacagcaagttccattatataaac

SEQ ID NO: 911778 - DNA, 634 bp, Homo sapiens
ctatagcattactgataaggtttcttttttaaattttacacttaaaagtcctcrtctctgagttcattgctcacagaatctatttagaagtacgggttattttagatgttattagattaacaagattgattgttgtgctaattctttaagttaaaagtaaagttattttacatccattgtcaggactgttgtaatatactgatttcacgagaccatgatatcttatggctgccttctagaaaaatgtcataacaaatatataattcacctgtcctgggagtcaagaatgttagaataaaaatacgtaaaaaatcaacatgcaaagttgttagtgatgtaaagtgttgaggcttggatgggacatctttgcttgggtcacagtttcagcaaccacacagtgcccggcacctgacaacccctcagtatcatcacagtgtcactgatcaaattatgaaagagtattcttttctttttttcccctcttttatttttagttggcatgtaataatcatacatacttatgggatagagaggtatacttcaatagatgtatgcaatgtgtaatgaccaaatcaaagtaattagtacatacatcacctcaaatatttcttattttttttgtgttaggaatatc

SEQ ID NO: 911779 - DNA, 606 bp, Homo sapiens
ataaatccaagccctcctcccattgcaagtgccattgtccccactcagctgcaccatcatgatgacaaactgcccccatggcaagcaatggaagtgaaggtagaagaatggggggatggctgcatcccatcttggcctcccgtctttcaggctctcagtgtcacattctgtccagaccatccacaagcccttacagggttccaaacgaatgctcacttccctccacatcttggcacctttcctcacatctggcaccaacaggtcttattgtaccataaactctgcttgtctgtagggggaaaggaagacaagatggcttgaggtgaaaggaaataaagtatattaacccaagtaaatttggctgcagatgtcaccacttatgcaaggagtgcctgacagctcccccgactccagttgaagtctcccaccgctgttcttctagatgggagtgcagtgctcccctgcatctcatctccccaactcctcacaacctccatttcctcaggcataaatttggggaagcgttgtctacattayggaacgattgtcaggattaaatgagaacatacgtgtgaaaccctcacacattgtccagcatgtagtcac

SEQ ID NO: 911780 - DNA, 616 bp, Homo sapiens
gttttggacaagggcacataagcagaaactgctcctcctgatggggaaagcaccagaacattgctactcctcaagaagagacyatatatatatatatatatatatatatatatatatatatatatatatatatatatatatatatatttgcgcttaatcagggagaaagaaaaagaaggcacttactacctgggtctacatttggcatcataaagagtttctttgggttacccctcctgttgaatgttactggttacacatttgttaaaatgtgtccatttttttaatccaaaaatttactttcaggagtaatcatgggtaaaatatagggcatacctaagggagtgaagtatcgctcaccaaccttgagtgaccttgcttccacatgattttgttttgcaaattctggtctgttcattgacagaacaacaaccacattgatgtgagctcctcatacatcttcagccaaggcacacagaaaaaggaaatgcctgacaaacaacccttctgagtgaagaatgatgggatctaatgccaggtgagaagagtccttatctggttgggatccaaaggctactcttattttttatttttttaattaaaaaaatacattttg

SEQ ID NO: 911781 - DNA, 630 bp, Homo sapiens
ccctggctccctttgtttaactcagtgttctccgagcttattggactgaggaccatcaggtgcccacagaccagggccagggcaatcctgctcagtttcactgagcgctgcttgctcrgatcccgactcccgtgagaagtcaggatgtggttcctgctcagagggtttcccagttctgtgcaaaagttggcatgcctgcagagacacagtgaggtcccagagcaaagtagagggcatcagagcatgggctctgcaagccactgtcgggggctgagtcctggctctgctcagtagtgctactaagaaaattgcttatcctttctgtgtctcagtttcctcatctgtaaaaggggtgcaatgataatacctgtctcacaagtgtctgtgtagattgggcacatgaggcaatatgtgtaaagcacttagaacagcacccgacacacaggacatgccccaaattggtagctgttgttcttaggaactcaggtgctttcggcagctctggctagagtggagccttagacctcttgtgcattacagcaaggggagggcatctccacatgtgcttattacttctccaagtagaaactgtgagtccatggaacaatgcagttacaccttctcctttct

SEQ ID NO: 911782 - DNA, 610 bp, Homo sapiens
tgtagaagtgttcatctctgtgtgacagagggactgctgtgaaacsccagcatgtggggttaaagtgagattattatatatatttaaagggagattcattttgtgtcccatgtctggtggcaatattatttgggataataatattaatcagtattcaaaactttccgttatttaagtgtcagatgatcactgtgtgagtttaattttgttcagggaggcaagagtgaatggtaggtgaggccttcgactctgacatctgatgtttgccccatgtgacttcagcagctggtcacccctcaagcaccaggttccacctttctccaaacagggaaagccatgctgcctgcttcaccagtaagagtagacgagatgatggatacagaaccccaactgtcctatgcacacatcatccatgctcacttggaggctggtgttatttctcatgctcaggtgttgcttgtggaagtcaggcatattatttaaacattttatttgctttaatatacagtgtaaccagggtcataatttcacatgtcttggaaaatacttttcagtgcaaggaagccgtctgcattcccagcatggaaactaattttcccagtaccatgcg

SEQ ID NO: 911783 - DNA, 605 bp, Homo sapiens
actagcagtaacgaactagaaaatgtataaggtacctgccaataaatataacaaaagctatccaaaaccttatggaaaaaacktcaaacattattaaaagattttttaaatctctacataattggagagatgtccctttttcatggatgagtcttgatatcttgaagatgttagttttctccaaaattaatttataatttttttttttcttgagacaaggtctcactctgttacccaggctggagtgcagtggtgcaatcttggctcactgcagctttgaactcctgggctcaagtggtcctcccacctcagcctccccagtagctgggactacagacacatgccaccacgcctgactaatttttgtattttcggcagaaatagggtctttctgtgttgaccaggcaggttttgaactcctgggctcaaacagttctcccacctcggcctcccaaagtcctgggattacagacatgagccacagggcctggccagtttataaatttaatgtaacattgatccagattccaagaggatgttttgagaatggaacttgacatgattttaaaagtcatatggaaaagcaaatgtctaagcatggtcca

SEQ ID NO: 911784 - DNA, 637 bp, Homo sapiens
atacagattaaatagctattctattctaaatgcaaacacaatagcgcaatacagagctattgtttaattattttaaatagactgtaattttgaatatttctagtgtgayggttttccccaactcctctgccataagccatgctgcaaatgtgagaacaagaacaagtcagtgtaaacacacaccattacaccaccaaagagaggcttggaccttaaatagataagggttttttgcaactgcaaatctgtattgacatcctaataatttccttgcttacagaacatcagagatagacgggaccttcaaagagaatttactctagcacctttattgtacattgggcaacctgagtgggtcagtagattatcacatagctatttagaggaaaagattaggtaagaatgcagggctgctctcttctactctaatgttctctccaccagaccgtatccatgtctatgaccttagaaaaccaaagcagttttgtatacatgaaattatttgccaaccttgaatgaaaatgggaaggaccccatgatcaatacagaggaatctaatgttgatattttacaaaacgaaactaggtaaaactcaattttttgtgtccattacaaagaatactagctactttatatt

SEQ ID NO: 911785 - DNA, 637 bp, Homo sapiens
atacagattaaatagctattctattctaaatgcaaacacaatagcgcaatacagagctattgtttaattattttaaatagactgtaattttgaatatttctagtgtgacggttttccccaactcctctgcmataagccatgctgcaaatgtgagaacaagaacaagtcagtgtaaacacacaccattacaccaccaaagagaggcttggaccttaaatagataagggttttttgcaactgcaaatctgtattgacatcctaataatttccttgcttacagaacatcagagatagacgggaccttcaaagagaatttactctagcacctttattgtacattgggcaacctgagtgggtcagtagattatcacatagctatttagaggaaaagattaggtaagaatgcagggctgctctcttctactctaatgttctctccaccagaccgtatccatgtctatgaccttagaaaaccaaagcagttttgtatacatgaaattatttgccaaccttgaatgaaaatgggaaggaccccatgatcaatacagaggaatctaatgttgatattttacaaaacgaaactaggtaaaactcaattttttgtgtccattacaaagaatactagctactttatatt

SEQ ID NO: 911786 - DNA, 568 bp, Homo sapiens
caaccccattttacagatgaggaaatggaagcttgcagagttaagtagtctgcacaatcaatgytgataaatacaagaggcaggatttatacccaggcagtctgattccagatcctgttctcttagtctttagcacttaccgtctctctattcaaatataacatagagaaattaatttgtctgcatcaaatcaatttgtaagtatcataaaatgctagatatgatataattttgtgaagaaaatgattctgtattttctcattatttccttctggtgaatctatttctcttctattacaatctgatcagtcttacaggaaagcaaaatcaaatattactgggtacattgtctgtggtaaataacaattttaagatgctaaacctaccagtatttagcaatatttcacttagattatatactaattatacctacatattatgctgcttaggatgtatattatttataacaagccattgttgaagagtgattagttctacaagggctggtccttggcttgatatttgtcaatttttttttccttttccttttagctgacatgtaataagt

SEQ ID NO: 911787 - DNA, 539 bp, Homo sapiens
ggtttctagcttcatccatgtccctgcaaaggacattaactcatcctttttatggctgtatagtactccgtggtatgtatgtgccacatttctttatscagtctatcactgatgggcatttgggttggttccaagactttgctattgtgaacagtgctgcaataaacacacttgtacatgtgtttttatggtaaaatgatttatagtcctttgggtatatacccagtaatgggaatgctgggtcaaatggtatttctagttctacatccttgaggaatcgccacactgtcttccaaaatggttgaactaattcacactcccaccaacagtgtaaaagcattcctatttctccacatcctctccagcatctgttatttcctgactttttaatgatcaccattctaactggcgtgagatagtatctcattgtggtttggatttgcatttctctaatgacaagtgatgataagcatgttttcttaagtttgttggctgcataaatgtcttttgagaaatgtctgttcatatactttgctcat

SEQ ID NO: 911788 - DNA, 603 bp, Homo sapiens
aatacccagtttattgagactttttagcatgaaggagagttgaattttatcaaaggcgttttctgcatctattgagataatcatgtggtttttgtcattggttctgtttatgtgatggattatgtttattgatttgcgtatgttgaaccagccttgcatcccagggatgaaaccgagttgatcatggtggataagctttttgatgtgctgctggatttggtatgccaatattttattgaggattttcacattgattttcatcaggggtattggcctaacaatttgttgttttgtctctgccaggtttttgtatcaggatgatgctgacctcatgaatgagttagggaggattccctctttttctattgattggaatagtttcagaaggaatggtaccagctcctttttgtacctctggtagaattcagctgtgaatcggtctggtcctttttttggctggtaggatattaattactgccacaacttcagaacttgttattgttctattcagagattcgacttcttcttrgtttagtcttgggagggtgtatgtgtccaggaatttatcgatttcttctagattttctagtttatttgcataga

SEQ ID NO: 911789 - DNA, 644 bp, Homo sapiens
taatcctttgggtatatacccagtaatgggatggctgggtcaaatggtagttctagatccctgaggaatcgccacactgacttccacaatggttgaactactttacagtcccaccaacagtataaaagtgttcctatttctccacatcctctctagcacctgttgtttcctgacattctaatgatcaccattctaactggtgtgaggtggtatctcattgtggttttgatttgcatttctctgatggccagtgatgataagcatttttttcatgtgtctgttggctgataaatgtcttcttttgagaagtgtctgttcatatccttcgcccactttttgatggggctgtttatttttttcttgtagatttgagttcaaagaacatctttattcctgtcttcattttgttatttaccccagtagtcattcaggagcaggttgttcagtttccatgtagttgtgcggttttgagtgagtttcttaatcctgagttctaatttgattgtactgtggtctgagagacrgtttgttgtgatttctgttcttttacatttgctgagaagtgttttacttccaattatgtggttgattttagaataagtgtgatgtggtgctgagaagaatgtatattctgttgatttggg

SEQ ID NO: 911790 - DNA, 676 bp, Homo sapiens
gcaagtatttttcactgttgcctggataaacaacctgaggtccaggcagrttaagaaatgactagtgaggggaggacatagaattgaaacttctagtcctgaccttggtcctcttttcaccatatcatagcttttagtatattcagctctctcttgaaataaaatttgcctatctgcaactctcacttggtggtattatttctgatctctagatttaaacagaaaaaaaaagttcctattggtttgtttgtgtgttgcatttcaaacagaacttgaactggctaataccttatgtaatggcatctcttcttcaagctaagcatagtcatttctttcaagcaggaaggtccaaagaagtgaaaaaacagagatgtggaggaaagattcctaatacactttccttccaggaggactcagcaggaacactctctggcttcctgggcagcaaatccaaccaggaggatcttaattaagagtcttgctttaagtgtatatagatttaaattttaaaaaagaaagatatgtgtgtgtgtgtatatatatgtatatatacacacatatatatatatatatttaagtacatttgctcatgtatggttgctgaaatgaaaataccatcatgggccatgcacagtggctcacacctgtaatcccagcactttgagaggccaaggtg

SEQ ID NO: 911791 - DNA, 633 bp, Homo sapiens
aatcaaaactacaatgaaatgttttaccctagttaaaayggtatttataaaaaaataaagaatattgatgctagtgaggatgtggagaaaggggaacccttgcacactattggtgcaggtacaaattagtatagccactgtggataactgtatgaaggttcctcaataaatgaaaaaatcacaactaccttaggatccagcaattccactgctgggtataaagccaagagaaaaaataatgagtaaatcaaagaaatatgtacattcctcatttactgtagcaccctttacaaaaaaaataaaaattgaatcaacctaattgcctgtcaatgtatgaatggataaaggaaatgtgatatatatacacaatgaaataatattcagccataaaaagaacaaaattctgtcatttgcagcaatattaatgaaactgtatatcattatattaagtgagataagccaagcagagcaagacatatatcacatattctcactcctatgtgggagctaaaaaaggagatcttatgaagacagacagtaaattggtgttttccaaaggccagaaagggtagagagtagaaggggttgaagaaagtttgatgaatgggtacgaactaacagttttatacgtac

SEQ ID NO: 911792 - DNA, 690 bp, Homo sapiens
accatcttctcaacaacccccatcctctccctggtcactagcaggggccccacaaccctccacactcagctcctgcagatggtggggcaacccggggtccaagtcctgccttgtaagtccaggaccatggtgcctgcctggaactccatctccctctgcactcttatcctgggcaagaactctggggccagaggggctggaccctgagtgacaacatcactacttatcagccgccatcttaagcaagccaccttccctctctgagtctcagtttcctcccttgtaaaatggagatactaatacccttctacctacccgaggtcaccgttgagattagttgagatacaatggctaagcccttggcacatgaggtgtgctcaggaattgttaactactgctctggtcatggagggttatggccacttcagcctgtgctacctctaaatgggccccatgattccctctgtctctgcctccacttgttagcccttgagccatgctttctggaaccttcaccctgacaagatgacaaagagaagccccagggagggacttgggtytcttgactctctctggcctgtgggacattcatctcccctccccaggcagccacagcctattagtccagttccaactggccttctgcctcagtttccccattgtgctgaggcaaaggacccttgctcagca

SEQ ID NO: 911793 - DNA, 566 bp, Homo sapiens
cacctatagtcccagctactcgggaggctgaggcaggagaatggcrtgaacccggaaggtggagcttgcagtcagccgagattgcgccactgcactccagcctgggtgacagagtgagactccgtctcaaaaaaaaaaaaaaaaaaaaaaaaaagctttctagacaggaatcaaaacgacgaaattaacaacagaaacctggacatcctataagaataggaacacttagaattccgaatccaatgcttcagtttcatcatgattgtactttgcttattgaaagtagagtgaggagtctctacggtctaaggattgaatctaaaatgttaaatctgtatggctgtttgaagccatctttgaaagcagagtcctatgacaatagtgctgaaatcaagaagaaaaaatagtgcttttagtgtttacagactattatctgtgtaatgtgaccagtttttgtagaggggctttggagtaatagtcccatcaatggacagtggtcatttcccagcctttaattatttctgttcatttgcttatggctatggctctgcattgatttttctttc

SEQ ID NO: 911794 - DNA, 557 bp, Homo sapiens
gctaccccataaagacaactgctattctgacttgtaacaccatggactagttttgcacattgttgttgaactttgtagaaatggaattgccatatgtaytcttttgtgtctggtttatttcactgaacattatgtatgagattcatccctgttgttacatgtagcaatacattccttttttaccttttttgtttaagaatcgtaagcacagaaaagtgtccagaagtttatatcaaactactgagtggcaatttcagaaaaagagaatggaatcaagaggaaaatgaagggtgggcctgctttcaactttttatgcctctatttgaatattttcataatgagcatgttttacttttataattttattttaaagaaagggactcactctatcacccagtctgcagtgcagtgcatgatcatggctcactgcagccttgaccacctgggttcaagcgatcctcccacctcagcccctgagtagccgggactacaggtgagtgccagcacacctgactaatttctttttttttttttttttttttagagatagggtccca

SEQ ID NO: 911795 - DNA, 248 bp, Homo sapiens
tttaaacatatgtatagattcatgacagagaggagttccataacccctcaaatctccttgtgctatccttttgcaatcacatcttcctttctcccccacacctagcaagcactgatctgttctccatcactgtagtgttgtctttttgagaatgccatataaatgcawtcaaacagtctgtaaccttttaagataggctattttatttttttactcagcataatgcctttgaggttcatgcagatttg

SEQ ID NO: 911796 - DNA, 553 bp, Homo sapiens
acatttaatataattactgataaggcatagtctatgtatgccacaatgctacttgttctccatgtcttargcttttttgttgctcgattcctccattactgcattctttttttattaaatagatatcttccactgtaccattttaattttcttgttagtttacatatataaaaatgtattatatacatgtataaatatgtgtatatatatgtatgtgtgtgtatatatatgtatatgtatatttttttttttagtggttgcctgagtattataattaacatcttaacttttaacaatacagtttggattaatatcaacttaatttcaatagtatatgttatggtttggatatggtttgttcatccccaccaaaactcatttaaaacttgatccataatgtggcagtgttgggaggtgggcctagttggagttgtttgggtcatgagagaagattcctcatgaatggcttgatgccattctcatggtagtgagttctcactctggcaaaactggattagttcttgcagaaatggattagttcctgcaagagtgg

SEQ ID NO: 911797 - DNA, 683 bp, Homo sapiens
aggcatgactcttttccttccattcttcacttgcagccagartgatctcatcaaaatgcaaatcttactatgttaaccgtcctatttagaatacttcagtgactttccatttctcttgataaagatcaatatccttaacatggtcttcaaaactctgcaaggtcaggtctgagcataactccatcatgtcccaacatgacatggagctatgtctgccctccagttacaatggctttatttcataatttgaaccttatgtgcccctccaccattggtcctttgcatatgatgctccctcagctcaaatactgtcttccagtacctcccaccactttcaccaccactttcacaattatttgattaatttctactcatccttcaaatgactgccctcaggataccatacataagtcctttatggtactgatcataattataagttcaaattcatttgtaagatcatttgattaaagcctatctcccttctagactgtaagttcaatgtgagcaagaactaaatctatatcaatatatatttgtttaactcatgaatgaataaatagcacacttactaaaacctaccaaaatttttttaaaagccttagagaacaatagaaaattcttatatagcagaaattccagaaaaagtagctctctgatgccatgaatactatctaaatgga

SEQ ID NO: 911798 - DNA, 483 bp, Homo sapiens
taaaataatatctaaagccttcccaaatcttggaaaagaaattgatatccaggttcaggaagctcaaaaaacctcaagtcaattcaaaccaaacaggtcctctccaaaacacattatatcaaattgtcaaaagtcaaagacaaagaaacaattctaaaaacagcaagagaaaagcatcaaatcaaatatacagcaatctccaatagattaacagggaatttctcagcagaaacttttcagaccaggacagagtgggatgatatattaaaagtactgaaagaaaaaaacggtcagcccagaatattatagccagcaaaactatccttcagaaatgaaggagaaaaaaatcattcacaggcaagcaaaaactaaggtaattcatcaccaataaaccagcctcaaaataamcaataagagagaaagtaaggaacaaatgatatacaaaacaactagaaaacaatcaataaagtgacaggagtaagt

SEQ ID NO: 911799 - DNA, 406 bp, Homo sapiens
cagagtatgaagctgtgcttagctcggattgccagtatcaggaaaattcagtatttttctaaccaactgttgttytatcttatgaatattgagactcttataaatgaacatgtttctatattctttggtcacttcaaaagtcagatcaacctctctttatcatatggtatttagtatcctatattaactgtatcttattttcttgccccattttcccttcactcctatttccacatatgttcaatgtttattccataaaatggtatttctataagttgtctcagatctattttcagaacgaggcaggagcaaaacgaattactgctcaaaatcaataataaatggtcaaaggaactatagcctgttgtcatgggagccagtaggtcccacacctatctctatggtc

SEQ ID NO: 911800 - DNA, 531 bp, Homo sapiens
ctcccttacagaggaaacctcttaaaaatggggaagagggccgggcgcagtggctcacacctgtaatcccagcactttgggaggccsaggacggtggatcacttgaggtcaggagttcaagaccggcctggccaacatggcaaaaccctgtctctactaaaaatacaaaaattagccaggcgtgggagcacacctgtaatcccagctacttgggaggctgaagcaggagaatcgcttgaacccgggaggcagagatttcagtgagccaggactgcaccactgcactccagccggagtgacaaagcgagactccatctcaaaaaaaaaaaagagcttggggccatggcactgtcactgggcttgagaaattcagccttgtctcataacatctgacttaggatgtcctgtggtttaatacttctctgtgggaggataggtgtttaatggagcaaaaagagaagtgatatccatgggcaggactaaggtgtatgaagggaagagtaagaaagccataggtgcctggagccaaag

SEQ ID NO: 911801 - DNA, 578 bp, Homo sapiens
cagaaatatggttctaaggagtgaggcattgctataaagatacattaaaatggggaagcagcttttgaactgggtaatagacagaggtgggaagagaccataggactcaraagaagacataaaggtgagaaaatgtttggaccttcttcgagactagttaaatagttgtgaccaaaatgttgatagtgggttgggcctggtggctcacacttgtaatcccaggattctggggggcctcagtgggtggatcacttgaggtcaagaatttaaaaaaaatacaaaaatttagctgggcatggtggtgggtgcctataatccgagctacttgggaggctgaggttgggggggaatcacttgaacccgggaagtggaggtttcagtgagccgagattgtgtcactgcactccagcctgggtgacagaggaaaactctgtctcaaaataaaaataaaaataataaacacttatagtaatatggacagtgaagtccaggctaacaaggtctcagattgaaataagaaatttattgggaactggagcaaaggtcgcccttgttatgtcttagcaaaaaacttagtt

SEQ ID NO: 911802 - DNA, 630 bp, Homo sapiens
aatagatgcagaaaaggcctttgacaaaattcaactccccttcatgctaaaaactctcaataaactagattttgatggaatgwatctcaaaatagtaagaggtatttatgacaaaccacagccaaaattatactgaatgggcaaaaatggaagcattccctttgaaaactggcacaagacaaggatgccctctctcaccacttctatttaacataatattggaagttctgaccagggcaatcaggcaagagaaagaaataaaataaaaggtattcaaacaggaagagagaaaatcaaattttgtctgtttgcagattacatgattgtagatttagaaaactccaaccaaagtaaaaatggccaaatgggattatatcacgtaaaaaggttcagcacagcaagggacccattcaataaagtgaaaagataccccccagataggaagaaaatatttgaaaactacccctctaacaggggattaacaaccagactatataaggagctcaaacaactctctaggaacaaatctaataatttagttttaaagtgggcaaaagatttgaatagacgtttcccaacagaagacatacaaatggaaaacagacatatgaaaaagtgctcaatatcact

SEQ ID NO: 911803 - DNA, 637 bp, Homo sapiens
tgacggaacaaaacatcaaggttcacattcttcctgcacaatcatatgtatgttgttatttctccttgaaaagcacattttccttttgtgaggagatcacagttgctcaggaaaaattttccttccaggcctgttacttatttttccctttgaaaatgttttcgtgttggcatagtgatttcctaaattgctcagggtagagtctatctcctcctaagatgggtttccctggaccacagattccaagtcaatgtcttcattagaaagaccagaatccaggacaccctgagtcagttctgggaatgtgaacaaatatgtacagaaacagggaggttattttgttttttaaacttgtttcttgagtacaaatgtaaatcagaatgttattttcagaatggaggccttaggtaaaaaattaacctccatgttgtgtcttagacacaagccatttgatttcctttttgaatgtgatggcttctcttggtggacaattttagaaatttcatagacttttaatttaattttttattaaatacttgrcgtttcagttaaatatttttgatattaaattaggcaagttaaaggtagagaaaatcttaacatgtaaggaatataaatatatcaaaagccctaaaag

SEQ ID NO: 911804 - DNA, 623 bp, Homo sapiens
acagtcttacagactatgcaatagaacgctcctattttgcctcatctctgccaacctccaataacatcttccacgttataagctagggaacctgaaaaacgaaaacctaagtgcatgtcgttgctatggcaatgggaaatttcaggaaattgagactgcaggctacctagcctccattttagaaactgtatttatctaaacacaccaggacttagatcgaaaaacacatttaatggcatttttcataactatttagcttcctctttcacactaaaaggtaaatactatcctacaaaattctgaatacaaagagcaaaagaaacaaatcacactgatctaacctaaaagtgtgaattttaaaatatttagttgtcactcatatttactattaaaacagatgcttttatttacagtggccaaaacagacttctcattttcaacttatacctgcaatgtttatgtagctggaaaaatgaaaacgaaatgtggctaaaagaaaagaaaacgaaagaaagccacaaaattcccaaaacctcagcataacttgcttctttcttcactcgctctcattargtcttaattctccagattagctttgtctcaaatatttctcaaactagtaa

SEQ ID NO: 911805 - DNA, 683 bp, Homo sapiens
ttatgggaagaggcatttgaatgttggtagtgtccattttgtcatcctgtagcagagatatctgtttgcactcttcttcccatgcagagtattctaaaccatcccccagaaagacaacccaatgtcctacccagtcagtacatggagctgaaggtctaagacctctggttgatgatcagtactccccacaagacccaactgtggcttctcagcatctagaaatcaatatcccggtagacaagttgtccgtgccttccatccaacagcagtgctgtgggatggggacaggttaattgcaacacagtctcaaggacagaaaagaataaagagagaacaccacacactggggactattggaaggtggaggctgggaggagagagagaatcaggagaaataactaatgggtactaggcttaatacctgggtgaccaaataatctttacaacaaccccccacccccgacacaaatttacctatataacaaacctgcacatctacccctgaacttaaaagtttttttaaaaaacttaaaaacaattagaaaacaatatgatttaaaaaataaaaatatagagaataaaaagaggaagacaagtgcactcctggtccacagcatttaagaactaatgctatatatgyttgtcaaaactcactaaattctgtaataaaagggtgaatttta

SEQ ID NO: 911806 - DNA, 613 bp, Homo sapiens
ggactactgaaattactatggaaatgtgagtgtgtttatataagcatttctggaaagcagattcataatttttatcaggttatccatcgaaggattacatgagtcagaaaaggttaataattgtcaacattcttatggaccaatgaacagattttgtaacatgaacatttaaagagtcttcattaaaataaaaaaacttgccaggcacagtgtctcatgccttaatcctggcactctgggaggctgaggtgggaggatcacttgagcctaggagtttgagaccagccctggcaagataatgagaccctgtctctataaaaaattgaaaaattaaccgggcagggtaccatgtgcctgtagtttccagctactgaggaggctgaggtgggtgggaggattgcttgagactggaggtcgaggctgccactgcattccagtgaagactggatgacagagctaatgtgatttttaaatcatatttaagacttaaatatataaayaaactaccacaacaaaaattaaaaaggaaatgatgtaatagggttcttccatttctgaccaaaatggagtagggactagatttactctgctgcttgaaactaccaaaaaatgg

SEQ ID NO: 911807 - DNA, 665 bp, Homo sapiens
agacttgcaaatactatcttaacacccattattttaacctgataacaacctaacactgtttgcataaacaaacaagcaagccaaaaaaagtaattaaaactctatgcattaactttatttttccacttaacttgttgttgtttctatttatatcttattatactatgtcttgaaaagttgtcatagatattgtttttgattcattctttgtttagttttttttttttacttaggataatggtatgttacacactacagttacagtattataatattttatttttcccatgtactgttaccagtgagttttgtatcttcaggtgatctctaattgttcattaatgttattttctttctgatcaaaatacttcccttagcatttcttgtagaaaaggtctggtgttgatgaaatccttttttttaatctggtaatatatttatttctccttcatttttgaaggatatttttcaccagatatactattctaaggcaaaagggttttttgttgttgttttgttttctttagcactttaaatatgtcatgccattctcacctggcctgtaagattttcactgaaaatcctgctgccagacgtattgsagctccactgtatgttagttgcttattttctcttgctgcttttaggatccattctttatgctt

SEQ ID NO: 911808 - DNA, 619 bp, Homo sapiens
ttatggtgtaaaataactgcacttgcctagggtagaaggaataatcaggagaaattgaaattctagaaccaaaagcagtgttgtgcgggggttacttctcccctccagcccacttcaatcatcaatcttctcacaatgtatccagtatgttcttaggagctcattaagcctccagctacattctttaaaatctagactctccttcgtcaactgtaagcatgcggaatttcagaacagaccatgggatgaagtatttgggaaaaccttaatgttataattagattatggattcagttacttctgcattagcgtatctagcgatcctgttgtttcctatctcaaacctgcttcttccccagacccacgtgtcaatgaatggcaccactgttaactcagttgctcaaccttaaaacctaagaacttactttgattcatctatttttctctattaacaaacagatggtctttattttcaaaatacattcacaatttctatcttcttacttcctacactactcttatcctagaggaagctgccatcatctcttacctggatgactgatcctgttttactctagccccacagkctattgatacttcagccagattgatctttcta

SEQ ID NO: 911809 - DNA, 573 bp, Homo sapiens
ccacctacccacaaagaactttctccctcagctcttattcacccaccctacctccactcctcatatcccttgtcatctccctgctcccaagttctactctttgctcaattttaatttaaattttctacttcttttttctttcctcctccatgagtattgttatgtttactaaaatatttgtaattttaaatgtcattgcttatttaaaggcatgtcctggtcattatggaaaattcaggcaaaataaaaatgaaatgtaagctcatcagatagagaccgtctccattaacacttgctgtataacatttactattcttcctaacttcccccacatttgtttttatttcttcttcaaagcagttagagattataattagattgatttctatagtgccttgtttattcatcctcagtattgtgataagtggatggagcaattgctcacaaaagaaagaaaactgatgatatttaaacmaagtcctgcgaacattattaaaatttcaataacataactttaagcttgtatataataatatttaaggtttacaaggcaatttcccattcacaattgta

SEQ ID NO: 911810 - DNA, 600 bp, Homo sapiens
ctgcatatggctagccagttcttatagcaccatttattgaatagggagtcctttccccattgcttgtatttgtcagttttgtcaaagatcagatggttgtaggtgtgtggtcttacttctgggttctctattcttttccattggcctatgtgtctgtttttgtagcagtaccatgctgttttggttactgtagtcctgtagtgcagtttgaagtcaggtagcatgatacctgcaactttgttttttgtttctttgtttgtttgttttttaggattttcttggctatttgggctcttttttggttccacgtgaactttaaaatacctttttctaattctgtgaagaatgtcagtggtagtttaatgggaattgcattgaatctgtaaattgctttgggcagtatggccattttcacaatattaattcttcctatccatgagcatggaatatttttccatgtttatgtcatctgtgatttctttgagcagtggtttatagttctccttgaaaaggtctttcactttgcttcttagctatattcctaggtattttattccttctgwagcaatccattcattgaatgaataagacttcactcat

SEQ ID NO: 911811 - DNA, 614 bp, Homo sapiens
acctagaagttgcagtgggaatttttttttaatttgaaagattaaataggtaaaaagtcatctttaatctctattaaacttttttgtrtaatgtcagaagtgaaagttccccacatctgcttacagcctgtttgtatccttcctgacttgattgattaaatggacatctctatatacatatgcatataatttcaatttttgcttagtaacaaaaacaaaagttacacatactggtgactaatttgcttttttcacgtatgtcatgaaccattttccagggcagttcatctagatctccctcaattctttttaatggctacatattccactattatggatgtaccatatttatacaaccggttccctattgatggacatatggttgtgtctagttttttgctagcattgtgatagattagagcctgtaatgaatggtaaggaagtaagtagatgatagcactactactttgaaggaaaaagtagagaataaacttcctttgccatagtcacttactaaatggaatttaataaaaacactgtcaaaagttgggaggaccaaaattgatactttttctctgatctttttgccatgtgtatatctgaattctttgttt

SEQ ID NO: 911812 - DNA, 618 bp, Homo sapiens
gtatatttatcacataatattctcaggaagtatgtgtctcattcagtcagtatcaaatataagagaaaatatcttcatttagagctgctratcttagaggttaataatcattaagtagaaatatattttcataatgagtttgccgtagcatgaagttgagccacaatgcaaaaataagtggcattgaaagtgcgctattctatatatgtacacccaattatagttgtgctggacacaccagggaactgaactgaattattgaagaaacgtcctgttttcttcttactttccattcaaaagactgcattatcacagcacagtcccctccctttttatactttgagttcaggggagtatttttaagtgtttaagtttaaaaggtctgctactaagttaaatgggatcaagtatataaagtgcttagtacaagcctgccccaccataaacctcctttaaagtggagcaatgtctctttttcatgttggaggcttcaggcattatggaagagaaaagtaaacaagagctggtgctcaatcttgtcgacaattgggaaatgagtctgtaacaaaaatagagtggaacgtgggagtgaagtgtttttgcctttgacaagtcatt

SEQ ID NO: 911813 - DNA, 648 bp, Homo sapiens
ttagtaggtaagaaacatgcaaaatattataactsaatttgttacactatgttgcagttttagttatggcagggtagaggagcacaatgctaggaatgggtctccaggcagacactctgggcttgaataactattctgcccttacaggccatgcaatcctgacaagtcacttggctgctgtgtgcctagtttcatcatctgcaatatgcaaataataaaagataatttattagagttgaggtgagcagtaatgagttcatagaagaaaagtgctaggaacagtacaggacacatagtaaatcctacataagtgtaagctaggagctatgatggctttgctcaaagttctcaacagttttcagacagacacttgaaaaaatggtcactctttaatctgtagctatatatgtattttaatgacaatgattctcaattgtcaggacaggccatcaccgaagatatcaatcttaaaaaagatttgcagtttaaaaacactcttctaactaactggggcagggaaagtacaaaataagtttgaagtaactatttgcaccggaaagtaaggaagtactcaaagaatcatgaggacatctcaacactgaagccagcccagacaagcctgcctccactaacctattctaggataat

SEQ ID NO: 911814 - DNA, 667 bp, Homo sapiens
gaaagtaacactgttttagtgaacaaccaattgtatcacagaggaaaaggcagtttagaaagtgcccccagtgttgtgaaccttgtcataktgttacgagaaagccgaagggtctggagatactggagtagtcatcattcttattgaatattcacatttgctttcatgtgttttcctgtcttttcttatctaaacaattctgcaacttatgcctatgcagacagttaccactcatgttcaggtttcataagaatctcgtattttactggaaatgtttactttagaaacataatttcatcataactgtcatgaatcttgatttttattctctcagattttgcttatcaaaggggaacaaaaggaaaagaaaagaaaagaaaaatccaaagcttggcattgttactattaatccccctagatggcatgctagcatcttttactaatgtgatttcactgaatgtactttaacagtctctaaaaatgagtaacaagaactattcatccaggacctgttttgggagaactgtgaaaagtttaatgttataacacaaaatgacagtcacatctgtatatgtccatacctggataaatagttcttgtaagaaaaagagaacattttcaagactaataaaatgccatttgaaacactatagtttattataatatg

SEQ ID NO: 911815 - DNA, 624 bp, Homo sapiens
aacaggcagggcagaaaccacagcccagctctgcagcwccttcctacctctggactgtgcacacgccggcccctttccctggaatgtgcttccacctgatgaactccaattccggggtaaatgctgctgccttccaaaacaggtcgggatccctgtaatgagcccccagaacacccactatggtccactgtggcctgtgccataattgtgattaaaatggcccatcatttaattttacattgcttgtccatgcccctccaccggactgtaagctccctgagggcagaaaccaagatctgggtgtgacactgctgcatccccagtgcccagatgaggcatttaatcaatatgtatggcttgaatgaatgaggagaaaaccgaggctgggcaaggttaagtcagtaagtggtagagcactcctctcagtctgatcctcacagaccagattctttcttccacaccacactgccttcctcaatgtagggatatcagacactatgccccagatgccactgaggggcagaaagggctttgctgtcagctctggcaacagtggtttgggtctatagtagttgcccccaggagaacagaagaggagaagggcaccagaagcaaaaagagctc

SEQ ID NO: 911816 - DNA, 624 bp, Homo sapiens
aacaggcagggcagaaaccacagcccagctctgcagctmcttcctacctctggactgtgcacacgccggcccctttccctggaatgtgcttccacctgatgaactccaattccggggtaaatgctgctgccttccaaaacaggtcgggatccctgtaatgagcccccagaacacccactatggtccactgtggcctgtgccataattgtgattaaaatggcccatcatttaattttacattgcttgtccatgcccctccaccggactgtaagctccctgagggcagaaaccaagatctgggtgtgacactgctgcatccccagtgcccagatgaggcatttaatcaatatgtatggcttgaatgaatgaggagaaaaccgaggctgggcaaggttaagtcagtaagtggtagagcactcctctcagtctgatcctcacagaccagattctttcttccacaccacactgccttcctcaatgtagggatatcagacactatgccccagatgccactgaggggcagaaagggctttgctgtcagctctggcaacagtggtttgggtctatagtagttgcccccaggagaacagaagaggagaagggcaccagaagcaaaaagagctc

SEQ ID NO: 911817 - DNA, 624 bp, Homo sapiens
aacaggcagggcagaaaccacagcccagctctgcagctccttcctrcctctggactgtgcacacgccggcccctttccctggaatgtgcttccacctgatgaactccaattccggggtaaatgctgctgccttccaaaacaggtcgggatccctgtaatgagcccccagaacacccactatggtccactgtggcctgtgccataattgtgattaaaatggcccatcatttaattttacattgcttgtccatgcccctccaccggactgtaagctccctgagggcagaaaccaagatctgggtgtgacactgctgcatccccagtgcccagatgaggcatttaatcaatatgtatggcttgaatgaatgaggagaaaaccgaggctgggcaaggttaagtcagtaagtggtagagcactcctctcagtctgatcctcacagaccagattctttcttccacaccacactgccttcctcaatgtagggatatcagacactatgccccagatgccactgaggggcagaaagggctttgctgtcagctctggcaacagtggtttgggtctatagtagttgcccccaggagaacagaagaggagaagggcaccagaagcaaaaagagctc

SEQ ID NO: 911818 - DNA, 428 bp, Homo sapiens
tgaccatagagataggtgtgggacctactggctcccatgacaacaggctatagttcctttgaccatttattattgattttgagcagtaattcgttttgctcctgcctcgttctgaaaatagatctgagacaacttatagaaataccattttatggaataaacattgaacatatgtggaaataggaatgaagggaaaatggggcaagaaaataagatacagttaatataggatactaaataccatatgataaagagaggttgatctgacttttgaagtgaccaaagaatatagaaacatgttcatttataagagtctcaatattcataagataraacaacagttggttagaaaaatactgaattttcctgatactggcaatccgagctaagcacagcttcatactctgcaaatcatattggtgacgtgg

SEQ ID NO: 911819 - DNA, 529 bp, Homo sapiens
ttggctccaggcacctatggctttcttactcttcccttcatacaccttagtcctgcccatggatatcacttctctttttgctccattaaacacctatcctcccacagagaagtattaaaccacaggacatcctaagtcagatgttatgagacaaggctgaatttctcaagcccagtgacagtgccatggccccaagctcttttttttttttgagatggagtctcgctttgtcactccggctggagtgcagtggtgcagtcctggctcactgaaatctctgcctcccgggttcaagcgattctcctgcttcagcctcccaagtagctgggattacaggtgtgctcccacgcctggctagtttttgtatttttagtagagacagggttttgccatgttggccaggccggtcttgaactcctgacctcaagtgatccaccgtcctsggcctcccaaagtgctgggattacaggtgtgagccactgcgcccggccctcttccccatttttaagaggtttcctctgtaagggag

SEQ ID NO: 911820 - DNA, 600 bp, Homo sapiens
cagatcatttgagattgagaccagcctgggcaacacggtgaaaccacattctctactgaaaatacaaaaaaaawtaaccaggtatggtggttcatgcttgtaatctcagctactagggaggctgaggcaggacaatcgtttgaacctgggagatggaggttgctgtgagctaagatcatgccattgcactctaacttgggcgacagagcaaaattctgtctcaaaaagaaataaaatcaagaaagtaacctcataataggtacaaaaaatataaagtacctaggaatcaatttaaccaaagaagagaatgatctatacatgaaaatctataaaaacactaatgaaagaaattaagaagagcacatgaaaaatggaaagatatttcatgcttgtgaattggaagaattaatattgttaaaatgacaatacaacccaaagcaatttacagattcaatgtaatctctaggaaaatatcaatgacattcttcatagaaataggaaaaaaaattaaaacttttatggaactgccaaagacaccaaatagccaaaataatatggaacacaacaaagctgaaggaatcacactaccttacttcaaaa

SEQ ID NO: 911821 - DNA, 616 bp, Homo sapiens
acatctactctaaaaagaaaagttttagaaatgaagtttagcagcattgagagccctcgtgtggaagcaagtcaagtaaagcttctatttacattttgtttttgtttttttttttaactagatcagctcagacatcaactgatttaatcacccttgtcagcttctaattaaactgacaacttctgaaacttaatttacctatgttttaacagagtagcaggttgctgtggcattggctaattgtacttaatcaaatatatagaaagagaatacttccttttttcttatttatcagtgtctctaaatctctatctaaaggcaactaaagaaagatttcaaaaatggtcacccagaccaaaataaaggaattcgaaattatcaatagacacataaaaatcaacttcattagtaatgaaaaatgaaaaggatttttacccatataaaattgttataggattttggtttgggtgttggttttggtttttttyttgaggagaaagaaaaataagagtgtgtgtgtgcgtgtgtgtgtgtgtgtgtgtgtgtgtgtgtggtttggatgtaagaaagatgtattttcatagatttccaataagacatataaattggtgagcaa

SEQ ID NO: 911822 - DNA, 638 bp, Homo sapiens
agaattataagatggactataaatccaacatgttattcattctttcttatctatttccargaataccaggagttaaagtgaaactggtaaacagaatagatattggcaattggagtacggtccttctgtttctccccatgtaaaacaggaaaggctagaatttccttaatgtgtgatgtatatccagaagacatctgttctcctactccatgaagttaatatgtctatacaatacttgctgccaaatacatttattgttttgtgcatggatgtgctacataaacataagtaatattgaaatgtatgtgcaatatagatatagatgtatgttctttagccataatgagtcattctctacaataatctcaaggagggcttattctcaagggtttattaggaaatgataaagacaaaagaattttctgttcattttgaatataatagctacactttatatcaggaatatgattttggaaaagttggagcataggaagtaacagaaagccttagaatcaagtcaacataaagaattatcccactgtatacagctggatagctgaagaaatcaagaaaatagaggaacttcccatgtaaattgtagattagctcattgcaagaccttaatatttctaattgaa

SEQ ID NO: 911823 - DNA, 654 bp, Homo sapiens
acaaaatcaacaaacaaaaattagtagcatttctacacaccaataatggtcatgctgagagccaaatcaagaatgcaatcccatttacaacagacagacagatacacacacatacacacacacacacacacacacacacacacacacacacccctaggaatgaaagaaatcagagacagcacaaacaaatgaaagaacattccacgctcatgaattggaagaatcaatatcattaaaatggccatactgcccaaagtaaaatacagattaagtgctattcctatcaaactaccaacatcattcttcacagaactagaaaaaaaacttttctaaaattcatatgaaaccaaaaaaagtccaaatagataaagcaatcctaagcaaaaagaacaaagccagaggcatcacactacctgactttacactatagggctataataaccaaaacagcatggtactagtacaaaagcagaaacgtatgccaatggaaaagaatagagaattcataaataaagccacatacctacaaccatctgatctttaacaaagctgacaaaaataagcaacagggaaaggattccctatttaataaatggtgctgggataacttsctagctatatgcagaagaatgaaaatggacccctacctatcac

SEQ ID NO: 911824 - DNA, 591 bp, Homo sapiens
cttcttcctttttcaacagcctgctggtaattagtaattttaactattgttctgtctatgagtgcagtctctcttttctttttaagttggaagaatgtraggataacaagaaccaaaagaaggaaatagaaaaggaattaagtagtgagatagcattttaagtcaccccgatccactaagaagtttcctttagacatggtatgcaaggcttaggggtaaacttgagactgaggatctggacatttaagtgtacatctaacctaggatcatttttaataccttcttctttctgaggatcttcaatccccacttctcaattcagaaaaggcacattacatttcatatattgtcctaaacatattttgtaggaaaacatcattgcttccttggaaaactgcattatctagactacaccttttggggttatgtgattctgattctagagtagccatgttacaactctgtaggctgcccacaccctacagagcaatgcaaaatcattcttgactgaagataagcaaattctcttcagtggaggttgaactgacttctcttccccattgagaaagagctagttttaccctcatttgc

SEQ ID NO: 911825 - DNA, 664 bp, Homo sapiens
attcaggagcctctgcaaatgctatagttgttaaagtacatgagaacctaaaggcattcccttctataaatgtagacatcaggctggtaatccattcagcaggaaaacaagctaacaagccgtttatgccaccagaattgtgttttctaaacttaaaatgaaggagctgagattgtagtggtggctcacattaaaagattcagaatctgcttccataaacatctttgagtgttatgcaccaggacctatgtaagtcatttgatatctattaccttactttatacaattagaagtaatttttaaaatatctgcaaggaagatggttcttcctaatgatccagtcaggatggagaacacacatgtcatagtaaacactaatatgaataaaagattagatgcaaaaatgatgatggacttcacattaatcaaatgtgtggtgaaaaatactatggaataatgacattattttggcctatttaaagtaaaaatgaaagtcatgagctaaattcctttttctcctgcttctgcattctctttcttttcccacttcctccttgctaatcattcyagcctctaccaagggctatttctccatggaaagaactttgagggataaatgtcagcatcctataacagattaggttttgagatgggaaatacctca

SEQ ID NO: 911826 - DNA, 598 bp, Homo sapiens
gacatggtcctatgtgaaatggtccccagctttgtgtttatcctgagagttgactcagcacttcttactgctggtggggagaaatattcatagcattttttcagttgcccagactgcaggttcttcatcttaccatttaaccgcccaacagctgctcacaaaattctgtgtcattcacactgtgcccaatccaggaaagtttaagtgaccatggaatggcacactggcagtgtctcaaaaggatcagttcttttaggaagacttttaccttggtcttagaaacctgaggaaactgtccagtttattccagaggaatgtcaaatgtcaggatctaaagtctaaaagaagtaaaataataatgaattattagttttcatgattacatgggttgggttggcattttgtatgttcatttcacctggactcactcatgtgactacattcagccgctgggttggttgaaatggagaaggcccaggatagccccactcacatgtctggctgttgcttctggctggggtaagggtaccttaattmtcctccacagggtctctcatcccctggtagagtagaccatcttccttgcatggctatctca

SEQ ID NO: 911827 - DNA, 584 bp, Homo sapiens
tcaaattactcaacaatggccacacctctcctttgcagtggtgcattcatcattgaatgtatagttgggttacctggaaccatattccagtctcctacaagwcttcttttgtggtgcaaaagaaatgtaactctgaccaagtggctgacagcagcaactttctatttcctgctattgcaacatcaaaaacaaaagtctttccccaactctgttgcacaatcactattcgtggtagcagtaaaaagaaaaaagaatccctgatgattttcagattgattcccccaaatgattacattaaatgctgtgattaaaattgagggaaaaattacatttagagagagttcccttgtctgggagataaaagccataggccatagggttataaactgacagccttgaaaggaactcaggctggttgaatgtcattccataaacaaggagatggccctacacacagattgaaaacgaagtaaggactacggaaggggaaaggcacacttcttgagtctctgctttgtaccacaccagggtatttccacgtgtgttccagcctctgttctcactctgcctagccattaagccag

SEQ ID NO: 911828 - DNA, 650 bp, Homo sapiens
caacatggtcagtttaagctaagggtggttctctggcttgcagaaggtgtccgtcttataagtcctcacgtgaactttccttggtacaygcacagatttcccacactctctctttcttcctcttctaaggccaccgatcctatagaaaggcctcatctccagatgcagttacataagggaatcaacatgtaaatttgatgtgttaggagccgttcaatccttagcatgttccaaagaaactaggcacttgggagcatctatcacaccactacctgcaagatttacatttgttccgaggcagcgcaaaatgtggaggcagttctaaatttaaagtcattgtgtttgatacatagtttactgtacgataagtttattactagttttattttttaattttaagcaactacatctgaaacatacacacgctaacatggtatgtctatgtatctataacttaataaaataggaaaatgaaattatcctaacaccataagccataaaataaaaatatttttcagaaaaaaaaaatcattgcattaacagaccaaatcctttatgaagtcaatgttgtattccgtcaaaaatctttaaaagaaatacatttttcaataaggatatgtgttgccattgagagcacatagtctcttcag

SEQ ID NO: 911829 - DNA, 642 bp, Homo sapiens
tgtaaatactcagcccataatcattaaatgttaaaaatcctcataggtatgctatagagtgaaaacattttttaattatattaaaattggctaaaaatctcagaatatagagacaaaaccgaagagcagtagcagtcgaagtaaggcaatgggaaagtgtaactacatatattttctcatcttttaagagaggtagaggacaaccagcagattcatttgcttctgaaatacagcaattgaaaattaagtgtaaaatataagcttaatttttaaaaggagacaaaattatatttaagacttagactttatcctctccagactttcagaggggtacaaaatgaaagaaggcatggagtgaaaaaaagaggaaagaaatataaaaaagtgaataaaaataaaatgaagaaaataagataaaaaaaacaaatgttggccgggcgcggtggctcacgcctgtaatcccagcattttgggaggcccaggcgggagaatcacgaggtcaggagatygagaccagcccggctaacacagtgaaaccccatctctactaaaaatacaaaaaattagccgggcgtggtggcgggtgcctgtagtcccagctactgaggaggctgaggcaggagaatggcatgaacccgggag

SEQ ID NO: 911830 - DNA, 642 bp, Homo sapiens
tgtaaatactcagcccataatcattaaatgttaaaaatcctcataggtatgctatagagtgaaaacattttttaattatattaaaattggctaaaaatctcagaatatagagacaaaaccgaagagcagtagcagtcgaagtaaggcaatgggaaagtgtaactacatatattttctcatcttttaagagaggtagaggacaaccagcagattcatttgcttctgaaatacagcaattgaaaattaagtgtaaaatataagcttaatttttaaaaggagacaaaattatatttaagacttagactttatcctctccagactttcagaggggtacaaaatgaaagaaggcatggagtgaaaaaaagaggaaagaaatataaaaaagtgaataaaaataaaatgaagaaaataagataaaaaaaacaaatgttggccgggcgcggtggctcacgcctgtaatcccagcattttgggaggcccaggcgggagaatcacgaggtcaggagattgagaccagcccggctaacacrgtgaaaccccatctctactaaaaatacaaaaaattagccgggcgtggtggcgggtgcctgtagtcccagctactgaggaggctgaggcaggagaatggcatgaacccgggag

SEQ ID NO: 911831 - DNA, 574 bp, Homo sapiens
tgagaatttctgtttttaaaaatttattccaagcacgtttgcaattgcttgttgaagcatttttatgctggctgttttaaaatctttgtcagataattctaaatctgtgtcatcttagtgtcggtgtctgttgattgtcttttttaactcgagattttcttggttcttagtatgattagtaattttttaccgaaacctggacattttgatatgagactctggaacttatttaacccttgtattttagcaggtcttctgtgacaccactgcggcacgtggcaaggtgtgtcactttgttactgctagataagggtggaatcccaggttctcgacttgaccttcattgacacccagaggggaggagctttttgttactgctgagcaggagtggaagttccagctctccattagccttcctctgacaccacaccagtaaggaaggggagcggcaccccatcatctctggatggcagtggaagtccaggttccctgggtgttctcaamcaacattgtgggtggggcgaggggtcaggggtttgttgctgcaagtcctatcctcccacctggcctgctc

SEQ ID NO: 911832 - DNA, 654 bp, Homo sapiens
gttcacattatcctagaataggttagtggaggcaggcttgtctgggctggcttcagtgttgagatgtcctcatgattctttgagtacttccttactttccggtgcaaatagttacttcaaacttattttgtactttccctgccccagttagttagaagagtgtttttaaactgcaaatcttttttaagattgatatcttcggtgatggcctgtcctgacaattgagaatcattgtcattaaaatacatatatagctacagattaaagagtgaccattttttcaagtgtctgtctgaaaactgttgagaactttgagcaaagccatcatagctcctagcttacacttatgtaggatttactatgtgtcctgtactgttcctagcacttttcttctatgaactcattactgctcacctcaactctaataaattatcttttattatttgcatattgcagatgatgaaactaggcacacagcagccaagtgacttgtcaggattgcatggcctgtaagggcagaatagttattcaagcccagagtgtctgcctggagacccattcctagcattgtgctcctctaccctgccataactaaaactgcaacatagtgtaacaaattsagttataatattttgcatgtttcttacctactaa

SEQ ID NO: 911833 - DNA, 590 bp, Homo sapiens
ggaaataagaacatttgttgaatgacttaygtaccaagtatgttcacagtggtatggtttataattctgagacaatgatagtagttacacccacacgataaaatgttacacagacaccaaaattcatattatgaaagagtatttaatggcagggaaaagctttctcactgcctggtaaatgaaaaaaaggcaggttacaaacagtataatgatacgagccacactttagaaacacacacacacaaagcaagcacaagtaccaaaatgctggcagtggtatacctaggtgttgagataacaggtgaacttaagtttctttctacttcctaatccatagtaagaatatatatatttatatattatatattatataatatatacattatatatattatatattatatacattatatattataatgtatatacttattatatattacatatattatatatatatatatattttttgagacggagtcttactctgtcgcgcaggctggagtgtagcggcacgatcttggctcaccgcaacctctgcctcccaggatcacgccattctcctgcctcaacctcctgagtagctggga

SEQ ID NO: 911834 - DNA, 603 bp, Homo sapiens
ttcaactactctgcaggaagagtttgggggacacctgtaattctctcattacctcatttagctacagttagtttggagatcacaaaactactcagcttaaaagggcctcagagaacacagttgagcytctatgtttgccaagagaggaaaccaacacccagaaattgcctggcctgccgagggctcagctggaaaatgacagaaccccatttggacccctggcccctggctgacagcgcatcactctgtccacccccatgtcccacctgtcttgttcctgcctatgacaataaccttgcaaaagaacgagtcactcctagcccagatcatgcctttaaagccaagggaattttttgattttttggttttgttttttttttttaggagaaagcaataacaaagaaaagtgggggagtgtgtcttaaataaagattgtccctctgacgtgctggatggaaagcttttgggtgtgagctttatgattataccgaggtaataatggacgtcacatatcaggagagaagatgtcactaccttttgacagaggacacttgggaagaaaaagttacaaacagaaagctttccctttaccttctgaggggt

SEQ ID NO: 911835 - DNA, 384 bp, Homo sapiens
atctgccttaaaagcttttccagcaatgccctccacttttctgtcctgagtgagtgwcaggcaccttgcattagtccttcagatagctccagatagtttagaaaagacatacatgccacagccaggcacggtggcccacgcctgtaatcccagcactttgggaggccaagcgggtggatcacctgaggtcaggagttcaagactagcctggccaagatggtgaaaccctatctctactaaaaatacaaaaattagccaggcatggtagtggacgcctgtaatcccagctactcaggaggctgaggcaggagaatcacttgaatctgggaggcggaggttgcagtgagttgagattgtgccactgtactccagcctgggtgacag

SEQ ID NO: 911836 - DNA, 540 bp, Homo sapiens
atgagaggctatcagtgagaatggggctcaggagatcccacttgagcccccaagaactgttttcacagttcttagtgatacgtgcaaatttagtgctaaaataaccctgggccacatatacatactagctttgcctctagcatcccaataaacaggggttgactggcacattctctctgaggcctgccttttctgagctgactcttctgggtacgcacctctcctttgccatcacaggtggcctgctctgctccagactccgggctcactgggtcctggaaaaggggcagccagggtgacttttgaatacagtgaattttccccattacacaattgcatattctcatcattgtaaatccagagaataaagacaatttgtaccgaaacaaatgacccacgaccacaaagggcatcagcacttttctaagcacagagcctcacctggcgagaatccacagccacatgcacctggcctggayctgctttcctgtggctctcctggggcttctcctcccaggaaatcctgctctggttctacaa

SEQ ID NO: 911837 - DNA, 623 bp, Homo sapiens
cccacactcttaattcctcagtcttcccgtctcatgtgccagctaggcccttctgcttctgctctgggggagtctgcaggggtagaaagaggcagaatctctccctctgggggaagggttacagagagaaggctttgagaaatcagaacctgaaaatcaagttcaagaattccctgtaagtcccatgtgcaaccaccatgcaaagcactttatataatgctttcattcaattccccattccaacccccaaagtgagagagagaaaaataattaccccaatttttcaggtgaagaaactgagacacaaagatatgaagaaacttgcctaaggtcaaacagctaacaagtggtggagctggcatttgagccagaggtcatgtcctgacatatatggtcatgtatgggggctccatgcaggcctccatgagcgttgcactgactgtcctgagaaatgcctctgcctgctttttgcacttcaaaatcacagactagcctggaagggttctggcagttttctggcccacccagaagatgctgactcaaaacaaatttttttaatgtctasaacctgttacacctgcccagttctgtttctataaaagtccactccaataagggtacta

SEQ ID NO: 911838 - DNA, 665 bp, Homo sapiens
catgcaatttgggaacaagaatgacactgtagaaataaacttttctgttctaatttctttgaaatgtaaaccatttacccatgtaagtaatcattggcaacasatcactagtgatacaactttgacctatgtccgtgagccggtgtgtttagattcagagaatgagaaccccttactctgcagaacttgccagaagagttaggcagtgctggaaaaagccatttaatttgcactatatttccccagctagccatgttgctaccttaatgttacatgacaaagtggtgtatgtgaattttcattgtttcctaatgatatttgtatatgcagtaagtcaaattacagcattcaataaatcctacgttcttgttcaaaacaaattatagtgcacacaagtttgtttttctttctctggtctcacttcaaatcaggtagctattataaataatacaaaacaaacactttatttttgaaatttacagaaaataacatcgccgcttacaatgttacagaaatatgtggctatttagaaaccctagatcacaactcttatgaattattatccaatggacataggagaattaagattgagtttttatcaccttttctgatttttaatgctaaagtagatttttgttgtatattaagcatgactatagactata

SEQ ID NO: 911839 - DNA, 653 bp, Homo sapiens
ttctaaccctggccaagtttcctaaaacattcaatatactccattgacctacatctttgtacattgttagcagttgaaaacataatattgtagtgtgctaaggctagaatcacagagtatttcaaaatagttctggagacctggttatccttaaatagccctgcaaaaaaatctgtcctatatgtatttattgactttctacacgcaatttgctggcactgtgctggcgtttgaaaatagtctatactatgattctaaatgagaaaagacaaaaagttagagagtgaggatttggccctcaagtagattttaacctaaaagcttcaaaaaacaaaggtacagtaggtcagaactatcagagatatggccattcatatgagcattgtttatttgtcagatagtgggtgcatgccatagatcctcaatgtatacattgatttgttctgggaactcatttacattcattgttttcttatttttaaaaggagtcagaatctcacaacaatgaatattgtgagaatctaatttcaaaaatgaacaagacaattctaagaaaaatgtacagtaccaaatttataagatatcatatttgttctcaatatgtttgtattttaacccctagaaggaragacgtcatctaagctggtaccccc

SEQ ID NO: 911840 - DNA, 600 bp, Homo sapiens
cttgaacccaggaggcataggttgcagtgagccgagatcatggcactgtactccagcctgagcgacagagtaaataataataataataataaataaattcttattcttttcctgtctgagactataatagctggactcttctatctctttttcttcttcctttgtgagtttgtctacctctctctgtcctttggctgaagttattttaaaaggctaagatcttgaatcttctttctttctcatttattctcatgctttaaatgatcccttctatataaagttttccagtcttatattgccaagtctctactaggtatttctgtcttagatgattactttctccttcaaacttgctgtttttccccccattttgtcaaaactatccttattttcttctttagcaagcctcaatataagagtaatacaatggtaataaaaataattgtaataataatacttatttaactctttctttgtgacaaagactgctctaagcactttacattyagtaactcattcactgttcaaaaagtccaaaaatttcatcattacagatgtggaaaccaaggtatggagaggtgaaaagttttctaactggac

SEQ ID NO: 911841 - DNA, 595 bp, Homo sapiens
aaatgtaagatgagacaatgtcagggagttatgaacaaatatgcctctttctctaaatagcccagtttttagtggtatctatttttgtgtagccatgcactgaaaatatcacttgagtgatataatttcattgagtgagtgcttttctgtatttttaaaacccaaagctcttttaggggtgtgggatagatagaggagaaaagtctcttatcttttgtctctttctcttttgtaattaagttgcattaaaatctagtctttggtcttaccacgttgtttcagaagcacatgagcgtgtacacacagacacacacagcgctacatgtttgacattgagtattatgggctaggattctataatgtactattgaagtagaaaaattaaagaattgattgtccttatgaaatagaaaaaataataaaaagtttagctgtaataggcattggtgaaccccttgaagtaaaagttagaaaagaatattaactgcttttctgtagaaactgtaagacaccttatctgtttcccacatatattgtaaggtctctaagtttctgyttttcttcttgctgtgcagctgcaaggtcacaaaataga

SEQ ID NO: 911842 - DNA, 565 bp, Homo sapiens
acagttctggtgctttccctgcaatgggtagatcacttaagaaaatatcacggttcctttacccttcattttggtttacttgaaaatagtgaggcaatataaaagttaatgtaacttccacgattactttagcactcagcaaatccagatcaccttgtattttagtaagagattatatatgttattactttgaaagctttcacaaattgctgtaaacatttaagaaatggattctccatggtataacacagtatctgtcaccactaagcagtgggcacatattttttttttgcttgccctgtagccaccgtttcactgttgtgaaaaggtgttgattagattttatttatgctatatatttaggatatttgacagttagctcaaggaatagagaatctgaataccaccaaacaacctgaaactcagcaaacaccctactctctactgcctgaattatagagcctggaaacatktgcgttcctatatgaactccatttctcaagggttttcatatttttctgttgtcaaagagctctgtgctggaaaatccccactcctgtgtgag

SEQ ID NO: 911843 - DNA, 579 bp, Homo sapiens
tggtttctaacaacaaattattgtttgattttctacaagctcagtcacacacacacagacacacacacacacacacacacacacacacacacacacayatatatatatatatatatatatatatgtcagcatgtatcttctttatccttctagcaaacattttctatattttatttctctaccaaatttgtgacattttttctctttgctttctgtgtgtatatcccataaaataaaatcctatttttgtttaagttttactttgggtttggggatacatgtgatggtttgttccataggtaaatttgtgtcacactcaggtcgtaaatttgttctacagatttaaaatcctaatttttatcaccaataaatctcttctcataagaatgatcaatggcctttaacttaatattgatcaattctctcaatatagtgtagaggttaaaaacccaaatgtgtagacagacaaaacttggcttgaattctgggtgataatgaaaacattgtactatcatgtctttttcagagtgtttaagagattaaatggaataatgaatctaaaacagtgaatatttgtcc

SEQ ID NO: 911844 - DNA, 634 bp, Homo sapiens
aggatgatgagtaaaatgatttctgtaaggacttggccaatacctgatcatggagacaagagaggaagtcaggaaaagtagcatcaaaacttggtataaatggaaaaatactaattgcaaaagtaagcttaatccatgtttaacattacaattaagatagagttcaatgaacaggtaggcagacaagttgaagagaatataaatatctgcaagcaaaacatataagtggctcataaaccttataattccaagttacattaagctgaggtggcatagagagtcagggaccaggaaaatagtcagggccacagacataaagtaatagaccagggaacgtagaaaccaagacagaaaccacttcagacaggaaatctattacatggcactcactggagtaatacacattaaggacattttctaccttggcctgccattggactcaatgtggtgagcaacaaaggagataatgtgcaggcttatttgatgtgaattagaaatatgatcatatcaaacattagtaagtaaaaatatttttaaagttttactttctacaytaaattataaaacttaaatttataaagaattatataattttaaaactggaagagcgaatttaaactttgcttatcttatt

SEQ ID NO: 911845 - DNA, 521 bp, Homo sapiens
gaagaagaaacagtatgcaagctttaataaagctatttgcaggccaactcccaaatttctagtatttaccgctcctttgcagttcctyttacatttgtaacagttgacctactaacaggttcccagaaacacagattcaaattttggcaggcttacctcacctctttgtccttccaaagtacataaatgctaaactgggttcacagtgagaatgagagtcattctaacaagacttttaaaaccaagaccctttctgctccctaccaagttactgccatcttctccgaagaaataaagttttgtcagtgtgcccttggcataatttcttcagcctggattaaacacaggtgactgagagtccgccttatctccacagggcattagtcactctataaaagttaaatttattatgaaatgctttgtttgtgttaacatatatcttctctgggaagctggaaacaaaggcatgtcctttaagactccatatggggaaaacacatcctcctttggaatttaacctt

SEQ ID NO: 911846 - DNA, 706 bp, Homo sapiens
tagagatagtatttgactcagcaatcccattactgggtatatacccaaagtattataaatcatgctactataaagacacttgcacatatatgtttattgcrgcactattcacaatagcaaagacttggaaccaacccacatgtccatcagtgatagcctggattaagaaaatgtggcacatatacaccatgaaacactatgcgtccataaaaaaggatgagttcatgtcctttgcagggacatggatgaagctgtaaaccatcattctgagcaaactatcacaaggtcagaaaaccaaatagcacatattctcactcataggtgggaattgaacaatgagaacacttggacacagggcggggaacatcacacactggggcttatcacggggttggggcctggtggagggatagcattaggagaaatacctaatgtaaatgacaagttgatgggtgcagcaaaccaacatggcacatgtatacctgtgtaacaaacctgcacgttgtgcacatgtaccctacaacttaatgtataaaaaaatatatacacatatatatatacacactcatatatatatataaggattccagagcccactctcagaccatgctcactcagtttgtcctggtgtaggtatcagtgtgtcaatgttcagaatctctaaggccactcaaaggcatgcccctgactgagaaacattgagtta

SEQ ID NO: 911847 - DNA, 627 bp, Homo sapiens
attttaagatgagacctgaagatgagtagacatcaaactgataaaatttcagtggggaggatttacagctcttcaaacattgtgaaatctttacatctcctgagttcaccacattgccttgcactacataggcactcaataatgagaataaataaatctaaaatttaacttaatttattaattgaaatagttttctgtttcatggggttaggcatggggtcaggtgggtgccaaggaagtggtgtcaggggagggaagaatttcctacagcatcctctgcaaatatcactggctgtcttcagagtcctccctcactattgcctaattttccctcagcaggtatccagagctgcctcttcagtcaaactgagtccattggcacaaacttcctcaatttcctatgtccactctgcaaacttcctttctctgccctcagcctcctctgatcttatcactaatcctggaagacaaggcatctcttctccccagactgattttcccacctatgcacttgatccaatcctcttggcccttttcaggactgtgttcaaactgttgaatctaaagaaatcctctcttttgcttwtgtccttggtggaatttggctctgttggccatgttttattc

SEQ ID NO: 911848 - DNA, 622 bp, Homo sapiens
tgatggtttccagcttcatccatgtccctgcaaaggacatgaactcatcctttttcatggctgcatagtattacatggtgtatatgtgccacattttcttttctttctttttcttttttttaacattgctttaagttttaatgtttatttccccaagacagcctagcctgcactttacttggatacattttacaagctagttttctgctgcttctagttttaaactttaaccattattctgatgacaaggaatgttgcaaaaatactctagttcaacaaagagttatgatcacaaaataatttttatctattctacagtgtttcagaattaccagttgatttttaaacacaaagtagatatagatgctaatggtggctaatctggtatgtttcttatagcaaactgttgttcatgcaacacttgtgctcaaaggggaaggcacaggatttcttacaatgagccacctagttctttttgtacaaattaatttatgtcacatttaatttagtgtgcataacatcaaaactgaggtattattcygatttataaaaaccacttgcataacttttatgcaagttttaaaaatacaaagttttctccctaaaggggctcaaaatagat

SEQ ID NO: 911849 - DNA, 399 bp, Homo sapiens
aattaggtaaactcaaaataatgtctccctattggtcaccagcagcatccatgttcctcataccagggaattgaatcattgaagttagtgactcacttcactgtccttgccttcaagctgctccttccaaacaaccaccctgagggagggtgtgctcaagagcttgacacacaggcccttgatagcttgttttctggcctgtctggctttataccctaaagcagttgtgcacactggcacctactctttgctccagctatagttgatccttactattcatggatttgaaatttgcaaatctgcctactcactaaaatttatttatttaaccctcaaatcawtattcatggtgctttggctgtcattcatgaacacgtgcctgcatatgtgaaacatctg

SEQ ID NO: 911850 - DNA, 584 bp, Homo sapiens
ttgacaaaggtctaatatccagaatatataaggaatataaatgaatttacaagcagaaaacaaccccattaaaaagtgggcaaagaatatgaacggttttcaaagaaagacatatatgcagccatgaaaaagatgctcaaaataactaaatattggagaatgcaaatcaaaactacaatgagataccatctcacattagtcagaacggctattattaaaaaataaaaaaataacaggtactggcaaggttgtagagaagagggaattcttatacactgctggtgggaatgtaaattggttcagccattgtggaaagcagtgtggcagtttcccaaagaacttaaaacagaagtaccattcaactcagcaattccgttactgagtatatacctaaagaaatataaataattctaccataaagatacatgcacgcaaatgttcatcgcagcactattcacaatagcaaagatgtgaaatcaacytaagtgcttatcaatggcagattagataaagaaaatgtggtacaaataaactatggaatactatacagccataaatagagacaagatcatgtcctttagagc

SEQ ID NO: 911851 - DNA, 626 bp, Homo sapiens
tcagaatgcttcagattaggtccacattttttcaaaaatcatttttaggacttttaaattatttaagaagtgcattgtgtgatttgaagtatrtgctgcaatttaactatctatgaggatgaatactattctcttaggagaacagctttcttcagttcactgagtgggagagactaaacactttgaaattttcaatcttttgttaagagtttgcaaacatgtgaaacaaatgcacattttacaagagtagagagctgcagcaagagtgtgggattggggagagagcatggctggttgcttagagcaggccccccaaaccactatccctgtgatgaggtcacatgggcaggacaggccctcggcattgctcctcacaaatgcagttttgccagtgttgagcacaagattccgtgtgtgtgtgtgtgtgtgtgtgtgcgcgtgtgcctgcatgtacctattaacatctcatagaattagttttccatgaaaatcagcttgggagattctggcctaggtaactaataatggtaattgtgatcagaacgttctttttcttggataataccaaaattaccatgaggttttcagaatctccctcctctggttttcatgaacatcattatctt

SEQ ID NO: 911852 - DNA, 633 bp, Homo sapiens
tgtgaatgttgtagtggctagagaagtgggcatggattcagtacgtagaggccccaatgtcctctctgccactaaagtcactgtgacaggatataaatcattacctctctgagctggtttttttartcagttgaaatttaaagtggacctcgacggctcttaatctccctgcaaattctaacatgaatatttttatattgacaatatttttttcttaaggcaggaaagccactccttgggaatagagtatattatatggcatttaaaaaaagaatgaaagaatgtgcctatgcctaggtaaaatttcaagcaaataatgcctttccaagtagcaaagtaataacaaaatagcctgtctttggaaatacattttcacaagatctttttggtttattttgtggatttttaataaatacctttttaagaaaacatactggtaaaggaattggagaaaagctaatgtcctttcaggacatgttatttgtcaaaattatgattgagacttgacagtttcctaacattttctcttttagcttcttttagagagttttatttgctagtttattttaggtttattctcctagattgttcatcccagagaggaaaaaatgaaaaggaatagataactatcta

SEQ ID NO: 911853 - DNA, 614 bp, Homo sapiens
catgaagctaggctcattcattagggagacgtaaataaagtcatactatttatacatgctgtctgattcgcttcaaatatgttttcaatagttttctatctacattgtgctgaaaacatatatgctgaaataatatctttatgcacagaaaatagaaaaaggggaagataattgcgcagttgttcctttaagccaattaaattccaccagagggagatacctctttgtgctcccagatgcttgccctgtgtgttcattcatcaacatagagctcttagttttgccatttcatatgacatcaatggggaaactgcaagtaatttaactattaatatagctgccatagcatttcaagtacagacaacacattattattacgtatacactaaatcaatcaatatagatctattatggagcatgtatggacagaacgttgcacagacactggggaaaatacaaaagaggatcttaaagcctactgtgtccactrggaacctgtgcatactctgcattcataccaaaaccccatcttggctcttaagactcttagggaaattagagcctaaacttgagatttgaatacttggttctacctgtcctttctctccaacata

SEQ ID NO: 911854 - DNA, 634 bp, Homo sapiens
ggatttcagtgaaagcaatgctatttattatactgatgtttaagaagagacaatggcctagaaatcagggcctggaaaagtaaataataaagttcaagaatagcatactcatgtatgaggcagtttttgagtctgagatgacatattaggtaaataaaatttgcatgagttttctttgttaattcaagttgctggtggctggccagcaagtaagtagaagtgttaggcagaggacaagctagttcaggaagtttctgtggcaggtgagtttgtagtggactgaatgtttgtgttcccccccacaaattcataggttgaaatcctaactcccaatgtgatggcactaggatgtggggcctctgggagatgactagctcatgaggatggactcctcatgaatgaatataatgcccttattataaaaggggccccagagagctctcttgctttctttccaccatgggaggacataggaggaggatgtgatctatgaactaggaagccctccccagacactggatctgcagatgccttgatctggacttctyagcctccaggatggagaaatggatgttgttgtttaacctatctactgtgtagtattttgtcataccaacccaaatgaagtaagaca

SEQ ID NO: 911855 - DNA, 627 bp, Homo sapiens
tttcgaaggattcatgccactgtaatgagagaggcagtgtaggcaaatggtctgagccttggatggagattgaagtcctgactttagctgggaaatcttggttaagagtctttctgtaccttaktttccctaagtgagaataagagagttggacaagacgaatgtatctccaggttccaatttttctgagaatggttgatagagaagctgctctctccttaaaatgcatggactcaatggcttgaagatattccccatggggaaccattgccacggaggccttgcatgcaagaagtttgggtggggacagtgaggaactgaaacacaagcaccttccaccaattattgctgtgaagaacctgagcctgaagaagctccatctaattttttccccagagttccagattttagggtgcaatcatccagcctatacatgtggctcatagttcaaaaaattaaaagcaaaaccagaactctccagtaggaatggagaaaacctatctgtaggctgaactggctcctttgtcttaagaggcactggtcaggggaaaaaagctgtcttccagacccctcctttctgggtggctactgtggaatcaacggggtcactggctgtaaatcagtaag

SEQ ID NO: 911856 - DNA, 449 bp, Homo sapiens
ttgaacttgagagagataagttagggcatctggcagaagaaatttgtaagcagaaaggcattcaagatttgacytggtggtttctttttcttttccttttttttttttttttttttttgagatggagtctcgctctgtcacccagactggagtgcagtgttgtgattttggctcactgcaacctctacctcccaggttcaagcgattctcctgcctcagcctctcaagcagctgggattacaggcatgcaccaccacgccctgacctggcagtttctaaaagtgtacagtcacatgcattcacaaacagatggtttgaaattggaatttatgtttaaaaggaaagaagacattaaaagtttggaaaatttgcaacttgaccatgtggttaaaaaaataaaaacccattttctggggagaaattcaggctggctgcataaatttgcataa

SEQ ID NO: 911857 - DNA, 620 bp, Homo sapiens
taaataaacaaaagaatggctactctattgacagaacagagcattcctgaaagcacgagggtgaatgcrtccaccataggtgcactgcttgtttttatatgagataaagcaaaaaataaccatggggcaggtgtgctctacttcaagggcttgtgacaaaagatggttcatctttgtgtaaccactgactttgacaataatctatattattatatatattttttggagagagggcctcctctgttgcccaggctggagtgtagtagtgccatcagggctcctgcagcctcaacctccccgggctcagatgatcttcccacttcagcctcccgagtagctgggactagagctacatagcagcatgcccagctaatttttgtaatttttatagaaataggattttgccatgttgcccagcctggtctcaaactcttgtgatcaaaagatctgcccaccttggcctcccaaagtgctgggattacaggcatgtgccaccataccaactatattatctttaaagcaaaactttttcttgaacaaagaatgcttttgtccttaggatatcaagacatcaggacattttctggtctgttaactctgaagtctgttcagtaaacatt

SEQ ID NO: 911858 - DNA, 535 bp, Homo sapiens
caacatagattttgtgagttgaaaatggctcaagtgtgagtaggctctagaaagtaccattgctttgtttttatcaagacaaactgaaaagggagaagcttaagaatgttggatatcagctgtgggcaaaatattctgctagacactttcacacatacatatttcttgattcaagtcattccttctctcagttaaattcatatggttaaatagatatatacgaataaatgtacaatgggctctctctatctggatttcacatccatggattctaccaacgtggattgaaatattttaaaaaattacatctctactgaacatgtaaagactttcttgtcattattccctaaacaatacagtataacaactatttatatttcatttacattgtattaggtatgacaaatgacctagagatgatttaaagtatccaggagaacatgcataggttacatgcaattagtagctgttttatattagggacttcggsatccatagagtttggtattctgtgggcagctcaggaaccaatccc

SEQ ID NO: 911859 - DNA, 589 bp, Homo sapiens
catggccaatataaaagagcagaatattcatcgattcctatgcattgaaagccacagatggatgacaaggctggaggcctcaggcccraaccaccctctccctgtaacatttaggaagccgtatgacaatcacagagttgctttgtgagcaagaagtaaagcaagagagcgaatgaaaagaaaccctagctgactctgttgataccatgtggcatgtccccaggcctcacttctgaattctttgtccctatggtgggcagtttcaggtaccccgtggaatgcttcccactttaaatgcctgctcctctctgtttccttgctggagtgcgtccttccctagcagtatgagcttgcttagctacaagtcagaacaattctgaagagccaaagagttgttactgctggccttgtgatgggagtccatggaaaaatgccccagtctctctgtcctgctgaagctcaattctaagatacattttatatggtttctcagaaggtgcccagccaagtcgggacctcagttgtccacaccgattacctatttattattgtacccttcattggcttttctccctgctagggctgccag

SEQ ID NO: 911860 - DNA, 618 bp, Homo sapiens
ttcttttatgtcatcatgattgacttaggcaatatcaaatgcatttttgatatacactattttcaacttatgatgagtttttcaggacataaccccactgtaagtccaggaacatctgtatttgttgatagaataagccttaagtcagacttagagtccaggtcttctttttttgagttggagtcttgctctgtcgcccaggctggagcgcagtggtgcagtctcggctcactgcaacctctgcctcccaggttcaagttattctcctacctcagcctcctaagtagctgggactacaggcacaggccaccacacccagctaatttttgtttttttagtagaaacagggtttcaccatgttggccaggctggtcttgaactcctgacctcgagtgatccacctgcctcgacctcccaaagtgctggaattacaggcatgaaccaccgcacccggccagagtccaggtcttctgactccaaatgcaattttcttcaaatttacttctagtgatttgttgaagatttgtacagaatacacaaaaatgagtagatyctgaaaacaacagggcagctcctgaagaacataaatactattgaggcagagttggagttgaggag

SEQ ID NO: 911861 - DNA, 633 bp, Homo sapiens
accctgcagggtgagtgatacggggctgsgggtgggagccgggctccttgttgccgggccgggggcgggagtgaagggaccggggcgccgcgggccaatggcgaagccggagcaggccgcggatggcggcgtccgggggaggggagcccgcccgccagcccaggaagcacaaagacggaggcgtcatcctgtcgtcgtggcccgagacctggctcccggcgtccctggctcgctccacagcacggtcgggaaacaatgcacggcgtgccgcctctgcggggccggcctctaggccgctcgcctccgcggcggcgcccggcgtgggcaccacgacccagagaaacaaagaggccgaggcggcggccgcgccccctgcccgttgcagccccccctagctctcccctaagaggagccgttcggggtcgggggtcgggggtcggggatccgcgtggggcctgcaggcgaagggctggccgggcctgctgagctgctgttctgcatgactcagtggttttcggagagggccctgttgggctttattgagtgaggcctttgcttagagggggatggggtatcagtgggacccgaacttgttccaaaatccattggaacatggggccgggggttctcggc

SEQ ID NO: 911862 - DNA, 624 bp, Homo sapiens
ccaaatgaagatctgagttagaacaatcaataagtttaaaaaacagaaaattaataatataatatttatgatrcaatcaatgcttccaagaaaacaatgtgtataagaaatgactaaagacccttgggaaaagtgaggagcccatgtctagagaaggtgtctggggctaagcaagccttctgcttccatcgctggggatagagcatctcctgccccagtggttcctgaaggcacctgatcccactgtggcccttagtgagatattctcagtcaatagaggtccacttctgacaggcacaggctcccgagttatgactccctggatttacttccctactgagtaagtaagtttgaaatattatctgactatatagatatatatttaccatcaatactttttaatatttgccatgtcttttacctgtttcttcgcttaagatttttccttctcattccctcctgcctgttttttcttcaaaatgttttgttttgtattacaggcttgacttctccctttagctctttctagagtttaagcatggttttctgaagctccgttgcaaatttctctgttaattgtggttgccagactaagacttctggttagtggcctttgctaactct

SEQ ID NO: 911863 - DNA, 680 bp, Homo sapiens
gagcacacagtaagaaggcagccatctgcaagccagagagacctcaccagaacccaaccatgctggctccctgatcttggatgtccaacccccagtattgtgaaaaaataaatttctgttgtttaacctattcagtctatggtgttctgtcatggcagcctgagcagactaagacaccaacctaccttatcactcatgacaaatgacagaacctcccatttttcagagaaaaatgaacagtagaaagtaatgtcttcaagttcctaccagcacacttcccactgacccgcctttatattcatctgtcctaactctctcctgtccccacacaaagcaatgtgctcctgttatctaaagtgagtgccttctcctgtggttcaagtcccttttcctcccactgtttcaggaacactgatctctgatgcagctcccctttctctggtgtgttccatggaccctgctcactcctttgctacagcccttaaacattctcaggactctcccctctcagcatccccttaacctcaccctgcaactatctcctgtttcttcatcttccatgtcacagctrgacttctacacttgctccaagacactgaatcctcggacttcctccaccagcaagtacccctgagaactccaccaggtgaccaggaacctcccagcatttggcactgttg

SEQ ID NO: 911864 - DNA, 680 bp, Homo sapiens
gagcacacagtaagaaggcagccatctgcaagccagagagacctcaccagaacccaaccatgctggctccctgatcttggatgtccaacccccagtattgtgaaaaaataaatttctgttgtttaacctattcagtctatggtgttctgtcatggcagcctgagcagactaagacaccaacctaccttatcactcatgacaaatgacagaacctcccatttttcagagaaaaatgaacagtagaaagtaatgtcttcaagttcctaccagcacacttcccactgacccgcctttatattcatctgtcctaactctctcctgtccccacacaaagcaatgtgctcctgttatctaaagtgagtgccttctcctgtggttcaagtcccttttcctcccactgtttcaggaacactgatctctgatgcagctcccctttctctggtgtgttccatggaccctgctcactcctttgctacagcccttaaacattctcaggactctcccctctcagcatccccttaacctcaccctgcaactatctcctgtttcttcatcttccatgtcacagctasacttctacacttgctccaagacactgaatcctcggacttcctccaccagcaagtacccctgagaactccaccaggtgaccaggaacctcccagcatttggcactgttg

SEQ ID NO: 911865 - DNA, 407 bp, Homo sapiens
gaagagtctcgacttagaacaagaaatcatctcggaaacgtctctaaaacaaaaggagattatattttaccactgaaggctagaaatattattatctgtagtcatggaaaataaaatgcggcttctagatggcaccagcctacaaataaatgtaattgagcttcttcactgccttttctttgaagttcaaagttgattactccaagcggctgttcctccattactaacaaatggctatagaaatcattacgtatacagccactgatttgggagaagagtcttttaatagcaagaacaacaaatttatctttccagtatttttcccacccataaagcactgacaagaccacaractccctgtcacatagttaaaaatgtatgattctcccgtagtagtaaagaccata

SEQ ID NO: 911866 - DNA, 688 bp, Homo sapiens
gtaataacagctacattagttgagtgtctagtgtacaatatatgttttacagggcactttggatgaactagtctaaatcatacttcaggatagcattgtaaccacacttaacagctgccaaccaaaactaaagtgcagaaaacttgagtgaactgcccaaggtaagacaaccaataaaaaggaaaaatagtatctaaagtccaatcttacaccaaatcctccgttcatggcattaaaccaccatgtctcagtgaactataattgtcacaggatccaaagtgacacagggtgtcactgtgccggctggaaacctctgtggtcagtggcacctctgcttgggttttgcttgtacccactgggttcattccacccacttggtccagcaggctgcacttggctcgcactactggaccagatcccatgcctgccaagggcaaaccaggtgtggagtggcgagcggtgtgtaagcatgggttccagccactgtgcacaatcaggcatgctggctgcagcagggtgggcagctccagacactggcacaggcactggctttgtgtgaggctgtgactggaccagatataccatcagcagyttccactggcaccagggaatgtggtggtgaccagaagcttggagatgctaggaaccacaaagccccaaagagggtgttacagccctggttcaggga

SEQ ID NO: 911867 - DNA, 559 bp, Homo sapiens
cgtgattatatgttagatttaagaaagcaaaacatgatcatatattacagttatctctaaccattttgaggtaatgctagkcaagactttatccaaataacagatgatctagatcttccctttcaatatggtacccactagacatatgtgactatttaaattaaaattaattaaaataaaatcaaatcaaaaattcaattctgagtcatcctcaacatatttccagagctccatatctccatgtatctggtaggtaccctagtggacatttacatgatcacagaaagttctacggaatagtgctaatctagacattgacctcaagatgaagtaaacatgaggaggagggggaaacttgttaattcagttaattcaggggtgtccaacccgcgggtcatggacccatacccggagtgtctgttgactgttgggaagcagggagcacagcaggaggtgagtggtgggccggtgagcattaccagctgagctctgcctcttgtcagatcagcagcgacattatattctcatagggttgcaaaccctatggtgaaccaagcat

SEQ ID NO: 911868 - DNA, 624 bp, Homo sapiens
attactaccactaccaccactgccaccaccacatccaccagccatctccactgrcatcactgtctccacagcttccaccaccaccacttccaccacctttaaccacctccatcacctccaaaccacttccttctccaccatcaatgacctccaccaccttcataagctctagcttcaacaccatctccttatatttgataactccttcatcctgatgttctcactctctgcccggacaccctctcatttgacttgattcatgctagtttaaagctaatggaagaataatccattgaggatctacccttaattgaagagctaacttcaaatatgagccactttctacaacgctgtgccaagaagctatgcgccatgctgggtagtcccctcacatcttcccttgctacaccacgcccatggatggtgtagggcatagtgctgtgcacgggtttttggtgtgaagttatcaaaagtaagacttttttgaatttcacaatgatttttatttgtcttcatatttttttcttttctttttcttacggagaaggtcttgctatgtttctcaggctagagtacagtggctattcacaggcaccatcctagctcactgcagccttgaactcc

SEQ ID NO: 911869 - DNA, 604 bp, Homo sapiens
tctgcatattatttaaatacagtttatgcagtattcatgttaacacagaataacatattcaaatagcacagatgtctactaatataatgaacaaggaaagaatctgaacttcaagctttgtrtagattatgaaactctggaatgatccactggataatatgattataagtttccatgatgtttaactcccatagagaacttttgggcaattgcctgctagtctatagaattcttatcattctgaagagcagaagaaaactgcaatccctggattttctttgtagtaacttggcataactgaaatctttttgggtctgctttctgcttacatgtaattacttttatgagcatttattgccaaacatttcctagttacatatttaagataaattatatctgattctaggactcaaattacttgcttttatttgaaatagctctcttttaggctataaagacaaatttgaaagctataaagacaaataaatatgtgcgtatatgtttgtgtgtatatatacacacatatttatttgattatataaacatatacatgtatatgcctaaatatgcatatgtatatatatttatcaataccattattaaa

SEQ ID NO: 911870 - DNA, 767 bp, Homo sapiens
ttcctgcagtttttagtttgtgggtattcctacattttttattggttctcagaaccttgcttatatgtgctaggtaaacccttctggagtgcaccttctgcttcccgccaggactctaactggcaygtagcatacttgtggggcttatggtccccacttcccaggactcaccagcaatgcctagggactagggaatatccacaagaagccaccacccattaaaaggggccaaagtcttcattagccatatggagacccccgtttcttgcatgtattcctttataactattttaaaaatatttttgttgccttatttttctcttgggcataaagcttgaggtgttcaaaaaagcaagatgggcattctgtgaaattactttctttacaaaattatctaaagggtaacggcaaaagaattttatcaaacaatcttattgcctcctcaggcagcccattttctcattaatttagggttctggttgaaagcagggacccggacttcctggatctgaatctgagtcctgctacatttatcagttctgcattcttgggcaactggctttgcctccttttgcctcagtatcctatgataaatgggaataataatattctccccctcagtgggttgttgtgaacattcagtgaactaagacatgaaaagtggcttagatctgtgtctggctcctagcaagtgcaatccaaattaggattttagggaatggagtaggaactctactataagccaggtccaatcagtggctgaagtg

SEQ ID NO: 911871 - DNA, 634 bp, Homo sapiens
ctgctgtatggaggaaatccacttgctgaccaggagcacctgcactggacttcatgcaagcaagaaattaaattctactggactaagctaatgaagttctggggtctagttgttataacaatgggcattactctaatatacttatcatttttttttctgataacaacactatgctgtcagcaaatagcattagcctcacatcaaagagaaaaaagctaagtatcagaatgaaatcacttgcctaaggtcactcagctagctagtggcagatgcaggattcatgtcaaactcctctggcttttaatatatgtttattacattatatttaatgagccaaggaatggaatgcaaatataaaatggcaacaatggtggttattagccactatgtgaattttcagcagtaacatttttaaggaagactgtcagtcaatagagttgttaataaaattatcacatagtttagaagatggattctattgtaatacattatagcagattaagttttgctcctttaaatgtataaatcaatgaagcaaaaaccattrcaatggtaaaatctgatgtggtttggggcaatattttgtttttacccaaccttgattttagtctagaagttttacattcctacgaag

SEQ ID NO: 911872 - DNA, 645 bp, Homo sapiens
ttggaatacaaaaattttatcaggacatgttactggaggtctaggttttttaaaaattataattaactttacttgggactcaattgttttttgtaacctgaaaactcaaaccttttttttctaagacatattttctctcttgattaccctatttattacttctccatctgttctcttttccctttctagtgaacttttattagtcacattcagatatcctggatctgtcctccaagtttcttttcttaattcttcatgaattccacatcatttataaaatacttcttccagttgagcttccaaaacagtcatatggtcctcagcaaagaatggtgtcttctcagcttattgaacttgtaatttcaaaaataagtattctggttctagaaaatcttttgttctgtgttaaatttaatgcccttcgggagttctcatttatttttgttgttgttgtttttaagttcatctgtcttttccattagctttatttaaacaattgtcatctgctcttcttttaaacttagtattctccctcgggttgctggarttccttaatctggcagttctcaacactggccacacatgagaatccctctaggggggttacaaaagtcccaatactcaggaaacggtgaaaccaattaa

SEQ ID NO: 911873 - DNA, 613 bp, Homo sapiens
gctaacaggaagcactttttgtgaaagtccaagagtctcatcttcctgggctgtttgttgccattctacctggagtctgttttagtttgygtttccctccacaatcttgttgcaggtgggcatggggttttcctcgtctctgtgtcctgcttggtgtcttatttgcacacaagaggctctccatgaagttcagacctgggtcgaaggagttaaagagctccacactttcccactgacaatttccttgggaatccctctaggagcctctgaatagctctaacttctctgctttgaggatgttttgctcctaaaagggagagggatgtcttttctcttttgatagattggtggctgagctggagggaggagaggttactcattgcagaggtcagggtgaacagggaggcgaggaggccttggctggccatgctgcttggggaactgctccaagtctgggcttgtcatactccttgcctgcttttagtcatcggggtcattaggctctgtggcacatggccccgactctctccttgtagaagcgtagaaagattggctgaggacaatccaagtccaaaatgtcataaatttgtcacgatttgatttccctttttag

SEQ ID NO: 911874 - DNA, 575 bp, Homo sapiens
atgatctcatcaatgtatttcttctgtctaattctccctcttttctcctcttaggacttaaattacatrtatataagaaaacttgatattgtcccacagattttgcataccttgtttttttgccttttgtgtttcagtatgtatagtttttattgacctaccttcaaattcactggattcttgcttagttgggtctagtctgctaataagaccatagaaggaatttatctctgaaattgtgtctcgcatttgcatttgactcttgttttgactctgctgaaattccctatctatctgctcgtgcatgttgttttaactttttccattagatttttaacatcttaatcatagttattttaagtccatgtctggtagttctaacatgtaagctatctctaagtctggttctgttgagtgtcatatctttctacaatgtgttgttctttcttgcttttttgtgtcttaaaatttttcattgcatgccggacattgtagaaaaagagtagagactgaagtaaatagtatttacacaagaaatgggcatgcctcttctttcaggctgtcagcatggatgg

SEQ ID NO: 911875 - DNA, 686 bp, Homo sapiens
tcctctgcctgaggaactttttttaacatttcttgtagtgaaggtctagttatagtaaattatttcaaatttcatgtgtttgaaaaagccttcattttgctttttcaaataatctgatttgacagttattttcatttagtattttaaagacatcactccactatctttctgctcacctggcttttgatgaatactctgccataattattctcattattcctctttatgtaatgtttattttttatctagctgccttcagatttttatctttggatttcagcagtttgactatgctgtgcttgtgtgtgtgtgtgtgtgtgtgtgtatgtgtgcttgtgtgtctatgtctgtctaactttatcctgattggggtacacagagcctctcacatctgtagtttatagtctttcattaattttagaaaattattggctatgatctcatcaatgtatttcttctgtctaattctccctcttttctcctcttaggacttaaattacatgtatataagaaaacttgatattgtcccacagattttgcataccttgtttttttgccttttgtgtttcagtatgtatagtttttattgacctaccttcaaattcactggattcttgcttagttgggtctagtctgctaataagaccataraaggaatttatctctgaaattgtgtctcgcatttg

SEQ ID NO: 911876 - DNA, 521 bp, Homo sapiens
gtgtccaagttgtagctatgaaaaatgctactataaatatgtctgcacatatcatgatgttatttccataggaaacatttccaggaawgcaactgctacaccaaaaatatataatttaaactctaatggatgctgccaaatggtcaacaaacatgtgaaaagataccaaatacaccaaatcctcagggagatgcaaattcagctaacaacaagacattacacctatcagatggaaaattgtaaggaagagctataacatcaatatcactctggggaaaagtatagtctcatgcatggctggtggaaatatgaagtgcccagtcttcctggaaggcagtttagagcttatttatagggtcacaaaaataaaacagaagttcctcttcttttcatatttctttccgtttctgtcaaactaatacatacatgatgacactatgaactcactccctcttagattattccctccacgcacagggaggagatcaggaaggctgaagaattatgggccttgtatgctt

SEQ ID NO: 911877 - DNA, 521 bp, Homo sapiens
gtgtccaagttgtagctatgaaaaatgctactataaatatgtctgcacatatcatgatgttatttccataggaaacatttccaggaaagcaactgctacaccaaaaatatataatttaaactctaatggatgctgccaaatggtcaacaaacatgtgaaaagataccaaatacaccaaatcctcagggagatgcaaattcagctaacaacaagacattacacctatcagatggaaaattgtaaggaagagctataacatcaatatcactctggggaaaagtatagtctcatgcatggctggtggaaatatgaagtgcccagtcttcctggaaggcagtttagagcttatttatagggtcacaaaaataaaacagaagttcctcttcttttcatatttctttccrtttctgtcaaactaatacatacatgatgacactatgaactcactccctcttagattattccctccacgcacagggaggagatcaggaaggctgaagaattatgggccttgtatgctt

SEQ ID NO: 911878 - DNA, 597 bp, Homo sapiens
tcatcattgatatagaaagtatagagtcagactagtttgaatattggctctagcacttgttaattgcataaactgggacattgtcttatgttgggctctttctaaagtagactcggagaaaaagttttgaaggcaagtcatttacttgggaagtgattctaagaaacactggtggctggatgtggtggctcatgcctgcaatcccagcactttgggaggctgaggtgggcggattacaaggtcaggagtttgagaccagcctgaccaacatggtgaaaccccgtctctactaaaaatacaaaaattagccgggactggttgcacgcacctataatcccagctacttgggaggctgaggcaggagaatcgcttgaacctgggaggtggaggttgcagtgagccgagattgcaccattgcactccagcctgggtgacagagtgagactctgtccaaaaaaaaaaaaaaaaaraagaagcactggtatgggggtgtgtggaagtgagacaggaagggaaggaagcctatagagatgtgttaatgagccattcactcctgtggcaactggggctcactcctgttggggaactctgggaggc

SEQ ID NO: 911879 - DNA, 634 bp, Homo sapiens
cagttgattattgggtgcacacaggtttaaaaaggctaaatattgaactactccaaaaagaatcttaggaaagtcatttccctattcgagaaacctttgaagactaaaatatgttctttaacctctgaaagtgagagagtctaaagctgatgtgaacctaggctgtgcacgtgaatctcctggagagttttagaaaacctcatgcctgtatccactaccctatagattctgatttcagtggcctggcctgggtatttggatttttaaagactctccaggagagtctcatgcacagtcaagttggaaattttgaaaccttgatactcaaagtatggtcgatctgtaggccagcagcatcagcatccctgagtacttgttaaaaatacggaatttcaccccagattcacggaatcaatctgtgttttaacaagatccccaggtgattcaatggtgcagccaaggttgagaccatctagaacctagaaaataatctgagaagctgtccttatgaaagacaccacgccgtcttccttatttccrtttaaaggtggtttttgcctctccttccccatatctagttaggtatcaagttctgttgattttcctttcaaatcaaatctccctgtgtctcaca

SEQ ID NO: 911880 - DNA, 603 bp, Homo sapiens
cagcttttcctgaagcctagcagcaccttggaaagtatgatcacctccagattcctcctctgttcaatagggattccaacaatgcttgtgaccataagaaggcgtatgtgcctcccttggcaccatgcctggtgcccaagaactagagatacttttattattttctgccactgttgctcttccctctgaaatgctcaccaggccctgtctccacttctgtgcttagacatagtgaccctgccctcttggtactaagcggctgggttggagggcccctcagaggtaggtcaagaggttggctctgcccactcacttgctgtgtgaccttgggcaactgtctcgacccctctgagcctcagtttccttatatggaaaatgggggtcatatagacctacatcccccataaggttgagacaaggatcaaatgagtaaatgcacgaatagctcttagcatggcagctggcacgyggtcagtaccctttgatattaactgctcatactgctcttgattcatttgactaacacttatttgaatgcatattgaatgccaggcagtgttctaaatattgcaggcaaaccagtgaacaaaaccagacaaagtc

SEQ ID NO: 911881 - DNA, 580 bp, Homo sapiens
cacgtatctgaaaaggaaaaaakagaagtcactaattcaggtgattagatcagcctctactcctggagcttgtcccaaagtccacattctgtggagttcagtggtaaacaatgcccatgcacccaagtgcccgttatcaacccaaacaaggaaaaggcctcttcaatttcctttcctcatcaatctgagggaacagacaatacataatttcctcctacatcaggctacagcgaaaacacatcttgttcggaactagacacttactcctaagaatgacagtttgattctaatccacaggagtaacagaaagcaatcaaagcaaaaagcagatgcaaggccctcaaactgccatgccctgaaacagggtcactccagggatcagcttgtcctgagagcaggagggaaacatttgatgaaatgtaggatttctgtggcagcagaaaagacccctgcattatggatggaagtcaccctgggaaaagcaccaaaaatgttcaaaggccaaggaatgatttgtgacaaagagagaaaaaaacaataagcagcattaaaacccaaaattactagctaccaagctggt

SEQ ID NO: 911882 - DNA, 580 bp, Homo sapiens
cacgtatctgaaaaggaaaaaagagaagtcactaattcaggtgattagatcagcctctactcctggagcttgtcccaaagtccacattctgtggagttcagtggtaaacaatgcccatgcacccaagtgcccsttatcaacccaaacaaggaaaaggcctcttcaatttcctttcctcatcaatctgagggaacagacaatacataatttcctcctacatcaggctacagcgaaaacacatcttgttcggaactagacacttactcctaagaatgacagtttgattctaatccacaggagtaacagaaagcaatcaaagcaaaaagcagatgcaaggccctcaaactgccatgccctgaaacagggtcactccagggatcagcttgtcctgagagcaggagggaaacatttgatgaaatgtaggatttctgtggcagcagaaaagacccctgcattatggatggaagtcaccctgggaaaagcaccaaaaatgttcaaaggccaaggaatgatttgtgacaaagagagaaaaaaacaataagcagcattaaaacccaaaattactagctaccaagctggt

SEQ ID NO: 911883 - DNA, 599 bp, Homo sapiens
agagttggctttttggaatgacgaacaaaatcaacaaatatttagctagactaagaaaaaagaaaaaagcaagaagactcaaataaataaagtmaaaaatgagaatgtggtcattacaactgatacaacagaaatatgaaggctaataagagacattatgaacaattatacaccaacaaattggataacctagaagaatcagagaaattccttgggtatacaacccaccaagactgaattatgaaaaactagaaaatctaacagacaaataatgagtaaggagattgaatcagtaatagagtctctcatcaaagcaaagcccagggcatgatgtcttcactgctaaattctatcaaacatttaaagaagaaatattaccaatttttgtcaaactctcctaaataattaaagagcagagaatacctccaaactcatctggacactatgttgtacaaattaaatacatacaattttttctgtcaatgtaaaaattaaaatacaaagcaaattaaagtttctaaaaaagaatattttgttactaaaccaattctattacaaaaaacccacacagtggaacctggtatccactgagggcttct

SEQ ID NO: 911884 - DNA, 534 bp, Homo sapiens
taacaaacctttacgtgcacctctgaacctaaaataaaagttaggaaaaaaataaatatttatctatcaaaatamgtataaaaccttcatggggaaaaacgtaagactttagtgaaatatataccaaaaaatctaaataaaaggaatgattatagcatgttcatagataggatgttgaaattgcaactactctgtaactccagcaattttatttccaggcatataccttagaagaattatcagaaatgaacactgagagatgatttagaatattcattgtagaactgtatataaaggaaaaataaaaatcaagtagcttaactgtcaatcaatagaagaaatgtatgtatgtgtgtatatatacatatatatgtgccacatatatataacagtatttaaataaaatgggaaaatataccacaatcaaaacatatgcacaaatatgtgtgaatttaaaacaacgttgattcagaaatgaagattgggaagaaatatacagagtatgatgctgtgtaaaattttaaaacaaagaaa

SEQ ID NO: 911885 - DNA, 565 bp, Homo sapiens
gttttggaatcaggatgatgctggcctcataaaatgagttaagggtgagtccctgtttttctgttgtttggaatgctttcataaggagtggtagcagctctgctttgtacctctggtagaatttggctgtgaatycatctggtcctgggctatttttaatctggctagtggtctatttagttaatcttttcaaaaaccagctcctggattcattgattttttgaagggttttttaatgtctctatccccttcaggtctgctctgatcttagttatttgttgtcttctgctagcttttgaatttgtttgctcttgcttctgtagctcttttaattgtgatgttaaggtgtcgattttagatctttcttgctttatttagtgggcatttagtgctatacacttccctctagacattgctttagctgtgtcccagagattctggtacattgtctctttgttcttattggttttaaagaacttagttacttctgccttaattttgttatttacccagtagtcattcaggagcaggttgttcactttccatatagttgtgtggttttgag

SEQ ID NO: 911886 - DNA, 565 bp, Homo sapiens
gttttggaatcaggatgatgctggcctcataaaatgagttaagggtgagtccctgtttttctgttgtttggaatgctttcataaggagtggtagcagctctgctttgtacctctggtagaatttggctgtgaatccatctggtcctgggctatttttaatctggctagtggtctatttagttaatcttttcaaaaaccagctcctggattcattgattttttgaagggttttttaatgtctctatccccttcaggtctgctctgatcttagttatttgttgtcttctgctagcttttgaatttgtttgctcttgcttctgtagctcttttaattgtgatgttaaggtgtcgattttagatctttcttgctttatttagtgggcatttagtgctatacacttccctctagacattgctttagctgtgtcccagagattctggtacattgtctctttgttcttattggttttaaagaacttagttacttctgccttaatttygttatttacccagtagtcattcaggagcaggttgttcactttccatatagttgtgtggttttgag

SEQ ID NO: 911887 - DNA, 648 bp, Homo sapiens
cttgcccctacctcactcagtatcccagccatggtgcattggttctgtgtacttcaacaagctttgcacaagatagcctgactgcactttgccttatytacattttctgcacctcacatttcctgctccatggcttctctgaagacaaagtttaggaagccagccgggaagcctacaggaattctttgagcctcatgcatacagtacttagaagtgtgagggagttgacattccttgaggcagcactttatcaatgggggataggagcccacggattaattctcttgtttttccactgggtggatagttttaaggtacattttattaggcatctcagaatgttttggtggcatcatgtgatgagtcacccttagctgtaagaactccttgtattggttttacttccttttcttattccaactctccagtgttccaaagtaaattacgtaactatagatctttgtcccaggctctgcttttggtgaaagggttggtactgggagtagccctagaaagtataccctcaggatattgatgctctgttacttactacacatatgacaacagaggccccattattggtagtaagtgctattggacagcaccattatataaggggatacacagttctgacttagtagtatggca

SEQ ID NO: 911888 - DNA, 623 bp, Homo sapiens
aacttgtgtatattattgtgatatatacccctttccccrgagaattctttaagtcagctttttttgtttgtttgtttatgtatttttttttttttttgagacagggtctcactctgttgcccagactggagcatagtggcactatcttggctcactgcagcctccgcctcctggtttcaagcaattctcctgcctcagtctctagagtatctgggattacaggctcgagccaccacaccaggctaattggttttttaaaatatttttaatagagatggagtttcaccatgttggccaggctggtctcaaactcttggcctcaagtgatctacctgccttggcctctcaaactgctgcgattacaggcatgggccaccatgcctggcctaaatcagcttttgctgaaacaatattgcacaataaacaaccccaatcttagtagcttccaacagcaaacatttatttattttgtttcagtctgtggggttaactgcagttaactgtgctcccagctgcaggtcaaatttaggtctgttcctatggctttcattttttggcccaggctgaaggagcagtagctccctgaggcaagctcttctctaggagggctggagcagaagtag

SEQ ID NO: 911889 - DNA, 638 bp, Homo sapiens
aagaaaagaggtttgtgaaatgggcactcaacactgagggaagtggggaatgaggagagtcccacatatgagactaagaagctgcagcctgtgtggtaggaagaaaaaagacaaaaggaaggtctgaaagccaaacaaagaatgagttcaaggagggagtgatcaactgtgttaatgttgttaattttctttacatgtacatgtttctacatgttcataatatataaaaagagtatgtgcattttatatataaatatcaggtctgagccggtgcgcgtgtgcctgcctatcatttaaaatcatttctggaaaaataaagaatggctttgtgcattgcccacaaggaggttcaagatgctcagaaattcactggttaggagcaattctttaagaacacgttaaatataattctataccttatgtagagcccatttagacataagtcctcagagtaagacgtctcttctttcaggccctccctcaatcagcctccctctcttgttgagttggggaccgtgctatgagctgacaatgacccttgwgaaattctcctgtcggtaccatcttggacacttgtgtgtcactgccccgcctctcagtgccttctttccttgggcaaccctccccttagacgtctc

SEQ ID NO: 911890 - DNA, 571 bp, Homo sapiens
gtatagaggttaagctcccaaattctagagtcatattacctagtttctattcttggctcttgccacattctaactgggcaattggggtaaactgyttaacctttaataaatcaggatcactgctcaaaggagataaagcaattgaaagaagaggggatgcaatgtataatctaagggggaattagcagagtacaaacactggaattgaagtctccaaggccgaaacccaaatgaaagcacatatgccttcaggaggaaatcaatcgtgtgggactgagattggcatacgggtgcacatgagtagagctttgaagttcaagcccaaaatgtaacctttgccttggaaaattccccagccaaagtcacagacactaaacaggaagcacatactctatgaaagcaggcaatgccatccatgatgtcttccaggccatttctctaaaacagaaggttcctcctgtttagatctctttgtagcaatgtatacaaatgttagttccaagtgaggaaatttcattcgtgatttctcaagaatggaatttatccaagaaaaacaaccatcccttatgac

SEQ ID NO: 911891 - DNA, 622 bp, Homo sapiens
acatgaaactgtgcacttagcacagtgtctagcactctggtacatgctcaattaataatagttcttattatcttgaactattatcttatgtaagaatgagtactcagtagagctcctgcaaggccatcctcaggytagtgacactgcttgtagtctgggcagcactttctgccttccagacttcaggtttctacagttatatttccagaggtgaacagatggccataggcctggatcctcctccgtaggtggtcaaacccacctccaccctgccagacatcaagatgacagagctatttctgatagttatttccctactatggaaatatgctctacaggtcaacactttatggtgagatgcttcactgggagggggttttcaaccttgtgcttggctcaggcctgggctctttgagttaggctgaagaatttcctccagagggtgtatcatgagagggatcctgcaaaagactctcctgccctcaacaatctcaatagctcattggctccaatgtgtcaaactctaacattacagttccattgttttacgtcttaggaaacaaacttagtaaaataaaaatatccctgggctgggtccaactattaagccattcatccttaa

SEQ ID NO: 911892 - DNA, 593 bp, Homo sapiens
atttattgagagtttttagcatgaagggttgttgaattttgtcaaaggccttttctgcatctattgagataatcatgtggtttttgtctttggttctgtttgtatgctggattacatttattgatttgtgtatattgacttcagtgatgcattatagattcagtgatttttatgtacttaggtagcctcttgaattgagctcctgaaactttgcaatgtaatgtttatcaaagtacatgtgaccatagagatatatttctaaccatttccttctcttttgagaatccaaaacccatgtggtacccacataaaaaaccaagcatttattctgcctcaatgccacattatttgtcattacatttgaatcataggtgaagagtttgaagcaaaatcaaattagtatctgtcctggtttatcatctctttgcaaattggacatttaatttttttataatagtgcacaagttcatattacatcattgtcagtttgtattagtattgctatatatgctggccataastctgtaaaatttgacaagttaactgaaggactaatcacctgaaatgcatctgaccagtaaagataccatcag

SEQ ID NO: 911893 - DNA, 623 bp, Homo sapiens
attatatttattcatatcaagaacatcaagcacttatcctctgcatctaaaaaaaagcaaaaaaaaaagcctatatatcaaattttaaactttattattattatgacattgatacattatagacaacaaaaacaaacaaaaagaaagaaatgtcccaggtaactgtttcacaattacacactgcattttgttagttcatttgaatatttcccaaatggtttattgaaaatagtccataggccaaatattatgctagatgaagatggctatgaaggttaatgagacatggacaattccgtgaggaagggcgcagcatctctcagtatattcagttagatgcttctacacgaattttccaaattatataagctaattttaaaatgttggacagcaattctagaatactctgggttactctgcattttcttaggtgctaaaaaaaaatctcttaatttgtcatcttattggaaaagtcttatataatgtgtcttatctttacctgtcttcctcatgcatttctgaatacttttactctactggtacctgaacacatgtttatctctccaagaagtatccyaattgtttgtttgtttttttcactaagtcgttcatatccttttacc

SEQ ID NO: 911894 - DNA, 628 bp, Homo sapiens
agatcatataatactgttagtcaactaataaatatggcacaattgaaggtgtgtttctaagtcaagatagatacaaagttaggaaaagatatgtagtcattggaagatatccagaatacatcaatctattttctgcactagcctagctcagatgacagtatttaaagacagaaattctttgataggccaataagatggaggaaatgtaccagataaaataaatgagagaatgcaagtgtgacacaagttaataacttcacatataaagatgaatttaatggctgtggcaggtagctactaagtattaagtagtttcaaacaaattaaagattcacttgacctagccatgaagatatatggactatgtgaagggcaatctgtagtcactaatcttaattctaaacatgtcaggaagaagttatctcataatgtgaaaaaacatacaatttactttctggtaatatattatgttcacatatttccaagtattttcaaagatagatagatagatagacagatagatagatagatagatagatagatagatagayagacagacagacagacagacagacagggtttggctctgtgtccccacccaaatctcagtttgaattctacttcctta

SEQ ID NO: 911895 - DNA, 516 bp, Homo sapiens
gtttacaaatcatcagccataaatgtgatttttcttcacattccttgttgatttagtggtttatttagtcagaaaagccagtattcaatcgcagctcttttacacaggactgtgtatgtcactttgggctagccatttaaactctgatatccttaatgtgcttatcaataaaatttctaaagaataactgaagagaagtatataaagttgctagctaggtgtggtaggtattcagtacattttgaattttatctgcttttaaggtgtgaatctaacttttgtgattccatctctttttgtctggcatatgaatacattagcttgattttcctgacatgatacagttcaaattctgtgagccattaccatggctgtcattgaccagggatccagtcatgacaaagtttcctcaagaatctcctctccacctcactccttccccaggctacaataagatcgatgttargttcaagctgggctgaagttcttgccaaggaaagaagccacatacgttgg

SEQ ID NO: 911896 - DNA, 680 bp, Homo sapiens
agaaaaccaaacagcacatgctctcactcataagtgggagttgaacaatgagaacacatggacacaggaaggggaacatcacacaccagggcctgtcagggggtgggggccaggggagggatagcattaggagaaataatgatgacaggttgataggtgcagcaaaccaccatagcccgtgtatacctatgtaacaaacctgcatgttctacacatgtatcccagaacttaaagtaaaataaaaaaatacattccataaataaaaattattttgtcaggggatgtataataaaaatttaaataatgtctcaaactaatttttaagtatttttttgaattgccacaagaataatgttagttcctttattgtgctgggtaaataaagagactgtcaggctatggaagccaccacccttcagcaccagcaaggagacaaggcctctgcggcacctatgattagagctctgtgctggggattcaacttctaaagccttgcagtccgtgttgggggtccctgagcaaggacagatgggcagtcctttgagcacttcaggtggaaaagctctgctcaagtagtgayggtgctgaggaactgagccagggagagcccttcccagaaaactaaactggagaccagaaggataacaaaggtcagttagaattgggggaatgacccaaag

SEQ ID NO: 911897 - DNA, 680 bp, Homo sapiens
agaaaaccaaacagcacatgctctcactcataagtgggagttgaacaatgagaacacatggacacaggaaggggaacatcacacaccagggcctgtcagggggtgggggccaggggagggatagcattaggagaaataatgatgacaggttgataggtgcagcaaaccaccatagcccgtgtatacctatgtaacaaacctgcatgttctacacatgtatcccagaacttaaagtaaaataaaaaaatacattccataaataaaaattattttgtcaggggatgtataataaaaatttaaataatgtctcaaactaatttttaagtatttttttgaattgccacaagaataatgttagttcctttattgtgctgggtaaataaagagactgtcaggctatggaagccaccacccttcagcaccagcaaggagacaaggcctctgcggcacctatgattagagctctgtgctggggattcaacttctaaagccttgcagtccgtgttgggggtccctgagcaaggacagatgggcagtcctttgagcacttcaggtggaaaagctctgctcaagtagtgatgstgctgaggaactgagccagggagagcccttcccagaaaactaaactggagaccagaaggataacaaaggtcagttagaattgggggaatgacccaaag

SEQ ID NO: 911898 - DNA, 665 bp, Homo sapiens
ctggagaagaaaataagtggtaaattttctgttttcacctttaagtaaaatgatcctgacataaayggtagtaaggagaattaagattaatcagaattgaattgggattcactttttactaccacttctatcacaatgattccactaaaacagtaatttttatttgatctatgaagccttggaatctaatccttcatagagttctgggaattattataaaccattgcaaacacaaaaagttcagagaatgagataaataacacccatgtactgactatattttgaaatatctaaatagtttgctgcagtttcattttttaattttaaatagaatattacggaattggtagaagcatccttcacaattcactctaccctttctcctgggcaggctcctggctctttacaacagctccctaattatttctcaaatagatatcaggattttcaaaataccacttaaagctttctgttggttatttgcacccatcatttgtatttcagcacagccaaccttggtttcctgttggttgttctttcccaaactaatcatcaccttctctggggagatgggaaagtcttacccaactccattacacatgcaacagaactgttcctaggaaacaccgaggcctttcttggtccgagatttgccgagcacagat

SEQ ID NO: 911899 - DNA, 655 bp, Homo sapiens
actgggacttacttttttggctgccctggttcccaggcctgcaggattggastagaactacagctagactttcctgggcccgcagcttgcagatggcagatcataggatttctcagcctccacactgagtgagccaattccttccaaaaaatctctctccatatatcaatatatttcctattggttctgcttatctggacaaccctgaccaatacacagggtgaatgctctttttgctaaaccacagttgctattgcaggctggcaccagggctgacatagagtcttcctctgccctccagaatggttggtgcaggagccttaaaccactcaatgggtctgaacccttggcagttgggaactggcagggaaatggtgtgcaggctcctcctcactcccagcctctcccttgagcatggaaattcggctaaggacctcatgtcactgaggatggccctatattcacaagcaactgtggattagaattaagtggtgagacacactgttgatggttttacagagttacctgaattcttttggaaccaactgagatgttatctcagccttagagggcagctgcatcctttatatcctgccttatttcaaggagtcaacaattttatttctgagagggtgaaaacatctgtaatccatcc

SEQ ID NO: 911900 - DNA, 589 bp, Homo sapiens
gccatgtgaagaaggacatgtttgcttccccttttgctatgattccttaagtttcctgaggcctccccagccctgcagaactgtgagtccattaaacctctttcctttataaattacccagtgttgggtatgtgtttattagcagcatgagaatggactaatacatttgggaaatgctaactggttaatctgatataatcaaagtataccgtgaggaaatgtaaaggagttgaagctgtggagataggatagggtcagatgattaatactaatagtttgcatttactgactatttattatgggtcagatacttttattcccatcatttcatttaattttcacaacaactccatgatgtaagtgctactattttctctccaatttacgtatggagaagctaagtaactagctgaaggctgcataactaataagtggtagagctagggttgaacctgatatacactctggtgttctggaatcagactgcctggagtccacactccctctacccctcatttacaccccaatccctacacccaaggaaawgtgtggtagccactgaataccaatttaaaatcactgtggtaga

SEQ ID NO: 911901 - DNA, 560 bp, Homo sapiens
tttcccctcctgtgagtggaatgagaggctatcagtgagaatggggctcaggagatcccacttgagcccccaagaactgttttcacagttcttagtgatacgtgcaaatttagtgctaaaataaccctgggccacatatacatactagctttgcctctagcatcccaataaacaggggttgactggcacattctctctgaggcctgccttttctgagctgactcttctgggtacgcacctctcctttgccatcacaggtggcctgctctgctccagactccgggctcactgggtcctggaaaaggggcagccagggtgacttttgaatacagtgaattttccccattacacaattgcatattctcatcattgtaaatccagagaataaagacaatttgtaccgaaacaaatgacccacgaccacaaagggcatcagcacttttctaagcacagagcctcacctggcgagaatccacagccacatgcacctggcctggayctgctttcctgtggctctcctggggcttctcctcccaggaaatcctgctctggttctacaa

SEQ ID NO: 911902 - DNA, 681 bp, Homo sapiens
ggcgaaaggcccagccctctccacaggcttcctgacacccaccctccagcaggaggggagagatgtcttattactgccaaggggccatggaaatcgaggctcccaygtgggtgcagtgtgcctggtactgccaggaaggatgaatattctcacttggccttctttgataccagtttttggaggacaggagattttggtgcttccttacagtctggccaagtctccccacttggcctctgctggcctggggacgaccaaaactctgctttagccaatggaatgtgggtaaatttgataggagcaggagacttgaatatgttagcgcagttttgtttaatcttttttttttttttttgagatggagtcttgctgtcacccaggctgatgtgcagtggcacaatccaggttcagtgcaacctccgcctcccaggttcaagtgattctactgtctcagcctcccaggtagctgggattacaggcacgtgccactatgcccaactgtttttgtatttttttagtagagatggggttttgccattttgaccaggctggtctcaaactcctgacctcaggtgttccgatgcctgcatctgccccccagagtgctgggattacaggtgtgagccaccgaacccggcctagtttaatctgttgcttgcctgccattcactaagggaagaa

SEQ ID NO: 911903 - DNA, 608 bp, Homo sapiens
atatgataggccacaaaacaagtctcagtaaattttaaaaaattgaaattacatcaagtactctctcagatcacagtggaataaaattagaaatcaactccaaaaggagccctcaaaataatgcaaatacatggaaattaaatgacctgctgctgaataattgttgggtcaacaatgaaatcaagatggaaatttaaaaattctttgagctgaactataataatgacacaacctatcaaaacctcatggatacagcaaaagcagtgctaggaagatagttcatagtattatatgcctacatcaaaatgtctggaagagcaaaaatacacaatctaaggtcacacctcatggaactggagaaacaagaacaacccaaatccaaacccaaaagaagaaaagaaataacaaagatcagagcagaactaaatgaaattgaaacaaaaaaaaaatacaaaagataagtgggacaaaatgmtggttctttgaaaagattaaaaaataaaacctgatagaccaaaattgagataaaccaagaagagagaagatccaaagaagctcaattagaaatgaaacaggagatattacaactgataccacagaaatacaaa

SEQ ID NO: 911904 - DNA, 649 bp, Homo sapiens
aatccacagacacttgacaccagcccttgaaagcagccaggagggaggctgtaccctccaaagccacaggggtggagctacatgaggccatgggagcccacttcttrcatcagcatgacctggatgtgagatctggagccaaaagagatcgttttggagctttaagatttgatggatttcagacttgcatggagcctgtagtctcttcgttttggccaatttctcccatttggaatgagtgtatttatcaaatgcctgtaccctcattgtatctaggaagtaactaacttgcttttgatttataggctgataggcagaagggacttgccttgtctcagatgagactttggactgtggacttctgagttaatgctgaaatgagttaaaactttggggggcggttggcaaggtatgattggttttgaaatgtgaaaacatgagatttgggaggggccaggggtagaatgatatggtttggctctgtccccacccaaatctcatcttgaattatagttcccataattcccatgtgttatgggagggactcagtgggagttaattaaatcgtgggggcagttttcctcatactattctcatggtagtgaataagtctcaggagatctgatggtttgataaggggaaacccctt

SEQ ID NO: 911905 - DNA, 695 bp, Homo sapiens
acagcctcctaacaacatagaatcagaatttargcttgcctaactctacagttacagtccatggctccccattactcccactagtctatgctgccaccattctacatatgggggttttatagtcttactcaaatgtgaattccagagaaaatcaataataacacatctattcctttctcttaccttttcttctcaaatggagagtttttagtattaggtaccttgacaactgtacataattgttaacactacctttttttgttaaatggagagttgttagtgtcaagtacctttaatgaaatccatgacaagtgtacataattgttaacactgctgcccccaatatgaaatgattactgcttaatcttaaaaatgtaagaataaacattggcctgttccatcgagaagagcttttttcatcaaacatgcaaagatgttataagtcaaattaatgctgtgttttaatataattgttctgaaattaatttttcaattagtaattatatagaatttttttaaatgcatgtttgcttcaaacggtgatgttaaatgactcctactgactcaacttccaaattactgaaccacatatactacaataaaaaccacctgactctaaataaggttcaataactttcaaaactgttaacaagagacttttagttcaagccttacagtaattaccattccccaca

SEQ ID NO: 911906 - DNA, 634 bp, Homo sapiens
tggtgttaccagttgagggtgtccaggttcttggcattttgaacaaataattggataaaacacacaaataaagcacgggaagaatgaagcaataaaagcagaggtttattgaaaatgaaagcacactccacagggtgggagtgggccccagcaagcaggtcaagggcgctggttacagaattttctggagtttcagttccctctagaggtttcccatgggttacttggtgtatgctctatgtaaataaagaggatgaagtcaagttacaaagtcatttactcagtatgtaccctatgtaaatggagaggatgttactgggtgtgtgtcgcctatgtaaatgaagaggatgaagtgaagttacaaagccattcacattcgtgttattgctgaagtgtttccatttaatttagttctaggaagtcctcaggttcccagtctccaggccctattctcctacctcaggggcaccatgcttgtacagcctgcagaaacatgagccaattaaasctcttttctttataaattaaaaacaaacaaaaagagtcttttatagagagcaactcagaaaattgtggtaaaaagataacattcattttgtattcaaatgccaaataccaaatgtcaaatgcttcc

SEQ ID NO: 911907 - DNA, 627 bp, Homo sapiens
tttatcaaaggccttttctgcgtctattgagatcatcatgtggttttggtcattggttctttttatgtgatagtttatgtttattgatttgtgtatgatgagccagccttgcatcctagggatgaagctgacttgattgcggtggataagctgcaatcggattctgtttgctgctggattcggtttgccagtattttattgaggattttcacattgatgctcatcagggatattggcctgaaattttctttttctgttgtgtctctgccaggtttttgtgtcaggatgatgctggcttcatgaaatgagttagggaggagtccctctttttctattgtttggaataatttcaggaggaattgtgccaggtcctcttcatacctccggtagaatttggcggtgaatccatctggtcctgggctttttttggttgttaggcaactaattactgcctcaatttcagagcttgttattggtctactcttgggctaataycagaatctacaaggaacttaaacaaatttacatgaaaaatgcaaacaaccccatcaaaaagtgggtgaaggatataaacagacacttctcagaagaagacatttatgcaggcaacaaacatatgaaaaaaag

SEQ ID NO: 911908 - DNA, 620 bp, Homo sapiens
cattcttatgcctttgtgtcctcatagcttagctcccacttatgagtgacaacatacaatatttggttttccattcctgagttacttcacttagaataattgtctccaggaaaagtgtgttttaaaggatgatgagaaatttggaagatatggggaggttgtgggaaaaggagatcatacctctcgaggcaatggcagaatgtacccattctctcctgagaacatcaaatggtctggtttgcctggtgccctcagtgaagcttcaggaagtcaggtgggaatcatgggtggtggccactttgcagagggtcgcgggatttgtggctggctcagcaagtatttgggagcagaaactgcctgctgctatcattgctaaatcttctacttagcggagctgctgaggggtgctttccaaaaagtctttaatcatgttttgagtctttataaaaactcagaaatcatacagtttttctttttcttctttcttcagatacatgtcatagcagtaagatatgtatccttaaatatttcctcagaaaaaattaatggagtgaattaaaagagacyttctttcaagctgttccaaatgaactcatttcacagcctttatcatgccttcc

SEQ ID NO: 911909 - DNA, 648 bp, Homo sapiens
gttttatagcttgaaaagttttccttttgcrcattagtggtttttttctttcagattagataactctctttagtacttcatgaaaaatggttcttgtggtgctgaattctctcagcttttgtttgagaaagactttctctctccttcatatttgaaggataatttttctggatgtagtattctggatggtatttttttttccttaagtactttgaaaatgtcattccacttcctcctggcctattttgtttccattgagaagttggttgccagatgaattggagctctcttgcatcttatttgctttatcttactgcttttggaattttctctttgtccctgacctttgagagtttgattactatataccttggggtagtcttatttgggttgaatctatttggtgttctcaaactttcctgtacctggatacttatatctttctcatgttttggaaagttttcagttattcctttgaataacctttctacctcttgctcttccttagctcccccttggacaccaataattcttagatttggtcctttaaggaaattttctgtatctcataggtttttctgttctttttttttttttctttttcttttcttatcctctaactgtgtgttttcaaatacttggtctttg

SEQ ID NO: 911910 - DNA, 622 bp, Homo sapiens
actctgcctctgagttgctcctcatactctactctcaacgatttccacctccacttctgctctgcccatggaatttttcaggattaatcttcaatagtcttatctctaatgagtctacttaataaattagcagaaattgtcataaaggaatcatttgctagtgaacatatattcggtcatatataatagagaatatcagttaatgcccctgaaagatgatttactaagcaaatgttctgttccatacacttgctttcagtcacaagtaacaacagtaacaataaaataatcaaacattgattttaaaaataaaagatttatttatctcccacaaataggaatactcggtgcaggctgatacagtggttcagcaatataaaggatttgggctccttttatcttcctgctctgatattttactgtgggactgtggttcctttggcaacaaagttctagtccacctccacacgtctttcttattccaggtaagaaaaatggggaaagggaggcaacattcagaatggtggcataagaacccctgaagatatgctycttcacgaaagcaatgagaacaccagcaaaaatggcaaatcaacgttttaagaactcagcaacattaaca

SEQ ID NO: 911911 - DNA, 596 bp, Homo sapiens
agtagtgggattgctagaaattttgccagtgggctgaatagtcaaatacagcagagcttgwcatggtttatttattaattagtgcagcacaaaacacttttttgtttaaatcttggaaattaaacatttttccaaactgtatttttcaccacagtaagtagaatacactgccaataaattcatgtttcttggaagattaggctctttctcttgctctacgggaacattgttaacattaaaaattactggaaatattataggtttaacaaatactataggtattttccaatgtagtttttgctgactacttatatagaacttgatttatttgaattacctaatttctcatattgagctgcctgaaaggaatgtctatcatgaacagaaatgtcattgcagataacccacagtggtcaatattgcagaggcatatggaccactctgggttatctatcttattaagcaaacctcacaagaaaacttaataactatgtagatacctctgtaactaattagaaaacattttattttctcttttgctgttgctgattttcccattttgaagtacactgcttttatgtagaattaaatggatg

SEQ ID NO: 911912 - DNA, 560 bp, Homo sapiens
aagttatttgagaaatccccaaactactttccacagtggctgaactaatwtacattcccataagcagtgcatatgtgttcctttttctctacaaccttgccaacatttgttagtttacttttaataatagccattttgactggtgtgagatagtatctcattgtggatttgatttgagttaatctgatgattagtgatgtcgagcaaatatttttcatgtttgttggctgcttttctgtcttttgagaagtgtttgctcgtttactttgaccatttttaattgggttatttggtttttgcttgttgaattaagttccttatagattctgaatatcagacctttgtcttatacatagtttgcaagtattttctcccatttggtagattgtctgtttgctctcttgatagtttcttttgctgtccagaagctttttttagtttaattaggtccagtttgtctatatttttgggtgggggtataattgctgttggggacttagccaaaaattatttgccaaggcagatgctgagaagggtattttttacatgtcttctaagat

SEQ ID NO: 911913 - DNA, 624 bp, Homo sapiens
acacattgtctggaaggcccgccttgtaggatgagctgtgttagtttgtgaggatccaaccttgcagatggaaaatgacttttgaggaaatacgaggcctaatggttccttatttgctcatctgggtgggtctgagaggaagagggtctgggagaaatgggctcttaatggaccagggtgacctttttatgtctctgggcaactgaactcagaaagggtctgactgattctaattgctctgacaacacaccaggagtgtgtgttgagcctcagaacaagccggcagcctggctccctctgttcctggatgatgagctgggccctcaggctcctgacaggctgctagcataagcttcatccatagtgcttgaatgctgccttgctgctgcaagaacagagaacagtggtgtgtcagcatgaggacaggcccactgggaagacaggagttgggacagaaaactttttattctgtcacatgatgtaaaatcaaggggacttggtaaaatcacaggaactagattaaaggaaatrtctctggtcgtattgtatactatagagctggtctaactgtggcaacaacattatgggtttttatagcacctttcttccccacggcacggggtg

SEQ ID NO: 911914 - DNA, 630 bp, Homo sapiens
gggtggccatagtactgtagtcaccatacaatttattcagctttgccctccagtgtggmgttccttctggctttgagctgattctgggccagcttcttctttgcttttctctccttctgtgcctcaaaggttcactgccacttccctgctgaatttcagtgttctgtaaaaatttttatttgtttttaaaaagtcttatgtaactatagaattgaaattattaatggaatagaaaattaaatgtaagaaaaagcaagaaggaagcaagaccaatatttaggaggcaatcatctctccagatgactcacagaagaggaaatctcaaggagtagattatttttaagaagtttctggtacagttcctctgaggtcctgtgactacccctcccccaggaaataacttttttatttaaccactacattgacatctacagaagttgacacctgtaagttttagacataaaattgattcaacttacagtgcaacaatttaaatgtatgcatcactgctatattgaaaatataatatgtcgttagacttaagactttcctttgttttgtcaagtttttttttctcatggtgggttagtttgctttgggaaccccagacctaaacctcagccatgcttc

SEQ ID NO: 911915 - DNA, 569 bp, Homo sapiens
aggaaaatggattctcccttagagcccccaaaggagtactacactattgacactttgatttgaggacttctgacctccagaaatgttaagtaataaatgtgtattttaagacattaagtttgtgataatgttttaatagcagtaatggaactaatgtataagaatttttacttatttatgtaggctactcttgtactatgctgaatagtacatacagtaataaccatatggtaatatctaaaactcataactgtgattttctaataattgggtggccaacagtgttgtccctcattaagccaaagcaattatccggtgctgacaagccagtcaaaatcattcaaattcatgtatgtgattgattgaaatggaagcactgaggatcattgaagaagtaccatggaaacagcatttgccattccaagatatttagatgctttcatgactactcatcaatgaagtaatgaaaattttgggracagatgatcataattttgagtacggttcaaagaattttaaagtaatgacaaatgtctatgcttactatagggagatttgccagaaagaga

SEQ ID NO: 911916 - DNA, 633 bp, Homo sapiens
tttcgaaggattcatgccactgtaatgagagaggcagtgtaggcaaatggtctgagccttggatggagattgaagtcctgactttagctgggaaatcttggttaagagtctttctgtaccttaktttccctaagtgagaataagagagttggacaagacgaatgtatctccaggttccaatttttctgagaatggttgatagagaagctgctctctccttaaaatgcatggactcaatggcttgaagatattccccatggggaaccattgccacggaggccttgcatgcaagaagtttgggtggggacagtgaggaactgaaacacaagcaccttccaccaattattgctgtgaagaacctgagcctgaagaagctccatctaattttttccccagagttccagattttagggtgcaatcatccagcctatacatgtggctcatagttcaaaaaattaaaagcaaaaccagaactctccagtaggaatggagaaaacctatctgtaggctgaactggctcctttgtcttaggaggcactggtcaggggaaaaaagctgtcttccagacccctcctttctgggtggctactgtggaatcaacggggtcactggctgtaaatcagtaagtcatag

SEQ ID NO: 911917 - DNA, 651 bp, Homo sapiens
atgctttgctgtttagaaatttcttcctccagatacccaaaatcatctttcccaagttcaaagttccataaatctctagggcaggagcaaaatgccactagtctctttgctaaaacataacgagtcacctttgcttcagttcccaataagttcctcatctgcatctgagaccacctcagcctagactttattatccatatcggtatcagcattttgggcaaagccattcaacaagtctctaggaagttccacacttgcccacatttttctgtcttcttctgagccctccaaactgttccaacccctgcctgttaccaagttcaaaagtcgcttctacattttcatgtatcttttcagcaacgcttcactcgactggtaccagtttactgtatttgtccattttcatgctgctgataaagacatacctgagactgggcaatttacaaaagaggtttaattggactgacagtttcacgtggctgggagagcctcacaatcatggtggaaggcaagaaggagcaagtcccatcttacatgaatggcagcaggcaaagagagaatgaggaagaagcaraagtggaaacctctgataaacccatcagatcttgtgagatttattcagtttcacgagaagagcatggaaaagaccaa

SEQ ID NO: 911918 - DNA, 616 bp, Homo sapiens
ttttggtctgtttttctatttttcaaaattcttctttttcatcttctaaggaattatctttggatctatttactcacatatttttttctagtttagtttttatttctgaattttttattttgtattattttctgagttccacaaactcttgatctaatcttcctttcctctgatcacctcatttctgaattttgataattctgatatatgctttttttcatagcttctgtaacttcttaaatttcttcttgttcagttttgaatattaggtaagatttccatttgttttcctggcatctacttctagttagtttcattatctgtaagaatattattctttttctaataacttagtttttaattgttttacagctttaaaagagctataaatgacataaaatagtgtatagtataaatgtaaaatttgataagttttgacatataagcatgaaacattgaccataattaaggtgataaatattatctatcacccataaatgatttttcatgtgcttttgtcatctgtctttctactcccaccccrctaaaggtaaccactaatctgctgtcatattagtttggatttatatgaatagatcatactcctcttaattct

SEQ ID NO: 911919 - DNA, 581 bp, Homo sapiens
gtttataatgaaggagaatattttgaccyagatttaagagagaccacagaaacccttttcctccaaggtagagttaaaaggtagggtttctttttttttcttgaacacactcatcttgtggaaaagggtagggtttaatgtctgtctttcttgagtgtcgtgtattcctatgacctctctagcaaacagcaattctgaacattttctgatcatctcaagctttctttagatgtgaagatcagccacccaattttgaaaatctcactcatatagctcatctcatcctgttagggccaatgctaagcaggaaataagtatacagtagaatagaaagcagataaagttgatttcctctgagtattgactttagaggggaatctaggaccctattaaggccgtaacaggtaaacagatgcaggaagactttgggaaagtagcagggagcctgtaaatattggctgtgctgattacaaaaagaatgtttatatacagattcctagactaataggattaatgggaaatagggaaaattgcaggttctctttgcctgcatcgtttattcttttctgtctttatattta

SEQ ID NO: 911920 - DNA, 584 bp, Homo sapiens
tagtcatgtggccttggggaagccccttctggacttttctgtcaatgaagaggttggaccagacttgggatatgcaaaggagatgttgcatctgctgccttggctaagggtgtggaagaatagtgaagaagcagaggaattcagatatctctgcttcaagagtggattcagcctttcctagtctacatatatggagcatccatgtaagtcacagtcaatacgagggtcctgaggttaaaatatactgaaaaatcttatatcctgtggatatcatgaatgcacatctgacattggttaccattgagtgcttatgatgtgtcaagcactgaaccagcaactttatatgcagccttttatgaattcttagaataactccgtgaagtaggtactattatctttcccattttacagttgaggagacattaacagcctttcttgccctgacctatatcccatggcaggaaagttttaagtgaagatggagaacaaastcaagagcttctgacactcaagtctgtatacttgatgactatgagacaactgtctggcactgaagaacagaaggtatgttcccatctactcag

SEQ ID NO: 911921 - DNA, 577 bp, Homo sapiens
atactaaacgtgctttaaaaatgaaaaagataaacacgtatttccaatgcakatatttccactacagaggctccaaaaccatatctgcagtatctagttcacaaggacccagtaattgcagaataaataaatgactttgcatccacttcttaactctggcaacttattagtttccttaaacataaaataatttagaatctcaagtctcagaacagataaagtattaatacaagttaggagacagtatctttacttttttttcacattattttactgaaatacaagtttggcatcaataaatcatcatatatttcgtaaagcctaactctcagtctgaaaaactagttaaaagttctttgaaaatattttggttatatcaatccataaaaatgattgcagacttactttcccaagcagatgacttaacatactcttgaacaatgctctttacataagcatttaaagatgtcttgtgaagtccaatggagctacacgtaggggatggcttaaaatagctttcattaacacgtagccagtcacacagctggaaaagaaaacagttattactttattttaa

SEQ ID NO: 911922 - DNA, 616 bp, Homo sapiens
aacaaagatcaaaaaagacaaagaagggcattacatagtggtaaagggatcaacacaacaagaagagctaactgtcctaaatatatatgcacccaatacaggagcacccagattcataaaacgagttcttagagacctacaaagagacttagactctcacacaataataatgggagactttaacaccacattttcaatattagacagatcaacaagacaaaattaacaaggacattgaggacttgaactcagctctggatcaagtagacctaatagacatctacagaactctccaccctaaattaacagaatatacgtttgtctcagtgccacatggcacttattctaaaatcaaccacataaatggaagtaaaacactcctcagcaaatgcaaaagaactgaaatcataacagacagtctctcagactacagtgcaatcaaattaaaatttaggattaagaaactcactcaaaaccacacaaccacatagaaattgaacaacctgctcctgaatgactcctgggtaaataaygaaattaaggcagaaatgaagaagttctttgaaaccagtaaggacaaagagacaacataccagaatctctgggacacagctaa

SEQ ID NO: 911923 - DNA, 563 bp, Homo sapiens
tccacaaacagcttgtaccatgtgcctggaaaaccacaggcactcaatgccaacccgttaaggagtkgcccaaggccatgggagcccacctcttgcatcagcatgccccagatgtaagacatggagtcaaaggagatcattttgtagctttaagatttaatgactcccccactggatttcagacttgcatggggcctgtagccccttggtttgggccaattccttccatttggaatgagtgtatttacccaatgcctgtacccccattctatctagaaaataactaccttgcttttgattttactggctcaaaagtggaaggaacttgccttgtctcagatgagactttggactgtggacttttgagttaatgttgaaatgagttaagactttggaggactgttgggaaggcatgactggttttgaaatgtgaaaagacatgtgatttgggaggagccatcggtggaagaatatggtttggctgtgtccccacccaaaactcaccttgaattataatacttgttaataataatattgtcaataatatacttgtcaatgataac

SEQ ID NO: 911924 - DNA, 563 bp, Homo sapiens
tccacaaacagcttgtaccatgtgcctggaaaaccacaggcactcaatgccaacccgttaaggagtggcccaaggccatgggagcccacctcttgcatcagcatgccccagatgtaagacatggagtsaaaggagatcattttgtagctttaagatttaatgactcccccactggatttcagacttgcatggggcctgtagccccttggtttgggccaattccttccatttggaatgagtgtatttacccaatgcctgtacccccattctatctagaaaataactaccttgcttttgattttactggctcaaaagtggaaggaacttgccttgtctcagatgagactttggactgtggacttttgagttaatgttgaaatgagttaagactttggaggactgttgggaaggcatgactggttttgaaatgtgaaaagacatgtgatttgggaggagccatcggtggaagaatatggtttggctgtgtccccacccaaaactcaccttgaattataatacttgttaataataatattgtcaataatatacttgtcaatgataac

SEQ ID NO: 911925 - DNA, 667 bp, Homo sapiens
tgaggcttagcaaagacaaatcttgtttcagttaatacaaagccaagtgggaattcaaccttgaaacatgctgtgttttgtcaactgttctacagagtcagtrgggagcaaataaattacagaaagagcacagaaagggaagaaagatgcagaagaatcttcctggcctgctgacaaacctaaatctgaccctgacccctggcagatcatctgggtgaagatacagtatctccgtctgtttccaacccaagtaggacagtgcagtgatcctgtcatttacataatcttctctgtccccaaagcaacccctctgcctgtggaattcatttacagcctgctctctatgcaataaagtttcaggaacttacagacttcaatagctgtatttcagtttagacaagtaaggcgtgtgaaaggaagaggagctggaaggaaggatagaaaagcaaacctttgtgaatcatttataataagacctgagagcccttgtttgctttcacagttgagtggtcctttctggaataccaaggacactgcgatggagcatctccttggtggaaggggaggtatctcccacatcagggagtgtgctcctccttcttcctccccacctcacctgggctaggaatgggagagaagcgagtcagcctccatgcagtttcaagca

SEQ ID NO: 911926 - DNA, 635 bp, Homo sapiens
tcatgatagtaaatgtgttctcgtgaggtctgatggtaggtaaaaagtgtgtggcacttccygccttgcactccctcttctgccaccatgggaagaagttccttgcttcccgtttcccttccgctgtgattataagtttcctgaggcctcacagtcatgcttcctgttaagcctgtggaactgtgagtcaattaaaccaaacaccgcatgttctcactcataggtgggaactgaacaatgaggacacatggacacagggtggggaacatcacacactggggcctgttgtggggtggggggagcggggagggatagcattaggagatatacctaatgctaaatgacgagttgatgggtgcagcacaccaacatggcacatgtatacatatgtaactaacctgcacgttgtgcacatgtaccctacaacttaaagtataataataaaaaaaattaaacctcttttattcataaatgacccagtctgaggtagttctttctagcagtgtgagaacagactaatacacaaaccatttactaaactgacaaaaaagaaatatatatgtttaataatctaaaaacaaataatagatataatgaaaattagaaattatgagggattatgtttactaacaaat

SEQ ID NO: 911927 - DNA, 665 bp, Homo sapiens
tatctacagtaaccagcccaggaaaccagccatttttctacaagtcagatttgtaggaagttagactgttatctctagcaagtggtccatgaaggcaaacagtccctgtaacagtcagttaaaacagtcagggacatggatgaagtggaaaccatcattctcagcaaactaacacaggaacagaaaaccaaacactgcatgttctcactcataagtgggagttgaaccatgagaacacatggacacagggaagagaacatcacacaccggggcctgtcatggggtgggggactaggggagggatagcattaggagaaatacctaatgtagatgacaggttggtgggtgcagcaaaccaccatggcacgtgtatacctatgtaacaaacctgcacattctgcacatgtatcccaaaatttaaagtataataataattaaaaaaacagccaggatttgattaataactgacaacttccttaatttttgttccttgttgggaacaggacccccaaaatctggccataaactggccccaaaacttgccataaacaaaatctctgcagcactgtgmcatgttcatgatggccataatgcccaccctggatggttgtgggtttaccagaatgagggcaaggaacacctggcccacccagggcagaaaacca

SEQ ID NO: 911928 - DNA, 665 bp, Homo sapiens
tatctacagtaaccagcccaggaaaccagccatttttctacaagtcagatttgtaggaagttagactgttatctctagcaagtggtccatgaaggcaaacagtccctgtaacagtcagttaaaacagtcagggacatggatgaagtggaaaccatcattctcagcaaactaacacaggaacagaaaaccaaacactgcatgttctcactcataagtgggagttgaaccatgagaacacatggacacagggaagagaacatcacacaccggggcctgtcatggggtgggggactaggggagggatagcattaggagaaatacctaatgtagatgacaggttggtgggtgcagcaaaccaccatggcacgtgtatacctatgtaacaaacctgcacattctgcacatgtatcccaaaatttaaagtataataataattaaaaaaacagccaggatttgattaataactgacaacttccttaatttttgttccttgttgggaacaggacccccaaaatctggccataaactggccccaaaacttgccataaacaaaatctctgcagcactgtgccatgttcatratggccataatgcccaccctggatggttgtgggtttaccagaatgagggcaaggaacacctggcccacccagggcagaaaacca

SEQ ID NO: 911929 - DNA, 647 bp, Homo sapiens
cctatttagtttaggaatagaacaacagtagctagtaggctgttgtgctactaattaaaacccagtcattaggagccactcaatgattyactgtggccaaaaaacatttattggattgacagacagtgctgtaatattttgacaacacttatcaagaatagtttggtgccaggcaatgaaatttgtagtatagacatcattaggtagtttaaaagcaaataatgtgtcttacttgtaagatctgtgaaagtgacactactccaaatatataccatctgttccctagccctctttcaagttctatttctgtaaaggtctagttacaaaagctagctcccacaaaatgtcaccaagtattttttaggggagatagaaacctcctattctaggtatggcataatagagagttgtgggtttctggttacctgggctcttgtgatgtttctcatctaaaaagtcacaaagtacttgaagccatctgtccagaaaaccaactgattattacaaggactggaagcaagggaagctgtgtggctctctgttcttggttgaatattgtcccctcaaaattcatgtgcacctggaaactgggaatgtgaatttacttgggaatagggtctttgaagatataatcaagttaagatgaa

SEQ ID NO: 911930 - DNA, 248 bp, Homo sapiens
atgtaatggacatgctgaaggatgcatcagagtctcttaacattagaactgatcaggtagaagaatgcgttagtgagcttaaagataggctacttgaaaatacaatcagaggaaacaaaaggaaaaagaataaaaaacaatgaagctcacctataggatcttgaaaatagcctcaaaggggcaaatctgagtaaytggccttaaagaggaggtagagaaagagatggggtagaaagtttatttgaagg

SEQ ID NO: 911931 - DNA, 642 bp, Homo sapiens
accaccatggcacatgtatacctgtgtaacaaacctgcactttctgtgcatgtatcccagaacttaaagtaaaatttttttaaaaaaaggatttcaagatgaaaaaaataaaatatattacccagtctgaggtatttctttatagcaacacaagaatggactaacacaattagtgtactgcatttgtattgtatggtacttgacacatacttagcacaaattatgtcatttgatctttacgacaccttttggaaataagcaatgtgggcatattccattttcaaatgaggtaaatgaacattctgctttaagtccttttgtgaaattatacatggtttaaataataaatcttattctacttttcatattccactttgctttgcagatagtacctattcactaaatatttgcatatcttaaatttatagccctcactaagataattttgaaggcagaaaataatgattatgttcaaacactagccaatataaaatactctggcaaggatttgatcatagacaagcacagaattgtaaggtttgtttacattaaatgctcagtcagcttgaaatatggtggtagactatcttggtgcttagtaaccctcatgctttatgggaaraggtcaaagaaacaggggta

SEQ ID NO: 911932 - DNA, 587 bp, Homo sapiens
ttcctcacctttaaaccctaaagagagactctctccaccaygaaggcttacacgtaacactttgttcaattgtttgtaacagaagctcaactacattattttaaccaaataggggtttgttttctcacacaccaagaagtccagaagcagacagcccaggactcttacagctgctcagggaaatcaccaaggaccaggctgcttctaacatccttatctgacaaccccagcgactggcttcagtcctcatggtggtaagatggctgctctactctatgtgttgtgtctgggtcccaggcaaagagaaggggcaggagcaaagggtccaaggtgcatgccaactgagtctgtgcctttgtaccaagaaaataatcgctttcctggaagccccactcactggacttcctctgtcatcttgctggccagaacctgattgggtggccacccttactgggcacatggctctcctaaacaaaaccggcatgctattagaaaggaagaggaaatggtagaagatgagataaacaaccagcggtgcctaccactccttcagtctattccagtccattggaactttaccctccttt

SEQ ID NO: 911933 - DNA, 628 bp, Homo sapiens
taggtgacatctgagctgtatgttgaaggacaagtggtataggaaaacagcctattgcayggcaagagtgacgccatcttgaagtgaaatcaccgtggtggctaatatttgactcctccatagcaaggttttaagcagcaaggtctttaaacaatgttatagtgtagatagcctgaaaaagatgcttccctaaccttcccaatagtcacaagtttcacaagaaaatctgaaacatgaccaactgcacatgttttactctaaaatcttgctacaagtgtaggaatccaccgtctcatggccaccagagaccttgcttctgttcctaagtccctaaaaaaattttttttttttctgagaaactggatttgtcaacctctttctttggcctgttagctcccttggctttgggagttaggtttgcatagacctgttcaccacatggaataagtgagaattagccaaagaaagggagaagggtattctaagaagaggctagcacatgtggaagggagcacgtccagggatgggaacagttagaaatgttgatcagtgctgtccagaactatctacgaaagtcctatatctatgatgtccaaatggtagctactagtcacatgtggctgttgag

SEQ ID NO: 911934 - DNA, 589 bp, Homo sapiens
gtattaaacattctattaaccagacataatacaattctacttggagcaagatacartcattctttatgtccacttctgactatccattatgttggtcatcatatccatggtcctcctgcagcattgctccactcatcagcaatgtctggccagtttctttgttgctccccttacatacatacctacaccgtctcactagtaaatactgatttttgcattaagctgccttttctcaagtggagtcttctcaggttctgtagtcaactgttgttctgtctatcccccatgggcaccccactgctaatctttttcttcttttccttggccagtctccacaattcactggcagcagcactcatgcttctttttcactgctttttgtcttttccaaggctgcatgtccatcgcaatcattctagggagcttaaaaaaaatgaataagcacaatccctggagattgattttgggatatctgggatgagctcttggcaatctgtgttttctaaaaactcctcagcagattttgaagttcgaatgatccctcttatgaaaggtgcagtgtgataatcacatacctttaactagaatc

SEQ ID NO: 911935 - DNA, 604 bp, Homo sapiens
cagttcgatctcagactgttgtgctagcaatgagcgaggctccgtaggcatgggaccctccaagccagtcaygggatataatcttctggtgtgctgtttgctaagactgctggaaaagcacagtattagggtgggagtgacccgattttccaggtgccatctgtcacagcttcccttggctaggaaagggaattccctgaccacttgcacttcccaggtgaggcgatgcctcgccctgctttggctcacgctcagtgggctgcacccactgtcctgcacccactgtcccacaagccccagtgagatgaaccgagtacctcaggtggaaatgcagaaatcacctgtcttctgcgtcgttcacgctgggggctatagactggagctgttcctatttggccatcttggaaccacccagtcaatctgactttaatcaaaaagtgctgaaagaaaaaaaatacaatttttctgggatgtaaaacaaaattttttaaaggggaaattgagtggtttatttaaaactctgaccaccttggaactatttgaaactctgtgtcccttttaaattttgttgcttctgagttaataggtaagattatagcaagga

SEQ ID NO: 911936 - DNA, 600 bp, Homo sapiens
  misc_feature 110: n = A,T,C or G
aatatttccctcttttacaactcctactgaaacatgaacttttgaattgcttttcatttttatcttatagaaccaraattacatagcttacatttcctttactcaaactntgagactacttggaaaaaaataaatagagtagcctcctaggtaatttgaataaaacttagtgcttgagagattcttttaaatggaaatgaacaattgttattcatttctgaccagtttccattttcgttttttctttaattactgagcttcctttctctgaaatcaagtctctaaaacagactttaattattcatttttaactgtaggaagatttattattcaaagagcagccagcattccagaatagatgttgttttgttcatattttaaagggttagtcagaaatatttcttccaatgggaatattttgtacaaaaaggcagtagtccaaaaggtaaaaagctttaaaaatatggaattaaagtaaatctataacagaagaaaatgactaaatctttcaaaatctttagtagcatgatccccatggaggaaatgaattaaattaacataattagaatagaaataatctttgtactcatacaacatcta

SEQ ID NO: 911937 - DNA, 551 bp, Homo sapiens
actactatgctaattattgtagcacttatttagcaaacatttattaaatactgatagttcacaattgcccaccttcgcttgctttaaccaatgggagtaaccagacatgacctttgctgtgactgaacagaagctttaaatgccattgtattgtatggtatggctgacactgttccctagtaccatatcttagatagtggcttcccctttgacctagattccagaatgagaagacacatggagccgagtctaacagagtccagctgaactgcagaccgcatgtaatgtgaccaagaaataaatattgattgttgtaagctactgagatttggagcttgtttaccttgcagcatagtctagggaaagctgactataacacctactctgcgtctggcattatactgcagggacaaagatgagtaacactgtctccttcctcagaacacttgctgttcttgaaggggatgaatcaatatctatcttatcctattccataattctactctattyatgcattccttagattgtcccagaaagcacttattctggct

SEQ ID NO: 911938 - DNA, 556 bp, Homo sapiens
cgcgatctcggctcactgcaacctccgcctcctggtttcaagcaattctcctgcctcagcctcccaatagctgggattacaggcataagcctatagaagtacgtaaagataaggtagyattatcaaatatgtgacccagagaaaagtgactgttgtaaaatgtgtcttctggctttctaactagaagggaagcctctttgcaggcagcccccgtctgaaagtgtgtctgtatttacagtgctgtcaacttggtggatgctcagtaaacatttgttaaatatggactaagaaagatgagctagatatttgaagattaaactgttgaacttggaatgaatagtttcttttcaaatgtttcatgatgaagtaggaagccaaatcatgttagatggactgtttctaagggaagaatcaggtaaaccagctgcctattccatggataaatcaggattacctaagctcttcatgcactgcaacaagacatctaggctgtagctctgtcactaatcagtttctgactttaagtaggtcacatgaacctaaacttcctcatttg

SEQ ID NO: 911939 - DNA, 684 bp, Homo sapiens
cctacggcacaaatggctttttagttacctcctagtgctgaatgcattaaataaatggcrgattcttgtcttgttatgattaataagaaagtttgtaaatgcagcctggatgatgataagcaaatgctgactgaacatgaaggtcttaattagctctaactgactaaaggcatttgttagttttggcagggggtgaacactcatctgtggctattctaagaccactcttatttcttaggtggagtccaacttgcctggaccagcttaatggttctggtaagtattaatgaaaacagtagatagacttaatgaaaatgctgatggtgatatgcttactgctgagctaatggcttaaggcttggctgatgaatactgactgtattttccttgagcatgtctggaacagtgtttatgtgttttccttgagcatgtttggaacggggtttgtgtaatgatgttgatcaaatgtctgacctgaaatgagcatgtagacaaaggtaacactgaagaaccctgtgacagacaactttgaaaagagtttaatgatgtttagcattttaatggaagtcctcatttgtattccagctcctggtaacgtttttatccatggatgacttgcttgggtaaggacatgaagacagttcctgtcataccttttaaaggtacatgttttattgatgttaa

SEQ ID NO: 911940 - DNA, 600 bp, Homo sapiens
ctcccaggccttttatgcttgatgtttttttcagggcccttcccattgtcatttcacaatctcattgaaatgtcagcttatgcactaaatgcgtgtaagttgggaatgcccaattttgtctaagaaaaaaggcctccccctcccccaaataagcacattctttcatttcctggggctcacccgaatgtctcacacaggctgtaaaacaactaccaccacctggctgggtgctgaggtgggcagattacctgaggtcaggatttcaagaccaacctggccaatatggtgaaaccccatctctactaaaaatacaaaaatctagccgggtgtagtggtgggctattgtagtcccagctattcgggaggctgaggcaggggaactgaacctgggaggctgaggttgcagtgacccgtgatcctgccactgcactccagcctgggtgccagggtgagactttctcaaaggaaaaaagaaggctgggcgtggtggttcatgcctgtaatcccaccactttgggaggcygaggcgggtggatcacacggtcaggagtttgagaccagcctgaccaacatagtgaaacccccatctctactaaaaat

SEQ ID NO: 911941 - DNA, 642 bp, Homo sapiens
tgtgcagaatgtgcaggtttgttacataggtatccatgtgccatggtggtttgttgcacctctcaacccgtcatctaggttttaagcccacacgcattaggtatttgtcctattggtctccctccccttgccccccacccctgaagtccccaggttttatcgaatcaagttcccattgcctcagcgtggacttcaaggctattcataacctggtcctgacttaactttttggcctcatctcttccccatcacacactctgtgctcaaaccatccagaccattcagaccattcacctttacctaagaaaacacagactttgaaaaccctatacctttgcttatgtcactgtcctttttttttagacagggtctcactccgtcacccaggctggagtgcagtggtgccatacacagctcactgcagccttgaactcctgagctcaagcaatcctcctgcctcagccacccgaatagctgggaccacaagcatgtgccaccacacctggctaatttttaaatttgtttttgtaaagwtggggtctcgccatgttgcccaggctggtcttgaactcctaggctcaagcgatctacccacctcggccttccaaagtgctgggattacaggcatgagccactgtaccc

SEQ ID NO: 911942 - DNA, 448 bp, Homo sapiens
atgccagatctcttcattgtaaaagtacattttcttctttctaattataagtaatttatgggttagtatcttgggtccatgtaaacattctgccttcagcaacctttaactcaacagtttggcattcttgttgaatcagttattacattggaggttataaaatttcattttaaaaaaccctatcattctttctacatttattagctgatattatgctgcaaagtagaatttctctctctttcaactattcctattgatttatggcctccctgtgttatttattatctattatctttatcatctttgatgatccrattatgcaaaacatgcctagttggagccttcaaattgcaactactttgtattgtgttaaaaaaatcacataacttaaaatgcaccatgttaactattttttaagtatactgtatagtaatgttaactatatatc

SEQ ID NO: 911943 - DNA, 659 bp, Homo sapiens
cagagaaggccgcaagagccgcggatgtccctagagtgaggaaaggacaaatcaaccctttaactttgcttcccttccccctgcaccactgctgagtgtctcagcttcagtttctgatcagtcttgccagagctgtgtccattctctcccttccttttcacattctaacccctcttagccttggtacctgggtggtggggatggggaggaaagaggagagacaacgaggtggcgagagatgacagtgctcatcacctttaagtgggttccagctcaatgctaaattcagcatcagctgccaggcagcttccaagggtccctcgcatgaggcccctcttgcccaaggatcatgctggcctcagcatttctgacagacctcaccttccagcggctaccaatcttccctcaaggaaccctcaaaacactgcctgtttttcttctcctctttttttgtccctgccttcagcacaaaaaccaggggattctttggattttctttagaatatccaatcaagggacaaaaaggcacagacagacaaaccattacaacagaagcaatacccaaacagamagactctctttccagaatttaggaattggcaggaggttccttttcccatctttgacacctctagaagcccacagtctaactaagagtt

SEQ ID NO: 911944 - DNA, 627 bp, Homo sapiens
gtctactgacttctgttatcccctgctccaagattttccctttatcccaattactttattctttttaaagaacatatgtcaggttgtaaattagatgaaattagataatgaaaactatataaagagcttctttgtgtttgagcgtttgggggtcctcttatctagtccagtgggataactagttttttgaattttctttttacagatatgactgtcttgagcacatacgtgcttgcttgctgtggacttgggagagagctggcttctcttgggcatgcttcatattctgctttgatggcccttcctctcaaaagcttgtcccgttgtgactttctccatgagcttagcagcatctctggagggctcctcagcactgcctcttgttgcatcaaggtttgcatcccattgttgtgtaatgtctttttacttgtctgcacatctaccaaacagcaaaagttatattcttaggtttaattctgtgcctcctatataataggcactcattcactacatgatgagtgtttctttagagtttatcaaaaggtacctttggctgtatgaargtgttattatcctatttgtaatattatttctcattttttttatgtcttatcatagttggactcc

SEQ ID NO: 911945 - DNA, 613 bp, Homo sapiens
atcaaagtaactgatgcccaattactttgaactggaacattgatctttttctgccttcagactggaactacwgttttgactcttcttgggtctcaagtctgtagactttttgactggaatgacacagttggctctcctgagtctcccatctgcccactacagatcttgagacttctcagcttctataattgcatgagccaattccttgtaatgaatctttgtttacattatactatgatgattaaatttatgtatcaacttgactaggttgagggatgcccagatagctgataagacattatttctgagtgtgattgtgagagtgttactggaagagattttcatttgcatcagtggactgagttaaatagatctgccctcaccaatgtgagtgggcatcaatcaatccattgactgtccaaatagagcaaaaaagcaacagaatggcgaattctctctcttcgtaagccaggacatccattttctcttgccgtcagacatcaaagcttctggttcttgggctttcagactccaggattatcaggcttttggccttgaactgggagttacaatattggcttgccttgttgttaggcctttggactctgaatta

SEQ ID NO: 911946 - DNA, 616 bp, Homo sapiens
atattttcatatgacttctgatttaattttgactcatgcttagtgatttttcagtccacaatgaggtagagtccagtggcgagtggatgcctgctgtggaaaagggctttatcattttaattgcaaccaactgaaatagaaactttaatggactctcaaactatttgctatctcatgcctaaaatgaacataatcaagacttttatagataaacatagtaaataattttatgccacattcataatataaacagaaatttttaaaaaatgatgaactaacaaattgtgccaaactaaggaatctggaacagggtgtacaggggatgtctttgtagtctccctggtcataggagctcacttcttgaaaatcagaggccaggatattttttctatcatttaaaatattcattgaatatgagtcaatgagaaataaatgtatacaaaaatgtcaaatacatgccaatatcagtctgaatgtgagattctattttagtgaattcccaaaagatatatatacttcttaataaatttgcttttttatacaagaatctaggggtgtatgtatttgtacatatttattgcaatawacagtagtagaactaatgaatagaagtggg

SEQ ID NO: 911947 - DNA, 555 bp, Homo sapiens
gtgcctactctaatgacttcatcttaacttgattacatctgtaaaaccctgtttccaaatatagtcaygttagaaggtcccaggagttaggacttgaacatatctttctggaggaatcaagccaatctataacagatggtatgagtatttaataccatagagctgagagacagggcaatttgtcgtgaggtggaatgattaaaaacgcccgcagcagtgtcaagaatgaacagagctggacttcaaagggtgggtggacatcgttggagaggaggagaagggcttgaagtagatgatgaacaagagactaggggagaaactcaccttctggggtcgaagatacttgctgtaatttactaagatcaataacaagcatgctgaaaactctgagaaaagcaataataatcaaacttcctcagctcagaaaagcaacagtgccattttaaggcagattttatcggtgtccaagattcctttcatctctgaagttcaggttgctcagtgttaatttggttttggcacagccccagagatactaaaggaacaagcctggga

SEQ ID NO: 911948 - DNA, 512 bp, Homo sapiens
tcttttatccactacatatccyagtggatctggagcctgtgccagtaggatcctgttgcccatcctgctatttttttccacatgataaaaagacacagtgaccattctttcatatcaaatatgcagtaaggtaattaaagtgaaaaatgactgcactcattctctaccaataccaaaataaaggctggtggccctagctgattgatctttataagtttattaaacaaaccaagcacaaataaaaagttattttattttttataatgccttttttttttttagtaagtagagatggcattttgctatgttgaccaggctggtcttgaattcctggcctcaagcgttcctcctatcttggcctcccaaagtgctggctgggattacaggcatgaaccaccacgcccagcctaagaagttattttaattttaaatatgaaaaattgtgaatttccttttccttgtattttattctgagatttggtcaatataaaaccatgaaattgccatacatt

SEQ ID NO: 911949 - DNA, 562 bp, Homo sapiens
attatttccattcttttgcatatgctgaggagtgttttacttccaattatgtggtcaattttagaataagtgygatgtgatgctgggaagaatgtatataggtttgatttggggtggagagttctgtagatgtctattgggtttgcttggtccagagctgagttcaagtcctgaatatccttggtaattttttatgttgttgatgtgtctaatattgacagtggggtgttaaattctcccactattattgtgtgggtgtttaagtctttttgtaggtctctgagaacctgctttatgaatctgggtgctcttgtattgggtgcatatatatttagaatagttagctcttcttgttgcattgatccctttaccattatgtaatgcccttctttgtcttttttgatctttgttggtttaaagtctgttttgtcagagactaggatggcaacccctgtttttttttttttttttttttttttttttttttgctttcatttgcttggtatatattcctccatccctttattttgagcctatatgtgtctttgctcatgagatgggt

SEQ ID NO: 911950 - DNA, 578 bp, Homo sapiens
gtataacaccatcccttttattttatttttttagaaagatatataatacataattccctggctattagatatcgtggccagtcaaccagaaaaacacatgagtttaacccaccatctttgaccaaaaaccttttgtattaattattaattcaatgttgttacttctcccttttaacatatttttgattattggctttctgctttccatagcatgttgacattctatgttggtatttttctaatttttttttttttttttttttttgagacagtcttactttatcaccaggctggagtgcagtggtgcgatcttggctcactgcaacctctgcctctcaggttcaagcaattcccctgcctcagcctcccgagtagccgggactacaggcgcacaccaccatgcctggctaattttttgtatttttagtagagatggggtttcactgttttagctaggatggtcttgatctcctgaccttgtgatccgcccgccttggcctcccaaagttctgggattacaggygtgagccaccacgcccagactctaatttcttttgctgaaaacttaattaatttct

SEQ ID NO: 911951 - DNA, 678 bp, Homo sapiens
tttaaggagtagaaagaattgtgggtaatttttattttcttctttgtatatctttatgttttcataaytttctatcatgaatatgcctttcctttgttatcagagaaaatatcaatcttacaaaatgatctcaaatggcttaaattaaaaagttaataagcaacactcaagtattaacattaagccatctttgaagtcagaggtcaccctctatagacatctttaaataaagggtcacgctagtatcctccattctaggataagatcatgagtatttttctaaccacatttgtcctttttaatgaaataaaccaaacaaggtcttggggctggttaataactgcctggactagactctaggtctcctgtcttgagatccaggactatttccatcacccggtgccctctgcccagcccacaagcaacagcattagaatgtatttgtcatccagagagaggtcattcaatacatttggagagtatcatcagttccctaaaaataacttggcagctcagaagctcactgtttaaaagacttaaaaccaaaggacaccctgagtttaaaatgtgaacaagcacacagtgggtttaaaatgtttgcattctctttcttgcctttcgggtttacataatagaaattaaagtgtgcatacacttaaagctacttctacacaggca

SEQ ID NO: 911952 - DNA, 633 bp, Homo sapiens
tggctatgtcattagagataaatatctrttcacataaaacaatttgaaatctataaaagagcatataaccaagtactaaagcaatgttaggatttgcaatctggtgctgaaacattggagccatttttgacattttttttttcaaattccatagccaatcgtcaggaaatcctgcatgctcttctttcaaaatacttaaaattcaagtgcttcttgtgacctctcttgtctgagctagcgtcttcaccagcctgggtacagcagtgggcatctatccagtcacctagccaccatctctgtcttcctgttgcctattctcaacacagctatgacagtgatctgcataaaatttaaggtaggtcctataattctcccactaaaaaccttccaataacttcccatttcattcacaataaaagccaacatgatttcaatggcctttaaagccctgtgtgatcttgccttggccacctctctgatgtgtcttttatggctgtccctcccaccactgagccattcattctatagtttatttttcaaacatgacaaacttactctcatatcacaaattttatatttgttctgccttgaatgctattcactgagtgttcctgaatgtctccctctctccct

SEQ ID NO: 911953 - DNA, 606 bp, Homo sapiens
cttttgcctctcttaactctctctcttttttttaaatcatgagtcttctgttgtctcttacctttcctctatacattctcttaattctgcattacaaagccactgaagccagcctggcaaagactctctttggaaggtggcgaaggtgaagcatccaaactgacaaacaaagttgttctgagtgggctggaagtgggaggagggaggctgggtactctcattgatgagtaaatctttgtcacaagttatctgagaagggagctacaagtcctacatctcagtgtacagcacagtgcttggcacaaagaggaacttgaaaatctgagtaaaggaggcaaattagggaggccctcgacctagcttagaagaggaggatttgagtgggtgtagaggcagttggagggcattccagggatagaaggatcagggtgtctgggtttatttttctgtggtggaatgtacatgaggatggggggcagtgaaaagacttggcatagggcattggaacccctcaatggggagaaatggagaatctatttttcacttaatagtggtttaatagtgggrgccatctatttgcttccaaaaatggagaccctcaggaag

SEQ ID NO: 911954 - DNA, 579 bp, Homo sapiens
ttcctggtggctttgtttacaatgtgaggggaaaaatgtctactcaagcctcagtaatggtggacacccctcctcccaccaagcttgagtgtcccaggtcaactttagactgctgtgctggcagcsagaatttcaagccagtggatcttagcttgctgggctccgtgggggtgggacctgctgagctagaccacttggctctctggcttcagcccctttccaggggagtgaattgttctttctcgttagtgttccaggcaccattggggtatgaaaaaaaaaaaaacaacagcaaattacagctagctcaatgtctgcccaaatggccacccagttttgtgcttgaaacccagggccctggtggtgtaggcacccaagggaatctcctggtttgcaggtttcgaagaccatgggaaaagcatagtatctgggccagaatgcaccattcctcaaggcactgtctctcatggcttcccttggctaggcgagggagttccttgacctcttgtgcttcttggatgaggtgatgccccaccctgcttcagctcgccttctgtgggctgcacctgctgtctaacc

SEQ ID NO: 911955 - DNA, 643 bp, Homo sapiens
gctgcacctgctgtctaaccagtcccaatgagatgagccaggtaccttggctggaaatgcagaaatcacacaccttctgygttgatcttgctgggagctgcagactggagctgttcctattcggccatcttgccaaccccatctcctttaacatttttgtagcgtaggttctgctggtgatagcctctcagtttttttgtctatgttaaaaaaagtctttattctctttgtatttttgaaaaatattttcactagatttagagttctagtctgacagatttttctttcagatctttgaagatgccattcgtttgtcttctgatttgtatgatctctgacaaaaagtctgcttaattaattatctatttatttattttagagaagagggtcttgctatgtagcccaggctgaaatgccattgactattcacaggtgcaatactactgctgatcagcatgggattttgacctgctcatttccaacctgggccagttcgttcctccttaggcaacctagtagtctcccattgccagaaggtcaccatactgatgctgaacttagtgcagaaacctgatgggcatagtgcacaacagcccagaactcctggactcaagcaatctcctgcctcatatttgggactaca

SEQ ID NO: 911956 - DNA, 615 bp, Homo sapiens; identical to SEQ ID NO: 897602

SEQ ID NO: 911957 - DNA, 601 bp, Homo sapiens
ggaaggcatgataaaggctgtgaaatgagttcatttggaacagcttgaaagaargtctcttttaattcactccattaattttttctgaggaaatatttaaggatacatatcttactgctatgacatgtatctgaagaaagaagaaaaagaaaaactgtatgatttctgagtttttataaagactcaaaacatgattaaagactttttggaaagcacccctcagcagctccgctaagtagaagatttagcaatgatagcagcaggcagtttctgctcccaaatacttgctgagccagccacaaatcccgcgaccctctgcaaagtggccaccacccatgattcccacctgacttcctgaagcttcactgagggcaccaggcaaaccagaccatttgatgttctcaggagagaatgggtacattctgccattgcctcgagaggtatgatctccttttcccacaacctccccatatcttccaaatttctcatcatcctttaaaacacacttttcctggagacaattattctaagtgaagtaactcaggaatggaaaaccaaatattgtatgttgtcactcataagtgggagctaagctatgagg

SEQ ID NO: 911958 - DNA, 588 bp, Homo sapiens
gtatactgaatttaagagccccatcctacatgcaatgacacccataggctcaaaatgaatggatggaaaaaaaatctaccatgcgaaaggagaacataaaaaagcagaggtggcaatcctaatttcagacaaaacacactttgaaccaacaaaactcaacaaacacaaggaaggtcattacataatggtaaaaggttgaattaaacaaaaagacctaattatcctaaatatacatgcacccaacacaggagcacatagatttgtaaaacaagttcttagagacctacaaagagacttagatttctacaaaataatagtggaagacttcaacaccctactaacagtattagacagatcattaaggaagaaaattaatgaagatattcagaacttgaactcaatacttgatcaaatggacctaatagacttctacagaacgctctatccaaaaatgacaaaatrtactttcttctcattaccacatgacacatactgtaaaatggaacacacaatcagacataaaccaatcttcagcaaatttaaaaaaaaaacactgaaatcatacaaacgacactctcagacaacagt

SEQ ID NO: 911959 - DNA, 566 bp, Homo sapiens
tttcatctgatgttagtacatctatctcagctttcttytggttatgtcagcctaacagaccatttttacattttttttttcagacttcctcagttcttatttttaataaaacacattcaattacttttaaaattcattttagatatttttattagccgaagtatgaaaatcatttatatttaactcaagatattttgattgtggtctaccactttgctatttttccatctgttgtattttcgacttgctctttcttgccttttttctcaattaagcatttttttctccaatatgcccttataatctcctataagtttaagtatcttttgattttgccctagatattatttcatgattccttgacttattagtgtctgagtataaagtaaaattttcattacttttcttagactatgaagatcttataatacttttgatattttgttaggtagttttgttgatatttattttaaattttatatgatggattttatttatatagtcactatttatttagatttatccagatgttttgtcctttcttttcttgatttcatttctaaatt

SEQ ID NO: 911960 - DNA, 676 bp, Homo sapiens
tttttgctagcaaatgaactgactatagatggttcaagtagcaaataaatgcttgaaagagctgttagggtgttcatacgcttactgggaatgctgaagaaacaggcagagaaaattggataaaacagagctactcgtactgaaaataacatatagatcctgttttgtggggacatatatgctgctgtccccatgcccaggaaaccagaggttactttgcagatgctcttagcttagatgcttagtggcccctaccatgatgagatcttgttgccttatatttctagttccagtttcaaagtatatccaattggtctggcctaggactcatgctcagggccttctgtgcaccaggttatttggcgctgacatagagaagtttcaaaagcaaaacaattaagttattagtttctatatcaggagacacattctgcttcccaccagactacgtaaggtgagaaattctctaaacattgggaagagagctgccaaaaactggccagtgtttaccgcatcttcattctctgagtcagccatggcggccactctccttctttacttgggacattccaagctccttttcttcttaagacccccactcttccccagatcttatatttggctggcttttcctaatcatgtaggccscaccttaaatgccacttcctcaaagtgg

SEQ ID NO: 911961 - DNA, 600 bp, Homo sapiens
cctctaatggaccctcttttttttaaccaaagctataaatattgcaaggtttataggccctcctttcctaccctcttctgagtgattgcatctagccccatggtttcaaatacaacsagcaatgaaatattttcacagcctagactattctactgagaccagtattcagacatccaactcctacctggcatcttcatctgaaatgggtatttcaaacttaacacggccaaagtacagacgtttgattctccatattcacttctacccattagttcactcatgcctccatcatctctcaggctatgagtcatcctttctttgctttgctctccaaaatatattccaacttccaccaccactcaccttctccactgctagttacatcctagtgcacaccactggtatctccttcctggatgaatccaatcatctcccaaatgttgctccgtcaacaaagcaatctttcaaaagcttgaaatcctctgctcccatgatacttgagctaagccccagcccttggtaaaataggcaaggcctccaaaacctggcccttacctccaccatccttcctgtccatcccaacaaaatggtcccaatgga

SEQ ID NO: 911962 - DNA, 662 bp, Homo sapiens
tgaagtcccaatgaattgaagacttaaaaggaatggaaaaggtttgaaatgactgctttgggaaattgaatggaaagagtggtaaaactgttgaagagcagggagaggccggtcacacttagatcatgtccatctggagtgggccctgatggttgtggactgtttatccctgagtgaggaaagatacagagtcatagagaacccagagttggagatgttcaagaaggcatcgtagaaggccaggaagggtagcagatatgctaggaagttctctcggaggtctgaagtaaggaagccggcaatgctgaaagacagctcctggtccaggaggtggaggaggaggagttgaagggttggcagttgatgttcaatgggagaagttggcagatatggaaagtgtgttcaagcgagaccatacttggaacctagaatcagtagataaattatgtgctttggatcatcgctctcgtaatgtgttagttaatcaaagttacaatcccaaatcatagcactctgagaaagcgtgttctataatgaacactttamatttttctaaacttaaatggttaggtactgtcattctgattttatggaagtgaaaaccgagtgatagattaaaatcacttggcatttgagattagaaggtaggaacagcacctcag

SEQ ID NO: 911963 - DNA, 627 bp, Homo sapiens
tgggagctctgggtctgggataggaaagtggttgttgtctcactttggagcaagggatcctttgtaccctatcctcttcactgactaattagggaatttgagctgccctggggaaaagaggttctttctggatgagggcaatttccctgagggatttggctgagacttggtacctcagtcctgaaacaagaagcagaacaacatacacctcagagtggtgcacagtattgaggctcaatggtggaaatgtgttgggatactgtgaggaatgagaagacaattcttatgtgggtgtgtgtctctgtcagaaaaaggtttcataggagaggtgatatttgaactaccttgcaagatggcagtatattcttcaggtagaatagagacatagtattccacccagagggagattcacaagcaaagcctggcacttgcaaaaaaaaaatgtatgtcattcagagtgactaggagtgtagggtccaagatgaggggaaggagaacaggatagtgaggtgataataaggaatgaagctgaaaaarcagcagggtctagattatggagggccaaataggcccagcagtttgcattttattctaatagcaaggcaagcctttgaataaaggagggtc

SEQ ID NO: 911964 - DNA, 587 bp, Homo sapiens
cgacctaatcaaacttacaggcacggaacacttctgcatgcatactttctcctcccctgacttgctgccacccaataaacagtcagcatactctccaaacatcaagcttaacaattgcattcccaagcacaaccactcctaggaattaaccaaaaaactacctcagggtgttactttagccctctagttttaaactatgttgtgcaattttaagcatgtgaaaagactagatatttcaaataggacttaagttttccaccatagacacagtagcattaaataagtggtgcacataacacaggttatatttgaaagtgtcttctaaataagaacattctggcctagaacccttccccttcctacctctatcaacacagttgacaggtataagcatttgtaatgcttagacaagatttaacaatttcacttctttaagtgtttttaagaatagtctttcttatgaattttaaaacaaaatgttctcaatttattagtttactaacctctgcttttgtcatacactgkcaaactctttaacatttagaaagactagatgttgtaaattaggatacgtttgcccatttata

SEQ ID NO: 911965 - DNA, 641 bp, Homo sapiens
tattcccttgatttcttttcgtctctgttttgttgcatttctttttaatcaggcmtaatgtaaaattgaagaacaatttagcttttgaatcatatttattgaatagcattgttgtatttcccaactctccaccatcccagataccagaaagctaaaacgtggcctatgatacatatggtccaacattgattatccaaccctaattgaaggaaagtagccacaaatggaaccatgaacttaattaaaagtggaatacctgtggtgtcagagtttactatagcagataaaacaaaattcctcttaggaggatggtggtccaaactggcattccacagaatttggcttgccaagttctgtgttgtaagatattctgaattattaggagacaaagcagaccatgtgttgtccagttcaccacaatctctaccaccttctgctgatggtcctgagctgctacatatttttttctaatatgctcggttcctgaatatgattatattattatggtggatggacctttgacattttttaaaaaatagatccagagattggacaagttctcaaagaccagcatactctagtagcagatctcaaggaaggcaagacaaagctgtaccaatgtacgtggtgataagtttggc

SEQ ID NO: 911966 - DNA, 646 bp, Homo sapiens
cagacaagtaaatgatgactgtatttgtcaccactagaccggcccttcaagaaatgctcaagggagtcctaaacttggaagcaaaaggatgacattcaccatcatggaaacatacaaaagtataaaactcactggtaaagcaatcacacaaaggaggaagtgaaagtaatcaaatagcaccactacagaatttcaccaaaccacaatgacaaacagagagaatgaaagaaacaaataatttataaaacaactagaaaacaattagcaatatgacaggaacaaaacctcacatatcaacattaaccttaaaggtaaatggattaaatgtctatggcagaataacaatccactgtatggatagaccatatcttgcttacttgttctgctgacagacagttaggtgtttccacctttttgctattatgactaataccactatgaatatcatgtacgagtttttgtgtggacatatgtttccatttctcttgggtatgtactaggagtggaattgctgggtcatatggtaactctgtatttaactttttgaagaactaccagactgtttttcacagtggctgcaccatttaccaatggcaatgkatgagggttggttacttttattttgtaaaaaaaccggaaggaagaa

SEQ ID NO: 911967 - DNA, 630 bp, Homo sapiens
ttggttaggtatattcctatgtatttttttaacctattgtaaaatgggttgagatattgatttgattctcagcttggtcactgttggtgtatagcagagctactaatttttgtacattaattttgtayccagaaacattgctgaattcattaatcagttctaggagctttttggaggagtctttaaggttttctaggtatacagtcatatcatcagcaaacagctacagtttgatttcctctttactaatttggatgccctttatttctgtctcttgactgattgctttggctaggacctctgatactatgttgaataaaagtggtcagagtgagcatccttgtcttgttctggttctcagagggaatgatttcaacttctccccattcagtattatgttggctgtgggtttgtcatagatagctttaattgcattgaagtatgtccatttatgccaattttgttgatggttttaattataaaaggatgctggattttgttaaatgctttttctgtatcaattgagataatcatgtgatttctgtttttaattctgttttggggtgtataacatttattgacttgcaaatgttaaactattcctgcatccctgctatgaaaccctcttaa

SEQ ID NO: 911968 - DNA, 651 bp, Homo sapiens
gattttggtgctttctcaaccttcctgtataaaaataaaaaattctattaccattggtctaggaaagcctagttttgttagaggctctatttattgtaggaaggtctgtgatggtctatcaagtgctggaccattctgaaagcctctagacagcatccccagaagaggccatcttattgatttctaggagttatttatatattttaaaaatcaactttttgactgtcatatgtgttgcaaatatttttcccattttgacatttatgttttgacttggtttatgatatggtttgtatgtattactttatttttatttttacgtagtcaactacaatgtattgtttaatgtcttctgggtttctattttgtatttagctgaggcaattcttttccacctctagaatttctaagaaaacctatcctatgctttctcctagcactgaaactatttattttaagatgtatctttgacttatttaaggaattatgtgttaaataatacatctctcttttatctgaaaagtcaacttatcagctttaatttctggatgtatttggataaatagctggtctctctttcataatctattggtctatctattaatrtgtctattccaatatattctaataccttagctttattagatgctt

SEQ ID NO: 911969 - DNA, 629 bp, Homo sapiens
tttccattttcctggaatatcttttttcattcctttaccataagtttatatgagtccttacgtgttaggtgagtctcttcaagacagcagatacttggttggtggatttttatccattctgttattctgtatcttttaagttgagcaataaagccatttaccttcaacattagtattaagatgtgacatactgttctattcatcatgtgagttgttgcctaaataacttgttttttaaaattgtattattgtgttataggccctgtgagatttatgctttaaggagtttcattttggtgtatttcaaggttttatttgtttcaacatttagaattccttttaatattacttgtagtgtgggcttgatagtggcaaattcttccagcatttgtttgtctgaaagactttaactctccttcatttacaaagcttagttttgctggatacaaaattcttggctgacaattatttcatttaaggaggtaaagattggatctcaawcccttctggcttgtaaggtttctgctaagaaatctactgttggtctggtaggttttcctttataggttacttgatgtctttgtctcacagctcttaagagtctttcctttgtcttgactttagataac

SEQ ID NO: 911970 - DNA, 611 bp, Homo sapiens
tcccgggagaagccggctgagtctggacccagcgcgagtggcactcgcgcccgcagggaaggcgcctccgggcagccaaacgacgggactgtgcgtcagtatcgccaggtgccttcccaggttgaagggttcggaacgtgtcagattgagcagggagacaacggagttgagacaggacaaaattaaaacccacgtgcgcacactcactacggtggggtcggattttcctggctgcaggctttagaggtccttgccatttgggggttggaatgggtaggtaggtgtagggaaggagccaaggccaacactcggctgagtcgagctggctgtgcttctcggccggcccggccctgcccagggcccaggaaaatttgagtgaggacaagtatccaactctcagaaccctggcctttctagctttgctccgtggcctccagactcttgtaactggtgaaataagttccatttagcaatgatagtaaaagggtccggaaaggctygtgagctgatagcgggaaaagaatctgatgcgcccagaattcactcctttgcagaacctcctagatcctttaacactgttccccaggctgccctcagctgtcttcgtggtt

SEQ ID NO: 911971 - DNA, 618 bp, Homo sapiens
tatcctttgctcatttttccattgagttgtttgtttcttcttctcactgatttttaatgactgtatgtattctggatgctaatattgtgtargttatatgcattgcaaatattttactccaatacctggcttacatttaactttattttagaatcacttttctcaaaagcttttaatttttagttatgtttcaagtggagaaatgtgaggctcatggttgcatagtaataatattttagtaccaaatgatgtcaccgtgcttgctactctaaagcagtacagcaagattgaaaagaacactcgtctgaacccaagatttcacaggtcttctatatctgcttctaatagttactggcaaaagccagtataaaaaataatttgttgatgttggttacttaattacctgattaaactgacacacagtgatgaacagttagtcacctaaccccaagtcatacacctttttagtgccaaagctgtcagaatctcacaccatttcccaaagtttgctgtgtggaaccctagtccttgaaaagcattctgtggtcagtttcattttacattttttctcctcttaaaatttcagagtttacagtgtgatattaaaagttctgttaa

SEQ ID NO: 911972 - DNA, 537 bp, Homo sapiens
gaaaccctgtctctattaaaaatacaaaaattagctgggcatggtggcacagacctgtaataccagctattcgggaggcccaggcatgagaatagcttgaactcaggaggtggaggttgcagtgagccaagatagcatcactgcactccagcctgggtgatagagtgaagcatttttttttaaagtaaaaagagaatgtttcctcctagaatcagtagttctagtcctgggactcattctgagcaggtgccttccctcaccccaccatccctgtggcttttgtaggttgaatgccttgatggtctagacgtgtgacacttgctgcatttatgagactggaggtggggccccacccaagttctgcttccagaggaggaggcaagaccaagacaccaaaacaaggtataatagatattgayggaaaaaaacaatatatgtccaccctgtaagatagaggtgtgggcagagctaggctattcccagagtccatcaaagttcacatgccacatcctgatcacggtccaggccagccttgta

SEQ ID NO: 911973 - DNA, 592 bp, Homo sapiens
gaaagcctccatctcctccttctactcattgttcccttctcgttccaagaatacatttctgattgaaagacaagagatgggccaggtgcggtggctcacacctgtaatcccagcactttggtargctgaggcaggcagatcacttgaggtcaggaggtcgagactagcctggtcaacgtggaaaaacctgtctctactaaaaatacaaaagttagctgcacgtggtggcacacaactgtaatcccagctactcaggaggctgaggcacgagaatcgctggaacccaggaggcagagtttgcagtgagctgagatcacgccagtgtactctagcctgggcaaaagagagatactctgtctgaaaaaaaaaaagaaagaaagaaaacgaaagacaagagacggcaattgggacaaagttagttttgaaatttgtctctggtcatttttattaatatgcaaaagcctttctttagtgacttttcttttgtgccatttgaattatcatagtatctaccttcaacagtcctaaatggtagaactttataacaaagaaatgaaaaacagcagtttgctactaaaagaattccattttg

SEQ ID NO: 911974 - DNA, 631 bp, Homo sapiens
gtttgatttccagtttacaccacactgtgtgtccaggaccagagacaagccgagaactacctgggcctgacttaggtgggcttgccagcacagctttgaaggtgaaatccwtgtttagccatctaggcagtacagggagcctgtgaatgtcactgtggctcagtggaggcggccagagctccgggagcccctctctgggtgtatctgagtagtaaatggtgtcgctgacagtcactggcatgagccctgtggtaccattgatcccacacacctaatgtcctgggggagtcaacagcgagggcccctcagcagccactccaggatagaagccccaggaaaggggctgttaatgatgttgacaaatttctggctgggttattatgggatgttaatgcctaccctcaaacaatatgtttccacctcccacgttttccccctgctggtttgattgagaaaaccatagcgaccaaaagagcaagatttatacaaattgtgtagcaggggattgggctgtaggcaggggagcccccttggggaggaattcaccttttcaaagtagaggggaacaggtgctctggaactggcacgtagctgcgagagggtggggatggcattcctgaagggaaaggtt

SEQ ID NO: 911975 - DNA, 619 bp, Homo sapiens
attacctaaggatagacaatctacatttcagagactggtatcagtagcctctaaaacgttgttaactagttctcttcaggcctcgacatgatctttggccttagaaggaatactaaaaagattaaccttttttttctagttagttgcaactaggtaaatataaaatcaaaattctttcataaacaacatgtcattatctcataaataaaatgtcttttcaaaaaaagtaataaaagagaaataaggatatattttagttgatatatatagagtaccttcccttccagtcatttattttccttgaatacagaactaaatcagttagcattcatgaaacttttactatgctcatagaattttccttgccttggtgttatgttgtataatgaatacattggtttgagatttcagtttttacatttatacattatttttcactagaatttaggtaaaaactatgaaaaaggcacatactaaatttaaattcctgagaaataagaatgtagtacgatgtctcatgtgcacctagatcacagagaggtaacaacatgactytaagtaatgaccagaggaatacatggtctctctctctcacctctgcttccttctcagaaccact

SEQ ID NO: 911976 - DNA, 629 bp, Homo sapiens
tttgtttatttctttgtttttgctctggaatgagtgctatcaaaagtgtggttagttrtattctttgttaccttagtaatttttatttaggttgtgcacagaacagagcagatttaaagttgtaactgtgaaaaagtagcagccagtagtgtttgctgggagagtggtttggtggtcattttcttgtacagtgtttttgtttttgtctgtgttaagacaggtttgcaaagtgattttgtttttgtctctctcaattcaattcattttgcacaggtattatttgaaattgttcatgttcagtaggaacatataacggtcaactcccagctgtcagatgaagaagttgttcttttctttctcaactctattacaatgtctgttgtgggttttctttcacagatgaaactctgactgaaatagtaggttcatcaatacttctacttataaaaataaatgttactttataatatatacctttctcttgacctattctattcatttttaaaccatgtcattacattaggatagtgaaaattataaaactgagaggaaggtaaaaagtcatattttagctaattagtaatgtttaagatgttatattagattaaaagtagaatatatgacagttt

SEQ ID NO: 911977 - DNA, 604 bp, Homo sapiens
cagtgtctaggagctatgaattgtcccaggctgagagcaagcaagaatgtagggacttcagttttgcacctgcaaaaaaattgagtccttccaataatcactgaacttggacaaggatcccaaacttcagatgagatcacagtcccagctaacatcttcatttcagcctggtgagaccctgagcaaaggactcccaggcctatgaacccatcccaggactcctggcctatgaaaatgtaagataataaatttgtgttgtgttaagccattaaatttgcagtaagttgttgcagagcaatagaatacaaaagcagtatagatgtactgaacaaaatcaatatatttgtgaatatatttcttaatacccccttaattattaaatgcaaatatgtacttcaagaagaattaaattaattcatgaagaatcggtaaaagtttagtttataattcataaattgactataattagtcaattttctctaaatatagatgttgaaaaaaatgtatatacayttaatatgatcgctgtagataatattatctgaaattttgctttaaaagattttgacatatttatcacttgcacaaaagatatattgaacag

SEQ ID NO: 911978 - DNA, 613 bp, Homo sapiens
tttgtgcgtgtagctagagaaagagagagaaccattttttggtgacattttctaatttgttaaacccaaataaacgtgtgtgtgtgtgtgtgtgtgtgtaaataatcattaaggtactttatttacctttgcttggaaacctctccagctaaatatccaatttcaatacttgcaatttctaccttccacaaaattacagaatgggaataaaaattaggtaagttctttgccactttatggcaagaatcttcttttctccatttttcaatatcatattcttcatttacatctgacctctcctcagaatggcctttaccatccatatctgtaccaacattgtgcacatgattacttgtgtattctctaggaagatggaggatttatctccatctcttctcttttctttctgagccctcaccagaatcacctttagcagtctcttcacagaaatatcagttttttctaatatacacctcaaaactcttctagtctttactcattacctagttccaaagcctcttccacatttttaggtatttcttacagcagcaycccatttccaggtgtggatatttgtcttagtcagtttgtgctgctatatccgaatactgta

SEQ ID NO: 911979 - DNA, 314 bp, Homo sapiens
acaccttttagcatttactgtagtgctgatgatccactgatgatgaattctttcagttttttatatctagaaagtctttatttcacctttgttttttaaagatttttttctgggtatagaattctaaatatagaattttaggttgacttttttttctttcagtaatttaacgatgttgcctcacagtgaattcatttgcaatttccaataaaaattawactgtcatccttatctttgttcctccacatgtatcatgtctttcttctttggctgctttttatgattttctctttatcattggttttgagcacctt

SEQ ID NO: 911980 - DNA, 640 bp, Homo sapiens
aggatataggtattattggcccrattttgcaaggctaagaataacttgcctagagttatagctggtaagtggtaatcaatatctaaattcaactttgactccaaggctatgctattgccactgcattacaaaggattatattctagttaatgtttagcttgtcggtaaagtaatgactcatacaatattagttaacagtgatcatctgataccaaacatcataataaaaggctgtcctcaacatcattaaccaaaatgaaaattcaaattaaatcatgagatatcactatgaaccagtagaatggctaaaattaaaaaaagacttatcataccaaatgcaggagaggatatacctagtctgacattctcatacatcgatagtgagaatgtaaaatggtacaaacactttgggaaaggttggcagttacttacaaagttaaacaggtacttaccatatgaccttcaattctgctattatgttactacccaaaacaaaggaaaagcacatgtccacacaaggacttgtatattgatgttcatagcagctatattcacaatagatcaaaactggaaacaacccaaataggctgtcaataggtgaatggaaaaattgtagtatatctctattatggaatattac

SEQ ID NO: 911981 - DNA, 624 bp, Homo sapiens
ttaatagcctaccaaccaaaaaaagtccaggaccagatggattcacagytgaattctaccagaggtacaaagaggagctggtaccattccttctaaaactattccaatcaatagataaagagggagtcctccctaactcattttattaggtcagtatcatcctgaaaacaaagcctggcagagacacaacaaaaaaaagagaattttaggccaatatcccagatgaaaatcaatgcaaaaaccctcaataaaatactggcaaaacgaatccagcagcacatcaaaaaggttatccaccatgatcaagccgacttcatccctgagatgcaaggcttgttcaacatatgcaaatcaataaacgtaatcaatcacataaacagaaccaatgataaaaaccacatgattaattatttagatacagaaaggccttcgataaaattgaacaccccttcatgctaaaaactctcaataaactaggtattgatgggatgtatctctaaataataagagctatttatgacaaagccacagccagtatcatactgcatgggcaaaaactggaagcattccctttgaaaaaaggcacgagacaaggatgccctctcacaactacaactcctattc

SEQ ID NO: 911982 - DNA, 613 bp, Homo sapiens
atcaaatgctggtgaggctgtagtgcaacaggaactctcattcattactggtgagaatgcaaaatggtacagcctctttggaaaacagttgggtagtttttcacaaaacataaacactcttattacacaatctagcaataactgttcttgatatttatccaaaggcgctgaaaacttatgtccactcaaaaacctacacttgggcgtttattcataactgccaaaattttaaagtagccaagatgttctttaggaggtgaattgataaataaactgtgatatacagtttccaggcaatggaatattatttagtattgaaaagaaatgagctacaaagccacaaaaaaaaaaaatggaggaatcttaaatgcatattactaagtgaaagaagccaatctgaaaagctacctactgtatgattccaactatatgacatcctggaaaaggcaaaacaacatagacagtgaaaagatcagtggttgccagaggttttaggggagagaggagcaaataggcagagagcagaggatttttaggacaggaagaaatattctgtgtgatacaggcatacctcagagatatgmgggtttggttccagaacaacataataaag

SEQ ID NO: 911983 - DNA, 185 bp, Homo sapiens
gggcatcagtgaggaagctgttgctgtcstccaggtttagagcagtggcggtgggactggaatagatgtgcccaagagacattcagtggaaacgaaccaagattttccaaccccatgtcaaaaagtgggaaatagagaagtcaaaaatgactctcaagtagtttgtatgaccattgtcagagagg

SEQ ID NO: 911984 - DNA, 495 bp, Homo sapiens
tccttcaaggcactactgattcttaaaatatacatatacatttttttttcttttattaagatacaatattttacacgcttatgggttacatgtaagtatttttgacatgtatagaataaggatcaagtcaggatatttggggtctccaataccttgagtatttttcatttctattaatatatgattgtaaaaataatttaattatgttaatttggtttctataacatgaatcaaagggggaaatgattaattatggcatttcaacttaaaatgtcattttttcacatgcaaagccctctctgtaactccatcagcagcatccaagcctgcctgtcaaaggtgagcttgtccaacccatgaacaccrgcacaacccaggagagtattttcaatactcttccaaacatgttcactctctgaaatacactaatcacaacaaaattaaagcccagatcttccagaacatgtttacatgatattcttgtcttgctactta

SEQ ID NO: 911985 - DNA, 615 bp, Homo sapiens
cattcaactggagcttgaatctaaagctcatgttctctgcactgcaaaattcatgtctctcagctctttctttctaaaaaccatccyttataacatccccacctccttcaaatactgtcaatgcacagcaatttgaaattattttcttattaaggatttaaaattgtttgcaatagtttttatctattgaggatgggctttttacttttttttaaaagccatctataagaagatatatctgtactttggataggccagttggacaagagttacatcaaagtgcatgaccacagacagttgtgtgcaccaaatcaccaaatgtaacaccatgccatcatgttcctgtgccctcccctaaacaaacagaaaaagctgaggaagttcttagagaacgagatgacacttttcacaaataacaaatgcttccctgagggattttcagttatatgcatcactgctcattctatatatgtcttcacagaagaataactaccatttcttatagtgcaaatgaaacaaacttggtctgatttcagtctggaagctcattatgtgacacatggtggccattagtaaccaggagattctcaagggtgaaggaaccttgcattgagg

SEQ ID NO: 911986 - DNA, 604 bp, Homo sapiens
aaacaacttattcctcctgtccgagactttgtaccctttgaccatcaccccaattccctccatcctctgtcatcaccattctttgtaggatctgatgctctctctcctagtcactcaatttcaactacccttccaagaggtctggctattctcggtgaagaaatattggtgaagaactaagaaccagagattcatgctgtgttctgtgcttggaaaattcctacaacatttattcaaataatagccatccctaaaaccacaatttcaaccccactctctccctaccactggaggtcttggcagtcaatacttcaaccacacttttagtgcaatgagagcctggatccacatcagattcaaacacattagtaaactgtttcaagggttttaagttaattttcccaagactgtgccataattctgagttctcctattcaaacaattgaccaaaaagatatctagtgggtattttattttattgcaaaatccagttaacatgttgtcttgttatcaactaaaaatagaaaaaacaaataaaaatagaaaaragcctgggcatagtgacttatgcctgtaatcccagcactttgggaggccaggggga

SEQ ID NO: 911987 - DNA, 309 bp, Homo sapiens
atcctaaccctacatgcacctaaatcatattgaactgcaagaagaaatccatctaccaccatactgagagatttttaacattcctctcctattaattgatattcaaggaaaccaaaaataaatgggctacataatatttaaacacaatcaacatgtttatacaacaggaattctgtacccaacaactagagatttcacaatcttttagraatctcatagaacatttacaaaagtggactaacactgagccacaatgcaagtctcaacaacttttcaaagtactggatcatacagttattttctctaatc

SEQ ID NO: 911988 - DNA, 674 bp, Homo sapiens
gaggcttgcctgcataagcggtgtgacaggtggcaggaaaccagcactcaacattgatagtgtgaaccaggtgcaaggcagtgatgacaacttccccaggggcagaagatggaagacttccctgggccacatcgttatgggagtcctggtattacccaaacaaggcaagacaccacgaccaatgaatgatgttggtcttgacactcactgaccacggcaagtgggtactcagagctggatttgatgtagagaaatatataaattggcaaacattgcaccttagtgtcatggggaatttcagaccctgtctaaggcctgagagcctttgaacttcgtgcttgattttcactcaaaagagaatccttgctgatgaaaatcattttcaatcaagaaaatgatgataagacaataataaagtggagaattaatgacttgaatttctattttttaagctcagggtaatgctatttggatttgacacagaaatgtcaaacagcaaagaacggtaggggtaaaaagcttgagctctgtgatcagatggcttgtgtttgcattgcartgctactgctacctacaggatgtggtagctgcatcctcagaagactcaccagtgctctcaaggccatagcacttcatgttcacctccacatgacacataaccatctcccttcttt

SEQ ID NO: 911989 - DNA, 649 bp, Homo sapiens
taaaacagaagcattggtatagacaaaaggacagtgcatataatgtgtaaatatatttttctggaaagatagatatgaaastgctgatgtggttaattctggaaatgacaactgagtgggaagagagatggcaaggagacagtatcaccttatatgcttctgcattgtttgaattagtttaactgaagattctttttaatatattttatttttttcctaaaacagcaactcatcttacctctttcactttacactcagacacttatccagaaataacttgtttgtactaacacacatagtgtctggtaagtgatggatccagaaattgaaatattcatgctcacttgatgtgacaaatccctttgggggttaaattttatatttatagtttgctctgacagaaatattaaaatctgcatttgcatgccacagcgaggatgttttgggcacaaacagaggctcttgctgctgcagtgaagggcagatgcctccaacaggagtgacagtatttattctggcattgtgaaaatcctgtttttttccttgtcctttcttttctgtacttccctctgggttaagcagaaaaataacttttacaatggtaccattttcttagtagcttcctggtaaaaataaaagggggaaaagt

SEQ ID NO: 911990 - DNA, 649 bp, Homo sapiens
taaaacagaagcattggtatagacaaaaggacagtgcatataatgtgtaaatatatttttctggaaagatagatatgaaactgctgatgtggttaattctggaaatgacaactgagtgggaagagagatggcaaggagacagtatcaccttatatgcttctgcattgtttgaattagtttaactgaagattctttttaatatattttatttttttcctaaaacagcaactcatcttacctctttcactttacactcagacacttatccagaaataacttgtttgtactaacacacatagtgtctggtaagtgatggatccagaaattgaaatattcatgctcacttgatgtgacaaatccctttgggggttaaattttatatttatagtttgctctgacagaaatattaaaatctgcatttgcatgccacagcgaggatgttttgggcacaaacagaggctcttgctgctgcagtgaagggcagatgcctccaacaggagtgacagtatttattstggcattgtgaaaatcctgtttttttccttgtcctttcttttctgtacttccctctgggttaagcagaaaaataacttttacaatggtaccattttcttagtagcttcctggtaaaaataaaagggggaaaagt

SEQ ID NO: 911991 - DNA, 668 bp, Homo sapiens
gtggagattgtgaggaaagagaagataaaaaaattacctactgggcactatgcttattacttgggtgatgaaataatctgtataccaaacccctgtgctacacaatttggctctgtaacaaacctgaatatgtatcctgaacctaaaataaaagttaaaaagaaataactgtcttacttgtttttattaatctattttaagtgtatatacagttcacatttattacaatgtttaatattagaagcatattgagtctctataaagtttggtgatgtttttgtgatcagaaatatgctgtaagaacgtaactcttgttgatatcaattagcctatggtaaaataggttttgttatacacacttttacttaaagttgtagttttcaagagcctcctgaggatgttaagtgaggacttactgtatgtttaagtgcttattatctatctctacaaacaagaatataaaccctttaaggccagggactttctctgaccggtgcctcacattatcccctttatatcttggctggtgcagagttggtgctcataattattcattggctgactatgtaatcacctaatttaatagctcctyctcaaaccttattctcctttaattttcagacactctgacaatgattttatttaatgttaatgatattgattcagtc

SEQ ID NO: 911992 - DNA, 608 bp, Homo sapiens
ggatgttagcaggttcatcagatatacgtgtcttaagtaaataatatgtgacctatccaaagaaaacaaacaaaaatcttagttaatagattcttattttccaaargcaattgagactccattttaaaactcaattgcaaattctgtggagatgttgagaatgatgttgagcatgacatggcatgagtctgtttttatgaccatttatggcaacaattttccagcagtgccagggctcatgaacacgtagctcatttttacctgatggacgaacactaagaattgtaaaatgtgtacacaagatgtttatacattccacacgtgagattccatacatatataactctacaacagttatggaatactatacagcaataaaaacaaacaactggcatatgctgtaacgtgtatgaagctaaaacacaatgcactatgtcaaaaaaggcagacacaaaagactacacgctgcgtggttccatttatatcaaatgtccagaaaaggcaaatttatagagatacaagcagatcagcagttgcctaggatgggaagtggcagtgggtcctttccttaaacaaataaggagaaactttttcaggtgatggaaatg

SEQ ID NO: 911993 - DNA, 654 bp, Homo sapiens
ttcacttctttgggttagcatacggttttggagatgcacatggaagttggtcaaaaattccaactacaggaaacttmaatatataccaatttttttctctaggaaattactgtgactttttatttaatgtgagtagagctcattcaaagaaataatgatttatacaatttatctgctattccttttagcaatcatgcagaattattcattttgctcctagaactggaatatcaaaaaatcttatctccaagtcacagaatatgatattttagaatttacaatgtggatgtttttatccccttacatgaccaaacagaaagttgtaagctgtgttcatgggactggacttaagatgtgaaaatggaccatactaacttcccattttgttgtttcctcaagttctgcgatttatttacttaacatttacttaagacttaacaagacatatttaacataaaggctttccaccaaagaggcacaatttagaccatgtatttgcttactctgtttctaggtcctgatgcaagcagcaatgaaaattgagctatctgttctcacacccagcctgtagtaatcagtatttgaagcaaaaggaaaaaaacaaataccctacttaatctttaaccttaacttgtccctactgaatggatctgg

SEQ ID NO: 911994 - DNA, 637 bp, Homo sapiens
ggcgagcgcagtaaacgcgtgttccctttctccctcaaagagagcgctacccagcgctctgggagagactgagagagaaacagacaggcaggctgactgacaccttctgtctaattttaccccaggaattgcccccgccgtttctcatctcgcactagtttaacctctggtcctaagcaaacctctcaaaagtcttccccaggcagcgcccaggagaaccgaaccccacaaagtgcttttttgctggcatcacccggatgcttccctttggcgatttgccccttctcatttccccccaaatctagaggtctcaaagcccctcccccgcgcgaggcgggcagcgcgccttgctcaccgtggtccccggcggtggcggcgcgggcgggagcctcagggcgcgggggtcggcggcgggtcgcgtgggggtcacccggccgctgctgcggtccggacggcagttggtccagtagtttcggatgcccgggctaggctcggcggagagcgagtcggcgtgaatgagrgcaaaccaacagggctgtgcgtggcgcgtgtgagtaagacgcgagcgggccccacacgcaggcggcggcggcggcggcggcggcggcgaggtctgaggcggggagccgggcggggg

SEQ ID NO: 911995 - DNA, 671 bp, Homo sapiens
tgtcacccttgaagaccatttcccttttcttccaggtgccactgaaaacagcagccttcagagctttgctgaagctgctgtcgtccagagtctgttgaactcagcagtgaggctagcagggctgggagcacctctcttcttcaacaactgcatcttgatgctcacttctggagctgtcatgtcagcttctctatcagctgtatctttttcctttgattggtacctcaacaaaagaccatggcctctcttttttctttgctcctaaaacaattctagaaagagtaccataatccaaatttcttcttttgtattgtcaatctgttcaatttgactacaaaggacaccattagcaaacattctctcttactcagccattctcagatgttagtaagtcctgactttagttttgccttagcatactctttttcacttatctccttgactgtctgtttacaccttccttttattcattctttgatatttgctactttgctttttttcttttcctgtgtactctccattaaacgtatctgcttttgggamtttgtgtttggctttatgaagccattggtttagctctgtccctaaagaggtttccttgaagcctttcttaaaggcctttttcaggtcactcttgtcacatcccaaaagtggcacagagcttctgagaa

SEQ ID NO: 911996 - DNA, 620 bp, Homo sapiens
tggctgcgtacagaattcatgagtaactacctatttccttcagaataaaaataaatttttaacttcatttttttcctgaagtttaaagctgtgaaagagagtctggctagggagaccagctgttagtaaaatatgagatacttcaaacttaatgcctctctccaaagatttgtagcattagacaaaggtaaacccaccctccagatttagcatcctgaaacatttttcatatgtaactcagatttcctttctttatttttaagaaatgaaatgttatgagtcagctaaattcccgatctgacttttgatgagaatattttgctttagtctttgacattttgaaagtcttcatatgtgtacaggtgtgtcttatactgaaagagtcatctctcagagtccacccggtgctgctagaatccctttttttcagatgtggtacttaagagcaagttgttatgcatatgccagacaaaactgccgctgcctaacagtcatttatccactttatcaggtttccgaagtgtaggcatgactggatattactccatcttcaatatgwtccatcttgttttgagattgggggcaatttctcccaaagattagtaatatttcaattgaca

SEQ ID NO: 911997 - DNA, 601 bp, Homo sapiens
gtactccacttatggggctctgaggtttttcttttctaggcagcatgatacaaaacagtgataaataggctgatgtttatcactgcacctaataccttttaaaagaaawttttttgctgtccctgagcaagtatatattattgtgagtagtttcttcattaaaatcagaggttttgcatatactctatcagaactggagaatgtctgatcatcagaaacatgcaagattcaggtgctatgtcttctctcaaaagacctccagccgtctctgacccatgtcagtctgacttttgctttctaataaaactcatgagcaaatgtgcagatctagctagcctggcatgggcactggtattaagaacttagttctgccacctgcaagcatatacctgctggtcaagaaaacataaaagtatccttcctcctgccccagccctaggaggggagcataacacaagagtattgcataggagagtcttccaaagtagcacaacttaaaccgtggttctgattctaagaaaagtcaatagcccatctggaattttcggggaccatttttcttcctggaagagtgtacagtctttcctgtgcatgataaatg

SEQ ID NO: 911998 - DNA, 592 bp, Homo sapiens
tctgtgttgagagatttcaaattctttttattgataggtaaactacagctctagatataactaagtgaagcacggctgragagggaagaaataacacctggactgctgactgccgtcgtggaagggcaaaacaagaggacacaaatgcatccagctattctctgtgctgcttggtgtaatagattaaacttcaatgcaccttgggctcttttcatgggctttgcctgtcacctttacacccttcagagttctataaggaattatcagcactacgactctttggcagtcttagtgggaaaccctgggaggtcaggaatatgggcctgtgaaatgacatcttcctgcctcgtccaaagatagcattcatcatcatttaggcagatgtatgatgctgctaggcaaaacgccagccatggatcacattggtgtcccattacagagcctacgctgtcccagtgtctacacagagtgggaatctcaaggctggatactgagagccttcctggaacttcagggaaaataaatgtactaaatcagttggttaattatctgtgtcattgaccttggtgccttaatggaaaaatatggttca

SEQ ID NO: 911999 - DNA, 569 bp, Homo sapiens
aatgtgcaggaattttctgctacctgagatacacttacagatgaacatagacatggtaaaaaaaaaaaaaaaaaaaaaaaaaaagtactcaatgcattctctgctatataggagracccttgaaaggtctgttgagtgaatagtaaatgttgctgcatttcttttacttttacaggtttcctttggggagtctagaatttgataaacaatccgacccattgtgttgattgtttacctaatatgatcaaaactcttttcgagacaagccagattgagattccaacaggtttggtctattaaggacaaatgattggataaacaggtttctctctctctctctctccctctttctctctctctcatacacacacacacacacacacacacacacacacacatttatttatttaaaatttatttataatgctaagaataaagtgataaatgctcaggagatgtcacagtgcattatttacattaattccttccttgctggatgaaccagcaattcccatgaaagagctgaacctagaaggctcatgacaatgtggttgtgctgagagaaaaat

SEQ ID NO: 912000 - DNA, 612 bp, Homo sapiens
ttaaactagttatttaaaaattcacttgcaaatatcactcattacctactggttaccaaatctaatgatgactttttggctcttagctgatttcacattccctgacaacaattagctccaggaatcccatctaagctgcagttctgataatgttgattggtggttctagggacttctgtgaaagattgagatcaaggagctgagtatgttatgggaagttgggaagtttagactgggcaataaagatagtacaattaaaaaattcaatttaaaatggcttgttagagagatagatgccagatattacttgacaagccagaaactagagacactaagataaaaacaaaataaaacaagaaattaagattgatggataaaaataatctctcaaagatttatttggatttaatctaaatttaaggtgccatatatctttactcgtgaaagaaaattgaatttttgaggacactaagtagtttgagaaatacccttctttaaaatcttcttctttacctaaatgaacactagtgtcctggttttcttyctatccacctactaattcttagtctccttctttcagcacttaaatattcttgtaccataggtgctatt

SEQ ID NO: 912001 - DNA, 627 bp, Homo sapiens
atgaaagccacaattagatgtggctatattttataagttgttgtaatatctgtggctttttctcttagccttaataatgcacccagggatgcatggtgctggtgagagctgaagtgtgctctgcagattctgctctggggatgagttgatcttcatcaagcaaacaagtgggtaaaggaagcagagaacactgaattctcaaccagaagaaagcaagtatgcacaggaagtattaaaatttcactaccatgtcttcctaacactgaataggagcacaataattatgtctccctcactccccatatcttgtggggcacgtccatggcttttcatgacactctcaaagggtatggaactccaaaatagcaaagaacactgcctctgtttgacgattttagcattgtcattatgtgtttgaactttcaactattagaggatgttattaaatatgtgtaacaatacattttacaattattaagacacagatcattatcagacaaaactcttacccaaatgccataagtaaaacttatttataaagagctatgggatgaagtaaagtcatgcatcacttaataacagcgatatattytgagaaacccattgttaggcaatttcctcacatgt

SEQ ID NO: 912002 - DNA, 602 bp, Homo sapiens
aacagtagaccctaattgaatccgactggtgttcttctaaaaacagaagattaggatgcaaaaaaagacgtcagggatggtccctcacaaaakaaaggcaatgtgaggacacagtgagaaggcagccatctgtgagacaaggagagagggttcagaaaaatcaaacccgcccacaactggatcttggacttctggcctctagaactgtgagaaaataaatttctgttattttagccaccaactctgtggtattttattatggtagccctggcaaacgaatacaccaacaactaaaatattattctaaaaacatcttgtaagaaaacacaagcaatctaacaaaaaaatcagcttaatattatatttcatttaaacatgacttctacctttattgttatcaattaaggattttttttttcctaatagcatccatatgtgtttactggtgtctattctcctcatccacctgtagtcaattccttactatgcaggcaaaattatcttgtgcaaataagatcacataatgccttctgctcaaaacccctgatggctttacatccaaaataaaatcccaaggaatcaaagaacttattttgacctat

SEQ ID NO: 912003 - DNA, 622 bp, Homo sapiens
tccatggaaaggagagttaggtgctgagaaattacacagtgttttagagatttattttagaaagtgacatttaacctaaaacttcaaagataagaatcaccatgtgaaaaaaaaatccagatagaagagagagaggaaaaaaaataaaagtatctaaatcaggggaggattttataatataggggaaacaagggggagtaatgaaaatgataaggatggagaaattggtggaggccaagttgtaaggggacaatagaacaggataagtacaatggggagctgttaaaattttcaagcaaaaaaaaaaggaaaatattaatttaagttttaaaaagtttacaagctgctatgttgaaagtattaaaagggaataagtgtgaaaacgaggaagagttaagacacattgtgttatcttagaggtagataagaaataattctgacctgacttaggtaaaacagtggacatatttagtgataggagttaaaaaatactttggtgggagaattgaaagaatatgaaagaartaaaggaaaaggagggatttgaacaactagatggatgtcttaaacaccaaaataggcactgtgttaatttggattatgttcattattagcaacagaa

SEQ ID NO: 912004 - DNA, 617 bp, Homo sapiens
atcatcttgataccaaaacctggcaaggacacaacaaaaaaagaaaatttcaggccaatatccctaatgaacatggatgtgaaaatcctcaataaaatactggcaaaccatattcagcagcacatcaaaaatcttatccaccacaagcaagttggcttcatccctggaatgcaaggtgcttcaatgtatgcaaatcaataaatgtagtccatcacataagcagaaccgatggcaaaagctacataatgatctcaatagatgcagaataggccattggtaaaattcaacatccttcatgccgaatacactcaataaactaggtattgatgaaacgtatctcaaaataataaaagctattaatgacaaacccatagccaatatcatactgaatgggcaaaagctggaagtattccctttgaaaaccagcacaagacaaggatgccctctctcaccactcctattcaacacagtgttaaaagttctggtcagggcaatgaggcaagagaaggaagtaaagggtattcaaataggaagagaggaartcaaattgtctttgtttgcagataacatgtttgtatatttagaaaacctcatcatctcagcctaaaaattcctta

SEQ ID NO: 912005 - DNA, 623 bp, Homo sapiens
aataaacaaataaacccagggattaggatgacataatacagggaaaaggtaaagagagagaagagtgccaaaaaccaagcctttgrctacatcatttttttttttttttgtagttacaattagcctgatatatatacattaagttctgggatacatgtgcagaacatgcaggtttgttacataggtatacacatgccatggtggtttgctgcgcccatcaacccttcatctacattaggtatttctcctaattctaaccctcccctagcccccccacccctcgacaggccctggtgtgtgatattcccctcccggtgtctgtgtgctcttcttcttcaactcccacttatgactgagaacatgtgatgtttggttttctgttcctgtgttagtttgctgagaatgatggtttccagcttcatccatgcccctgcaaaggacatgaactcatcctttttaagactgcatagtattgcatggtgtatatgtgccacattttcttcatccagtctatcattgatgggcatttgggttggctccaaaatctttgctattgtgaacagtgctgcaataaacatacgtgtccatgtgtctttatagtagaatgatttatattcttttgg

SEQ ID NO: 912006 - DNA, 590 bp, Homo sapiens
agtgcaaagggaaaatgtggggttggagcccccacatagagtccccactggggcactgcctagtggagctatgagaagaaggccactgtcctccagatttcagaattatagatccactgacagcttgcaccaygtgcctggaaaagccatggatgctcaatgccagcccatgaaagcagctgcaggggctgtacctgtaccttgaagagccacaggggtggggctgcccaaggctgtgggagcccacctcttgcatcagcatgacttggatgtgaaacatggagtcacaggagattattttgaagctttaaggtttaatgactgtcctgctgattttcagacttgcatggggctggtagcctcttggttttgaccaatttctcccttttgtaacaggagcatttacccaatgctggtacccacattgtatcttagaagtcattaactagcttttgattttacaggctcataggcagaagggacttgccttgcctcagatgagacattggacttggacttttaagttaatgctgcaatgagttaagactttgggggactgttgggaaagcgtggttggttttgaaatgtga

SEQ ID NO: 912007 - DNA, 566 bp, Homo sapiens
ctaggctggggcaaaatgctaccagtctctttgctaaaacataacaagagttgcctttgttccagttcccaacaagttttcatctccatctgagaccacctcagcctggactttattgtccrtattgctatcaggcttatggtcaaagccattcaacaagtctctaggaagttccaaactttcccccattttcctgccttcttctgagccctccaaactattccaacctctgcctgttacccaaagttgctttcacatttttgggtatcttttcagcaatgccccactctactggtaccaatttactgtgttagtccattttcacactgctgataaagatataaccaaggctgggaagaaaaagaggtttaactagacttacagttccacatggctgggaaggactcagaattatgctgggaggtgaaaggcacttcttatatggcagcagcaagagaaaatgaggaagatgcaaaatggaaacccctgataaaaccatcagatctcatgagacttattcactaccatgagaacagtatgggggaaaccactcccatgattcaaat

SEQ ID NO: 912008 - DNA, 625 bp, Homo sapiens
cactttaatgggcagtcctaattgactacaaagaaatctgtaaaaacaaatatcgtgattaggacctattgatttatgcaggtggctttattttaatcaattatccactagttacggagttatttgatgtgtgtttttatcttgtacatatgtttcctgagttgtctcaggccccatagcttcagtaaaactaagataaatagctgagcataaattctcaagtctgttcattgctccacggtatctgtctttttactattatgtttgtttaaaggcaggttagaaatgcttacctgtcccagaggaagagtaatgtgcttggtgtttaaaatacccagctggttgggattgagagcgactcatgatattctttgcaggacttcctaattaaaggaaggcggaagcaactttgtcccagaataatgaaaatcaaatggatgccatcccgtttacaccctggaataacacaaggaagggccgacttacaatgtccagaatgaccttgaggggccaccttaccctaatattgggctctccctgctatgtcataaacctaaatttttatgaaatgaaaatgcttccagaatgtggtgtccagctctatrcaaaatgaaatctaggcatt

SEQ ID NO: 912009 - DNA, 690 bp, Homo sapiens
cactctgttgcccaggctggagtgcagtggcacaatctcaactcaccacagcctccacctcccaggttcaagtgtttctcctgcctcagcctcccgagtagctgggactataggcacatgccaccatgccyagctaatttttgtatttttagtagagtcgaggtttcactctgttggccaggctggtctcaaactcctcacctcgtgatccaccctcctcagcctcccaaagtgctggaattacagacataagccaccaagcctggctgggtctccgatatttctaataggagatgccaactaggggatatagagctggataaacagagtttatacagaaaaagttctgggctggagatacaaacttgtgaatcaactgcatacaggtgaaactaaagattcagatgtgtatgcaataacaaatgaaaaatacagagtaggcagtgaagagagcctaagccagccataaggagaaactacacatgaagaaaaaaaaaaaggggtgggaaagcaaaagaaaactagaagccttgtgttgtggacaccaagaagatatttcaataatgacagagagatcaagaattgaatgttgctggcagattaaataggattaaaatcaagttattttgattatttgctttcatctcagctgcttactgggactagagttaagtgccacccttttcactc

SEQ ID NO: 912010 - DNA, 586 bp, Homo sapiens
aatgctccttcagaacagtctgacctcagaaggctctagaacatccggaatctgggaagggctaacaggatttatatgtactgataggaaaggaccactcagcacctggtgataacaccatattcaatccagggaaattaaattctaacaggattaaaggagtcagcagttaatacataggagtatgatttcccccaagccaacatgcacattgaaagcccatcttctatgggagaaactgctaagaacatgacacaatgcattaaggtaggaggcagcttaaaatatgtgcagaaattctagcttttcattctgctatagcaacacagaatacgtctgaattgcctcatatttattgccctgttttctaacagcaaatgcaaaaacatgcatcaatatagcactatggaaccaacctaaataaactaaagttatataggaaatttatttatcatgtgactatcacacacacacatacacacaataaaaattaccaaagaattgtcccraaatataaaatatggaaatctcaaatacattttattatttcaaatcaagactctttagtactctgttattgtgcctc

SEQ ID NO: 912011 - DNA, 669 bp, Homo sapiens
gccttagggaaataaaaccaaggccatagctatataattgcaaagctccaactgtgtcctattaacccagtcatttcatgaactaattcagggacaatgggttcacaaagcctcagtgtgtttaagatttataattaaatttcaaaaatgaaagctcatcttgcctgtttaagaatctatgaagtgtgtggctatcctacagaatcttgtagacagactctgtttcttaaatccagccttttctttttattatgatgccagtttgtattttaaaatatgccatttctttctaaaaagtccagcttaaaactcaagatattaaataacaaaccctgacagaacatgtgagaaagtttcatacttttttttcaatttgcctgaaaaaaaaaaaaagctaaaaatacagacaatttctatctatgaatatcaacgattttaaaatgcccaccagagaacattgtttctaagtctggagtaaggaagagataagagattgtcctagtccaggtcttttaagaaactgattaaacacaaagggagcgtttcgtgggatattccgctgagaaaaaatgcggaaggaactgagaaaaggtgggagagctgtcggactgcaktgtgtatttaatgagaagagaaagctggaataaaggaagttgggacaaaaacatt

SEQ ID NO: 912012 - DNA, 630 bp, Homo sapiens
ctctgctccatggccaggtagatttccaggcattctgagtgtctgttcacctggataagctgccgaagccaccccacccttcttgtgaagagattgtggtgcagtggggctctttctgttccatacccaggcagctctctaggcacttggagcattcactctcctagatgggagagttaggccactcacccttcttcatgctgggaaactggggaaaaggaggtttctcagcttcatgtctaggcacacctctaggcgcttggtggctgcccagtgagcttgtccttggagctagtgcttgtgcctgatattgtgggacctgtaggtgtgcctgcttgatctggccccacccatcttgctcccactctccagggctgtgcattccacagtggtctgagctcccagagagttttaaccaggaagcaaggatcaagtatatacccatccacattggctgtagccagctcttacccacaagagccacctactggcttggagaaataatggcacagcactctaggatttctgccgacacaagtacatarcactggagaaagttaaacttcctgaccactgccaatttggccccacaggaggcagtgagcctgctcacatgcccagaacatcact

SEQ ID NO: 912013 - DNA, 629 bp, Homo sapiens
gcttgagaagtggcctggcacagtgaagagttcattgatcgcttatgatgagtctgacactgtttgtaggactttacacgtcatatctcactgaaacccccaaaaaatccaggaagtgggcagtatccccatttccccaatgtacttttactcaggtttttaaactaatgacagcagctcagagacccctcaggctacctttgagccaccatggctggtgtggtgtcaaggacccaaggcccggggaaaaccacctctatgggcttttcagagttgaaaattcctgcatctagtcaacttgacaaatgccatgctgctctgattgtctgaaattgtttccttttggctctcctgtataattttatgaagttatttttggaactatcagttcaaatcaattcttaaaatgggaatagagtgaaccttggaagcctgttcatgccacaggcttaaagggggagtgaacacatccaccccaggtggggagggagtgcagagtcttagctccaatgctgggaaactctgtgtttagttttacaaagaaatgctcttcccttacccttcgagaaaatggtttaacctctgggatatgyacaattagcaatgaatcttttctggatcaatgtccc

SEQ ID NO: 912014 - DNA, 650 bp, Homo sapiens
ttgagtgattttcttagtattgatttctatgtttattgcaatgtggtccaaaastgtggttggtatgatttcaatttttttaatttactgtattgtaatttactgtactgtacagttctgtagatgtctattaagcctatttgctcacttattgagttcaggtcctaaatatgtttgttaattttctgcctcaataatctgtctaatactgtcagtggggtgttgaagtcttccactattattgcatgggaatctaaatctctttgtaggtctctaagtatttgctttacaaatctgggtgctcctgtggtgggtgcatatatatttaggatagttaggtcttcttgttgaatttaaccctttatcattatataatgcccttctttatcttttctgatttttgttggtttaaagtctgttttgtgtgaaattaggattgcaacccctgttttttttttctgttttccatttgcttggtaaatttttctccattgtttattttgagtctatgggtgtcattgcatgtgagatgggtctataacacagtataccattaaatctttcttctttattcagcttgccactctgtgccttttaagttgggcacttagctcatttacatttaaaattaagtattgatacatgtgggt

SEQ ID NO: 912015 - DNA, 550 bp, Homo sapiens
atacagttactgcttaagaataaatgaatatagacctgtatatgttcatgttaccattaagaaacatgcccaaaattcataggttttttccatacatctactgaagtttgtcttcctaagcatacttcttgagaagcataatcaagaattaatgtgtctgaacaatgtacagggcatgctcattggcctgaacgcaaatgaacaagcaagctaaactaaaatctggtggtggtactttcacatgctccatattatttttatgagaaatggcaactacataataaaacatctcttgcattaagtaactttagagctatatgagcgatatgagcagcagctcaattgcctataccttctacatctatagatgtgtacagtgaaaacagacatcagttaagatgcccctaagacactgaaggattttgagaaagtaaaagttcaaagaaaatcacacaaagacaagtatattttaatacacgttaattacctgaaaayacatcatctttatctgaggtaatccaaatatccctttaatgtgaacattagtttc

SEQ ID NO: 912016 - DNA, 550 bp, Homo sapiens
atacagttactgcttaagaataaatgaatatagacctgtatatgttcatgttaccattaagaaacatgcccaaaattcataggttttttccatacatctactgaagtttgtcttcctaagcatacttcttgagaagcataatcaagaattaatgtgtctgaacaatgtacagggcatgctcattggcctgaacgcaaatgaacaagcaagctaaactaaaatctggtggtggtactttcacatgctccatattatttttatgagaaatggcaactacataataaaacatctcttgcattaagtaactttagagctatatgagcgatatgagcagcagctcaattgcctataccttctacatctatagatgtgtacagtgaaaacagacatcagttaagatgcccctaagacactgaaggattttgagaaagtaaaagttcaaagaaaatcacacaaagacaagtatattttaatacacgttaattacctgaaaacrcatcatctttatctgaggtaatccaaatatccctttaatgtgaacattagtttc

SEQ ID NO: 912017 - DNA, 648 bp, Homo sapiens
gctgactctaatgagggcaagagagaagcagtgtgcttgtgaaacacctgaatgctaagggcacagtgctgcatgctccctgccagttcatgacccagaaaaacaagaagtatagaaagccagataccctgggccaacttgaagccctggaaagagaggcagccctagggattgtgggggcagggaaatgtgtcgttcatacgaacccttgagatccactaactgcccttttgcttctctttttaaaaatatcagaaccttcagagatgcctctttattgtgggcagaagccagcagcctgctaaacaaccacagcatgactggtgatccaatcttttcccaacagacgaacacaaagcagacttcatttccacagttgtttcaggatcactttttctggggctgaggtgagtgatgaaaagaaatggggagggagaaatgcagcatccccaaacaaaaactgttctattagattaagcacaaaaaagaaaaatgggtgaaacaaattcaattaaaattcctttaggaatttaattgataacgaatataaatcgtatctaatactaattgggccctttggccaggtgatgtgctaaagtctttacatgtattatcacakgtaatcctacagtaacatatgggtaaact

SEQ ID NO: 912018 - DNA, 591 bp, Homo sapiens
ggcaaataaccttatataaaatgatacaaaatttaacaaaaattaactcaagttggattaaagacttagacataagacctaaaaccataaaaactctagaagaaaacctagggcataccattcaggacactggcatgggcaaagacttcatgactaaaacaccaaaagcaatggcaacaaaagccaaaattgacaaatgggatctgattaaactaaagagtttctgtaggacaaaagtatcatcacagtgaacaggaacctacagaatgggagaaaatttttgcaatctatccttctgacaaagggctaatatccagaatctacaaaggacttaaacagatttacaagaaaaaaacaaccccatcaaaaagtgggcaaaggatatgaacagacacttctcaaaagaagacatttatgtggccaataaacataggaaaaaaagctcatcatcactggacattagagaaatgcaaatcaaaaccacaataagataccatctcacgccagttagaatggcaatcaytaaaaagttaggaaacaacagatgctggtgaggatatggagaaataggaacacttttacactgttggt

SEQ ID NO: 912019 - DNA, 590 bp, Homo sapiens
tggaaccaagccaaatgcccatcaatgatagactggataaagaaaatgtggcacatatacaccayggaatactatgtagccataaaaaagatgagttcatatcctttgcagggacatggatgatgctggaatctgtcattctcaggaaactaacgcaagaatagaaaaccaaacactgcatgttctcactcataattgggaactgaacaatgagaatatatggacacagggagcggaacatcacacacctgtcatggggtagggggctaggggagggatagcattaggagaaatacataatgtagatgacggattgatgggtgcaacaaactaccatggcacatgtacacctatgcaataaacatgcacgttctgcacatgtactccagaacttaaagtataatgaaaaaaaaaaagatgccatttgcggtttttgctacttacttggcaaagaaattttaaattataatacccagtgttggtgtggatatgaagctgatttaactggccagactgtatgagtctgaatcctagttcctccacttaacaagctgactgaccttgggcaaggcacttaatctcactgtgtc

SEQ ID NO: 912020 - DNA, 590 bp, Homo sapiens
tggaaccaagccaaatgcccatcaatgatagactggataaagaaaatgtggcacatatacaccacggaatactatgtagccataaaaaagatgagttcatrtcctttgcagggacatggatgatgctggaatctgtcattctcaggaaactaacgcaagaatagaaaaccaaacactgcatgttctcactcataattgggaactgaacaatgagaatatatggacacagggagcggaacatcacacacctgtcatggggtagggggctaggggagggatagcattaggagaaatacataatgtagatgacggattgatgggtgcaacaaactaccatggcacatgtacacctatgcaataaacatgcacgttctgcacatgtactccagaacttaaagtataatgaaaaaaaaaaagatgccatttgcggtttttgctacttacttggcaaagaaattttaaattataatacccagtgttggtgtggatatgaagctgatttaactggccagactgtatgagtctgaatcctagttcctccacttaacaagctgactgaccttgggcaaggcacttaatctcactgtgtc

SEQ ID NO: 912021 - DNA, 609 bp, Homo sapiens
atcaaggtcttggactagtcctatgctcartggccattgacagtataaaccatgatcatttttaggcgtgtgtcattcacttattcatagtttggtttacctaaattatcaggaatacagtgttgcaatgatgattaaaaagacacttgttagttttcctgtaccaggcaatgatcataatcaaaatgatatgctgttgagaagccactcttaagagtccagtttgtttaatgttatgagcagccaccaatttgtggtgtctctgtatatttttgtaaagattctcatttttatgcttgaagtatttggtgaaaagatgtggttgaccataatttgcaacattcttttattaaaaataaactttcatatttgtatttggtagaaccgttaacctagaaatgtagcttgttaataagaatgacacaaaaatgaagtcatagctacagtacaacactgactgctcagacacatttaggttcagggcaggcctttatgtcttgtcaaggtgtcttgtcatgataattatttatgatgaagtgtggattcgtttttttgttaaccccactgtcttagggaattatgccaactgggttacatagtattttcagg

SEQ ID NO: 912022 - DNA, 594 bp, Homo sapiens
ctaatctcataatccatgagatgcattcctgaggagtacaggaagagacattgctctctgctgctgccaggatcacaaggctgatcctgtcaccctcctgggcaagttttgggaacttgcccttccctccagagcaaatgctgcacatcccagcacagactgccctcggctctgctccatctcttccctacctgccctgccagccccatcttctactactccccttcctatcttgcgtattaaccacatgaggctactggtttcgtgtgtgtgtgtacatatctaccaaaagtgggagatgaagggcaaaacacacacttggaaactggctcctatgagaaaggagccagaagcccccccacaccccccacacacactcacacatatatgcttgaggacacacacacacatgtccttagagtatatatatatatatatacacacacacacacacacacacacacacacagatacacatgatatatatacacacgtatatgtgctcagaggacattaaaaccctaaattagttaccttagattatttgcatgtaaaaatcctsatggcttgttactataggaactcagagttcta

SEQ ID NO: 912023 - DNA, 621 bp, Homo sapiens
aaaggtgtttgatatgattagtcattrggataatacaaattaaaggcataaggagataacaatagacacctattagattggtaaacaacaataactgaaagaataacctgacaaagctacatttggtggcaagtttacagagcagccagaaatttcgtacattgctggtaagaatgcaaaaatgatacagccaagagtttagcattttcttattaaactaaacatatacttacgttatgatgccatgagttttctccctaggagtttacccaaaagaaataacactttaattcattaaaatttttatagggatttttaaagtagcttaatttataagctccaaaaataaaaaaaaaaaaaacaactagatgcccttcagccagtgtaaagaaaaacagaccctgatgaatccatgcagtgaatactactcagcaataagaaggagcaaatgactgatacaagtaataataaacatgaatttcaaatgaattatgataagggaaagaagccaggctcaaagggctacgtcgtgcaaaattccatttgtataacatactgaaaaagacgaaactatagggaacgagaacaaatgattgatagatgccaggttttagaaaccgg

SEQ ID NO: 912024 - DNA, 689 bp, Homo sapiens
aagatgcatcttataatcaacactgtcacaatttaattgctagcgtttttttcttagtgtaaataaaatagcagcatctcttacaataagtattctcctaaattcartgaaatatactataaagaactacagattaacacacaatgaaaggccaacaaaagtcaatcaaaaatggacagaatatttgaacaggtacttcacagaaacaataatttgaataccctataaatatgtggggaaaatgctcagcctcattagtaattagggagatgcaaattaaaactataacgaaatactgcttcatacatgccagattgacaaaaattaaaagtttgacaacatcaagtgctagagaggatgtagaacaactaaaatgtttaaactctgctgctgggagcataagtttgtacaattactttggagaacattatggctttttctagcctaagatgcatataacctatgactcggcaattccaaccctaggttcatactcaagataaactcttgcacattagtacaggggacatgtacaaagcatgttcataacagtactatttgtaagagcaaaacttagaaacaacccacaaggacagataaataaatgtggggtagtctcagaataggatgttatacatcagtgaaattgaatgaatgatagccctattcacttacaaggaataatctct

SEQ ID NO: 912025 - DNA, 574 bp, Homo sapiens
agaaaaggattgtaaaactatagtacaaataygttccatatactcaagaagtgagaggaaaacatcaccataaggagagaaggagaagatacaaaagacaccaaaattgaacttttagagatgaaaattaaatatactgaaacgaaaaccatactggatacaattaacagattaaactagagaagaaaagctcagtgaacttgtagacaatgtaatagaagctatccaaaatgaaacatggagagacaaaacttaaaaacaaacgtagagtgtaagtgactttttaagcaccataaaaggtgaataactggagttccacgaagagacatagtgagtaagcgagtgagtgagtgagagagagagagtgtgtgtgtgtgtgtgtgggtgtgcacgtgcgtgcactggggaagtgggtgcagaagaaaaaaaaatttgaagacaaaatagcagagaacttcccaaatttgatgaaaaccgtaaactgacagtaccaaggaagctcagcaaaccctaagaataaacataaagaaagccaaggcaaatcataaccaaatggctgaaaaccagtgataaa

SEQ ID NO: 912026 - DNA, 636 bp, Homo sapiens
gccccatattagattcttgtcctgtttaacgtctttggggttttgttatctattgatgtctacaaactggacgggttcctgatgtttctagtttcctccagtrtctggctgcaactcccaaactaacactttcaattttctcccaccgttcttattggaatcacgaagaacaaaactgccctttgcccagaaatcctgcaaactgaggctggacgacttgaaatactcatcagcgagattaccacgaagcccaggtgcgagggaccctcacgcctgttgctgcgtgggccgcccagacatcgccagagaccaaaccgcagaagatgctcggagcccaacatctacaaacctgccccgccacggcccccaggctcagaaactggtttttagtcagctccaatgattagctttttttttttttcttttgtttccatagaaatgcctcttcaaagcattatgggacaacacacccacccagtttctgtaccgtggagcttcttggggaagtttcagactaggaaacaatggggctcaggacacatcaccccaaagtatgactgtaggagaccagaatacgccacccctaaatatgactataggagaccagaatacgtcaccccaaaatatgactgtagg

SEQ ID NO: 912027 - DNA, 602 bp, Homo sapiens
tatatatgttaaaatcctgcctccaaaggtgattgtattagaaagtgggacttttgggaggtatttaggtcataaaggcagattcctaatgaatgggattagcacatttataaaaaggtccctgagaaaccctttgtcccttccactatgtgagtacacagcaaaaaggtgtcatctgtgaagaagtgggctctcaccagacaccaaatttgccagcaccttgatcttgagcttcccagcctccagaactcttaaatataaatttgtgttgtttataaactatccaggttatggtattttgttatagcagctcagatgaactaagacatgcattcaaaaacaaagaaaactgcataaaccaatgcatgaactagaagcagtggcatgtgccttggggatctgcaagaagttctatatggctattgcacagcatagagactgtatgtagaaggaaggtacacagacaggaagagggtcccagagaggagtaatggtatatttttgtaatttaaaataattcrgtacagacagagggatatatgtgtttatctacaacttattataaatctacacatctacacccttgagtaattggttaacat

SEQ ID NO: 912028 - DNA, 602 bp, Homo sapiens
tatatatgttaaaatcctgcctccaaaggtgattgtattagaaagtgggacttttgggaggtatttaggtcataaaggcagattcctaatgaatgggattagcacatttataaaaaggtccctgagaaaccctttgtcccttccactatgtgagtacacagcaaaaaggtgtcatctgtgaagaagtgggctctcaccagacaccaaatttgccagcaccttgatcttgagcttcccagcctccagaactcttaaatataaatttgtgttgtttataaactatccaggttatggtattttgttatagcagctcagatgaactaagacatgcattcaaaaacaaagaaaactgcataaaccaatgcatgaactagaagcagtggcatgtgccttggggatctgcaagaagttctatatggctattgcacagcatagagactgtatgtagaaggaaggtacacagacaggaagagggtcccagagaggagtaatggtatatttttgtaatttaaaataattcagtacagacagagggatatatgtgtttatctacaacttaytataaatctacacatctacacccttgagtaattggttaacat

SEQ ID NO: 912029 - DNA, 631 bp, Homo sapiens
acaaagctaaactcttaaccttcattttcttacttgcacctccacccaatcactaaatcctgctgatgctccctgccactgtcttaggagtcccccacttttgtccccagtggcamtgtttctcatttcccaccttgcttactgcagcagcctctttactggtctagtttccctctaatccacccaccaaacagccaggctgtcatctgaatatttccattctctgcttaaagtcatttagtagcttcttattgccctcagggtagaggtgaatcttctccatatggcttgcaaggcccttcgagatgtggcttctccccacctccccaggttcctctctctggaggatccttacctcatatcaaattactttcagctcttatatgctgtgctttcttgcctccagggcatttatttcatttgtctgaataagcccttcttgtttttgaggcctcactatcactttctacagaaagcctttttgatcagttctcaaattcaagtcaaatgcccctccctacttactatggtctgaatgcatctccccaaaattcacaggtagaaatgtaatcatcaatgtgattatgtatttggaggtgagtcctttgagaggtggttaaatcatgaaggc

SEQ ID NO: 912030 - DNA, 574 bp, Homo sapiens
taactggattgtttattttcttattgtcaagttttaggagatctctgtgtattttggatacagktacattatctgtttcttttgtttgtttgttttttcctttgttctttctttttaattattatactttaagttttagggtacatgtgcacaatgtgcaggttagttacatatgtatacatgtgacatgctggtgtgctgcacccactaactcgtcatctagcattaggtatacctcccaatgctatccctcccccctccccccaccccacaacaggccccagagtgtgatgttccccttcctgtgtccatgtgttctcattgttcaattcccacctatgagtgagaatatgtggtgtttggtttattgttcttgcaatagtttactgagaatgatgatttccagtttcatccatgtccctacaaaggacatgaactcatcattttttatggctgcatagtattccatggtgtatatgtgccacattttcttaatccagtctatcattgttggacatttgggttggttccaagtctttgctattgtgaatggtgccgcaatgaacatacctgc

SEQ ID NO: 912031 - DNA, 683 bp, Homo sapiens
tggtgggaaaataaaatgatggtacggctgctgtgaaaaacagtgtgctgattcctccaaagttaaacatagaattactgtatgatccagcaattccgtttctgggtatatgtccaaaagaattgaaaacaggactcaaacaggtatttagacacccatgttcatagcagcactattcataagaggcaaaagaaggaaacaacccaagtgtctgttgatggacaaatggataaaaagtatagtgtgtacatatactgcggaatattatttatgccttaacaaacatgctgcaggctgggcgcagggctcacgtctgtaatcccagcactttctgaggccgaggtgggtgaatcatgaggtcaggagttcgagaccagcctggccaacatggtgaaaccccatctctactaaaaatacaaaaaattagttgggcataatggtgggtgcctgtagtcccagctactcaggaggtggaggctgaggcaggagaatctcttgaacccagggggtggaggttgcagtgagctgagattgcaccactgcactccaatgctggcggcagagtcagattccatcttaaaacaaaacaaaacaaaamaaacatgctgcagcatggctgaaccttgaggacattgtgctaagtgaaatcagccagttacaaaagaataaatactgtatgattc

SEQ ID NO: 912032 - DNA, 586 bp, Homo sapiens
gtcaggcttgttgaagatcaggtgattgtaggtgtctggtcttatttctgagttctctattctgttccattggtctgtgatatgctttggctctgtccccacccaaatctcatcttgtagttctcataatacccatatgttatgggagcaacctggtgggagctaattgaatcatggggacgggtaccttcatgctgttctcatgatagtgaatgaggtgtcaggagatctaatggttttatgagggcctttttcccttttgctcagccacttctccttgctgccaccatgtgaagaaaggatgtgtttgcttccccttctggaatcattataagttttcctgaggcctccccagtcctgtgaaactgtgagtcaattaaacctctttcctttataaattatccagtctcaagtatttcttcatagcagtgtgagaatggactaatacagtmtatgtatctggtttttgtaccagtactatgctgttttggttactgtagcctcatagtatggtttgaagttgggtagtgtgatgcctccagctttgttctatttgcttaggattgtcttgtttatacaggctttt

SEQ ID NO: 912033 - DNA, 629 bp, Homo sapiens
caaaatatgcaatagctcttcattttctacasataaatgcatgagctcctgaccatggctttcaaggatatccatgatatgaatgcatttatattctgtcacccttctgtatggataaacttgttagtagccatgttggtttcagtagcatcattgaactcattctgtgttcacaatgaattactttattattatccaacaaagatttaatcaacaaatactactttccatatactgtgttagtcatgggagatacagagacatttccagttgtagaaaatttgagattatgaggatttttaagtacttagtataaggcaggaatgtcataaattcaattttataggaaaacagtgtaatgtactcagacaagaggagttgaaacactttgtgtgaggaaagacaacatacatgtaataaaaagatataataataaatgctgaagtggttttcaaacatgatttatttttaaaccacaaagtcataagggaatttatcatgaaacatgaccatcttaaaaccacgattttctcagcaagatcactgaaggtaaaagttggatgtttggcttttgacatttatatacagtattgaataatcaagaaagttcatttcagttcaatgtatta

SEQ ID NO: 912034 - DNA, 577 bp, Homo sapiens
ctcaggagacttgcatgtgaaggtggcgtgtcacgcayatccaatgctgtcatctataactttgacacctacctacctatgcattttataatatttttaaaccattttcccattttattgacatgaagcagtagaataaatcatgtggaaagctaatttttatgtctttgtgagcttgtttccttgcatcacaaattgtgtccctttgtactttcacaagaaaccagcttttccatggctgacacaagccacaaatcattgccccactcatgaaggcaggaggcctgctggttgtgagaatcattgaagccacattagaagctaaacccaattgcagtgtagaacgatttaaaggaaattgcctactagttcaaagagattcctgaaaactgagttccatttagaaaacaactttggtgtattgctaaaattttcagacaactaaaatgaaagtgttcaggctgcagtgatcatagctcattctggcttgctagatctacgtacagtctccagctgggaatgcgcccatccacactattcaagagttagaggcctcagtacaggtggcagctttgtt

SEQ ID NO: 912035 - DNA, 557 bp, Homo sapiens
tttttttaggtgaggaaactgaggctcagaaagtttctgacttgcscacattctcttgtgtagtaattgtggcatcaggatttggagtccatgctgttgaccccagtgtacatgttcatatgcaattccatgggcccccaagaaagagaaagaatcctggagctaactggtggccaccttcagtctttaggacatcttactaagcctgtctcccatctacaaaatgaagactccggagttgtgcttctccaggtctcaggaacactgacaatggggattagcaagcttttttccacactgcccccccccccaccataattaaagtacttaggaatttcctttgggaagacaatgtttgaatgaataacagaacagaattctgcctgtgaaggggtgtgaggtcttctagggtacgccgtaagtgaggttctgttggaatgattaaatggcagagggcagagtaaattaccagctgggatcctgttgataacaagcttgcaggaaactcactgaagtcaacgtgtaaacacagagatgtgggcagagatatgccggta

SEQ ID NO: 912036 - DNA, 582 bp, Homo sapiens
cagggatgctttctctctgaactttcaaattaattgtttccctccttatcaggtaggtttgatctgaggtgattatgaacagattagattctcccaaaagtttaaaaaacaaacaaaaaattactttgcaacaaaaaccaggtttccattcatggttttctgaatctacaaaaattactttggtacaggctgatcatttaggatatttaaaattgaatttgaagctttaaactactatttctttattcatccattcattcactcagcatacctgtctcctgctttgtgactgttatcctccttgtcctggtaagttcctacctcctggtgagttctgctgcgtaaagtaggggctgactgcttcagctggaccaaaaacagacctctgtttccttttttctttttctatttataattttctgctttgtaggaagactacaagaaatggtatatatgactagatgctgcttttccacaataataggggatctttgaaatcctaggaaactgtcttgttttctaaattgtgycttttaaacactttacctgcaagtcttgtcttcctaagtgtagtattagcaa

SEQ ID NO: 912037 - DNA, 685 bp, Homo sapiens
tgtgtagactgaaccgtaattggcatctctgagataaatcccacttggtcatgatgactaatctttctaatgtattgttgaattcagtttgatagtattttgttgaggatttttgaattaatatccatctcatgtattggcctgtagttttcttttattgatgtatctttgtctcattttggtatcagggtaatattggcctcagagaatgagtttggcagtattctcttctcctctgtttttcagaatattttgagtaggattggtattaattctttaaatgtttggtataattcaacagtgaagctattggatcctgggattttctgtactgagagatttttcattacagttttaatctcactatttgttatgggtctgtttaggttttggatttcctcatggttcaatcttggtagattgtgtgagtttaggaaattatacatttcctctagattttcaaattttttagattgtatgaatttaggaaattatacatttcctctagattagcaattttttcatatagttgttcatagtagccactaatgatcctttgaatttctgcagtatcagttrcaatgtcttctttttcatctttgattttatttatttggatcttctctttctttttttcttagttagcctggctaaccatttctcaattttgttaatttaaaaaaaa

SEQ ID NO: 912038 - DNA, 478 bp, Homo sapiens
tctggatcatatggtaagagtctgtttaattttgtaagacactacccaactgtcttccaaagtggctatactatttttgccttcccaccagcaacartagagaattcctgtttctcaacatcgttttcagcttgtgatgttgtcagtgttttgcattttacctgtttgaattaatgggcatgtagcgatatctcgtcattagtttgcaattccctaatgacatacgatgttgaacatcttttaatatgcttatttaccataacttatttggtgaggtgtctgttcaggtctttagccaatttttcagttaggttgttcacttaagacccaacacttaagactgtattttggataatagtcctttatcagacatgttttatgaaaatattttttcccatctgtgtcttgtcttcacattctcttgacatttctttttgtagagcagaagttgttcattttaatgaagtgcagctttaaa

SEQ ID NO: 912039 - DNA, 516 bp, Homo sapiens
ttttataatgtaggcatttatcattataaatttctctcctagaactgcttttgccacatcccatgtgttttgacatgttgtgttttattttgttttgtctcaagatwcttaaaaattggttttattgattgattgattcattggttgttcaaaagcatgttaatttccatgtacttgtgaattttctaaaattcttcttgatgttgatttcctagttttataacactgtagttagaaaagatacatgatatgactttagtctctttaaattgttaagacttgttttgtggtctaatatatgatctatatgtgatctggagaatgttctgtgtgggcttgagaagaatgtctattcagatgcagttagatggaatgttctatatatgtctgttagatccatttttgctaaagtgtaattcaagttcaatgtctccttactgattttctgtctgtataatctattcatttttgagactggagtattgaagtacgctaccattattttattgtaatcta

SEQ ID NO: 912040 - DNA, 659 bp, Homo sapiens
ttcctacttctgaaatccttttatcagaaaatgcagggatttggagtcagctgacctgtgccaaatccygattctgttacttcagtggctgtgggagctggggcatgtccagtcagcatatggaatcttgagatcctgatgtgacaaatggggtggtactaataccagtcctgcctagacttggcccccaatgtaaggggaacaaatgagatcgtgtaggcgatgccactttgcacattctgaagcactaaatgaatgtgcaatggtgtcaccacatggtcttttgcctcttttgcctattacatctctacccccatgatgttctgagactggtggcatctgctccagagaggaagcaggcctggaatagcccgggtatttacggaggagattggcagagtgtgagttgtgaaactcagtggtctgctccagatcatcctgttgagttcctcactctcatgagcactaaatttactctccccattttttaaaaaatagcttcagaaatttgctctattatgtttctcttcactttatgttggggggaatttgagaatacttccatacaaagggctgttctttgactgagaatgatcctgtcaggcatatagctcacctctcacttgtcaggcacacggcaagagaatgactttctcaga

SEQ ID NO: 912041 - DNA, 567 bp, Homo sapiens
acaggtcaaaatctgtaataatcgaaatccaaacaataaatgctgttcaaggtttgacttaccctcaaatatagaacctcaattcagcaataattttttttttcctttacatttctaatcagagtaactctttatggctgaacacctgaagacgttgtgtctgagatccttatgaaaagcttacaggcgaatgttgtggtttgtcaggtcaaaagcaatattttttgtttctttctcattgaaaaaagatttgcctttaacactattaaagtctgattgaaaaagtgtgtttttaagacgtgtctctacctttagagaattctagacactaatggctttgaagtaattcttacacactttagaataagtgacatccttaaaaaagtctgacttgttatttacacgtattcatattccccaagcttcctgtctagtttttcaacgctcacataggtctttaagaagaatgctttaaaaggagaaaaattgcagtgccagaaaatgtraaaatgacatgaagaggcacccatcccgccctcacatatgcacagccactggcgttaatgg

SEQ ID NO: 912042 - DNA, 680 bp, Homo sapiens
cataaatatttttattatgttataattttccttaggataagtgattcaatgtgaaatttgggaacaatgaatttttaatatggatttaatatatagatttttaaggacacctgggcttttaagggtattaagacatactgccaaattaaaccacaacatagatactaaattacactcctaccagctttgttcaagtttgctagtttttatatattctcaacgtctggcattaaaaaatttgtcagatgaagattgttacctaattactattttaaatgacactcctttggttactagagagttgtacattttttatatattcagcagacatttagatttcttatttgaaaaaaatccctattttcctaatttttttccactttggtgttcattgaaaaaagattgatttatagaagtgaggtaggcaacctttaaaacggtcaccccgaggtagattggaaaacgaaaatgtggcacatatataccatacaatattacagagccaccaaaaaacaaaaaaaaaatcatgtcctttgaggcaacacggattcagccggcggccactatcctaagcaaattaacacaggaacagaaaacsaaatactgcatgttttcactcataggcgagagctaaacgctgggtactcagggacataaagatggcaacaatggacagctgg

SEQ ID NO: 912043 - DNA, 513 bp, Homo sapiens
ttcaaactcctgacagtgtttactattgatgtatatcttctgtatacctaattcattaagctgaaatacaagcatagtggctcatgatttctcagtgtaaataaacatcggtttggtagacagcacagtctgtagcaagagcactgtgccaggagtcagaaggctgttatctccatcttattagctctaacccttgaaattgtcacttaccctcattggccttctggtttctaattctgtaaagcctaccacacagaaatgatgaatgaagagaggaccttagaagaaaggcctttgcaagttgtaacacagggatgataataaggtattcttcacgtgcttgagtctttgtggaattccctctacactccactttctcaggctgaatgatgccacagagatacctaagattactatcatgtctcagccttactctgaargaacttgaggtccagcccccattatggcaattgcaaatcacagagagacaaaaaataccagaaaggtttagag

SEQ ID NO: 912044 - DNA, 668 bp, Homo sapiens
ctgaaacaaaaaaagctctattctctgtgtaaatatacacattattagatgttttaaagttattttctaatttcataattgcttattaaaggattaccatggctgtctttgcataattagaaaacatgtcatagcataatacatttatcacatgtggtacattcattatttcccagtctcagtttttgttccttttttgttatgttctttttaaaaatatcaaagggatataatatagttaagattatatatgaatcgactacttaaaacatttacttttgtgagtgataacccaagatggttgtgagttggattatcacgaaagagcattaaaccaagcctgtaccgaattaatgaaaattagtatgttaactgaggagtctgttgctttttattcaattaagcaatttaaatgtgaaataaaacatattaataaatgataaagtgagtttattatttattatcatggttctagttagtgaatggcatagctttatttccagccaccaccttaaagtatcatttcttataattactgtcatgattttttaatayatattttatttacttatttatttattttttttagagagagggtctcactctcttggctctggctggagtgcagtggcacaattatagctcactgcagcctcaaacttctgggg

SEQ ID NO: 912045 - DNA, 632 bp, Homo sapiens
tccttaattaagggaaggtgatattataataataaaatatctgatataggaatgggaggttctttttgacactgttccaawaagtaatcacttaataatgatagaaaaaattctggttactaaaaataccataaaataaaagtgttctttattttgggaagggcttcaaaatcatcaattgtatttcatattcactccaagttgtaaaaactatcttggaataagtgtatctgtattattacataatttccataaatggaaaaccacctttccccctcctctaagctttaataaaacaagcaaatatacatctcaatggcagattaaggctttttttgtagctaagcctaattaaaatggcaacattccaatggtttctttaccagggagcaaggacatctgcaagggataaaaagatagcaagcattttgatgcatttgtttccagtgtttaaatgtggcaacagaaaacagggattgatactggctaagttacaagcaacatttgagttaaatgttttaaaagagtacaggaaatcaaagcagttatataaattgtgattttaggttgttgttttgcctgctatttctgcctgttttcagtagcatagacttccccaaatcgtgtcccag

SEQ ID NO: 912046 - DNA, 690 bp, Homo sapiens
aaaactatatatagcatgttattccatattctgtatgattaattttagagattatatcttgaattctgctatcaatctacaatgtttattcattcattcaacaaatatttgttaagaactactatgtgtcaagtacctagtttgcaacagtgaataaacagatattcttgagtttgtgaagtttattatattcaagagacagaaatatagatagtacacaattaacataacacctaagaaaagaatttaatatgtaataagatcataagtacaatgagaaaaaatgcatcacagtaaggagactggggagagtttgcaatgtgaatcatgtggtcagagtgagtctcattgaaaagttaacattagaacaaagactgggagaagacgcagttgtgagtcatctgtgttctgcagcgggaacggcaagtacaaaggctctgaggaaggagggcgcctggagtgtttgcagcagtgtgaggaggtcagcttaaaagtagaaatgagaagaagaatagatgataggatcagctggctatgcaatttgcagtgcaaaataaatttgtggggactcttgttaaaatttctttctctttttttattatactttaagttctggggtacgtgtgcacaacatgcaggtttgttacataggtawacatgtgccgtgttggtttgctgcacccatcaact

SEQ ID NO: 912047 - DNA, 575 bp, Homo sapiens
tactggagaactctgttggtttttaatctgtttacagataacagcttttacctttgtgcrcacttctaatactagtatcttttaatacaattatctttcatgtcaggcattttttaaagttatatgttgattgtgtagatttccatttcaaaggggaaaagcaacggttagaaacttctgaatggaacataaacaaaaccaagcattttttcatattggtccattacactcccatctcttgcttgatgcttgaagaaaaactcagtcgcacaggcttcatgcatataaagcatttcttatgtggaatatatgaagagaaactcaatagcaaaacttactttcaagactagatgaatgagccacttatttcaaaaaatatataaaggatactaccaaggaagtcacagaatttgatttgttctatgagtttactatgtttactcttgattgtatttgaactttaatcctgtcttgctgactttcttccactgtacaccaagagcctcacaaagaaaggaaaattggaaggtttgatgatgtaaaacctgagacatttaacagatatttttaaactt

SEQ ID NO: 912048 - DNA, 624 bp, Homo sapiens
tctcatggcgttttccagagcgcctcatacaatgttgaagctgcatcattgtctgggtaatacctgagttttgctgcttcatgccaagaaaactaaggacacggacacacataaggagtgggtttaagagctgaggtttaataggcaaaagaaagagaacagagaactgagagagacagagagagacacctgaatgggacttctggcccaaggcggaatgcaccggattttatagacaggcttgtagaggcagtgtctgatttacatagggcccagagattggttgaaccaggtgtgatgtttacatagcacgtggggcagactgccccaccctaatcttattatgcacatggggtctttgcctggctggagccatgttgtcttctccttactctactggtggtttggcaaagagaagagaagatggagcagccattttgaacacacctagtcccaggtagccttttcctactggcacaactgcccgcattcacctgtgcaagcttytagtttgcctttctatgtctgcagctcaattttccaggctgctctttgttagaaaagaaatgattttcaggctactttcattaaaaacaaaaacaaaaacctgaccgaggacttcct

SEQ ID NO: 912049 - DNA, 624 bp, Homo sapiens
tctcatggcgttttccagagcgcctcatacaatgttgaagctgcatcattgtctgggtaatacctgagttttgctgcttcatgccaagaaaactaaggacacggacacacataaggagtgggtttaagagctgaggtttaataggcaaaagaaagagaacagagaactgagagagacagagagagacacctgaatgggacttctggcccaaggcggaatgcaccggattttatagacaggcttgtagaggcagtgtctgatttacatagggcccagagattggttgaaccaggtgtgatgtttacatagcacgtggggcagactgccccaccctaatcttattatgcacatggggtctttgcctggctggagccatgttgtcttctccttactctactggtggtttggcaaagagaagagaagatggagcagccattttgaacacacctagtcccaggtagccttttcctactggcacaactgcccgcattcacctgtgcaagcttctagtttgcctttctatgtstgcagctcaattttccaggctgctctttgttagaaaagaaatgattttcaggctactttcattaaaaacaaaaacaaaaacctgaccgaggacttcct

SEQ ID NO: 912050 - DNA, 495 bp, Homo sapiens
agtgtggaaatttttaatcattagctatgttatcctgcctgtttggccttttcaggaacctatctctactaggtaagtcctcactagggcattaggctctaaattctaatctctagtgttactgttaccatgattttcagaaaggaattaacttcctcccattttaatgaaacataaaatgctcttgcatatgttttaatagaattaacacagtatgatttctggttgaaataatcttttttcatttttgcttattaataaataatgtatcaatagtgaatgatttatcataagtaaatggtaaaatacaattcacacagattgtcccttgaggtctaatatcttttgtataaaaaaagtttttaaaaataaatattttgtgatggtcataggcttctgaagttattagaaagggatatatggattataggaaatattttcmtgataatatggtagaataaaatttttctagtttttatggtgattctttacttt

SEQ ID NO: 912051 - DNA, 639 bp, Homo sapiens
tcattgaatacattgttcctattattattttgaatacattgttgtctgtaacattcatcttttctttatataatccaagtttctaacctaagccattatcctctcttcttaagaggttcttaagaacctctgttaactttttttatccccccaagacagagtctcgctctgtcgcccaggctggagtgctgtggtgcaatcacggctcactgcaatctccacttcccaagttcaagcaattctcctgcctcagcctcctgaatagctgggattacaggcgcatgccaccatgcccagctaatttttgtatttttagtagagatggggtttcaccattttggccagactggtctcgaactcctgatctcatgatccacctaccttggcctcccaaagtgccgggattgcaggtgtgagccaccacacccggccaacacttctttcaagataaatttcctcatttatcagttctaggagctttttggaggagtctttagggttttcttggtatacaatcatatcatcagcaaacagcgacagtttgactaactctttaatgatttagakcccctttatttctttctgttgtctgatagctctggctaggacttccagtactatgttgaatataggtgatga

SEQ ID NO: 912052 - DNA, 643 bp, Homo sapiens
tgttcctgccatagttcttggaggaaaagttcataatgtgaatctccacatgctgctctgtccatctgagtgggagctgcaaggtagtcctgcctcctatctgtcattttttcccacatcttagcctacrttttcttctactgctcttgtttatgtttcccctcttgtctttgggtttccctaaagactccttcttaaataggacctatgacttgcagttctttcagctgtaatccactgttattattcaggaacctaattgctgtgctaatgaagtgtggagggagggaaagtgttctgtgttcctatgattaggttttattttgtgctaatgaagtgtggagggagggaaagtgttctgtgatcctatgattaggttttattttgtatatgagtcggtttccccagtctgtaaccttcacaagtgcttctactccattgcccctcatgtgagacaggaagtctagaggtgtttgaagttaggcattcctcttcaccagtgtcaaagacacagggtgctagagttggatattttcctgcccccaagtgagttaggctctcataaatcacagatgagataatctctggcaaagtagtttctttttaatttgatttttattattaatatctgctgggaaaccga

SEQ ID NO: 912053 - DNA, 610 bp, Homo sapiens
taaatctttttacatggtaggtcatcatawtgttgattattcttgtgcccttgctaagttttctatttttaatcttcatacttttcaactattcttcattttcattgttagcagataaatgtactattctgtctatctactgtggccattctccaatttgccattgattgattcactcatttatttacttaacaaacaaatatttgtttgattacattagaaacacaaagatgagtaagaaatcatttttgcatcaagattagtctaacaaaggggaaagactaattaaaacacaatagacatatgacacaaatatgttggaaataggcttgtttggggacgttttaccaaagatatgatatttgtgccagaatttgaaggatttattgttcttcaagtggtggaagtacagtagagcattttaaaaagactcagtagcccaggccttggctcaaaggtctgagagtatgtctgacaagatgggatgctcagactagatagtgtgtctagaatattagtgtaaaattagaaattgttttacattttaaaaaattgtagtaaatataaataagatataattttccattttagccattttaaagtgtataat

SEQ ID NO: 912054 - DNA, 626 bp, Homo sapiens
aaaaacaagaagcttccatcctactttattagcctacttgcttgccttatttytgacaaattcctaagtatttggattgttttaaaaaatctaaaactggagccaggcagtggctcatgcgcataatccaggtgctttgagaggctgaattgggaggattgcttgagggcagaagctcaccatcttgggcaacaacctggacaacatagctagattccatttctacaaaacattttaaaaattagccaggtgtgttggcacacacctgtagtcctagctacttggaagaacgaggaatatcccctgagcccagtccaaggctgcagtgagctatgatcatgccactgcacaccagccaggatgacagagtgagctcctgtctcaaaaaaggtaaattaaaataaaataaaaattttaaacccttaataagatcgtaatttacacattaaacttatattctcttctaaatataagaggagagttcatgtttttaatttgctatctgcttaataatgaaatttaagccccattgttcattgcctatctttccttctatgctttctttttcaaaaaaataaaatgataaagaagagatttacagaaattattacactagtggggaaaaa

SEQ ID NO: 912055 - DNA, 643 bp, Homo sapiens
tatggtttggggacatcgccccacccttataagtctcctcaggggttcaaagcaaacagagaggattaaaaattgtctgcattgttggtgatttgcttcttatattcttgtttattagttcctgctatcagaaaagtcctcaacctatttctcattgcccagtaggaatgtggtactttatctgagcacacgaaatataaaatgactacattaaacaggagcagctgttcctgaatctgcaagcagaattttgcatctattaatgatatgtacagaaatatggaggaaaaaacccagcaagagtcctttccaatttagttttctagaaaaaacaaatccaaatgagaaagtaagttacccttaccatatttacaaaatcagaatacatgatggctgtagcaatttaattagaaattacattaaattatcactattattagataaatatatagacatcacagatacaacatacggttttagaaaaaggaggctttactttggataacaaagtatcaccacaaaatgtgtgataaacctcttgtcaatattkataacaaaaatggaatctgattcagtgtctactactcaagaatttgtctcagttccctgtagcagattttacaaaagaagtaatgggaatcac

SEQ ID NO: 912056 - DNA, 660 bp, Homo sapiens
tgggtatatagccaaaggattataaatcattgtactaggaccatgcacatgtatgtttattgcagcactattcacagtagcaaagacttggaaccaacccaaatgcccatcagtgatagastggataaagaaaatgtggtgcatatacaccatggaatagtgtgcagccataaaaaaggatgaattcatgtcctttgcagggacatggatgaagctggaaaccatcattctcagcagattaacacaggaacagaaaaccaaacaccacatgttctcacttataaatgggagttgaacaatgagaacacatagacacagggaggggaacatcacacactggggcctgtgaagggatggggagctaggggagggatagcattaggagaaatacctaatatagatgatgggttgatgggtgcagcaaaccaccatggcacgtgtatacctatgtaacaaacctacatgtttggcacatgtatcccagaactttaattaaaaaaaaaaaagtagagaaaaaaagcttcagaagaagcaaactatttgaaaagatgatacatagtccacataccaagattatgtactttacacataaataacctccatagccatttctggggcctgcttggtccttattttaggcagaaccttaatgagctttat

SEQ ID NO: 912057 - DNA, 644 bp, Homo sapiens
tcagaaagtaacaagctgatactaaaattcatatggaagtacraggatcccagtttagcaaaacaatgatggaacaaaaaaataagttggattcatatttcctgacttcaaacttaccaaaagctacaataagagggtgtggtattagaataaagataaatagaatagagggtctagaaatccttacaagtttgtctaattcatgttaaagttaccaagataatttaatatggaaagaatagtatttttaagaaattatcctgagacaactggatattcatgtgtagaagaatgaggctagacctttacctcacaccacacacataaaaattaactaactcaaaatggattatatctcaatataagagctaaaaatataaagtttatagaagaaaatacagaaataaaattattgtaatcttcagttagacaacaatttcttagctatgatatgaaaagcaaaagtggcaaaagaaaatgagtcaattggttgtcctcaaaattaaaattgtttgtgcctgaaaggacaccatgaagaaaaagataactcacataatggaagaaaatatttgcaaatcatatttgataattggcttgtatccaaaatatataaaatttcttacaactaagataaaaggtacata

SEQ ID NO: 912058 - DNA, 653 bp, Homo sapiens
gaattattcctatgacttgaggcaatagagttttccttgatgacatctggacttgttgaaggccagtggctcctttgtttcgtgattttttttwaaaaaataaggacatccatgcctatcccaccataaaatgtcagaagcaaataatttatgttctagagtcaaagattcacatatggagagaaattttgcccaagatgaaatactcagagcttcattcatacctgatttagatgacttaggtaatacttgggacttattgatttgatgttatttagattaaattgtagacttagagttggtgctaaaatggattaaacttcagcctaaatgtccatgaataataaactggataaaggatacaccatggaatactatgcagccataaaaaagaatgagatcgtgtccttttctgggacatggatagaagtggaggtcattaactttagaaaagtaacacagaaacagaaaccaaatattgcatgttcttacttgtaagtgggagctaaatgatgagaacacatggacatatacaggggaaaaatacacagtgtggcttttcagagggtggagggtgggagaagggaaaggatcaggaaaaataactaatgactactaggcttaatacctgggtggtctgtacaagaaacccc

SEQ ID NO: 912059 - DNA, 653 bp, Homo sapiens
gaattattcctatgacttgaggcaatagagttttccttgatgacatctggacttgttgaaggccagtggctcctttgtttcgtgattttttttaaaaaaataaggacatccatgcctatcccaccataaaatgtcagaagcaaataatttatgttctagagtcaaagattcacatatggagagaaattttgcccaagatgaaatactcagagcttcattcatacctgatttagatgacttaggtaatacttgggacttattgatttgatgttatttagattaaattgtagacttagagttggtgctaaaatggattaaacttcagcctaaatgtccatgaataataaactggataaaggatacaccatggaatactatgcagccataaaaaagaatgagatcgtgtccttttctgggacatggatagaagtggaggtcattaactttagaaaagtaacacagaaacagaaaccaaatattgcatgttcttacttgtaagtgggagctaaatgatgagaacacatggacayatacaggggaaaaatacacagtgtggcttttcagagggtggagggtgggagaagggaaaggatcaggaaaaataactaatgactactaggcttaatacctgggtggtctgtacaagaaacccc

SEQ ID NO: 912060 - DNA, 606 bp, Homo sapiens
aatgtgcctaggaagatgattatttcagtggtttgaaaaaagtgagacattggaaaatatataaatgtataaactagagacacattaattatagtatagcctcatgatgaaaagtttgacagttattataaaaatgctgtggaaatttaatgaatggcatgggggatttccagaatatactgttactaaataagaattcatgtgatcaaatcctatgaactgcataaaactaataataaatccatctttaataggttatagcaataaaaaattgttattgttcactttttgtggtaggcattttgtaatctttactttttatgttttatctgcaatttccattttttatcttgtacatgtattgtttttaatgagaaaattatgttttaatgggttagactctagatgcttaaaaagcacttgatatttgacatctcttcataataaaaatcctcaataagctaggcatagaagaaacacacttcagcaaaataaaggycatatatgacaaagccatagctaacaacatacgaaaggggggaaaattgaaatcttttcccctaagaactgaaacaagatgagaatgtccactttcaccacttctat

SEQ ID NO: 912061 - DNA, 620 bp, Homo sapiens
aaaactgtgaaaacaagttcagaaatacatacgctgaatcyttagcctaaagccttaaatttctactcttacgacctgtcctattttagtcaattgacaaacaccaacaacttacaaagagatccagtggagcttccaaatcatatctgtagatgttaagtcttggaattctttgtagttctaaatgttgatacttgtgagaattaaatttgataaaatgttttcttttaaaaacaatatactggctttgacatagaacctattttaaataaagctattaaagtaacccagtcaaagcttctaaaatgttgcatagtcaacttttgaattttctgaggtggtttttaaaagcaatgttacagcctttaatttttcatctgctacagaacttaaaactactaaagacacgttattacagtattcagatctgatttacagaaacatactccacaattaggtttagaaaaacatagatgcaaattagttaaaaaatgatgtgcatttcaagtatctctttgtactgaatcacaatcacaaaggaataaacacataattcactgtgtttacctgccactctagccaaagctctgatttggcttacgtacaataataaaatacta

SEQ ID NO: 912062 - DNA, 620 bp, Homo sapiens
aaaactgtgaaaacaagttcagaaatacatacgctgaatccttagcytaaagccttaaatttctactcttacgacctgtcctattttagtcaattgacaaacaccaacaacttacaaagagatccagtggagcttccaaatcatatctgtagatgttaagtcttggaattctttgtagttctaaatgttgatacttgtgagaattaaatttgataaaatgttttcttttaaaaacaatatactggctttgacatagaacctattttaaataaagctattaaagtaacccagtcaaagcttctaaaatgttgcatagtcaacttttgaattttctgaggtggtttttaaaagcaatgttacagcctttaatttttcatctgctacagaacttaaaactactaaagacacgttattacagtattcagatctgatttacagaaacatactccacaattaggtttagaaaaacatagatgcaaattagttaaaaaatgatgtgcatttcaagtatctctttgtactgaatcacaatcacaaaggaataaacacataattcactgtgtttacctgccactctagccaaagctctgatttggcttacgtacaataataaaatacta

SEQ ID NO: 912063 - DNA, 618 bp, Homo sapiens
cagagagtcagggagtggttgtctgtgacttcccatttcctggacatccatctgtccttactacatagaaactggcttctgtgaaatttatcatctgtagcctttcaacaagccccactgtttcttgaactaaactgagtatgtttatcttttttgcaactgaaataatgcagataacatgtattgtatttattgagcacttaaaatatgttaggcattgtggtaagtgctttccatggactgttttgtttaaacctcatagcaattccatgaggtaatttctgttcattctcaatttttgtgcctgagaaaaatgaggcttggaaaagcctcactgttagcaggtagcagagcataatttgaacctgaactctaaagtcttgctccacattgatgatctttaccaccactgaagtcaggcatgagcttgcagacctatggtaggatgaggccaggcaaggctggggcctgagaccaggctgactcattaaaatgaggtaggtactgaggaacaacacacagtgatatgtcctggcaagaagcccasttggaggcaggaactcgatgtctggggccacacaggtaggctgttgagcgtatctaacctgcagagttggg

SEQ ID NO: 912064 - DNA, 615 bp, Homo sapiens
ttgaaactggtttaaggtttaaagtcagcwtttagtttcttcaaatacacaaattcattcatttgccatatagttcgtgaatgccagaagtacagcagaaataaaatccaacccttaattttatgtaaattccattctagtggttagagacagagaaataaataagcaaatactatgttaagtgttgcatgctatgaggaaaaattaagaagaggaaatgtgatggaggcagggagagtgcaatgttatgaagggtgatcagagaagcacttgtttataagctatccaatggataaattcaaccttattcttacagctcacacctcacaaacttctagtatgtactgtttaagggtgtactagaaagtatatttactttgttagtttttagttgtgattatagtttctaagtagggaatacttgggttcttcatttccattaagttgagggaacatgaagtcaataagcctataatgtgtgaaagatactacctgtattttagccaaaagtagaatcccatgaaatgatccaaaacaggaagaagtagagggggagatattccgttgaaaaaaaaatgaaactgggggatgtaaaataatacagtcaccaaagct

SEQ ID NO: 912065 - DNA, 620 bp, Homo sapiens
tgattccgtcatctggaatcaatgatctctatttcattattcattctgttcatttgtctgcacctctcaccagaactatttgttctctgaggtctgtgactgcactcgatgaatctgaaattctgtagcatctagtttggtaactggagaacaatataaaatggataaatttttcatgggtgtatagacataaggagtgactgaaaatagagtgccatatggtgtttatgcactaaatgtgcatatgtataaggaagagaagggtcaagacatgcataggtcatttagcgtgtatttatgaaacttctgatttgcacccagccttggtcatttgcagtgatggacaatgtgacaaacaattgaaatgaaaataggatcattccaaataaaagccaaaatatcatttcataagtgggtttgctgagcccgagtcactctccagctgtgtcagtcatccccttggccagtgtcatgaattctcttgagtctgtagagttacaggtcataccagaaaagaagggcctctgccatttgctcctggagggtttccctctcaaggcaggtgagaagccccaaggcctggctaccctgacattgttsttacagagcctcttgttggc

SEQ ID NO: 912066 - DNA, 582 bp, Homo sapiens
tattgacaagaattcaacgaaacagccactcccagatactgtttgagaatatgtaaattagaacaacctaggaatgtccaaaagtattagtaaaagagtttaaaatgcatataccctttaactttagcaattctatttcagggaatttatttgataaaaaataaggatatacacaaagattttacttacagaatattcacagtaataaaaaactaggaataaatatatacaacataaaaaattgttttgtcatcaattatgtcatagaagaaaattttatgacatccaaagatatttatgacgttagatgacaaaatggattatcataaaatataattcatcttttgtgaaaaaataaagtcataaaaaagatctgagaagatatatagagaggcggtttatcacaggataatgatgttctacttttttgttcaaaagttttacatgtatataattttaaaatacaaaatgattatacgatagaagtatttttcctttatccatgttgcaatttargttgttggcttttttcttattggtttgaaaatttcttgatagattaaggaaatgagctgtctttct

SEQ ID NO: 912067 - DNA, 607 bp, Homo sapiens
gacctccagttccatccatgttgttgcaaataacaggatttcattmtttttttatggctcaatagtactccattgtatgtatatactactttttatctattcatctgctgatggacacttaggttgcttttaaatcttggctattatgagttgtgctccaataaacataggaatgcagatatctctccaatatactgattttctttctcttcagtatataactaggagtagaattgctggatcatatgttagctctatttttagttttctgaggaaatgccaaactatactccatagtagttttaataaaacatacatttgcaccaatactgttcaagggttctcttttctccacatcctcaccagcatttgttattgcctgacttttggataaactttaactggggtgagatttggtctcattatagttttgattttcatttctctgatcaatgatgttgagtacttttccatgtacccgtttgccatttgcatgtcttcatttcagaaatgtctattcacatcttttgcccatttttaatcagattattagattttttcctatagaattgtttgaactctttatgtattctggttattaatccct

SEQ ID NO: 912068 - DNA, 605 bp, Homo sapiens
aataaaagaactgaacttttctgaactaaacagcggcttttcccttgagctaatgtgataaattgcctctttattttgataatttttatagaatatatcctagaaggcatatttttatcaagtaaaggtataatacaaaaataaaaattttcttgagtgtgctaatacaaccttccagtgttaatgataatcaggactggggggaattaatctccttcctgtgaaatgctgaacacttgtcctgaaaaaatactgacatcagactctagtatattcaatgttttatatattgtggcctatttcctcttttgttatttggataaaactttctttatatgacacccattaatactgcccacagtagaagaaatttctgatttattttcaatctggtactttatgctgccatgacaaataacctgttagaaagaataacagaaaaaataaactaatatttattgagagaatattaaagttatgagattggacccagaaggggtgttcaggcaatacaatatattgtctcagctcaagggtattttatttatttggggagataagatacataaagttccctaacakaacacaatacaggatacattatt

SEQ ID NO: 912069 - DNA, 644 bp, Homo sapiens
actcaacctaagttttcccagactccactgtgtcatttgctctgttcttcccaatctctgagaaccaatggctagaaagaagtgtacctatactkccaaagtcacttcacatagcatcaagggtttatgtgagaacctagaattttaaagtaaaggagatctaggagaagacaggaagagagccagagcttaaccagcacacactaagactaaaataacatcattcttggttcaagtagacatatattgagtaagtgaaatcactactacataggcagcaagggcaggtgtagttgggggaaggagtataggtgcagatggtaggaggtgaaggtgaattgactccctaaattctgtgtttgtcttctattacccagagcctgattttttttaggtatcttccttttttaatttagtcctcacccggtgagctacctttgcaaccttagcttaatcttatcctgggagtgaaaccaaagttgataattgggttttcagctcaagcctcagtgtctacaagagcaggattttaattcaaataattgcttggaggaaaaattttctgtgccaaataagagtgtatgttgcagtacgaaaaggtaaaagcatcctaaaagcagaatccaaacagccaacttttggaa

SEQ ID NO: 912070 - DNA, 666 bp, Homo sapiens
acagaaattcctacacatctggtatcataaatgtgtgttaagtgtgtgagagtagaaaaaacactgggttttcctatctctaatagacyacttagcagattctggtaagttgagatgtatagggagagtctaaagtaacgaataagaaactaacaaaaaatgtagtaaaaaatagaataaattctaacattataaaatattcacttaatgaaaaagaaagtagacaaaagggaacagaggaacaagaaaggcacaacatatgcagaaaagaaaaagtaaaattgcagacacaaatccaactatattaataataatattaaatgtgaatggattaagcaatccaataaaatgtcagagattgcaagaatggatgaaataatatccaactgtatcttatctaaggagagatactttaggttcaaagataaaagtggatagaaagtaaaacgatggaaaaatgtatatcatataaagataaaccataagaaaactggagagactatactattatcagccaaagtaggctttaaacaaaacatgttaatagagatgaagaggtacattttataatgatactcaatggtgagagtctgaattgttttctctaagacctgtaacagtacaaggctgtttgctttcacaaattttattaaacattgtaatgga

SEQ ID NO: 912071 - DNA, 611 bp, Homo sapiens
ctacttggactatcaatattctttcagataaaaagaggtatctgtctgatctgaatagctgaaacactgagtcaggartgtgactggcaatgggattgctttccggctagcctggcaggggagctgacatggctcccacccttccccctgataagaccttagtgcattacactgagagctcctccagccactgttttcaaggctgggacctcttcccaccatggggtattctatttatccacctgttttagacacagccagtttctatctggggacaccccctctactgacttgaagcgtaaactattcaacccaataaataaaatacagaagaaaaataaatacataaaaaagtgcagactacaggggaaagagacaagtttcaaaagatacctctgccactccaaccccacaggaaacagtgaacttaatcatataccaagcacactgctactaaaacaagcatctggggaagttaacatacaaagactctctataaccaaggaactcatacagagtcttcagccttgaaagcaccgagaactgaataggctacaataaactgtaaacattaaactcaaatccttaaagggggaaagaaatttttaaaa

SEQ ID NO: 912072 - DNA, 610 bp, Homo sapiens
accattccttgtactggtttgcacagggagagagaggccaaaagtctgacttgtgaaaaaaaacttttacccctttgctggcctgtcagacttctgggttcccttcccstaaactcaattctaagtcaaccagtttaaggtttggcaaattaactttccctagtttggaggattcatctgaggggagtatcttgtagtacagggacaaaattacccatctgtaaagagaggacagaaaaggaaaaaggaaaaaagaaggcatcttttttttcaaaggagtcaaaggggttcaggatgcattcgaaagtggtacagactgaaaatggattgactactcatatagaaagaggggagccaggcatccctggttcctttttcttcctagcaaatacccatgatacatgagggagaaaaggaaaagcatcctctttccttcttccatccttatatccccgagtcttggtgatctcgacagggtgctgccatgggtttcagagtggctttcacccatgctaaccgggggtctaagagtgggatcatacactctgacccatgtgttgccttttccctctgctgtcagtagtcttcaagttccctagacctcattaat

SEQ ID NO: 912073 - DNA, 658 bp, Homo sapiens
tttttttttttttttttttttgaggcggagtctggttctgtcacccaggcttgagcatagtggcatgatcttggctcactgcaaactctgactcccaggttcaagcaattctcctgcctcagcctcctgagtagctgggattacaggtgcatgcttccatgcctggctcatttttgtattattagtagagacgggtttcgagaggctggtctcgaattcatgacctcagatgatccgcctgccttggcctcccgaaatgctgggattacaggcacaagccatcacgcccagccaaagcagagtgtttttgcagcgagtctcatagaactgtatccttctattggagcctgttaggattttatgggatacttacaagtagcagtgataattcagttttgaaatttgaataaaaaccaaatcacttcagctataccctagccatagactgacacaggtataaaaatatttaccttctgtaggttcatctctgcacaatttctcaattaatgagagtaaaaccttgaggttttttttcatgaatacacaagagttttgawtgagatcatggcctcaatctcagggcatctgaagtcataatctgtgcatatgccgcagacagccttctgtctaacttctactgggtatatttagtttaacc

SEQ ID NO: 912074 - DNA, 585 bp, Homo sapiens
gagtgaaagagaaataggaagtgggactccattccggaccagactgagaaacagggaagaatccgaagcacctctccataagacatgcccaccagagttatgagagtttaccccttccctggmaatgacccagaagttaccacccctttactagacatttctgaataacctacaccttaattttcatgtaattaaaattgatataaaagctgcttcagaactgccctgaactgctactctagataaactgcttgtgaggtagtcctgctctgcaggaggagtcatggagctctaacactgctacttcaataaagctgtttccttctaccaccagctcacccttgaattccttcctggaagaagccaagaaccaattatttttaaaaggtttttccagaatacaccactatttctttaagatctgaagacaaggaatggtgattcgatagtaaaaattatctcttactgggatcatgggttatgtacatatttggttgtgatgcccgggcaatccttacattatggcgtgtccctttttgttatcttacaaccaaagatcttgagagaaactaagaaaattgtttc

SEQ ID NO: 912075 - DNA, 680 bp, Homo sapiens
aaatttaaacaccccagccctccttctaattgaagagttctttttaaaagagattactcagcccctcaagtaaatagacccttgatggccctggccctgctggtcttttagacaggctaaagctgtcatgctcaaactctgcaccactgacatgaaggaaggcccatcaacttctctatgtctgtttgggcctgttttaaaacatcatcagtgtgggcacagaagaattcattcttctccctgagtctctcaggaactctgcatggcatccatgtttggaatccttagcttactgcccctatgatgcctccttagagtatgttgtttcctgcttgtttctggagcagagtctaggtggtaggcactatgaggatgctatgcagaataaggcatgaattctcttttgaaggagtcttcagaacagaatttgagatgatgtgatcaaacaaataggaagagtactctctaacagtacttctgccaggtggtcatatggcctctgcctggatctttaccaattttttcaaacacagagctttctgctgcagaataatttgaagcattagacgtttttccctatttaaagctgaaatccttgggcaatgggatcataagaagcccaaacttcagcatcatgccatatacccatgraaccaacttgaacgtataacccctgaatc

SEQ ID NO: 912076 - DNA, 676 bp, Homo sapiens
ctgatatatggtcattgattggttaaataccaagggacctaactggcatgagggcagtcttcatggatgtgaagagacccagttgtgcagggtctccactctaagaagggccccaaacttagtttaattctctactgttgcaatcttgaaattcacgaaaattttatttttgatcttgtgttctataagtgaagtgtgatgaaacaatgaagcatgtgcatgaatagtggagatatagcaggtggtagtgtgcacacttgaaggcttaggttcgtaggcatggaaggccaaacaggcatcgagcaattggtctggcatgcacaaacaggcctttggtacagtctggggtacatggggccctaaggtagccaagctgggacctgggcccagaaggatgctgtcaatggtggtggcagcaatagcagaagcagcagctctggtagcagcaggagctgtagccacaggaacaaggattccctgtggtggaagcactgggactggtgacaggagatggacttgcctgtctcttaagccagaccctatggaatctacacaaatattaactctccattctgagtacaaggacaagaacaacttgcattcaggcattaaactgtctcagtaagttatgacaaaacaaragtgtacacatggagattgtaataatgcatattaa

SEQ ID NO: 912077 - DNA, 573 bp, Homo sapiens
tctgattgttttggctaggacttccagtactatgctgaatagaagtggtaaaagtgggaatctttttcttgttccagttctcaggaggaatgctttcaactttcccccmttcagtataatgttggctgtgggtttgtcatagatggcttttattaccttaaggtatgtcccctctatgccaattttttaatcataaagggatgctggattttgtcaaatgcttttcctgtatctattgagatgatcatgtgatttttggtttcaattatgtttatgtggtgtatcacatttgttgacttgcgtatgttaaaccatccctgcatccctgatatgaaacccacttggtcatggtggattatcttttcgatacactgttggattcagtaagctagtattttgttgagaatttttgcatctatgttcatcagggatactggtttgcagttttctttttttgttatgtcctttcgtggttttggtattaggatgatactggcttcataaaatgatttagggaggatcccctctttatcttttggaatagtttcagtaggataccaattcttccttgaa

SEQ ID NO: 912078 - DNA, 654 bp, Homo sapiens
gtcctttctaggtaaagaatattttttcctcagagctctagcaagcagctccagggaaaactcaagccttcaatgttttagctttcttgtgagatttatttattttttaaataaatcagaaacctctctttctatagatatgtgaactttctttaaacgaggagatctctggccctgaaaaactttgaaaccactggttcaggtgaagtcgatcattacctgctatttcactgccatgagagtgagaagtctgtcgtgagagagggttaagggagtcagggcattggcgcacctgctggtcccctgtgccagcctgagagcagaactgttgggaaatgtctccagtggccttggcaggcttacccatgaatgttcagcaccaaattatgaatatccatgacatcatatctaaatgttagggtagggctgaatcaacttccatttaatacaaaatataaacattatgaaaattctttgtttcttctaataactaacgtggccagatgtcactatcacttcacatcgtaatatcagattgtcaccattcattattgacccttcgattactctttaaatgaaaatggtacgttagctgcctatgatgcaamattttacacttttaaatcgtttcttgctgtaattttatttttatct

SEQ ID NO: 912079 - DNA, 624 bp, Homo sapiens
atgattgtgaagcctccccagccatgtggaattgtgagtccactaaacctctttttctttataaattaccccatcttggatatttcttcatagcagtataaaaatggactaatacagcatgtattayctcatgaacttctgttagtctttattttagaaaagaaaaaggtgatgttagtagaaatcaataactctctcactataacccatctagtaactggaagaatccaatctgtctgactgtaaactcattctctttttacctaccccacacaacatcataagagattggagttgttaggacagcagtgagaaaatttcctatttttaatccatcaattaactttttaaagtgtaattggttgtataatatgatggattaggcacctttgtataccatgtttaattgttttgactttacttcttaagtccatttgtgtccatcaattatttgctgtctacaagtaccttaatacaggcacatccagaattaaactcactttgtaaacctatgtggaattcatacatatgcatgaattcatccagaagtaggaggagccaaatgctcagtgggctacctttgaataatggggacataataaaagtaataactgtttctctctg

SEQ ID NO: 912080 - DNA, 638 bp, Homo sapiens
tcaacctcagcgtctgcatcttttctccatccacatttggaatactgtctccaatgatttgttcaaattawgttagtttagttgaaatcttggtccctctcagcaggagcagtacttcctggaagcacctactcagccatattttccttcactttctattgttttttcttataaccataacctttaaagattgatggtagtatctcctaaatctataatgtggccttctatgagttaacatagaatgttttcaaagttttattccaatgctttactatgagcttcaggcttctttttagtacattcatattccatatatactctatttttgtatgtattataacaaagctttgagcaaaagttctaaagtacacataattttctcataattgacttaagaactgatgatgaggtgtcttcacattcatcagcttcaatatagattagaattttatagctgccaagagattaataaaatgtcactgtctttatttttagtcaagtgtaaatagacacaaaatatacatagttttctctggctctaatcaatgagtggattttctcatgataaaataacttagtttataaataacagtaaaatattatagaatatgactaacacctagaagtaattcaat

SEQ ID NO: 912081 - DNA, 666 bp, Homo sapiens
aacctaggggcctggaaagaaaaaatagtttaatgggctgggcccagggcctctcctgctatgtttagcctagggacttggtgccctgcatcccagcctccctagctgtggctaaaagagaccaagatatagcttgggtcgtggcttcagagggtgaaagctccacaccttggcagctttcacatggtgttgagcctgcagatgcacaaaagtcaagaattgaggttaggaaacctctacctagatttcaaaggacgcatggaaatgcctggatgtccaggcagaattttgctggaaggtcggggccctcatggtgaacttctgctagggcagtgtagaagggaaatgtgaggttggagccccacacagagtccccatggggctatgagtagagggccactgtcctccagaccccagaatgagagatccacttacggcttgtactgtgtgcctggaaaagcctcagacactcactgccagcccatgaaagcagccaggatgggggccgtatcctgcatagccacagaggtgaagctgccaaaagccatgggagcccacttcctgcatcatcatgacctgggtgttagccatggcatcaaaggagatcattttggagctttaagatttgattgcccmactggatttcagacttgcatggggcctata

SEQ ID NO: 912082 - DNA, 634 bp, Homo sapiens
caggaagatgtgggaaagtttggaacttcctagaaacttatcgaatggctttgactaaaatgctgctagtaatatgtacaatgaaatccaggctagggtgatctcagatggagatgaggaacctgttgggaactggagtgaaggttacgcttgctatgcattagcaaagagactggcaacattttggccctgccctagaaatttgtggaacttcgaaattgagagagatgatttagggatctggtggaagaaactgctaagtggcaaagcattccagaggaagcagagcataaaagtttggaaaaaacagcctgacaataagatagaagagaaaatcccatttctctgtggagaaatccaagcctgctgcagaaatttgcataagtagcaaggagcagaatgttaatcactaagacaatggagaaaacatctccagggcatgccagcgaccttgatggcagcccctccaatcacaggcctggaagcctataatggaaaaatagtttcacggtccaagttcagggcctcactgctgtgtgcgtcctcgggactgygtcccagccactccagccttggctaaaaggggtcaagatacagctcaggtcattgcttcagagagtgcaagccctagctc

SEQ ID NO: 912083 - DNA, 550 bp, Homo sapiens
tgaaatgggacaaacctaaatctaaactattttcaatttgrgataataaatgaatttccactaagtttcctaaaaatgtgcatgtgtgtactagcgttgtttctacggtaaaatatctcttttgtaggttcacttctttccataaaaagacacccagattacttagctaagcaatgtttgaccccgggatttaggaggaataattgttgtgatagaattttttagttttcatccaaatatgtcatattatgtggactacataatgtcctcactctcaaacagagatacaagataaaaattatttccacatccctcagtcactcagaatgtactcttattataccgtagttactcacatgagtgcttttctctcctattaatgctaaattccttgaggagggcctataccatttcttatactaaataaggtagagcaattcagaggtaaatgagtcaaattgtttgacttcaatcaattagggaagaaaagacataaacaaaaggagaagcaacttagaaggttacaaatacgccaaagtttagcaacaga

SEQ ID NO: 912084 - DNA, 608 bp, Homo sapiens
gtgcccaggagtttgtcagtttatggtgccagtaaaactattcctgatttttctccttgtttatccaagaagagtaaagggcaagataaaaaaggaatgtgatggaattcaatttaagcaaaatcaggatttcagccttttgatattttaactaatttagtgagcatttatattttgctatgcattgtcattccattagtacaggtgactataattaaagctttcatgagattattttgattcacccttatcgtaagactaaaaatgaaacagacacaaataatctgtcataaatggtgattctctgggacccaattttttggagccagtagtgaaacaagcattggattttctgggctgggaaaactggagatattcaggtccctattgatttgccttctttggaaaatgactggctcaaagacaactgggccttgtccctctatcatggccatcttaaatgttatttaataccaataatcagtaataggttttactggaatgacagagttgtgtaatctctggaaattttctgaagatttctagtgccttttkctgatatggtttaagcatatatttggtcaaaggtactctctcaagggtccatc

SEQ ID NO: 912085 - DNA, 685 bp, Homo sapiens
tgggaaggggagctgttataaagtacaggaagcacaccctctccaaattgcctaagagagataacatatctgtggaaaaggtgttgggactcttaaaaagtacattgtattagctatgtatatggtaaattatgaagtgaaagtcgtggttttctgtgacaagagaacataaagtttccaaaatgttaatcaagagagaaaatgcaaaccagaaatgtgctttctggaagagggtgaatagaagttagcagtgcaccacagctaaagcaggcactggtgattcaggaccatggatatgtccccccacccctgcaacaaactccaagagagttttcaactgggcagtatttctgtgcaccagctgtagccactaccctgcatctacaatgtggctttgaagaaagtagggtatgatacatgatgtgcccttcgtttgtcttcttggcactggcctgtatactgtgaaagatgcttactgcactgccaactctctgcctgagggctattatactgctcatggatgcttattatactggtcattgatgcttactctgtccatatgcagggtgagtttaaagtaccaaggagttaatgcccctggaagcaccactaaactaatggyggagttgttggattcatgtgccagtttccagagttgcaataactcggaggcatgttctccacc

SEQ ID NO: 912086 - DNA, 651 bp, Homo sapiens
actgctttgtttggtcttgagcctacaacctaaaccatctgccaagagatctagaaggaatcacacacacactagtgccttggcagaaaggcttctctgcctgcctacatcagtctcagcagtgaacctaaaagctgccctgtggctgggattcacccctgatcagttgagctcccatctcagaagtggttacacaagaacccaggggaagactcacccatatctcacagctcaggagtctgagcctccctgatgggcttgcccaactctgtcccagagcaaatcccaagggtgcccagccttagctcttgtccctctcgatgctgtcagagaactatctcctctgtactgagacctggtgggagagccatacctgtctgggacaatgatgctggctctctagcctccatctcacagcagatcccaaggggacccggtcccagctctgatttttcctgctgcaatgaaagaatgatctcaactatccagggacttgctggaagatgcacatccctttaagtcaatgagaccaggctctttagcctgtatcccacagcagatccctagacggtctaacagacatctagagaatattttacmcaactgctgcagaatatacatttttctcatcagcacatggaacattctcca

SEQ ID NO: 912087 - DNA, 554 bp, Homo sapiens
tgaacctaccttttaaacttatgaaaatagtgaagcactatccaaaacctcagtctcttttcttccccttttccttacacctacaaacagtaaatgtacttgctggagcatrtgattcctgttttgggcttgtttccatttatatttagagagcaatactaggattaaaaacttttttattgttgttattattattttttgagacggagtctagctctgtcgcccaggctggagtgcagtggcgcgatctctgctcactgcaacctccgcctcccgggttcacgccattctcctacctcagcctccccagtagcttggactgtaggcgtgtgccaccacgcctggctaattttttgtatttttgtagtgacggggtttctccgtgttggccaggatggtctggactcctgtcctcgtgatccgcccgccttggcctcccaaagtgctgggattacaggcgtgagccaccgtgcccggccaatttttttgaggcagggtctcactctgtcttccaggctggagtgcagtggagggatctcagctcactgtagcct

SEQ ID NO: 912088 - DNA, 579 bp, Homo sapiens
taagatcccaaaccgtactcttagacaaaaacataggtgtaaatttttctgatactgacttagtaatgatttctttttttcctctccttttatgtgggacaggaaaactagaggggtttagagttgtcttactgcttttcccctatgtcagacaaggccctgataaagcagtttttctttagggcagggctttcacacagagaatagaatgctctgggcatatttcaaaatggttgctgtacccactcactctatccaccaactagggtatattttgaaatggttgcttttcccttttccttgcctaaagagcctgaggaaattttcttcagccttcatcatgagaaccagctagggtttctggaagtaacattcatgaaagtataaggggttcccaaggcgggacttcaacaagtttttaactctcaagctagtccacactcagccaccggtaattaattgactagcatktaagtgttcctaccaattactggctcctgtggcttctgctctcaggtaaactgtgatgttctgtagtcacgtgtctctctagtttttgaggaagtggtttgccctgtg

SEQ ID NO: 912089 - DNA, 566 bp, Homo sapiens
ccttgcatttccaatcttattcacacctagaatccaggcattttcagccacatgragtacctacttgaatagaggttcattggtatgctggcactgatggattttcagctgctgatgtttcttaaaggtcttcttacagtcttcaaaactgcactgttaaattgtaaaggctcgttagtcttatggaaagtcaaaacaaaatgaacagttcgtaacagaatcctcaagataaaacaattttggagactgtataaaatttctgctttcacccattttgttactgtaaaattctgctttatctcaaaaaggtttgaagaatcatataacatttgaaaaagcaaaactgtttcagttggaatagtctcccaatacactaatttgcacaatgtctgcttccaaattaaaacctttatcattatgatggcattaagtaaattcagacatttggcagacaaaatttggttgacgaaaactttatttttcacttttattttttagagacagggtctctgttaccccaaaattttttgttttgttttctgtttttgtttttttttttcagagac

SEQ ID NO: 912090 - DNA, 588 bp, Homo sapiens
ttctctacttaagactattctctttttacatatmacttttgtggtttctttggcatacttttgtattttagtatgaaagcatggaaaaagttgtgtcattaatagagctttgcaagtagcaatcactatggatctctcaacccccagggccactggagaattgagcagcctaaatctctgcagtctggctggagactttgctgcattgctgatgatacatgttgatcaataattgttttccaaaaaataaagttttgatttgtgtactataaaaatcattgttcttttaaggctgaaagaatccctgctcccaaaaaggacatgattccttggtagaaaaaaactgatccctgagaaaattcaccttcagcatagctggtttcctagatacacgttttccctttgaatgtgatagccacagtggcaaagcttccagacgagggtccagttaccatttccataccgctgaaaaaagtaattggatgtgcagcattcatatgcacacacagcttattctgttaattgaggcataaaacacggtatgaagaactgacaaaaatttttttcttaggctcctaaaatgtttgt

SEQ ID NO: 912091 - DNA, 566 bp, Homo sapiens
tcttcctgcctttgctttgagttgtcccgcctttccagactgaaccaatgtacttctaaygcatattgattgacgtctcatgtctccctaaaatgtataaaaccaagctgtgccccgaacaccttgggcacatgttgtcaggacttcctgaggctgtgtcacaggtgcacatcctcaaccttggcaaaataaacttcctaaattaactggattttctgggaccactctgtgcttatctctctttaatcttccccctctcaactcattggcctaacatgtgttacttggtcaccgctagccacagggagactgggaaactgagtgttgagcttttttagcctctgtagtggtgagaagagagaagggatttgggaatttccttcgggtggccacttaacactgtctgcctcataattggccctccttttacaaaagaaaaactgagactcagaagagttcttattcgctccaaggatcaagctgctaagaagagcttgaatcaacatttctttgacttcaagttcacaaaattttcaataagcaattcttactgactgagggcattc

SEQ ID NO: 912092 - DNA, 618 bp, Homo sapiens
gtgtgtgcgtgtgcgcgcgtgtgtgtgtgtgtgcgcgygatcactgtgatgagacggaatcctctccaggccttgaactgttggggtaggatccagccaccctcaaccttgaacttaaacaattgggaaaataatttttgtatttgcttttaattatctttcttaaaagtacataagctcacattcacttcaatgtttaatgttaaaagtgtttgagatctttatttagaagtttgatgatgtttttgtgaccagaaatatgccctcggaacttaattctcgttttatcaattagcctttggtaaaattggttctgttatacatcatgttgcttagagttgcagtttccaagaacctactgaggccattaagtgagggcagagtgtactcagagaatcacaaatgctaaccatctgggtcattttcttagatgggagcactaagctatgcttttcactgtctagcatgcagtccctcaattgagtgccatctccgttaaggaggacaggctgcagaaaggtgcaattaaaacaaattaagatgatcctaacatctattgctatagtttagtagtatcaggttctttttttaaaagctcatacaggaaggtacagtatt

SEQ ID NO: 912093 - DNA, 568 bp, Homo sapiens
ccactggagcaaccgcctggtccctttgtccttggagagatgggtcgtagcatgaaggcttctaattagaaaagtccacgtggttccaagaagcaaggccattttcatctacagctcttgctgccaacttgcaggccacagcgagctgcactctgaacatgctgggtactttctccacttgtgcccctcacagcacctcatctggtctgtagcaagctggaaacagcatttatcactgtgaaccacattttggcccttagacttatatactcatttccagggacgaggtagcagagaaggaggaggttctgctactcacatctgcaaaaggttcaaacaaggggatgggaacgggcagagcaggtggctaaaagcgacaatagggaaataggggggaaaaaaccgagtgagaaggcagcatgcttaaagcactcttgattaaaagatgtaatcagttttcatttgaatatccccaaaccacccaaaaccmtagtgcgtggtggcctatggcttccaaattctcaaaatgataagctgccaaagtaaactaattgcagtgtgtctcagt

SEQ ID NO: 912094 - DNA, 624 bp, Homo sapiens
ttgttattaactctagtcaccgtgttgtagccartattaaatatatcttgaattttctgcaaattatagatgtgaaaggaagagtcaatgactttgacactaagttttttttttaagcctcattttttaaaatgttttcttaaggagaacttcaaacatattcaaaaatagaatagtaaaatgaccctccatgtatcatcactcagcttcagtaattaccaggtcatgctaatcttatttcctgtattccttcattaacttctcctcttcccatgttaaagcaaatctcagatattgcagggatatcattatatcaatatgtatttctaagaggaaatgaccttttaaaatgtaatcatgatagtacttttcaaaaaatgtaacaagaatcacttaatatcatagtatcataaaatggccaattgatgttccaattaccattgtctcataaatgtcataaatgtttttgtttatttacacatgtttgaattggattccaaataagagctatatattgtgattggctgatatgtcaagtcttttttaatctatagtttcaccctccatctctctttgtttcttttggctttttctttttttttttttttttacaactttttggct

SEQ ID NO: 912095 - DNA, 539 bp, Homo sapiens
aaaaaaaaaaaaaggccaggcgcggtgtctcacacctgtaatcccagcactttgggaggctgagacaggcaggtcacgaggtcaagagatcaagatcatcctggccaacatggtgaaaccctgtctctactaaaatacaaaaaattagctgggcgtggtggcatgcgtctgtagtcccagctacttgggaggctgaggcaggagaatcgcttgaacctgggaggtggaggttgcagtaagccgagatcgcgccactgcactccagcctggtgatagagcaagattccgtctcaaaaaaaaaaaaaattaataataataataatagtaataacaataacaagttgtctctggaagtaggggtcagccacactggaatcccagagtccctccaagctgtagggacaccccagctgggccaggtttctcccagtagaaaatggtctgggaaccagggmctgggtgtggtggctcacacctgtaatcccagagctttgggaggctgagctggaaggactgcttgaggccaggagctcaagacc

SEQ ID NO: 912096 - DNA, 601 bp, Homo sapiens
cctacttcttgcatcagtgtgacctggatgtgasacatggagtcaaaggagataattttggagctttaaaatttgactgcccagctggatttcagacttgcatgggccctgtagcccctttgttttggccaatttcttccatttggaatggcctatttaccaaatacctgtaccccaattgtatctaggaagtaactagcttgcttttgattttacaggctcataggcagaagggacttgccttgtctcagatgagactttggactgtggacttttgggttaatgctgaaatgagttaagactttgggggactgttgggaaggcatgattggttttggaatatgaggacatgagatttggaggggccaggggtggaatgatgtagtttggctgtgtccccacccaaatctcaacttgaattgtatctcccagaattcccatatgttgtgggagggacccaggggggtaacctcccaggggaggtaactgaatcatggtggccagtctttcccatgttattctcatgagagtgaataagtctcatgagatcttatgggtttatcagggatttctgcttttgcttcctcctcatttttctcct

SEQ ID NO: 912097 - DNA, 480 bp, Homo sapiens
tatttcaatgaaaacggaaccaactagaayaatttaatattctctgatcaatcgattacaggaagtaaccagagtatttgcaatttgccattctgatttacagaattaagttgtactgttcaaaagaaggtactctggtttgggatactggtagttttattgatactttttttttttgctttggttattattgaaacaaataacataatcaaaattcctcatcagtagatcaactgcaggaggccatgaagagatggggtaaatctctcacttttttagatagtagcattcggctccttgaaagcaccgctctcagcactgccacccaaacgtctgtgtgagctgttcctctgtcctcacacacaggaatcacgcacagtcaacactcctacagttgtttttcaagttgtctcttcatcaaacacacccgaccctaaaactgatcttaaaacagaagatggaagtgagtcccaggatcac

SEQ ID NO: 912098 - DNA, 526 bp, Homo sapiens
aaagaaggaaagaaagagaaaagaaaagaaaaaagtagctcactccttctccccttcaggactctgctcaaatgtcacctaatcagatagactctctaactgatgtatcwaatagcagaccacaccatcactctccaaactgttgccctctttaatttttcttaaagccctatcccttttggacactatattagaaatcttagttaaatctttgttccctgcccccctgcagcctgggtctggtttgctcattgtgaagcccccattgttccgccagagctggtgcacatagaaacgcagtgagcatgggtgagtaaatgagtgaagggatccagccgtttgctccctgcatcctgtcatcatgcaacacagtcacaaatggaactccagacagcaagacttctccgcgtgctgcctaactcattccatgagccaccagtggcaggaggatcacaattttggaagcatcaatccagcctcaggtggtttctacctcggggccccggtctgctcaccttagtggacc

SEQ ID NO: 912099 - DNA, 611 bp, Homo sapiens
ctgctaggaatgtgacaccagatttactcccaacaaagaaatgggctggcaatcaaaatgcatcttacgtgcctcgtgacagtgaagaaagaatgaaaacagatgaagttgaaaagacttgaawaaagtgcgccctagattatttgacacattatttttgaggtctctgaatggttgttcaaaaaacttactggaatattatcctttgagaagttatttttttgggggccagcttagtttgatcatcctgaaaccaggagtagggaaaggtgaaaaggatcaaagacagtcataggtcatctgatggaggaagaagggtatctccaaggccattgtgtcactgaggagcatggcagctatcaatcaaaatgccagtttagctttgtgcatcagttggttctgataagcacctgtttcttgtgtctgttgctttcctggtttgctctccaaatgagcaggtcctttaaatggaaaattagcaagtggccatctgagaataaaatgaaaagaaatatgtaaatacttcatgcagacacatgaggcttggatggtaccgcttctcctgtgttatcaaaagaaattgtcttacaaggacagcctgaggctaaatg

SEQ ID NO: 912100 - DNA, 648 bp, Homo sapiens
tgtcactatctacgtaactggcaaaaggttaactcttttatcattcatcaatttaataaaattctgtaagaaaaagaaaactcaacaggaaacaggcaaagatgtaaataggcaaatgagaaaaaaatatatagatgacagatatacatgtggataaatttgtaaactaggcaatataaacttaaaaattagattctcatttttagccatcacgtaatgtcctgagccagcaaagagcattggaaaaaaatatttttatatgtttactggagtttacactggaacaatcttaagtgaggaggacaatttggctggatttataaaaatgcaaccaccttttggcccaggaattctactaatcataatctgtcttctataaatgtacctgtgcacagaaatatacatacaatgatgttcacaacagtttgtagtggccaaatgtctatggaccactttaataggtatagtatatccatcccatgaaatgaaacccagccatcaaaaagaataggagacatttaggcatactgatctggaaagagatccaagacatattgtaaacagwgaaaaaaaaatcacagaaaaatacattttgatcccatttgtgtggaaaaaatggtttgtgaatgtatatacataaatggctcc

SEQ ID NO: 912101 - DNA, 596 bp, Homo sapiens
caatatctgactttgcaaaaggaaatcacctcactatatatttgtaggctcttgggtcaatataatgaaaagtaattgtattgaataccagaattctaaaataattgtttaaaaatagaaatacgacttatatccccccaaatttattaccatttccctcaggaatttagaatccatttatatttttcaagtcttaataaccaaaaataattttttaaagatcactagaagatactgggaagatgaaagttagataaaatactgcttatatcatgagtttataaaaagatgttcgatactattcagcacttctgcactgccaggctggtagacaatgctacttggaaatcagacctatagttatcaattgcaacgggttaaatggtggctcctccaaaagatatgcacattatctaaaacttcaagcttgtaaatggtaccttatttggaaacagtggtctttgcagacataattaagttaatcatctccagatgagatctttctacattatccaagtgggccttaaagccaatgmgacgtgtccttataagagaagaaggaagatacagagagaagagaaggccgtgtgaagaca

SEQ ID NO: 912102 - DNA, 601 bp, Homo sapiens
actcaaactgaaacgctggctcttcctgggtctcaggcctgccagccttcaggctagaactacaccactggctctcctgggtctccagcttgctgaatcgtcatgaagatcttgggacttgtcagcctscctaatcacatgaagcaattccttgtaataaatctctttatacatacacatacatgcatacataaatacatacacacacacacacatacacacacatcctattgttctgtttcactggaaaactgattaatacacagggcaaagcccaaattccttaacacagttaaaagatccactatgacttggtctctgcaaaatcctccagcttttctctttctctgcactttcccccagcttcgctctcttgactgcagtagcatccagctttggtcatatttttgacatacctttatttctcccacctgatctttcacacatgccattcctttatgcttatagtacatttccacctttcctttccatgtcattcttcattaatttattcaacaaacatttctgaaatgttggatatggtgtttagaagttaataaagcaaacacggcccttggcctcatggaattcctagtaggag

SEQ ID NO: 912103 - DNA, 604 bp, Homo sapiens
ttgctcttcttcatagattcctccggcctcagatgaccaggcaccactagatacagaayactgtgctttccttctccaaggtaaaggaataaatatctgttccccttcatgaagtgttactgttgggcctttatgccatcctgaagccaccaggatgtggaaccagatcagggaggtccacagttacaaccccttgtatctgtaacaccagcaggacattatctacagagtcctgctgcagggccccgaatgaagacagcattttgctgctttgtagcgtgagcagtgctgtaacagtgatgcatggatgttcctctggtgtcctgaaagaatgtaggtgcttcttgaaagctctctgcaacttattaattgggagtgattatgcgatggagaaaacagagtcccatcaccccctcagtcttccctgggaaatcacaagagggctgatagctctctgtgaggtgaaccgtttctagaatccccaccgtctcgtcctgttcttccgcccacccagttcctcaagatagcccctgtgggcttctgatgaagtcaccacaccactggctaatgaagtagataaaccagaacagtttggtttaacatt

SEQ ID NO: 912104 - DNA, 636 bp, Homo sapiens
taccatgtttcagctttaccgaagccctagtctcattttagcttcaaagtatcatatagacattgacctcaagaaatttaaaaaattgtacaatgactaacaaacagggaaaattacaatctcatttttttagtataaatacattggttgggccaaaacttagctacccttgccaaaactatatacccaataatgggcctctttgatgacaaagaacacaagggcagttgttaacttttacttagtcactttggattattctcagaaaattctcaagtcaacttctccttgttacctaaagagtacaggcccttctgtgtatacaggagagatggcaagcaacttttaaaatcagcttaggtaaaataaaattaagaaatctgcttataaggttatacttatgaagagtcaaacacttataaaataagattataaaggcttggactttattactaatagtagattttatagtagagtgacattatttcagttaatctaattttcttcctagtgtttttttatctgctagtttcccaacttacagatatcaaatgaaatgatactatttcatctgtataytgaacactgcagaaataaacattagaattaggacacatcaaaatataaaactaatca

SEQ ID NO: 912105 - DNA, 468 bp, Homo sapiens
gaacaaggtttgttctcaaacctgtttgtgcccrtcatgcatttcattgtgctgataaatttatttaaataaaatgaaaattcatgaaattcataaaaaaaactttgtgaaagttaaggtgaagactttgaaaagactagctgaagggtgatactgaattgaggatatgtgaaaccactgttaaagtgtcggagaaattataaaaatctgcaaagatattgcactcatattgctttgcaaatatcattaaattcttactctacttttacaaagtggaaattgaaaatcatatataatgcattatggaagaccatgctgaactcatctctcagttgaagaaacagccttggctctacatcaaaagattggcaaatgaatgtacatcttaacgttgcaaattgaaataaaatgtttacgggatgtatgcatcattttttaatggttccttgacttaaaagatatacagtc

SEQ ID NO: 912106 - DNA, 586 bp, Homo sapiens
ctttgaaattttttgttgtgaattctttcattgagcctctttttctgtgagttttccttgcatccacggttgtgggagtgtttctccagcacggttttgcttttgccccttctgttgcccagrgttattgctgtccggggccaaatatctggttactttctgcacctagaaggtgacacaactgtatatctcaaacttgtaagactttggcctgtggtttcaaattcttggatgtgaatttttttttcttgttattttacatagaactcaaccagagaccactgggaacatcgtttcatcttcttttaatggtgcatagatttttctctagtccattgtttaggaccagactttatgtaaggcatcttattttctatgtcccacctctcagggcccacatcactgtttcctatcccccagttgacaataaagaaagcctctaggataatgaaacaaacagtcctctccctggatagctactatgctacctcactccctcctgtttttcctttcccttttcctttcttgtgaactcatttctataccttttttaaaaacaaaaatgttatatttcattcaatatttc

SEQ ID NO: 912107 - DNA, 626 bp, Homo sapiens
aattctttcattgagcctctttttctgtgagttttccttgcatccacggttgtgggagtgtttctccagcacggttttgcttttgccccttctgttgcccagagttattgctgtccrgggccaaatatctggttactttctgcacctagaaggtgacacaactgtatatctcaaacttgtaagactttggcctgtggtttcaaattcttggatgtgaatttttttttcttgttattttacatagaactcaaccagagaccactgggaacatcgtttcatcttcttttaatggtgcatagatttttctctagtccattgtttaggaccagactttatgtaaggcatcttattttctatgtcccacctctcagggcccacatcactgtttcctatcccccagttgacaataaagaaagcctctaggataatgaaacaaacagtcctctccctggatagctactatgctacctcactccctcctgtttttcctttcccttttcctttcttgtgaactcatttctataccttttttaaaaacaaaaatgttatatttcattcaatatttccaagcacttactccgtgtgagcttttgggttatctgagcccatcgtcctgcctgtgtcct

SEQ ID NO: 912108 - DNA, 611 bp, Homo sapiens
tttgatagtcccagcatggttgactgatgttgagcttgcagtctatgagaaatcccaagtctctacacagcttgtttttttaggcttgtcttctcctatcctttgcataatttattcttttatctagtcacactggggatacagcagggaaccaagtagacattgtccctgtctcttggaacttaacatacattagtgaaggctgtcagtgaacaaatgagcaaacaaatatataattacaaattgtaagatgtactataaagtgaatgaacagataaatagtagaagagacatcctactcttgatagttttttttttttggtggggtatgcattttggcatttaccctgaaataaaacattatttttaatatatctggcctattattccaccctaccccaaccatttatagaagagatcctggctgttatttgttatttttagtgccctcatccttcactttattcctaaatgtgataaatatgacacctctggctttatcccagtcatcaataaaaatayctaacgggacagaacagtaccattgttgtcctagagctaacagtaatatccattagctacacatagataaagatctagccagcatatat

SEQ ID NO: 912109 - DNA, 636 bp, Homo sapiens
ggagaaagaaccaaggtgatgctagaagagattctagacagagactaagctacctctcaggccattcttgactaaacaatcatgaaaactctaggagagagttgctcaactcaatgctagaaccatcttagatttgtatgtaagttgtggtttgttattatattcatattttatcagaatgaattggatgtaattcataggtttagttcttctcaatatagtatgcatttatccttataaattctagagttgaagagaatccattcaggtgacatttagcacctgtgaaattaaagaaaacaagccagcccccagcctagtccatagaaacactgccaccctggggaaccagagaggggtccagccaccctctctgattcctcagctcttataaaactcatcaagatgttatgccacttaggaggtagtaactgtgtacctgctatttaaaaactagtattgaataagtaaatgtgacatttaaaaagcataaatacatgctcacaatgaaagcaatgactatcatttcaaaagctgtgcaaaattagtcagatctgcccttcaccaattagtgttaattcctattaatatgatctaaygggacttaatttcctcagctatagtgaatgcaattgt

SEQ ID NO: 912110 - DNA, 573 bp, Homo sapiens
accccagccattgaccctcatcatcttattctgtgtcttgtcatcagcagaaactgcatctcttttggaatcttgattttaaatgccctrtgtcctggctactaccttccctccttcttgctaacttcctactctcctttgcactcacccagcaaaaatcactcactcacccaaccctggttgaacccaatgatctactttctttgtgattggactgaactgctgaatactgtttgagaagctcacactaactggcttcacaatgaattgcaaacctgactgatggctcaactctatgtagaaattctgcagtgcaaccctgtaggcatcctagcatccaagatggcctcattactggctgctccttctcctttgccgattccgcctccacttcctggtttctaaacagacattcccagggcttccgctcaagacctcttttcttctctcccattcgttctgctctttccacctctattcatttccatgaaacaccatccatgtaactgtgacttctaaatgtctctctttaatccagcgctttcccctgggtgttagtctggtaaattgtct

SEQ ID NO: 912111 - DNA, 630 bp, Homo sapiens
aagcatgtttgtaggcatgaacataggttaatattattccatttactggctgagtgatgtcaggctaagctgttawttgatgtgaacatcagtttctaataactaaaaaatggtttgttgtgatatttaaatgaactatccataattttgtttcttttttcttcttttgaagaattttgattttcagttttaacatcaaggaaccaagggcaaaacttaacagcataatgttgggttttacagtgtgcaaagaaatcccttgaagctctgtttataaacttagttgcatttttttctaagtatgtttaggaagcagatttggaaggagctagagatctatgcactacaaagcactagcttctagatcaatgttttcagcagggaaggattaggcagtagaagaatatcacatgaagataagctagagagttttttgttttgttctatttatgttttaaattcatatacattgaactttaatatatgttaaatacttatttttaagtcctctcaatatcaagtggaggtgccattaatattcccatttagtagataaggaaacaggcttgggatgtcagatatcttgcctcatgtctcatggctaataaatggagaagctgctatgtgaac

SEQ ID NO: 912112 - DNA, 679 bp, Homo sapiens
gtcctgctgaactgtggatccatcgtgaatatgctctgttttgaaataaatttgtccataaatgatggaggaagatttcagaccaaaaaacacttttttccttggctacatctgagacttggatacccactcttgatttttgctgtttggtttagaagggactgacaagttacacgttgttgatttatcttccttggctgacattttttaacaaatgtctcagtgttagagttggtgttgtgcttgatgttttctcttcttactctttaatatcacttgttaatttaccttatatcagaaaaagcatgcaacatatgtgttagtaatgatgtctactgagggaagattggcagactatcctatgaatggtatgtagactgcaagtagatcattttgtgttttatattttcacaaatgggtgaaggatattgctgtttcaggtttactctctaacattgagggaaactacaataggaattcattatgaatattaacaaatattttctgaataagatatcacaaaatggttcagaaagtttccataatttatctaagtggctttatatctttcaagaacagaaagtcgaatagtgggatcagcatcaagttgtggatatactgatttttaaaaattatyatcttatttcatatggagtaaatttagttcattgaagcatac

SEQ ID NO: 912113 - DNA, 580 bp, Homo sapiens
ctgtaagggtctatcagatccattttgtccatgtcgagtttaggttctgaatatctttgttaattttctaccttgttgatctgtctaatactgtcatgggagtgttgaagtctcttcctattatcatgtgggagtctatgtctctttgtaagtctctaagaacttcctttatgaatctgggtgctcctgtgttgggtgcatatatgtttaggatagtcttcttgttgaattgaatccttcaccattatgtaatgcccttcttgtcttttttgatatttgttggtttgacatctgttttgtctgaaattaggattgctatccctgcttttgcctgttttccatttgtttggtagattttcctctatccctttattttgagcctatgattgtcattacatgtgagatagcatgtaatgacaagacagcatactattagttcttgcttttttatccactttgccactctgtgccttgttgagtgggrcatttggtccatttacattccaggttagtattgatatgtgtggatttgatcctattattgtgctgttagctggttattacataggcttgtttgtgt

SEQ ID NO: 912114 - DNA, 642 bp, Homo sapiens
tgtaggaaggctttccagggtatgtggctcttgagctttcctctgaaagattaatgggggttaacaaaaagtgaaagagcaggaaagtcattccaggaagaggaaatgttctgcaccaggataatcatatggaagaagccttacatgttcaagacattagaagaagttttattatagaaatgtcagaagagaaggaacacagtattccattagagttatcttttagtttggtgtgggagattttatgtatgtattgaacaaatcaaagctttacctaaatagtttttctagataaacttttctaagatataaaggaaatatgggtaccctcaaggctaatattagtggggtaaaatgaatattggttttcctctatttagtgaaatgagatagattatagtattcataaggaattctaagtaaatttctttagagagggtcgggcaggtctcctgacagttttctttctttacaggatggggaacagggaatgaattaatggtgaggttttagtgtgaaatgaaattgtggtatttactaatgtcttaataatattttcttagtcttttgacattcaggctaaccatatacaggatatgaacggagtattcaaggcrtaggtaacccctatttatccttcag

SEQ ID NO: 912115 - DNA, 632 bp, Homo sapiens
attaaacattactttaaaactagcatctttytaatagaaacaaaaggtattcaccacatagtttccaaaatggaaaaacatgaatgctgtgttttcaactttttcatatttaaattgctgtgcaatacagtatttagattttacgggaaaacacaccctacactgaacaggagatatatcttattttcttttgaatattgctcatgattattctactacaacgcaggtcaatgtctgtttccttgggatctgcgggctgatgagaaacaagcaaagcacctgaagacaagaggctggaagagaatgatgcctgtacctatggtactgtaggaaagcagaggaattgagaaatagaaattagttcaaagtaaaggggaaaaaaatcactatccaagttggagttcagcaaaagaatcacaaagcagaggaagaaaaatactaatttgctatgaaaagtaattccattgggtaagtgaaaagatgcttgtgtacgtatgaatgatgaatgagaaacaagaagaaattgacatagaaagttacttatgacaattaactaaaaatccatattttgccaataaccaacaggcaaagaaatgagcctctctaagcctcagcttctttctcctaaatac

SEQ ID NO: 912116 - DNA, 666 bp, Homo sapiens
aagggattagcaactctgttagaaactggsgccacagaccaaatattagaacaaaagatgcacctagcatccctcttgctcaggaaattacaagagttttgagaactctctgcgaggaaccagggtcagggatcaaatacacatttcttattgtatcacaatatcacatccaggtgcccatcagcaagagcctagacaagcaatctggtatatccatacagtagaacactgctcggcaataaaaaagaacaaattgctgatacatgtaatggcaaggataaatctcagaagcattaaaggacatgaaagaagccagacacaaaatactttatactgtatgattccattgatataaagttatagaatagttaaaattaatctgtggtaacaaaaatcggatcagtagttgcttctggttgtggagggaggggaatgttgactgagaagaagcaagagggaattctacaggttgatagaaatgttctatcttctggtaggggtgtgggttatataggtatagtcacttacccaaactgatcaaactatagacttaagatatctgcatttcactatatttaaattataacctcaaattaaaaaatctcacacaaaaaatagcaaggtattttcctatctcttattctgactctctttcttattctctta

SEQ ID NO: 912117 - DNA, 647 bp, Homo sapiens
ttttttaagcatgaatatttaaataaggtatttgtgcttaatcccttcccataaaatttgtctactttttcctatgtttctagttgtccaatactcaaatgagcaccattgctttaaaarcagtaaggagaaatttatttcactcaatcatgttgtcttcatgattgaccatcaaggtaaaggaatagaccacgaaatagaaagtaggtctttatgctcttcaatagtatatcaaatctggcaaagaaaaaatcaatttgcctcatttaatcttaggaaattagaagttgtgaaaaaccaaattaaaacaaggacttcatctcatttggtcaagcattgagattggatacttcaaaaatatacattgctaacatgaacaactaatcttagcccaatagtgggttgaatactttgagtactgctcttagaatacttttctattaaagtcaaaatgagagaaactttttaaagccttgactatattgtggtatatactgaattataagaaattttcttgtacattggtagactatcttattgtattcaattataaaaagacatgtttcctgtatgggagtattgacagactctaataactttataatgctcctattatttccacttcatgaagagaacatcaaccaatt

SEQ ID NO: 912118 - DNA, 445 bp, Homo sapiens
gcatttaatgtaagtcataattcaattaaaaaagaaaaaagtacatgataaggaattgaatgttacaaaatatttttaaaawcccttttataatcagtgttctataatgcaacagataaagtttcttcagagttaacctgtactgataattatataacaaaaatgtattgagtgcctcctgtatgtgagacatgttctaggaattaaacagggcaaaaaatagccttgctttcatgtgctttacattttaggagggtaaaggtggtagtggtgatgggtgggtggcgggagaagcaagggatacatgagcaaacaatgtaataaataggataatttcagatgtgcgtcatgaagaaaactgtgactaggagaaggggtaggagaaacattttcgaccagatggtgaggaaagacttctttgagaagatgacatttgagttgagtc

SEQ ID NO: 912119 - DNA, 685 bp, Homo sapiens
acttttctttctgtatgactcattaggcaatgactatatatgtactacaaygtaaacagcacctcctggattgaatagaacataactgacatgaccagcagagacaggctaaagacactgagctgaaaaccctggactctattgctaaattgaggctcctgaatccgttcgctctgagcaactgttgctgtggtgctgccttcacaagcactctgctgagcactcagatagaggggctgtgctatccgtcaacagacaagctgcagccagaactgctcagctgacaaactggtagaggtccagaaacacagttctgctgcatagtgaaaaaaggccaatttagattctttttcatagagagaaaaacataaacatgtgattgaacgagtctcctgtattagactaattgggttggctttgatatttaattgctaaaaatacacttagaatataaaccttactgtgtcaaggtctcaaagaataaataattggtatggtataaagaagtattgaattctatgctacaaacttctaagctaaaatattttcaatgtatgcaaggataggtgacatacatattagatactattcccccattaagcaaatttataatgagagaaaattatcttccataaaaaaataaaagccatgtaaaattaaggactaagtttttctgcacagacta

SEQ ID NO: 912120 - DNA, 685 bp, Homo sapiens
acttttctttctgtatgactcattaggcaatgactatatatgtactacaacgtaaacagcacctcctggattgaatagaacataactgacatgaccagcagagacaggctaaagacactgagctgaaaaccctggactctattgctaaattgaggctcctgaatccgttcgctctgagcaactgttgctgtggtgctgccttcacaagcactctgctgagcactcagatagaggggctgtgctatccgtcaacagacaagctgcagccagaactgctcagctgacaaactggtagaggtccagaaacacagttctgctgcatagtgaaaaaaggccaatttagattctttttcatagagagaaaaacataaacatgtgattgaacgagtctcctgtattagactaattgggttggctttgatatttaattgctaaaaatacacttagaatataaaccttactgtgtcaaggtctcaaagaataaataattggtatggtataaagaagtattgaattctatgctacaaacttctaagctaaaatattttcaatgtatgcaaggataggtgacatacatattakatactattcccccattaagcaaatttataatgagagaaaattatcttccataaaaaaataaaagccatgtaaaattaaggactaagtttttctgcacagacta

SEQ ID NO: 912121 - DNA, 571 bp, Homo sapiens
atatatcttctgtcattgccacctggattttacatgaaatagccagattaagaggatgtgaccttgtagggcttcaggaacagtaaagaagttttcccttttctacactgagctattcttttccccattgccttttatctctttttttttttaattctgggatatcaaaaaagtgaaagttctccctgaactatgggaaccaaagtttgccacaacacaagaagcagagtgaaactgctgagtttccagtgcagaattctggaaaacgacatgcttcccagatttcacattcaattatcagaaaagttataggtggaaaacatacggtacagttatctactttagccccattatctactgaaaatgggagtcaaactaacaaagacatatgaaatgtttcatcgagagctcttgaggtggcattctctagcatttcatkgcaccaaataacatgatacaattccatattgctgaattacataaattaccaaataaatttatcaaattagtcagatatattaaaagtctaagttgagcaaagcaatttaacgcctcagagggtggaaaaagg

SEQ ID NO: 912122 - DNA, 550 bp, Homo sapiens
ttcaattctgactgatattttatgatatttagctaaagattctatcctatttggtacaaaacctattgaaaatagagttkaaaatatcagaacattttataaaatagagaaaatagtcttgaaaaactaaaagaaaagaaaaaaatgaagcaaaatattggcaaacaacatccaggcttaatttactcccccatgttactgggaatttttaaaaattaaaacttaaggccaggcacagtggctcatgcctataattccagcactttgggaggctgaggagggtggatcacaagatcaggagatcgagaccatcctggctaacatggtgaaaccccgtctctgcaaaaaaaatacaaaaaattagccgggcgtggtggtggatgcctgtagtcccagctactcgggaggttgaggcaggagaatcgcttgaacctgggaggcggaggttgcaatgagccaagatcgcgccactgctgcactccagcctgggtgacagagtgagacgctgtttcaaacaccaacaaacaaacaaacaaacaaaaaacactta

SEQ ID NO: 912123 - DNA, 551 bp, Homo sapiens
aggttaacacaagtcaaatgttccttaagaaagaaaattcatctttgagaaagaactaaatcccaatatttttttcagatgttctagatatcctagtttgaagaggaaaatgtatactatttattttggacaagaatatttaaaagtttatctgatctgcttaaagttaagaattgctggttttgtaaagtgacaaagggattagaaacattattgaaaaataacttctataatgcttgccaaattgccctagaaacagaagtaggcagaaaagtatctcttatgttgcaatctgacatgagttgtttcaaatttgcagagctgaatttaagaataatataggctgggcccagtggctcatgcctgtcatctcagcactttgggaggccgaggtgggaggatcaccaggtcaggagatcaagaccatcctggctaacacagggaaactccatctctactaaaaacaaawaacaaaacaaaaaaacccaaaaccagccaggtgtggttggtggtgggcacctgtagtctcagcaactcaggaggctgaggct

SEQ ID NO: 912124 - DNA, 679 bp, Homo sapiens
caggacacagggatggaaggtacaagggggaggtaygcaaggctatttcaggagggttgggagcaacagtctaaggaggtaaaatttcaatggcaattcagtgaagggaatgagagagccctattaacatctaggagaagaacttcccatgcagaggtatcagcaggtgcaatgtcctgggagaagtatgtgcctgagatggtttgacaaacagcaagagggttattgagctgtggagctatggtgagagaggagggaggagagtgaactaggtcagctcatggagggccaagtattccacagacagggccttcagactcatcatcagtggagagttgcgagcaggagagtgaggggacacatttggttttaaaagaataactaaggtaactgtaaattaggaaacagacttgtgcgtggggtcaggaatagaagcaggaagccacagggggaagctattgctcctggagtttagacgtggaagaccctgaaagctttcaacaggatagctccaaatgactacagtgcatagtttaccaagactcagggtctggggtaataactcataataaaacacagtcatatttctgaagaatgtatgactattcttattcagtgggataaagaaggaaaataaatggtcttatttcagatgaggtcaagttttcccatcaaatga

SEQ ID NO: 912125 - DNA, 679 bp, Homo sapiens
caggacacagggatggaaggtacaagggggaggtacgcaaggctatttcaggagggttgggagcaacagtctaaggaggtaaaatttcwatggcaattcagtgaagggaatgagagagccctattaacatctaggagaagaacttcccatgcagaggtatcagcaggtgcaatgtcctgggagaagtatgtgcctgagatggtttgacaaacagcaagagggttattgagctgtggagctatggtgagagaggagggaggagagtgaactaggtcagctcatggagggccaagtattccacagacagggccttcagactcatcatcagtggagagttgcgagcaggagagtgaggggacacatttggttttaaaagaataactaaggtaactgtaaattaggaaacagacttgtgcgtggggtcaggaatagaagcaggaagccacagggggaagctattgctcctggagtttagacgtggaagaccctgaaagctttcaacaggatagctccaaatgactacagtgcatagtttaccaagactcagggtctggggtaataactcataataaaacacagtcatatttctgaagaatgtatgactattcttattcagtgggataaagaaggaaaataaatggtcttatttcagatgaggtcaagttttcccatcaaatga

SEQ ID NO: 912126 - DNA, 647 bp, Homo sapiens
taacaaagacagaggcatttgaatcttggcttctaatggcagaagccctatagttagggtgtaggaaggagtagcctgtttatataaaaataaacctacacatcattgaatctggttatcaaaattcaactaaaccaaaccaaagctctgcttagaaaataaaatacagtttatattttaaacagtatataaatacagtttatacccaatggtcatgtcagaatcctgtaatcagaagcagcttgaaactctattttcacatcctctgggatttcaattcactgacttgccagttcaaaatcacggaagtcctctacataattaatgctcatttttagtgtattgcctcagtgtatatcttattttatacacgattcatagtttcttgatgaagatgcacttatataagcataattttgtagtttttaaaaattgttttcagaaatctactctttcaaagtaactccataagcactttggtccagaatgaatcatgagtgagttagtgaactgtttctgtgtctatatatgtgtatgcgtrtttagtgctgctaatctattccacaatttttttctgacttgctacaacttggaacttctccaaacatgtttttaaaaaatgctgttaattacaggaactttaataa

SEQ ID NO: 912127 - DNA, 654 bp, Homo sapiens
aagcacatatacgaaggtggttccataaggttgtaatactgtatttttactgtaccgtttctatgtttagatgcacaaatatatamcattgtattacaactgcctacagtattcagtacaggagcacgctgtgcaggtttgtagcctaggagtaatagactataccatatcgcctaggtgtgttgaaagctatgccatctagttttgtgtaagtacacaatgattttcacacaatgatgaaactgcctaacaacacatttctgaaaacatatccctgtcattaagcttgactgtgtttgtgtgtatatacactttgcacttctttagagaatgtagattacatgattatctcagttctgaacacaactggtgtctacataggttagacgcttccccaagcaaaattacctcatgtaaggtgacagacagtaacagagtttgacatacaagaaatgtctatagatatcaccagcattcataggaggtaagaaagattactgaaatatctatctatttatttttgagcattaagaaaaaagttttcattttccccttgactgatatcccatatgttttgtgggaagttactcaaaaaagaaaatcatccaaggtcagatgaaaaaaattttaagaaaataaagaacgcccagcatg

SEQ ID NO: 912128 - DNA, 588 bp, Homo sapiens
tcctgttttaaaggcctaagaggacccatgtcctgtttttcaatattaacaccaaatactgtttcaagctgagcagaactgcctaagaattaaaaatagagacttgtttgatctgagaaaaagacagaaaaatgactcctatagagtttgaaatggagaaagtctccagagacagttaattgctcctcccttctaaatactgctcaaaaacagatagaaacaaatctctgtctggtgatattgcaatatgcaaattgatagaccaagaataaacatattagctaatagcttcaaaaaccagccaagagctcgagttgcataagaaaactagtgcttttcttgggaaagcaaaaatagaggttgttttgaactctgcaatagaatcattgcacttacagggtctctcatgaataattgatacaatatttgtcaggaaacaacaagttctgaaaacaaaggagttaggtttctagtcaagaagttagaaaaacaggaaaagagcaaacccktaaatgcaggaaaaaggaaataataaagacaaagatagaaatcagtggaacagatgaacaacaatacaatagaaattag

SEQ ID NO: 912129 - DNA, 597 bp, Homo sapiens
aacaaaacctagtaaaatttcgattttatcttatatcacaaatattaagcacccgaaccaccatactgtctcatttaggattttctgccaggtttggacatgaccgcttttaaaactggcgccaagtctacactagcgcccggaatgaatttccagtttaggtcagcgtttgttgtgaactgaactttgtgatagagcgagttaggggtggactttcggtaaaagggtccgcaaaccaattagagaaaaggtgctcctctgcaagagtttcataggataaactcatagaagagtataaaaagcataaaaacgttaaagtgtactatataaatagcagttaatcgtgtgaatatgttgacaattgttaagtgaatgatgacagtgagtttttgcatttaggaaatgcatgggaatggaaattgttaaggagaaaagagccatactccagttccttgtttaagtgccgtggctttgcaattcaggatcctgttagcatatctgtatatttkccttactcataaagtttaagatgtttgtggaggttacttcctcctttcatccattttcggacactattaacttgttttgtccatttct

SEQ ID NO: 912130 - DNA, 593 bp, Homo sapiens
ttctgtgccagttcagtgtaggaagaaaaagaagtgatgaggcatatttttaaagacaaaaaacttaaaaaaaatggacaaaattatgactgcagacatgtggagagtcctatctacaccctgtcagatggtccaaacactccactcccaaccatttagccacactttgcatctgtttatggctacatctaggaaatcaaaagcagatgacaacatcatcactgcagccaatgtttgtagcaaatattccttctctccaaaggcttagaaatttgtgaacgtggagccaggaagacggaatcataattaaatgcagatgtgctatcatgttatgctattatgcacctaaaagaaacaatgacctggagtgcaaaaccagtgtctccctgagagagccccagatggcacagtcgggctaaggacagatttcactgtggggacctggctgtgaaggaaggcctagaaggaaactaaagagataaacattgagattagagagtctrccttcgtcaatttaaaaaaagaagaaacaaagatattagagaaaactcatattgatcaagactagatctcagttctgaaattcggaggaa

SEQ ID NO: 912131 - DNA, 596 bp, Homo sapiens
ctaatttgttctaggcagaggcgaggcagaggcaggagagkctttcagagggagtaacaattgatctgagattcaaagaataaaaaaaaaaaaaggcaaaaaaagacacaagaaccagatgaccattccagcatataaagtagtgcacttccattgttgaattatgcgagattcagttatctgttccttcttaacaaacatttccaaaattaatggtttaaaacaatgattactactgtcatggttcctgaggtgacaggtgagctgggaagtttttcctgctccaggtgttttcaacttggtggtattcagcaggtagacaggctggtccagtagatataaaccatgtctggcatctttacagggatgcccacaaatgctggactcagcttagaatgctgagccaggaacctataccttgatggtcttggtccaaggtgggcacttgtgaacttcttacatggcagtgcaagaaacactggggcaagaattccaaaagaccggaggggaacctgccagccttcttacagcctaaacctggaatgtccgaccattacttccttcacatcctattagtggaacaagtcacctaggcc

SEQ ID NO: 912132 - DNA, 592 bp, Homo sapiens
aagggaactagagccccggcgccttcgcagccggagcggaagccggagttgtgggaggcccgcgtgccctccccgcccgtggggcccagacgcgcggggacamcccctcccctccacgcatcccgagtctctctctccctcccttgtcctagccatggaagggctggaggaggcagaggccaactgctccgtggcgttcgctgaggctcagagatgggtggaggtgagtgcctttcactgctttcccttccgcaggtgttgactgcctcggggcggtcgtcgcgaggtgactgcagccccagtcactctgcactttagcctccttcggcgacccagccgacgtgaacaagctggtttgcttgtgcacttttggggactctgcgggttctgccgctcctgcatcttatgtcccgcttagattggcgctgccctaacccccgccccccgacggtgtcactggcttcctagggcagaggtgggcgttcgcctgccggcatcgcgcgtcccggaggagcagcgcagtccgccctggctcgcccggggcgtctctgcggggcacagcccagagcgcgcggtgcagagctgggccagg

SEQ ID NO: 912133 - DNA, 692 bp, Homo sapiens
caagctgaggaaagaatctcagaactcaaagatcagttctttgaatcaactcagtcagaccaaaataaagaaaaaaatttaaaaagaattaagaaaaccttcaagaaatatgagattatgtaaagaaacaaaacctacaactcagtggcatccctgaaagaggggagagagcaagcaacttggaaaaaatatttgaggatattgttcaagaaaatttccccaaactcactagagaggtcaacattcaaattcaagaaattcagcaaagctctgggagacactatacaaaatgaccattcccaaggcaaatagtcatcagattcttaaaggtcagtgagtaagaaaaaaatatttaaggtagctagagagaaggggaaaggttctcttcaaagggaaccccatcaggctaacagtggacctttcagtggacagcctacaagccagaagagaatgattgcctatgttcagcatcctgaaagaaaataaatttcaaccaagaatttcatatccagccaaaataagcttcataaaatagttttcagagaagcaaatactaacagaatttgttaccaccagacctgctttagaagatgtccttaagagaatggtagacacggaaacaagggacrgtagccagccatgacaaaaatacaatttagtacatagaccattgacattatgaagcaaccata

SEQ ID NO: 912134 - DNA, 647 bp, Homo sapiens
cactttagagaagatctgcaagttgtgaattcccttagcatatgattgtctctattatatgctaaaagaatatgatagaataaataaaagaatatgtttttcattttgaaggatattttcacagagtatagattttgaggggtttatatttacttttaatattttaaagatatcattcacttatcttccagcttccatcgtttttgacaaaaatttaaacatcagtcttgattttcctttgaagatactatgattttctaactgctttaaaatgtttccctttgtctttgatattcagcaatttgactaggacatatctagatgtggtcatctttatatgtgtccaaatgagtttcgctgcgctttataaacatgaattgataattttatctgatttgaaaaattctagacaaatactttatcaaatattgttcctattccatgctcgtctctctttctgagcaataactataattcaaactattttatcatgttccaaatatctcttactttatgttactgttttcttccctgcttcrgtatgtaaaatttttattgacttatctttggggtcactaattctttattctgttgtacctaatttttaatattaaaaatttttaattttaattttaatattaaattag

SEQ ID NO: 912135 - DNA, 626 bp, Homo sapiens
tactgtattttttatttttattatttttttggtgtgctattctttattcaagtctttttgatctatagtcagttgaatttgcagatacagaacccgcaaatacaaagagctgagtgtacataatttacagttaaacatatagtccacatatgcttcctttataaaagttttattattttttgctgtttctaattgccccattttttattgctggattttctgtatttataataaaaactattcctgtgcaaaattgtaaaatattcctaagatctccatatgtcaggtaatctacaaaatccattttcattttctttgagatatccctcctgcagccttttatcatcttgtgctaacctttgcaaatttctaagtgcctcctatacagctgatttcctggaaccatttgtccctcaccagttttcaaggaatttactcttgtgttggattttgtgttttctaaatatgtctcttcatgtatatttttctcctttttcactcatttttttttgtggtgaatgtcatacagaagctgctggagaaagagagcatggagggcatatttttaaggacatgcatcygaaaatactttactacaagtctcatagcgtggctggatatagaat

SEQ ID NO: 912136 - DNA, 598 bp, Homo sapiens
agggcagtgtagaagggaaatgtggggtgggagcccccacagagagtccatactggggccaccgagtggagctgtgagaagaagtccaccatcctacagaccccagaatggtagatccactgacagtttgcactgtgcacctggaaaagctgcagacactcaatgccagcccatgaaagcagccaggagggagactgtaccctgcaaaaccacagggtggggagctgcccaagaccatgggaacccacctcttgcatcagcatgatctggatgtgagacatggagtcgaaggatatcattttggagctttaagatttgactgccttgctcgattttggacttgcatggggcctctagccactttgttttggccaatttctcccatttgaaaaggctgcatttacccaatgcaagtacctccattgtctctagaaagtaactaatttgctttttattgtacaggctcataggaagaagggtcttgccttgtctcagatgagactcaggamtggggactttttagttaatgctgaaaggagttaagaatttgggggactgttgggaaggcatgattggttttgaaatgtgaggacatgag

SEQ ID NO: 912137 - DNA, 590 bp, Homo sapiens
accaggaacttagaaacacaaatctttgggccgcattccaaatcactgaatcagaaactctggagttggggttcagcaacctgtgttttgacaaaacctccaggtgattcagatgcaccctcaggtttgagaaccactagattacaagaaatggaaatctgacaagtccgatcagacatttcctcttaggctgtaagaagcaaaacctctcttcccaccccagtgtcctctctgcttgctccctgtcttcattcccttacactggcatcctcttccctctcctccctcgtcaccccttccgcctcaccacacaccaacgaacacctgtacggcgttcaaagaactagaaaccagcccccatttctcctctacttggagaatgtattttataacgtgtgcatagtgcgcaggcaaggggcggaatttaaacaatgtctaattaaagaagacaacaccacacgtttatcacattacattgttgtgtatttacccyttgccgcttttgatgcatttgcatatcatcttttataattcaattcacttgcttaaatcatttcttttattttcacttatttatccagaaggaaaag

SEQ ID NO: 912138 - DNA, 590 bp, Homo sapiens
accaggaacttagaaacacaaatctttgggccgcattccaaatcactgaatcagaaactctggagttggggttcagcaacctgtgttttgacaaaacctccaggtgattcagatgcaccctcaggtttgagaaccactagattacaagaaatggaaatctgacaagtccgatcagacatttcctcttaggctgtaagaagcaaaacctctcttcccaccccagtgtcctctctgcttgctccctgtcttcattcccttacactggcatcctcttccctctcctccctcgtcaccccttccgcctcaccacacaccaacgaacacctgtacggcgttcaaagaactagaaaccagcccccatttctcctctacttggagaatgtattttataacgtgtgcatagtgcgcaggcaaggggcggaatttaaacaatgtctaattaaagaagacaacaccacacgtttatcacattacattgttgtgtatttaccccttgccgcttttgatgcatttgcatatcatcttttataattcaattcacttgcttaaatcatktcttttattttcacttatttatccagaaggaaaag

SEQ ID NO: 912139 - DNA, 577 bp, Homo sapiens
tctttggacaaagtgaaaaacctttttgatgaaaaagagcaaggtactagtgaaatcaccagttttagcmatcaatgggcaaagaccctaaagtacagagaggcctgtaaagaccttgaattagcatgtgagaccattgagatcacagctgccccaaagtgtaaagaaatgcagaattctctcaataatgataaaaaccttgtttctattgagactgtggtgccacctaagctcttaagtgataatttatgtagacaaactgaaaatctcaaaacatcaaaaagtatctttttgaaagttaaagtacatgaaaatgtagaaaaagaaacagcaaaaagtcctgcaacttgttacacaaatcagtccccttattcagtcattgaaaattcagccttagctttttacacaagttgtagtagaaaaacttctgtgagtcagacttcattacttgaagcaaaaaaatggcttagagaaggaatatttgatggtcaaccagaaagaataaatactgcagattatgtaggaaattatttgtatgaaaataattcaaacagtactatagctgaaaatgacaaaa

SEQ ID NO: 912140 - DNA, 656 bp, Homo sapiens
caaaaaatatatatataatatacatatatatatgccmcttataaaataaatagaaaataattgggaataaatccaatgaataatataccaggtttctacatagaaaactataaaacatcaaaaaattttaataagacttcaactagtgaagggatataccatattcatggataaaaaaatttaatattgtaaagactttcatattaattgatggacagatttaatgtaatcccaataaaaattccagcagggttttttttggtagaatttataaagttatcctaaagtttatgtggaaatatagaagttcaagaatagccaaggctcacgcctgtaatcccagcactttgggaggccgaggcaggcagatcatgaggtcaggagattgacaccatcctggctaacgcggtgaaaccccgtcgctactaaaaatacaaaaaattagccgggcgtagtggcgggcgcctgtggtcccagctactcgggaggctgaggcaggagaatggcgtgaacctgggaggcggagcttgcagtgagccgagatcatgccgctgcactccagcctgggcaacagagcaagactccatctcgaaaaaaaaaaaaaaaaaaaaaaaagaatagccaaggcaatcttggggaagatgagaggcatgaag

SEQ ID NO: 912141 - DNA, 519 bp, Homo sapiens
atattatgaatacatttgaaatccaaattattgttcagccatgttgaatatatttgctactctgaccagtttttagaatgctctgatgaaacttgtgtgatctccaaatttgtatagtgaagagaaamccctgaaaatctttcactttgtcatgcctgcgctgagggcagatgactcactgtatgaattcaagttaaatcacttaacctttttctcttattcaacccatctgggaagctgaatacaagcacttcactatgaaacagatggtgagcctaagctacattttcccagattaaaaaaagaagaatgtgttataaggactaaaagaaccaaatgtggaaaaaacgcagggattacacggaaaagagctataagctggatcagacattttcacctgtaaaaaataatgtaatgcttaaaaaataagtcctaggagatgatatggggacaaagtcagtaaaaccttttcataaagcaccatatgtgtaatgtggtcatgaatgttggtatgtacag

SEQ ID NO: 912142 - DNA, 625 bp, Homo sapiens
tcttagaagctctttgtagatgcagaacagaaatcagaaagctggggcaaagtcctggctccactgggccttggtgcaatggggcacttgckctctacaatttttgagtcctatcctgcactgacacaccatggtgggagaggaaacctccagaacacgcacagcatcctcaggcatgacacgcagtctctttagtcagactggagtttcagtcctcctgcctctgctacccactgtgttcttggagacttacatcagaaagcctcagtttcctcctctaagagtagaacctaagaatagtacccatcacatagagtgaggtaagggctaaatgcaataatccatgtaagagactcaataaattctaaatctaagtcagcacaggaattgattgacacaaagatgtcctgagcactcctcctaaaatgaattcctgcaaaacagtttaagctttcatgcttacttaaaacaataataatacgcatgccacttactttgctttaaaattacattttaaggctgttaataatttttcacattttaactcttttgagctttactttacagctaccctgtcttagtccattctagctgctataacaaaataccatagactggatagctt

SEQ ID NO: 912143 - DNA, 463 bp, Homo sapiens
ctagattcaagtgattctcctgcctcagcctcccaaacagctgggactataggtccacaccaccacgtccagctaatttttgtatttttggtagagatggggtttcaccatgttggccagactggtctcaaactcctgacctcaggtgatctgcccacctcagcctcccaaagtgctggaattactggtgtgagccaccatgcctggcctattttttggattttttttttttttttttttttttttttagtagagacagggtttcaccttgttagccaggctggtttcagactcctgacctcaagtgatccgcctgcctcagcctcccaaagkgtgatatgactactcagaaaaccacagccttgaagaaagaaatagtcaagcagcaagggcaagtgggttgagagtattcagcatgtgaggagagcaaactactggatgtcagtctcagcttcactcatta

SEQ ID NO: 912144 - DNA, 363 bp, Homo sapiens
aagactagaatctaagtttctagaattcaaattattgagacatggcatttcccgtttgatcttaccatattgagctggttgttagggttgctgtaaatataacaggaagcttgaagttatcttagacaataggagacttttttacatacattcctaaaataaaaccataaagagaacatataacaacttatgtttcagaaagtcagttttatcacactttatcgtactcctgtaacttctaccccttattctgcatcctactcagtgggagtccacagaataagtccarttgctttttcatatgacagaacttcagaaatgtgaagatattggctatgaagttctggagtcttgtcttctcta

SEQ ID NO: 912145 - DNA, 594 bp, Homo sapiens
aggcctgcacagcccaccaatctctcacctccactcctaatcaaggtgcccagaacccagtaagcctggagcttgagttcatttatcttatcaggcattggcacgggcagcttggggagctcagaggcctcctrgctagggaaggatgtccaggttctgtgactgtcagtgtgcccctaagaaaataaatccgttaaaatgatttctttttctttccaaccaagaaatgaggttcataacccatccttggctaccagagaacagtcctctctgaattccttccctaccttggttacagctgttaaattggtcatttgggtttcaaaggatgaaagtctgccctgcaaaacctgtggttgggcctggttaactcactggctcaggcctgagagaagggtggagagaggcttagcttcccactggctgtcttgagcacagatggaacttgcctggatagagcactcagaaatgctctcccttgatcaccggagagaggttggatggctcagctgaaaccctgcccctctgctccagaaacttcctgatgccctgcctcccgagaatggctctggtacaatatcacattcattgagc

SEQ ID NO: 912146 - DNA, 598 bp, Homo sapiens; identical to SEQ ID NO: 905175

SEQ ID NO: 912147 - DNA, 585 bp, Homo sapiens
acagctacccctagaactatgacagcgatattactcttctgaattagacaatgtctgctggttgaatttttaatgctcatgaygtgaccacaaaatccagcatctgtgacaatcaaacgtaacaattagtagggtttaatttttaaaaagagaaaagtaggaaatacacacacacacttacaacataactttcaaggacaaaatctgtcatagtgagacagatggcagattattttctaggatttgtgtctttatcctaagtgatgtacctttactgatgtcaaaaaagaaagacaagtaaagaaaaaaagatcctaacagtttatggggttgataacctgacttatgttccttctgaattgcctggcttagtgcattacgcatagtagatgcccaataaatatttgtgaatgatacttgaacccactggagataacagaagtgcttcccactcagaaggatgcactacttctaagtatgccataataggaagctattctagagtgaccaatagtttttgtttgccttggtctttaccagtcatcacaatggaagtcccacatcctaggaaaccccttagcccta

SEQ ID NO: 912148 - DNA, 630 bp, Homo sapiens
tgtgcattgattttttttctttmtttctttttttacccactataatcatactttggattcataggacaacatttgcattctgagatgaaacctctacaaagcatcaatctttattatgccttgttgacagatccacccaagactcatttaccacatttttgatttttaagccaggtaatggggtgcgaagatggataacttgtgatctgtggcttcccttcaggcacactcgaaaaattgtaaaatattacaatgcttaaacacattctctagacattttaaagtatgctgtggaatgtctgcacagtcttgccattcaattcgactatgactgggaactcacactcctgcctaccctcaccctgattatgagatccctgaaagccttggagatgagcaccagaattgtcagggaaggtaaagagccccagctttcacatcttctcacctataaacactctccagttggaaaagtccttgtagatacctaagtccaatctctgccatgcacttcaagttagcagtggccttttccagcatcagtgtactattggttgcttccaaggaaaagcactcagggataacaaggaagtggagacaagtctacagcagtgtggtaataagtgtttt

SEQ ID NO: 912149 - DNA, 575 bp, Homo sapiens
accaaaactaccgtaagataccatctcacaccagtcagaatggctattactaaaaagtcaaaaaataacagatgctggaaaggttgcagagaaaacagaacacttatacactgttggtgggagtggaattagttcaatcattgtggaaaactgtgtaacaattcctcaaagacctaaaaacagaactaccattcaacccagcaaccccattactgggtatacatctaaaggaatataaatcattctatcataaagacccatgcatgccaatgttcatgacagccctattcacaatagcaaagacatggaatcaacctcaatgcccatcaatggtagatagggtaaagaaaatgtggcatatgtaccccatggaatactacgcagccgttaaaaaaattgagatcgtgttctttacaggaacacaaatagagctggaagccattatccttagcaaactaatgtagaaacaaaaaaaacraatactgtgtgttcttacttataagtgggagctaaatgatgagaacacatggacacatagaggggaacaacacactctggggtctatcggagggtgg

SEQ ID NO: 912150 - DNA, 606 bp, Homo sapiens
cacttgcctgtccatactttttcagtatgccaagaattctatgcctacttttgacacataacttgatgtcaagtttcacttgatgaaacctttttgataattgtcaactcaaaagttaacaygacatatacttcatgaaaatggagttaattggctattctgagccttttataaagagaattgcttcatccacataccaattaagtttctatatttataaaatatttttctaatcaaaaaattaattgaaactatgaaaaaatagacacctggctgtttctttctttttctgttgttgagacagagtctcactcagtcacccgggctggagtacagtggcaccatcttggctcactgcaacctccacctccacctccagggttcaagcgattcttgtgtctcagtctcccaagtagttggaattacaggtgcacactatcacgcctggctaatttttgtgtttttagtagagatggggtttcaccatgttggccaggctggtctcgaactcctggcctcaagtgatctacccacctctacctcccaaagtgctggaattacaggtgtgagccaccatgcccagccaacctggctgtttcttttcca

SEQ ID NO: 912151 - DNA, 552 bp, Homo sapiens
gctaatagaggcctaagtgggccatgtctatgtgttcctagggcttcccagctgtgctcaagaggccaaggtcactgccccatgcccactgagcctctggctccctgacttttttctcatcccagaataggagaatggggccaagcccctcctgaaggcagatggggatcaaggttgggggcactcaccagggacccctaagcattgagtcagaagcagcaggagtgggagccaccccatccttctggctggaggctgcactgtgacccaccacagccccatccgggaagttgtgaaacctgtccctacgggattgggtggctctggctccgcacgtcagctcagggcctgctggaccctgacctgagacctggtgacaggagccatgaggggccaggcctcaggtcccacaggtcagttgcaagggcctagcacagctagccccctgagaggcctccctacttagtggtcaggtgttaggaaggtttggtggggmcacttgaggtgccctggggttggggtgaaacccctctgcagcctagtcagcccaag

SEQ ID NO: 912152 - DNA, 638 bp, Homo sapiens
tcaggccccagctgtaggcaggtcagcccacgcccggcggcagagcccagagaggctcgctcatctcagccgccagaagtgtcatcccagggaaggtgagcgaagctgtccactaggactaaataggggtggaggtaacaggtagcagggactctggcaggaaccgcctttcagacgttttcaggaccgtctgagcggggcctccaagtatgggtaggagacaggcggcctagggattccggttagcacgtcgcgttctgccgcagcagggctgggagcatccccggggcaggcggaggtcggaggtggtgaggcctttcggcgaagctgaggcctggaacaacccggtgggaagccacggagggggtcccctagcggaggctgggcgcgggccggtgcgcgtgcgcggctggaggctcagcgcgcgagcgtgcgcgtgatttggccctgaacggacgccgtagccgagaggttgggcggatgttgtgaaccgggtcgcggcggccgaggctcggggtgagtgaggggcggcagggctctgagcctggcgggttccggctattcccttcgcggtccagtttagtccastgcgagggcacctgcagcgccgggatctgagtgcgaaactccgagcggaa

SEQ ID NO: 912153 - DNA, 614 bp, Homo sapiens
ggtctcacaatacatatggaatttactctctacttttcatcatcaacggtgacacttcaagaaagtgattgcttggccaggtgcggtggctcacacctgtaatcccagcactttgggaggctgaggctggcagatcacctgaggtcgggagttcaagaccagcctgacaaacatggagaaaccccgtctctattaaaaatacaaaatcagctagacgtggtggtgcatgcctgtaatcccagctactcgggaagctgaggcaggagaatcccttgaacctgggaggcggaggttgcagtaaaccgagatcgtgccattgcactccagcatgggcaacaagagcgaaactccgtctcaaaaaaaaaaaaagaaagaaagagattgctcttgccaactttcccctaagcaaaagtcacactaattcacatatatctcagcatttttaccttcagtatgaaagccccatactttacacaaaactacatctatattgctgaaattctaatatagcttcrtgctactttctagcattgcagaagactttaaatctttttcgctctgtctaccctagataaccatatgtaggaaatgacacaaatgaatggaagaattcc

SEQ ID NO: 912154 - DNA, 599 bp, Homo sapiens
ttttaaagtgaagactatcattgaaggatgcacactgtcctgttgtaagatttactataaaactatrgtaaccaaaacagtgtaatcttggttaagggaaagacacagtgatcaaaagagcagaattatgcgttcagaatagatccacagaaataggccaattgattttctacaaaggtacaaaaacgtttcagtggagaaaggatgctttcagataaatagtgttagggaaattagacatccctatgcaaataatgaacctcacattgtatctaaaaattaactgatagacctaaatatagaatgtaatactatgaaacctttatttagaagcagaaatgagaaaatcatgactgtggttaggcaaagatttcttacacatgacaacacaagcacaatccttaaaagaaaaaaaaatactaaattggactttatcaaaattagagacttttgctctgagaagaacactgttaagagaatgaaaaggcaagctacagaaaacgtatcacatacatgacaaagaacttgcatctagaatatataaagacactaaactcaggaataagaaacaaataaaaagtggacaaaattcttgaagc

SEQ ID NO: 912155 - DNA, 646 bp, Homo sapiens
tcagatatttttatcttaaaaacacagaaaccaaaaccagctgttctcaatagattggaagagcacagcagagccgtttaatttctaggcagccatcttaaaggcacatggctcttgaagtggtgtctgttgttctcatcgcatatttgataatgcttacaggaaccacaacaagttcaataagattaaagaaattaaattgtgtccaaaataggcactcctcatttacataatatgtagcacttctgacagaagttaccacctatgaaatctattaatttttcagcatatttttattattaaaagaaaattcaggatgtgtctttaaagaaatgccaaactaaaactctatctgacattctgtagtgttgtatgtccaaaaggattgatttttatatcaaaagtgaacacaaactaataaagtaaaatttctgtgtgatttttccactgaatccaatgatctgactctgacatcgtttcccatagaagagttctaaaggcattttgagcaaygacaccattataaggctatgtgtatattctaccagggggactgcttggaagaataacactcatttagatgtataaatcctgttttgttttcttttaaaatgtccaattatttctattgctgcctcatccatac

SEQ ID NO: 912156 - DNA, 680 bp, Homo sapiens
ttccaattaataaagttaagctagtattaaaagtccctacttgttagagttatgtaaataagattcatgytgagtgttggcaggcagctataatggaaaaaaaaaaaaaaggcctacactaggcctcagacaccttaattctagaattggttttactttgtattatcaagaaaatgtggataaatcacttaataattacattcactcattcttccgtcgctcatttgttcattcacttacctccactgcattttttaaaacatgaaatgctcactaaattgttgtcattctggtgattaaaaaaattggtaaaatatggtctcttctcaaaaattgtttgcaagtaagtgaataaaattacaaactttttcaacattaaaatgaaaaactcttacctgccgtacgtaccttattaatgcattgtatctaatgaaagggtgctatggcttaaatacaatttgtccccatccaaactcatgttgaagcttggtccccaatgtagcagtgttgggatctgatgcctttaagaggtgtttagcttgttaagatagataaatgtcctctcaaactggattagcgcttgtgggaattgactattcccaggagcgcaggttgttctaaagggaggttgtgtcgtctgttggcctctttgtgtgtgtgcactttcccttctcttctat

SEQ ID NO: 912157 - DNA, 627 bp, Homo sapiens
aatctagatagcattttaaaaagaaatccttctctgtgactttgcagtagataattcccttttattttctccataaacagtgtcagttcaagaaaaggccactcttcacttaggctttataatagtaatccaggttgaaatattagttaactgctcctctatcttttctaattctatatagttttcaatgtgtgtgtgaatgattaaaattctccattcagtatccactgtttatctttcttaaatcctattttgcgtaatcctttctataggcaaaactactttgttccttgggtaaagtttaccatttaaaattttcattgacatgacattttccccagtttagattttgctcatcagttacacagaggaaactctttctaatttcaaaataatctactcttgtgatgcttcttctttaatacaaagctttcataactgctagtacttttttgcattttcagactagtgaatctttcaaatcgtgtaaaaagtttgagctgcatttatatttaaactaactttggcggggggcatgggcaatcaagtatatgtcatagcggctttacaagtagactttgcatgtagaaaacaraaaaggaaaaagtccatatagttttcaaataa

SEQ ID NO: 912158 - DNA, 636 bp, Homo sapiens
caacaaagcaaggccttgtctctacaaawataaaaataaaataaattagccaggcatgacggcacatgactgtaagtcctaactacttgggaggctgaggtgggaggatcactcgagcccaggagtttgaggctgcagtgagccatgattacaccattgcacacagactgggtgatagagtgagaccttgtctcaaaaaaaaaaaaaaaaaaaaaacctgtggtagaaatttgagcatttaaatctttcactacattttgggttctggacccattttctcccatgtacatttgaagctgatagttgaataattacttgatacttaatgtgatgctgtacatttttagacatgctattttaaatgtcaaatcaatatgaatttatttgtcagtctttcatacaagcatggatcataataaactcatccgtgattcatgagaatgtaaaatatactctcatgggaactttatcttaattcaatattattggtcttttaaatgaaacattatgttttcccttttgaacagagttcattggtaattgttcatcagaggagaagcatattattttttcacatttttttaagcctttgacaaaatcagggatgaaatctggctatgtgtctgtgatgccaaa

SEQ ID NO: 912159 - DNA, 627 bp, Homo sapiens
gctagggcctggaacatgggttcactactctgactggtgccctatcctgctgtggctgagctggtatccaagatgcaagacaattcatccacactatttcctctcctctactcacrcagaaaaaaaagtgtcttttttggagctaagagctgtgcaatggggttaggggaatggtgatgccagtgctcctttgcccaaactgttgtctcagaatgctgcctgcatcccactccactgtctctgggtctagtatagtattaggactcacttaagagttggagtatttatggcctagactgtctttcaagtttacttggaaacagagatcgctgtagccctcagtggtaaggtttgtgggaactcaagtttggactgctgggattggtgatccccctctggctagagctggtttaaatgttccctctgttgtggcgcatcagctgagtttggacaggttttcctttctgctctaacaagacagcactgagttcactgcctcacaattgatgtgtactccctcactcagtgtccagagaggctctctgcaccatgaggctgctgccaggggtgtgggaggggtgttgtcagtgattcaggactgtttttctaactattcaatgcttctct

SEQ ID NO: 912160 - DNA, 637 bp, Homo sapiens
attcagaactgaaactgaattctaccagaggtacaaagaaaagctggtaccatttatactgaaagtattcctaaaagatgaaaaggaaggacttttacctaactcattttatgaggscagcatcatcctataccgaaacctggcagagatacaacgaaaaaaagtaaacttcgggccaatatccttgatgaacattgatgcaaaactcctcaataaaatactggcaaactgaatccagcagcatatcgaaaggcttatccaccacagtcaagttggtttcattcccaggatgcaaggttggttcaacatacacaaatcaataactgtaattcatcacataaacagagctacagacaaaagacacatgattatctcaatatatgcagtaaaggcctccaataaaattcaacttcccttcatgttaaaaactctcaataaactaagtaatgaaggaacatacctcaaaatgataagagccatatgtgataaacccacagccactatcatactaaataggcaaaagctggaagcattccccctgaaaaccagcacaagacaaggatgccctctttcaccactcccatttgacagagtattggaagttctggccagcgcaatcaggcaagagaaagaaata

SEQ ID NO: 912161 - DNA, 648 bp, Homo sapiens
cagagcactcatatcccattaaaggatataagaagagtgacactggtattggtgccyatcctggcaaccttcctgtggatccagcccagtcccgggcactgggaggcaggaatcagcagcccgaccctagaggtgctcaccacccagtgggagagaagagagtcacccagtgggcagaggatccacccctcaatgagctccttctgcaggtcaggctctggggagtgcgcacaagtgcaggctcaggcactgcactgcctgggtttgaatcacggtacgtggcttttcaactgtgtaaccttcagcaagttacttaacctctctgggcctccatttcctcatctgtaaaatgctccctaaagttgtcatgaggatgaaatgcactgactcttagtggtcttagagctatgcctggcccatgccgagggcttaggtgagtcacccacagcgtcttcatcagccctttttggagatctctttaattatcctagcaattctctaaggatgctatgataatccccatatcacagatgaggaaactgaggctcagaaaggtaaaatgacttgagagtcaggtaaaaggcagagccaagatttgaacccaagaccacagaaacaagatcctatattcttaatgatttttgttgt

SEQ ID NO: 912162 - DNA, 631 bp, Homo sapiens
ttcctttcccttttaatacctgatttggcccctccctcactgtgcttccttagtccctgaacttattttcaacacaaacttctcatgtggtattataatttcctttttttcttatttgattccctcactatattgtaaggtatgtgagagcaggaaacctatttttctctgctgttctgtttctatgcacctactacaatacctaccacattgcagatgctcaaaaattatgaattaataaggtaagaaaatataagttaaatcctttgtcccgctcctgctcccccacttcacagatactatctctatccataaaggccagtttgtaccactgttcattttatccccacggaagcctctgtcaactttcaattgcacttacaaatagagacattgaaacgttatatataaattgaagtaacaggtaaatatgtgattagagttcaaatgggtcagtcaaataatgaaaagggaataaggttttataccaaccagatttgaaaacagaaaatataatgcatattagtcagctcaggctgctgtaataaaatgccatagamcaggtggcttaacaacagatatttgtttatcacagttctggagtcttggaagtccaagatcatggtggcag

SEQ ID NO: 912163 - DNA, 671 bp, Homo sapiens
gcccagcaacactctcttaggaaagaaatgccatagatcttggactatcctggatattgggtacccttgggtcagagactacctgaggtcaaagcagctatgctctgggatagcaggaakagtacttgtttcatgacataaataaagcctaattgcttgtttcacattaggggcagaaacaatgttgacaatgtccaatgcaaacctcaaaagagtattacctttcctgccacacattcacacagccatacagaacccaaattgaatactggtatggtttagttgtgtccccacccaaatcttatcttgaattgtagatcctgtaattcccaagtgttgcgggagagacccggtgggagatcattgaatcatggagacagtttcctccacactgttctcgtggtagtgaataagtctcaccagatctgatagttttataaggggaaacccctttcgctaggttctcattctctttgcctgccactatgtaagacacaccttttgccttccgccatgattatgaggcctccccagccacgtgtaactgtgagtctattaaacctctttttctttgtaaactacccagtctcaggtatgtctttatcagcagcgtgaggacagactattacaaatactgtgttttgtgattttctttcctttaaggtctgcgt

SEQ ID NO: 912164 - DNA, 577 bp, Homo sapiens
actctgacactcaaatgcctgcctccccctctgtatctcacataatcttgccttccaacatcatttttttcccatttgactgagtggtctgacctaaaacagctgtgcgtgacttgaaatttaagcattcctctttcaactctctgataagaatctttcccctttaataatgctctcagtggctcctcgcccattccttttcatttctgctaggtgcttttaagttcagttttccttccaccccctgcaagccccccaaggcttagcttcagagacaaggctctctcaagacccaatcaattccaacattcagttaagctaattaatttcaggttgccatcaatatatttcttaattatggtttaaacataggtaaaacctagaattgttcgtcaacagccctcagcctcagctgaatgctagcatctaccattaagaattcccatgggtcaaatcgagggtctgacaatagytacaaagaccacatgtgtatttgcataggatttgcatatatctacataggttagtctctttgcagtagatttccaattaaaatgttattattttggccttgaag

SEQ ID NO: 912165 - DNA, 627 bp, Homo sapiens
catcttaattttagtggccccttaatccatgtggcaatttgagtgatgatccccattctatgtactatgctataaaaacatagggcaggagatggaagaggatgggagaaagtagaacagagaaagrgagaatagaaggaaatgaaatggaaaggaaagaggaagatgaaaaaatccaaagccaagaagtggacttgagatgctacaaccaaaaaacattatcctgcctctgcattctgctcagttgaccagcagagcttttcaattttgcaaatgccagtagctcagttctcatcttgttctggatgcttttattttaggaaacattgcaaatccatcctggtgaaaaaaatcaatacacatgatatttcaaatagttttttggtcaagcagagggctttgggggtaaggaaaataaggatggaatgtctcattggtgcactgagcaagccctgtgctgcctacagtcaaggccccacctgattctttctctcctttgttgctgggccatcctatttacctggaaatggatcttttcctgggatattcaaaagctctcaattaacacatatttagtattgatcaccttgaagatgccatctctccttccctttttgtgtttctatc

SEQ ID NO: 912166 - DNA, 640 bp, Homo sapiens
aaaccagaaatagaaaagttgtgaagaagactttggacactgactttcaaataacgttttaaattcaaggcagggcaattgttatttttctcataaagcaacagtggccagtgtttgataataacctttrataacttgtttatacatatgccattctcaattagttgccaccacggtaattcaataataaattttgtttactcatggagatttgttagccagtatgaaatgggtagtcttaaatttctctgtaaaaaaagtcaagctttctgtatcttaccctaagttagataaaagtcaaaagctgaggccgggcgtcgtggctcacgcttgtaatcccagcactttgggaggctgaggtgggtggatcacttgaggtcaggagtttgagaccagcctggccaacatggtgaaaccctgtctctactaaaaatacaaaaaattagccgggtgtggtggtacatgcctgtgatcccagctactcagaaggccgagaggcaggagactctctggaacctgggaggtggaggctggagtgagcagagatcacgccactgcactccatcctgggcaacagagagagactctgtctcaaaaaaaaaaaaaattgaaaaacaggattagtgagaagatagattga

SEQ ID NO: 912167 - DNA, 660 bp, Homo sapiens
tgctgtggctgcatctggggagctcctgmcccaccaacttggaaggggtgaggctcccacttgtccccatttcctgctggcaccatggagtgtgcagtcccagttgtgcctcactgctgcagccagtgtaatagcagtggctgctctagatggactgttgctgccatcaacaggaggagtctggggaagatctgggttgtgagttccaggttgctgtttgctgcaggcagcatgaggcgagatggctgaggatctggcctttccctaatggtcaactctccgtgtccatgttcttggacagctcttggtgacactgccaactctgggtaagatttcttggctgtgtggctctttggaaagaattgtcagaacaaccctgtgggccacctattgggccagccccacacaccatttgataccctgcctcttccgtcttgtacttactggtggttggattgactgatccaggttgactggtagttttggtagtttctcagcccatttctactagttagccctgggaaaagttgggggaagatgtgcattaagttgttcaactaccagccattgctagcacctcccttatgctaggctggtggctcagaaagacctctgccctcaggagttgcagttcagtgtgggagatacgcttgtaccagc

SEQ ID NO: 912168 - DNA, 602 bp, Homo sapiens
tcccagctcctccactgtgtgtttgaaaacctagttcctcatgtattatcctcccaaacacatgttatgtgtttacattaaaaaaaggtaaaagccagattctcttcctttctttaaaaatagaacaaaaacaaaacaaaaagtgaaggagagggaggagtaactcatttcttggcattttaatagagtacccagaatcctcctaatataaggcactattatagttgaaaggcatattaaaactatgtataaatgaaaaactctgtcttttaaaaattgtttatttattagactggagtgcaatggtgcaataacagctcactataaccttgaactcctgggttcaagtgatcctcctgcctcaggctcctgaatagcttggaccacaggtgcatgacaccatgccagggttttttgtttgtttgttttttgttttgttttgttttgttttgcttttttgtagagtcagggtctcactatgctatctaagctggtcttgaactcctggccccaaaagatcctyctgacttggcctcccaaagtgctagaattatagactgagccaccgtgcccagcctaaaagccctatctttagtaaagga

SEQ ID NO: 912169 - DNA, 571 bp, Homo sapiens
cctttcatcagaaggcaaatcttcgkaagcatccagatattcacacaggggagaaaccctatgaatgtagcgaatgtggaaaaaccttcagtcagaagtcagtcctcactgtccatcatagaacccatactggagaaaagccttacgaatgtaatgagtgtgtgaaaaccttttgtcacaagtcaaacctcaatatgcatcagggaattcactcaagagagaaaccctgtgaatgtgatgaatgtaggaaaactttttaccataaggcagttctcaccatacatcagagaattcacacaggtgagaagacatttgaatgtaagaaaaccttctcccaggagtcaaaaccctttgtacagcacagaactcacacagaggaaaaaccctttagatgtaatgaatgtaggaaaattttctcccagaagtcaggcctcagtatacatcagagaacacacacaggagaaaaaccttatgaatgtaaggaatgtgggaaaaccttttgccagaagtcacacctcagcaggcatcaacaaacccatataggagagaaatctgatgtagctgaggcagg

SEQ ID NO: 912170 - DNA, 643 bp, Homo sapiens
ttctcttttcctctcctctgactcttaagccctttcccattctctttctcaggaatggctgttaaaatgccaatatggtcatgtaactttcctgtacttagtgaacctccttatttacaccctgtttgtgaagaggctgtgttcaccctgggtggacacagaatgtttttggcatgtacaaagagaattttatgctgcctgtgtagagctactaatttgtaagtacactcagctttttgtatctgtaggtttaatatctgtgtatgtaaacaaacttggatgcaaaatatttgaaataaaatcagacgcttgcatctgtagtgaacatattcagactttttcttgtcattacttgctaaacaacacaactatttacatccacattgtatttggtcttctaagtgtgaaaggaaaataaagattgggactgcaactcattaagctaaagggaaaagtcaagctgggaactcagtcatgcaaacctgcctcctccttttggttcctaaataagatggctacaagayaaaaagctcatatttttcccacaaggaaatttctggtgtgctttaagatctttaaagtgtttctgttaaaattcatcatggcaatgtaaatcaatagcttatcctttttattctttttt

SEQ ID NO: 912171 - DNA, 590 bp, Homo sapiens
tcttgcaagattaatgaaaaacagaacgctcacagggtgcggtgcctcatgcctgtaatcccagcactttcagaggccaaggtgggtgtatcacaaggtcaagagatcaagaccatcctggccaacatggtgaaacctcgtctctattaaaatacaaaaaaaaaaaattagcccggcatggtggcatgtgcctgtagtcccagctactcgagaggctgaggcaggagaatcgtttgaacccgggagagtggaagttgcagtgagccgagattgtgccactgcatgagagcctggtgacagagcaagactccatctaaaaaacaacaaaaaacaagaaacaaaacaaaattgcattctccaacattaaggcatgctaggttttctgggactccagctggttacatattatgactcatatgtttatcttgctgggaaaattacatcaaggaaaatacagatctccaatagtcattatttgaaaaacctgcwattatagagttaacatgtagagatttctaagttctctgcatacctctctctgttcttcttctacccattcactgtttatggaattctggcctgtgccccaa

SEQ ID NO: 912172 - DNA, 654 bp, Homo sapiens
ctgttgcccaggctggagtgcagtggtgcaatcttggctcactacaagctctgccttctaggttcacgccattctccctcctcagcctcccgagtagctgggactacaggtgcccaccaccatggccggctaatttttgttttttgtatttttagtagagacggagtttcaccatgttagccaggatggtctcgatctcctgacctcgtgatctgcccgcctcagcctcccaaagtgctaggattacaggcatgagccactgcacccggcctgtatcctataggttttgttttgactttaaagtttttcttttctcaaaaactcagtgccatggtaccggcttctagtgcttttggcagtgagccccttttacttgataacagtggtagctgggacaacttggcaatgtaaataaatacatggcatctagattggaaaggaagaagtacagttatctttatgtacggatgacatgatcttgcatttagaaaatcataagaaatttactaaaaagtattaggactcatgaacaaatttaggaatgtaatactatataagattggtatagaaaaataactgtatttctttaccaagaaaycttgaatccaaaaatggaattacaaaaataaatcttgttacaatagaattaaaact

SEQ ID NO: 912173 - DNA, 628 bp, Homo sapiens
ctacactttagcaacttctccaaataacatgtctcttactgaaacttgggaggttgaaagttaaaaayataaaatccagtggcatttatgtatcctaggcacttacattcttccaacttgcctttgcttggttagagttttgggtagataagaggtggatttacatgtgctagtgtgagaactttgatacactcatttagacattgacctactatgttgatatttgaaagctaaaacccaaagaaatttgtctttttagataaaacaaattcagcccttaccttccttatcgattacatcttccactagcagtaataaaaaagtaacaatatgcataagtcaaagtatcttcttaaatcctctgtagtgttttattatttagttgtgttaattaaagtaactgtctcaaaatttcaaggaatgcctgagaataaattcatgttcaaaggctgccctcttgtgacaatgtgttgtatgttttactgtaaaagtaatcttattttaccttataacctctacaatccaattcataacagcataaaaaggaaataaaaccttacataattttgaattttgaaaagtaccttgtttatatggttcctttagctaatgaatagacaatttggta

SEQ ID NO: 912174 - DNA, 627 bp, Homo sapiens
agcaacagtgttctataatcgtatgtgagggacaagtattcagacyccagcagcagtgttctggaatcttatgtgagggacaaacattgagaccctcgtagcagtgttgtggaatcctacgtgagacacagacattcgtaccacagcagaagtgttctggaatcctatgtgagggacaaccattcagaccacagcaggagtgttctggaatcgtatgtgagggacaaatattcagaccctcatagcagtgttctggaatcctttgtgagggagaaacattcagaccccagcaggagggttctggaatcctgtgtgagggaccaacattcagacccttgtagcagtgttctggaatgctatgtgaaagacaaccattcagaccctcatagcaatgttctggaatcctatgtcagggacattcagaccccagcctcaatgttctggaatcctatgtgacagacaaacattcagaccacagcaggagcatttggaatcctaagtgatggacaaacgttcagaccacagcagtagtgttctgcaatccaatgtgagggacaaacattcagaccccagcagcagtgttccggaatcctatgtgacagacaaacattccgaccacagcaggag

SEQ ID NO: 912175 - DNA, 604 bp, Homo sapiens
acaaatattcagaccacaacaggagtgctctggaatcctatgtgaggggcaaacattcagaaccttgtagcagtgttctggaatcttatgtgagggagagacatttagaccctcgcagcagtgttctggtatcccatgtgagggacaaacattcagaccctcccagctgtgttctggaattctatgtgagggaaagacattcaaactccagcagcagttttctggaatccgatttgaggggcagacattcagaccccagcagcagtgttctggaatgctatgtgagggacaaacattcagaccacgggagcagtgttctggaatcctacgtgaaggacaaacattaagaccctcgtagcagtgtcctggaatcatatgtgagggacaaccattcagacaccagcagaagtgttctggaatcctaggtgtggtagaaacattcagaacctagtagcagtgttctggaatcctatgtgagggacatacattcagaccacagcagcagtgttctgaaatcctatatgatggaccaataytcagacccttgcaacagtgttctggaatactaggtgagagagaaatattcagaccctcgtagcagtgt

SEQ ID NO: 912176 - DNA, 521 bp, Homo sapiens
ttctggaatgctctctgagggacaaacattgagacctcagcagcagtgttctggaatcctatgtgagrgacaaacattcagaccccagcagcagtgttttggaatcttatgtgatgtaccaacattcagacgcttgtagcagtgttctggaatcctatgtaagggacaaacactcagaacccaccaacagtgttctgcaatcctatgtgagggacaaatattcagaccctcgtaggggtgttctggaatcctttttgagggacaaatgctcagaatccagcagctgtgttctggaatcctatgtgagggacaaacattcagaccagtgcagaattgttctggaatcctatgtgagggacaaacattcagactccaacagtagtgttcttgaatgctatgtgagggacaaactttcagaccacagcaggagtgttctggagtcctatgtgagggacaaacattcagaacactgcaggagtgttctgatttcctatatggggaacaaacattctgaccacagc

SEQ ID NO: 912177 - DNA, 707 bp, Homo sapiens
gaccccagaagcagtgttctgtaatcctatgtgagggacaaacattcagaccccagaagcagtgttctggaatcctatgtgagggacagacactgagaacgtagcagcagtgttctggaatcttgtgtgatggacaaacattcagaccacagcaggagtgttctggagtcctttgtgagggagaaacaatcaggccacagcaggagtgttctgatatcctatgagaggggcaaacattcagaccctcctagcagtgttctggaatcctgtgtgagggacagacactcagaacctagcagcagtgttctggaatcctatgtggaggacaaacattcataccacaggagaagtgttctttaatcctatatgagggacaaatattcagaccctcatagcactgttctggaatcctatgtgaggaacaaaccttcagaacacagcagcagagttgtggagtcctatgtgagggacaaacactcagaacccagcagtagtgttctggaatcctctgtgagggacaaacattctgacccttgtagcagtgtttgggaatcctatgtgagggacaaacgctcagaamcccccagcagtgttgtggaatcctgtgtgagggacaaacattgatatcacaggaggtgtgtcctggaatcctttgtgagattcagaccacagcagcagtgttctggaatcttatgtaaggaacaaac

SEQ ID NO: 912178 - DNA, 707 bp, Homo sapiens
gaccccagaagcagtgttctgtaatcctatgtgagggacaaacattcagaccccagaagcagtgttctggaatcctatgtgagggacagacactgagaacgtagcagcagtgttctggaatcttgtgtgatggacaaacattcagaccacagcaggagtgttctggagtcctttgtgagggagaaacaatcaggccacagcaggagtgttctgatatcctatgagaggggcaaacattcagaccctcctagcagtgttctggaatcctgtgtgagggacagacactcagaacctagcagcagtgttctggaatcctatgtggaggacaaacattcataccacaggagaagtgttctttaatcctatatgagggacaaatattcagaccctcatagcactgttctggaatcctatgtgaggaacaaaccttcagaacacagcagcagagttgtggagtcctatgtgagggacaaacactcagaacccagcagtagtgttctggaatcctctgtgagggacaaacattctgacccttgtagcagtgtttgggaatcctatgtgagggacaaacgctcagaaacccccagcagtgttgtggaatcctgtgtgagggacaaacattgakatcacaggaggtgtgtcctggaatcctttgtgagattcagaccacagcagcagtgttctggaatcttatgtaaggaacaaac

SEQ ID NO: 912179 - DNA, 642 bp, Homo sapiens
ccaaatagctgggattacaggtgcctgccactatgtccagctaattttttgtatttttagtagaaatggggtttcaccacgttggccaggctggtctcgaactcctgaccttgtgattcgcctgcctcggcctccaaaagtgctgggattacaggcatgagccaccgtgtccggcccctttctctagttcttttagttgtgatgttaggttgttaaactgagatctttccagctttttgatgtaggcatttagtactagaaatttctctcttcacactgccctagctgtgttccagagattctggtatgttgtctctttgttctcttcagtttcaaagaacttcttgatttctgccttactctcattatttacccaagactcatccaggagcaggttattcaatttccatgtaattgtatggtttttagtgaatttcttagtcttgatttctaatttcagtgtgctgtggtccaagagattttttgttatgatttcacttgttttgagtttgttgagtgttttacttctgattatatgattgatttttagagtatgtgccwcgtggtggtgagaaaaatgtatactctgttgttttggggtggagaattctgtaggtgtctatcaggtttatttgatccagt

SEQ ID NO: 912180 - DNA, 623 bp, Homo sapiens
ttatgccatagctatttgcttttttttttttttttttttgacggagtctcactctgttgcccaggcttgagtgcagtgacacaatctyggcttactgcaagctccgactcccgggttcacgccattctcctgcctcagcctcccaagtagctgggactacaggtgcccgccaccatgcctgggtaattttttgtgtttttagtagagatggagtttctccatgttggtcaggctggtctcgaactcctgacctcaggtgatccgcccgcctcggcatctcaaattgctgggattacaggcatgagccactgcacccagccttctttttgtttttaataaaccttctcctgaagaataacatagctaccaaaaagtgctcaaattattagtgtatagcttggagaagtgtcacaaatggaaaatttcacctgtttcaggaaaaaactctcacaacatgtttttcctctgtttctcacaccatcaaaatcaacacacaagacttctgtgaccaaatgtgtgggggttgccccatcaccacgcagtgaacaggaggtgggtgtcctccgattcaattccaacactgtttacctggaggtcgcatcagatcccacaggttgatccca

SEQ ID NO: 912181 - DNA, 654 bp, Homo sapiens
taagacagaatcatttgaacccgggaggtggaggtttcagtgagccgagattgtgccactgcactccagcctggtgacagagcaagactctgtcccaccccacctccacccccccacccctgccaaaaaaaaggtaaaacctgtgtagtgtatcaagcaatgtccaggtctcattcattcatttgacaattcctcactgacctcctactaagtgccaggcactatgtaaagaatggagggagatacaacaagatacaagagccggagatacaaaggtgtccaaacacctaagaaaggtgctccaaacacagactggtccctgccttcatggagcttaacatttagtgaaagggaaagacattagtcaaataatcacagaagtaaatgtacaatacaactgtggcaagagcatcaaggaaagggaggcagtgctatgagaacatctaataaggaggatctgacttaacatccttacagtaaacttagcgcttggtttcagaggactgttacagtcaccagtgtctcacctcccttattactttgagaggaaacacacagaaattttatatcatgcaagcatcaaattaagtaatgtctgtgaaaggctttgaaaattataaagmatgatgtaactataaagtacgtgaaccaaga

SEQ ID NO: 912182 - DNA, 634 bp, Homo sapiens
tgcaggcagaggggacagcagacagaagaacatccaaggcaagaatgaatgaatgtacatggtggttaaagaacagaaagaaggccrgtatggctggaatgtagttaacaaggaaagaagaagtatcaagtgccatcggagagaataggccagggccaactgtgcattggccttgcacggttgggaatgtgagggacaaaaaggagtactgaggttaggtaagttgaagcatcactgggttggtgaaagccaggcaggtttcttactatgggatttctcgaaaactttaaaatataatgctcattgtaaattttcaagtcagtaatacagatcacagcattttccaaatacatttcatcatgacatcctttttttcagaaacgagctcttgagactgttgtttcaaggaaaatgcgttgggttacacaggtcaaaaacaaaaacaagcaagggctggtaacctatagctttcaggccaaatccagcctaccacctgtgttttaccatctgtgaactaagaatagttttacatttttaaacagtctttaaaaatcaaaagaatatttcacagcaagcaaaaattatatgaagttcaagtttccgtgtccataaagttttactgggacgcagccac

SEQ ID NO: 912183 - DNA, 644 bp, Homo sapiens
tgagcaaatggatgttcacaaggaggtgtcccagtaattgyagtgcagtctggcagagtctgaaaagagcctcccacttttgtttttttttttaaccacactaagaaaatctgatgctaccttataaaaatgtgttgaaatgttttaaacaagaaagtcaaaactgtgttttggattcaaaatttcaccatagagtggaagacagtttgggaagataaagatgaagacctagggatgggttaagatcttcttctcaaaagtagagcaatattttagaaaataagtagctagatttttggggaataatagcattggattacctcattctatgcaagaggggttaataacataaggttttgtaatagctaatggaagtaaaatttgttactttatagtgtaagaatgtatagaatttcatgccaccatttcttaatactgactctttaggggcataaatggagatcacatcagcgcaagttgattctcatgtgtcaaacatatgtgagttcagctgttaaattagtcaatatttatcttaacattgctgagagggacctactgtaaatgtgacatcctcacacttcccaaatctttaactctgaaaaaatctcaaaaacttgaagcctagaagtattccaaagcaa

SEQ ID NO: 912184 - DNA, 644 bp, Homo sapiens
tatgctgcttacaagaagcccgcataactagtaatgacacttatagactcgggtggaaaaawatatatcatacatatgggaaccaaaagtgagcaggagtagctacactgataatagacaaaacagactttaaatcaacaacattaaaacaagacacagaagataattatataatgagaaagagatcaatgcagcaaaaaaaaaaaaaaacaaccctaaatatatatgcaaccaataccagagcacctggattcataaagaaatgttactagacctaataaaatatatggagagcaacacaataatagtggtggacttcaacaccccactgatgcactagagagaccgtcaaggcaaaaaactaacaaggaaacagagtacttaaattggatgctagaccaaatgaacctaacagacatttacagaacattgttcccaacaacagaatatacatttttctcatcagcatatagaacattttccaaaatagaccatatattcagccaaaaacaagtatcaacacattttacaaaataaaaatcatatcaactatcttcttcaaccacagtggaataatacttagaaatcaataccaagagaaacaatcaaaactacaaaaacacttagaaattaaacaacctgct

SEQ ID NO: 912185 - DNA, 566 bp, Homo sapiens
gctttcactgctatgccaatgagaaacagataaaaaagaattttttccattgtagatcaggtttaagagcctgtaacggaagacacaaaatagaatgttagcatccagtgatttaattcatattcatattcctactagaataatatttgtatgcaatctagaatagagaaataatttcacttgtttgcttaacaagtattaatatttattctgtagtaaaggctataatgggcactagggaggaataacataccattgatagtttcatgggatttaaaatcaagtaggaaaaacaaagcagtcaaaagtttattataactctgcaaattaagcgccattttttaagtatgtccagggtactccatgggtgaaccaaaagagatatacagccgagattgtaggcctgggggttcaggaaaacataccctagaccctgaaggacatcttgttacataaagatatttaaaaaattagaggcatatttgaagatttgtaagtaggtcaattcagtagcctaaacagaaacaataaaawacaatatttgttagcttgcagcatgacctttg

SEQ ID NO: 912186 - DNA, 602 bp, Homo sapiens
atatagggcccttctttgtcttttctgatccttgttggtttaaaatttgttttgtcagaaactaggtttgtgacccctacttttttctgttttccatttgcttggtaaattttcctyagtccctttatggtgaacctatgtgtgtctttgcatgtgagatgggtctcttgaagacagcataccaacagattttgaccccgtccagcttgccatcctatgtcttttaattggggcatttagctcatttacatttaatgttaatattgctatgtgtgagtttgatcctgtcatcataattcaagctggttattttgcagacttattatgtggtcacttcatagtgtcactggtctgtatacttcagtatgtttttgtagtggctagtaacagtttttccttttcatatttagtgcttccttcaggaactcttgcaaagcaggcctggaggtgacttattccctcatcctttgcttgtctgaaaagaatcttatttctccctcgcttatgaaacttagttgggctggatatgaaattctgggttggaaattgttttctttaagagtgttgaatattggccccaaattgcttctgtcttgtaaggt

SEQ ID NO: 912187 - DNA, 624 bp, Homo sapiens
tggcatggcggctcatgcctgtaatcccagcacttttgggaggccgaggcgggtggatcacctgmgatcaggagtttgagaccagtctggccaatatggtgagaccccatctctactaaaaatacaaaaattagctaggcatggtgatgcacacctaatcccagctactcagggggctgacacaggagaattgcttgaaccccggaggtggagttcgcagcgagccgagatacaccacttcattcgagcctgggcaacagagaaagtctccttctcactaaaaaaaattgttcagtttacacttaaccaattgaaacattcttgtgaggaatgaggaaaagccccaatctttacactttagtcacatacacacacacacctctacacccccccacacacacatagagtatatttaatgtaagaactcatacaactccatatttggagttatccattttaaaaaaaatcaaaatgtaatgcctcttctaaccttaagatcaacttgctggactagtcaggcgccatcttctctccagataatatggtacaattcaatgcagttttacacttaatgatcatttaattttaatgtggaacaatttaaaagggcttcagtgacccagt

SEQ ID NO: 912188 - DNA, 624 bp, Homo sapiens
tggcatggcggctcatgcctgtaatcccagcacttttgggaggccgaggcgggtggatcacctgagakcaggagtttgagaccagtctggccaatatggtgagaccccatctctactaaaaatacaaaaattagctaggcatggtgatgcacacctaatcccagctactcagggggctgacacaggagaattgcttgaaccccggaggtggagttcgcagcgagccgagatacaccacttcattcgagcctgggcaacagagaaagtctccttctcactaaaaaaaattgttcagtttacacttaaccaattgaaacattcttgtgaggaatgaggaaaagccccaatctttacactttagtcacatacacacacacacctctacacccccccacacacacatagagtatatttaatgtaagaactcatacaactccatatttggagttatccattttaaaaaaaatcaaaatgtaatgcctcttctaaccttaagatcaacttgctggactagtcaggcgccatcttctctccagataatatggtacaattcaatgcagttttacacttaatgatcatttaattttaatgtggaacaatttaaaagggcttcagtgacccagt

SEQ ID NO: 912189 - DNA, 592 bp, Homo sapiens
cgaactggttttactgtgatgacatttggaagcygtatagtctttatagtaggagaggaaaatacatatatttggctatatggcagtaatttaagatgtgggtaagacagtactcaggtcaaatacatgaaactaaatatttatgtcactaaaaaaagaatgaattaaattaaacaaacgtatatcctgggaatttagtgaaagcatgtcaaaataaaaaaaaggagaagaaaagaagtaatgatataaagccaaaataaataagtcaaaattcgaagttaaaatggggcataaggcatatcagagaagtaaagttaaaaattgattctctgacaaccctgatagattgcctcctgtctaccccagtggtgtcaccatcatgttctaaagccttgtttcctggtgggcacggtggctggtgcctgtaattcctgaactttgggaggccaaggcagggggatcacttgaagtcaggagttcaagaccagcctggccaacatagtgaaacccccatctctattaaaaatacaagaattagatgggtgttgtggcaggtgcccataatcccagctactcccatggcggaagcatg

SEQ ID NO: 912190 - DNA, 592 bp, Homo sapiens
cgaactggttttactgtgatgacatttggaagctgtatagtctttatagtaggagagraaaatacatatatttggctatatggcagtaatttaagatgtgggtaagacagtactcaggtcaaatacatgaaactaaatatttatgtcactaaaaaaagaatgaattaaattaaacaaacgtatatcctgggaatttagtgaaagcatgtcaaaataaaaaaaaggagaagaaaagaagtaatgatataaagccaaaataaataagtcaaaattcgaagttaaaatggggcataaggcatatcagagaagtaaagttaaaaattgattctctgacaaccctgatagattgcctcctgtctaccccagtggtgtcaccatcatgttctaaagccttgtttcctggtgggcacggtggctggtgcctgtaattcctgaactttgggaggccaaggcagggggatcacttgaagtcaggagttcaagaccagcctggccaacatagtgaaacccccatctctattaaaaatacaagaattagatgggtgttgtggcaggtgcccataatcccagctactcccatggcggaagcatg

SEQ ID NO: 912191 - DNA, 600 bp, Homo sapiens
tcaggttattagatttttttcctgtagagttgtttgagcttcttatgtattgtgatcattaatcccatgtcagatggatagcttacaaatgttttctcccattctgtggtttatctctttattttgtkgattgtttcctttgctgtgcagacccttttcaacctgtgattccatttgttcatttttgctttggttgcctgtggtgttgaagtactattcaagaaatgtttgcccagaccaatgtcctggagagtttccccaatctttaattttagtaatttctgagtttcaggttttagatttaagtctttattctattttgatttgatatttgtatatggtgagagataggagtctagtttcattcttctgtgtatgaataggcagctttcccagcacagtttattgaagagacttctttccccattgtgtgttcttggaagctttgtcaaaaatgaattcactataaatgtatggattttatggatttctgatggttgctatattccgttccataactttatatgtttttaatgacagcgccatgttgtttttgttactatagctctgcagtataatctgaagtcaggaaatgtgatt

SEQ ID NO: 912192 - DNA, 646 bp, Homo sapiens
caatccatcaaccttgatctgatgcaataattatggcagtctctttaattaattgcttgatctatttgtgtaaaatctttccctccccatcctccaattcaagaaggtgactggttggaggggccaggtacgctcattaatgatggcgtgatagaggaagaaagggggtcctcagagcttcacctggtcatctgaattctcactgggcctctgctgcagaggagccagactgagtttctccctgaactgctgaccacagaggaacaaatggacctgtctggccatttgagatcatgtgctggcaccgactgctggaacccaagatccgagctatttattctcatctttaagtcctcacccaaaatgaactctctcctgcatgagggcctctgctggttcaccagggccctcagcatctccacctctcctccttgggacttggagttacataagtccctggggtccagaatggcagacctgggctcctggtaccacctacactcactcaggcaccatgatggccacggtgccaagcctacacctatgatttccctaagggcttgagtcttcactacagtagctcaaaggagcaaaggtttctgcasaccatccataccaatacagatactgctttctaaacccacag

SEQ ID NO: 912193 - DNA, 564 bp, Homo sapiens
ggaacactgggtgtggattgcaatgccctgtctgcacttttgaattttgcaggtcatttaactctgctatcagcgttaactttgttcaagtttaaatctagaaatatttttcttcttattcgctgaaaccttcctcaacccactgctcactcccctctcaaaacaagcctttgtgtggttaggagtaaaactgtgccagggtgtagcctgccctcagcagaatggaagtggaatgtgcccttttgcttggataatctttgtgtctaaaaatagaagagacaccccttaccgtactggtgacacacagactcatgggagatgaataatcatattgacagtcattttgggggtaagcaatagagaacaatgggtaaaaactgatcctaaattataaaaatgaatatcacaaatttcaaaagatattttcattgtaagctggagtttttgttccttgctcaattcctctgcccttttaatttttttatttttataagccaaagcagttgccctcattcacaaccttttatttaccagaktgtggacagggcacctcctccatgtcag

SEQ ID NO: 912194 - DNA, 697 bp, Homo sapiens
tgttacaaaaacccattcactggttaggtttcctgaaattcttgtctatcagtattcatggcctgactccagaatgcatggggactgatactcaaactccaggaaaaaaagaaattgatcacatggcttaagaaaattcctacatttggaaaattgtagattaaaatatcaacacttaaggatcttagggtatttccatggggatcctttgactcaaatgtcttttttggtatgtgatttgttcccctcctcaccgcagcaacaaaaatgttaaaagaatacttaaaaaaaaaagagtttatctattaacatgttttccccctcttgaggacagaaaccatgaattattttggttccacagacagtaattgactgcctacttgatagtaggtgactgagacttatttttcaaggaaggaaaggaaagaaggacaaagagtgatgggaagaagaaagctcttttttatatctcctttgacactgagtgaatgggggagctgggatgaatttcatcagtcaatatctacaagattttaaaattcacttatacaaagtgttgtgtttacctgcctagaagcttacttctgagcctagattgaaggataaaaattaatgctttgggtattgagaaatggtgacagaaaatggcagtrttgttgaagaaagtttcaaataatatttgaaatacatattttag

SEQ ID NO: 912195 - DNA, 605 bp, Homo sapiens
tcaggtatcataccaggcactcaacagacacagtctcttaataatcctaaaagtagtattaactctctttttcagatgagaaaattaaagctaatctgaaagagactgaaaattcatcccaagtcaaaacattatggagacaggattccaaccaggtagtctgattccaaagccgatgcttttcacctggcttcatggttatttccacattagaatcttgtttattttccattatttcatcccaattccttggctgtacaattctttgactctgtagaattagacctatttctagaaggtctttattccaagacatagcatttatacttccacattttctactctccttgtgtccaagaaacctgctcttaacactcagataatctctagtccctgtacgtctacctagtttccattacacttagtttttgttgttgttgtttttagagatggggtctcacttggtcaccaaggctgaagtrcagtggtgtgatcatagcttactgcagcttcaaaactcctggcctcaagtgatcttcctgccttggcctcccatgtagctagagctacaggcatgggtttatcaggcccagtgtgttttttcg

SEQ ID NO: 912196 - DNA, 664 bp, Homo sapiens
aaaaaataataatggagttccrgtttgatcctgagatcatctaggtgtgaatgcttggggatacttaaattggtatgtaaatgtgagattttcattttgttctgtcttgttttccctcttacaaacactggtacctgatggagaaaatatctaacttaacaaatcaagcagttctttgatgtgtagaaacttagaatggaaggagggatctcatccaaccagattagtctgcattagtcctttggctcccattttgaaattgacaataggccaaatatctgttgatgttcatcccattataaattccaagatataattgaaaaaaaaatgctgaactcaccagagtggcaaaaagatgatagagaatgaaatagatggcaaccacgggtgcccacatatgtcccacagcatttagagtttggtccattacgtccacccatccttcctgggtgaggatctggaacatggacataaatgcctaagaggaaaagaacaaaggtattacacactagctttaggcttgcatacaacttcaaattagcatgtgatgtttgaagactttgatctcaatattattgatttttatctgatcagggcaagaacagtcttgattcaacacataggaaagatataagaataaagatcttaaaaatgtgatatttaa

SEQ ID NO: 912197 - DNA, 573 bp, Homo sapiens
tatgtatatgtgtatatctgggcttcaattctgactgatattttatgatatttagctaaagattctatcctatttggtacaaaacctattgaaaatagagttkaaaatatcagaacattttataaaatagagaaaatagtcttgaaaaactaaaagaaaagaaaaaaatgaagcaaaatattggcaaacaacatccaggcttaatttactcccccatgttactgggaatttttaaaaattaaaacttaaggccaggcacagtggctcatgcctataattccagcactttgggaggctgaggagggtggatcacaagatcaggagatcgagaccatcctggctaacatggtgaaaccccgtctctgcaaaaaaaatacaaaaaattagccgggcgtggtggtggatgcctgtagtcccagctactcgggaggttgaggcaggagaatcgcttgaacctgggaggcggaggttgcaatgagccaagatcgcgccactgctgcactccagcctgggtgacagagtgagacgctgtttcaaacaccaacaaacaaacaaacaaacaaaaaacactta

SEQ ID NO: 912198 - DNA, 711 bp, Homo sapiens
aagaaactgcttagagttctacatctggagaaaatatttttcaaaaaggaaaataaaataaagatgtctttagacaarcaaacattgaggaaaatctatctccaggagaactgctccaaaaaagtatactaaagagatttcttccagcgaaaggaaaaatatcccaggtgaaagcatggaaattgagaaacaaatgcacaacaatagagagtaaaaatatacgagtaaatctaaatgactatttattatataaaaataatattaacttatttgaatttaaaatgtgtgtcataaaatcacaaaaaggatggaaatacactgtcctaacatgatctagaaagtaataaaaatactattttggagtagatctaatatgtcaaaaacatatgtataatctcttagcaactagggtagaaattctgttatatttactattttttctattttaattggatttactttcctaatttttttctaatttgttgagatgaatatttaaatcattaattttattcttttttcctttctagtatatgcagttatagctatacatttgcctctttagctgtttcccacaagtttcaatatgtcctattttctcttttattattaacttatttttctttttgagacagggtctcactctgtcatccaggctggagtgaagtggcgtgatctcggctcactgcagccttgaacttctgagctcaa

SEQ ID NO: 912199 - DNA, 597 bp, Homo sapiens
ctatatcctttgtggcttattcaccttgctatgtgctcaagaaagctagactcctgccaataatagtgaataaaattaaaagtccattgtcaataattaaaatttttttttctgtattattgttaaaactaacatttgcttaaattgtagtgccaaaatatttttaatatctctctgaacaatgatgagtgagtgatcttaatttctggaccatctaggtcaataatatttaaatggtaatagaaattttagtctgtttggaataatgtgtacttttataggcttctgttcattgttcaaaatgttcttggtgtggtgccattataatagtcattataattatttcctgggacctttagtacttttgtgtctaaatgtaaaagaaagtgattgactgcaaataaatgaggctccacagtattatcaatcaattttgtcctttcattcgagcttcaaaacactactgcatttcacatgcttcctaatggcaaaaaagagaactctcacctttttggattaggagtatgtcttaattcattygggctgctgtaataaaataccttagatttggtaaaaaaaaaatggaaatttacttct

SEQ ID NO: 912200 - DNA, 639 bp, Homo sapiens
ctcactgcaacctctgtctccagggttcaagcaattctcctgcctcagcctcccgagtagctgggattacaggtgcctgccaccacgctcagctaatttttgtatttttagtagagacagggtttcaccatatttgccaggctggtctcgaactcctgacctcaggtgatctgcccgcctcagcctcccaaagtgctgggattacaggagtgagccactgcatccagcaagttcaaaatatatttctgatcaatgataaactagaataaacttgagtggacagataggtatttgaataaaaagattctggctatacgtcttttaaataatacatttatggttatgttaattcacaggacctggttttattagggaactaaaatatgtcaaaaaaaggagaaaagtttttgcctttataatactaatagcattattaatactcttgtgaaagacttgaaagagagcagtttttcaataaaaacttgaagcagagcaaaaagttaactgagygtcttcaacggaaaaactaggccttgtctaagtacatcccccgggttacttgattctatgatgtctctgaacctttcactgcaaattattcttgctcatagatatgcaaatgaatatcatctgggtgtg

SEQ ID NO: 912201 - DNA, 591 bp, Homo sapiens
tcatcttagactcttagcatcaaaaagatccttaaattaccatctatcccattaactggaatctctaaaacrgtgtgtcttgcaaggataaaaatcataaacacaactgagtattgatggttcagtaaaagctaattgactaatacatattggttgaaaacatacaatttttttaaccgctattctaggcttaacaggagtttaaagagacacacaagcaagttttctcagtgattttataagttaacaaaacaggtgggaggtcatttatagaaatgccataggaactaacaagaatatatttagtctgtataaaatatccccattaacaaaaaataaatatattttccttctacctcttatccataactgctagcaaagtggatgagccagcatgtggcctggaagggcatcttgtcctattagcatccctaagcccaccacgcaaggcaacagtatgcctgctactgaagctaccaagcttcaagacaagttttctagttccacccagaacacaatgccacgatcccttttataagaacattctagagcaacctctgcaaattataccataactagccttttattcaa

SEQ ID NO: 912202 - DNA, 641 bp, Homo sapiens
ggattgggaaaactgatggagttggccaattcctatggaagtcacatttcattcctggaaactttgaatctcagattttcttttttaaagaaacttcatctatatatcatttatataatatgaaatatgycagttttaattgtatactttgatgagttttggcaatatatgcaccactacaatcaggatgtattttataacctttccatgttctgaaaaaggttttctcacgcccatctgcagtcaacaccatcctatgcccacctagcctaaggaaatcattgaacttctttgtgtaactacagtcttggtattggtaatttctcagaaagtgtaaactcatgttcattagcagacaaatagaaaaatgaattaccaaataattaaataatgccttgaagggctccaaagtaagtcacacctcaaattctgacatacaggcccctaaggtctcttatgaatccccagtgaaacgaattagtcaaatgtcaggtaaaaccatcaggcaatacacaagttcctccaccttggcttccccacctgttgcttgctgggtcacttgctcccctttgcttagccagttcgacccacaaaatatctccttggaagccttagctcttcaaggaggtgacaactgcttc

SEQ ID NO: 912203 - DNA, 586 bp, Homo sapiens
aacaaggactaaacatcaaagactataggaacaccacgaagtacattacagacaagattctgaaacataagttattaactggwttctttacatttttatttcagtaactttattgtaaaattattgttatttatatattttaaagtaccaaattcacatctattctcacataaaatttagctttccactcatattaatgccaaatatctcatagccaaattttagtgatgtttttatgtcaatttgtgcagaaaaataagacacaattcaagagtcagatgcagatggttctactaaacatttgttttctatttcagtaatttctgactttatctgtataatttatttccttctacttccttcagatttcatttgttgtcatttatctaactttctaggctggatatttagatcatttattttatgacatttttctttttattagtttatgagcccataaattttccttctaacaagctttagcttcataccaaagtacttgtatgtcacattttattatcattaagtttagaatactttcttattttcatttaatttattctttgatccacagattgtatagaag

SEQ ID NO: 912204 - DNA, 673 bp, Homo sapiens
cttgcaagagtgaggtggtatctcattgtcgttttgatttgcatttccctgataattagtgatgttgagcattttttcatacgcttattggccatttttgtatcttcttttgaaaattgtctattcatgtccttaacccactctttgattcaattgtttttttcttgctgaattgtttgagttatttgtagatcctgaatattagtcatttgttggatgtatagattgtgaagattttcttccactctgtgtgttgtctgtttactctgctgattgtttcttttgctatgcagaagctttttagtttaattaagtcccatctatttatctttgtttttgttgcacttgcttttgggttcttggtcatgaagtctttgcctaagccaacgtctagaagggttttccaatgttattttctagaatctttatgatttcaggtcttagattaagtctttgatctattttgagttgatttttgtatagggtgagagatgaggatccagtttcattcttctacatgtggcttaccagttatcccagcaccatttgtttactagggtgtcctttcccactttatgtttttgtttgctttgttgaaaatcagttggctgtaagtgtttggctttrtctgtgggttctcttttctgttccataggtgtatgtgcctattttt

SEQ ID NO: 912205 - DNA, 598 bp, Homo sapiens
ccaaattgcacaacttgggattgtgtaactcctttaagcttaatttattttattctgtttgtttcccattcttataaaaaataatcatcattatcagcaagaaggcagattattctgttttcatttgtttatttcacattttgtttgtgttttgttttggttttatgctgaatgaagggaatgatatccactaggactctggcatagagcagttggttaagagctgtggtacataaaattactaaaagtgttttcaatgttagagaataattgaatggagatgaatatacatatgcatacactccttaatgccttaatgtcagttaatttcaaacacttgcatatcaaagccaaataaagtggcagatatttttatttcttttttttattatactttaagttttagggtacatgtacacaacatacaggttagttatatatgtatacatgtgccatgttggtgtgctgcacccattaactcatcatttaacatgaggtgtayctcctaatgctctccctccccactccccccaccccacaacaggcccctgtgtgtgatgttccccttcctgtgtccatgtgttctcattgttcagtt

SEQ ID NO: 912206 - DNA, 654 bp, Homo sapiens
tgtctctgaagatgcttaacataagtatagatagcatctggaggaaaaaaaacacgagatatctttacgttagcattccatgagctagagatatcagcattttcttctaacttcgcttatttaattcttgggtagctctgtaagtctaaggattaaaatgccagaaagaaaacgagggccttaagatagagttagctatagtctaaacaaggagagaggccctgtgcattatcctcatgtgaatggagattccttggataatgactatagactggatagggaaaaaggctttgcacacagccacccattgttcagtctttattagaaccaaaataagtggaggcttgcttttcaggcccactctgtgaggactgaagagaggaatgtcactggatcccaacagtatttgatgtcttcattttccaggactcttctgagagagacctggcaggctagagcagttgacacagagaaaaggcaaatcctgaaccaagtcacattcctagtaatgagcagtagagcatttctataatgataaggcacttttactgctatggttgagttaatagaacattgatgacatcacagtttctttartgaaaaaaatgaaaagaagggaagagaaaaaaagtccccagcacagcagataagata

SEQ ID NO: 912207 - DNA, 615 bp, Homo sapiens
ttaataatagccatcctgactggtgtgagatgttatctcattgtgattttatttgcatttccctgatgattagtaatgatgagcattttttcatatttgttggctacttgtacrtcttcttttgagaagtgtctgtacatgtcttttgcccacttcttaatggggttattttgttttttgcttgctgaattaagttccttatagattctggatattaaacctttgtcagaggcattgtttgtgaatattttctcctatcctgtaggttgtttatttagtctattgatagtttcttttgctgtgcagaagctttttagttcgattaagtcccatttatcaatttttgtttttgttgcaattgcttttgagaacttagtcacaaattctttctcaaggccaatgtccagaatgatgtttcctaggttttcttctaggattcttatagtttgaggtcttacatttaaatcgataattcatcttgagttaagttttgtatatggcaaatggggtccagtttcatttttccacatatggctagacaactaccacagcaccatttattgaatagggagtcctttccccattgcttagttttgttggctttcttgaagatca

SEQ ID NO: 912208 - DNA, 615 bp, Homo sapiens
ttaataatagccatcctgactggtgtgagatgttatctcattgtgattttatttgcatttccctgatgattagtaatgatgagcattttttcatatttgttggctacttgtacatcttcttttgagaagtgtctgtacatgtcttttgcccacttcttaatggggttattttgttttttgcttgctgaattaagttccttatagattctggatattaaacctttgtcagaggcattgtttgtgaatattttctcctatcctgtaggttgtttatttagtctattgatagtttcttttgctgtgcagaagctttttagttcgattaagtcccatttatcaatttttgtttttgttgcaattgcttttgagaacttagtcacaaattctttctcaaggccaatgtccagaatgatgtttcctaggttttcttctaggattcttatagtttgaggtcttacatttaaatcgataattcatcttgagttaagttttgtatatggcaaatggggtccagtttcatttttccacatatggctagacaactaccacagcaccatttattgaatagggagtcctwtccccattgcttagttttgttggctttcttgaagatca

SEQ ID NO: 912209 - DNA, 623 bp, Homo sapiens
tcttccaacctctggtttttacttgttaaacatcacccctcataaattcaagatgccaactctctgcatgaaaagtgcataaaataaattygatagttttatgttgcgtataagtctgtactcttgatagtgatattctgggatcttcctgggcattgatagtttcattcccaattttttacaattctctttaccttgtaatctctttaccttacttagtcctcaaagttgccatgaatgaggttgtattggcaaggattggatagaatatattgtggtaaccagcaacctattaatctcagtggcataaaactataaagatttatttcataattatcaaaacttctctaaggattctgttttatgttctccttagtcagtgacacaggcaaacggtacctcaagaaaacgtctggaaaaagtgaacatggaacattctattctggctcttgcatgcttccattcagatatggtacatgttctgctcaattttttttttttttggcaaagcaaggcatatgcaaagtcacatgactctgcttagtctagtgttccccacccttctgtcccaattttaccctttttttgtatagtaaaatcctttttatcctacctggctgagc

SEQ ID NO: 912210 - DNA, 623 bp, Homo sapiens
tttttctctaaacttctcttctcgcttcatttcattaatttgatattccatcgctgatatcctttcttccagttgaytgaatccactactgaggcgtgtgcatttgctatgtagttcttgtgccttggttttcagctccatcaggtcctttaaggacttctctgcattggttattctagttagccatttgtctaattttttttcaaggtttttaacatctttgccatgggttcgaacttcctcctttagcttggagtagtttgatcgtctgaagccttcttctctcaactcgtcaaagtcattctccgtccagctttgttctatggctggtgaggagctgcgttcctttggaggaggagaggcactctgatttttagagtttccagtttttctgctctgctttttccccatctttgtggttttatctacctttggtctttgatgatggtgatgtacagttgggtttttgttgtggatgtccttcctctttgttaattttccttctaacagtcaggaccctcagctgcaggtctgttggagtttgctggaggtccactcctgacgctgtttgcctgggtatcagcagcagaggctgcagaacagcggatattggtgaacagcaa

SEQ ID NO: 912211 - DNA, 623 bp, Homo sapiens
tttttctctaaacttctcttctcgcttcatttcattaatttgatattccatcgctgatatcctttcttccagttgattgaatccactactgaggcgtgtgcatttgcyatgtagttcttgtgccttggttttcagctccatcaggtcctttaaggacttctctgcattggttattctagttagccatttgtctaattttttttcaaggtttttaacatctttgccatgggttcgaacttcctcctttagcttggagtagtttgatcgtctgaagccttcttctctcaactcgtcaaagtcattctccgtccagctttgttctatggctggtgaggagctgcgttcctttggaggaggagaggcactctgatttttagagtttccagtttttctgctctgctttttccccatctttgtggttttatctacctttggtctttgatgatggtgatgtacagttgggtttttgttgtggatgtccttcctctttgttaattttccttctaacagtcaggaccctcagctgcaggtctgttggagtttgctggaggtccactcctgacgctgtttgcctgggtatcagcagcagaggctgcagaacagcggatattggtgaacagcaa

SEQ ID NO: 912212 - DNA, 489 bp, Homo sapiens
catagctggtaacataaatagagacaaaccattcttaygtacctcttgatgctagttacatgagatgacctaagaagttttctagcttaaaatgttaaatctgaaacagatcactactcttcactactctagatctaattattaaattataggaaatacatagagaataaatgaatatgttaatcataccatgggggtgcaatctgcaaaacccagataaacaacccattttcttcagtaacaactacaataataaaagaaaaaatgaaagaaagaaaggagtggtcatatatagagtggaaaagacttaagagatgtagaaacaactgaaatttatggtccatacttagatcctgattcaaactgtaaaataaaaacatataaggcaaccaggaggatttgaacactgttggatttgttgctactgagaaatgattgttaatttttaaatgtgataatgttttgtgattaggttttaaaaatagagtt

SEQ ID NO: 912213 - DNA, 669 bp, Homo sapiens
gatgcatgacccaaagctaatcagaaacacttaaccctttgaaaggaggyagcaattacttgcttatttctttttctttcctctttttaagatagaaaatacatttcttacttcatctacaatttttaagacaccttgtttctgttttgatgtacaattattttccttgctggataagttgaagcgtaatcattcatcgtggctccctcttaaagtgtagagtgtttgctttaaaagcatctcatttctcagagagacaatgcaggaacagtgactaattttgttacccattttttaatgtttttgtcctgtgtagatatttacttcatcaaacagttcttttattattagtgtccctggcccaatgataatggcttgggatattcatgtttccacaaatcaagacaagcttaaagccctcaatcatatttcctgtagaatgagatttaatttcatgtcagtttccttttctgatgaccagtgaggaagatgctctgggaaacagaatgctagtgacaggttcactttaatggagcgaaaacctgagcaatgtagaggagatggtggcattcctgggccaccacactcctcttcacccaagagaagtcaagtcataagggcttatgtttctttctagttcttacaaaaatagtactcttagattgtggt

SEQ ID NO: 912214 - DNA, 473 bp, Homo sapiens
atctaattaaacttaagagctgcacaacaaaagaaaactatcaatagagggaacagacaacctacgggatgggagacaatttttgcaaaccatccatctgacaaaggtctaatatccagcatctataagaaacttaaacaaatttacaagaaaaaaacaatccaattaaaaagtgggcaaaggggccaggcactgtggctcacacctataatcccagcacttcgggaggccgaggcagacagatcacaaagtcaagagatcgaggccatcctggccaacatggtgaaaccctgtctctactaaaaatcaaaaattagctgggcgtggtggcactcacctgtagtcccagctactcaagaggctgaggcaggagaatagcttgaacccaaggagcagagattgcagtgagtcaagatcgcrccactgcactccagcctggtggcagagcgagactcggtctcaaaagaaaaaaa

SEQ ID NO: 912215 - DNA, 674 bp, Homo sapiens
tgtgttaacaagacagggattaaaactcaaatcctgccatgacggtggggttttgggaaatagccttggctcttcttmgatgagacccaatgcaagtgcaacagccttaaaagtaaggccgtactttaggattaagagttatatcctaagaataagataaaaatgaaaagaggccaattcaaacaaattcttgataaaattaatatattcaataagtaccctattttcctgtcataaaaaaagttctttttggtggaagatgtcctcagaaaaatcctctacaattcttcattcacaatattcagcaactaaacaaaaatgtaaacatatgctaagaacaggattaagtgaatgaagatgaagagaaaaaaatagatttaaaggcagagccagaggtgatatattattgacatatcaccagattttaaaataattgcaattagtattttttagaaaatagcaaagctgaaaaatacgacacagaaaattctcgatatttttgtctgttttgctcaaattgttatttggaatatttaggaatgtaaaaggacagtctagaattgaaaaatacagtctcctacatttagaactcattgtgaaatgggaaagctcccttatcccccttgcagggtgtgacagggggagtggctcgcttcttcagtgccctgctactc

SEQ ID NO: 912216 - DNA, 642 bp, Homo sapiens
cacgtatatgctattttaaatagtgttgcaataaacataaatgtgtayatgtctttatagtagaatgatttctattcctttgggtatatacccagtaatgggattgctgggtcaaatagtatttccagttctagatccttgaggaattgccacactgtctaccacaatggttgaactaatttacattcccaccaacactgtaaaagcgttcccttttctccacagctttgccagcatctattgtttcctgactttttaataatcaccattctgactggtgtgagatggtatctcattgtggttttgatttgcatttctctgatgatcaatgatgttgagctttttttcatatgtttgttggccagtaaatggcttcatttgagaagtgtctgttcatatcctttgcccgctttttgatagggttgtttgtttttttcttgtaaatatgtttaagttccctttattaaatattagacctttgtcaaatgggtagactgcaaaaattttctcccactctgtaggttgcctgttcactctgatggtagtttcttttgctgtgcagaagctccttagtttaattagatgtcatttatcaattttggcttttgttgcaattgcttttgccatttttgtcatgaagtc

SEQ ID NO: 912217 - DNA, 680 bp, Homo sapiens
attattatatgtattttatttatatattatatatatatataatcaagcacaatagttacttttataggccagtattctttttccatttctatataagtaaaatatattggcagtatgttaaaattaattatttattaaaagaacagacttttaaaatctagaattgtctggataattaagaactgtggcatagaatttgggcagtagaatttacctctatgttcccacaaagaatgcagtggtattagtgctgtatgaaataatagaaaagaataaatgaaaattcatttaaaatgcaaataattattaaaataccttgaacttcacaataaaatatctaaaataattaggattcatgcaatttcacattcatttacttcactggtaaaccaacttaccagtgtaaagtgccttaaagaagaaaaaaagttttattattttttgtttccttaaaatactgaagtatcttttgtactttcagtaaattatgtatttaatttctcatattcatctttgataaatttagccaaagttctaattgcacattttattttcaaaaaaaaaaaaaataygtagcccaatacaatatactctaagaaaatggaaagaggagaatcattcttcatgaagcatcctatagttatcttccaggaggaataacaaaattgacatacagaatg

SEQ ID NO: 912218 - DNA, 598 bp, Homo sapiens
gcacaggcaaccaaagcaaaaatggacatatggacacatcaagttaaaaaccttctgcatagcaaaggaaaaactcaacaaagtgaagagacagcccacagaatggagctccccatctgacaagggattaataaccagaatatgtaaggaactcaaaaaactctacagcaaaaaaaatctaataatctgatttttaaatggcaaaagatttgtataaacatttgtcaaaagaagacatccaaatggcaaaccagcatataaaaaggtgctcaacatcactgatcatcagagaaaggcaaatcaaaactactatgagatatcatctcactcctgttataatatttttttacccaaaagtcaggcgataaatgctggcaaggatatggagaaaagggaatccttttacattactggtgggaccactgctacttgtatacttgtacgttgttagtacaaccactatggagaacagtttggagggtcctcaaaaaactaaaaattgagctaccatatgayccagcaattccactgctaggtatatgccccaaaggaagaaaaacagtatatattaagagatgtcttcactcctatgtttgtt

SEQ ID NO: 912219 - DNA, 643 bp, Homo sapiens
gagtaataaaaaaaattccaaacaattagttgacactgagtaaagccttgcttgcgcatatgttttatttaggtcmgtattaacctgtaacttttttcaaaggtctgtacaaattcaaattagcatctactgatgcttaacttggttttccttatttcacacaaagtattttaaagctgaggaaagtgaggtataaacaggtaaaattactatcacaagatattcagctagttactaacagagcgtaggttcaaattcaagttttcaaaatccagtgtctttgtataataaattttgatacctccaaatgatgcttgatatatatatatatttaaagtcttcaaaagaatataattacttttatcttataaacttgttattgttaaatttttaccttcaatatagcattgtccatgtctaatgcatcccatctccccaaaaaatgcaaatacatttctctgccctatgatcagagatacttggtatacaaatctaataattatttttaattctctcaccttttagtctcaaaattatatgccatattaacctatttttgatcattttaataactacctgaatgcactgatttgaatatgattcaataaaaaaaatcactatattttggctaatctgtaaacta

SEQ ID NO: 912220 - DNA, 605 bp, Homo sapiens
tgtctcttatctgcccatacctttgcaaaatttcttcctctttccccaatattctccctttaaatattgaagccttcaaaatcatcattggagaaaggcacaaacttgcctcccaggtgcacgtccttaaccttggcaaaataaactttctaaatgattgagatctgtctcagacacttttgggttcacaccaatttcctgggtctttcaggaaccctgtttgagaacaggtgagcacttcaggacaacagcacagattggcaccacaactttcccagagatattcagactcaagtaaagtggcaaaaaatgtgtattctatgcctctgtgaccccagccccctccatcttcagcggactaggttgaagtgctggtctgctcctctggtcctcttcagccagcatgggactggtgaggaaaaggttgtgctggactcctcaccgcctggctacctgaccttggtgttgagcttcaggtatgccacatagtgtgtcaggagcagcctttggaargcaccgctgtagaaggcccaggccgggatcaggctcagaaagcccgccttaaacagagagaagcatcagtgttggggaggaaggaataacaa

SEQ ID NO: 912221 - DNA, 683 bp, Homo sapiens
atgaatacacgaaaactctacacatttccccagtattcttcatttgggggatctggccaacatactgtcctgggagagaatctctaggatttagggctgggctatgcatatggaatgggtgaccagccaggggtaggataggtacagcccacttttttcactgcttgaagagaaggtgctcagtgcttttcaaggtctctggcaaagcctgaaaggcctgccaaggcgtggttgaatccccaggccaggatagatctgccaccttgttgccttttctcctgaaggaaataatgtatacagtggtccatttccaagacaaagtttcttaaatcagcttaggtcagcaaactacagaagaaacaggatatactaggcccctgcttggatagctaatgcctgcttgttggtctccccttccccaccaggtccccccacttagtttccctcactcagaccaaagaagtttagtctaaggtaaaagtttactagactgcaaaatagctcatttttgtctgttcttatcagcttgcccagctacttaggtcataagtcaaatacttgaagagcccctaagctaactaggattgcaatgcattgtgggctgcmacaaaatgcaccaagacaaccctaaacaaacacctaaagcccctgcccaacaaaagagggaactaaaaagacaccct

SEQ ID NO: 912222 - DNA, 626 bp, Homo sapiens
atgattcatgttgtcaatcttagtctgataaacaacaktatcaatttctttgaatcaaccaatgttctgaatcatagaacaggtgaaataaagaatcccatcccagcttcgtggtaagatccatgatggtcacagaaaagctagcagtgatctgccgaataggtgtggctgtgtgctccttctactgcctgcttcctggtcaccctccatgctaatactgatggactgtccactctttggtggtcactctgctgcaaataagtgttccagaagaaacaacagagaaatgagatatgtccctggctctttaggattgaaactgttgaaataactgctaatcctgaaacgaaagtagttggaatgtgctctttcctttactttcttttctaataattacatgaatctttgctgtacatataaatgggggcaccaaaactttttgaatgtacccaagattacacagcagaggaagccatgtggctaggattcagatactggaaggctctgttcactttctactgtgtctctactgttaggtatgaggaacacctcattttttcccatttaatagtgaaaccaggtctaaaggcaaagctggtcagagatatacacagaaagtagcatag

SEQ ID NO: 912223 - DNA, 675 bp, Homo sapiens
tctattattttggtgtggagtgtcctgcatatgtctgctaggtgtattrgtttatagtgttgttcaactccgctactcctttttttttatattttgtcaacttgttctattatttaatgtggagtaatgaagtctccaactattattgtagaaatgtctatttccttctccaattctattaattttagacttgtatcttttcctctgttgtttatacatttataattattacatcttcttggtggattgatacttttattggtgcataatgtctttccttgtctcttgttataatttttatcttaacgtgtattttgtctagtgttaatataaccattctagctctctttggttattctttgcataggataagttttttcagccttttagtttcaacttacttgtgtccgtggatctaaaatgaatctcttatagagagcatgtagttggattgtggttgtttttgctttttatccattctgccaatttctgagttttaattggaaagtctaatccatttgcatttttttcatagttctttctctctttttaaaaaatttttccataagttattcgagcacaggtgggatttggttacctgagtaagttcattaatggtgatttgtgagattttggcacacccatacccacgtatacactgcaccatgtttgcag

SEQ ID NO: 912224 - DNA, 608 bp, Homo sapiens
tcttcatataccggctcccaaactgaatgaacaatgtaaaaagattgataggtgatgagagatgtgtttcgtatatattgggatggggtgtggatgataaagcattggtattttaagcagttgacactagacaagagtaaacctaaagagtcctaggactcccaggtctttttcaaggggcaaaaacctgtgtcttttgagtgcctgaaagagttctaactgaaattgcccaggtgaagggaagtagcaactggcttctccatttaaattatgcccttctgacggcccgtcgactgacgtagaacatggcactgttatcgcacagcagcgagctgcagctgtctatcattttcttctcaaaatgccagtgcattaaagcaaggcctggaatgagacacatcacatttatgacaggatttgactccatattattcagtcagtaggaataatcagcctatcacaacaacacatacccacagaaacatcgtcttataacacacgcctttgaaccccaccctgcgttgctggatagtgctagcaaatgtccttctacagcctcttctccaggcasctaaagtcaaaatttcacctcagacttctctttttac

SEQ ID NO: 912225 - DNA, 635 bp, Homo sapiens
taatcttgaaaaattagaggcagcctaaatatccagcaataagagaataggtaaagatattatgatatatctacataatagaatacttcatagccatttaagattgtagtgataaggaaaaaggctaataattactgattattttctattctctagcactggggtgggacggaagtgatctaatggaattccacaagagttttaagagggttaggtcatactgtcatcaatgtttaggtgaaaattgatacctaagttaaaaatcatatgtgcatatgtaaacaactttttaataaaaatacaggctagaaataaacaaccgatggttaaattagaagaaaatgtacagacttattcttccgttttttaaaaacatgtaatcattgtattgaatatcattcttttataatccatagttaatgtgttcaagatcatgtgtagacttaaatatcaattatgagttaccttctgaaattccttttgaataggatgatttcaagaaaaaaagacataaagcagtaagcctatggtatgaatgtttgattctccttttttgtctratcagcttcctaacataacatgttagggcacagctgctcctcccagtccccgacaaacaccaaattcaggttcca

SEQ ID NO: 912226 - DNA, 672 bp, Homo sapiens
ttatttctgggctcccaccatctggcagagaactgagctatttttcctgcaactcttcccacataagaagagcggtgcctgctgcatgaatgatatgacattatattaaaattgaaatattaaggattcaatgcttcatttctggacacaagcaataaacaaaaacagattgatttctggatttcgatagcactgacttcccagggatcagactgtggtctttacactctcagatttgaaggcaattatgtgttttacatacagagtataaagtttaaaaacagcatcagcagtcttgcaaatttttttaaagatttttgaaatgcaacagctcagttagattaattttccttggattactttttttttgtgacaacccatcttcaaaactgtggaacataaaagtatagaattttagagttgaaacattttctaggtttatatttcacaataacatttttctataaaagctcttcattttatctaacaatctgtctacttttatctacaggtaacagaaatttccttgtaatttttttcaatattatcatctcatgaggataggagggtgagagcactatttaaaaatcaaatcatctaattttttgatttaaattagaaatactgaatattttgcaygtgaaataaaatgtacattataaaattgagtcc

SEQ ID NO: 912227 - DNA, 684 bp, Homo sapiens
tgtgctattgtggaaggtccttgcaagaacctagagcagcacaatcactggcaactgggacactattttttttttcctgcatgtttgctgtggaagtgaatgggaagccctgcaaagtgctgaggtccttggacctcagtttgatcccatctagagagattatggttcacattttccctggagccttcttttaaaatgacatctattaaaacctaatatgcttatccctggactcctagttccttgagggtaaagaccatgcatggttctgttttgtgtcctcacgtgttggataaaatcttgccacattaaatacacatataggttagaatgggttgggatagagttccatgtaatttccaaagttctgttttatatagcttctcaagtgcaagaaaaggagaaaatgatgcaaaattagaagcatgtttaatttctgctaactaaagcataaagtcaagtacggcaacctccactgcctcattaattgctgacccttaattaaaggtatcatacatcattaaggactgagcctaaataaagtaaatgcaaaattagataagcatagctattaccttaatatgaagctaatgtagctccwtctttaatgatcacacaaataggctctcaggctgaagtaacagatatttgcattaccgtgcttattaaaaggaagtctgtaag

SEQ ID NO: 912228 - DNA, 629 bp, Homo sapiens
cctttcaaattccattcagctcactctttcccttaataaacacttattgaacacattttccattacaactagggatgcaacaataaaaacagagcatggctcctgccctcacagagctcatgatcaagtgcaatgtcagtggttgggttgtgcaggggtggggagagccttccatgttgcagttgaagagttaccaacagtgttcatttattaaatggaaggccacatactttagtctgcttgatcactcaaaacaacgagagcatcttaagcctgtgaatggcaccatccaccttgcagttcaagttcttcagccagcaacattgctacaacctcaaatttatatagataaactgtatgtgttaatgatttaggcagatttagcttcaattaagcacagacaactagaagttgtgcccagagatacgtaagctgtgtgcccccacttagtaggaaagactttcagtgaatgaagtcttctatagacaggtggtacctaaaataataagaaatrggggaagatgaaaatcatagcaaatggaaggaataagaaagaaaactagggtggcaatgtctagtgggtagcatcaagagacattttctcttgaagtaaatatgtttctaagagg

SEQ ID NO: 912229 - DNA, 611 bp, Homo sapiens
ggagatctggtctctgctttccaggatgagatgagagaggggtgacctastcagggaagtcaaagaggtctttctctgcagaagtgatgactgagccagggtctgagtgatgagctgaagtcatctgtgaaagaggatttgcggcagagaacactgcgagcagaggccctacagcaggaggcagacaagttcaaggaggtcactatgaaggaggtcactgctggaggagaaagagcttggggaagctcaatggtcagggtgggtcagaccagacagggccttgccagccctaggaggagctgtggtcgcacccaatgccaagtgaaccctcagaagggatttacacaaagtataatcaagtgcagcatgatcatagtgacaatttgagaagattgtcttggccctggggtgaaggatagactggaaagtggcaggaatagaagcagatggaaaactgggagccattgtgtgatcccagctggagagaccatggcttggactaattggtgatgtaggaatgagcatgtgtcagctgatataagagtgataaggggggaaagtcaacaggattcagcaataggttagatactggcaacaaaggagagggaatt

SEQ ID NO: 912230 - DNA, 637 bp, Homo sapiens
atcaatttcctctgcttcctcctgtgccacacctctgtaagtatctctcatccttaaatcaaactctcttaaatttatgttccttttagccacatctctgaccaattcctacgtaatcttgcaactctcaaagyagggacatcttccctggaagtgtcatccaatctcttctctctgctgtctctagaatgccttctctcctccccaccaattttccaatactacatagtctggacctgttacattgaaatgatcagtttatgtagctgtagcctcaaaaagaccatgatctatcagaggagactctgtcgtgttcattattgtgtcatgtttcagcccggggcactgtatgtaagagggagctagtttaatgatcattgaattgaaggacacaactccatgtgatttttttttctttttttagatggagtttcgctcttgttgcccaggctggagttcagtggtgtgatctcggctcattgcaacctcagcctccagggttcaagggattctcctgcctcagcctcccaagtagctgggattacaggcatgagccaccgtgctgggcctccatgtgggtttgaaattgtctcaaatgcccatgctaatacaaaacaaaacttgttctcctctgcgt

SEQ ID NO: 912231 - DNA, 446 bp, Homo sapiens
gcttatatcagctgccacaatagaatattgccatctttctatcaggatccacatctaattccactcacagatctgaagccctttaattaaaaagtaggccagttgctaccttgaaggtccctgcaaatactgtctttaaatatccctctgatctttcactaatagggtctgtgttatttatagaataaccaagggaaaataagaattgtcagacttctgaggaatattaaatttgggaactgagctggattgaaagcaagggaacaaacatatctttaagtttttttttgcaagagtgggggtaggtttagggaggtaataaggagagtttaaaccaaagtctgtctcaaaatggtcctacagacccacctgtggctatagacccayctgtggctgcttccttctgatccaaatgttgtggttctctgacctacaagagcaagagc

SEQ ID NO: 912232 - DNA, 445 bp, Homo sapiens
aaaataatggctcttgctcttgtaggtcagagaaccacaacatttggatcagaaggaagcagccacagrtgggtctatagccacaggtgggtctgtaggaccattttgagacagactttggtttaaactctccttattacctccctaaacctacccccactcttgcaaaaaaaaacttaaagatatgtttgttcccttgctttcaatccagctcagttcccaaatttaatattcctcagaagtctgacaattcttattttcccttggttattctataaataacacagaccctattagtgaaagatcagagggatatttaaagacagtatttgcagggaccttcaaggtagcaactggcctactttttaattaaagggcttcagatctgtgagtggaattagatgtggatcctgatagaaagatggcaatattctattgtggcagc

SEQ ID NO: 912233 - DNA, 575 bp, Homo sapiens
ataagtataattaaaatataagaaatacactggaagaaaatattttataacatataaagcagataatattgagaatttgtaagttaataaatgtatgtctgttaattatacakgaaagatatgtaaattaatgaacctgtgaaacagtacattagcaaacagagtagatatatagaaaagcaaataatagaagagatttataaaaaagtgttgaaaaccagccaggtgtggtggtccatgcctataatcccagcactttggaaggccaaggtgggaggattacttgattccacaagttcaagaccagcctgaacaatacagtgagaccccatcactacaaaaaatttttaaaaagcccaggtatggtggcacaaacctatagtcccagctatgtaggaggccaaggtaggaggactgcttgagcccaaggaggtagaagctgcaatgagccataattgtgccactgcactccagtctgcatgacagaatgagacactgtctcaaaaaaataaaagacaaaaactatcctcaactaaacagaccatcaaagacatgcaagaaaaataaaatcatac

SEQ ID NO: 912234 - DNA, 619 bp, Homo sapiens
acaaatacacaagatatgtgtgctttaggaaataaacaaagaacatatttgtgttaaagagcaaaggaatgttggtggtgaaaacaccactaaatgtgkgtgttttcaaccattcatgaaaacctccgactcctataggtgctcactaagtaattgggatggaaagaggagttaatctttgatgggcatggaatatacatgcgtgcacgcgcgcgcacacacacacacacacacacccgtgtatgtatatatgtgctcactgttgagagactaccaggaacacacctatggttgtgaatacattgggtttcattcttgttgccactagggagaccacacaatatgagaatcgttgaagcatttcagtgaaaagctgtgagataggacttctttaagactttggccttggttttggtggttttggtaaagatacaaggaagcagagattttctctaaattggaggatatcagaagtcatgagacaattctatgtttgggtatgttaataaatcttttctagaaaaaggcagactagagtgaggttggagccataactaataaataagcatcaatcatattagccaagaagtaggggctgttaggtgctatatggtgtaca

SEQ ID NO: 912235 - DNA, 543 bp, Homo sapiens
taaaatgcatgcaaatagcttttatggawcctcttagcaatagtattaattgaaaattatacttccacatttattacaaaagtgtgtgtgaaggctggtattttcactacacagtgtttttaatatgacacatatacaaacacacacacacacacgcacacacgaaatcctaggttagcatccacagattatgtgaaaggtttaagacaatactctccagaagttatcaatttttcctttttctacagacttttgcatttaaagaaaacaagaaaaattattttggattcagaatcctcctaactctccaaaatattttatttttatgccaaaagagtatattggctaacacatgtcaaatgataaaaataggaataataaaaagaatggatggaatagaatacaaaattatgaacagcaaaatgaaagaggtaataatacatatttctgtgtatgtcctaaaacagcacttctactatcatgttaatgactggaaacaaggactgatgaaaatttatattttggggggttttgggttccata

SEQ ID NO: 912236 - DNA, 602 bp, Homo sapiens
ccaacatgaattggtttctattcaactgagattagagactaaaatttagagctttatttacaagctacatagatgaaaaatagacttkaaaatgtgtggttgtctaatcatttagtcagatagctaattggaaacagctgtgatagctccaaggcagatgtataccttccttataaaagtcaggtgagacctacatgatagggtacctgaaaggtaggtttacaatacagaagagggaagggctgtgtgcaaacatattttttgtaagaattgtatcaatttatgagagatgacaggagattgattttttaagaggtaaatttcagctgcagaatttaaatctgaaactttgactatccagtaacagactgagccagcatttaacaaagcaatgaagcagggaggatcttaaagtctttagctttagtttgggatgggggttggtacactttttctgtaaatggccagatagtaaatattttaggcttttcagtacacatggtctatgtagtaactacttgtgtaaaatgaatattagtacacatatgccttgggatgcaggaaatttcagatgatatcgttagcattttggtgggagcaaa

SEQ ID NO: 912237 - DNA, 571 bp, Homo sapiens
caaagttacacagtggtagttgatagagcctggtccttatgcttttttcwgtttataaaagtattatatatttattgtagaaaatttataaaatgtagaaaagtcataaagaaaaaaactgcaaattatgtgaaatctcaccacttagatataaacccaatcaagatttttttgtgtatatatcaccattcttgtttacataaaaataattttttcaaagttgaaattaaactatacacgctgctttgtaacctattttttacttatccacatttttccactaattattcttctacaacaatattttcaatcaacataaagcattctagcataggagtataccataatttagtaaaaaccatattgttagccatgcaggttttatctgtatctttgagcacagctttgaacactactgtcattatttccttcattgaaattctaggattactaggtcaacatgtgtggatatttttaaggctcttgggctttttttgatcaaattatattctaaaaagttgtactgctagatgtatgatgccgtctgttttaccacatatttgccagcatg

SEQ ID NO: 912238 - DNA, 604 bp, Homo sapiens
tttctttgtttgaaatggggagtctaagtatatctgccaaaccaagacaggtaggaagtagcagtggatcattggtgatatctatgcaaagtttcccagtcctgcaagacaggactcagaacttccttctccagttctctgatccagggtaaaatgtcacagtctcattgggcctctgtccatgttacccaaagtaggaagagagagccttcaggtgaacaaaggcaaagggacaaaccaacaaggcagtgtaaagacacaaagggtgcttgcctcactcagtgggcccccttcactgtgaaaggatagcactgaatttctgaatgacatctgcatcagatggaatcctgtcctgtggccttgctgtgctacggtaaactcaatgcagaggtacaagagttttcttaaaggtaaacgagtcaacccagcctgaaggagagtctgaatttcagtagatgggaaagttgtaggtcagtcttgagaagcagtagccaaaaaagggcttttcacaggaagtcatcaagaggttgaaagtgagcaaagtcaacatgaatgaggttgcagagtacaagtaatayagggcaagagatcgaggtatgtggga

SEQ ID NO: 912239 - DNA, 660 bp, Homo sapiens
acccaaaggaatataaatccttccactataaagacacatgtacacatatgttaattgcagcactgtttacaatagcaaagacacagaaccaacccaaatgcccatcaatgatagactggataaacaaaatgtggtgcatatacgccatggaatactatgcagccataaaaaagaatgagatcatgtcctttgtagggacatggatgaagctggaagccatcatcctcagcaaactaacacaagaacagaaaaccaaacaccacatgttctcactcataagtgggagttgaacaatgagaacacatggacacaggaaggggaacaacacacaccggggaccgttgtagggggagcaacgggagggagtgctttaggacaaacacctaatgcatgaggtgcttaaatcctggatgacagtttgataggtgcagcaaaccaccatggcatatgtatacctatgtaacaaacctgcacattctgcccatgcatcctggaacttaaagtaaaataaaataaaataatagtaataataaaagatattcttggcttaaaaaaaatagtaaggggaagagagaatacatgccagaaaggcaacaaaaaatacccttcaaaatgatttccaggcaccatcctatamtatgatatcaaaatcactctcta

SEQ ID NO: 912240 - DNA, 693 bp, Homo sapiens
ttatatccttttgagtaattatcaattgttaaaatttactgttccagtctaactttaattgtatgtataatacaagtcacatgttttaaacaatttttctgattttggaaaaactctgaaatcatagttacaaacatttgttccctttggtccttccaatgaaagacccaatccatcatctcaatactttgtacacctaccagatatctaaatgatgaactaaaattgttagaaaacctttgtttttctggttgttttgcatatcattgcagaaaaagccatggataatttaatctacaccatgcataagactgtctcatttgttcccttcctaggatgaagaaatactgacttcattgctctttcctttatctttgtggctctcattgtggtgatctctttgttcccaactctaagcccttttctcccacccaaatctatggctctttcctgtctaccctatatagtattggcagaataattcccctaaagcacttaattcgttatgtcattctcctgtagggttaccaaaaatgggttttattttgcttatcatttgagtccaatctgggcaaacctttatgagtttttatcttccrgtcgcagtctagacacctagctttgcttcctgatattccctttctcccatcttcttcagtcactgcagccacttcactggagctacacatgtca

SEQ ID NO: 912241 - DNA, 597 bp, Homo sapiens
atcccaccatttacatttttctgctcccctcctattatcagtgtccatcactctagctatgttttgacctcctctgaaggcaggaaagttgtctcatttgtttctaataaattgcctctgctgatgctgagcttccaactttacacagtgtttcaaaaattttgttaaataaaaacctaaaacagaagcagcaacaaccacaagagttgaagaactgtgctcagtatgatatatcataattttaaagagataaaaaaccaaaaggaatatgtccagggaagaatcattaggaatgtgagagtttttaaaaattctaacaaatcagaaacacttggaaagaatgtccagttaataaaacataaaattaaatgtctaccactactaagagttgtaggctagctttccagtgacatgactatccagttttgcctgagagataattcccagactatgtctcaaatgcaagaaggaataggtagcaaaaagtagagcaggtgccaatattgtcacaaaattagtggcagaaccaatcagaaatcactaagattaggtatygtaattccattataaatgacgatccataactcatatccaaaa

SEQ ID NO: 912242 - DNA, 676 bp, Homo sapiens
aacggattcctttcatcatcgtggtcatcagagctggtagagatgactctctcctttccagctgatatataggagagggtccattcagttcttcaggtggaaaccacytaagatggattgttgtgctgttgattcctttaaccagaggtggcctcagttgtgctggtgctaaatattagaaaacacctgttatattcaagaatttggtttctgtctctagacacacatattcacatatacgtatatatgtatttgtatatatcacacttcaaatcaaatcagttgtggtttcaagtatctgtatggctctaggaactgaaaacacaatatagagtttatcttaaatgcagtgaaacaaaatttaaatggccaatatactacacacaaaactttcaaattaaattttttcttgaaaataacttctctattctttttagctaaataatagatcttatatattatagtagctgctgtactctgggtggtgccccaaccacagtccctctaccaagcaggtaccccaatggcccagtttctgtgcccgttggtttctgatggctcatggctgcccccttctgcgtagaacttcccttggctgagtaagagctgcctcacccaggagccacaggatcccgcagtgaaacctacagccaatgactagcactaaacccatagg

SEQ ID NO: 912243 - DNA, 585 bp, Homo sapiens
ctccttcacttgcagccccttacccacccgcttcctcagggacttaacttgtgcaagctgaytcccagcacatccaagaatgcaattaactgataaggtactgtggcaagccatacccgcagttcccaggaattcgcccggttaacagcacccagagccccccgcgtttgtgtctggttgataaagcccaaagccccgcttctatcaccttgtgatagaattaaagcccctgcacctagtactgtttactttcctgtaaccatttatccttttaactttttgcctactttacttctgtaggattgttttaactagacccctccccccaacctctcctttctaaaccaaagtatagaagaaaatctagccccttcttcgggccgagagaattttgagcactagccgtctctcggtcgccggctaataaaggactcctgaattcgtctcagagtgtggcgtttctctgtaactcgctgggttacaacaaatagagctccaagaggcagaagtttgtatcaattatgttccttgcttgttgctgagaatctagaacggtgttaattagcacatggtaggtacgcaata

SEQ ID NO: 912244 - DNA, 618 bp, Homo sapiens
aaattcctatgtcagcaccctaatgagacaaatgacatcctaattcttccccttggcttgccagtttgtaggtactagtttttcagaagttactctaaaatatttctgattgcagctccttcctaaagagcagtatgagcagcatgtggttatttatgtattcactcttttctcctacttctgtggtgacctggaacaaattctcttatgtatgtaaagattggacagcccacctgattccgatgtcacttagatacactgtttctgtatcagcctcttctcttagaaatatatctgagagtctcctgtgtgtgtatgagaattgaagtcaagatgtgactaagattgcccaaggagatcgtgtggtttaagggggaagggagctttggtttggaatcctagggacaccaatattccagggatgagaaatgaccatttctggagctagagaaagacaaggagggtgaataattacagaaataggttagatgcacgtgaatggaagagagatattcaggaactgtttaytgctactgtagatgaaaagaagtaaggacaagtgagtgatttaggcaatcagtaagaagcttgatcttactttctatttatcactcttta

SEQ ID NO: 912245 - DNA, 628 bp, Homo sapiens
ccttcactccagagcagaatataaaattaagtacaatcaaatatggctgttgtaaattctgggaattggcttggctaggattatatgcatatgcccagacagtgcttagagaaagtgaaaaaaaagacraaagttggtttgggcaagacctggcttctcatcctccatgtcttttctttcatgtcacaggcatctaacaattagaattactaattatttattcattcactcacagaaaccaatatatgttgagcttctactgtgtctcagaccctgtgaacaagctaaatcagaccatgcccttgtgtagcctacaatctaatgaaggaatcagatggaaaaaaaaatatgaatcacattaagtattgtcatatagttcccagttttatgtctgctcttatgtgcgtggcattttaatgatgactactgcttgttgaatactgtgctaagatatctgtgccggcatctagcctaggacttagttggtgctcaataaaatgtgttgaattaattggtttaatccacacggtaaacacaagataaaggtgtcatctccattttcctaaaggaaaaacaggcaatgttgtttttactgaagccgagattcaaaccaattccatagaatttc

SEQ ID NO: 912246 - DNA, 678 bp, Homo sapiens
atgggcaagttgagatgtcaagtgacaaacaggctaaggtgagtctgccagcaaaagggggcagggaaggggccctataagccaaatctgcccacaggctcacttgatctgaccttcctcgtgtctagcccaattgctgtgacattgctgaaggattagatacgtggaggggaggggtaaaccaaactgtcacggtacaagtcagagctgattaaattccttttcttttgtggggtatttttttgtttttttttgtttgtttgtttttgatgttgtttttgatggagtttccctctgttacccaggctggagtgcagtggcatgatcttagctcactgtaatctccacctcccaggttcaagtaattctcctgcctcagcctcctgagcagctggggttacaagcgtgtgccaccacacctggctaatttttttttgagacggagtctcgctctgttgcccaggctggagtgcagtggcacgatctcagctcactgcaagctccatctcccaggttcacgccattctcctgcctcagcctgccgagtagctgsgactctaggtgcctgccaccatgcctggctagttttttttgtatttttagtagagacgaggtttcactgtgttagccaggatggtctcgaaatcctgatctccagtggtccacctgcctcggcct

SEQ ID NO: 912247 - DNA, 663 bp, Homo sapiens
ttagagagtgattttgatatcataktataggatggtgcctggaaatcattttgaagggtattttttgttgcctttctggcatgtattctctcttccccttactattttttttaagccaagaatatcttttattattactattattttattttattttactttaagttccaggatgcatgggcagaatgtgcaggtttgttacataggtatacatatgccatggtggtttgctgcacctatcaaactgtcatccaggatttaagcacctcatgcattaggtgtttgtcctaaagcactccctcccgttgctccccctacaacggtccccggtgtgtgttgttccccttcctgtgtccatgtgttctcattgttcaactcccacttatgagtgagaacatgtggtgtttggttttctgttcttgtgttagtttgctgaggatgatggcttccagcttcatccatgtccctacaaaggacatgatctcattcttttttatggctgcatagtattccatggcgtatatgcaccacattttgtttatccagtctatcattgatgggcatttgggttggttctgtgtctttgctattgtaaacagtgctgcaattaacatatgtgtacatgtgtctttatagtggaaggatttatattcctttgggtat

SEQ ID NO: 912248 - DNA, 520 bp, Homo sapiens
cttagtaatgtgccagaaactataacagatgtatatgactatttcttttattcttaatattatacctatgtggtagttactgttatctccattttataggcaagaaaactgatgctgagagaggttaagaaacttggccaaattcacacagctgataagcaactaccatatttttgcaaatgcaagcctagatattggtctcaggtgcagaaagacagattgtcacaattatacgtgtggtattggcatgtgcttgtatttctcttttccaatttaaggtcgtcaaccccaaagtctggcagagttagcttggtacacacaaaaatggggtttgggctggcagaaaaagaaacaatgagagagtgtaaaaggcagaggcatacttggtagaaacagataataaggccatgacagccacccctcatccttcccctctcataaatatggagaagtggcaaagagcaacagaagagggaatrgaggaggaggaggaggcgagtcggttgtgcatgcagcacat

SEQ ID NO: 912249 - DNA, 584 bp, Homo sapiens
agcccaaaactataaaaacccagaagaaaatttaggcaataccattcaggacatagacatgggcaaagatttcatgatgaaaacaccaaaagcaattgcaacaaaagcaaaaattgacaaatgggatctaattaaactaaagagcttctgcacagcaaaagaaactatcatcagagtgaacagacaacctaccaaatggaaggaaatgtttgcagtctatccatctgacaaaggtctaatatccagaatctattatccaatgaacgtaaataaatttacaagaaaaaaacaaccacattgaaaagtggacaaaggacatgaacagacacttctcaaaagaagacatttatgcagccaacaaacatattttaaaaaagatcaacatcactgactattagagaaatgcaaatccaaactacaatgagatactatctcacaccagccaaaatggcaattattaaaaagtcaagaaatgactgatrctggcatggctgtgaagaaataggaatacttctacactgttggtgggaatgtaaattagttcaaccattgtgaaagacagtgtggtgattcctcgaagacat

SEQ ID NO: 912250 - DNA, 614 bp, Homo sapiens
cacctatcatgagtaattgtcaaatgaaattgtaaaagtcatcacatttccatgcaaatttctttttcaatgtggcagatgcacagagggtgaaatcatcacctcctgctccacactcacagaaatgaatataaaaatgataaaatcatgttaatcgatgccaaattacactttaaaacaagaaactagtctctatatgacatgaagggtagtagctgctgtgtttactgcagatgtcctgtgctccaggtactgtgccaagcattttgtcagttacctcattaattcatcactctggtcccatgaaattagcactaccattaacctttttttataggtgaggaaacttgaggcacgcaggcaataatacatttgttcaacatcacccagcttttagaactagaacacaggttgtcacactccatggccttcactatgacacctctcataagaagggagagatatctctcaggaaggaagcagagaagaagccataacgtcaattaggcgcagcctccacagcaaggttgggataggtgccatgttccayaaagtgctgacagcccatgatcactcagggcattattcctgtaaagattacagtgaaagcagta

SEQ ID NO: 912251 - DNA, 653 bp, Homo sapiens
ttttgagtcagagttaggagctggagattaaaagcttttcttcagcattgttagagcagggtgcatcattctcaattgccagcggtcaattctctccagacacagttgatcgctcctcccacatgaaacaatttcttcacttgaattcctccaacctcgctggctgtttcttcccaatctcttttgctggttcccagttgtgtcactccccactcattactgaagagccctaaagttcagtccttgaactccttacctatcaacaatcatccttgcttatctcagctagattccgggctttgtatactgatcaattacaaatttgtatctccagcccagacttgtctgctgaatttccaacttgtacattctgctgcctactcagtatctccacttggatttctagtaaacatctaaaatgtgtcatctccaaaactgactttctaatttatcacaacacttactttcaaaaaatacatgcacaccttctgtagtttcctgcctcttaggtcacagcaactctattcttccrcagttcaagccaaaattttcggtgatctccttgactaccctgtttctcttactttctctataaagtctcttagagaaaatcttgttagtgctaccttcaaaatatcatggtgtgagttcaa

SEQ ID NO: 912252 - DNA, 565 bp, Homo sapiens
ttaaaccacaaaaaagcaggagaaaatggtgtggrctcttttttctaaagaagtaatcattggacttataaaaataacacttgatatttatctgtctgtatacacacacatacactcataaacacgtatcttcataaaatgggttaagcaagtattaattgaggttgtttcttagtgttttttgtaatttgcttcactttattttctataatgagtatatattgctttttcaataagagaaactaaaatcattgtgggaaaaaggacttttttggaataaaaatacaattgaaccaacacacagagtatgtgttgaacatgtaactatcataatatctcatgtatatatcatcaaacctagttaaataaggtgttttgtgtaaataaatcttctggagagactgttccttcagcatgagattctattttctttcagccatttcagttgatgctttgtaatgtatactaggcatttccccaccttgtttttgcagcctgttccttagtgttggactatatggccctataccgaatactcccaggttgccaaataatgtagtagatc

SEQ ID NO: 912253 - DNA, 610 bp, Homo sapiens
accctgcttttggcttactttcccctctgccattacctttactaactgaccacttacagcactgcagttctattccaattacgatgttagtcattatgggaagcacaaacatgaacaaactcagacatattccccactgaggaacagaattaagtaatatgcccaaacagacttggttgggtctatcaaggaccagtaatgttcatttggataacctcactgcaccatacctcctaacctccatagtggctcaacccacagcaatttttcttgcctttccttacaccccagactccctcaaagaagtgaggccttgcttgtcccaaactccccagctcatttggctagtgttctcaagtaaatacttgttagccctcttcctgatccccacatctgtcattagtggcaaaagtgatgctatgaaaggctagaccttctagaatcacaacacagctcttccagactctggtgtcctgcccactgcctaaactcttttgatactattttacaagcactagactggaccactcaataccaacatttgyatgagtgacatctgtgcctactaaatcacattaggataccctggaagtccttgccagggctagtc

SEQ ID NO: 912254 - DNA, 551 bp, Homo sapiens
gttgtcaatatgcctgtggcccacagttccagtagaggccagagggtgcctgccaggtattggagcttcaagctggtaccaggagtggtttaaagaagggaaacgggagaatgggcctgggtgcggtgatttggagtcattctttttgcatctccataaagtttttcctagtatctcattgtaatattgctgtcctaggcaagttaattctcctactgggtctgtaaaggcttttccccagtgcacaatgcagaatctcttgataagagaggtttttaagagccaggtgctcaagcttgtgagtgttggttcgggggaggggatggtcagagtaaagttactttgaggcattagctccttttcctcccatggtgactggtccccatgtttgttcccccacagacgtaacatgaagagatgggcaagctgctggttatgctttctgccagttgggtgaatagwtttttggctatgggagggggttcaggcaatttctggttgacctgctcatagaatgacttgaaaactcagaattgttgggttgaacaggc

SEQ ID NO: 912255 - DNA, 633 bp, Homo sapiens
gaaagatatattttaaggtctgaagttgagattttcttttctgttacttggaaaagatttgctggatgttgaatcagaatctcagcagtacctgcccaatgtctgtggtaagtcagcctcacaggtagtaagaggaggaagatacagcatctttctacttcctgttaaaattggagcctaggctctcatccatcatggagttgattgaaaggaagaggacagtttaacaaggatggaaactgttgctatgttaacagcttccttaggctccagttccagcttaagacagtgtctatgccaggtattaacacaactacgcaacccaaattcatggtatataatggaaggagaatgaagaaactgaaccttctaggttttggtccagaatgtattatttatgcaactctgagaaaattgttgaatctcttaaaacttttgtttcatcacctatacagtaagaacctcttgttgcttaatttgctttctgtaaataattattgaaactatatacatatatatatatatatatatatatatatatatatatatatatatatatatatatatatatarcacatcagagggtagacagttcaaatgaatgtaacttgggaattctggaaagatggtgac

SEQ ID NO: 912256 - DNA, 623 bp, Homo sapiens
gaaatgctggcccaggtttgccttgattctagtaaacaataagagagctgcctgtccagaatcggggacgtcccacagggagaatcctgtcagtgtgggattgggtgggggttcaagcccaggggacttgtggaatattcctctttgcctttcaccatgattgtaattttcctgaggcctcctcaaaagccaagaagaagacaacatcgtgttttctgtacagcctgtggaaacataagccaatgaaacagattttctttatatattacgcagtctctggtatttctttatagcaatgtgaaaacagactaatacagtatcagagttaaatacttgatacgaggacgaggtaaaaagagacggtctaattgggccagtatatactttttgccctttcagattcattctccagccatctctctttaatattttgcttcagaggtctgagctttatggactacatggaggaatgtcaccttactttctggcttctgacagagtttggctaataagaakccctggaaagtcatcagagggagagaagcagaaggtaggatatgtcccctggctttctacctggaagtttgcatcaggctagctgagtttttccagcaaatgtcact

SEQ ID NO: 912257 - DNA, 719 bp, Homo sapiens
gtccattccaagtacccaattcagaaattaaaacaatgctttctaattttaatgttgatttctttctttcatgaaatgaataaygttacatccaccattaacgtgccttccttctgccagcagtttttgagaacttatttggttacttctgagagacacaaagatgaagaaagcacactcccccagaacctcatcaataagtagccacgcatttgacagaatgaggtgcacattgcaggctaacgattcacacacatacatacacactgctgggggcacaggcagattcaccagcacaccctgcaatcattccgacttccaacaaggttatcccaaatcataaatatgtatatgttttgcctaaaaccaaccctcacttcctcccaccccgtccctagtatttcctgttttcatcaatgacacactggcctcaggcataagtgagaggcaggtcttggtttcaggctcccctctcttctatcaaacccttctttcctgggtatgcctatatacattatttcaaaaacccttgtaggggagatactaattattcccattttacagataaaggaaataaagctcaggagttgaatggacagtccaaggtcatacagtaagagactacctcaggatttgaatccaggtctctccaattcaagagtcagtgcctgtcccatggtgtcagagatacatattttttaaataatttttttattagc

SEQ ID NO: 912258 - DNA, 680 bp, Homo sapiens
aaaaaaagcccaggaccagatggattcacagccaaattctaccagatgtacaaagaggagctggtaccattccttctgaaactattccaaacaatagaaacagacagactcctccctaactcattttgtgagaccagcatcatcctgatagaaaaacctggcagagtcacaacaaaaaaagaaaattacaggccaatatcccttatgaacattgatgcaaaaatcctcagtaaaatactggcaaaccaaatccagcagcacatcaaaaagcttatccaccacgattaagttggcttcatccctgggatgcaaggctggtttaacatatgcaaatcaataaatgtaatccatcacataaacagaaccaatgacaaaaaccacatgattatctcaatagatgcagaaaaggccttcaataaaattcaacaccccttcatgctaaaaacactcaataaactaggtactgatggaacgtatctcaaaacaataagggctattcatgacaaagccatagccaatagcatactgaaggggcaaaagctggaagcattccctctgaaaactggcacaagacaaggatgccctctctcaccactcctattcaacatagttttggaagctttggccagagaaagaaataaagcrtattcaaataggaagagaggaagtcaaattgtctc

SEQ ID NO: 912259 - DNA, 633 bp, Homo sapiens
tatggaaatgctgctggctggtaccgaagggaacagagggataaaaatgaaggaagtctgttggatttcttgagattctataaaatgggtcagtagagctatctggctgtgaacatgtgttcttcaagaagagggaagaatgaccctgaagatgattgagaaggcaaaggggctactattgctaccacaggaccagagggctcaggcctgaggagtcaaggtaggctacttcttagggctgagggaggtgggctaccacactggtgggctcagaagacagggctgccacccctgttaggtgggaagatggagaatgaagctgaagaagattattcttgagccttaaaatctaatgggatttgcctttatacgtttcagacctgcttaggatccatcaccccttctttctgatttttttggaataggaatgtttatcctatgcctgtctcaccagtggtgtattttggaagcaaataacttgtctagtttcacaggttcatgctggagaagaattttgcctcagggtgaaaccttgagtatgcctgtacctgatctaaatgatatttagatgagatttggggcttagagttgatactgaartgggtcaagactttggggctgttgggatggagt

SEQ ID NO: 912260 - DNA, 575 bp, Homo sapiens
tgggaccctgtacctggagtcgtctgccacagggcaggtcagwtgtcccatggccgagggctcaggagctgtggctggcggctggtagcagcactggcttcttaccttggccgtggccctaagttcccacatgtgggaagtcagcctagtgtgccatgtgggaagtgtccaggttcttcctggggacactcttctgcctacatatgtaaagagacagatttctggggtgagaaaggcagctccagcttttagaggagccaggaaatctccccaaggctctgacctgaagaaagaacactctctagagaacaagggagctcaatctttttttagttctgatttctatctccgtcattaaaaatcaagctttaaaaataagaccctatccattatgttttaataatcatcactcgggcttaaagtgactaataataaaaggtttttgtttaaatattaaacactaatggttttgttctgctcttgagaactggaggcagacagttgaaaatgggttcacagtgtgccctggccctggggtctgggctgatgactaaggtgacccctgggaaatggca

SEQ ID NO: 912261 - DNA, 617 bp, Homo sapiens
caatctcatttgtggtttttaaaaaaaattgccctgatgatttgtgcagaatgtactatagaggagctagaattgaggtagaaaaagcaattaggagtcagcgaatcataatctatggcagggatgaagagggaagaagatggtaaatagtcaaatttcagattttttttttaagagtagtgaaatgcagtagtgagaagggaggagtgagttaaaacaaggagtttgatgtctaactaaccatgagcaatcagttgagaataactcactgcctttcgaccaccctcagatttattttgatgttagatagatcagatgatctttctaatggattagatgtgaacagttagggaaagggacgatttaagggtgtatcctgggctttttacctgaataactggagagatggtggtaccgtttactgagatacagaagccttgaggaagaacaggctctgtttgtatgtatgtgttttggggaagtggraataagaagagtgttcaaataactgttttggctacattaaagatcaggtgcctattagaatttcaagtgaagtgttgagtagacaattggatatgtgagtttagaactcagcgtagctggaccagagattg

SEQ ID NO: 912262 - DNA, 619 bp, Homo sapiens
atttccagaataatttttaagggtggcatttctgttgggatgggcttaaaaagagtttgctgggtgcgttgcctatattgaagcaaatctccttctaggyagtgggaaaatacagaaaatgacgggaagaccaagcagaagccccagtcggctttgtctggattaacattttaaggtaataagcatctccaggctacctttgcctctaaaaggcattatggcaccatgtacactgcaggcactcaaaatccttcgttgattttatttggttactgactcttatggtatcactgaaggcatttgaaagagattctggagtccttttcccataaaattcattggtgccataacagggtcattaacctgaaaaggagaaagctagtattgagctctaggctttccacttacgatcttgggtaaataacataacttctcatcattgccaatctctctgtgggtaagaactcaacatttctgcctggtttagaacttgaattatttcttggatccattatttaatatttataccaatatgattagctcttagaataagaaattataagattatgtggtctgggaaggtaagcatattatggtgagttaaatgtggaaattccct

SEQ ID NO: 912263 - DNA, 619 bp, Homo sapiens
atttccagaataatttttaagggtggcatttctgttgggatgggcttaaaaagagtttgctgggtgcgttgcctatattgaagcaaatctccttctaggtagtgggaaaatacagaaaatgaygggaagaccaagcagaagccccagtcggctttgtctggattaacattttaaggtaataagcatctccaggctacctttgcctctaaaaggcattatggcaccatgtacactgcaggcactcaaaatccttcgttgattttatttggttactgactcttatggtatcactgaaggcatttgaaagagattctggagtccttttcccataaaattcattggtgccataacagggtcattaacctgaaaaggagaaagctagtattgagctctaggctttccacttacgatcttgggtaaataacataacttctcatcattgccaatctctctgtgggtaagaactcaacatttctgcctggtttagaacttgaattatttcttggatccattatttaatatttataccaatatgattagctcttagaataagaaattataagattatgtggtctgggaaggtaagcatattatggtgagttaaatgtggaaattccct

SEQ ID NO: 912264 - DNA, 619 bp, Homo sapiens
ttgattcaagtattaaatgtattagtgattgcaaagcacttagaacatttcatggcatttagtatagccccaataaatgtctgcaattactatgcaaatatttattcatgaggcttggggctggacctcaccaccttttcataacaagcttactgggcctgggctggtgggtagagggaaataaatgaactaatggagatattagaattgaaaaagttctgtcattccaaataatagaatagagtaaatggtcaaacattttctctttgatattcagggagagcaagtgtaattgaaaatgatgacaacaccaaaaatgcttctgtttcaggattttctagttgaaagttcaggagttgaggataagaattatgctaatgaagattcttcactttttttcatttccccagtatcccaacctgtttactcttctgattgctgcaggacattcagtgtgagaaaaataattctatagataaactaccracaaaccattgatttcaaagctctttaagaactgagtgattgatgcctgtcattaattcatatcctgatcacaataaggacgttttggctgccatatggagtgtgggtggggctcaacaaatcctccccacag

SEQ ID NO: 912265 - DNA, 611 bp, Homo sapiens
acagcctcaggcttgcactcgcataataatagacagtgctggtacaggactggcaaaagcattccaattctcctgtcaacagtgtctgaatttcttttttaaaacagaaatctctgacagatctcaccayggacctctgattagccagatgacatgtagataaggtttcaagacctactacagggaatgcaatcgcagggtctgtcaccaatcttctttttgtactgcaacttcttcattcaaaggtgtcaagagggcaaatctctaacaaaggaactgcagcgagagcagttgcagagcccaccacaaggcagaagagacagagtcggaaacagatgtgataatgacaacagcagagctgaagctgcagcccgaaagcgctccatagcccactaaaacatcacagggccagagctccctatggcggaagcccccacgccacccccaaacctcagtggcagtctggtccagatccttatttccagataggcaaaaacattttctgatttttcacagataaagggagaaacctaatattctttccacatgccttgtaaatgtactagttaaaaacttattacttatatattacctacatctctctagatgtc

SEQ ID NO: 912266 - DNA, 667 bp, Homo sapiens
tgaattttgcaggtgataaagtttttaaaagcggaataagaaggaaagtcacttcaggaggagggaaaagtgtgaaccaaatgcagttataatttggaggrcaactaggggcttatggaggcttttcatagattttggagtggtgagttagaaaaactatcttgacagtgatatggaagacgaagttcagacaaacatgtcagcagatcccataggattctatgggtctggtctggtcttttcttttcttttcttcttttctcttctcttctcttctctctttctctctcttctcctttctttcttttcttttcttcttttctgttctcttttctcttcttttttttttcttttttggcttaggtgaaatataacaaaggcttaatataaatctctttaaacaacaaaagggaagttaccactgatcccacagaaataaaaacaaccatcagaaactactatgaacaactctatgcacacaaactagaaaatctagaagaaatggagaaatttctggacacatacagcctcccaagacgtaaccaggaagaaattgattccctgaacagaccaatgacaagatctgaaattgagtcattaataaatagcctacgaatcaaataaaagcccagaaccagatggattcacatctgaattttaccagaag

SEQ ID NO: 912267 - DNA, 602 bp, Homo sapiens
cctgggacagagttcatataattatctttgtctctgtcattcattcacttaacattcattgaactgatacacactgaaccaatatatttaatatgtatcaggcattgttctcagggtacaaaaatgaaaggatttagtctgcaagaagctcatagtccatgggaagagagaaatccaaatagtccattacaatacagtgagacaagtacattgctagaatgtattggagcctggaggaaaaaaccctgcctagggaaatggggaagtctttcacagagcaggtaagacttaaaggatgagcagaaagctgttgcctgtaacaaagtgctacagtcagtacttttatagatagaaaaattttatagactttttcccactctggagaacagaattattcaaggttctttgtaacacagtatatcagctttacgtggaaactctgtgtaaatgtcttacactcttggaatgcatggaraaagtgctcattttctactgtactgtggagaatgttttcattctgagtactatctattatcccaataatgttgtatagtaaaccatcccaaaactccatagcttaaaacagtaacaatttattattt

SEQ ID NO: 912268 - DNA, 641 bp, Homo sapiens
gggtaagagaggaatctgtgagaccacttaggaagcttttgtggtccataaaagagattatggtggtctaatttaaagtggtattagtgaaggtggaaataaatgaacaaaactgaggatatctttggacatagagccaatagaacttagagatgaaaagaaattaggaggcagaatgaaggtaaagaaaacaaaagcttagttttgagtttccgcagctagattgcttgtggtaccatctactaagatgcagaggattgagggaaatacatacttttggtgatagggtgtgaatagggtattaatatcatagaaagagatcatcaacatgtatattaggaactacttgtaaggtcacaaattctaagccagtttcttccactaaggctaataaattttttcagagtttgtagaaatttctagaggtacagtaaagccttcagtagcatcatgctatccatgcctttcagcagttctgcaattgataatcctatccttcttaagactctaaaagctttgtgaaaatgaaatgtggttcttcatataaagaccggaagccctactagaacagtcacaggccacatgrcaattattgagagaagggatatatcacagccttcagacacggaagatatgggatc

SEQ ID NO: 912269 - DNA, 403 bp, Homo sapiens
ataacacgaggtttcccaaccttaaggagccttgtctagagaaaggtgatcaacatgttcaaaaccaccacatgtgctggaatgaaggcacgggcaaaatgcttgatgctcccaccgggcaaggagccaacggatgatgggcaggaactgactgggccaaggcaggggaggtaattgctgctgccgctaacacatattaaatgctgactctagtgacagatactaggcggagtgctttacagacgtgatcacacttaattttcacaattgctattatctcactaattcagatgtggcaagcccttggttaaattaatatttttcccaagaacgagcagctggaatggrgctcagaactctcgttctgcacagaggagggtacaagccccaccgtcgtgccatc

SEQ ID NO: 912270 - DNA, 610 bp, Homo sapiens
tgacatctagagagatgtaggtaatatataagtaataagtttttaactagtacatttacaaggcatgtggaaagaatattaggtttctccctttatctgtgaaaaatcagaaaatgtttttgcctatctggaaataaggatctggaccagactgccactgaggtttgggggtggcgtgggggcttccgccatagggagctctggccctgtgatgttttagtgggctatggagcgctttcgggctgcagcttcagctctgctgttgtcattatcacatctgtttccgactctgtctcttctgccttgtggtgggctctgcaactgctctcgctgcagttcctttgttagagatttgccctcttgacacctctgaatgaagaagttgcagtacaaaaagaagattggtgacagaccctgcgattgcattccctgtagtaggtcttgaaaccttatctacatgtcatctggctaatcagaggtccrtggtgagatctgtcagagatttctgttttaaaaaagaaattcagacactgttgacaggagaattggaatgcttttgccagtcctgtaccagcactgtctattattatgcgagtgcaagcctgaggct

SEQ ID NO: 912271 - DNA, 525 bp, Homo sapiens
aaaaatctcatgagattttttcctcagtgttctgcctaattcattcatgcatgattcacaatcacagtctacaacaaattaaaaatctattcactctcawtttacacatcttatccaggatacggcataacttaatatttatttccaagcctatatgtaaccactgtacctcaagtatagatgggtttctaacatacatattaacagcttatgtttatttccaagcctatatgtaaccactgtacctcaagtatagatgggtttctaacatacatattaacagcttatgtgccagttttgataaaggaagccattaaagtcaaactgttaccatataagccaaagccctctaccttgcatcacatataaaaagatattcagattgacggaatatgtataaatatgaaaaaagaagaaaatctaacatgttaactctttacttttaactactgtaatatagctaagcatcaaaaataaatattattcccaaaaagcaacatgaatagagaaaaacaggtgaattat

SEQ ID NO: 912272 - DNA, 525 bp, Homo sapiens
aaaaatctcatgagattttttcctcagtgttctgcctaattcattcatgcatgattcacaatcacagtctacaacaaattaaaaatctattcactctcaatttacacwtcttatccaggatacggcataacttaatatttatttccaagcctatatgtaaccactgtacctcaagtatagatgggtttctaacatacatattaacagcttatgtttatttccaagcctatatgtaaccactgtacctcaagtatagatgggtttctaacatacatattaacagcttatgtgccagttttgataaaggaagccattaaagtcaaactgttaccatataagccaaagccctctaccttgcatcacatataaaaagatattcagattgacggaatatgtataaatatgaaaaaagaagaaaatctaacatgttaactctttacttttaactactgtaatatagctaagcatcaaaaataaatattattcccaaaaagcaacatgaatagagaaaaacaggtgaattat

SEQ ID NO: 912273 - DNA, 671 bp, Homo sapiens
ctccagaataccagtgatcagcccgattatgaaatacaatctttaataaatcatagattttcagratcataggttttataatcatgaggacttatgttgaagaagccaaagttgcaaacaggtattaccttcattaaattgggatcttacttaaatgagagataatcaatgtaaatattaatacagtacaggaaaagattaatatgatactctatgattgtttatatgtcataaactatatttccgtgaagttggtatcacattcagaaataacacctataaaaagaaatatttctcataatatatagcttttaattttaaagattttgtactttataaagatgttcatgcatgttggattgatcttaacccaactagattcaacattttaatccttacttagccaaaaggtacatgagttgtgcctgatttgtaaaaattttgatttgactccttttagattttacatttaaattcccaataaacccaagaaaactcgctttcaaggattagaatcactgtatgaaaaaatttacattgccacagaagatactcaatgacaatttagaatcattcaacaaaagtttgaataatatgatcaagaataggttgattgacacttttgcataaaactaatagtacaatgatttctttcgtggacctctaaaagc

SEQ ID NO: 912274 - DNA, 714 bp, Homo sapiens
gtattctggtcaaattggccttctgttaatcaatatccattactttaggaggggaaagaaaggagaagctgcctgtcatatgagagacaagcacggcattcaatgcaacaaaaagtgtaagaaaagctcagcatccctaggtttcttgtgtgttgatcagttaacgcttagggaggataagtgaaacttggagacatgcttgaacagttttcccaaattgttccataaatgttggaaatgttcctctatcaattctgttaatacatacatgggttatatatatatatatatatatatatatatatatatatatatatatatatatatgtatgtgttaaaacatgtgcatcacttctatatgcaaatgttcctctatccattatgttaatactacgtgttgtattgagagggtgaaaattttaagaattgagttgtgtagaggtctttaataagtaaaaacaaactctgaatctcagaatggtgtttttatctggtttcctcacagttgtttcttcattgccagatatttgtctatttcttagccttttcagataatgagctcttagatttattaatttgatatttgctttctaattcattaatttggtcttaatctttattaatttttcttcctgcttttcttgtgtttttttattgcctttttttaacttcctgagttgaytgcatcacttattttcattcttccttgttttt

SEQ ID NO: 912275 - DNA, 488 bp, Homo sapiens
cgtctactatgggctaagtaccatttaaaacattatttaccaccacttatcagatgcaagttataatcattytttatgggaaaactgagtcttacaaagtttagacaacttgatgtgggccaagttttggacctggtataagttctgtgaaggcagatattatagctgttttgttcagttggtacccctgggggcttgaagagggtctatcacataataggtgctccgtaaacatttgttgactggattaatgattcccatatctgaatgttttttactccctctttttcagtatttcatattgagattatttaagagtttgggccatggctctcctagttctctataatggatattccaatgggttctgagagtaggaagatattagatgaaggtagtaatgttgaactggtgagctggaggtccttgcaggtgggaataggctaaggctggcataattgtatagaactcacagcagacctagaaag

SEQ ID NO: 912276 - DNA, 685 bp, Homo sapiens
cctgggctcaagcaatcctcccacctcagcctctcaagtagctgggactataagtgtgcaccaccatggctggctacwtttttgttgttgttgtggagatgagatttcaccactgttggccaggctggtcttgaattcctgggctaatgtgataggccagccttggcccctcagagtgctgggattacaggagtgagccactgtgcctggcctatatatacatgtttttataaaaatgtttcatttatactctttctgtctgctttttttttttttttttttttgagatggagtcgcactctgttgcccaggctggagtacagtggcacgatcttggttcactgcaacctccgcctcccaggttcaaatgattctcctgcctcagcctccctagtagctgggatcacaggcgcccaccaccacatctggctaatttttgtatttttagtagagatggggtttcaccatgttggccaggctgatctcaaactcctgcctcaggtgatccacccgcctcagcctcccaaagtgctgggactacaggcatgagctactgcccccagcctgctttttttttgtttgtttttttcttacacttaacattatatcttagaggtctttccaaattgttatattgatttattttttttaaaaaagctatgtggcgttcaactgtatgaatgta

SEQ ID NO: 912277 - DNA, 632 bp, Homo sapiens
cattggctaaaagcaatcattccaactatacaacctcaccgtttgcatgtagggcaaacaagaggctagtgggagaaattgagagaaagatttggggaatgagatgtgcataggggctggcacgtgcccaggaagcacctgagaaggccacatctctgatctttggctgacctggaggttctgtgcgggcaggaagtggagctgcagtggtgacatcagctgcccgcctgagtgcggcaggggcaggagtgcaccacacacacaaagccctcagcactggggagagactcgccggctcaaggcattgatgcaaacctctgtccaacctcacctaactgagcagagactcaagcctcaacatagagtcccaccgtgtcctctggccccctccaatcctctcgtccctcccatcctcctgctgttataggagataagaaagaaatcatttaggtagatagggtaaaaatagtccacggcaaaaaattttccttctaacaaaaaacagctcagaaattgctctctttctaaccccaagcagttcaaagaaatcacttctcttctaacaagagcagtctagaagatcaataaaacacargtaagcaactcgggcacacaacttcccctgcgcaggc

SEQ ID NO: 912278 - DNA, 618 bp, Homo sapiens
tatagtagcaactacccatcccctactcccagccacgtggcatgcaggtgtgcacatatttctggagcaacctacacacagcttgtaggagccagggtaggcaacaatggaccctgtcctccaaatatcagggattcatgctctctaatcactaattgctgcttttaatcacagaagtgcagacaaagaggtgggtggccattgctgttctacttcccagtattgtttcaagtccctcccactctggctaaagtgacttccagggcattttaaggtctggttctcttttctctccccttcatttttctctttttcctctttttggggactaggacattcaaaagcaactgcatacacagggaaaagtagaaagtgactgtgcacacccagggaaagttacagactcagaaaagacctatgaagaccttaagtttatacctcaggctgctccttggtacaaagatagcctacaacaataagaaacaaaaacaaaaccaataagcactaacaaaaaaagtaaactctgggggaagggggatatctgatatccagtattaccacatattagattcaaatrtccagtttgcaacaacaaaaacaaaaaaacacaaggcatac

SEQ ID NO: 912279 - DNA, 657 bp, Homo sapiens
aaatacaaaaattagccgggcatggtctgggcatggtggcgcacacctgtaatcccagctacttaagaggctgaggcaggagaattgcttgaacgcagaaggtagaggttgcagtaggtggagatcacgccactgtgctccagcctgggcaacagtgcaagactccatctcaaaaaataaataaaaataaataaaaacaaaaatcatattaaataattaaaagcctttgcaagctccaaattaactactctagaattcttctgggaaagacaatggggacagccccatgctgcagctcagtagctaaagttttgcactttcacagtggcggtctggttttgattctccacctaggaagtaagttctttctggtttaatatgtgcgtgaccttgtctattctcttctccatggactgtcttaaattttcctttctctaagcacctcggtggttgtctttggtgaagttcagaagctagaaatattgactgcttggcatggataaagtagggtaataagagatctgaaaggattttttttaaagagcactgtgkttaaaagtcagtttaattaaaagtggataaacaagctttagatatatttaaaatgcctttacgtttttctcttcttggaacttgtttttctggaaaaaggttttt

SEQ ID NO: 912280 - DNA, 582 bp, Homo sapiens
tttctcttgttattctcacagtatactttgttcgttttctcaaatttaagatactstgtgtgtgtgtgtgtgagtgtgtgcatgtgtatgtggttttacatgctttctttttttttttcagcagactgtaaatttcatgaaataggatccatgtccctttattctctcctgtttacctagtagaaggcctggcacattttagattgtcaataaatatctctagagtgaatggatgacagagtgtgactagaatggcatttcctaaaatgaaaggagatctatgcctagtgtatgtactgttctctgtgaaggcagtattacctatctaagggtgtgtcagaaaagcagagtaggatcataaaatagtttgaaaatatttctctgacattggaaagttatgtgtgggctacacccagcaggagtaattgttggaaattgcttgcattatgatgaatgataaatgccaggagaataatgaataattccagataagagaataagctttgtacttgtttagaacataaacctgcattcttttaatgatagcagccaaggataaattaaaaataaaaatcttgtttt

SEQ ID NO: 912281 - DNA, 629 bp, Homo sapiens
aagtctcccactgttattgtgtgggagtctaagtctctttgtagatctctaagcacttgctttatgaaaatgggtgctcctatattggrtgcctacataattaggatagttaactcttcttgttgaattgaaccctttaccattatgtaatgcccttctttgtcattttttttttatctttgttggtttaaaatctgttttgtccaaaactgggattatgacccctgcttttctctgttttctatttgcttggtaaatttccctccatccctttattttgagcctatgtgaatttttgcatgtgagatgggcctcttaaagacagcattccaatagcccttggctctttatccagcttgccattctgtgtcttttaattggggtgtttagtccatttacttttaaggttagtattgtgaatttgatcctgtcatcatgatgctagctggttattttgcaggcttttttatgtggttgctacatagtgtcactggtctgtgtacttcagtgtgttttggtagtggctggtaactgtttttccttccttcatatttagtgcttccttctggacctcttgcaagacaggtgtggtggtgaaaaattccctcagcatttgcttgtctgaaaaa

SEQ ID NO: 912282 - DNA, 668 bp, Homo sapiens
ctggaaagcagaacccagctggtaggatcccagaatctgtgcaattaagcccctctgccacaggcatgctggcactagatgaagaattcaagaaataacaggcaggcctttcttctttcactctgctctctcggccaacatctttatgggggaaatgatattgtgtgaaggcagcataaaatgctcagggctggctctctgttagacaaatggaaaatcaacacagtttgtgaatgggggaaagctggatctgatttcctttgattgactgtgtctgctttgaggggaaatggctgcagaatgagccacatttaacctgggatcaataaccacacagcatgatccgaggaattcaggctaaatggaaactggctccatttggggccagtgtctggggcatctcggtcatcgatagccagccacctgatgtcatcttgcccaactgaacactagaacaaagaacattttcctaccatgtgggaggcgaatgtttagaaggccgcatagtagaagataatcctgcaagtggccggggagtgtgtgctttccttccagtttctgttccacactttcygggcctccattttgcaccagctctcgctgtttattggggaagggaaacccacgaagaggttaaagcaatgtgacaagtgatttagcagaggtat

SEQ ID NO: 912283 - DNA, 602 bp, Homo sapiens
tttgcccatttttgagtcgggttttttttkttgttgttgttgaggttttttgagctgatttttgataaggctgttgcagtactaagcgatataagatgctgtggatggtagactgtcacctaccttgactaacagctcattgttgagtgacttttgtgataaaaggtgtacctattgtcagattgcaaatgatgtggaaagtaaaaataggacacagattagtgtcaaggaccacggtactgtggctggagtcagctgattgaactggaatagcagtaccagaccctggaaaagtgtcatcagcagtgagaccccactgatagcctgaagaaggttgtctgatgcaaccaatctgccagtagcatgtgatgtggttcctctcaccatgagacaaatgagtccttttccaggactcataagtctaggatgaggtggcagcctctgcatcaggaacatagagtcttttactttgtatccactctatgatgatagatatgttgctgtgtctggtatgatgatggatccagcagcagtggtagcagtcttaaccgtgcagcttgatcagtggcttgattataattggtctcatcagacaatggacc

SEQ ID NO: 912284 - DNA, 688 bp, Homo sapiens
tacaatgaggaaaagatagtcttttcaacaaatggcactggaacaacttaatatccrtaagcaaaatcaaaaatctagacacagatcttacatcttcccccaaatttagctgaaaatggatcatagacctaaatgtaacacacaaaattataaaatttctagaatataggagaaaagctagataaccttgggcatggcaatgactttttaaatacaacaccgccaatggcatgatccatgaaaaaagtaattgataagctggacctcattcaaattaaaaacttctgtgtaatgcacagtcaagagaattagaagacaagccacagactggggaaaaacatctgtgaaagacatatctgataaagtactgttaccaaaatatacgaagaactcttaaagcaacaataagaaaaggaataacccagttaaaaaattgacaaaagatctgaacacacacctcaccaaagaagatgtacagatggctaataagcatatgtaaaaattgctcaacatcatatgtcattaggaaatagcaaattaaaactgataccactacctacctattcaaatgcttaaatacaaaacactgacaataccaaacaatgacaaggatggggatcaataagaattctcatttattcttggagggaaagcaaaatgaaatagccactttttagaagacaggttg

SEQ ID NO: 912285 - DNA, 647 bp, Homo sapiens
cccatgctattagcataaccgtgcaaaatctatggactcactgttacttaagtttatttgaatttagtactcttttaattcagatttggtatactttatgtgtccgtgttctcatcaaacatcatttcccagtatgaagtatataacacttataaatatctactttgtaccaaagtagatgcgtatcacaaattatccaaaacaaggcttgggccaggcgcagtggctcacacctgtaatcccagcactttgggaggctgaggtgggagaatcggttgaggccaggagtttgggaccagcctaggcaacatagcaagactctgtctctataaaaaatagaaaaaattcaccaggtggggtggtgcatgcctgtagttctacctactcaggagcctgagggaggaggattgttcgatcccaggagttcaagattacagtgagctgtttattgtgatagtgccagtgcactccagcctgggcaacagtgtgagaccctatctctaaaaaatctaaagcaaaaaagacgtttggagaccaagtggcagctgggcaactagacaatgctagagagtaaagagaacagaatatggggggtgaggggcaygtgggagaagaggcttagaggaggaaggtaggctttgctgtga

SEQ ID NO: 912286 - DNA, 555 bp, Homo sapiens
tcaggtaaactttctctgtctaggtcagattcctttcatatatactctcataaagccagattcctttttcagagcacttttctccatttataattaaaaaatcatgtwtgcggttatttcgttaacatctgtctctctcactgtgctgtatgggctctaggagagagaagatgggcacctttctgctattcttgtatcccagcatccaggacagggtctggtacacagtgagagctcagtaaatatctgctgggtgaatagaggcatctgcatgataggaaagaaagatttgaagagtgttaggagtgctgaagatctttctgccaattctaagacatgcacagacctttggtggaactcctccccaacaaggaaaggcatggaacccatgcccactcatgtcaagacaccactccccatcccacccctagcatgcactattttccaagcacaccatgcttgggaggaatgctggtggcttttaataaagagggcctcagctgtcagaggcaaccgggctatgtctttctcagtcatgaggcttttcagtttcat

SEQ ID NO: 912287 - DNA, 581 bp, Homo sapiens
tatgcaaatcaataaatgtaatccattacataaacagraccaatgacaaaaaccacgattatctcaatagatgcaaaaaaggccttcaataaaattcaacagcccttcatgataaaaactctcaataaactaggtattgatagaacacacattattggggaaaccagcccctgatatttcaacataggttttctattttccctaagtgtcagtcggtctgagaaataaagggaaagagtacaaaagagagaaatttaaaagctgggtgtctgggggagacatcacatattggcaggttctgtgatgccccctaagccacaaaaccagcaagtttttattagtgattttcaaaggggagggagtgtacgaatagggtgtgggtcacagagatcacatgcttcacaaggcaataaaatatcacaaggcaaatgggggcagagtgagatcacaggacaggggtgaaattaaaattgctattgaagtttcatgtcccactgggcatgcactgtcattgataacatcttatcaggagacagggtttgagagcagatgaccggtctgactaaaatttactcgtcagg

SEQ ID NO: 912288 - DNA, 683 bp, Homo sapiens
ataaaaaaaattgtgccctcaaggagccaacattctagcaggggaaacaaacagtgaacagtaaacatgataaatatgtaacttatgtcagaatttagaaggtagcatgtgctgtgaaaaagaagaaatacagccaattagggggattaggatgccccagggaggttgcaacaataaagagagtggttgaggaagtcctcacggagaaggtgatctgaacaaagatatgaaaagttccatggccatttggacagcctacaggtgtcagagggcgaagtgccccaagaagagggcataaaataggatcacacccaacaagtttggggctagacagcagagagccacgtggaggcaggggggccagttaggagaccactacacgatccaggtgagagactgtgacagttgagatgagggtgaaggtggtggggtcagaagtgatggaatactgggcatatcttgaagctaaagtatccagaattttctgatggatgaaatgaagattcaagagaaagaaaagaatcaacatgatttcaaaatatttggcctgagattctagaaggatggcagctgcatcctaaggtggagaacactgtaagtggaacaagttaggggagaagatcaggagtttggttttgagcaagttgcacttgagatrtgcattggacatgcaggtggagatg

SEQ ID NO: 912289 - DNA, 668 bp, Homo sapiens
gtcccttaatcccccactttcaggaatcagcaactctagattcttaggaactgacttgtctttctatctcttagcagggaattgggtagagaagaattaaacattggcactcttaagaagaaatgatgaaaacttgttaactaaaatgaccagaaatgtttaaaagctgtttaaaccatcctatacaatatgctttaagccttattcatagttaaaagaaagaagattctgaaaaatggatggctttgataatattgatgacttgatcgttcactgaattggcacctggcaaattggctcacttctgccccatagtgcctctaaaacaggcgtgtcaaacccaaaagtccttgctccatagctgtcagggatatatctgactttcaagcagaggtatgggattctatttttgtggtaaccacttgcaattgttcattagcaatactgcagtaaatgctcattatggtagcaaacacccagggtataagttttttgttctgtgattctaataataactggataatatgcattgagtggaaatttcaattatgctgaaatgttaatttttttcaggtgaagaaaacaatttyacagatctattagttgttacctggaaaccttttgattaagaataaggttaactatcttgaactagtaaacaaagactt

SEQ ID NO: 912290 - DNA, 543 bp, Homo sapiens
gatgattggcttcaaagaaaatgaatgtcatctatccttaactggttacccgtctattcattcattcaggtctttccttttcttttcttttcttcttttttttttttttttttgcacaaattatctgcagtacctcaaactctgaatttctacatcagtttctaactaaactgagcttaaggccgtcttaatttgagctctaattttcttctccttttctcaaaacattcatctactctgtacttcccctggacatggaggaagaaattgctgcttcatgcctcaaccatttttctctctgttttttttgttttgtttttctttgagatggagtttcattcttgttgcccgggctggagggcaacagtgccatatcagctcactgcaacctctgccacccgggttcaagcaattcttctgtctcarcctcccgagtagctggaattacaggtgcatgccaccatgcctggctaatttttgtatttttagtagagacagggtttcatcatattggtcaggctggtctcaaactcctgacctcag

SEQ ID NO: 912291 - DNA, 429 bp, Homo sapiens
gcaaggtagggcccctgggcggctgttgaaattacactccatgttattcggaaggtatcacttgagtattattcattccgaacatatcctttttctttttttcttttttgcaagtcacttcattttgaaactcacttgcagttctgcagagtgggctgtatgagcccccaccctctacctccagacctacgtccacatctaccctgtgtttggattctcagctgagaatcccttggtcacacaggcctgtttgaagaggtgatcagggagagcaaaggctgaagagaccaaggagaacccaagagagctcatctagcaaactcattttcacactcttaatgaagattttttttttttaaagctttggttataacggsacagcctccggagacagaccgagggggagtactttgcttcctgattacgggg

SEQ ID NO: 912292 - DNA, 650 bp, Homo sapiens
gtgcccatctttgtgtccaggtgtactcaatgtttagttcctgctaataagtgataacatgtggtatttgcttttctgtgtctgcattaattcacttaagataatgacctccagttgcatccatgttgttgcaaaggacatgatttcattattttttatggctgtgtagtattccatggtgtacatataatacatttgctttatctaatccaccattgatggacgcccaggttgattccatgtctttgctattgtgaatagtatgcagtgcatttctttcagtgacatctcagattctccacctcttggtagtgtctctcaggtgcctccccctgctcagtgtcttccctcccaataacatccactgccttcttcacactcagtgagacgacaagttccttcccagagctggcatggctctcatgctctctattgcttaaggcttcccccaaacattaaaatggaaggagtgggaggagggtggaggaggtggaagagaagcaggaggaagcaaacaagaaatgcttggctgcaaaatggaagcattggattactttggtttttgaactaaagtaatgatattttaaagtcaaatgttaytttattttaaatcaaaaccctatgggcataaaattcatgctcatctgtca

SEQ ID NO: 912293 - DNA, 570 bp, Homo sapiens
aacattagtacattatcacatakgtacactatacatgcacattattgcatcatgtggtctaagaggattgcctatgattgttggttctcttctgtgctctgtgtgttgttgagtcatgtgaccccccctgtacatgagttatctcaactagaaaatggttctcagttaccatatccaagtgaattgcttgggttggtaaaggcttaatgacgcctagcctcacgaatcttctgccaagtttttaatgaaaaatgaaaaggtcccatatgtcctttcccagcatccttaaccaacagcctatctgttagactttgcttcacaaaaaagagatccattggttaagatctcacgactgaaagagggcaagaaagttatctctgggctctgactgaaacaattatataggtatgatttccaaggtagtgttgctaccaaaaatataaggatatttagtaaatctgcctgaactctgagtgacctgaaatctgccagcacccattacaggctgggacatctggtggtcaataaactttttatttatttatttatttcacatgaagcagctgtact

SEQ ID NO: 912294 - DNA, 662 bp, Homo sapiens
tataaataaatgaagacaaaaggaagatggggaagagaaagttatgtataaaattttcttctaaaacctctgatcaaattctctgccawattgtatagaatgaagttatataatatccgtttgcttactgcaatcaagtgttcacaccatcagtgcagattttgcattttattcagttttaatcatcagagaaatgcagattaaagccataatgcgataacaacttgcctgagccagtatggccattattaaaaagtcaaaaaacaatagatgttggcgcagatttactgaaaaggaaatgcttatatgctgctggtaggaatgtgaattagtacaattcctatggaaaacagtttagaggtttctcagggaactaaaagtagatctaccatttgatccagcaatcccactactgggtatctactcaaaagaaaagaagtcattatatcaaaaggacacctgcacgtttatgtttatcacagcacaattcacaattgaaaatcaacctaagtgtccatcaaagtatgggtgaataaagaatatctggtgtatatataccatggaatactactcagccataaaaataatgaaattatgtatttttcagcaagttggatggaactggagaccattaacataagtaaagtaactcaagaatggaa

SEQ ID NO: 912295 - DNA, 610 bp, Homo sapiens
ggaactcaacacgcctttgggctaaaggttatttgaggtctgaccatatataaggtacgtatcttgccccaatccaactttcttttctcccctttatgtctcttctcctcagataaatctaacaccacctccccaattccctacacagtaccatcaatacaggtcataaataattcctttcataggagcctttttttattttttatttttttgagacagagtttcactagtgttgcccaggctggaatgcaatggcacgatctcggctcacagcaacctctgcctcccgggttcaagcaattctttctcctgcctcagccttccaagtagctgggatcataggcatgtgccaccatgcccaactaattgtgtatttttagcagaaacagagtttctccatgttggtcaggctggtctcgaactcccgacttcaggtgatccacctgcctctgcctcccaaagtgctgggatcacaggtgtgagccaccatacccggcccctttcataggagctttatccattgctcccggacagcattcattctccattcaatttcattcacttccccawgaaaccaatgcctcctgtccctcccactctggtgacagtc

SEQ ID NO: 912296 - DNA, 658 bp, Homo sapiens
agggtatgaatcagtgtggaaccacagctgaaacatcacgcattttaatagacccattgcatgargattttatctcaataataaataaaattattaatagacgtgagctgtagatatccatgagaagccaaatggttagaagggcaactatcagttactcttaggatgcccttgcccaccaaaaatgtgagagtggggtgaggaaagagaaaaagagaggaagaaataaaagaaaaagagattggatccactagtatggatccactaacctagaattcaatcagtgaaattatgtgattaatgtcttcaaggtcacttaaaaatagtgtgtattcacttaggattttctaatgctgaaaaattatctgttatttattaccacataatgccttgaagatcttaagtacatttttattgccattaaataatttgcctaaaatttgcctcaacaaacaaaggtaagtgtattagtctgttctcaccctgctatgaagaaatagctgagactgggtaataaataaagaaaagaggtttaattgactcacaattctgcaggcctggggaggcctcagaaagcttacaatcatggtggaaggcacctcttcacagggtggcaggagagagaatgagtgccggtaggggaaatgccagatgcttg

SEQ ID NO: 912297 - DNA, 634 bp, Homo sapiens
gtcatgggagggacccggtgggaggtaattgattcrtgggggcgggtttttcccatgctgttctcatgatagtgagtaagtctcatgagatctgatggtttcatgaagggaagttccccttcacacactctctcttgcctgctgccatgtaagacattactttgctcctccttcaccttccagcatgattgtgaggcatccccagccatgtggaactgtgaatccattaaacttctttcctttataagttacccagtctcaggtatgtctttattagcagcatgagcacagtctaatacaccatccataagtagacaactgataatttttttattggtaagaagagactaggcttttctttagtaataaccaagcccataatatcccaatggtttaactcaatagatatttctctttcacagaatagctggggtgtcagctgtcttcgtggtcactcaaaacaagtagtaaattacattgtctcttaaagcatctttgtggaaataacatatatatcattgtttctcacattttattgctatgactttgcttacaacaagggagcaggggattgtgatcccgcataaaaaaagatgagatatttgtgaataactgtaatactgtcacaaccttc

SEQ ID NO: 912298 - DNA, 680 bp, Homo sapiens
gataaaatctatgtgtaagaaaatgcactatagcttttacagggagtgaaaaaatacaaattccaagttatgattagcattgtgttgtgacttaattgacagcattttaaattttgtagtcatacattaagtaataatgaatcttacaactggtagtatttaggatttgacttaataattacatctcctaactggttttcctaaccctatccccgtgcttcagaaatttttctcctttattcattgaagaacagtccttttctagactctatttctcctgggccttcccaggagattagtcaaattagacattgatataagccatgatagcttcaaaggaagtaacagcttcgtgtactaatgaatcaaattaatacatttgcatttatcaatgatttttggatctcagtagttcaagagaataattttaattatacgtacctcaggtgccatgattagcatatgcttataccaacaattgcttgttactaacagctgttctcagattcttcccatgagccctatatgggctcagtgaaggacactgtttttattatttaaaaaataaaatgtaggtttatatttgtatataacagcatatrttcatgtagaaaatgtggaaaatacataaatctggaaaaatggcagaatatccataatcttacagagaaggaacctac

SEQ ID NO: 912299 - DNA, 632 bp, Homo sapiens
ggagaagagtaggcattcaaagccattttaccaaccacctattatatgctttcaatatagcaggtattaatctagaccctagaaccccgatctgatttaaggaacgagaaaccttaaaatagggatctgtggagaaatcctagtttcagatgttagtggaagttaactattaacccaagatatttggaacaagttgatgactacattaagcagatagcttccacccagacccattggaataattagtctattaatggttagcaacatttttctataaagaaacaggtaataaatattttaggctttcagtcctttaagtctctaccaaaactattcaactcttgcaatgtagtgcaaaagcagccataaactatacataaacaaaatgagcatggctgtataccaataaaactttatttataaacgcagttaataagccagatttgtcctacaagctgtaatttgccaaccgttggcccagatactttaaagtactgatttctaaactctcatgtaaatggtttcgtctgttttccttttagtcataatgtttctctttgctattttaacttatatgcttctaccttagtccataatgccttcttatsaataattcttgcttaagtctaggc

SEQ ID NO: 912300 - DNA, 597 bp, Homo sapiens
aacttctctgagctaaagtggcatgttctaacctgtatcaaggcagctaaaaaccttgaaaaaaaggtcagatgaatggctaactagaaaaaacagagtagagaaaaccttaaatgayctgatggagctgaaaaccattgcacaaaaacttcgtgacgcatgcacaagattcaatagccaattcaatcaagtggaagaaaggatatcagtgattgaaaatcaaattaatgaaataaagttagaagacaagattagagaaaaaagagtgaaaagaaatgaacaaagcctccaagaaatatgagactatgtgaaaagaccaaatatacatttgattggtgtaccggaaagtgacagggagaatggaaccaagttggaaaacattcttcaagatattatccaggagaatttccctaacccagcaaggcaggccaacattcaaattcaggaaaaacagagaacaccacaaagatactcctcaagaagagcaaccccaagacacacaattgtcagattcacaaaggttgaaatgaaggaaaaaatgttaagggcagccagaaagaaaggttgggtaacccacaaagggaggcatatcagact

SEQ ID NO: 912301 - DNA, 632 bp, Homo sapiens
tcgtctttttgcttattggtttaagctccttatagattctggatattagaccttatgttgggtacatagtttgcaaatattttctctcattctgtaagatgtctgtttacggtaatgatagtttcttttgctgtgcagaagctctatagtttacttaggttccacttgtcaattttcgtttttgttgcaattgcttttggggacctagccaaaaattctttgccaaggccagtgtcaagaagggtatttcctatttttttctaggatttttatagcttgaggttttacatttaaatatttgatccatcttgagttaattttcgtatatggttaaaggtaagggtccagtttcaatcttctgcatatggctagccagttatccagcaccatttattgaacagggagtcctttccccattgctcgcttttgttggccttgtcaaaaatcagatggttgtaagggtgtggctttatttctgagttttttgttctcttccagttgtctatgtgtctgtttgtgtamcggtaccatgctgttttggttactatagtcttatggtatggttcaaagtcagatagtgtgatgtctctggattttttgtttttgcttagaattgctttgactatttgggc

SEQ ID NO: 912302 - DNA, 682 bp, Homo sapiens
tgccctatgggtttagtgctagtcattggctgtaggtttcactgcgggatcctgtggctcctgggtgaggcagctcttactcagccaagggaagttctacgcagaagggggcagccatgagccatcagaaaccaacgggcacagaaactgggccattggggtacctgcttggtagagggactgtggttggggcaccacccagagtacagcagctactataatatataagatctattatttagctaaaaagaatagagaagttattttcaagaaaaaatttaatttgaaagttttgtgtgtagtatattggccatttaaattttgtttcactgcatttaagataaactctatattgtgttttcagttcctagagccatacagatacttgaaaccacaactgatttgatttgaagtgtgatatatacaaatacatatatacgtatatgtgaatatgtgtgtctagagacagaaaccaaattcttgaatataacaggtgttttctaatatttagcaccagcacaactgaggccacctctggttaaaggaatcaacagcacaacaatccatcttargtggtttccacctgaagaactgaatggaccctctcctatatatcagctggaaaggagagagtcatctctaccagctctgatgaccacgatgatgaaaggaatccgtttca

SEQ ID NO: 912303 - DNA, 638 bp, Homo sapiens
cttattaatatggtagcaatatggaaaattaatgtttgagactttcttttttctttcttttagaaaagggaaagcattcagtgytcaggtgacttgtgctaaagataaaaggatgaaaaaaatggaagctgtggaaatttcctcatgtcttatcattggaaattatattgcatcaccaagttttctggtttacaaaacaatagcatagtaaaactatgttttaaatgctgtaccagctaacctaattagcctactttacagatagggaatctgaggcccagagaatgaagttactcaactaaagtcacataggtatttaatggtagatctagggttctattcagcgtatcacgattacaatgtctgatttcttttccttaatatggtccatatcctctcattaggccattcctcttagcagctacaaatttgtagatgatgtatttcataattaagtgtggttaaacaaattaaaatttccacctagaccagaaggtcctacaaacaaaatgtttccaattagcattgtctgtgcagccagtaaaggtgtgaaaatggacaaggttaaaactggcataataactatttgaagaatggttaaatagaccaaagctgttgcccttttcctatctcccaaa

SEQ ID NO: 912304 - DNA, 622 bp, Homo sapiens
tgcatacacactcaaaaaatatcctttatttctcctggtgtgatgccttgctaccttctttacttacttaaacactaccaaatggaggtggccatgtgggtcatgtttctggtaacacctacaactgattctgtgctggtctctttttatcctaatagattcctctgtttatggcaatggtgatcattgagaatggcactttgaccatctctacttggataaccataaacccaagattcctcatacaaaatttatctcattcttaccctattggttgttatttagactttctcttctctaatcaggccatatcttcatataattcagaaattttaaaacagcttttatgtttttttatttaattctcacaacagcccaggaatacaggtatcccttctctcagtttggactaattttatcactattatcatagtcttagggactcaatccctgctctcagtttggactaattttatcattattatcacagtcttagagactcagaacattcatacattttcacctcttccctacctggttatctraatccaattaggcatgaagtcctgtcctgccaatttcagctttgaattgtctttcacattttattctttccgtatat

SEQ ID NO: 912305 - DNA, 633 bp, Homo sapiens
agagagtttgcatcttgccaaaactcctatgtggaaacctaacccccatagtgatgttattaagaggtgaaacctttaggagttggttaggtyatgagggctccaccctcatgaatgggattagtgctcttataaaggagcttgagggtgatataggagttaaaaataaattatttaggcagatagtgagggtaaggaagtccttggaaaggtttcccttttaatgaaaagcagcccccaaataatttgcttttctaatgcagagtagcctgtaaaattgagctgcagacataaacaagcaagctagaagcttgcacaggtgaatgctgacagttgcgccaataggaaaaggctacccaggaataggcatgttcaaaatggcggctccatcttctcttcactttgccaaccacatgtacagtaaggagcagacaagatggccaagtagaaagcctatttgcataagattagggtggggccatacagcctttcctgctgcaccaggtaaatgtcacacctgatagaaccaatctgtgcatcccacataaatcagacaccgcctcctcaagcctgcctataaaatctggcacaggccagtgtggtgactcatgcctgcaatcccagcactttggg

SEQ ID NO: 912306 - DNA, 603 bp, Homo sapiens
ctctagccccccaccccccgacaggcccyggtgtctgatgttcccctctgtgtgtccatgtgttctcattgttcaactcccacttatgagtgaggacatgcggtatttggttttctgttcctgtgtgatactttgctgagaatgatggcttccagtttcatccatgtccctgcaaaggaaatgaactcattgttttttatggcagcatagtattccatggtgtatatgtgccacattttctttatccagtctattattgatggacatttgggttggttccaagtcttcactgttgtgaatagtgccacaataaacatatgtgtgcatgtgcctttatagtagaatgatttataatcctttgggtgtatacccagtaatgggattgctgggtcaaatggtatttctagttctagttccttgaggaattgccacactgtcttccacaatggttgaactaatttacacccccactaacagtgtaaaagcttcctatttctccacatcctctccagcatctgttgtttcctgactttttaatgatcgccattctaactggtgcgagatggtatctcatcgtggttttgatttgcatttctctaatga

SEQ ID NO: 912307 - DNA, 663 bp, Homo sapiens
gagagtggataattcctactctctagcccccgctgcttcatgggtgcgagccgctttgatgtccatggtggcacctgccaaggtcgccggaactcagaaatacgaggatggaagagggaaagaggacactcttccctctctacctcaagtaccctgggtatctgctaggaagagaagagaagcagggatgcctgctccccgctttctagatggctagccattcaccttcagtctgtacccttttcaaatgcatcctaaacccctgggactcctttgaaaaaactccttcttctctatcctgtcttcactcatagtaattgcgtctctctagtatggaacactccccacaaatgcatcctccaaactggaaagagttaatttctcaaatcttaaactggttggcttaggactgggctcaggggaagggaacccagaagcctgacatgccagcaaaagagtgaagttttttttttaaccagctgggctcttggcctccctctccctgggcaaactggtaaaaggcctcagaatttctgagctgtccttattcctctccttgtttcgttttartacatgttttctaacaacttagtttgttcttgcctttaggccatcacactcgtcatgcaaccggagcctttgacgatggccccttttgctggg

SEQ ID NO: 912308 - DNA, 628 bp, Homo sapiens
tgttgttgcctattaagaaaggaccaaaagaagtggtcttgttcagccatagcattgtactagaagaggcatcatttctatttttacaaatacaacctcaaagaggtaaaaaagattaacgtctgtcaagtcaacctcatccttctattccagcgtcagtaattaaatgccattcttgtgatagttatcattaatgggagagactgatttggcccatgaattttgaaaaataaatgcagtgaaagaaagttccaggaaagggctgttctgggctcagcagtagctcttctccactcaagacacagaatgtgaatatcaacagccagatggtcatccaggtagtaggctctgaaaggcatcagggaggaccctctggcaaaatctgtcttttatcccaactgtcactgtgtatggaatttcataagcattcaatcttttgagttaagcagtgtcaattatttttcttcttttctctattcattcaagaattatttattaagcattaatgatgtatcaatgagtacgaggtactagaatgaaaaaaaactgttttagctattaagatgtccacagyctactgaaggagacagaaaacaagcagtgacacaatagctaacatgtatcacat

SEQ ID NO: 912309 - DNA, 562 bp, Homo sapiens
ctacagagagctaggaattcttttgaaggaggtaagactsgagaaatttcttgaggattgatcagatttggaaggctgaagagaagccagtaaagcacagcagatgggcaagtgcagtgtgtgtcttgagactgggcaaggtgcgatagtgagtcctctaatttgggtagatgaagcgattactttgcttcaaggagtagtggtagttacctttggagagattgttggggtgtgattaggggaagtcttaaataccagactgcccaggaaactggtttctccctgcagccaatggggagctgcctagggcagcatccttgcataccagtgtgaatctaccagtgtgaatgtagctacccaagcaactttttgtttgttcacagatctgttgtccaggcattttgtaggaggctgtgaaaagtctgggtagatctccaaagtacagttttcctacaaatagctggtttgtgtactgagggcctaagtccattcctcagaacaaactgtagaggaagaaatacatggatggttgtcccacaggttcaactctttcctgttaacc

SEQ ID NO: 912310 - DNA, 619 bp, Homo sapiens
gtgggaatcaccacttctgtgtctttcaagtctttgatggtggcagtaattgctgcaatctctttccagggatgcgatattgtttttgatttactatttttctaggtataggcagccctaatggcttttatttggcctttcccaccataatagccctcaccctcccagtcagggagccaatgtgggggttctaccagctgctaagtatgtctatgccaattatgcattctggcactggggaaatgacacaggatgagttcatggacccactgaaccaactgtaagtcagacctgagctaaagcttcattaattacctgacttccataagtccctactttaactgaaggatcacaatgacattttgagtcccctggaatccacgtcagctaagagccagtgtccagtagtccccgaaatatctgatcatttccctttctcaaaatgcacagttaccctgataaaaggccggaggtctccttggggaaggatgggagaaagattagcagcataaattgtcagtattgtattggggtccttccttaaggggacccagcctccccttcattcaaggggttctrggtgtgtaaacttgctcaagtctggaaattgattaagggg

SEQ ID NO: 912311 - DNA, 634 bp, Homo sapiens
caaatctaaggagaattggtagttacagcacagcttctggactgcaatcctatatatctccagaaacttagaatgcacttaagaaaaggtgggtatcctgctaagagtaagagattaagaaaccaccttctcagaccccagtgtgcattgttcacctcaagagaaagaagtgtgaagtccattttaatagctgacacttttaattagctatgggaattctattcaaaaagcatttattgagagttgaaaatatgcaaaggcacataggtacatatgtgaataagacagctaaacaaaggttgttcataaaagaggtagtattggtactggagacagattggtatgtaaaagttataaaacagtgcttttataataaaagggaaatacaatcgaagaattctttaaaaagataatgggtggaaacaattcagagctaaaaaaaaaaaaagcaacctggtatcttcgagatggaagacatagggaatttaaattcagacatatgtaacatggaaaaaagggactagctagattttacttgagaagcaaatgttttggtccatatgatccagattcatatgtctttgcaaacttggcctaactgcaccaygctccatcagatgaatttttaaagacc

SEQ ID NO: 912312 - DNA, 678 bp, Homo sapiens
acactattttgctaatgtgtcctaatgatgatacctctgaatgtcaaataacaagtctttacattgggagaagaggactcaacacaagcasacagttgccagggcactaccagtccaggatatattttcttacacttcactttcatacttcaattgcctcccttccaagccaattgtaaaaattcatgcataatctcaagaaatgccttaaaacagaccaatacgttcaggtaatgtgaacggtgcaacatcaatacttttctgtgttttaacagtgttaccagaaaggggtcctgatccagacccaagagagggtacttgaatctcgcacaaaaaagaattcaggccgagtccacagtgcaaagcaaaagcaagtttattaagaaagtaaagtggtgaaagaacagctactctatagacagagtagggtgttcctgaaagtaagaggagggacttgtccactctaggtacaatacttgctcatatatgggataaaaaaagatctcagttaatttagaaagtttattttgccaaggttgagaaggtccacctgtgacattgcctcaggaggtcctgacgacatgtgtccaaggtggtcagagcataccttgcttttatatattttagggagacatgagatatcaatcaacgtatgtaaaataaacatttgtttggttc

SEQ ID NO: 912313 - DNA, 600 bp, Homo sapiens
taacagggaaatttatagcattaaatgtccacatcaaaatgtaaaaggatctcaaacaacctaacgtcacaactaaaagaactagagaagcaagagcaaacaaaacccaaagctagcagaagacaaaaaagtaaccaaaatcagagctgaactgaaggagatagagatgcaaaaaactattcaaaacatcagtgaatccaggagcttgttttttgaaaaaaaaaattaatgaaatagatagatcactagctagacaaataaagaaaaaaaaaaagaaggttcaaatacaatcagaaatgacaaaagggatattaccactgacctcacggaaatacaaacaaccaccagaggatattatgaacacctctatacttataaactaaaaaaaaaaaaaaaaaaaaaactggaagaaatggataaattcctggacaaataacaccctttcaagattgaaccaggaagaaattgaatctctgaacagatcaataacaagttctgaaattgagmcagtaataagtagtctaccaacccaaaaaagcccaggatcagatgaattgaaatctgaactttaccagctgtaccaataagagctggagccat

SEQ ID NO: 912314 - DNA, 600 bp, Homo sapiens
taacagggaaatttatagcattaaatgtccacatcaaaatgtaaaaggatctcaaacaacctaacgtcacaactaaaagaactagagaagcaagagcaaacaaaacccaaagctagcagaagacaaaaaagtaaccaaaatcagagctgaactgaaggagatagagatgcaaaaaactattcaaaacatcagtgaatccaggagcttgttttttgaaaaaaaaaattaatgaaatagatagatcactagctagacaaataaagaaaaaaaaaaagaaggttcaaatacaatcagaaatgacaaaagggatattaccactgacctcacggaaatacaaacaaccaccagaggatattatgaacacctctatacttataaactaaaaaaaaaaaaaaaaaaaaaactggaagaaatggataaattcctggacaaataacaccctttcaagattgaaccaggaagaaattgaatctctgaacagatcaataacaagttctgaaattgagccagtaataagtagtctaccaacccaaaaaagcccaggatcagatgaattgaaatctgaactttaccagctgtaccaakaagagctggagccat

SEQ ID NO: 912315 - DNA, 634 bp, Homo sapiens
ttctgctgagacaattccaaaaatttgagaagaaactcctccctaactcattgtatgagaccagcaacatcatgatwccaaaacctgccagagatacaacaaaaaagaaaacttcaggcccatatctttgatgaacatgaatgcaaaatcctcagcaaaatactggcaagtagaatccagcagcacatcagaaaagcttatccaccacgatcaagtaggctttatcgccaggatgcaaggttggttcatcatatgaaaatcaatacatgtgattcatcacatgaacagaactaaagacaaaaaccacaagattagctcaatagatgcagaaaaggcttttgaaaaaattcaacatctattcatgttaaaaagtctcaataaactagttattgaaagaacataccacaaaataataagagccatatatggcagacccatagccaacatcatactgaattggcaaaagctgaaatcgttccccttgaaaaccagcaaaagacaaggatgccctttctcaccactcctattcaacatagtattggaagttctggccagggcaattaggcaagagaaagaaataaaaggcatctaaatagaaagagagaaagtcaaactcttactgtttgtaaatgac

SEQ ID NO: 912316 - DNA, 598 bp, Homo sapiens
atttccagcagtagcaattgcatgtctttattttgcttgyttgttaatgtgacaatctttttccactagacactaagagtccttcaagggctggtaccatgtttttgtttttgtttgttttcctttgattctctaacatctagcacagtatctaacacacagaaaattcttcttatgtgtttgggtttttaaaaaatgacaaccaaagaatgaataaattaatgaggagagagaagtacacctataatttatttaaataaagtttcgattgtagcacagaatcatattaaagagtattgtggagataaaaacacagcccctctgcaatgtaatttattcttcaaccattctgttgggcatgctcctcagagatgaaagaactaagcgatggaggaggtctatatcctgcttcgtgtctgaagtttgttagagagaatctagaactccatcctcggtaccactgctgatttgctgtgaaatatgttctgggaaatataaggcattgctgaccccaggaacaaatgtttttctgccagtaagtaagaattctaatcctgtttgaaaccaattccaggtttggagagtcaaggagatcatt

SEQ ID NO: 912317 - DNA, 591 bp, Homo sapiens
tgttttctggatatgagtcctttgtgagaaataggtattgtgattactttttcccagtctgtggcttgccttttcattttcttaatggtgtctttgagcaaaagttttaaatttctatgaagttcaatttrttaatctcatcttttgtagttcatatgttttatgtcttcagagatctctctgtcataggatcactaagatattctcctgtttctttttttgttttttttttttaagaagcaaatagttttaggttttatgtttaggtctgtatgccttcttaaattgatatttgtgtgtgatgttacagaggagttgaaacattttttttcaatacacgaatgcagttgttctagcaccatttattaaaagtctcccctggccccttgaatcaccctggaacctttgttgaaaatcaattgaccatataatgtgggtctgtttctggattatctgttctgtcctgttgatctgtttgtccatctgatctctctttcttttctctacattatgccagtattacactgtctcattactgttgctttatagtgagtcttatggttacatagtatgagccctccaactccgttc

SEQ ID NO: 912318 - DNA, 571 bp, Homo sapiens
aactagaacatctagaagaaatggataaattcctggacacatccaccctcccaagactaaaccaggaagaagtggaatatctgagtagaccaatcataggctctgaaatttaggcaataattaatagcctaccaaccaaaaaatgtccaggaccagatggattcacagccgaactctaccaaggtacaaagaggagctgttaccattacttctgaaactattccaatcaatagaaaaagagggaatcctccctaactcattttatgaggccaacatcatcctgataccacagcctggcagagacacaacaataaaagagaattttagaccaatatccctgatgaacatcgatgcgaaaatcctcaataaaataccagcaaaccgaatccagcaacacatcaaaaagcttatccaccacgatcaaggtggcttcatccctgggatgcaaggctggttcaacatatgcaaatcaataaacataatacatcacataaacagatccaacygcaaaaaccatatgattatctcaatagatgcagaaaaggccttcgacaaaattcaacttcccttc

SEQ ID NO: 912319 - DNA, 636 bp, Homo sapiens
aaagggaacacttataaactgttgatgggagtgtatattaagtcaaccattgtggtaagcagyatggagattcctcaaagagctaaaatgagaactatcatttgatccagcaatcccattactgggtatacttcatataccctgaggaatataaatcattctaccataaagacgcatgtacctgaatgttcactgaagcactattcacaatagcaaacacatggaatcaatctaaatgaccgtccatgacagattggataaagaaaatgtggtacatatacaccaggaaatactatgcagccataaaaaagaattagattacatcttttgcaggaacatggatggcactggaggccatatctttagcaaactaacaccggagcagaaaaccaaataccatgtgttttcacttataagtgggagcaaaatgataacttaagaacacaaaataggaaacaaccaacactggcttctacttgagggtggagtgtgggaggagagagagaagcagaaaagataaaaattggatactgggttatgacctgggtaatgaaataatctatccaaaaaccactgtgacacaagtttacctttgtaacaaaccttcatgtgtacctccaaaactaaaataaaagc

SEQ ID NO: 912320 - DNA, 575 bp, Homo sapiens
gccaagcaaatggggaaaccccttataaaatcaccagatctcatgagatttatgtactaccaggagaacagtatgggrgaaccacctccatgattcaattatctcccactggatccctcccacaatatgtggaaaatatgatagctacaattcaaggtgagattttggtggggacacagcaaaaccatatcatttcacccctggccccttccaaatctcatgtccttacatttaaaaaccaatcatgtcttcccaacagtcccccaaagtcttatttcagcattaactcaaaagtccacagtccaaagcctcatctgagacaagtccagtccttaccacctatgagactataaaatcaaaagtaagttagttacttcccagatactatgggatacaggcattggataaatacacacattccaaatgggagaaattgactaaaatgaaggggccacagactccatgcaagtacaaaatccagtggggcagtcaaatcttaagctccaaaatgatctcctttgagtccatgtctcacatccaagtcacgttgatccaagaggtgggtcccaaggtct

SEQ ID NO: 912321 - DNA, 643 bp, Homo sapiens
aaatctcatgtccttacatttaaaaaccaatcatgtcttcccaacagtcccccaaagtcttatttcagcattaactcaaaagtccacagtccaaagcctcatctgagacaagtccagtccttaccacctatgagactataaaatcaaaagtaagttagttacttcccagatactatgggatacaggcattggataaatacacacattccaaatgggagaaattgactaaaatgaaggggccacagactccatgcaagtacaaaatccagtggggcagtcaaatcttaagctccaaaatgatctcctttgagtccatgtctcacatccaagtcacgttgatccaagaggtgggtcccaaggtcttgggctgctctgcttctgtggctttgcagaatacagcctccctcctggctgctttcacaggctggcattaagtgtctgtggcttttccaggcttatactgcaagctagcagtggatctaccattctggtgtcaggagaaaggtggccrtcttctcatagctccactgggtagtgcctcagtgaggattcagcgtgagggcttcaacctcacatttcccttctgcactgccctagcttaggttctccatgaggtccctgcccatggagcaaacttctgcct

SEQ ID NO: 912322 - DNA, 600 bp, Homo sapiens
tagaagtatgtatgtttaggagtatgtatgttatatatgcttatgcatatataattttagggrtatgtatgttctactcaaaatctttgaaattgtctacattttaagactctagggtcagagttttcatagatgaaataaggagtttgagttttttcctgttattcttcacaaatttttgatttacagtactgggcctaatccgtattactaatatgatgtactggatttctgctgtgagtccttttagacctattcgtcattctatttcctgatccctactctctgctgctggtaggacttatttggaatagaacagtaagcttccttgctcactggttccctcacccactgattttcaccaatggggtaaaccagctgggcatcagagggagggttaaaagtgaggttggctccctacctgcagagttgccaagaagtgactacctagtttaaggttatggctctgccaggtggccctgtcctcgcagcctcccttgtctcttgtttcctttgactgctctacctcctttaggcctggggacagtgatggccttctactcttactagctctagatactgtactctctctgtggcttc

SEQ ID NO: 912323 - DNA, 600 bp, Homo sapiens
tagaagtatgtatgtttaggagtatgtatgttatatatgcttatgcatatataattttagggatatgtatgttctactcaaaatctttgaaattgtctacattttaagactctagggtcagagttttcatagatgaaataaggagtttgagttttttcctgttattcttcacaaatttttgatttacagtactgggcctaatccgtattactaatatgatgtactggatttctgctgtgagtccttttagacctattcgtcattctatttcctgatccctactctctgctgctggtaggacttatttggaatagaacagtaagcttccttgctcactggttccctcacccactgattttcaccaatggggtaaaccagctgggcatcagagggagggttaaaagtgaggttggctccctacctgcagagttgccaagaagtgactacctagtttaaggttatggctctgccaggtggccctgtcctcgcagcctcycttgtctcttgtttcctttgactgctctacctcctttaggcctggggacagtgatggccttctactcttactagctctagatactgtactctctctgtggcttc

SEQ ID NO: 912324 - DNA, 528 bp, Homo sapiens
atgagcccattggggacaactagtggttccaacagtcctacctcagattctgcatctgtacagagagcagacaccagcttaaatgactgtgaaggtgctgctgacatgccataaccttgaaatctatgaaatgagacaaacatatcagaaatatatctatggtgaaatcaccattttgttttgtcaaagggaagttatttccttggtttcatatgctgtttataaccagttttcatcttatggacatatttttaaagctgcttttgccttgctggcttctgacctgaaggacttgctgcttttaaaacaaattcacagtttttttatccctgaaacaaattcttattagagagtcctgtctttcatgggtcagattgtcaaacactcactgtcctttgaagatacaggatgctttcttcatattacatgttgacrtctctccaaagacatcacaagaaataacagaatcacaaaggatagacacctcaaagagttagtgcagcatttcaagaaatagaaagcacgtct

SEQ ID NO: 912325 - DNA, 604 bp, Homo sapiens
acagcccttaaacgtggtgcatctggagttgtttgttcctcctggtgggtctgtggtcttgctgacttcagaaattaagcygcagacccttgcagtgagtgttacagctcataaaggtagtgcagacccaaagagtgaggagcagcaagatttattgtgaagagtgaaagaataaagctttcacagtgtggaagtggacctgagcggattgccgctgctggctcaggtggccagcttttattcccttatttggctccgcccacatcctgctgattggtccattttacagagagctgattggtccattttacagagtgctgattggtgtgtttacaatcctttagctagacacagagtgctgattggcgcatttttacagagtgctgattggcgcatttagaatcctttagctagacacaatgctgattggtgcatttacaatcctctagctagagagaaaagttctccaagtccccactcgacccaggaagtccagctggcttcacatctcaacattacctgtcttcaaaatatacaacaaagctatagtaatcaagacagaatagtactggcataaaaacagacaatagatcaacattgcaga

SEQ ID NO: 912326 - DNA, 604 bp, Homo sapiens
acagcccttaaacgtggtgcatctggagttgtttgttcctcctggtgggtctgtggtcttgctgacttcagaaattaagctgcagacccttgcrgtgagtgttacagctcataaaggtagtgcagacccaaagagtgaggagcagcaagatttattgtgaagagtgaaagaataaagctttcacagtgtggaagtggacctgagcggattgccgctgctggctcaggtggccagcttttattcccttatttggctccgcccacatcctgctgattggtccattttacagagagctgattggtccattttacagagtgctgattggtgtgtttacaatcctttagctagacacagagtgctgattggcgcatttttacagagtgctgattggcgcatttagaatcctttagctagacacaatgctgattggtgcatttacaatcctctagctagagagaaaagttctccaagtccccactcgacccaggaagtccagctggcttcacatctcaacattacctgtcttcaaaatatacaacaaagctatagtaatcaagacagaatagtactggcataaaaacagacaatagatcaacattgcaga

SEQ ID NO: 912327 - DNA, 640 bp, Homo sapiens
gccaggcacagaaaaaccaacctgcatgatcttacttacatgtagagtctaaaartcaaattcatagaagcagagaatagaatagtggatactagagtctgggattaggagtagggatagggagatgttggctaaaggacacaaaatctattataaaggagtataagttcaagaaatctattgtacaatgtggtgactatagttaataatatttgtatcctagaaaattgctgagagagaagatttgaagtgttcttactacaaataaatatgagatagttatatgcatatatatagttaatacatatgttaattggcttgatttagccattccaaatatatatacatttcaaaacatcattttgtataccataaaaatatacaatttttagttgtcaattaaaaataaataagaaggaaaaagaactgcattgtcttcaagtactttcaataaccaaatctgatataacaaatattgcctactatgtgttaccaagggtcctgctttgataaataaatgtgacattatagtcacaaaaattgggaatttaaactttggaagtagataggctcatccaacgtatatagataaaaataacaaaggaaaaacttaaggcagagctctaattttaagcctgaa

SEQ ID NO: 912328 - DNA, 625 bp, Homo sapiens
caaagcagcagccagggaacacccgaccaccctccctgtaatcttctttcctttagcgagggactgacctgcttactccggtcccagtcccttagaccgacactgggcgagctttctctccttcactattaagagaaatatagtctttatgggggggggggggcggggggaaggaggttttagtcagataaatggaagaactcttgacgctgaattgctacatggataactaagtgggacttttctttccttccttggatacgacaggcaaggcccacctctgtgttaactgcggccctctagatctctgaatgctaggattcttggggtcttcctcggaaggggaggtgcgttctcctccttccggtgctttactgggactatttaactgtgtttaatgctaccactaattcctctttgaatgcttcttaggatttttccagcaggcttaatcttcccaagcctcaggatggccacaagctaagctgatactttgggggttaggtgtactctgaagaaatttttttttattgccaaagtactcytttgttttttaaatgagtttcataaagtcaccttactcctaccccagacatcacaacagctggctggcccctcaccccat

SEQ ID NO: 912329 - DNA, 589 bp, Homo sapiens
atgaaatagtggaggattctgttcacaacrtgtttgttgacttgctgtagttgcttcccacccttggggcccttttggtatgattacgtgtaaacatctgcttctccttggcataaacacttgcctggaattgggcctcagaacagattggcttttgctttctgaattccttcatttctcctgtggaatgtagcataagtaattgactcagttcagagaacacagtgaataaacaaactataagataatgcaaaagaagcattagcatttgggttttctagttccttagagaaatattaaacagtggagaattgaaggtagagatgaatccttgaagtgcatgaaacgagcactgatagtttcataacttctctaattgctaagtaacctgaagtgtgtcccaaaggttgcacgttttactttaaagctcattttgacttttaaaaatgtcagttttctctgctaaacagacttagccatttaagatctcataaatagtcctgtttttcaaaaaaattatgacagtatagtcagcttatagtcagcttattgttatcagtctgaattaagagatatactcttccttctt

SEQ ID NO: 912330 - DNA, 680 bp, Homo sapiens
ttctatgttatagacatggtttaactagccagaaatacagtataacwgtcacagatagtgatctgtgggtagcaatttctcaagggagcctcatccttgagatagactaagactcttaaaagaaagggacttgtaggaaaacacttggtaaattgtagagtgctttataaatgaaataatttgttatgtcccacttaagactttaaaatacaacaaataatcaaagaatgtaatttttttacacattctttatagcattttacacagggctgatttcaaccgttgtctgcatagggctagtttttttttttttttttccctgtggaaaagtagaaaaacactttaaatctcagccattattctgggttactgggccctttcttgagttgaacaaattttatagtcttttttaggacatgattttttgaaacaaatgataaatgtcattttttttacctgtacatacttatttaatgaggtaatagcagaatcttctattgacaagaccttttaataagtagaaccacttttacatttgaagtagttttaaatatgtaacctatattgcttcaattttaaagtaaatttaaacttctctgattttagctaatttagagtggaatgggaatcttacctgaatatggtttaatattgtcatctaaccattcattcattctcaa

SEQ ID NO: 912331 - DNA, 602 bp, Homo sapiens
ccttgagcaattaggcaagagaaagaaataaagggcatccagtttggaaaagagkaagtcaaattgtccctatttgcagatgatgtgatcttatatgtagaaaaacctaaagattctaccatgcaaattttgaactaataaacaaattcagtaaagttgccagatacaaaatcaacatacaaaaattagtaacatttctatatgccaagagtgaaaaatctgaaaaagaaaccaagaaattaatcctatttacagtagctacaaatgaaataaaattcttaggaataaatttaaccaaggaggtgaaagacgtctacaaggaaaactacaaaacatgggtgaaagaaattgaagagggtataaacaaatggaagacatcctataatcacgtatcagaagaattaaaaatattgttaaaaagaccataccaatcaaagcaatctgcagattcaatgcaatccctatcaaaataccaatgacattcttcacagacatagaaaaataaaacctaaaatgtgtgcagaaccacacacacaaaaaaaatcccaaagagccaaaacaatcctaagcaaaaaaaacgaagctaaagacatcacattacc

SEQ ID NO: 912332 - DNA, 602 bp, Homo sapiens
ccttgagcaattaggcaagagaaagaaataaagggcatccagtttggaaaagagtaagtcaaattgtccctatttgcagatgatgtgatcttatatrtagaaaaacctaaagattctaccatgcaaattttgaactaataaacaaattcagtaaagttgccagatacaaaatcaacatacaaaaattagtaacatttctatatgccaagagtgaaaaatctgaaaaagaaaccaagaaattaatcctatttacagtagctacaaatgaaataaaattcttaggaataaatttaaccaaggaggtgaaagacgtctacaaggaaaactacaaaacatgggtgaaagaaattgaagagggtataaacaaatggaagacatcctataatcacgtatcagaagaattaaaaatattgttaaaaagaccataccaatcaaagcaatctgcagattcaatgcaatccctatcaaaataccaatgacattcttcacagacatagaaaaataaaacctaaaatgtgtgcagaaccacacacacaaaaaaaatcccaaagagccaaaacaatcctaagcaaaaaaaacgaagctaaagacatcacattacc

SEQ ID NO: 912333 - DNA, 614 bp, Homo sapiens
aagggatactaatcccatattaaatagagtaatataagtgttcccccagattctggtcttttcaagactcagaagatttcatttgaagtmaaaaaaccaggttaattcatgcaaccacactattgtaccttataaaattatattaatgtttgtaacacttctaagaaataatcttcatttattttaaaactgcaaatatggcaccttataataggaaatcaattcataactttatttatgacatcattttgctggcaacttgtttctcatgactattgttcatgatacctaattcattaaagtaattttctccttctttcagtgggtttcctacagactctatagccagtactcagtgcactgctgctctctgagataccccattttctcattgctcctttcttttggtatgtttgggagcactctcattttgaaagtacaaggaaaattatctcataaaagaatgtaataacaacagaacttctgagatttcaaaaacgtagaattcttaagttattgaactatgggaaaagctgtaatttataaccagtaagttagtatgttgtacacatctgtgtactgtttcagaaaataaaggttgttaccatagcaac

SEQ ID NO: 912334 - DNA, 605 bp, Homo sapiens
ctgctttacattcccaccagcagtgtagaaatgttcccttttcactgcatccatgccaacatctattataaaaaatgctgagcatcactaatgatggaggaaatgcaaatcaaaaccacaatgcaataccatcttactcctgcaagaatggtcataattgagcaattacttttgaaggaagaccccaaagcagaaacacaagaacacagaggagaagtgagtagtcgatgaaaaatatgaaacgtgctgaaattcaggaaatatgtaattccagaatgatgacacaactgaaagaagcatgaagaagagagatgtgataaaaacacagtgatggaaataatgaacataagagaaaagaaaaggagatcccagatacatgcaattgaagttgtagatgagaaacacaatcaatgaaacaaaacccaaatgtttaaagatatgattcaggaaaaacttctgataataaagtatgtgactctacacactgmaaaggcactgtgtgtcccagggaaaagtgacccagatcatcatcaacaaggaataccctagcgaaattattgaactctaagaaatgaaggaagaattctttgggcagtaaaaggatg

SEQ ID NO: 912335 - DNA, 665 bp, Homo sapiens
ttagagagtgattttgatatcataktataggatggtgcctggaaatcattttgaagggtattttttgttgcctttctggcatgtattctctcttccccttactattttttttaagccaagaatatcttttattattactattattttattttattttactttaagttccaggatgcatgggcagaatgtgcaggtttgttacataggtatacatatgccatggtggtttgctgcacctatcaaactgtcatccaggatttaagcacctcatgcattaggtgtttgtcctaaagcactccctcccgttgctccccctacaacggtccccggtgtgtgttgttccccttcctgtgtccatgtgttctcattgttcaactcccacttatgagtgagaacatgtggtgtttggttttctgttcttgtgttagtttgctgaggatgatggcttccagcttcatccatgtccctacaaaggacatgatctcattcttttttatggctgcatagtattccatggcgtatatgcaccacattttgtttatccagtctatcattgatgggcatttgggttggttctgtgtctttgctattgtaaacagtgctgcaattaacatatgtgtacatgtgtctttatagtggaaggatttatattcctttgggtatac

SEQ ID NO: 912336 - DNA, 448 bp, Homo sapiens
gaatctttacatttcttgggggaatgtaaagggagtaggattgttttgggaaatccctccccatagaatgaaacatcaaagtgaggaagcagcattccctgccaatggttgtcctgtggtacttgtcacatagttaagcatttaatgaataacagtggttcaggaacctattagatcagcaagattaaacgaggaaaaattttaggctataatctttatcccatcccagacttaataaatcaggattttaattatggatctcctgggtagacccaggagttctatagttttaaaagcttctcggcacttctgtttaaataattatctatttcttgtatcagtcttgagccatataaatgtattttttaayctaagatggcttcttcttatcattgtaatcatttcttcagtctgtgattatcatctttagtatgttttctagaatttg

SEQ ID NO: 912337 - DNA, 638 bp, Homo sapiens
aaaagaaatgctatacttcctagtagtcattccccctttcttcctstctgcagcctctggcaaccactgctctactttctgtgtctatggatttgtttattgtggacatctcatgtaaatggaatcacacaatatacaagttgagcatccctaatctgaaatccaaaatactccaaaatccaaaacttataaatgtcaacatgatgccacaagggaaaatttcacacttgacctcatgtacacaaacattgtttcatgcacagaattattaagaatatgactaagaccccaaaagcaaatgcaacaagaacaaaaataaataaatggaacttaattaaactgagaagcttctgcatagcaaaagaaataacagagtaaatagacaatttatagatgagagaaaatattcacaaactatacacccaataaaaacctaacatcaagaatctacaagggactcaaacaaatcatcaagaaaaaacaaataaacccattaaaaagtgggcaaattacatgaaaagatattttccaaaagaagacacacacacagaaatggccaacaaacatatgaaaaaaatgctcaacatcactaatcatcagggaaatacaaattaaaaccacaatgagatacaaaatta

SEQ ID NO: 912338 - DNA, 665 bp, Homo sapiens
cccaatactagaatctggattctggatgtgctcattgctactggtgtggcactkctttcaggggctctcagttaaaaatgcaaacaagcaaatatgtgtgcctaataaaccatgtatatacacatattcataaatatttctatatgcaacaagatgtaactatattcaggtaaaatgaggtcttaccaatatctacaaccctattccattatcaaatagtatttccgaagttacttaggtcagcacctcttcccccagccacctcatctcagtgagataaattcatatgtttatttggactgcatttagcttgttttgtgacattctgcatggcctcctgggatctcaatatcacttgaataattttatttgtaatcactaaggtttacattttgtgcattaaaattctacagattttaacaaatgcatactcttatgtatccaaaatttcagcatcatacacagaagtttcatcactctaaaatactccctgtgttgcagttattaagcctctgctttcttcccctacatccctggcaagcactgatctttttaatatatctatagatttgcctttttcacaatgtcatgtaattggaattataccacatgcagtgttttcagactggctaatttcaattaacagtatgaatttcatattcatc

SEQ ID NO: 912339 - DNA, 543 bp, Homo sapiens
aaaggaatgtgggagtcattgaaaagggaagaatgcaggatgtttcagaagattctgccttgaatgaagacagatgaatagaggagggtgagaaggttgagagctagcgagtgaattttcctgttcagggggcagttgaaagaaatgcctctgggctgggtgtggctcattcctgtaatcccaacactttgggaggctgagggcaggtggatcacttgaggtccagagttcaagaccggcctgggaaacatagtgagaccccatctttacaaaagtaaaaaaattagccaagcatggtggtgtgcacctgtagccccagctagttgggaggctgaagtggtaagatcagttgtaacccatcagggtgacactgaagggcagtggtgaaagaaaattctgaagctgggtgcggtggctcacgcctgtaatcccagcaccctggraagctgaggcaggcagatcacttgaggccaggagttcgagaccagcctggccaacatggcaaaactcagtctttactacaaatacaaaaattagctgggc

SEQ ID NO: 912340 - DNA, 683 bp, Homo sapiens
tacctctctcctgcaggtgagacgagccagagcagggcgttggagaggccctgcgagccggccaaggcawtctctagggctcctctggacaccggggcggatctgaagggaccaatccacgatccccgcacccagtggccacctccctcatctctaagttctgagggggaaaggaaagggagaggaaaggaggcaaggagggcgagaaactgagtcataagactttgggagactccttccaaggtgtccaaacctttgttggactgccccgggtaccccctctacagagcactgtatctggactccagtcctagggattctagttaccatccttaactgtttttcatctttggctgcagtttcaaataactgctttgaaaagtcctcatgcccagaacattgggaacttaccctcattttttactggtcaaagcaagtcacagagcaacgtgagctttcagtgtgcctaggaggaccatgagtctttggtggtgttacaagaaatacttgggaccgtaacgtcccccctaccccccaaactgagaaggagctgagagaccagagaatgactgtgccaagtccacctagaggagtagatgagtttattaggacttacgtacaggacactcctggaccgcggcaggacagctctagagatctgcacagcatccagtctctaaact

SEQ ID NO: 912341 - DNA, 638 bp, Homo sapiens
ttcaatgaaagttctgtcttgggataagagcactgaatgacaaaaagtcctctatgccaagaatagaaatttggagtcttcattgttgtccttgaattcctgaaataacctcagaatgtcctgatttgatatttactctggaagtgtatttgacatttatctaattttcttccatttgggcttaaattattcataatgtttaaagaggagcagtaacaggactacttcaaaatagctccttaaccacacagttgtataatttcatgcccattttattaaaggcattctaagtggttcattttgacaaacgtgtttatttggggggaaatgcagcacaaaacaactacagtaaataacggttggaatggccaggtgcggtggctcatgcctgtaatcacagtactttgtgaggctgaggtgggtgaatcacttgagcccaggagtttgggaccagcttgggcaatatggtgaaaccccatctctactaaaatacaaacattagctgggtgtggtggtgcatgcctgtagtcccagctactagggaggctgaggtgggaggatcacctgagcctgggaggttgaggctgcaggaagccatgattgcaccactgcrctccagcttgggtgacagagcaaga

SEQ ID NO: 912342 - DNA, 584 bp, Homo sapiens
aacaaggactaaacatcaaagactataggaacaccacgaagtacattacagacaagattctgaaacataagttattaactggwttctttacatttttatttcagtaactttattgtaaaattattgttatttatatattttaaagtaccaaattcacatctattctcacataaaatttagctttccactcatattaatgccaaatatctcatagccaaattttagtgatgtttttatgtcaatttgtgcagaaaaataagacacaattcaagagtcagatgcagatggttctactaaacatttgttttctatttcagtaatttctgactttatctgtataatttatttccttctacttccttcagatttcatttgttgtcatttatctaactttctaggctggatatttagatcatttattttatgacatttttctttttattagtttatgagcccataaattttccttctaacaagctttagcttcataccaaagtacttgtatgtcacattttattatcattaagtttagaatactttcttattttcatttaatttattctttgatccacagattgtataga

SEQ ID NO: 912343 - DNA, 567 bp, Homo sapiens
taagtgtacacttcagtggcattaagtactctcatacrgtgtgaccatgaccaccatctagttccagaactttttcatcaccccacatggaaaccccatgcccaataagcagccacttcccagaatcctttcccccagctcttaagcagccactttctgtctcttggatttgtctattccgaacgtttcatagaaatggaatcgtacagtatgtggtcttttgtgactgtcctccttcgcttaggaaaatgttttcaaggttcattcatgttgtgtcatgtatcagatgctccacatcctacttgttaggaaaatgaaaatctaaaccacaggaaataccatttcacgcacattagcatggccacaatgaagactacagaaaataacaagtgttgacgagaatgtggagtgactggagccctcatacatggctggtgggaatataaaatggtacagctattctggaaagcagtttggcagtttcccatacaacacagcatttgcactcctaggtatatattcaaaggaattgaaaccaggtgttcaaacaaaaacttgtccagtaat

SEQ ID NO: 912344 - DNA, 621 bp, Homo sapiens
ccttgtcttgttccagatcttagaggaaatgctttcagtttttcctcatttagtatgaaactagatgtggtctctattctgttccattggtctayatgtcagttcttgtaccaatactacgctgtttaggttactgtagacttgtggtgtagtttgaagttcagtagcgtgatgtctccagctttgttttttgcttaggattgtcttggttatttgggctctttcttggttccatatgagctttaaaatagtttttttctaattccgtgaaccatgtcaatggtagtttaatgggaatagaattgaatctataaattactttgggcagtatagtcatttttatgatattgattcttcatatccatgagcatgggatgtttctccacttgtttgtataagaccgcacagctacaaccattggatctttgaaaaacttgacaaaaacaagcaatggggaaaggcctttctatttaataaatggtgctgggagtgctgactagccataggcagaaaactgaaactaatgtgaagattccttaaagaactaaaagtggaactaacatttgatccagcaatcccactactgggtatctacccagagaaaaagaagtcattacatga

SEQ ID NO: 912345 - DNA, 622 bp, Homo sapiens
acactgaatccttcgggtgttaagggaaacacccctgggccatggacagctggagaacatcccacttccaccccaccatcatttgtcatggacagatgtccaacagaagatacactgaggtgccactagatttgcttgtggttgaacccagagaagcctcaacttgttgagaaaaagtaaatcctctctcccaccactgtccatctgcattcttcttggaactaaactcaagaggaggctcccaggaggaaatgcattctccagagggctggtgatggctggaaaacaccaaccagcaactcctacaccatttgcttcagctcctggttggagggagatgggactcatagtaggaaacacagtcctcaggctcagcccatagacgaacaagtgtcatcagagtgtgctcttctctcccctgagtctcttgggatttggccttaccagtcactcactactcttccctaaacagttacttgagagaattacccttgactttccttccaggtcaaatttccaccagcgcaggcttctttctccacttccctttccctgcacctgattttctttcactttactctggtgagcctrtttatgtcagggtgacatacttcaacactct

SEQ ID NO: 912346 - DNA, 578 bp, Homo sapiens
tcacttgaagtcaggagttcaagaccagccttgccaacatggtgacayggtgaaaccccgtctctaccaaaaaatacaaaaattagctgggtatgtgtgggggtgcaggcctgtaatcccagctacacaggaggctgaggcatgagaatcgcttgagcccacgaggcagagtttgccatgagcggagatcacgccagggcactccagcctgggcaacagagcaagactccatctcaaaaaacaaacagaaaacaaaaacaaaaaacaatacagagagaaaataatttgcacgggtcacacagccaatcagtgtaatgatcagatttgaacccaagcaggatgattccagatcctgcagtcaacagctgcgttctgcttcttatcaggtaaagcaggtctcccagagtgacacacagaacacacaaaatgaagagtggcccaagatctggaaatgatccagggtttgtgagcatctggcactggaatcaatccaaaatcaatgtttaaataacagttaccttcacccccaaattgtctcattgtctgactgctgaatttgaatcagggctatggagaat

SEQ ID NO: 912347 - DNA, 579 bp, Homo sapiens
aagcttagggctcaagggttggggagggaacattgtttttaaacagtcgaatgcatgacaaagtaaaatcacaacagtttgacagcacaattttaataagttttgcttttttctggcaccgatattcatcaagttatggcttgaagcaatagagggaatgataaggaaagaaacaagtgttgagacataagtagtcactgtggtgggcgccttgaatgttattttgttgtgagaattgttcacgccgttgatattcccaaatgctttaccagcttaaattaaaaaatgattatttaatatattcagctcttctgcctacccctgagagaacaaacattacggtcttccacgtcgctgaaggtggagcaggagtggattcataactccacaaagccctcctcacccacccctgtctcctgcaagttggggtcatgttccaccaccttgcaggctgcagctgaaagccatggagaactcagcttttctggggtgcttcagaagatgtgcagggatgtgatgctkgtggagggagaggggcggcagctgctggggcctgcatagaatgcttggacattctag

SEQ ID NO: 912348 - DNA, 599 bp, Homo sapiens
taaataattttaaatctcacaattaatgttattaagagatattggataacgttctaattaaaataattttcactggagtctccttaatatagtatgaataatggcgcattttacaatttatgtcatctttctttttctggcagtttcttttttattagaaaataacctgtttatattttcacatgtgtgtttactttatgctggtaaataatgaacaaaatataggtgatttatgtgagcaaactttgtacactggacctgcctgagggcagtgtcaaggagtgacaagtggttgcctgggacactttgtgcctacaaggtccatgtaggtgtcaatcatggaatatttcctagaagagtggaagaaggaactccggcccctgttgactatttttttggcattcttctgtagtagataaaattctgttctttttcacagtcatctgtaagtgaaagatcaaagtgagcatagatctcagttratcgggtaataattaaaaagtagtaattagatgggatgatggttatctatctatctatctatctgtctgtctatctgtgacgtgggaaatgaagaggctaatgcatcttttcttatg

SEQ ID NO: 912349 - DNA, 576 bp, Homo sapiens
cttagggctcaagggttggggagggaacattgtttttaaacagtcgaatgcatgacaaagtaaaatcacaacagtttgacagcacaattttaataagttttgcttttttctggcaccgatattcatcaagttatggcttgaagcaatagagggaatgataaggaaagaaacaagtgttgagacataagtagtcactgtggtgggcgccttgaatgttattttgttgtgagaattgttcacgccgttgatattcccaaatgctttaccagcttaaattaaaaaatgattatttaatatattcagctcttctgcctacccctgagagaacaaacattacggtcttccacgtcgctgaaggtggagcaggagtggattcataactccacaaagccctcctcacccacccctgtctcctgcaagttggggtcatgttccaccaccttgcaggctgcagctgaaagccatggagaactcagcttttctggggtgcttcagaagatgtgcagggatgtgatgctkgtggagggagaggggcggcagctgctggggcctgcatagaatgcttggacattctag

SEQ ID NO: 912350 - DNA, 589 bp, Homo sapiens
caatttactgtctcctaggcttccctgatcacaagaaccactcctgggggttctgatttagtggagctagagcacagcccaccagtctcttttcccctttcccctcaggtggcccttatgatcagccaggtttgggaaacctgttttctttggctgagacgggactcctgcaggtgaagtttggaaagaaggctctgttctgtccggtgctctctgagcagccagtgttcatatgggtcagtgatgactgtcagaaggagcctggcaggaaacacccatgtgagtgtcttccactcatatgacaagaggttctgtgtttttttttaagaacattgcacataagcttttactagtaaagcaatgcaacatttaagaacataaccatttctaaattcttagcagttcttaaggagataaggttgtcacactagaagagtggcctgtggtttgaatttcacattcctccaccactacccctggctgtcttctccccagaaagcctccctaactaggtgcagggatagccaatcttttggcttccctgggccacartggaagaagaattgtcttggaccacacataaaataca

SEQ ID NO: 912351 - DNA, 583 bp, Homo sapiens
tctatacaatctgtggatcaaagaataaattaaatgaaaataagaaagtattctaaacttaatgataataaaatgtgacatacaagtactttggtatgaagctaaagcttgttagaaggaaaatttatgggctcataaactaataaaaagaaaaatgtcataaaataaatgatctaaatatccagcctagaaagttagataaatgacaacaaatgaaatctgaaggaagtagaaggaaataaattatacagataaagtcagaaattactgaaatagaaaacaaatgtttagtagaaccatctgcatctgactcttgaattgtgtcttatttttctgcacaaattgacataaaaacatcactaaaatttggctatgagatatttggcattaatatgagtggaaagctaaattttatgtgagaatagatgtgaatttggtactttaaaatatataaataacaataattttacaataaagttactgaaataaaaatgtaaagaawccagttaataacttatgtttcagaatcttgtctgtaatgtacttcgtggtgttcctatagtctttgatgtttagtccttgt

SEQ ID NO: 912352 - DNA, 613 bp, Homo sapiens
ctcaaaatcataagagctatttatgacaaacccacagccaatgttatactgaatgggcaaaaactggaagcactccctctgaaaactggcacaagacaaggatgccctctctcaccwctcctaatcaacatagtattggaagttctggtcagagcaatcaggcaagagaaaaaaaataaagggtattcaaatagatgatatgattgtatatttggaaagatgacatgattgtatatttagaaaaccccattgtctcagcccaaaatctccttaagctgataagcaacttcaacagtctcaggatacaaaatctatgtgtaaaaatcacaagcattcctatacacaaataatagacaaacagagagccaaatcatgtgtgaactcccattcacaattgctacaaagagaataaaatacctatgaatacaacttacaagggatgtgaaggattcttcaatgagaactacaaaccactgctcaaggaaataaaagaggacacaacaaatggaaaaacattccatgctcatggataggaagaatcaatatcgtgaaaatgaccatactgcccaaagtaatttatagattcaatgctatccccaccaagctaccattg

SEQ ID NO: 912353 - DNA, 613 bp, Homo sapiens
ctcaaaatcataagagctatttatgacaaacccacagccaatgttatactgaatgggcaaaaactggaagcactccctctgaaaactggcacaagacaaggatgccctctctcacctctcctawtcaacatagtattggaagttctggtcagagcaatcaggcaagagaaaaaaaataaagggtattcaaatagatgatatgattgtatatttggaaagatgacatgattgtatatttagaaaaccccattgtctcagcccaaaatctccttaagctgataagcaacttcaacagtctcaggatacaaaatctatgtgtaaaaatcacaagcattcctatacacaaataatagacaaacagagagccaaatcatgtgtgaactcccattcacaattgctacaaagagaataaaatacctatgaatacaacttacaagggatgtgaaggattcttcaatgagaactacaaaccactgctcaaggaaataaaagaggacacaacaaatggaaaaacattccatgctcatggataggaagaatcaatatcgtgaaaatgaccatactgcccaaagtaatttatagattcaatgctatccccaccaagctaccattg

SEQ ID NO: 912354 - DNA, 511 bp, Homo sapiens
agttcctggtggtgcctctccatcttgatagtttaaaatttctatatttttccatttaaaacttctcaactccctattgaaaacaatggttataaaaactgaaatccattcttacagcttttgatgagagcaaaatgtgcctttttctccctgtttttacgtgagaacctatcaatagatggctctgagaaaacagaaatcccaggaaaagaaaaattcgaaaggaaaaaaagccaaattttaaaattctctagagtctacagtaatagacagtagcaaagtagtgcactctaaagaaccagggctacatgtcttcattgcaacttgaaaagtctgcagctctatactgtcctgattacctgaggacactcccttgagtaaaacaggtttgccctgtctaagcattggcaatayaaaaacaatgaaatttttaaaaaggaaaatgttttcctcagttaactttatgataaatgctaatccttagggataaaatgaaagagtagataaagta

SEQ ID NO: 912355 - DNA, 397 bp, Homo sapiens
tgatggcacgacggtggggcttgtaccctcctctgtgcagaacgagagttctgagcyccattccagctgctcgttcttgggaaaaatattaatttaaccaagggcttgccacatctgaattagtgagataatagcaattgtgaaaattaagtgtgatcacgtctgtaaagcactccgcctagtatctgtcactagagtcagcatttaatatgtgttagcggcagcagcaattacctcccctgccttggcccagtcagttcctgcccatcatccgttggctccttgcccggtgggagcatcaagcattttgcccgtgccttcattccagcacatgtggtggttttgaacatgttgatcacctttctctagacaaggctccttaaggttgggaaacctc

SEQ ID NO: 912356 - DNA, 569 bp, Homo sapiens
gacatagtctacccaagtgagaatgaaccagaaaaacaactctggtaatatgacaaaacaaggttctttaacatccccaaaagatcgtactagctcaccagcaatggatcaaaatcaagacaaaatctctgaattgccagaaaaagaattcagaaggtcaattattaagctaatcaagtagtcactagagaaaggtaaagttcaaattaaagaatcaaaaacatgatacaggatatgaaaggaaaatgcttcagtaaaatagaataaaaaacaatcataacttctggaaatcaaggacacacttagagaaatgcaaaatccactggaaagtctcagcaatagaattgaacaagcagaagaaagtacttcagagctcaaagagaaggttttcaaattaacccaatctgtcaaagacaaaaaggaaagaatttcaaaaaaaataaagcctccaagatgtttgggactattttaaaatgtccaaacctaagaatggtgttcctgaggaagaagataaatctaaaagttcagaaaacatayttgagaatataatcaaggaaaacttatctgga

SEQ ID NO: 912357 - DNA, 576 bp, Homo sapiens
atataatcaatcaatacagaaaggcatttgacaaaatccagcattcattactgataatcaagaaggttaggaataaacracacttcttcaatctgatcaagggcatctacaaaaaccctacagctaacatcacacttaattgtgaaagacaatattccccaccttcccaacgtcaggaacaaatcagggatgcctgcttttaccgcctctgttcaacattgtactgaaggctttagactgtgcaatcagagaacaaacagaaataatggacatccaggttggaaagaaagaaagaaaaatgtattcacagatgacatgattatttatgcaaaattcagcggactctacaaatgagctactagaacaaataagtgagtttgtcaaggttgcaggatacagagtagtgtacaaaaatcagttgtatatggtagcaatgaaaaattgataattgaaacaaaaaatcaacatttgcaatcacataaacaatactacctttgcaatagcataaatacctgggataagtctgaccaaaaaaatgagaaaaatactgtacactgaaaactacaaaatactgat

SEQ ID NO: 912358 - DNA, 574 bp, Homo sapiens
cagttcctttcagtgccacccctgataaaagaggtggttgtagcttatgtgtttctattgcaggtacaataaaaattcaaaggagctgtgatccttttttttttttttttttttttggtgctctgggaataaaggagcagttttccttgcaggtgaaaatatctcttagtttttctgccctatttttcatttctgctctattttcattaatcatataatccaaaaaacaatgttaatcggcctgctgttattagaaacaattacaggtatgtccacacttgtcttccatacctgcatcacagcaataaacctgcattagtcactgaacattgacagtctcattatgttttgttcattttgatgcctgagcttgacgaagtggcttttgattcctcaggggtgggggaagtgagtgggtatcggcagccttgtagatgaaagccctttcaagaaaaaraatgctgactggtgaggaagaaataaagcagccagcttgaaatttttttgaacatattttgtagaggagccagtgtgatgcaaatggcatgccagagcataaacgtgtacacttttt

SEQ ID NO: 912359 - DNA, 593 bp, Homo sapiens
atagctaggacagcgggcattcaccaccgacccagctaattttttawttttcgtagaaatgggatgtcactatactacccaggctggccttgaactcctgagctcaagtgatcctcctgcctggcttcccgaagtgctaggattacaggcatgagccaccgcacgtggccactggggggcatttaatacactgaaatttcatttgaaattttgtgatttaaaggtttatcttcgctaattcagaacaatataaaaatatacagactaataacatggaaagtaatttgaaatttaacaaattgagaatgtaggacattcattaatagccattaataacatcataagatagcaattcatgaatggaagaaaggaaaatattcatattcattctttataatttgatctatataaaatgccaaaagcactaataatacatggatataaaatattctttttgccctgtgttaagagaatactgctatattcagctgtgttgcttgtcttttctcatgaaaatatgtatatatttttaagaaaaccaaaaagtcttgtcgtatttgcttgttatctattgctgcataaaacattattcc

SEQ ID NO: 912360 - DNA, 625 bp, Homo sapiens
tattcacttgacatgaacaaactgctttgtgtttgggattcaggtaaaaggtgatttttgcattttctagtaatagtttagaaatcttttcatgtcagcatcttgaaatctacctcattatttatttatttatttatttatttgggagacagagtctcgctctgtctcacccaggctggagtgcagtggtgcgatcatggctcactgcagcctcaacctcccagactcaagcgatcatcccaccttagcctctggagtagctaggaccacaggtgcatgctaccactcccggctaatttttgtattttttgtagagatgagttttgccatgttgcctaggctggtctcgaacttctgggctcaaacaatccacctgccttggcctcctaaagtgctggaattataagcatgagccactgtgcccagcctaatttttttcataatttactttttctctggagcatagattcaaaatgccctgaatatatgctctctacttcattcttttaataactatacagtttgctaatgttacrctggagtatcccagtgcttaaaaatataatacacttggctgggtgcagtggctcacgcccgtaatcccagcactttggtaggccaaggt

SEQ ID NO: 912361 - DNA, 625 bp, Homo sapiens
tattcacttgacatgaacaaactgctttgtgtttgggattcaggtaaaaggtgatttttgcattttctagtaatagtttagaaatcttttcatgtcagcatcttgaaatctacctcattatttatttatttatttatttatttgggagacagagtctcgctctgtctcacccaggctggagtgcagtggtgcgatcatggctcactgcagcctcaacctcccagactcaagcgatcatcccaccttagcctctggagtagctaggaccacaggtgcatgctaccactcccggctaatttttgtattttttgtagagatgagttttgccatgttgcctaggctggtctcgaacttctgggctcaaacaatccacctgccttggcctcctaaagtgctggaattataagcatgagccactgtgcccagcctaatttttttcataatttactttttctctggagcatagattcaaaatgccctgaatatatgctctctacttcattcttttaataactatacagtttgctaatgttacgctggagtatcccagtgcttaaaaatataatacacttgsctgggtgcagtggctcacgcccgtaatcccagcactttggtaggccaaggt

SEQ ID NO: 912362 - DNA, 603 bp, Homo sapiens
agatggagatcacctatcttcattactgaacaaaactacggttcacaatatacctggattcgacagcataaaagaaaccaatatgcaggatggtagtgtgcaggtcattaaagatcatgtgaccaattgtgcattcagttttcagaattctttgctatatgatttggattaattctatataattttggacttttaaatattaaggttaaaaaatacctgtatctaaaattgattctgttaactgttgtcttaaaactaaaggtattaaagtataaaattaaaatttgcaattttttttaaaaaattgcaattttgattctcatgggggaaattggagataatttttttttttttgcctctggagtttaaagtttccttatggagataagttttgtgattcctgtaatagatgtgtatgttttctatttgagagttaaaacatttgagagttaaaacatttagttttaatacaacctatgtatatatacttctgtgttaawttttgctttgtcattaataaaatttaaaaatattcactaattgtgtttgtcacacaaagtaattctcaagaatgcatttaactggaattataagtacatgtgt

SEQ ID NO: 912363 - DNA, 423 bp, Homo sapiens
ggggcaaaccaagaggtgagaattgaaaagcaaaggcaaataatgctggattaaaatgactggtggaaatgtcagagcaggagctaaagaaccagcaacaatcaraccagaagaaagaaaagtgggtattagagaaaagcaagagctgaaataagcaagttgaagtataagggaataagagaaactctgaaagtgccagacaaaatttggccagactgtcatatgctatcccagctagattttgttttatgttgttccatgtgccacatacatctagtttctgacattatcatctaatataaccattttgttgattcctagataattttcaatgactctctttattaaaaatgaattttaaaccagacactttaagtgtttaaattacctaagtatcccaagactgacaagtaagcagttgtc

SEQ ID NO: 912364 - DNA, 505 bp, Homo sapiens
cgtctcaaaaaataaaataaaggcccggcgtggtggcttgtgcctgtaatcccagcactttgggaggccgaggcaggcagatcacgaggtcaggagatcaagaacatcttggctaacatggtgaaatcctgtctctactaaaaatacaaaacattagccgggcgtggtggcaggcacctgtagtcccagctactcggaaggctgaggcaggagaatggcgtgaacctgggaggcggagcttgaagtgagccaagatcgcaccactgcactccagcctgggcgacagggcgagattctgtctcaaaaaaataaataaataaaaataaaataaaataaaataaaaggagttgtgtgatctaagaatgaagtgatgagggtcagaactaaaatagtgacaatttagatggacggatgtaagaatcatttaaaggaagaatcaatagaatttggtaactgatttgatatggggaatgacrggtcaagtgaaaatggctctaaggtatgt

SEQ ID NO: 912365 - DNA, 679 bp, Homo sapiens
attattatatgtattttatttatatattatatatatatataatcaagcacaatagttacttttataggccagtattctttttccatttctatataagtaaaatatattggcagtatgttaaaattaattatttattaaaagaacagacttttaaaatctagaattgtctggataattaagaactgtggcatagaatttgggcagtagaatttacctctatgttcccacaaagaatgcagtggtattagtgctgtatgaaataatagaaaagaataaatgaaaattcatttaaaatgcaaataattattaaaataccttgaacttcacaataaaatatctaaaataattaggattcatgcaatttcacattcatttacttcactggtaaaccaacttaccagtgtaaagtgccttaaagaagaaaaaaagttttattattttttgtttccttaaaatactgaagtatcttttgtactttcagtaaattatgtatttaatttctcatattcatctttgataaatttagccaaagttctaattgcacattttattttcaaaaaaaaaaaaaataygtagcccaatacaatatactctaagaaaatggaaagaggagaatcattcttcatgaagcatcctatagttatcttccaggaggaataacaaaattgacatacagaat

SEQ ID NO: 912366 - DNA, 599 bp, Homo sapiens
agcacaggcaaccaaagcaaaaatggacatatggacacatcaagttaaaaaccttctgcatagcaaaggaaaaactcaacaaagtgaagagacagcccacagaatggagctccccatctgacaagggattaataaccagaatatgtaaggaactcaaaaaactctacagcaaaaaaaatctaataatctgatttttaaatggcaaaagatttgtataaacatttgtcaaaagaagacatccaaatggcaaaccagcatataaaaaggtgctcaacatcactgatcatcagagaaaggcaaatcaaaactactatgagatatcatctcactcctgttataatatttttttacccaaaagtcaggcgataaatgctggcaaggatatggagaaaagggaatccttttacattactggtgggaccactgctacttgtatacttgtacgttgttagtacaaccactatggagaacagtttggagggtcctcaaaaaactaaaaattgagctaccatatgayccagcaattccactgctaggtatatgccccaaaggaagaaaaacagtatatattaagagatgtcttcactcctatgtttgtt

SEQ ID NO: 912367 - DNA, 676 bp, Homo sapiens
cagttgggctttctgaaaacataagataatgctttaaatcaaagcagcttggggacagatggattaactcttctgagtcagcaggggactattaaaaacatcactcttggacctgcctgtatctcgctgccagacagaccttcccaggacacggttttcatcatgtctctgtgattgtttattgagctgttcttgttcaggagtctcagtactttaagtgggtgtgtatgcattattaatagttgtagtttcttaacttcagtgacagaaaagttaagaatttgaaaatattttagtttttcatatgcctttttaatatttcttttatgttaccactgtgagttacccattttcaagtgggtgtgtaattcatctacttatttatctaatttatttatttacttacttatgtggagattgaggtctcactctattgtccaggctggagtgtagtagctcagtcatagctcactatcacctcaaacttctgggctcaagtgattctcctgcctcagcctctcaagtagctaggactaccagcacacaccaccatgcctgcctaatttttattatttatttgatatttgaggtccaatttctytctttttttaaacttgtatcttaacttcaggggtacacgtgcacgtttgttacataggtagacacgtgtcatggg

SEQ ID NO: 912368 - DNA, 677 bp, Homo sapiens
ctgggatattggaataaatgaattatgaagcacagttgactgtcagtgtctaatgtactaaaacttctctaatacaaaaagtaggaggaaaaattcttccttttccctaaatcatcagatactcatatgtaaccaacatttgtcacatgcatttacttttatgcaaagagcaattctagatgctgtggggcagaaatgagaccaagactggaggcttgtcctctggaacctcacagtcttagtgtaagttacacacagtctgaggagaggagcccagaaggcttcacagctaattcctcctggaaaatccagctaactgatgagatgtggaagtgtgagcgggatcacaggcttaaacgtctgccctgtgagggtgggctttcgagaacgcaggacagacagctgtaaagtcatccaagcttgaactgcaatagcatgaaccagtacacattcctaaaatgcttaaataagatataatttgaatatagaaagtactgtgcacaaattccattctactggttgtaagtgcctattcttacgatatytgtgagcaaaaatcactgaagaagatataactcagttttctttacatattctgatgccttacgggggagcaaaaactgaatcgatgttgtccaatagaaataggatgcaagccacatatgtaattttgaatt

SEQ ID NO: 912369 - DNA, 519 bp, Homo sapiens
gcagctcaacctagggcatctcagatgctaacccagcagttcctccctgggcaaggtctttagaaatcccactgcaggacccttcttacaataaggatatattatttaccaccaccctctatttgctctgaaaacctgagaaagcaaaggctgatgatgttagtacactgagggttgtgtatttttcagatttcacaaactgttttatgcccctgagggggacagttgcctgctttgccagggcactctgtgagacctgtgttggcaccttgcagcacccaatcttgaggtgggagatgtttgctgccccatgtcacaagttcttagggctgctgactgtgtactacagcacagggtcttaatatccctccctgctgtttcctacttgaggcataagagagctttgtcaccttggagagaggtgttmtataaataccattatttgggttgagagtagcacgatccagtgctagggttgtctatttgtgtaagtcagtaggcaaatcttcctcttccctt

SEQ ID NO: 912370 - DNA, 570 bp, Homo sapiens
tcagattctccaggtacctagaatggcctttcccaggtctctccctttacggttcactctttcagaaagcccagctsgagcatcatctgttcattagccttcccagccttactctttcaggtggaatttgttactgtgtcttctgcagtgtaaatattaatacattacagcctcacccacactctgcctcacagcagtgagtgagcactctgactctccacctggataataagctttttaagagcagaggctgcacctcacttctttcagagtccccctagacatagcacttgcacattataggtgcttcatgaatatttcttttgctcactttatcacagagaaaatcttttaaaaatagatttttggtaaatgactatattcaaccaggcagtgaaacttcacatttcttctgtatagggaatgcataattgtttccagtgtaacctccttattgattttaatcaatttaatcttttttaaactccttggtgtgggactcgtgatttggtgtaggactcatgatttagcttgggaactctctttttcggggaaaataagagccttttt

SEQ ID NO: 912371 - DNA, 747 bp, Homo sapiens
ttctttcttttcttttttttttttttagatgggttctcactttgttgctcaggctggtcacaaawttgctttgttgtccaggctggttatgaatatgatttcctttgatgtaatttgcctagtgtttcttgtgtttaggattcattgagcttcttggattcatcagtttgttgttttactgaagtttggacattttcagccattactttttcaaaattttttttgtctctctccaattcttctctccctcatgaacttcacttactcttctgttaactcactcgatattgtcctatatctcactgattattttctttctttttttgattcattttctccatgtgtttcatttttggattgattttattgctaggctttaaatttcactaatcatttttcctgcaagacctcccgtggttaataccatccagcatattatttatctcagacattgtatttttttatgtctgggaattatacctcatagttatgtgtatatataagcagctgttcctcaactcataatgggcatcgcattatgtccagataaacctatcataagttgaaaatatcgtaaattgataatgcatttcatacacctaatataccaaacattatagcttagcctagcctaccttaaacatgctcagaacccttacattagcctgtagatgagcaagttcatctaacacaaagcctattttgtaagaaagtggtgaatatctcatgcagtttattgaatactgt

SEQ ID NO: 912372 - DNA, 640 bp, Homo sapiens
gaacacgatgcagcagttaagatgaatagtctgcctctacagagagcaacatatataagtttgatgggtaacaagttacagaaggttgtataaggttgtatgcggtatrgtattttatactgtttatgtaagttaaaatacagcaaataagtttttgttgtttatggataccatagcacaggtgtcaactatgtaaagtgtgtaggctgtttttgaacagctcacaagctaagaatgacgtttacattttaaaagtgtaaaaacaaccaaaacatgttacatagactccacctgaccctcaagttttaaaatatttctatttgctcctttactaaaaaagttttctggtttctgcagtacagatgatctgtgtgcccagggccatgccctccatgccctccagcccaagcttggtagacagctccctgaaggccacctctgactttcctgccccaggagttattcttgtgccttggaacttcagttcttcctgggggcagcctgaaacatcagggattaacacactggaggcaaccacagccactgggaatgtgaatcagtggatgacgatttccatatcttcctcttcaaccaaggagcagtgctgaggcatgttcttcatggtccctcacagggaccc

SEQ ID NO: 912373 - DNA, 618 bp, Homo sapiens
aatcaaattcaaacattttcccaatcctttagctaaagttacttgactaaaatttatccctttgaaaataaactaccttccaaaagacactacagatttattaaagtgacactgagatagtaaaacatcttcaagttcaacattttttcaagtagacttacctactagtgaagaagatttgactgaaatggatgtggtttgcttaataacagcctttcttgacttccaaattccaacctgtacaagggatattggagtacgactcattgtgtctatatcctatctcatttcccctttatttacttatcatgcctaaatgcattgagaaaagagtcttagcatccgagcaagcccaacatcctgtgttctcatcccttgcaacatctaccatatgcttcagtcttggttctttgtgttagtccttcagtttaaataacaataaaatagctaatgtttagtaaatatttagtaaaccagtgcctcacatgttttatctaatgtgatagttccaataactgtgtgaggtaaracaagctattatttttggagtacgacaagtgctgtggaagagaaatccagtaaacaatgacagttaggaaatctatttttgtttttgct

SEQ ID NO: 912374 - DNA, 620 bp, Homo sapiens
aaggcaatatgtgaaatgacttgagcatcccaaaacmctgttttcattatttttacttttgactactccacttttgcgttgactagacttctttcactttttggtagccattactttgatcgggctttgtcttcagtatggtactttaagccatgtttcatctcctgttacaattcttcaagaaatacttcaagatcttgatcccacttaaaaaaaaattaattgaaagctctgctcttgcctgaagctgatctgggtgcaataattttggtacccattgagaggagtttgctcaactttaatttttcagtcagaattgtacgagctgaatcagttaagctgtctgtggtgtttcctattatttgtgctgtgcatcgttggtcctcttgaatcagaacacaaataagatgatttttttttttcctcacaaatggatgcggatggtctcctgcaatggatactatggacttaatcttcaacattgtcttgcttcttaaaacaagttacccatttgtaaactgctgattttcaggggttggaggcattgtttccattaactttacatgaagcatcaatgatttcaccattattcttcgacccaagctttaccataaatttga

SEQ ID NO: 912375 - DNA, 670 bp, Homo sapiens
ttaggattttcaggaaaggatcttcagcaagaccttcatttggtatttgttttcctccaaacctcattatgggttgaggatatttgctttatcagagagataaagtgaagccaatgtttttcagagtcgataacagtgtcagatgtcatcacatctttagtactccatgataagtgcacatgtccactgcttgagataattttgagagtttaagacctttactttttaaaaattgttctgacttaggggtcagattcttgtagagtctggatatatttggaaataattatttggaaattgggttctctttataatgaagagcaggcattaagagaagttttctactgactcttatagtcattactgcttaaaaccactacatgaattcttagttgagagaaaggaaaacaaaagtaaaaagaagaggcagagaaatagacaatatacaggtatagataatatgactttttatagatagcttcactatcttccaaaaaggcaaaaatggctttatgggtataacttcactcactgagaaaaaaaaaaaaaagaccaaaatttcccaaaatgttcatgaayacagctctctctcctttgatattaccacaaatcttttctttgaataatgatacagggtatctggatgaggctttctcagtatttatgtaag

SEQ ID NO: 912376 - DNA, 644 bp, Homo sapiens
cattttaacgtttttctttaaaaactaagacacagcacacacattagtctaggctacatagggtcaagatcatcaatatcactgttttccacctccccatcttgtcctactggcaggtcttcaagracagtatcatacatggaattgtcatcttctgtaacaatgccttcttctgaaataccctttgaaggatctgctcaagactgttttacagttaactttgtttaaataaataagtggcaggaggacactctaaaataataatgaaatatatagtatagtaaataagtaaattggtaacatagtcatttaggcaatagtaatttttcagctccattaaaatcttatggtaccaccattttatatgttgttcagtgttgactgaaacatgcagcacattactgtatgttattttattaatagtagtattggtgaatggaggcgctctgtggtgatttattaagaaaaattgtgttttctctggaaaacagttgcctttaatctgggaaattcctaggtggggaacaatcatgtttacaagacttggaaagggagaagaaaacagatcagcaaataattttaatcaaagccttggtggaaaggttcctacatgttgcaataaacccaaagaggcttagagaagt

SEQ ID NO: 912377 - DNA, 638 bp, Homo sapiens
tgaggtttgagtccccacacagagtccctgctggggcactgcctagtggagctttgaggaaaggaccactgtcctccaggtcccagaatggtagattcactaacagcatgcaccatgtgcctggagaakccacagacactcagcatcagcctgtgaaagcacctgcgagggaggctgtaccctgcaaagccacagaggtagagctgctcaagaccatgggaagccacctcttgcatcagtgttacctggatgtgagacatggagtcaaaggatatcattttggaactctaagatttaatgactgccctgttggatttccgacttgcctggggcctgtagcccctttgttttggccaatttctcccatttggaatgggtgtatttacccaatacctgtacccccattgtatctaggaagtaactaacttgcttttgattttacaggctcatagtggaaggaacttgccttgtcttagacgagactttggacttggacttttgggttaatgctggaatgagttaagactttgggggactgttgagagggaatgaatgtgttttgaaatatgaggacatgagatttgggagtgaccaggggtggaatgatatggtttagctctgtgttcccacctaaatct

SEQ ID NO: 912378 - DNA, 608 bp, Homo sapiens
cttcacaaacaaaaacgtaagcatgcatatcacagaataaatgacccatatamatgtggaaagattaaaactacaataacatagtatttacagccatccaagaaataaatattaataactctggcaatattagaagatgacactagtataaattggtactattttagagaataatctgaaatatctaatgagagtaaaaaatacatacgttaagactctgcaacacctttaggcaaatcctcttgaaaaaatattacctctatgctcaaggaaatatacaaagttgtcccctatgaaatttctacaaatagcagttaatgacaagacaggaatttgtagtcgaagaagacaaatttataatttgatatatttaagctgagtcatttgaaacatgatgaaaaatgtggttgatggttggagtagattgtttgaaataaagggaaccaaggaattgtaaaatcaggatgttagaagcatccttagtgaaactacaggcaaaagatgaaatggagataaaggctacaacctaattattagaattcttgagaaatacagagagtttctctctggaaagaaaaacattaaagaggatcatgaaagggggagac

SEQ ID NO: 912379 - DNA, 406 bp, Homo sapiens
agcaatttgcatgtcacttatatgcaattctccatttattccatgtttctttattttcagttgtaaagataaagattgtatgatgttacaaaacatccagaattatatttctaatcttttccaattgtttgattagaaaccttgatgtgatcaagagtaattatcaaagcaaacaccaggcttggcagtcaggcagatgtacagcctcttcctctattgcctatgatattctgaataggaaggtgatatagcttggatatatgtcatctttaaatctcacattgaaatgtaatactcagtgttggaggtggggcctgatggcaggtgattattggatcatggaggtggatttcrcatggtttagttccatccccttggtgctgtcctcctgatagtgaatgagctc

SEQ ID NO: 912380 - DNA, 666 bp, Homo sapiens
ttcattcatttaatgaatgtctaccaagtgccaggcactgagctaccagaccatgcagagatgaagaaagcctggttcccattcttgagaagctggcaggaaccccaattaaggaggtctgagcactttgtcaagactcttgtgatgctccttttaccactcatacgatgtatggttctacatgtcgttgtctaatctcctctttgcccttcttccttgttcccaaactgcaaggatttttaaagacatacactatttcatctttattcccacttgtagagtgcctcatacgaagtaccttctccacattgatgtgttgaagctcactgagttaaaaccagagcaggaatttggctgtccccctccagccaagggtggtaggcatccttagcagaaggatggatattagccccaatgtggaaccccaatcttggaattagccccagtgtggaacccaccagaggcttgtccgtggcctgcggaattcaatagggacacctgtgcttggcatttactgccatagtcaccttttcaggaccattttctgctaattccttatcctccaacctaaggggctcamttgctgtcctttccctgccctcatggttgtgatcacattgattcttcctccaggaaatccacctcactcccacctgtaaaaatgtt

SEQ ID NO: 912381 - DNA, 706 bp, Homo sapiens
ttcccctgccgttgctacccctgcttctcaggccttcagatctggactgcaatctataccatcggccctctggctctcaggttatacgaccagctttcctgggtcctcggcttgcagacagcagattgtgggacttctcaacctccatattcacgtgagccaataccttctcataagtccctttctagagatatatgtatacatagatcctattggttctgtttctctagagaaccttgactgatacagatttaatgctatggaatgagtgtgtccccacaaactcataacttaatggtatatcatgaacaacttctacattattacatatttttactacaacattttcttaaatcacaacatttttaaaagatctttggggccgggcatggtggctgacgcctgcaatcctagcactttgggaggctgaggcgggaggatcacctgaggtcaggagtttgagaccaacctggccaacatagtgaaaccccgcttctactaaaaataaaaaaattagccaggcgtgatggtgggcacccataatcccagctactcgggaggctgaggcatgaaaatcgcttgaacctgggaggtggagtttgcagtgagctgagattgtaccattgtactccagcctgggygacagagtgaaactcagtttcaaaaaaaaagatctttggtattccatgctgaggttatactgagg

SEQ ID NO: 912382 - DNA, 459 bp, Homo sapiens
ttgattcttgaacagatctaagaagttaytgattttccatttgtttgaccttttacttgttaggacagagtgatgacttccaagctccttacatgctgaaccagaaaccagtgtcaaagaaaaacattgccagacacttgttaaaggtagcaagacagattttatgaagactactgcaaaagaggagagaaactccagtataaactgagctcagctccaactaagacaaaggtgaccaaggttattaaagagagaacaaaaagagaacaaaaaggggttatgaggaagtgaaaagcggggaacaagaaaagggactggggaactagggagaaatgaaaattacagaaggaaggtaagtggagaattactgaaaatggtttgtcaaggtgtgttggaacaatgtatactttgcagtttggcaatagtgtgttttcttgagtagaaactaggcatgggagt

SEQ ID NO: 912383 - DNA, 651 bp, Homo sapiens
ggcataggcatatttagcagctggcagaaaccccacattggctctttgattggtagggtgagggctattatggtgggaaagaacaaatggaaaccattagagctgcctttacctagaaaaatagtaaatgaaaaacaatatcgcatcgctggagggattgtggagattagtgttaccataaagacttgaaagatgcaggggtggtgactgccaccacatacccattaaactttcctatttgacctgtgcagaagacagatggatcttgaagaatgacagatctgtaccagatctggtttcattgcttgagaaaattaacacatcacctggtacctggtatgcagccattgatttggcaaattcctttttcttcatttctgttcataaggcccaccagaagcaatttgccttcagctggcaaggccagcaatatacctttactgtcctacctcaggggtatattaacttatgatttgtgccataatcttgttccaagaggccttgatccctttttgcttcaacaaggtatcacactggtccattacattgatcacattatgctgattggatccagtgaggaagaagtaacaaacacacyggacttattggtgagacatttgcatgtcagagaatgggaaataaattcaaata

SEQ ID NO: 912384 - DNA, 618 bp, Homo sapiens
ctcgtcatttagctttaggtatatctcctaatgctatccctccccactccccccaccccacaacagtccccagattgtgatgttccccttcctgtgtccacgtgttctcattgttcaattcccacctatgagtgagaacatgtgttgtttggttttttgtccttgtgatagtttactgagaatgatgatttccagtttcatccatgtccctacaaaggacatgaactcatcactttttatggctgcatagtattccatggtgtatatgtgccacattttcttaatccagtctatcattgttggacatttgggttggttccaagtctttgctattgtgaataatgccgcaataaacatacgtgtgcatgtgtctttatagcagcatgatttataatcctttgggtatatacccagtaatgggatggctgggtcaaatggtatttctagttctagatccctggactctcatgatttttaaaagaccttgccatccractctcataatttttagaagaccttgtcatcctctttagtttgtcttgtgttccttgctccatctgtcaccctgcttctacctaccatgctggcctcccttctgtccctcacatgcaccaagct

SEQ ID NO: 912385 - DNA, 648 bp, Homo sapiens
caagatatacataacaaaattttgccattttaactgtttttaagtgtagagttcagtgttattaagtacattcacattgctgtgcaaccattactacccatgcctagaactytttttgtcttccaaaactgaaactctgtacccattaagtaataactctcaattcctccctttacccagcccctgcaaccaccgttctactttctgtctctatgaattcgactactctaggtacctcatataagttaagtcatacaatatttgtctttttgtgactggcttatttcacttaacgtaatatcttcagggttcatctcttttgtaagcgtatattcgaattttatttattttcaaagctgaataatagtccatgtaatacatataccagattttgtttatccaaatggacacttacgttgcttctaccttttggctattgtgaataatgctgctataaacattgctgtacaaatatctgttggagtcttcactttcaattcatttgggtatatacctagaaatgaaactgttgtatcatgtagtaattctatgtctaatttttgagaaactgccatactgttttccatagctgccacacactttacattaccaccagcagtgcacaagattccagtttctccacatcct

SEQ ID NO: 912386 - DNA, 588 bp, Homo sapiens
tcaataggagctcaaaagcttgggcaactaaagcaaaaattaacaaatgggaytacatcaagctgaaaagcttctgcacagcaaagcaagcaatcaattaagtgaagacagaatgagagaacatatctgcaaactacccatatgacaagggattaataaccagaatatataagaagcttaaacaactcaacagcaaaaacaaaataataacctcaatctgattaaaaattagcaaaagatgtgaataaacattttttcaaagaagatatataaacggccaacaggtatatgaaaaattgttcaacattactaatcataaagtaatgcaaatcaaagctacaggatgtctcatcccagtttaaatggcttttatcaaaaagactagtaataaaggatgctagtaaggatgtagagaaaagggaattctcctacactgtcaatgggaatgtaaattaatacaaccactgtggagaacagtatggagatttctcaaaaaaataaaaatagaaatatcatatgatccagcaatcacattactagttatatatccaaaaggaaattcgtatatcaaagagacatctgcactct

SEQ ID NO: 912387 - DNA, 642 bp, Homo sapiens
tatgcatgcacacatgtagatctacatatgtatctatstatctgtatgtaaaaagacatagccatcatggaagcacacatgagactctctcctttgttggctaccaggaagctgctgtttcatgagagcctggttcagagggccacatggcaagcagctgccgacaaactgagagcagccgctgatgggtggccagcaagaaaacatggacctcagttatgcggctgcaaggaggtgaattctgccaacaaactgaaggtgcttgaaagcagaacttcctcattcaagctccggttgaaattgaggcctttcttggaaacttccaaaggaccccaagcacccttattgccagaattctgacccatggaaactggggagatgataaatgtgtgttgtagtaagacacttcatttgtgttattttttttttcagcaatgaaaaactaatacaccaaggaagaacagttttaatggaaaggcagaggagaaagtttgatctggtgggttcaggagacccctatctcacaccatgcacaacaattaactcaaaatggatcataggcctaaatagaagagctaaaactataaagcttttatgtgaccttgggtttggtaaatattttacaaatatgacaccaaaagc

SEQ ID NO: 912388 - DNA, 610 bp, Homo sapiens
caaaaaaaaaaaaaaaaagtatgtctttttctaagttgccttamggtaagcaaaatcaactatttgttcttagaagttaaattgctaatttccttaggtttatggtaggtttatgtgacttgttttttttttcctcatagcagagctatgtatctttggaattcagattaaaatgttcattttctctcagttgattgagatttctctgtgccaatagataatcactccatttccaagtcatggaggactacagaaaagttatcttgtgtcttaaagtaccatttaaaactccataaccccaaaggtattgatttaagtcaattcaattttaattaattttccttcacaaggtttcctaaggtcatgttcctgtggttggagttggagtttccctgaaggaatgtcaattttcactgtcagttatacagggaagaactttgttttcagataggatcagaacttaggatacgggtaaaaggctttttctctcccttctcaaagatccaaatggtagaaaacctgaactctgatttacagggatactctgaacatccccagcagtagacaacttggttcttgtccagaggaaacagacaaggaagtaggagct

SEQ ID NO: 912389 - DNA, 777 bp, Homo sapiens
aaacaagccatttcatttcaaatacagtagtgagagagacayatgatagacattcccatttcaaaggaagacattggaagaaataaaggggtcacaagtttcaaggaagtccaaagcctattagaaaaaaatctattagactgtaaagttggagaatcattttctttgactttattctgtgtcctataggctgagggcaggtagagctcttttcttagcagccggggaagcaactccatcctctaggctctgggcttccagagactgttggcaccagctccactcttttggcccccagctagataaaagtagccagtctgaaaagcctacatagtatataatgctaattatacaacattctggaaaatataagattatagaggctgtaaagggatcaaggaaaagggagaaataaatatgtgaagcataggaaaattttagggcaaagaaattattatttataatcctgcaataaggcctgttttcaaaattgatagaattttacagcacaaagaaagaaccttaatatatgcaatttaaaaattatttagtaagttggaggattccacaaagaaatgcagactatggctagagaatctaactgtactacaaaagcaggaggctgataaattattcatttttgtaactttagaaatgagtggagttggtaagactaacggcaaatgtagctgcacataagcattgtactctagttcatagaggtctttcccacacgggtatgtcttagcaattctagtactgccatacatcttaata

SEQ ID NO: 912390 - DNA, 593 bp, Homo sapiens; identical to SEQ ID NO: 912130

SEQ ID NO: 912391 - DNA, 593 bp, Homo sapiens
aggtgggaggattgcttgagcctaggaggttgaggctgccgtgagctgtgattgtgccactacactccagcctgggtgacagagtgagaccctgtctcaaaaacaacaaataaacaaaaaatagcagcttcagtagaagcacatttatccagaggtggagggaaggaggcctggctacaagaaaccttcatgctcaactggcaaattcagctctgattgtaaagcataaaaggaagtatttttagagcaatacttactcaggaaacagtaaaactgaacattgtgtttcatcataactggctctaacttgctgtggctgattaggaccataaattttgagtgattcaggtatgccagaccctcaaagaatctaactgaaaactgtttattgaccaatgaaccacaggacttgttttaaccaacatacaggcctgtggactctttcctctctatccacagtgctagttttcaatccttaatttgtggccgttaacaaccgctgatttgtmccccctcagtgaaactactcaatcgacttttttctataaaatatattccattgtctggcaagttttaaaaaaacacttgatttt

SEQ ID NO: 912392 - DNA, 582 bp, Homo sapiens
cattctctgacttcacagctgtaaaggcacctgggaaagatgaagagaaacaggtagaagagtgacagtttaaaaaaaaaatccatccatttaagtaatctgaaatgaattaaaagagtcacatatgttaaaatgcaattcacatccaaaaatgttccctttgtggaaattgtaattatggcgttctgaccacaagacttttgtcttgtttagttttgttttgggagcacctcacaggattaggttaactaggaacacacactgggaaacaactgcactaagttttcaagaaaggattatgttctctgcatcattcaggagcagtactcatgcatttcaggaaggtttccatccctatcagacatacctggctgtatatcaaaagtccatgctcctctttcatacagggtagagttgctgctaaaaagtgggtgagcagctagggactctatttctgccagctcctcccccacctttgcagcttgatgcagtcttgcaattaamtcttagcaaaggaagggatgttcaccagcatgaggtccccgccacaatccttagtgttctttattcctctgctacgtg

SEQ ID NO: 912393 - DNA, 630 bp, Homo sapiens
tgggttctcatccagattagttccactccctgtgaaatattttggaaagttgtagaatttatcttcagttttgtcatttacctattgaaacattattttcagttacattttttaaatttctattttatattgcaatttatattttatattttttgtgtgattatgtggctagttaggttatattacctgcaaatttcattttagaatggtaaaggggtatctcaaaatatgtgttacataaagggaggctttgggcctgagaaggcagagaaccgctgcactaaatcgttattcccagaataattgagaattgacactgatttttctttaaaatgtgggacacaagcatttctcaagtctaaaaagagaagtcattgttagtggcatataactgtattagtttcttaaaataaattaaacatatttctaaacagttaatgatggggcggggtaagcaccagggagaagaaaggaaatgcaaattcatttgtaaggagatatccctgcyttttcactggaaagtcaatttccttgatacattaactcctcaatctcaaacatttatttagggggaggtaccaagtctagggccctagcttcagggagtgagagggcaaactgcaaagtgaa

SEQ ID NO: 912394 - DNA, 557 bp, Homo sapiens
atgtgcaactcaggtaatttattatatatttttattactcatgtatcacagaatgatytatacccatgactaatcattttgccataagcaaaactattgagctcattacttgattaaaataaaaacaacaatttagtgtagtaatcaattttctgataaagataagaatttgcctaaaagacaatacataaaatgaggagtttctttaatgttcatttaatcaaacttataaacgtttttagtgtatagcctaattttttattttaatttttttaaactgacagaaggtaagatacggtattaaataacacaattatttataaactaatagattaataatgaattgatcattaaaaaaaacacaagccagcgtacagttgtattagtcatttgctttggaaattcaacatatctaattttggtatggatttcaatgttagcattttattctaaagaaataaataaattaggtcatttgtttctaaattataatgcaagggagagccctgctggcagactttcatagatgcagcaagtagactcataatagaagtaaa

SEQ ID NO: 912395 - DNA, 620 bp, Homo sapiens
aattaaaaaatatatgtcacatcacatataatgacccaaatcaccacttgatccaaagtcaaggaccttgaaccaaatgcatttaaaatgtattggtttattcggacatagatttcctttataagagaaaagcattcgaattcacccatttaaaaaaaatcatctttcattctttctaaattggacattaaatttgccaatgactgcattgtgttaaaggtgtggtccttttgctttctgatccaaattggcttggaattgatccaggatttcaagctgggattcttctgcacatttaaatgtatgtgacttgattggaagttgtcaaagacaactcattaaactggaaatctcactatgtcattgtttaattggtctttttttgttgttgttataagtatattgaagtgttgtaaactacaagcacagcaacacactgaatagccagttactttttaaaaaagttttagagagtagtgattgatactgagagagagacacacagagagagagatacagagagagagagagagagagagaggcagagagaggcagagagagagagtgcttaactgaagtatctataataatgtacygtacaggttgaatacaatacctgg

SEQ ID NO: 912396 - DNA, 527 bp, Homo sapiens
ctcatggattggaagaatcactatccgtaaaatgaccatactgcccaaagcaatctataaattcaatgccattcctatcaaactaccaacatcattttttcacagaaccagaaaaaactattctaaaattcatatggagccaaaaaagaacccaaatagccaaagcaatcctaagcaaaaagaacaaagctagaggcatcacattacctaacttcaaacgatactataaggccaaagtaaccaaaacagcaggtacaggtacaaaaacagacacatagaccaaaaaacagaatagagaatccagaaataaagctacacacctacagccatctggtcttcaacaaagttgaccaaaacaagcaatggggaaaggactccctgttcaaaaactggtgctgggatagctggctagccatatgcaaaaaaaataaaaaaataaamaaataaactgaactcctaccttttaccatatacaaaaattatctcaagatgtattaaatatttaaatgtaagaactcaaactataa

SEQ ID NO: 912397 - DNA, 579 bp, Homo sapiens
tgtagtcccagctccttgggaggctgaggcaggagaatggtatgaacccgggaggtggagcttgcagtgagccgagatcgtaccactgcactccagcctgggtgacagagcgagagtccatctcaaaaaaaaaaaaaaaaaaaagatattaaaaaatatggaagctactttggaactgggtaacatgcagaagttggaacagtttggagggctcagaagaaaacaagataatgtgagaaggtttggaactccctagggacatgttgaatggcgttgaccaaaatgctgatagtgacatgaacagtaaggtccaggctgaggtggtctcagatggagatgaagaacttgttggaaacttgagcaaagatgacacttgttatgttttaacaaagggactggcagcattttgcctctgccctagagatttgtggaactttaaacttgagagagatgatttagggtatctggcagaagraatttctaagcagcaaagcattcaagaggtgatttgggtgctgttaaaggcattctgttttaaaagagaaacagcataaaagtttggaaaatttgcagtccggc

SEQ ID NO: 912398 - DNA, 698 bp, Homo sapiens
agaaaagactaagatattaaaagaaaagaaaagaaacaagtacataaagtgctaccgggacagattaaaagtagctgtcaattktttgatgcttttaaaggtgtgggcttattttctaccccattgttttctgcataagcttcatgatgcctgcctaacagagaacagtgaaagacaggttgtgtcagttttcaagctgagacattaagggaatggtaacctccacttctctcctttgggacacttgctgtgtaacccagctgccatgccatgagaaagcataagcagctaaacagggagacttatttggagaaaaagcaggacccccaccaagaatcccagttgaaattccagccaaaatccagcaggaacttgtcagccatatgagtgagaaaataagttccatgacatggagctaagatgaaccattcctgctgagccctgtccacatttcagattgtggcaaaataaatgattgttattgcattaaatcacaaagctttggtggataaataccagaacacctataaacttctatgaaggaaaactcctgacagccatgaaaacaaatataataatgggagccatctaattttctctgaaggtttaacaaaaaaatgctctcatttaaatatattattatattacaagataagctctcagattataagagtatcactggataggcatttgaaaag

SEQ ID NO: 912399 - DNA, 677 bp, Homo sapiens
gacctacaaagagatttagattcccacacaataattgttggagactgtaacactctactgtcaatattagacagatcaacgaaacagaaaattagcaaagatattcaggtctttaactcagctctggaccaagcggacctaatagagatctacagaacttgccaccccaaatcaacagaatatacattcttctaagcaccacatcacacttattctaaaattgaccacataattggaagtaaaatgctcctcagcaaatgcaaaagaacggaaatcataacaaacagtttctgagaccacagtgcaatcaaattagaactcaagattaagaaactcactcaaaactgcacaactacatggaaattgaacaacgtgctcctgaatgactactcagtaactaacgaaattaaaacagaaataaagaacttctttgaaaccaatgagaaccaagagacaacatgccagaatctctgggacacagctaaagcagtgttaagaaggaaatttgtagcacttcatgctctcaacagaaagctagaaaaatctaaattcatcaacctagcaacacaatgaaaagaactagagattcaagagcaaccaaattcaaaaggtagcagaaaatggaarctatttatgacaaacacatagccaatatcatactgagtgggcaaaacctg

SEQ ID NO: 912400 - DNA, 634 bp, Homo sapiens
tcagtagtcagggacccacttgaggaggcagtctgcccgttctcagatctccagctgcatgctgggagaaccactgctctcttcaaagctgtcagacagggacatttaagtctgcagaggttactgctgtctttttgtttgtctgtaccctgcccccagaggtggagcctacagaggcaggcaggcctccttgagctgtggtgggctccacccagtttgagcttcccagctgcattgtttacttaagcaagcctgggcaatggtgggcgcccctcccctagcctggctgccaccttgctgtttgacctcagactgctgtgctagcaatcagggagactccgtgggcataggaccctccaaggaaggtgtgggatataatctcctggtgcaccgtttttacagcccgtccgaaaagcacagtattatggtgggagtgacccgattttccaggtgccgtctgccacccatttcttggactaggaaagggaactccctgacctcttgcacttcccaagtgaggcaatgcttcatcctgcttcggctcacgcatggtgyactgcacccactgtcccttgcccactgtctggcactccctagtgagatgaacctggtacctcagatggaaatgcagaaa

SEQ ID NO: 912401 - DNA, 717 bp, Homo sapiens
cctgtgggtgggggagaaggaacaggagcaggttccaaatgatgctctagaatgatttttgaggctcaaagaagagcaaatttatatgttttgtgagtctgtcgagtcacccagattacaactgaatcattggtatgggttgagcatccctaatctgaaaacccaaaatctgaaatgctctaaaatcgagatgtttctgagtgttaatacaacacaagtggaaaattccacacctgatttcatgtgatgggctgcagtcaaaatgcagtcaaaactttgtctcatgaacaaaattctttaaaatattgtataaaattgcctaaatttaggctgtgtgtataggtgtatatgaaacagaaatggactttgtgtttagacttgggtccaatcccaggatatctcattatgtttatgcaaatattcccaaacccaacacacttctggtcccgggcatttcgggtaagggacacttcacctgtgtcaccactgtggggtctactcccctgtagttaggtggactcactcccctgtacttaggcaaatgtggaacacacacacgacgaggtgtgcagatttgctcataggcaggaagtgcctcgggcttccacatggggacagtggaacccacctgccaccckacggggtcttgtgctgggtgtatgtgtgtttatatgtgcaactgattagaaagtgaaccttgctttcagcaaggtctga

SEQ ID NO: 912402 - DNA, 623 bp, Homo sapiens
agtttatcatgaaaaataattgacgtataattaaatacacttgaataatacttttttccatgcygtatatacatacaaaacactcatacaacatgtatatacatatacatgtaaagggaaatagatgaaaaactagagaaaaggttgaatcaatcagaatacacctacagataggacactatatggctacttacaatagaattttctgacaagagtcacaggaaaactttcttggttaaatttaattaccactttcaagctgcaaatcattccaacatacgatctcagttaaaagatatttgtattcacatattttgatggaggaaaatggtaggaaatacatatgcattgtatcagtgtctatccctaaatgaacagcttttttttggatgctttaaaaaattgttcttataaactcatagattatgaagtactttaagaagccgacattaaaattgttaaagaaagttaataaaatatcgataggctagtaacatagtcagggccttgctttctgaacatcttgaacttttgcttcaattaatgacaaccctatcaaatgtatgctttgttaacttttttagtttttatttagaacttataaggtctttcaggatatgtat

SEQ ID NO: 912403 - DNA, 638 bp, Homo sapiens
tttaaatggttaactgtctgtgtaaatgtgaaatttctttttaagtgaaaggtcttgctgcaagaagaatggctttgggactgccaacttacagggccatttctgaaaacccagtcattatgttgccttgatattactgttaatcatgagtgtccttagaacttattgaaatgctaagaatttttggtgaggatgtacaccgtttcatcttataggcagataagtctcctttagagaccaaccttatgaaattgtctagcctgctagagctgaataattttgtaaaataagtattgaaaggtttagtgtattatatagccaatcacctcgagtacactgaaacagccagtaagaagcttaaacatactcttgaagaggcaaaaagagacatcattagacagggcttataactgctgcccccttgattttctcatttcaggacttttatcagctcagtttcaacagaaagcaaagaaaaaaaaatcttcccttttaacttgcttattgaaatagaaggaattttttccttgccagtctctgaaaccctttttcaccaaacaaaacctgctgggagaagttttcattctttgtttggagacaataattttggaaayagaaaactgtgaactttctatgag

SEQ ID NO: 912404 - DNA, 638 bp, Homo sapiens
ttcactccaacttataggttaggagggcgaaaggatcagattaggtaagtaaccttcctaaggctacacagctaataaactgaagaataaaatctaagwccacatactagatttttaaaggccatgatttgtcactgagtagcaacttaagtggtcccaacacacccatgcaaaccacagtattaatgtgtagaaagcaaagagcaagccaaagacatctatttccagaattaattctgattagttccttcctgtctgcctgctttggtctgattcatctggtcctccaatcagttggggcctactcttcagatcccagtggggtctcccacggagtcctttatgcacatgctgatcacaaagaggaggctgtgtccccccaggccctttcacacacagctactagtgtaagcttggccttttccaaataggggctttcagaaatgcatggacattccatagcaccagtctgaattcatgtcgaaggaaaaaagtggataagaaaccaagtgcctgcctaagtctagttggggaggaataaaggagatggagggaggcaattttttactttcagtgatcactgtgtttccattcgaagtgggatgaccttctaagaaaggttatagaatcattattaa

SEQ ID NO: 912405 - DNA, 622 bp, Homo sapiens
tataaagaggaaatgatcacatgarttaagataaaagtagagcctagctcatggtgtgctatggtctgaacgtttgtgtccccttccctctccaaattcctatcctggagcctaaatccccaatgtattgttatttggaggtagagtctttgggaggtaatgaaatcataagggtggagccctcatgaatgggattagtgcctttaaaaggaaccaaaaagactagagttctctctgtcatgtgaggatacagcaagaagtcagcaatatgcaatctggaagacagctcttaaaagaagccaactattttggcacccttacctcagacttccagcctcttgaactgtgagtaaaaaattccggtttttaataaaccacctagtctatggtactttgtcatagcagccaacactgaccaagacatagtatgtgggagaaaattgttcctttttgttgacattcaaagagcataagactcccaatcagaaaaccaaggtcacgctcctaggaactttacacattttctgtccttaggccttggttttcttagctgggaaaatagggtgttagaagacttatatttcagggtctctctgggtccaaactttgtttcaactgcctg

SEQ ID NO: 912406 - DNA, 622 bp, Homo sapiens
tataaagaggaaatgatcacatgaawtaagataaaagtagagcctagctcatggtgtgctatggtctgaacgtttgtgtccccttccctctccaaattcctatcctggagcctaaatccccaatgtattgttatttggaggtagagtctttgggaggtaatgaaatcataagggtggagccctcatgaatgggattagtgcctttaaaaggaaccaaaaagactagagttctctctgtcatgtgaggatacagcaagaagtcagcaatatgcaatctggaagacagctcttaaaagaagccaactattttggcacccttacctcagacttccagcctcttgaactgtgagtaaaaaattccggtttttaataaaccacctagtctatggtactttgtcatagcagccaacactgaccaagacatagtatgtgggagaaaattgttcctttttgttgacattcaaagagcataagactcccaatcagaaaaccaaggtcacgctcctaggaactttacacattttctgtccttaggccttggttttcttagctgggaaaatagggtgttagaagacttatatttcagggtctctctgggtccaaactttgtttcaactgcctg

SEQ ID NO: 912407 - DNA, 611 bp, Homo sapiens
gtgatctaatgtccacaaacgtggtatatgtgctgggtctactccactgccttctctgaaccccttcctgggcttctgtcctcctccgccttgccttagagstgaccttaacgacccacatcagtgtatttccttaccctcttctcttaggtttttccagtggaggacaagcagataatttgagggccaacgatggaacagtaaggtttatgtatttattcttcctgctgggtcactgtggatcatctgtgtccctctgttgcagactacctgtcaggcagccctctcagaatttgggcaattgctccttccctgctccttcggacatagggtaagggttcctacctgttgtgagtccaggaatactaaaccatcccttgttggctttcctaaattctgtccacctctttgcaagtaatccatttataaaattctccacaaatctccaaagtaacttatctgtctcaagagtctataggccgttccactgtcacatgaatcccacaccatactgcacatatgactcgctgatcagaaaagggctatccatttgccttttaaatttgccaaatataaccaatctgtaacaggagagttgcctaacattaagt

SEQ ID NO: 912408 - DNA, 493 bp, Homo sapiens
ttggcttaggcaaataattcattactaggaccctaaaagataatgcaaccaaagaaaaaataaataaatgggacctaattaaactaacaagcttctgcacaggaaaagaaagaatcagcagagtaaacagacaacctacagagtgggtgaaaatattagcgaactatgcactcaataaaggactagtatccagaatctacaaggaactcaaatcagcaagaaaaaataatatctcatcaaaaagtgggcaacgaacacaaaaagacatttctcaaaagaagatacaccaacagccagcaaacatgaaaaaagtgctcaatatcaccaatcatcagggacattcaaattaaaaccactatgagataccacctcacgcttccaagaatggccattaattaaaaagtcaaaaaacaatagatgttgtggatgtggtgaaaagggaacagttttacactgtttkcaggaatgtaaactagtacaacatctatggaaa

SEQ ID NO: 912409 - DNA, 637 bp, Homo sapiens
gagaaaactgggtaccattatatttttgtgcaaatccattctgttccctytcactcatttttcagtctttgcaaaatatctcgagcttcccttctgcttccaccataatcctgcaatgccctactctccaccatgcattaaattcatatccttatacatctaggtatcacctgagttgcttcaaaatcaaatcttatcaagaagagatttggcaatctctcaagaaccattcagtcaaacacattactacaacttgctctctcccttgagtatccacataacaagtgacatgctatctttcctctttctttctgcctcaatattcttcattgtaagtttccagagcagacaggctttttttccccctttacttaattcattttgcattacatttaactcagtgatatgcacagtctggtgctaattcttactgtgaataatagaaaatacactgaaattctatttcctatagggtctcaatttgggtctgttttctcggtaatacattttttaatagcaattcaatagtgagctaaagaattcctttgagttcaggaacatcccatttgtcaatttagagtaaaatacctgagctcttttttcccccttttctatgagcttttctttactgctgcat

SEQ ID NO: 912410 - DNA, 598 bp, Homo sapiens
taggggaatcaactcctttctttgaaaactggtgaataaaggggaaaaaaatcaaacatttattctccctttgttatatgagccatactactgaataatcacataataaatgagcagacatttttctttataggattcctcagctgattaatgaataaagaatgatagaagtagaatatcaccaattgcagtgcttaatgaactaatggatctatacatagatcataatggtagctagcactcaaaaagagaggcaaccatttattacatgcctccagatagaggaacattacctgtgaaatagtcttgtcaaaaagatttgaacctgtgtctgatcaagcctctagatccatatattaagttatggaaaatatgaggacataaagacatattattaaggaataccacagggatgtagaaaaatgaaggttttaggagactcaacaaataaaaatctgatttttgtcaacaaataaattgcaggatggagtgggggtctgggggatcttacagatcaaaggatgcctaaaagacttatcagccaatcataatgagtaaattttaattggmtattgattgaaactattttttaaaatta

SEQ ID NO: 912411 - DNA, 618 bp, Homo sapiens
atttacccaatgcctgtactcccagtgtacgtaggaagtaactaacttgcttttgattttataggytcataggcagaagggacttgccttgtcttgcatgaaactttggactgtggacttttgagttaatgatgaaatgagatgagactttggtggactgttgggaaggcatgattggttttgaaatgcaaagatataagatttgggaggggccaggggcagaatgataaggtttagctccatgtccccacccaaatctcatcttgtagctcccataattcctatgtgttgtgggaggaacctggtggaatatgattgaattatggggtcaggtctttcccatgctgttctcatgatagtgaatgggtctcacgagatatgatggttttaaaaatgggagtttctctgcacaagctctctttttttgactgttgccatccatgtaagatgtgacttgctcctccttgccttctgccatgattatgaggcctcccagccacgtggaactataagtccaataaacctctttcttttgtaaattgcccagtcttgggtatgtctttatcagtagcatgaaaatggactaatacacattattattattgattctatgataat

SEQ ID NO: 912412 - DNA, 648 bp, Homo sapiens
tttaactgtggaccaaaaaccctgaccaaaaagartgctgggatatgtgtgctgtcattttattcaccacaatgttaaatagaactgtgacatgctagactgattctggataaattgtcttttactggcttgataaaaggatgctctgaaggaaaaattgtgagacaaggaataactttcagaaaagtctgaataaagaagtttctctaattcttaatagagtcagtataattccaagggctaaacaaatgctacttttatgcaaatttattgcttcaaatgttattgtaataatgtggcacatcaattgatattttgaggatctggaaactttttttaatttgaaaaatgtatagctatatccttggtcatcccttatgcctcaaaatggtaaacattcatgggttccctggtaagtctctagtagtctgcattttattttctctgataatcataaccatggacttggtaagtgtcaggtgctatgcaaagctttttacctctattattgaaagacacattttattttcttagttgtatgttgagaaatttgagattcaggaagtctagggagcttgtcaaaagtcacaattagtactaaagctgggattcagttatgcctgaccaaaagtgttctgtcctttttaa

SEQ ID NO: 912413 - DNA, 667 bp, Homo sapiens
atataagttaggacatatcttcagggataaactgttttgaaaatgataccacaaataaatgaagarcactgataaatgtgtgaatagatatatgagatataagataccaataccagaaagatctctggaaaatttccaaatattcagaaactaaattaaacacattaaataatgagtgtctcaaggaaggaatcaaaaaggaaattagggagcatattgaattaaatgaaaatacaaatgcaacatataatttatgagatgtagcttcagttttaaatgataagaagtttattaatatttgagaaacatttttaaaagagtaagtggatattttaaaaaagaaaatctcatatttcatcttacaacactatagaaagaacaaatttaatttaaacagataaattataataataaaaatgagatcaggaatcaatgaaacagaaaacacaaaatagagaaaacaggttaaattgaaacctagttggggggctgttccaagatggctgaataggaacagctccagtctacagctcccagcatgagcaacacagaagatggacgatttctgcatttccaactgaggtactgggttcatctcactggggcttgttggacagtgggtgcaggacagtgggtgcagcgcaccgagcgtgagccgaagcagggc

SEQ ID NO: 912414 - DNA, 667 bp, Homo sapiens
atataagttaggacatatcttcagggataaactgttttgaaaatgataccacaaataaatgaagagcactgataaatgtgtgaatagatatatgagatataagataccaataccagaaagatctctggaaaatttccaaatattcagaaactaaattaaacacattaaataatgagtgtctcaaggaaggaatcaaaaaggaaattagggagcatattgaattaaatgaaaatacaaatgcaacatataatttatgagatgtagcttcagttttaaatgataagaagtttattaatatttgagaaacatttttaaaagagtaagtggatattttaaaaaagaaaatctcatatttcatcttacaacactatagaaagaacaaatttaatttaaacagataaattataataataaaaatgagatcaggaatcaatgaaacagaaaacacaaaatagagaaaacaggttaaattgaaacctagttggggggctgttccaagatggctgaataggaacagctccagtctacagctcccagcatgagcaacacagaagatggacgatttctgcatttccaactgaggtactgggttcatctcactsgggcttgttggacagtgggtgcaggacagtgggtgcagcgcaccgagcgtgagccgaagcagggc

SEQ ID NO: 912415 - DNA, 646 bp, Homo sapiens
tgttgcctgccaaggctctgagagtggggcaggttcattctttgctgaaaggaggaattagacaccgttagagaggcgttaaagacgtgctagcacccccctgagacyttctcttaatgtttttagaatgacgggaaagagatgacctctttcaccaactgcttcaatattatttcatatagggtctgagaaccctaaaaacaatctcctctatggtccctactgactatctggagagacattgcattattgtattacacagaacttggcccattgaacacaatcaacatgtacttttttcttccttttctcttttttcctccttcttgagggaccgctggaggtttaaatctggtagcaacatctccattggggactacatttgtttttaatcaactgccagggctgatttggtttgtggacggtgtatgggaaatttgttctcagtttaaaatgcaggtcaacacccatctgttatattgtgttttctggtctaaatgtggctttagaggtcaaaatgtgttggagcagaaatgagaaagaagtaacatttttgaggacttcctacattttctattctttccacatattgtataatttatttctcacaactcttcgttaatagaaagcattgccctcatcttag

SEQ ID NO: 912416 - DNA, 572 bp, Homo sapiens
tgtaggtaacaatagagatagttcaatatttgctttagaactcataagggacagtaatctttatcctatatatactaaaatgtattcttttttaactggaaaagttagagcattatcragtttaattcagactcctgtcttcaaaagctattcacagctaccacatagtcaacatcactggactttttaagtacatggtcttgcttgcaagacaagagaatgagtttgttgaccagattaggaaattactcattggcctcagcatgaataaactgttactcttctgctcatattgagacagtagagcggattccgtagtcaagtacacaaatactatttcaaaggaggtcccagagaactgtgaagtcacctgagaaagattgacatttagctgctagttactgcaatgcaaacaaacaacttggtaaaattacacctatctatgacctacctagatcatgccagacatgagcaagtctaggccatggtgctaacaggatcattcaacactgtgtgttcaacaaccacattttgactctggcttgagcctcccattctctaacttttctctt

SEQ ID NO: 912417 - DNA, 590 bp, Homo sapiens
tgggcagatcacctgaaatcaggagttcaagatcagtgtggccaacatgacaaaaccccatctctactaaaaatacaaaaattagctgggtgtggtggcacatgcctgtaatcccagctactcagsaggctaaggcaggagaattgcttgaacctgggaaggagaggttgcagtgagccgagatcacatcactgcactccagcctgggtgacagagcaaaactctatcttaaatgaataaataaataaaaatgaaaaaaacaaacaaatgaaagaaagtcacgagcacaacttctgactccccctccatcttttccattgttccctgtctctctgcttaaaaacaatccgagtgactctcactttttccttgtgtctcccacccatctaccctactcttgctctacacagttaaggattgttttgaaattctatggggaaaaattataaaatttataatcccaaagagtccatccaattgtctgtaacaagatttaaagcttagtattatctcaacccaaaatttgacaaatgacagtttccttgttgcttgtacacacgtcactccaacagctgaaaagccaggataga

SEQ ID NO: 912418 - DNA, 596 bp, Homo sapiens
gcaaaggaaacaattaacaaactgaaaaggcaactaatggagtgggagaaaatatttgcgagccacatatcagataagggctaaaatccctatggagttcatacaactcaatagcaaaaaaaacaaacaacctaattaaaaaatgggcaaatggcctgaaaagatattcctccaaagaagacaaaaaaaatggccaacgggtttaagaaaaggtactcaacatcaccagtcattggggaaatgcatattaaaaccacaatgaagtatcatcctacacctattaggatggctattgtaaaaatgacaagagataaccagtgttgatgaaggcacagagagaagggaatccttgtaccctgttggtgggaatgtagatttgtgcagccattatggaaaacagtatggaggttcctaaagaaaataaaaatagaacttccatacgacccagcaatcccacttttggrtatatactcaaatgaaatcaccacgttgtaaagatatctgtactaccatgttcatggcaccattactcacaatagtcaagatatggaaacaagccgtgtcaatcaaaggataactggataaagaaaatgtgg

SEQ ID NO: 912419 - DNA, 614 bp, Homo sapiens
gcacgtgcctataatcccatctacttgggagcctgaggcaggagaatcgcttgaactcgggagggggagattgcagtgagccgagatcatgccattgcmcctcagcctggatgacaagagcaaagctccatctcaaaaaaaaaaaaaaaaaaaaatatatatatatatatatatgtattactttacattacacttaagcacattttgttgcaaaaaaaaaaatcacacaacctaggtcaaggtaaaaatccatttttaccaacccacactccttcaagaccatcccagccccttcccagagtaacaactgtttccggtttgctgtttatgcttccagaaatttctatgtcatgtatatggagaaagagtgtgtgagagagacagagacatagggagaaagagtttatgttatgtacatttctattgtgtatatatattataaaatatataatttctggagaaatcacactgatacatattgttccaaaacttgctttttttcactgcataatatgttcaaacatatagatgtagctttttttttaagttgcttagtatggatgtactgtattcattttgccattcctcaagtgacgtttaagctgtttctaatc

SEQ ID NO: 912420 - DNA, 685 bp, Homo sapiens
aattgaatacacagaagcagagagtagaagggtaggtagcaggggtcccagagtgagagaaatggagagatgttggtcaaggggtacaaactagtagttatgaataagctctgaagaccatgcacagcatggtgactatagttaataataacttagagtatacttgacatatgctaagaaagtggaacctaagtattctcagcacacacacacagtatgtgacataatagatatattaattgattgtggcaatcatttcacaatttatatgtatatcaaaacatcacattgtatgccttgaatataaactctttctatttgtcaattatatctcaataaaagtgaaaaagaagatttcccaaaattgaaagacaatgttttagatcagctaacttttctaaccaattagactagagaagaagccaatccaagaggaggcagaattgctgatgtagtgcttaatgactgtgactaattagagaacttaattaagctgtcaagaaggaataaagataatcagtctcagtcagttcccactcttttgcacccaggagcatgagcarattcactcaggccaccacataatccttgctctctcacttgatattgatgtaacctcatatgcaccttcctgaggtgatgcaggttatacaagtaaatgacacactttgtcttttgtttcatc

SEQ ID NO: 912421 - DNA, 521 bp, Homo sapiens
gtttacattccaggaccctccctggggtcaggctgaggctgggatgtggcctgaggtcatgcttggcttggccyctcccctttctgtcctgcttctccactctcctaccgaccactctggggacatttcttcaatgaatcactcatctaggaatccttatctcaggatttcctttgggggaacatgacctaagtgaaagcaatgtgggccggatgtctttcagaccagaaaatgcctcaaattcccttttaagcattccttttagtgtccaggattctgccctaagcctccacttaaactgggggtcccacttcccagggacagtaacccacccctcctcctcaccactggctcattcttgtgggtagtttctgggctttgcagctctccccctcctcacttcttagccagactttactctgcttctgtttcattcattcaatacccaacaggtattgaatccctgttctgtgtcaagcatcctcctaggtgctggggtacagctgtgaatagagcagaca

SEQ ID NO: 912422 - DNA, 638 bp, Homo sapiens
ggcccacagagaagggaagaaacttgtttgaggtcacacagccaggcaggagctgactctagacaggaatttctcaatctgatctaggacatgttctgtaaccacacgtgaacactaagctggcttgctagggagttccctcacctgtctccctccttacctccattcccactcaccacttccacccagactaccacaagaaaagccaaggaacatcttgtaaaggacatcctctatggagcagagagggttttcacatatggaggggaaaagtcatataagactcccactgtgtgcacatatgtgggtcatccaaacatgagaatgcaagccccacctagctcagagtcacatgggctgtttgtgctggggacacggcaagacagcactgaagccctcttgatcacagaggtcagtgaatatcaatgtccagatacttctctttctcctggaatggcccactagtgctggtttcctggaacgcccaccaccctttccctaacccatttattcccttataacatatactgggtaactagtccctcagatttacttacagcrttgtagaactgtttcattgcatttgatcttacaaccccctcccagattttcaatggaagttgtctctccatcttttc

SEQ ID NO: 912423 - DNA, 542 bp, Homo sapiens
gacaaacacaggatttgacaactagcctagatcctgtaatgagttacttgtagttagcgcagccagtgccatgatcagtagagcactgcagttaaaagcctgttagacctgccttcaaattcctgtcccttcagttagtagatgtgtgattctggacaaattacttaatctcactgcagtagggtgatttcaataagaaatgccttttggccaggcacggtggctcatgcctgtaatcctggcactttgggaggctgagatgggcagatcacttgaggtcaggagttcgagaccagcctggccaacatggtgaaaccccaactctgttaaaaatacaaaaattagctggacgtggtggcatgcacctgtagtcccagctactctggaggctgaggcagaagaatcgcttgaacccatgaggtggaggttgcagtgagcagagattgtgccgytgcactgcagcttgggtgacagagtgagactcagtctcaaaaaaaaaaaaaaaaaaaagaaagaaagaaatacctttcacgtggctaccc

SEQ ID NO: 912424 - DNA, 645 bp, Homo sapiens
atcagattttcaccacattacttcttaggcggaaaaaaatctttgtaccaaacgaattcattagatatgtcatagagtattgcatccaaagaactaatcacaatttactctttcacattttttgaagatcgttcatatttgttttactggcattagttcacagcaaaagatgctacctaagcacccatctggatgagaaattattactccacacatcccatcactgttattcagtgtgaaaagtgcctcattcgcggaagtgaggagggttcagtaaattgtctaacctaaggtgtaacaaagattgtgtgaatatccagggacagaatccaaacattccattttaagagcttttttttttctctaattattgtttcctactacactactaagtctttggtgataacacatgtatcctttttcttttttcagggaaaggggtactagacatcaatcatattcctctctctggaaaaagacaaagtggaagaaaatatctattttcactccacttagttttaagttgcatgttgtatgtaaactgtcattaagtttgagtatcaagatatttatttttcawaattaatatattcctaaggcctagtactgctgcccttcaccacacatagaaacccacatcatccc

SEQ ID NO: 912425 - DNA, 618 bp, Homo sapiens
cgtatcaagcgaaaggggaacaaatacagatrggcatataggacaggaagaaatcagaggagagttatctagggatgtaccccaagcagcccatagcaaactcaaactcccacattttatttttaaagtgtgttttaatgttaaatcacatgccataagatatcaatttttgtacttacctcaaacttttgaatatattagaagctccaagaatctttaccaccttgattttacaactttgcagatcccctgtactccttagttggacaacacagaattaagagaatatcctggaaagtttaccatgaatcatctgggcctgcactaatagggcgagagatggaaagtcagaattttatcaggttgcaaaaacaactcctcaaaaaacccaaacttagaccaaaacagagtggattttagcacatgagattccagacagcctgatttaacttaattccacagtttattaatctcttaatatgtgaacaggaaatgaggttctgcttgaaaccaccatccccttatcaattattaaataagtcattgccaaagaaatgtaatttgaaatatgtaatggatcttcctaggcacaagactagtattaatttccattcacag

SEQ ID NO: 912426 - DNA, 524 bp, Homo sapiens
tccaatataagagttactaggaagtcttataacgtgtgtgcatgtgtctgtgtgtgtgaattaactctagttcagccattaatgaatgtagaagataatcaacaaaattaaaaagtataccattgtgtttaaaacagtcagaaatcagtttatttattttagaaaacaatctttgctgctgcagcaggaagacagttcatcataatcatttggaattttcactgagcttttcttagtactaaaataatacaccttcagaaataagcttagtaagcatcactgctggtttatttatatcaagtgatatagatttaaactgtgaaatatatcatacatgcggtagcgtataaaggacatagttacaatttaaaggatcactctgagtttatgtaatgtcaagagataccagtacctgagaagccctatgtgttacttatcagttgcatatccctcatccccagaggtaaccattacaccgtgattaaatttyccatttaatcatagggcatgagactattaggagg

SEQ ID NO: 912427 - DNA, 641 bp, Homo sapiens
tggtacagaggaagaaacattcttacaaatgaagacattctttataaatgtaaattttccttacaaaagggtaatatttttttgagagcttctcttgtgcttgctgtttccaaaaataaccagctcaaaataatcctatgcctaaaaagcatattttggggtggcatattctgtttggtctcctataccactatattccagacacaataccaggctctgggaatacaaatatgattaagccacaacatatgctttccagggatttataaccaaaagagggagaaacacatgtagacccagaagtagtgggaaatatttttaagagttcagtgtgggcacaaaaataaaagcattcaattcagtgtgtgtgtgtggcggggtgagggggtggtggtggggtgggagcatgtgggtacagaatggctggggggttgtggtgcagaaatggtgttattgaagagtcctgccctgcattgagttttgagtgactgatccgtgtttgctgagagsttaggagtgcaggagagaactcaaggcagagaacagcataattgcggtagagaggcatgagataggctggttacaagatgagggggctagatctgtttatttatgccacttgggggtgcagacgatgtgca

SEQ ID NO: 912428 - DNA, 651 bp, Homo sapiens
aaaatgtggccatactgcttttttaagtgagtccttgatcyacttcctcctcattgggcaggatcttccaactgcagtctccagccacttcctacaggtgtgtttgggactgcagtaggtccataccttcctagggtggagctcccagagggaggggtaagccaccatctttgctgttttgtagtcttcactggggatacctccaggtactaaaaaatttgaagcaactagggactggagcaggcacccagcataactcagcagccctccagaaaagtggtcagactattacatggttgcctgtttccatatctccaccaggtaggtcctccaggtctgggcctccagccaccccagcagagctattgaggcaacagcaactcagaaactcctgagttgacagagcctccagggtcaactaaaagcctgtatgccactgcctctgtggtggaactgcccttgctaacctcagactaacaggggagcaaagactctaagtgctttatccacacctctaacaagctgcagtcaacccaaggaataaggccagtctgtctttcatcattccccttcccaccactgttcatcaccaacagggagcccctagccagggcccccagcacaaatgctccgtcatggactgattgcact

SEQ ID NO: 912429 - DNA, 693 bp, Homo sapiens
tggaacagagaagacatgtggaaataaacaagacagacttacaaggagtcaccaragtgccagagttgcagaggtcaccaccatttgcacatcgttcattgacttggtcactgtcacctagatgaagagtgttgacattaaatattaaatttaattaatatgattctttgtaagactttgtaagactgttcctggctggcactactgaggttgtgccagcagatctaaacaggcatgcagatctaaaggccgagatacctggggcaaactggcttaatggaactgtactgatgctgagccatgtgaggaggtgcaaagtgtcaaacagtagatgctaccttttcaatatacatgaatcacttaactcaaatgcagctgctgctcatctccattttggaagctattccaaggaaaaattcagttaatagtattttcatctggctgtcttcctttgctataatctcttgaagtgagagttatatatcactgatatgtaaaacatatatgttacatatatatatgtgacattttcaagagcacttcatttttccaaaggcctgataaacactttatatctttctggtacttggaagaaatgtgtacttctcatgctatgttgggcacatgtccatgctgctgctggttgatggagctttaagggttggtttggttcctactacttcagggtaggtt

SEQ ID NO: 912430 - DNA, 637 bp, Homo sapiens
gtgttgaatattggcacccactctcttctagcttgtagggtttctgcagagtgatccactgttagtctgatgggcttccctttgtgggtaacccagcctttctctctggctgcccctaacattacgagcaacttcagccaagtctcagaatacaaaatcaaagtgaaaagatcacaagcattcctatacaccaagaatagacaaacagagagccaaatcgtgggtgaactcctattcacaattgctacaaagagaataaagtgcctaggaatacaacttacaagggatgtgaaggacctcttcaaggagaactacaaaccactgttcaagaaaatacgaaaggacgcaaacaaatggaaaaaacatttcatgctcgtggttaggaagaatcagtggagtgaaaatggccatactgtccaaattaatttacagattcaatgctatccccaacaggctaccactgactttctttacagaattaggaaaaattactttacatttcagatggaaccaaaaaagagcttgtatagccaagacaatcctaagtaaaatgaacaaagctggaggcatcatgctacctgacttcaaackatactacaaggctacagtaagcaaaacagactggtactggtagcaa

SEQ ID NO: 912431 - DNA, 642 bp, Homo sapiens
ttaaactaacctctaagtgaactgtgaagatttataagaatctgaaaatgttgaagatataaggcaaatgatcctggatgaagcggtgatcataaaaagcaaatcactctgcaactcttaagtgctttgaactataaataggaatatgcagaagataagctgatgggcagaaacaaacttctatttaatgcatttcaaaaagctctttcacttaataaatacaacaaattttcttctttaaattctttcaccacctgctcttaacaactaagaattcagaagaaattatatttaaaactaaacaaggaaatgtaaatgaaggctagtttagatatctaatttagacggtatagtgtgctgaatggttcatgttttttaaagagtttcaataagtcacaataagataagaatattattcattgataattggtttgttgtaaggagacgctttgatagtccaatatacattaaatacctcatgacaccaactatatggggttaatcttttgcagtttaaagctttgcctctggtagtaaaacttccatgtaattggcatcaatagtcaaatcayacaattcattttgggttgctgggtggaaacaaaatctcctctatttggctcacaatcactctctcagtgg

SEQ ID NO: 912432 - DNA, 672 bp, Homo sapiens
gtcttgggcacaaataatataatttagggataagtgttgagtagatgccttcaatgtcctgcccatatcccttgtatcttacttcattatgctgtgtttccaactgtgtgttagtatctgcatttctttgcttgaaggctttcaagaactcttctgggagccttgagtctgcaggcctttgcttttccaggcgtcctccctacattcccttccccctcccagaagagcaggaattgccatggaattagtactcaccctcacacccacagcagccttcaactgctggttgaccctagttgggttaactctgaagctgtgtgttttacactggttcccagactttcctaggggattaagctcttgccacccaccatgaagctgtcattatcatacaccctttattggctgcttttcctactctgtcttgcttccctgctcccctgccagtatttctagcacttcccaaaataaactacttttatttgaatcctcatatcaaggtttatttctgggggcctcaaactaagagctcttggataacaccctcaattaaaaggtagacaggagaaaaactacatcttattttcttaattagcaattatcttttaattttcaagtacttcttgkactttctacttggacatgctgttgatatctcaaacctgacgtgtc

SEQ ID NO: 912433 - DNA, 613 bp, Homo sapiens
aaatgtagactctttggaatgtggaagctcatgcagaagaattgcatatgagcaccataataagaataaagatattattggaaagctgtaactatgcatggtttcaaaataaggtggacatttcaaaagaattagcaaccaacactacacacaagattttggtaagagtgataaaagaataatggtttccttcaatggacatttaaaagtgtgtagcaaagtttattaataaaataaagtgcaatgaggatttagaactgggagggtgtggctcctctgttttgtccttgaggaatctgaggtccaggaaacatgacatactgaacagctacccagagctgttcagtaagtggtagagccagaactagaattttcatctcctaactctaaatccagtgttctgcgccctaaactagaaatcaaccaaatttatgcatttgcatcccagaatggaaactaatttttttaactgaaaaatgtgaaattacaaatgaaaagaatgtaaataatgtcatcgaaacagaggctagaactttgtayggagggacttgtaatattttatgggcttcctttctggaatattgcacaaacagcattcataaatagcacatct

SEQ ID NO: 912434 - DNA, 583 bp, Homo sapiens
cacacacacacacacacacacacacacacacacacacacacagtatttttagaaaaggaatagactagtgctatagtgatttttatagtatttcctgttgaggaaattaaaggagggaggctccctccttcaaaaagaattaaacggagtgggattttctaaaacaagacaaactcaccttctgttcttattatatggtgttgcagagtttgaggctggacttctccaggctcaagattccatagcttttgaactttccttggattatatgttgtaagtaagcctgcttcattaaaagctctcatatttccaggaggctctgaacattccgaatgcagcaatctaccatcctggcaaaataaagtgctgcctaccccacggtctttctttttcaggtttctaaatgatccgtcaagggttgcagactcagaggccgatgttgcttgatggctattttcctgtaaaagtggcatttcttttctggaccccacartggacatgacctttatctcgttttcctgagttaagtggcagttgcagtatcccttagtgtggtaatttcttgcctcatgagcacacaggg

SEQ ID NO: 912435 - DNA, 593 bp, Homo sapiens
atgagaaaaaaaaaatcagtctttaagcacattcactaggagaaagtttcaaaatgtcattatccatatwaagatctaacaggtaaatgcagtaatagggtattaggtacagaaatcactaatttcataccagcaatacaccacagctaaacagtaacttctaattcaaaacaaagcttcatgggtccatcttgttgcccacttcagtaggcagaggtgactactcttacatgaagccacctatgctgatggaaaaccaaacagaccacaggcaaagcatctttaaaacagctcctggtggctggataaaatggaaaatctctccaaagctaaattaaaataatgagacctctatatgctgttgttttaactaagtagaattttcagtatccgtgaaaaaaccatttagataaagtatttgcctacaaaactgtgcttttcaagtgttattttgatgtaaaattgagtgtttaaggatgaaaattccctcaagcactctgaaatgatagcgccgttgacagtgtcaaaagccatgctgagatcaagggaaatgcgaatggaagcagtagcaactgcattcataaagaggtcat

SEQ ID NO: 912436 - DNA, 642 bp, Homo sapiens
ggagaaagaaccaaggtgatgctagaagagattctagacagagactaagctacctctcaggccattcttgactaaacaatcatgaaaactctaggagagagttgctcaactcaatgctagaaccatcttagatttgtatgtaagttgtggtttgttattatattcatattttatcagaatgaattggatgtaattcataggtttagttcttctcaatatagtatgcatttatccttataaattctagagttgaagagaatccattcaggtgacatttagcacctgtgaaattaaagaaaacaagccagcccccagcctagtccatagaaacactgccaccctggggaaccagagaggggtccagccaccctctctgattcctcagctcttataaaactcatcaagatgttatgccacttaggaggtagtaactgtgtacctgctatttaaaaactagtattgaataagtaaatgtgacatttaaaaagcataaatacatgctcacaatgaaagcaatgactatcatttcaaaagctgtgcaaaattagtcagatctgcccttcaccaattagtgttaattcctattaatatgatctaaygggacttaatttcctcagctatagtgaatgcaattgtgaagag

SEQ ID NO: 912437 - DNA, 438 bp, Homo sapiens
ttagaaaaaagggtaaaaagaaataaataaagcctccaagaaatataagactatgtgaaaagaccaaatctatgtttgattggtgtacctgaaagtgactgggagaatggaaccaagttggaaaacactctgcaggatgttatccaggagaacttccccaacctagcaaggcaggtgaacattcaagttgcggaaaaagagagaacacaaccaagatactcctcaagaagagcaaccccaagacaaataattgtcagatccatcaaggtagaaatgaaggaaaaaatgttaagggcagccagagagaaagcttgggttacccacaaagggaagcmcatcagaataacagtagatctctcagtagaaaatctacaagccagaagaaagtgggggccaatattcaacattcttaaagaaaataattttcaacccagaatt

SEQ ID NO: 912438 - DNA, 611 bp, Homo sapiens
ggttacaggatttcttctttttacagaaagactggaaatcctagctgaaattaggtatgatagaacactttctattcaatgttattttacagtacaagcaataaatatttctttaaaaatacataaatgggtttaaaaaatctaattaaatacagaagcagccatgctgtctggggtatatacctggggtttattgtcacatgctgagaaagaaatcaggacatagacacatgtgggtgggttaggagtggaaagtttaatagacagaagaaaggagagaggagagcagctccttgcaatagagagagagatccaaataaggggagagttggtggacggcaacagattttataggcaggctggataatgtggtgtctgatttacatagggctcacagcttggtttgatcaggtatgacatctacatagtgcttggggaaggctgctcacccaccctaatcttattatgcaggtgggctttctggttgagagctgccatcttgtctgcttcttactgtacacatggctggcaaagagaatggaagatggagcctcatcttgaacatggtgggcataactgccrgtatctatgtgggtagcttgattttacag

SEQ ID NO: 912439 - DNA, 592 bp, Homo sapiens
aagagtcacctttgctccagctcccaacaagttcttcatctccatctgagaccacctcagactgaaccttatcgtccatatcrctatcaggcttttgggaaaaaccattcaacaagtctctaggaagttccaaactttcccacatttccctatcttcttttgaaccctccaaacttttccaacctctgcctgttacccagttgcaaagttgcttccacattttcgggtatcttttcagcagtgccccactctactggtaccaatttactgaattagtccattttcacactgctgataaagacataactgagactgggaaaaaaagaggtttaattggccttacagttccacatggctggggaggcctcacaatcatggtgggagatgaaaggcacttttcacatggcagcagcaagagcaaatgaggaggatgcaaaagcagaaccccctgatagaccatcagatttcatgagacctattcactaccacaagaacagtatggggaaactgcccccatgactcatatgatctcccatgggtccttcccacaatacatgggaattatgggagtactattgaagatgagatttgg

SEQ ID NO: 912440 - DNA, 494 bp, Homo sapiens
atctcttagaccctgtactgatytggaccctccctgcttctccagcttcatgtcagagcagggtgcacttgctccttgtattcagctccactgtcctgctttcagttctcaggccactccaagacaatgacctttgaatttgctgcttcttcaggcccaagaggatcatcctgaagttccaagaagagctgtctgattctcacaggtctcagagaagccttctatcatcacatcatctaacacctctactctttcctctgttaggttccatcacatcaactttaggatttcttttaggacaagtattataattagcacaatgttatcatccttcttattcatttctgcgtttgttatctgtattctttagaataattattatttccagtatgatatactagaaagagtttgggacttgtaatctagattaattttaggtgtcattatctattacaagatcttggcaatttactgtctctgtgccttgcttttct

SEQ ID NO: 912441 - DNA, 604 bp, Homo sapiens
tctccctgtattcttatcttaacagagttattgctaaagccagtgatccctaagccagaagkcagagagtaatcgtccacccttccattctcccattcccattcccattcccaaatcctgattatttggccttctgagtatttcttatatcttctcctccactgtacacacaccaccttagacctagttgaggccccaccacttcttaaaagcttattacaaaaaattcttatttttgtatcttgccttcacattcactccacatcttgtcttccatcagcttcctgggatcttcctaaagttcaaggctgatcatgcctgcctcttgtctttcaatgtgcccacgtcatggcattcccagctttctaggccctggattttcactgcctcaccagcttcatttcttggtgaactgatgctactatctggtagttcccaggaatctcaatgtttgaattgtctggagctgtggattacagagtggggaaaggacaagacaaagtttactttgtaattcttggctgggtcgctgaacatgttgcttaatattattaggaggctcaagggtcaccatctacctttttcctatttttgctaatttggg

SEQ ID NO: 912442 - DNA, 569 bp, Homo sapiens
tgcctggcagttttacataacaccactgacaatttccttttctcatcactactagggatatctgaaatacagaacaagcattgtctgacctgtccattttgtagcattcttatgaccaggttaataaaaaagcataactaaatattgtataatagatgacatataaaagttgcaaaattccaacctttgaggaatgctatgcttcattcatggctgcagaaatgaagggttctagtctggcttttccactgccctctgaggcatgccttctgatactgtactgattctttcccttctagttcctaattatgtgagcatcacctttagtctttccagaaccataggcaacctttctgctctatagttattctcggttttatgcttcatcatctggattactatgatatccaccaggaatagtttttagcctttgatgagcagataagataaaagtcattttctttctaagaacaagtatgttcacatcatttctcttttgtattgctagtatcttggctgctcactatagtggcatgcttcaccrggaagagttcagcttctactcttta

SEQ ID NO: 912443 - DNA, 629 bp, Homo sapiens
atggtgttgaacagaagtgctgagaggagacatcctttccttgttcataatcctgtagggaaggtttctagtcttctactatcaagtatgctgttagctgtagggttttgtacatactcattgccattcraagaaatgttcctctattcctagttcttaacaggattgtgtgttggattttgtcatatgctttttctgcatcaactgatatgatcatatgatttttcttctctagctatgaatgtggtggattacatcaattagttttcaaatgatggacaagtcttgcataccaggaattaatcccacttggtgtggtgtttaatttttttatacattgttgtattaaatatgctaatggttcattgaggatttttgcatctacattcatgagagatattggtcaatagttttcctttattgcaatgtctttatctggttttggtattagtgtatgctggcctcatataatgagttaggaagcagttcttcttattctgttttctggaagagattgctcaaaattgacacaattttttaaaactgttgaaattcaacattgaaagtgtgagcctagggcattctttttggaaatttattagttattgattctatttatttttagatat

SEQ ID NO: 912444 - DNA, 652 bp, Homo sapiens
ctggttatagctgcatacacgtgcacatttacacacacacacrctcattcactcaaaatccattcaatacagaacatttctaaataaagtattaatttaaaaaaacacagtatggtggattatgcacctaattatgccattcaacagataataaaaagcaattaaccaacagaaacaaataagccaacaatgaacaaaagctcctgctttgcttcccagagactggaaacattgcaaagttaaggctggaaagaggaattggaaagtggagcaggccgcagcaaattttaaaccagacattttaagcctcagctgccttatgaagtctcactgcgcccaggagtagatcccctcactaagagaatccctgggaggggttgtgctctgaagaccaaactgctagttcatttctgtatgttcttgggacaccataaaaataaaaacacaacacacacatgtaccacacacaatgtaaattattgttgcacagcaaacagtaaaaagaagttgccagtttataaaaaaaacaagtatctcattttattctttctgagattttaaacatatttatcaacatgttctattttaaataaagcaaatggtcacaaatattagatgtgttaagaaaataggtactgatatctaaaagtga

SEQ ID NO: 912445 - DNA, 593 bp, Homo sapiens
tgtccttatagcagtgtgagaacagactgatacacytgttgtagccacaccatcttctctcctactccaacccttcttaacccctgccaaccattaatcccatctctatttctatgattttttgtcacctcaataagtgtaatggttaattttacgtgtccacttggctgggccactgggtgcccagatactttgttgaacatttatttctgggtgcatctatggagttagcactatggagtcagtagaggagtaaagcagattgctccccgaggtgggcaggcatcaccctattccttgaggggctgaatgaaacaaaaaggaagaagaaggaaaagttcactctctgcctgactgcaagagctggaataaggctcttctccgtccttgggctaggacttgcagcatcacttcttctggccctcaggccttcagctttggactggagcttacaccatcagttccatgcattctcaggcctttggtctcacactggaacttacaccatcatttctcctggttctcataccttcggtctcagactggaactacaccatgggctttcctggatctccagcttgcaaagggacatt

SEQ ID NO: 912446 - DNA, 217 bp, Homo sapiens
gtgaacaggaagcatcctcagttaccaacaaatatttactaagccccactatgtgccaggcaccgtggaggccctcgggaaatgcactaagtccctgctctcaagagatgcgtgccagagaggtccagggcggtgggytcacttacccaaggtcactcagtgtgtcggtggcagagctaccatgaggacccaggtcttggactcctgggacagatac

SEQ ID NO: 912447 - DNA, 599 bp, Homo sapiens
gtttgctgcctatgagcaagttccagaccacagtacactgaagaggagtgtaaaacaacctaagagttttgctgaattaaagagaaagaatgttagtgtttctagayggcaagatggctaagatgtgtggtcccgagtaccagaaaacagcagctacacatacaaagcccttaagatctgcagcaggatctagtaaagtctttggcttaagattgatctgtccatgtgtaagagaatgcttcctaagcccagagaaataaccactggaaaggaacaggcatcacaatttctgaagctcatacaggactgaacaatttttggcccttaataagccagaatggaaagccatcaaaatccatggggcatgggtagagtcatcaaaatatattgccttagtggagagaataaattattactagattgaagacatcattgtacatttcttaacaaagcttaaaggcttcaaaaggatttaactaaatccaagcaactgaactgcaaaccataacaaaaatccaacaatgtataaagtaacgtaacaaacttgaacataatgtaagagtctggtatcaaaaatcattaggcattcaaaaaaaagc

SEQ ID NO: 912448 - DNA, 577 bp, Homo sapiens
aggtacatatatgcatatatttaacaaaaaaaagtcttttaggratgcatctattaaagaaagcagggtagattacaatgtctcagaagaggggatgcatgcaatggaaacagcagcattctggaaccagaataagaatcagataacctgggtttgaatcctgacaccaccttttagtactggtatgattttgaataaacagttttatgggtttgttcacagtttcttcaactgcgacctgtttaaaataatgtttgtcatgttgcaaaggttacataaaaattttaaatgcctggtactcctatcagagactctaagaaaaaaaaaatctctactaggataactttgcttcccctgagaaactgtgatacttctttttttaagagaagaattatgtagccatgcttttcttccattttgcttcacctgctaaaaaattcagagccaatttggggctcaactgtaagaactgggctgaccctgatactctgtgaatgtgtgttcttcctttccctggtattgaatttccagcttcatttaaaatttccctgatctttattttaattaccttttttaa

SEQ ID NO: 912449 - DNA, 644 bp, Homo sapiens
ggacctctgcccatcaagatgagcaattgtccctctttagaatatcagtagctagaaaagrggtgattagaaataggcctagcttgcctctggtatttcaaatcctaaaaccctacataaaaagttgatgacaacatcaaaaataacaataacaacaaacagagtttgaagttagatcttctgccaaaatctccatcagactaatgcaggtgctccatgcatgtcaccagctttgttcttctctcctcccagagcactaacccaatatgcttgtggtttcaccctttaaaagaaactgacaaacaaaaatacccatgtaacttcataataactttaccacctgcaatagtgatctggcagctatgatagtagtatcgccctcttccataatatgtataaaaagagtatcagatgctatagattgatatttttcctctgtttaacccaagttcataatttaatcctaggagagtaaggtaaaataaccagaatccctgtattagaactgctaatcccagctttatcagtaaatggctgtgtgatcttgaagactcagagaaccatattttcctcttttctttctgcttatcagaacttacgtatgtttcaacctcttgcaatttataaaaaataaaacataattt

SEQ ID NO: 912450 - DNA, 605 bp, Homo sapiens
aatgaatttacagtttcacattaatatatatgatgatgatgaagtctgcttttatgagccatttttcttcctatggagaaatggaagagtaatttactgtgtttggccaggactkcccaaacttagtaccaggcaacgcctgatagaaacttggatcacagggggcacacaaatgtcataggctctagggctgaaccaaacaaggttctttcttgttctatgattccaaaagattctctgtttgagagaaaagggcaagattaggcttcagagaaaagagcccgtggttccagagtaaggaatcaagcagtttatcagtctttcaagcaagagaaaagtatacctcacagatatagaatggtcaaccaatagaaaaactaagatggaacaaggtatagcattaaagaggaaatctctgaaggtctcaataccacttatacactacagtatcctttttacagataacgtgtatcaatcccatagaggagaaagggaaatattaaaggaatacaaagggaccagacaaggttagatctgggaaagtcctggaactccatggaagtataattatgcaccagcagatgattaaatacaagtatgaaacg

SEQ ID NO: 912451 - DNA, 654 bp, Homo sapiens
tcaataccacttatacactacagtatcctttttacagataacgtgtatcaatcccatagaggagaaagggaaatattaaaggaatacaaagggaccagacaaggttagatctgggaaagtcctggaactccatggaagtataattatgcaccagcagatgattaaatacaagtatgaaacgtgcaggaatttggatgctgctctatgtttgatataatataaaatatttgtatttatatttcaaaaatacttgaactcacttgcaggtagatataagttatagctctatgttgctccaaggtggtgtttatgcctatcattttaaggctttacaattgaataacactttaaagatataaagaaaaacttttttggcaaaaaggtaagggtaaaactaggagtagaaaattcattcttcaatgacaattaggtgagccaataggaaaacctcccccaaaaaggacaagatgaagactcccccaagtcccataacattcagtatattttcttgaaaaggccattaacacaggtctaaatcaaagtgagtggcaygtatgatattcccccagtgtcatcataatcttagcacagtcttataaatcaatgaagcaacacactcatataaacagtgtaaaaccacagcataaaactgtg

SEQ ID NO: 912452 - DNA, 648 bp, Homo sapiens
ggaatacaatggccagagaacctggagctttgacatctaagggaaagagaagaagggtatcctgcctcaagaaaagagaaccccaattcacgctcactctccttgtttgttccttctgggcccccagttgacyggatggtgctcattcacattgagggagaatcttccccactcagtctgccaactcaaatgccagttttttcataaataccctcacagacacaccgagtgcagctcaatttttctaaccaaatgccaaaccaactgggtttctttcttaccagaagaggaatcgactccatgtctaagaaaacattgacaatcagttatctgggtatcacttaatccagtcaagttgacatccaaaatcaactgtcacagggaccatcttagaattctactactataaggagaaagacagcaagatgagcaaattataatactaaggggtttccgttgcataaaaaagaaacatgacttctccactacacaatttagtaaattaaatatgtccaccattgaaccacgtatagagccaaaaggaaaaaaatgaaagaaatatctaaaaatgtaaaatgatggactcatcttagaaaattaaaaagacctgaaggataagtccaagaatcctgaaatgtggctattaca

SEQ ID NO: 912453 - DNA, 656 bp, Homo sapiens
gttttcatcattatatatcttgaagatatttctatattaatgaaacacaagcatcctcaatctttttaaactgctgcgtatattttccagtgcatatatgtaccacaatttatttaactggtcttttattcaagggtattgagattgtttcagtgctacaataaatatcctttcatatattttattttacacctggacaattatatctttagaattctgtttccatcatctattgctgtataacaaactaccccaaaacttagtactaattttaaactaacaatcatggcagtatctcataatttggctcatatctcataatggctgcatggcccaccatggctcaatcacacagctagcaccctcacaggtaaagtaggaagactatactcaacaggaacaagtacccagagatatctcacccggcctctccagcatggtcatctcagggttcttgaacttcttacatggagtctcagagcttctaaaaaggaattaactcacctcagctctggtttagacaaacaggaccttacagtctagatagtgtcatctgtatcacgtgcaaatacagacgatactcttcagtgaagatacctgagtatgrctcttctcaacctgaagatttgtgaactaaaaacaaaagcaaaccaaaa

SEQ ID NO: 912454 - DNA, 596 bp, Homo sapiens
gcaatctttatgaagtgaactgccacattgggccaggatctattgctgtcacacctaccaatcagaacagatcctgctacatggtgagtgagccagttacaaattacctcctattttctcgtatcactatccatactcctagttttagaactggtcttctgagaagcagacactaagatgggattacatgtacaaggatcatgttatcagatatgcccatgtaaaaggaaatagagagggagcaggaggaggccaggagagcagtctgacagtaatgcaagtcttagccctagtaaaggacagtgagagaaggttggctgaaagcaaaagcatcctaggctgtaatgtagtctaggaaaagtttggcaaagccaaccaagagtactcacttctgcagcacatatactaaaattagaatgatacagagaagattagcatagtccctgtgcaagaatgacacacaaattcatgaagaatttcatatttttacaagccagaaaagataagagtcctatcttcagcctccttaaacagaataactctcasccaataattttgtatccagcaaaactaagtttcataaatgaaggagaaat

SEQ ID NO: 912455 - DNA, 464 bp, Homo sapiens
agcacctccccacttgctcacttgctctcttgctcccccatctgccatgattgcaagcttcctgagccctccccagaagacaagcagatgaacagttccatgtttcctctacagcmtgcagaactctgagccaattaaacctcttttcattataaatgactcagtcttagacatttctttatagcaatgcaagaatggtctgatagacctggtgtctcttcctctccttataaggacacaagtcatgggggggtccaccctaatgtcttcattttaatgtaatcacatttgtgaagaccttatctccaaacagggtcacaccctgggatgctggggttaggacttcaatgtatggatttggggaaacacagttcagctcataaccttatgtgtcaggcacctcccagatgcttcaccaatagtaactagtttaccctcccagtgaccatttaagtcagatgcag

SEQ ID NO: 912456 - DNA, 589 bp, Homo sapiens
cccaagtagctgcgattacaggcatgcaccaccacacctgrctaattttgtattttagcagagatggggtttcgccatgttggccagaaatgtgagagaataaatttccgttgtttcaagccatcagattcatgatcaattgttacagtacccttaggaaactcataaagtgttccaggactgctagcttgcttcatgatcaggacagaaggggaagaccagaaaggaagcttagggatcattttcaggcagaagcagaacccttttgcagtggcccaaacaaccctaatcaaccaactgtgggaactgtacttattatgatgactgaatggaaaatgattatgtgcaaacgtttttccaggccacaccctctacctggtgggcatttgaggacagagttacagtgcggaatggacagagttacagtgcggaatctcttggcaagcctccattcaaagtttctgggactcaatcattcatacaggagaggactgccctctctcagcacatctacctgccttggcctcccagagtgctgagattacaggcataagccactgcgcccggccaaaagttattttatattgat

SEQ ID NO: 912457 - DNA, 718 bp, Homo sapiens
gatgcacacagcggaagagaaggttggaaaagtcaaagagtggctcttgagtgccaggttgaaacgtttagtttattgccattggcagtggggacatagtatggattttragcatggaaatggcatgattagggctgcacttcagtaaattcacctatcacttttagcttagagtctatgactatctttgttttgttttgttttgttttgtttggggcttgggtgtgggagaaaagtagcagtggataaagctgagttcttctggcccaaactaaaggcttagggccagtagttagagagttcttctactcagctcccaccacttaaagaaaaactcatttacagccacatccaaatccatttagaaattcccaacccgctctcacttcggtttcaggggcaatatagaaaaggcaatataaatgacaagctgtgcacagcaagggcttcagagactgacatctagatttcagtccttggttcaaaggttactttctctaaacctcaattttctaatttatgagaatcatagtagtgcctactcacagagttactgagaatattaaatgagatagtgaatagagaaccctcagaatagttcaccaaagtctagaatgttgtaaatgctataggataaacatcctggtttctgcaataaacaaattacaagtaataaaaaatggtgagaaatctatgaacttagattcttaaaagagac

SEQ ID NO: 912458 - DNA, 486 bp, Homo sapiens
acccatgtgggcttggtgtactgaagataaagctccagtgctggagaggcacagtggctactggcccccagaggagggcacactcaagagatgactctgttctccagatggtgctgtgttgctgcagcttaagcctctgggggtgggaagtcttcaccttgtactcctagtccaggacatgcagctgtgtcaattcttggcaatactccaaactggcctgagggcttgcaaagactgtgagattctcctgttgtaaagactttgtgtttgtgatggcagtggggctggtggggatcttctgcctaccttcaccctgcaatgagaagtccctcctgtctctgggccaattcaatccagatggggcagaaggggctgcacaggctgagtgcttccatactgtggcaacttycagtcaccacagatgtgtctccactcctttgctgcactccaggactatccctttgatactctaatcaaatctcagat

SEQ ID NO: 912459 - DNA, 486 bp, Homo sapiens
acccatgtgggcttggtgtactgaagataaagctccagtgctggagaggcacagtggctactggcccccagaggagggcacactcaagagatgactctgttctccagatggtgctgtgttgctgcagcttaagcctctgggggtgggaagtcttcaccttgtactcctagtccaggacatgcagctgtgtcaattcttggcaatactccaaactggcctgagggcttgcaaagactgtgagattctcctgttgtaaagactttgtgtttgtgatggcagtggggctggtggggatcttctgcctaccttcaccctgcaatgagaagtccctcctgtctctgggccaattcaatccagatggggcagaaggggctgcacaggctgagtgcttccatactgtggcaactttcagtcaccacagrtgtgtctccactcctttgctgcactccaggactatccctttgatactctaatcaaatctcagat

SEQ ID NO: 912460 - DNA, 640 bp, Homo sapiens
gataattggtgtgtttttagtgtgtattggctatcaatatggagaactgaaatatgggttagtattctgttaaactggaagraaaaacaagttcatacatgtcttctatctctaattcataatataaatgaatacatatatttaagaaaatatttattaaatattttaaataagtatttaataaggtaaatatctgaatagcttggcaaggtcttttatacataaaccatatagctaatataatacatattaataataatataatacataaaattatatatgttgagttgggattaattttagtatttatctttcagtatctaaagaggtacttttccctcaaagtaattttgtattcataatatttatttcataaataaataaatggacaaataaaatagattttaattatatgtgtgcgcatatatatatatgtatatatacttggaattctaaagaaacaatttcatgattgttggtatccagtaaattgtacacacactagtttttaagtttttaattttccagcattcctgcacttaagaagaaaatatcataggttttgaaaccatagcttcaagaactttagatgtgttaaccaaggaaaggtgtaatttgctatatctatctatctatctac

SEQ ID NO: 912461 - DNA, 622 bp, Homo sapiens
ttgaatgaagatacatatatatttgtaaaagattaattaagtgggtgaagatttgtaggtggagcaaattacactgggatggtcttttctcttgattttattatttgacactcagtaattttcatcctgggcaaaacaaaccagctgatgtctacagtttgccaatgtgttttcacagtctgggaggtgtgctggggcccaacacatgcaatcatccatgaaggcaagaattaatgatgcctgtttggatcaccagtgcatccccagtgcttaacatttagtagatgctcaatatatatttgttgaatgaatgaatggttgtgtgcctaccacagagaaaataagacagtgctacgtgtcaagtataaaggaatagtagataaaggacaaagcattttttagtttgtggtaagtcagtagctgcaaatataatataatcccctcagtagcacttctctgactaaccacattagttaatagaaagctttctaggacagaaatgamtagtatttcaaaggtgagatattaagaagcaacatagaaaatatgaggaaaacatttttaaaaattttcttctcatggcatgtaacaaagcagtaacataggatggaagaaggaaaaa

SEQ ID NO: 912462 - DNA, 521 bp, Homo sapiens
ctgctttatgcaacaatggacaagaagacctgagttttctctcaaaatacttctccatacctgccaattaagcctcaatatgtagagcttcattttttttttttatcttacagcaagtttcagattcttccttgaaaatgaattttgataccagggaaaaggaaaaacttaggcaatatcaggagtggcttctacaataagataaaagaattcaaagctggtagctaaataaaatattattattattgctgttattaatattattgccatcatcattatcattactattgacaccatcaaaatttattatttctatcattaccaacataataattgtaattcttatcctcttaatcaccattaccactttaaaattaaaaacagctactgttctttggatatttatcmtgtgtcagaaattgtaagtgctttacattcattatcagacaattcccagaagttggcaaactctttctgtaaggggccagaaagtaaacattttaggctttgtgggccatacc

SEQ ID NO: 912463 - DNA, 628 bp, Homo sapiens
tataaactttgagaggctgaggtgggtggatcatttgaggtcaggagttcaagactggcctggccaacatggcgaaacctcatctctactaaaaatacaaaaagtagctgggcctggtggcacatgcctgtaattaatcccagctacttgggaggctgaggcaggagaatcacttgagggtggaggttgcagtgagctgagatcacaccactgcactccagcctgggcaacagagtgagactcagtctaaaaacaaaaacaaaaacaaaaaaatccacacgaaatctgacactatcatccccattttaatgttgggaaactgaggcccagagaggtgagttgacttgctcaagttaaaatagaaagtgcagagatggcttctcatctaatccaaaacttttacatattttttagtggaaccttcttttctttatcaagaggtaaaccacatagggtgggagtgtctgagccctctgcaaggatgtaagaactcaggagtgtgcaaggacctcctttttattcatacagaggctgaatttwaggaaaaacccacttaacccagccaggtgtttggctctgagccgtaacaggtgtgtggcagtcccttttatggccacatgaggtcagc

SEQ ID NO: 912464 - DNA, 686 bp, Homo sapiens
tagtttcagatcaacacaggtccatgggaaaatatttcccccatttgtctttctttctctgtctctcttcttcatatgcaatatacgtytatgtgtgcatgtgtgtgtatatatatgtgcacatacatatgtgtatgtttacatttgtacttatatgtatctatatatgcccatgtaaagagaaaaagttttcatagtttaggtatataaacagaatgttgatatgtatgatgtaattgatctagccttcctactgttgagtcatttattcatgaaatcacatggcctgggtgggaagcaatttctacatattgtaaacatgaatgaaaagctagacaaatagttggaagaaagcaggattatatattttaaaaatggaataagaggtaccatagaatactcttttctctgtctctttctgtcatgttgggcttaattggcctgaagctgatgcacacatttatgttatttatattctgattttataacagatcatatattgtacagaaattttgcaaaatatataaaggactaaaaatagaaaatatacttcctaattctatcagcctgaggtgtcaatttaacaatgttggtgtgcttctattctatctttattcaaataaatatatatggcaaaatattgtacatactgtattagattttttccattttgtaaaaaataaaca

SEQ ID NO: 912465 - DNA, 654 bp, Homo sapiens
attttattgcaaagttgagaaccattccctttagcatcaaaaacacaatttttatacatatcactcagtaaatatctrttgaataaaactcatattaatcacacaaataggccaatcatgtcactatatttttagcctaaattatatcagccaagttattaaaaatctagtcatctttgggtttttataatatttgaattaaaatcaagttcattctcaaaagattatgatttgtcacttccaagaatagttaaaataatgtggctaactcccagagagtgttttttgaagcagaggaaggcccaacacattttttaacaatggcaacattagatctctataaatactttcacaaataagcaaatctggtacatagaaacattgataagtttttattaatatattcatatgtgacattttgagtactgctgactcttccatgctaatcttgtattttattcatttaatccaagaagtttatagtatcttgtccatggcccataccagtattaatgcagattttttctttttccaaaggcttcatcaatgtatattttcccagaatttgagtaatagaagaaaagaaatctggacctgaaacataaaatgagatcatgagcatgcaatcattaaattgtcacagttatatcataa

SEQ ID NO: 912466 - DNA, 516 bp, Homo sapiens; identical to SEQ ID NO: 910041

SEQ ID NO: 912467 - DNA, 570 bp, Homo sapiens
tatttttaattgacaaataatgattgtgtatattatgaggtacaatgtgatgatctgatacatgtatgcgttctgagatcataaaattaagctaattggcatatctatcacctcaaatatttatcatttctttgtagcatgaacatctaaaattctatcagatattttgaaatatataatacattattgttaactgtagtcatttttgaggaaatcccatgttatttttccagaaaacaaaaaaatatatatataccacaaagagtgtataagagtttacttttctctacatctttgccaacacttgttagcttttatcgttttgataatagttaatctgatacaggattgaaaaatagagctgcaaacctaaataaggaagttagaagctcacgggggaatgggggttagaaaattacatgggggtagctgtgaagacagaaaaggtctacctggggactatgcatttctaacatggaggctccatctttctttttttgttacctcatgtacaggaacaaagaaatgggtaacatkgtgcagcacaggcagagaacctgcctacataat

SEQ ID NO: 912468 - DNA, 416 bp, Homo sapiens
ctttattttgcgcctatgtgggtctttgcatttgagatgggtgtccttaatacagcacactgatgggtcttgactctttatccaatttgccaatctgtgtcttttaatttgggcatttatcccatttacatttaaggttaatattgttatgtgtgaatttgatcccgtcattatgatgttagctggttattttgcccattaattgatgcagtttctttttagccttgatggtctttacaatttggcatgtttttgcagtggctggtactggttgtttcttttcatgcttattgcttccttcaggagctcttgtaaggctggcstggtagtgataaaatctctcagcatttgcttgtctgtaaaggattttatttctccttcacttatgaagcttagtttggctggatatgaaattc

SEQ ID NO: 912469 - DNA, 624 bp, Homo sapiens
aaactgcatttggtgtcaacagttgcatttctttatatttatattagctggttagctgtgctggcagaactaaaggaaacctgtccatagagccttacgtagtcgtaactacaacacaatcatgtgtcacaaatttatagcacagcagacctttacactgaaaattgtttagagaaagaaaaattcgactgggagcggtggctcacacttgtaatcccagcactttgggaggccgaggcgggtggatcacctgaggtcaggagttcaagaccagcgtgcccaacatggtgaaatcccgtctctactaaaaatacaagaaaaattagctgggcatggtggcatgcacctgtagtcctagctattcgggaggctgagggcaggagaatcgcttgaacccgggaggtggaggttgcagtgagccgagatcatgctactgcactccagcctggctgacagagcgagactccccatctaaaaaaaaaaaaaaaaaaaaaaaaaggagagagagagaaaggaaaacttgaaaaatgaatgagaactggtaaacaactgcagggaaagtaattaccacactcttcatatgrcaaactaaagaaagggggcaccgcaagaaaagtattgcca

SEQ ID NO: 912470 - DNA, 617 bp, Homo sapiens
tgtgactagatggaagctacaatgtcttttataaccaaacccagacaaaactgggcctgggtctttataagtctgttctcatgctgctatgaagaaatacccgagactgtgtaatttataaagaaaacaggtttaaatgattcacagttctgcatggctggggaggcctcaggaaacttataatcatggtggaaggcacctcttcatagggcagcaggaaagagaatgagtgcagagcaaaggggaaaaaaatcccttatgaaaccatcagatctcactcaccatcacaagaacagctatgggggaacgaccctcacgatctaatcacctcccacgaggtcccatccccaacatgtggagattacttttggattacaattcaagatgagattttgggtgggaacacaaagcctaaccatatcagagtctaatcaggatagaggaaaaatacagcaacttcaacaggacaacagagcaagactccgtctaaaaaaaaagcacggcacataagattcagttgtataatgattctttgtgatgattaaatgatgaatgaatatgggwaattaatatggaggcaaagccacagaccattatgtagagttaataaaaaggaa

SEQ ID NO: 912471 - DNA, 594 bp, Homo sapiens
ctccataggctgtgctcttttcatrtcatactgttttcacatgaaagaatctagaactcaaaactggttcaggaataccgtggaataaacagaatagactggtattgggcaagcctgggaacctaacaactctttaccattgtttccaggttgtgaatataagaagagatatgtttgtaatttagggacttgcctatatcaccaaaagatggtaactttggcatttgaagtgttcaactacaggttaagtatcctttattcaaaatgcttgggaccagaaatgtttcagatttttttttgaattttggaatgtttgcattatatacttactggttgagcctccctaatctgaaaatctgaaatccagaatagtctaatgagcatttatttttgtgtcatgttgatgctcaagaagttttgggttttggatttccagattagggatactgaacctgtataggaattacagcctagcttttcactgagctccctggatccttttttcttttcctgcatccttgcctgtcttttttctattgttagtctgtgttgcaattgtgctaagaaattttgaagaagcatttgtagagatta

SEQ ID NO: 912472 - DNA, 632 bp, Homo sapiens
tgcaatcccagctactaagcaggctaagacacgagaatcgcttgaactcgggaggcagaggttgcagtgagctgaaatcgcaccactaccctccagcctaggcaacataacaaataaaaagaatgaattatgaaccataaactgaaagaaagtacaattgggtcattaagtctccttagtaaactagtactcaccttccagttttcaaaaaattttgatttacaagcaaatctacttttattcagctttgtgtatagaaaaagaaagaaatgaagatggaatgagggaggaaaaaagcacactgaaagatcctgttcatctttacctgggaaatctcacgttcctagtcactaaaaatccagctaaagttcatcccaaagcttcctttctgtagccactccagctcagtgtgatccttcctctctatgatattcttcaaccatcactgcctttagtactaattttgacattgattcaaaatatctgcatgctttagttgtatcttatctatgtaataatactcaaggctccttcatgtcgggtcttcagatctcatacactttyatctctttcattgacccttaaataatgctacaccctagtaagcactccagtttttaaaaaatcaaatg

SEQ ID NO: 912473 - DNA, 595 bp, Homo sapiens
tcatctacagattcaatgcaatctctatcaaaataccaatgacattgtcttcagaaatagraaaagcaatcctaaaatttgtatggaactaaaaacaaataaacaaacagaaaaccctgaatagcccaaacaaccttgaagaaaagaaaagcttcaggtattatactacctgacttcaaaaactctaataatctacaaacctataataatcaaaacagcattgtacaggcacaaaaacagacacatagaccaatgaaacagaatagagagcccggaaataaatccacacatttatagcccactgattttcaacaaaggtgttaagaatacacgatgtggaaaggacagtgtcttcactaaatagtattaagaaaactggatatccacttatagaagaatgaaattagattcttatctctcaccatagacaaaaatcaactcaaaatggatgaaagacttaaatgtatgaccctgaactgaaactactaggagaaaacattggggaaagctctatgtcactgatttgggcagtgatttttttggctaggacctcaaaagcaaaagcaataaaagcaaaaatagacaaacgggatta

SEQ ID NO: 912474 - DNA, 593 bp, Homo sapiens
ttattccagataaataaaaatttatgtcctaaaaagacttgtacaaaaatgcatataatgatcttactcatcatagccaaaaactagaaatgacctaaacgttcgtyaacaggaggataaataaatttcaatatattcatatagtggtgaaatatttaacaattttaaaaggtaaactactgttacatacaacaacatgaatgattttcacaaacattatatcaaatgaaacaaagcagaacaaaaaagaatacactgtatgattccatttatatgatgtctaacatcaagcaaaactaactgatagtagtaaaaatcagaaaaaagttgctccagggtgagaaatgtgtactgaacagaaggagggataagagaatttcttggtgtgatgtatgttctatattggagggtagatagataaatgggtagatacggttggtcaaaatatagatataggcatagatagatgtggatgtatatatgaaatagtggattgattccacaaataattattgatcagctactatgtacaaggtactgctgtggacactggggatccattagtgattaacacagacaaaaactcttctttc

SEQ ID NO: 912475 - DNA, 647 bp, Homo sapiens
aaggggtccagtttcaatcttctgcatatgggtagccagttaccccagcaccatttattgaatatcctttccccattgctttttttgtcaggtttgtcaaacatcagatagttgtaggtaggtgtgtggcctcatttctgcgctctctattctgttccattggtctatgtgtctgcttttgtaccagtaccatcctgttttggttactgtagccctgtagtatagtatgaaattgggtagtgtgatgcctctagttttattctttttgcttagaattgccatggctatttgggcttgctttttatttttattttatttatttgtttttgttccccatgaattttaaaatagttttttttctagttccatgaagaatggcaatggtagtttaatatgaatagcattgaatctataaattgctttgggtagtatggctatttaaatgatatcaattcttcctgtccatgagcatggaatgtttttccatttgtttgtgtcatctctgatttctttaagcaggaaagacatatgtatttcttattcagccttcaaacaatgtccatgctayggacaaagccggggtccctggggtcacttaatgcctcttttcccaaccctcttgcgtggccagtagccttaggacaggt

SEQ ID NO: 912476 - DNA, 700 bp, Homo sapiens
gcagaagaagaacgtcacctgattcttaatgtttacggatctttgcaaaccgaagaagaattgggaatgtggaaagacagtgctctctctcaggaatgtgactgcaacctcttcttttactaaagaaatgggtttgcgcaagttgcttaactgtgttgagccacaatttctccactcgaaaaacagaataatcatacatatcagtataagatatactgcattagcttaaacaagacagaggtttattatcttctcatgtaaaaaaaaaattgacagattgttccaagctgctacgacagctccacagtcatttggagactccaggatctttcttgttttctgttttaccgtccttgacacatggctttcaacttcaagtacacctcataatccaagacggctgccacagcaccaaccaccatgtctgaattctagacaggaattagaaggaagaagggatgggggaaaagggcatactcttaggtgagtcagcctccttgaagaattttcctaggacttcctttcaacctcaacaactctcgcttacattacaatgaccatttctctctgtgaggaaggttgggaaatgttttagttttgcacattgccacctggaataaaatggggagtyttagaaacaaagtagatgagaatagatattgggtaggtagtctatgctccaaaactttggagagttgtt

SEQ ID NO: 912477 - DNA, 684 bp, Homo sapiens
tctagtagcatttctgttgatgtaatgttctcaaaaacattataatcctactagtttactagggctcctgtaacaagttacacaaactagatggcctgtgamaagtaaaatttattctctcatagttttggaagctacaaaacttaaatcaaggtatcagcagagccatgctctctctgatggctctagaggagagtccttccttgtctcttctagcttttagtaactgcaaacaattcttgacttgtaggtgcatcactctaatctctgcctgtcttcacatgttgttttcctctctgcatgctgcatgtatgcgtccaaatttccctcttcttataaggacaccactaattagattaaggcccactctaatccagtatgatctcaccttaacatgattacatgtgcaaaaaccctatttttaaacaagttcacattcataggtccaaggaagatatgaattacaggaagaaactattcaactcactgaatggtccttgcctaaatttttcagagtttcactccattagacaaaagccatgagcacaaacatttttgagatgatccctgctctgtctttggtttctgctgagatgactgagggacaacactcctaagcttctgagaggccctctagtttcactgatgggatcggtgagtcacaaccttaatatcttagaagag

SEQ ID NO: 912478 - DNA, 612 bp, Homo sapiens
ggcacgtgccaccacgcctggctagttttcttatatttttagtagagacaggggtcttgctatgttgccccagctggtctcgaactcctggcctccagtgatctacctgccttggcttcccaaagtgctgggattacaggcatgagccactgtgcccagcccaaattgtttcttttcatttcttattttgggatggcactacatatcattcttcttcctcctccatcttcccttccctcctttaagtctctctctccaacaggaacccctcccctctttttattatagaaaagggcattgaatacctgaaaggcggtttatcatggaccagagaaaaaacaatgctcacagctggttctctaggttctctgagcctttcattcacgtcaagaagttctggctgcctgcatcctctgccatctcaccttgccttgcacaccagatgaaaaggagatgcaggaggtgggaaagcaccctggacccccatcaccccagggtggcattccccaaatgatggttgacctcaaactgccctcctgacttttgccatgtcaacaaactgccagaccaccacacytgcaaaacatggtctgcgtaaaacagattctataa

SEQ ID NO: 912479 - DNA, 561 bp, Homo sapiens
aatgtctccaggccatgtcagagaccttcatggcagcaccttccatcayaggcacagaggctcaggaggaaaaagtggtttcataggccaggcacagggtgcccctgctgtgtgcagcctagggacttggtgccctgtgtcccagctgctccagccatggctgaaaggggccaatgtacagcttgggctgtggcttcagagggtggaaaccccaaaccttgccagcttccacgtggtgttgagactgcaggtgcacagaagtcaagaattgaggtttgggaacctttgcctagatttcagaagatgtatggaaatgcctggatgcccaggcaaaagtttgctgcaggggtggggccctcatggagaacttctgctagggtagtgcggaagggaaatgtggggtgggagcccccatacacagtccctactggggcactgcctactggagctgtgagaagagggccaacatcctccagaccccagaatggtagatccaccaacagcttgcaccaggagcctagaaaagccgcagacactcaacgccagcccatgaaagcagct

SEQ ID NO: 912480 - DNA, 596 bp, Homo sapiens
ttttggatacatgtgagaaaatgtttttattttctatacaaaaataggtaacatgcaaactgaaaagaattaaattaaaactacaataaataatgaaaatattggatgtcacatcatcttatgagcctagcactttttttaacagaaagcattgaaggctgactcttgggaattagtttcttcaaaatgctattgcaaatacacaccaataaaatattatagtaaagaaggtgctttatcatctcttcctagtacacagggcctggaatagcaggaaacaagatgaaaataaacaagggccagaagatatttcattattgcttaaaaaaaaaactgtgctatactttctatagcatataaatacagacacatgaaaaggatacaataaaaacaggagttgaaaggaaaacccagtgctccaagactgctccaccagacagctggaacatcaaacatgctttctgaaatatcatataacagctgtctactatgctaagcccttgaacattaccccaaatagttttttttttttwaaatcatgatgatcaatagcaaccatttacttagggccttctctatgcccggtgctggactaa

SEQ ID NO: 912481 - DNA, 586 bp, Homo sapiens
gccaggggggttttcctggattattccctcaaatatgttttccaaatttttagattcctctttttccttgggagcacaaattattcttakgtttggtaatttaacataatcccaaacttcttgaaggctgtgctcattttttaaaattcttttttctttctgtttgttggattgggttaattcaaaagccctgtctttgagctctgaagttcttgcttctacttgttcaattctattgctgggaatttccattgtattttacatttctcttaatgtgtccttcatttccagaagttgtgattgttttttaattatgctatatgtttctctggagattttttaatccatatcctgtaacgctttacaaatttctttaagttggtattcacctgtctctggtgcctccttgagtagcttaataatcaagcttctgaattctttttctggcaattcagagatttttttcttggtttgtatccattgttggtgagctagtgtgatcttttgggggtgttaaagaaccttgttttgatatgttaccagaattgttttgattacttctcacttgggtagatcatgtcagagg

SEQ ID NO: 912482 - DNA, 658 bp, Homo sapiens
gccatttgaatgtggcatttgagagcttgaaattcagaagcatgaggcccaatccaagctcawagggaagagtaccagattgattagtgatgtgtttcatggacacaggagtcaggaatagcagcatatgcattacatatttattatcatattatttctaaggcttctactggaatgctgctgtgcatgaattgtcacaatatccctcttacatgctttcaggaaataaaagctattgtgtcattgttcatattttatgttattctttccaagtggcccagattttccagaggcatctgagaggccactaatctctcccctctagaaataaggtcatcatgttagcaaacttcctctgctctgacacagttgtggttttaatggagaactaatgtcttcatcagtatctgtgctatttcacacttcatttcctccccaactcttggatgaaaaccatccagtcctggtgatttactttgtgggagtttctttcaagtttgtttccttctccaaggatgtcacacaagcattttcagggctccagctggggagcacccagccttgaaacatcagcgtgtgatcaagtcactcaagaaacccaatgtccttggcagggacctggccgtgaggcctcttagctgaggcccttgagtctgag

SEQ ID NO: 912483 - DNA, 660 bp, Homo sapiens
gttattatgcagacttgattgtgtggttgctttatagtgtcaacgacctatatgctcaagtgtgcttttgtggtggctggtaacagtctttcctttccatatttagcactcccttaatgactgtgcaaggcagtaacaaattcccttagcatttgcttgtctgaaaatgatattatttctcctttgcttatgaaactagtttggctggatatgaaattcttggttggaatttcttttttcttttttttttttttaagaatgctgaggctgggcgaggcagctcaggcctgtaaccctagcactttaggaggccgaggtgggtgaatcacctgaggtcaggagttcgagaccagcctggccaacatggtgaaaccccatctctactaaaaataaaaaaattagccaggcatgatggcgggcacctgtaatcccagctattcaggaggctgatgcaggagaatcttttgaacccaggaggcggaggttgcagtgagctgagattgtgccacttcactccagcctgagtgaaagagcaagactctgtcaaaaaaaaaagaaaaaaaaaaaaaagartggtgaatataggcccctaagtctcttctggcttgtagagtttctgctgaaagttccactgttagcttgatagggttccctttgtag

SEQ ID NO: 912484 - DNA, 594 bp, Homo sapiens
taaaagcataacaagattttcttagagcaaaaacctgcttatgatctgacctgtaagaaaaattgtaaaggcttataaaaggtttattaaaatcttacctatggtcaaactgattaagattgaatatatttgtctataaggttttattgaatatatttgtctattgggtgtaacatcaataatgcactaacacaacagtgacatttggcttacttggtataaaaatcatacaagaagcattgccaaatacaaaatggtgcttggtttttttttttggctctatttgtataaatgtgttattggtatatgttccaaaattatgggaaactcctctaattctgatatggcttaatgtatgttattaatagttataattgttatgtgaaattgctatatgccacagaagtgaccaaatttccatatcaattgtggccttaatagtggctgtcctaagactttttatcatccacagacaatttttgtcctgttttaatcctctttggaagatgattttatagtcaactgtacaattctaacaggtgttcttaaatgsaggtttctgataactttggagattattacgttagaatagag

SEQ ID NO: 912485 - DNA, 595 bp, Homo sapiens
ttatggacctaatctgctggtaaaatgttccagtayatgagagtccagaagaccctacaaaatctcattagagtggcctgattacttacttctcactgcttgatcaaattctcagaagaaattgctgtgcctctacagcttttaagaaaatttacatctttactttattgaattgatatgttaaaaagtgatatataattcctttatacctgttggcttaataggtattccaacatgcctcttcctgaatacccttctatctttgcagattatggtaggagaaggaattctctactgttgcctctccaaaagaagaaatggggtcggactagagcccaacattaatgctggaggctgcaacttcaattccttcctcagacgagctgtcagattcgttggtgggtgtggggaaccacaaagaaaagaaatgcttttttttttatattgaaatgttatatttaattatagatattaagtctcgtacgctataatttagatgtataatttcagtacatgatgagttttatattgtacaagaaactgttaaaacaccaaaatttgggttttgtatctgaaatgtgttatttacagttgt

SEQ ID NO: 912486 - DNA, 621 bp, Homo sapiens
tggcctaactcctagatgcctgtttctctcaagggaatggattcagaggagccacttcaaaagctagtgcagtgcttctgcagtttcattaatgcatcaagcccgttccatctttccacttaacagagcttctctttggtcctcatagtttcaagacggaagtgaaaggactgtgggagtcaggacctcacatggaataaaccaggaaggcaggaggtgaagatgagaatggaatgcatgaatttgaagttgaggaaggtacagtaggtattcataatgataaggtctactatggtatgattatggaggtgagtgaggttggatggacaagacccttggagaagaaatcaagaaatggagaagcaggtattaaaaagatcatctacaggtacattgaaacctccaaatattaaaacagaagtggtattttaaatgaattatgactcccgcctccccatcccacattctataaccttccattgtcttcatggtgagtgtagagaaataaatgccttggtggagtygctataacatgccatgagtcgcttgtttttcctcatgtgcggtttcctcctagcctcttctacagacctcatattgccctgtgttggagagagtgcc

SEQ ID NO: 912487 - DNA, 646 bp, Homo sapiens
aaagaaagaggtttaatggagtcacagttccacatggctggagaggcctcacaatcatggtggaaggtgaaaggcacatctcacatggcgggagacaagagagaatgagaatcaagcgaaagggatttccctttataaaaccatcagatctcataagatttattcactaccatgagagcaatatgggggaaaccacccccatgattcaattatctcccactgggtccctcccacaacacatgggaattatgggagctacaattcaagatgagatttgggtgggaacacagccaaaccatatcactattattcagagtaattatgatcaaatgcaacagtgagattgaaaatattatttaatattgcattttgagtacaaataaattttggcttttaatcgtgaacagtcataatgttgaatgttttacttaactgtatttattattaattttttgaaatggtaaaaagtaacaactaacaaactaagaaaaaagagaaaggaaatgaacagtgttataggcaagtagatgctgtggcttacaagcatatggttttctctcagaaacgccccagycctgtctcctatctcatctctaggagcccacatctacacatcaacctttcctacctgaagtcaagacctaaa

SEQ ID NO: 912488 - DNA, 578 bp, Homo sapiens
acatgcatgcacacacatgttactttacttatatgtttatgtgtacatgcatatatacaatttcaagggattcatgaccatcatgaaacctasctgaaagcctctggttttttccttgttagtgatctaaaagataagtcagattgagaggtctttgacattatacgtataaaagatgaagtaacataaggacaatatgtgttaagttgaaacatcttattgtgtgacatgttctgagtctcataagtattatttaaagccaacgaggggcttttctttaaaatccttttatcctgtttgttatatggtaaaccagataggttatagtaaaattaaattagccctttaagaatggaaaaacttcacatctatgaacaagggctgttcaattaaatgtgcaattatccatacctatttctatacatgaacttatatacacacccttgcatctatgcatatccacctgtatatacacataggtttaaatatacacctaacctttggggagattaagacataaaacctgtcttcagaggctaagaatctttagaaagagctcacacaatatcttaacatgt

SEQ ID NO: 912489 - DNA, 704 bp, Homo sapiens
gccttggtttcaggaaaatagtcaaaaaacttgagtgtatcttaagataagtttttttctttctattctgtaaggtgtgtgatctaaaatgacacagttattttcattacccactgagaaacttgagatttctttgcttccagaactttctctttcttcctgggcagcttttacttttagcctgtgagcctgtgacttaccattggtattcattctcctacttggttgttctacagagtttaatcaggaacctttacttattctttctgtcctcacctcttgtttttctctctctccctcagcaaatttcatcaggttttgaaggatggcaagttgttagaccttcaatgtcatttctgaaaaaatggactttttgaagaaataatattttgccaggcagatgtcacagattctcttgtaatttagatctttccctggaattctttcctcctggccgtgtactagaacgaggatttgcaggcttggaagctggcccaagaatccctgagtatactgcggggagaaaggttgctgtatttgagattttaaagagacagagtcctttacttgaatgtaagttacttttgtgcttttgtgttactctttgaccatcagttaccctatctgcaaaatggaatcataccygttttagttacacagaaggttagaaggataccatgaaaaatgcatatgaaagtttatga

SEQ ID NO: 912490 - DNA, 583 bp, Homo sapiens
tgtaaaatcgagccacagatatagatgacagcagaaaaatactaccagggactaggcatgttcaaaatggcggctccatcttctcttcttgccagccatgtgtaaggtaaggagcagacaagatggtgctggtcaagtggagagcccatttgcataataacattgggtggggtggccagccctccatgcaggctatgtaaatggcacacctgatcaaaccaatctgtgagccctacctaaatcagacaccacctcctcaagcctgcctataaaatctggcaaactccacaggaggcccgtctttcccttccagaagcccctgtctctcactaaagagagagttgttctcctttctctttcttctgcctattaaacctcggcttctcaactcctcatgtgtatccatctcctaaattttcttggtgcgagacaacgaaccctggatattcaccccagaaaacgtagctgcttcattttgaatgagattaaactttaaatcagtggactttgagtaaaacagatttctctccrttatgttgtgagccttgtccagcagttgaaggcctaaatagaacaaaaatga

SEQ ID NO: 912491 - DNA, 585 bp, Homo sapiens
cacataaaaaagtagtattgayataaaggatttatgggaaataacagacagaagtcaggaggaaaacaaactcaggatccagactgtttccttaaatgtgttatttgtgctgactatctgagccctaaatatgtacaggcagtttctcctttagggagtattcgggattctgacctgctgcataatttagtacatttaatatgacatataaaatggagtaaagttagacatttattgtgctatgtccacgtcatatttagaaattacagagccctacttttaataggacaacatcagggattgtatctactaaagacagaaagcccttcccactataatcttttccttagagaattatgaatcatatgacccattgggatacctggaaatgatacattcctatattttagttcttattgtgtatactaaatagattttagagaataagattaaaaagaaagaaaggagttgtagagtattcactctaaccatgaaattagggtgatgtgtggaactgaaataaaagaaagaggagcatatgaactggaatgtagattactctaattccttcaatagcaagaatgc

SEQ ID NO: 912492 - DNA, 646 bp, Homo sapiens
acacaggtgcactgaattctctttcacctttgagcgtttactggatggtatcatgtgcttaraattctccttttgcctttgctcttgctatggtttatactgggtgtagtataattccctgcctcactggcattgggcttggacatataatttactttggccagtgaaagatgagttagcttcacacatgcttctgtggacttgcctggtttagcttacactctaggtgccctgctctgtgccgtgaaaaagaaaaataccttagatagtgatcgcttcttcagcttagaccttgttttagtccatttagtgtggtaataacagactacctaaaactggataatatatttaaaaagtttacttggcttataattctggtggctggaaagttcaagaccagacaactgcatctggtgaggtcctctggctgttccagttcatggcagaaagcacaagaggatctctttgcatgtgcaaagagatcacatggacagaggggaaggtggggaagtgtcaagcactttttcataaccagctctaccagaaacgaatagtgtgaaatctccctcacccccagggatgacatattcatgagggttccacccacctgacacaaacactgtccaccagccccacctcccaacat

SEQ ID NO: 912493 - DNA, 519 bp, Homo sapiens
agagctctttgacgacaattgtcaggatgcttttggggccttttccatttggaagcccattatttggggaagtttttggggggggggcggggttgggggaaaaaggtattgaagtagggaagggaaagaagaatacgagtttgcactttcagttcagtagctaaatagcaatttcaacaataaagggtctcaccgtgtcacccaagctgaagtgcagtggcacaatcacagttcactgcagccttaactttccctggctcagctgaacctcccatgtcagcctcccaagtagctgggacatagacgcatgctaccatacccagctaatttttgtatcttttgtagagatgggtttcatcatgttgcccaggctggtctcaaactcctgggctcaagcaatggaaccgcctcaacttcccaaagtgmtgagataataggtatgagtcaccgcaccaggtctatttggtaacatttgtatgttaatgtctcacagtgttccatcaaaagatatgaagtaag

SEQ ID NO: 912494 - DNA, 591 bp, Homo sapiens
tgttcattctttttgtctttccaaccttccctttttgtattcttgtatattatcttaataacgactatgaactgtggaaatttcacagaagttgtgtctygtttgtggacttttttataggtgtggaaatgccaacgaaaacaattacattagagagttttaggggactattagagctcctctggcccaagccctttagttttatagatatggaaactaagaccagagaagttaagtgacttgccttcaagcacacaagaagtaatctttctaagccaagatgagagtactgtctataccaccatctcaatatacgctgggtaaaaaattttcattttgagccacctagcactgaacatccttcctcattgcatgagttgcgatgagaggcaagaccctaacatctctcactgtggaattggagggaccataccatcctcctcactctaggaggatttcaaaattctgatgtctggttcatcttgcaaaagcagaacatatgacaccactgagcctccagtcctatagggcaacaatccagtagaaatgagtagcagcccctgccttctgtggcaaagacatgatttacag

SEQ ID NO: 912495 - DNA, 584 bp, Homo sapiens
caagcatgagctagcgtgcctggcccaaattgcgaattttaaagarattcctcttgctgcatgaaaaaccaagcaaagaagaacaatgatttaaaaaaagaaaaaagagagagaaagagttggagagaaagctgttgaactgactgcagttccaccaagccaggggtactttagtgaatggcagggaaccagagccatggggacatatctctgcctctctttgtatcttggtgtggcctcaagttaaaaaaagacaattgtttgagaatgatgaaaagtgttactgataggaacaaagcatgaagagatttgacagatgttcacataagccaagacagagttccgcttgagccatcacttctcaaggacatcaggaacacttcagtagccaaaaatgttctcttccagttctggctgacaaagagtcaatgatctggcagctgtgttacttgcagttgtcacatccaggtttcatgatagcaactcactgctatttggaggagatgcaagctcccatggaggctgcagctgttgcacaagccagcagcttacctactgagtggtgtcagtcacgaagcctgtcc

SEQ ID NO: 912496 - DNA, 621 bp, Homo sapiens
gcctgttctggagacttctctcatcatgcaaaagagctaaagtccttgggcagggaagcaggtctgtggtcacagctggggttgtagaacagcctcccagcccacactggagtaaccaaactgtctggagtcctggaaacttaggttctcatttcgttcatttttagaccttctgcccaaagtcatgtttggccatagatggtgcctcttgatctgtctctgcgtgactgtggctcagctgagagcctgtgtgcttcaaaaccaaaaaggcatctataatggtatcatttattagacttgcaccttagtaatttttttttttttttttttgagacggagtctcgcactgtcacccaggctggagtcctgtggctcaatctctgctcactgcaagctctgcctcccaggttcaagccattctcctgccttagcctcccgagtagctgggactacaggtaacagccaccacacctggctaattttttgtatttttagtagagacagggtttcaccacattagccaggatggtctcgatcttctgacctcgtgatccacccgccttggsctcccaaagtgctaggattacaggcgtgagccaccatgcctggccgcaccttggt

SEQ ID NO: 912497 - DNA, 620 bp, Homo sapiens
gagcggtggctcgtgcatgtaatcccagcactttgggaggccaaggcggacggatgacctgaggtcaggagtttgagaccagcctggccaacatggggaaaccccgtctctactaaaaatacaaaaaaaaataaccaggcgtggtggtgggcgcctgtaatcccagctacttgggaggctgaggcaggaggcttgctggaactcgggaggcggaggttgcagtgagccaagattgcaccattgcactccagcctgggcaacaagagcaaaactccatcacacacacacaaaaaaggtacccatcctcatgtatattcaaaagggcatcaggaggaaggctcctgccatcagccactgcactgatgagaagggcatccccgctatgctacacccacctggacgaggagccaggcttcatgccacccactgggaacaaagatttctcctatctggtggaggaattctcattcaccaaggacttcctcckggggactgtgcttgtgttcttccaggttccttgttactttgcaggacagtttgagatttaatctatttgtatgatacaatggcggggagctggagggcttcccttcctctccatgtggtatggtggtctcatt

SEQ ID NO: 912498 - DNA, 591 bp, Homo sapiens
gtgtccaatcccaggtcttttttagccaagcagagacctgcagggacttctccagggagggtgggggttgggcagtggttagattgtgtgcacagtggggcattcccaggtgcaaagtgcccagtmaggcctgcccttgctccactcttgcaagcgtcctctctcattttcagactgcttgccaccgaaggacaaacagtgccttggtgctgggccttgcatggctgtgcccaagtaaggtgggggtcccctgcacgcccctcaccctcaaacctgggtgggctgctcaccctgactgctcaaactctctctccagtcaaagccgcccaacttcatgggcactggcccagccagccctactgagcccaggcagcagggctctccctggggctcctgagaggccgtccgcacatctgtgccagcctcactgctcctctccaagaccccaggatcctaggtcagcaccacccactatggtgggtgagaggcctggtggctgtggctgccagaaactccctctgtgatggttaattttatgtctacttgaataggccacgggacccaaatatttggtcaaataccagtctagct

SEQ ID NO: 912499 - DNA, 620 bp, Homo sapiens
acattgtatccatggacagggaagtcccattgagaagacagcatggcagcatgactgggatgtggtgtsaggagccaggcagcccagggtcagttcccagctctacaactgacgctaggcaatggtgtttggtttccttgtctgcatagtgggaaatggcttgttttgagaatcaaatgagttaatacatataaagggttttaaatcatgcctgggacagacagaaagcccttgataagtgctggtggttgtttctgagaattaacccaagcaatccaaggggtgcttttcacgtaacttatgtaagttttctgttaacttggatcggattttataatcccatccaagtttacagaagaaactgaaatccagaaaaaaaatctgacttctttcagatcatgcaggtctgtggcaaatacaggacaaaagggcccacttgtcctgacccctgtccagggctcttttcactgccccacggaccctttggaagattcagtgcactctaaattccatcagccccaacaggtggccatccaccctggaagccagcccatgttgattttataaactttccatccaccatgacatgctggcctccccaaatataaagcatccccagc

SEQ ID NO: 912500 - DNA, 620 bp, Homo sapiens
acattgtatccatggacagggaagtcccattgagaagacagcatggcagcatgactgggatgtggtgtcaggagccaggcagcccagggtcagttcccagctctacaactgacrctaggcaatggtgtttggtttccttgtctgcatagtgggaaatggcttgttttgagaatcaaatgagttaatacatataaagggttttaaatcatgcctgggacagacagaaagcccttgataagtgctggtggttgtttctgagaattaacccaagcaatccaaggggtgcttttcacgtaacttatgtaagttttctgttaacttggatcggattttataatcccatccaagtttacagaagaaactgaaatccagaaaaaaaatctgacttctttcagatcatgcaggtctgtggcaaatacaggacaaaagggcccacttgtcctgacccctgtccagggctcttttcactgccccacggaccctttggaagattcagtgcactctaaattccatcagccccaacaggtggccatccaccctggaagccagcccatgttgattttataaactttccatccaccatgacatgctggcctccccaaatataaagcatccccagc

SEQ ID NO: 912501 - DNA, 612 bp, Homo sapiens
tagtgccaagattgagacaccccgagatgtgcagacgaccaacaggaaacccacactgcttcacgccatcaacctcattgcagccaggttccacccaaycctccaccttctgcctagccagccacagctgtggactcttgcactttcaaacaaggatccaggcatcagtcccaaatccttcaaactcctggaaactttcgtcaatctctgaaatgcctccatcgccttgagatgtggtggagacacaacaaccatcctctccaaaggcacctgcactgcctgtctcttcacctcccaaggattcttagcatctctgttacagcttggaggccgatgaggaagctggagcagaacccattcaccatcactaaggtgatctcacaaactggcccggtctttggagcacctgtcagaacttgatacaaataagccacatttaatattattgcaaaactgttgttattggcacattaatagaacaatcaaattctggaaaatattttaaagaggtttattgtgagctaatatgagtgacatggaatgggaaacagtctcaagaggtcctgaggaagtgtgtgcaaggcagttgggttacagtttggttttacacat

SEQ ID NO: 912502 - DNA, 637 bp, Homo sapiens
ttacactatatagtataaatatgtggatttaaatgtatatgtttcttctataaaaaagtgtcatttatttgcccctttaactattatycattcttataaattccttctatgaataatggttaacatattaggaggaagtatataatgcaacttattacaacaattagtactaaaaagtctttagcaaatgtatgttttctgtttaaacatttagttttggtcagtgaatagccttttgctagccactactggaaataaacattatgccattatgaggtaaccaatatattttcaggattatggaatataatactggcttaaattcatactttaattgttataccttaaatttatactttaattattttatcaaatgacatgaatgtctcttattcacgactattagaattccaaaaatcagtgatgttaagacaactctaagtctcattttgcatatattatcattttttttcaaaaaagttaaattagaatatggttcgacttataataatattttggcatcagtgtgttcttggctagaaaaagataaaagtaggttacagaacaaagtgatatcaaaatatacctaaaaataatttactggaatgcaaacatatttcttatactgtcaggaata

SEQ ID NO: 912503 - DNA, 654 bp, Homo sapiens
aaagaagactatccattttatattacgtgaagttccatattgataattcaggtaacgtttcctttttaacaagcaagacaaatatatacaataaaaaagagataaactgtttctcttacacactcaataatattcaggatttttcttaggagagaggaagtactctgctgtacgcaaatggttctcaaactgtggttcattgaccaacagcattattattacctgggaacttgttatgaacacacattctcagatctttcttagacctaatgtacaagaaattctggggcagagcctaataatctgtgatttactaattttgtggatgattctgtcgcacaccaatgatttagaaatactactccatgttgtcacttagtaagagaagcagatggatactttgcctatctcaacacgtaatgctcaaagtcattatggtcatctccaaccagttagtggaaaggcaaccagtctggagaagcaggagaggaaagtttactagaccccacttggaatcagtacatataaattccatccatttttcattggctaaagttcagtcatgtggccatacatgattrtaaggtaagacaggaaattgctgtgtgtgaaacatgacagaatgtgtgtgaagaagaatgacatattttggtt

SEQ ID NO: 912504 - DNA, 614 bp, Homo sapiens
atgaactaatgttttgttttaccaataaattcatcagatatcctatttgagatgtgttacattgctattgtctctttgccagtaaaacaaatataattgcatactccaaattgaatagttggaaaacatacaaaaagagtaatttggatttgcttatttgagaataaaatagaactattactgttttttcatttaagtttctcagattatacatttcacctgctcactggacacactggtaataattgggatagacaagcagaatgcttttggacagattgttactgattgatttgacaaaccattaaaagtatgacagctctattaaaggtattattttaaataaaataattgaaaaatatatttaaggcactcttccagtcgtgaaaaatctcataaaagtaaataaaacattaaatgataaaacaataaaagaaagggtgacatcatttacacaataggtcactatattccatagacactaagyttaagagtgtgaacgagttttgattcacagagtatgggcaaatcatacaatacatttgcaatttcccctattcattctgtgtgggtgaatgtatatttacctttcaagattaaataaataatataca

SEQ ID NO: 912505 - DNA, 654 bp, Homo sapiens
atttattcttatcatagcagtgccaaggcgggacttccaggtgtttcctgtgactgagatagggactgcctgctgcctattcccatcttacttccttttggtcctataaacaacttcatgcccttccaataaattattaatattatgattcctaggctgactagctagtagtaatttctgctgctggtgtatacagataatatgtcagctattatttcagctctgatggtgatgttaggtttgtgttcagaacagtatttgtgcaattatttgaatattttattctattttatcctcactattgtccaaaaatatgttagagaatgcaaacaggaaaatgcttatacgagtaataaaaaataaaactctcaaatgaagatagttgagataaaatgaaaatttggcatgtagacaagagagaatcattagactcaatagaattaagctaattgattgcaaattcatttatgagaaaaaagaagaaaaccaaagcacacctattaaatgcttaaaatatactaccaaagtttgtgtctctaaggagaaagaaaatagaacagatttttaaaaataaataatattttatctctttaggaacttcccyatatatttttaagtcaattttgttttctgttggcacatacatatttttag

SEQ ID NO: 912506 - DNA, 613 bp, Homo sapiens
ttcaactggagcttgaatctaaagctcatgttctctgcactgcaaaattcatgtctctcagctctttctttctaaaaaccatccyttataacatccccacctccttcaaatactgtcaatgcacagcaatttgaaattattttcttattaaggatttaaaattgtttgcaatagtttttatctattgaggatgggctttttacttttttttaaaagccatctataagaagatatatctgtactttggataggccagttggacaagagttacatcaaagtgcatgaccacagacagttgtgtgcaccaaatcaccaaatgtaacaccatgccatcatgttcctgtgccctcccctaaacaaacagaaaaagctgaggaagttcttagagaacgagatgacacttttcacaaataacaaatgcttccctgagggattttcagttatatgcatcactgctcattctatatatgtcttcacagaagaataactaccatttcttatagtgcaaatgaaacaaacttggtctgatttcagtctggaagctcattatgtgacacatggtggccattagtaaccaggagattctcaagggtgaaggaaccttgcattgagg

SEQ ID NO: 912507 - DNA, 608 bp, Homo sapiens
tttcctgtaaatttgtctaagttccttatagatgctagatattagacctttggacctatatagyttgcaaacattttttcctgttctgtaggttgtctatttactctgtagataggttcttttgctgtgcagaggtctttagtttagttagatcccatttgtcaatttttgcttttgttgcaattgcttttgccatcttcatcatgaaatctttacccattcctatgtccagaatggtattgcctgggttatctttcagggtttttatagctttgggttttacatttaaatctttaatccatcttgagttgatttttgtatatgatgtaaggaatggtacagtttcaatcttctgcatatgactaaccagttatcccagcaccatttatagaatagtgagtcctttctccatttcttttgccagctttgtggaagatcagatggttgtaggtatgtggtcttatttctgggttctctattctgttcccttggtctttgtgcctgtttttgtaccagtaccatgctgtttgggttactgtagccctgcagcatagtttgaagtcaggtaacactgatgcatccagcttcgctctttttgcttaggattg

SEQ ID NO: 912508 - DNA, 596 bp, Homo sapiens
atgctgttgtggggaagattctggattaggagggttgcagccaggccacctggaagacagggcttctagctcaagccatgcaaacgtgggcacaccttctaacccctctcggcctcagtgtcttcttctataaagtgaggaaaacagaaggacatgcatcagaaggtttgtggggatgaagtaaactcatataggaaaaccctgtggttggggaacaacagactagaagagcttccagctcttaacaatgccataattgtatggtctatcgatgttaaataccttaaaatactgcaaatggcaaagaggaaggctcactctgtggtcggcactttgctaaaggttgtcctgtatgattttacttcaccctcataaactttttgatgtatgtacttctattttcctcactttacaggaaaggataatgaggctgagatgggtcaggaggtgcagccaagttttcacggcttgagctggaaactaggtcccacagctggcctgggtgyggggcctcacctgtaaccatgctgctctctgctagcggcaggcaccagtgagaccaccaacagaggagtggttccagggaaagccatgtc

SEQ ID NO: 912509 - DNA, 637 bp, Homo sapiens
caatccatcaaccttgatctgatgcaataattatggcagtctctttaattaattgcttgatctatttgtgtaaaatctttccctccccatcctccaattcaagaaggtgactggttggaggggccaggtacgctcattaatgatggcgtgatagaggaagaaagggggtcctcagagcttcacctggtcatctgaattctcactgggcctctgctgcagaggagccagactgagtttctccctgaactgctgaccacagaggaacaaatggacctgtctggccatttgagatcatgtgctggcaccgactgctggaacccaagatccgagctatttattctcatctttaagtcctcacccaaaatgaactctctcctgcatgagggcctctgctggttcaccagggccctcagcatctccacctctcctccttgggacttggagttacataagtccctggggtccagaatggcagacctgggctcctggtaccacctacactcactcaggcaccatgatggccacggtgccaagcctacacctatgatttccctaagggcttgagtcttcactacagtagctcaaaggagcaaaggtttctgcasaccatccataccaatacagatactgctttcta

SEQ ID NO: 912510 - DNA, 643 bp, Homo sapiens
atgcacacaaatatcaataaattgccgacactagaaggctatttattgacttgtaaagaaagcatcattatttaatatggaatatctgtggagctgcccctattaaatagttacagtcatgtaaatgcaattttccaaagtatgacctacataaagctagtgcctagaaattatccatgaagacttccagggttaatacatttgaggatagagactcataatgtttgttagcatattacagactccaagcggttcctcagtagagaagccagctcaatgttgtttaaaccagtattgctcaaagataactagtgcgacactttattcccaagatgagttattaatgcacttaaagaattgctaatatagacatatgcaaaatcactgtctaaaagtttgtaccagattatgtacctaaatttgtatcaactccataagcattataaagactcttcgttgcttatattttccttttctcattgtttaatttgggggaataaaaggattcatttcagagaaacaatttctggagacaagtttacagggggaacactgtcactctttggccmgcatgggaaggcgctacaaagtcatcttctatccgatatggaagttgaaagccttgcagttgtcccattcccgt

SEQ ID NO: 912511 - DNA, 615 bp, Homo sapiens
atcacattaatctggatccaagaacctgaatctacttttttactttgagtagaatgttctcatatcatttcatgctccatttatccacttctgtaatagaactatgttgagttaatttcaatttatactaatgcataaaaattccagataacatgattgactaattgacactatcttgtacagaaatcatgacgttcagaagtggttctaaaattcagaactttaatgctacattttagataagtgaatatggttttgtaattccactcaagaaattgcctctaaagtatcacatactttaaaattcagaaattcaaatttgttcatactttcttcaaagtgcttttcttccgaggaaatgaggattatttgaaccagcaccatgcaactgttaatttcatactttcattcacttatttaagaaatattgtgtgtctcagcccttggctttcctttacagacaatacagacaaaaattctctgcctttgtggagcttatattctagtatagggtaggggggaaaatatagattccgatatatagagagaaaatatgtacattgtaacttctattygctttgaatagcaaattgctatagttcagaagttccaagg

SEQ ID NO: 912512 - DNA, 669 bp, Homo sapiens
ctgaaggagaagaacatggtaccctgtggccttatgacagtggggctggactagttggctggataggraaggcttccttaaagcactgagcttcttcaggagtttggcagccactccacttaaaggtctgtccctagcaatctctcctttcatatcacagtttgtagatgcctgacctatgaaatcaagctctaagtctctatactagtgaaatgaataaccattaagttgtctctaattagagaaggggagagtgctgcaacgggcgcaaaacatctggaagatgatttgaaatgatgcaggtaagcaaaggtgggaggggaaaggagaaactgaaagggaaggagagtcccagcctctgtggagagaggcaagtagcagtggtgaatgcagacctcctaacaagcagcagctcatgcacaccgagcagaagcagaaggacgtgggcggagcatgctaggcactgtgggccacatcaagagttgtaaacagagattatacatgaaaaagtatgaaatgaaagaaaagcaaaagcatcaagaataaaacctagggagctgaagacagtgaggcaaaggttaaataaacacggtatgaatgaagaaatgccactgtgaggcccttcctccttttggttgtagcctattccttttccttaatgggttttag

SEQ ID NO: 912513 - DNA, 661 bp, Homo sapiens
gataaaacagactttaaaccaacaaagatcaaaatggaaaagaagtccattacataatggtaaagtgatcaattcaacaagaagagctaattatcctaaatatatatgcacctaatacaggagcacccagattcataaagcaagttcttagagacgtacaaagagacttagactcccacacaataataatgggagactttaacaccccactgtcaatattagaccgatcatcaagacagaaaattaacaaggaaatccaggatgtgaactgagctctggaccaagcagacctaatagacatctacagaactctccaccccaaatcaacagaatatacattattttcagcaccacattgcacgtattctaaaactgaccacataattggaagtaaaacactgttcagcaaatgtaaaagaacagaaatcacaacaaactatctctcagaccacagtccaatcaaattagaattcaggattaagaaactcattcaaaaccgtacaactacatggaaacagaacaacctgctcctgaatgactactgggtaaataacraaatgaaggcagaaataaagatgttctttgaaaccaatgagaacagacacaacataacagaatctctgggacacatttaaagcagtgtgtagagggaaatttatag

SEQ ID NO: 912514 - DNA, 656 bp, Homo sapiens
atattctttctcacagagtccacaaaagacaaagagaggcataaatctacctgatcacatttgacactgcaagatagctgtccaaattcatgtgaaaataaagtgtaaagagtggtagaataattgaatctgtctcacagcagtagagaagattacattaatttttatgcttttaagttttcttgatttaaaaaccacatgtcatcttattaatgaaaaaacaaaacacagtggaaagaaaatatcatatgaaatgtattcttgaatcttgtcaaataagattggcacaaagaattaatcattttatcagagcaaaggaaacctagtcatggaattaaataaataaaacacttgtattaaattatttgataaatgctcagggttttgtacttataatttgggttagtggacctttaacagacactcctatctctcattcaacccctatccctccctaactaattttatgaaactcattcacaaatctctcccttctttatctgtgtcagtttttcctatgttgccctagtcctgaaagtaraaggaggactggagccttcagcgtctatccaacttgaaaacaagtgaacttaaaatgtactgaactactcagctatcccatgaaacacagattcaaaatcaaaatatctgtacta

SEQ ID NO: 912515 - DNA, 657 bp, Homo sapiens
tccaatggtttgaattggatttctgtaattgcaatgaaaaatgttacaactatactcaaaacagtgtagtattggaatgagsatagaaatatagaccaatgaaatagaattgagagaccagaaataaatctaaatatctatggctaattgattttcacaagtgtcaagtccattcaatgagggaaagaacagtccctttaacaaattgctttgataccactggattttcacttgcaaaagaaaaaagttggacccccttcttctcaccatatacaaaaactaactaacttaaaattgatctgtgactaaatataagagctaaaatcataaaagtcttagaagaaaacagggataaatcttcatcaccttgggtttgacaatggattcttaaatataacaccaaaagcacaggtaacaaaagaaaaagtaaataaaatgtacttcaaaaacttaaaaagttttgtgcatcaatggacatcatcaggaaagtgaaaagataatctacaaaaggggagaaaatatttgcaaatcatttacctgataggagtttcgtatccacaatatattaaaaaaaaaaccctgaaatccagcaacaagtagaaaagtaacccaatttaaaaatggacaaacaaccttgtgtaggcatttctccaaaga

SEQ ID NO: 912516 - DNA, 646 bp, Homo sapiens
gtatttgctgtatttattaccaagaacttggagaggggcaaggaagcaagacaggaaagaaccctatgttaggagcccttggaggaaggctgacctgctttttctccacaagaggatggggtcattcaacccttcccacactgggattaattaaagaggcctctgagaagataatgaatgtggataaggatgcaggacctctgtacctgggctgctatcaatctcatcctcactaaaactgtcatcttgaggctctatggttgcctcccttcattcttgctctagtgcagtcagcttttggtaggttccatcccttccttctccctcattatgtctgagaaatcgctttttgtttaatcctgtagtttttagctgacagccaaagtgagatggatccagagggtaaactcaagggatggaagcctaccttagatgacatcccaattaatgttacccttgtgtttctgtgtagtatatccctaatttctaagttacgaataataatgaagggaaaactctctgagctacagatagtgaatcttctattaacaagaaaggcatttcttcaaaacatccagaaatacaggtgaggacrttagggttttttcataactaatagaacctattccttccagattacagattt

SEQ ID NO: 912517 - DNA, 622 bp, Homo sapiens
gccttttcccaaattgtctgttttgttacaaaaccaccaccctcaccaccacccctatcaacaaatgtcaatatccaaattcacagaagcgatcagtggagttttagtttactgtcactttctgtatattgtgtgttagatagtcacaccttctggtgaagtgtcatatccacacattgaatacaccaggctctataagcacatcacaaatactaaaatataaagagaatgaaagagagagagacagagagagagagaataaaggtagggggcaggtattggtatctatgcatgtggtatcagaggaaatcttcactcactaggaccttgcttttgtcttggaaaaggagggaaagacaaatctttttttattttaacttttaggtccaggggtaaatttgcaggttcattacataggaaaacagtgtcatggaggtttgttgtatagattatttcatcacccagctattaagtctagtatcctatagttattttttctgatcctctccctccaaccaccctccactctcygataggccccagcatgtgttgttcccctctgtgtatccatgtgttctcatcatatagtttccacttataacacgtagtatttggttttctg

SEQ ID NO: 912518 - DNA, 627 bp, Homo sapiens
cagatatgtcctaaaagaaatgcttaagggagtacttcaaccagaaagaaaaggactttaatgagcaattagaaattatccaaaggtayaaaaatcactggtaatagtgagtatacaggaaaacacagaatattttaacattttaatttgatgtgtaaactactcttaccctaagtagaaagactaaatgatgaacaaatcaaaaataataactataacaacctttcaagacatagtaaaataagatataaaaagaaaaaacaaaaaattaaaaagtggagtaatgacgttaaggcatagcactttaatgagttttgtttttgattgtttgtttatgcagtgtcaagttgttatgaggctaaaataatgagttataagatagtatttgccagccaatatgtcaaagtcttacagaattcctacccaaggaatcttgtgtaaaggtgtttaacctagtgcttcctaaggttagagaaacatgaaacagcttgttccccacaatacagtagttgccagaacaccagtttagaacaacgttgatgtcagcacagtctcttttctgttccaccaacctaacacaggccaattatgcaattttgggtttgtgtgtgtaccctaaaatcaatt

SEQ ID NO: 912519 - DNA, 575 bp, Homo sapiens
taatggcttcactgctgaattctacaaagaatttaaagaagaactaataccactcctactcaaagtactcagaagaataaaggaggagggaatacttacaaagtcattatacatggccagtattaccatactaccaaaaccagacaaagacaacttaaaaaaaaaaaaaactacaggccaatatttacgatgaatactgatggaaaagtcctcaacaaaatactagcaaactgaattcaacaatacattagaaagttcattcatcatgaccaagtgggatttatccctgggataaaaggatgattcaacatatacaaatcaatcaatgtaatacattataccaaagaatgaaggataaaaaccacatgatcatttcaactgatgcttaaaacgatttgaccaaattcaacattcttccatgataaaaaccctcaaaaaactgaggatagaaggaacatacatgaacataataaaagccatatatgacagacacacagctaatatcatactaamtggggaaaaactgaaatcctttcctctaatatctggaagatgaccaggatgcccactgctgt

SEQ ID NO: 912520 - DNA, 670 bp, Homo sapiens
gctaacacgctcccatgaaattatatttatgtcttgygttatcaactcgttctatacatgttatatcatatatttatatgtgagtatgtaaaacaaaagtaaattacaagaatatctctgtctagttagtataaatagtgatgggttctgaattaagagccccattttttaaattattgctttactatttttatcttacattaggaagaaaatattagtctgatttgatgcccttaatgtttggaatataaaggacaacaacacacattaacttcaaaatcaatgaatatacttaaaataagctctatagcaaacataactacatcactaaatctcaatatttatagtttatttctaaggaacaaatgtaaatggatcgaattttaaaaatcatttaaacatttttctaagtgtctgtaaaaaggattagaagaagtgtaacatacatgttgaaagattgtccctcaatgcagaagtgggcattgaatttggcacttggtttgaagcagttttctctttccatagccattgtatatgccattcggttactgtggtcagtggttttcttgccttagaactcactttaccttagattctcttctgcgtcttagctcagcaaaatgatcatgatccttctgaacctaaagctcaggccaacattgtcattatc

SEQ ID NO: 912521 - DNA, 530 bp, Homo sapiens
aaaaaaaaaaattagccaggtgtgttggcacacgcctgtagtcccagctactcggggaggctgaggcaggagaatcacttaaacctgggaggtggaggttgcagtgagctgatattgcgccactgcactccagcctgggccacagaatgagactccatcccaaaaaaaataaataaaaaggaaaaaagaagaggcatctgagagaggctttgaagaatgtccaggattccaacagacagtgacaggcaagaggtgtccccaggagcactgaggaaggaccagcatgagaagtgtggagccggagcagcaggggttcactagtggcaggttatgagcaggatgcgatggaagatcaggcgtgaaagctaagtggaggccgtactatagaagactttctggcagggtaaagagatttgggagagcccctgacgtctttgagcataagagtagcccgrgtcaaagttatttaaaggtttggccagtgggcaagatgtgggcctgcagaagcacctggctgggaagttgggagc

SEQ ID NO: 912522 - DNA, 583 bp, Homo sapiens
gccaattaataaccctacaatggcttctaagttcaagtgaaaggaagagttgcaaatctcttactttaaatcaaaagccagaaatgattaaatttartgaggaaggcatgttgcaagttgagacagaccaaaacataggcctattgggccaaattgttaaccaaattgtgaatgcaaaggaaaaattcttgaagaaaatgaaaagtgctacttcagtgaacacgtgaataataacgtgaaacagccttattgctgatatggaaaaagttttagtggtctagatagaagattaaaccagcccagaacattcccataaaccagaccaattcagaacaaggccccaactcaattccattctatgaaggctgagagagaggtgaggaagctgcagaagaaaagtttggaactagcagaaggctcatgagatttaaggaaagaacctgtctttataacatcaaagtacaacgtgaagcagcaagtgctgatgtagaagatggagcaatatatccagaagatctagctaagaccatttgtgaaggtggctacactaaacaacagatttccaatgtagacaaagaagatt

SEQ ID NO: 912523 - DNA, 679 bp, Homo sapiens
tcattttctctctgaacttttgtgacttagcacaacattttaatttgtaaaattactttcaatatacaaggaaagaattagaaaaccagttgggatgaaaacgcctgatgctcttcttgcrtatgttgttgaataccaaaatcttgctaggagttcatacataaacaaggtagatggagagagctgggaagattgtgagaatgcaattttttccccattgtctctgcctagcctttctcatatcacagaatgacacgatgttaaatgtgaaaccagatctcattcagctctcttgttttgtaatattaaaactgtgactcagagaggttaaatgacttcctctcaaatcccttgaagttcctggcacaatcaggtctaaaatataggattgcttgactttcagtccaatggccattcaattagtcacatctctattcctgtattccctgacttctcctcctcaactgtaccagcttttccaataaaacttgcttgatctaaattgctctccctaggcattgtatatttcaagacaatctttctgttttttgaactatatttcctttttctgtagtaacatcagcttctctgaaaaacatatccattgccaaaggattaattttaagtttgtgtgtgtgcatgtgcatgtgtgtgtgtgtgtgtgtgtgggtgtgtgtgc

SEQ ID NO: 912524 - DNA, 671 bp, Homo sapiens
tctgccttaaaggactccggcccccagcartctcccatcttacagtcaactcatggggaccttaattccatctgcacagcccttcctggcagctcctaggtcagagccgagctgaacacctgggaggaggcgcacacacgggcccaggaacctggcagcaggctgctggtggggggcatgggctccccaagggcccacggttggcctggcccagccctagcacagctggtgtgctgtgtgcactctttctgtcatcctcccctcaaaacgcagctcctacgtgctgccctggctctggggaaaggtgatgaattatcctttctcctccattcagctgaagtttcagacatcaggatttctctctagggagaggctcttttcttctctgtggtgatgtccccgacagaagaagaagagcgttgtgttgattgtcccgccgtcctggcaactccacaaccaggggagcaggacagtgcccaggacccacaggtcgggcagccatcccttccttcataaggaacgaggggccacagggaggctgtagagtccgggaaaggctcttgccagctgttcacagcgtcacttggggcctccacagcccgctgagcccaggacagtgtcacaggggagacggaggccctgaggaccccagagccgtcaagcacgctcag

SEQ ID NO: 912525 - DNA, 619 bp, Homo sapiens
ttccaccttcccctaaaaatgaggaagatagggctccatgtgcatgtaccacawtcccatcagcaatagtcagttggagcagaggatttttaggtaagacatgtcttctctggtttacctcagtcaccactactccttattgtcttatactcaactgcttccttcattggtcttaccgccccaaaccccactagcatttgagtttcagaaccacagtttaatctacctctaatattttatgcaataaaagctgaggtccagtgatattttgtgacctacccaaactattaggtagttttgtgacctacccaaactattggatcacgcagcccaatagtggccaaactgagtttcaaacccatgtttcctgatttctagtttaggcctctttctatgctaccatagaaccactcatctgaagactgccaatattaattatttaaacaaaatctggcatgttttacaaaacgtggtgccagtcattttattcatgaggaagaaaggagagggttatgacttttttttgaaaggtaaatagttcatgtttcctgtaagaagtatttaaagaaaagatttctcagcaagttctgctggggaactgtgtgtagaaccacaaaat

SEQ ID NO: 912526 - DNA, 596 bp, Homo sapiens
agtgaggtaatccatgcacagagagttagataagttatctaagtttccacagtcagtcaatggtggagccaggatctgaaattctcaagtatgtgtggagaaaggatgttaytctaacatcagtagagtgtcttcataagcttagaaatttctgtaattacttctaatttcaggtgacatctgctgtggaaaattattcagtaaagtagctttgtggctttattcaatctgctggcaacatgatttagttaaatatgcaacctgatgctgcccttttatctaggttgtaatttacatttggtggaagttaatatgataaatagtggaagtcaaagttttcccttgaaatatagagtattttgtatgctcatggatttttgtttacatcaggacttctcaactctggcactactgacactgggctgaatagttctttcttgtgggggcactatcttctgcattataactgcagccctagcctcaacccactaaatgccagaggaccccctggttgtgacaaccaggaatgtttccagatattaccaaatgtacccttaggggtaaaattgcccccagttgagatctgttacattata

SEQ ID NO: 912527 - DNA, 510 bp, Homo sapiens
gtattaatttcatatcttgaccttgcatctggcaaccttgcaaagctcacttatttatgatacttyaattgtaattattatggattttctttgcatatgtaaataacatttgcaaacgatcatagtttttctattccttatacccttggtttaatttctgttattgttgtaattactaggatttccattagaatactgtgaagaagtggtgattctgggcatacttggcttattcctagtctcagagagaaagcattcaacatttcaccatttattatgatgctggctttttatatggccctgatgaaattaaagaaattatcttcctttcctagttcttagtcttttttcatgaataggtgttgaatttaattaaatattttttaacctattgagatgtcagcgatttttatctttcatggtgttaattcagtgaattaccctgcctggcttttccaatgttaaactagaaattgcatttctagaaattatccaacttggttttgatca

SEQ ID NO: 912528 - DNA, 660 bp, Homo sapiens
cctgcctgagttatagagctgatatacataattgcctactgggcactgatacttggatagctcataggaattcayaccaactggactcattatcatctacctgtggtctcctaaacccgttccccctcagggttccctttctcttttcattacccaaggtggaaatgttcactttttgcccctgcatggctcctaatattcaatcaccaagtcctaactaccctcccttctaagtatgtctcaaatctgttcatttctccacatccccactgtgactacattggcctgagtcatcttcatctctcatttgaagaactgcagtgctctccatctggactctgcttctagtcccactgaattctaatgtatacttttcattgcaactaccagtgatccctataaaatgagccattcattcaacaaatatgtatttcatacctactgtgtgtcaggacctgtgttaagctttgggggtaggtgcagagcacaaaacagagtcctggtcctcatatttatttatttatttattttcagaccctgtgttcagcaaaatgagcagaaggcaactattaaacgaacaaaatgacccatagcatgggtcaacaaaggattttaaaatctgtaattatgtagttaattatacttggaacttttctgggt

SEQ ID NO: 912529 - DNA, 660 bp, Homo sapiens
cctgcctgagttatagagctgatatacataattgcctactgggcactgatacttggatagctcataggaattcacaccaactggactcattatcatctacctgtggtctcctaamcccgttccccctcagggttccctttctcttttcattacccaaggtggaaatgttcactttttgcccctgcatggctcctaatattcaatcaccaagtcctaactaccctcccttctaagtatgtctcaaatctgttcatttctccacatccccactgtgactacattggcctgagtcatcttcatctctcatttgaagaactgcagtgctctccatctggactctgcttctagtcccactgaattctaatgtatacttttcattgcaactaccagtgatccctataaaatgagccattcattcaacaaatatgtatttcatacctactgtgtgtcaggacctgtgttaagctttgggggtaggtgcagagcacaaaacagagtcctggtcctcatatttatttatttatttattttcagaccctgtgttcagcaaaatgagcagaaggcaactattaaacgaacaaaatgacccatagcatgggtcaacaaaggattttaaaatctgtaattatgtagttaattatacttggaacttttctgggt

SEQ ID NO: 912530 - DNA, 699 bp, Homo sapiens
atttcattcccacttttccaggccttttatcatgctaaatcacaagtcagggacctgacaatgaaatcctttttgtatctgagtttaaaaggctttaaaagttgaacttaatggtctttacttggaatatgcgctgtaggtgccaaataaatttaagggtaaggtcgtggtctttcatattgctagtaaaaagagatttactatctgagattgtcacattccagcaatgacatcaccaagttgtgtaaggattgttgtatgtattaaaactgaagatcacaaacttttgagagcacaaatctatgccttcacttgcataagcttaccgagtgcctttatgtggatttattggcatgtgttcataggaaagaagtggtcacaattttaatgcataatgtgatgtgtcagtaagtgtatatttggattatttatttgttaaacaaatgtgtattgggtacctcctttgcctggcacaccattagaaactaggaaactgaaagtcagtatgacacttctgtgccctcatgaaggttatgacctgatgcagaagaagtaaaccaaccattaggagacagtacaacaaccagtgtaatagaaataggcccgggaaataggaagtttctttcagatgaaatgggatctacagagacaactrcattgtctgggagaaacctggagggaagggggcattcttggcag

SEQ ID NO: 912531 - DNA, 594 bp, Homo sapiens
agagaaaaaagaaatggattctgcagctcattgctcattgtcttaaagagggagtggtattccttgtttttgtttttaatgaaatggttttttaaaataaaatataattttctcattttcataagcctaagcctatagtctaagttcttactcatgatttagaatgattgttattgacataaaatatattttatgttttaatatgatgataattcttgaggatcttgagatatgtaggtctgcttttcaaactctttagcttaccttttgaccagagaaatcacaattttcacttctctctgctggcagtgtatttgataattctaatttgtctctttattaaaaagcatgtgtttataaatgacctcttccatctggctaagtacatggacatttgttgacagagttcgtggtctttccaataattactttgcccactgttaaatttgttttaattcatttatatcaggttccacgttaggactcaggatttsatagatggggagtcaagtaataaaagtgaattatgagaagagttaagacacctaacactttttcttttttataatctttaatgaagtcattttattaatt

SEQ ID NO: 912532 - DNA, 657 bp, Homo sapiens
actgcactccagcctgggcaacaaagtgagatcctgtctattaataaaaaaaaaataaaggccgggcgtggtagctcacgcctgtaatcccagtactttgggaggctgaggcgggcrgatcacgaggtcaggagatcaagaccattctggtgaacacggtgaaaccctgtctctactaaaaatacaaaaaattagccaggcgtggtggtgggtgcctgtagtcccagctactcaggaagctgagacaggagaatggcattaacccaggggggcggagattgcagtgagcggagatcgcgccactgcactccagcctgggcgacacagcgagactctgtcttaaaaaaaaaaaaaaaaggatttaagaaacataccaaacacaacagaacacttcatagactactttacacaatagtccaggcaataggcaataataacacacattttttaaagcataagcactcaggtacactaacaatgttcccactggtatgatagttaacagcagatgaaccatatcataaagaaataggtcaaaaaagaaaaatgggtaaattgacaactatggttggtaattatgcacacctatctttataaccacagtcatctgaaatattgtgacagacatcctaattcttttgaggagatcgatcaata

SEQ ID NO: 912533 - DNA, 313 bp, Homo sapiens
aacttctagctactaaataatcttagtgcttattttctatcaatcccaggtggtttccctacacaggctgtttcatggctttctttgatcgcaaaaccctgtccttcttccacttcctttatcttagcaaacaactttattgaaatttatttactttattgaagataagttgttcagaaccatttctgtcacactcctgtctctctccctccacctcccactttctcttattcttcctctttatttcccccatttcaaaggctcacctctccttctctgttcctmattcaatatccattagggtttaaattct

SEQ ID NO: 912534 - DNA, 513 bp, Homo sapiens
tgaagaaagactgctagggacagacgagaactcaaatagctttgagatttttttatttccacttccttttttaaaatacatcaccctgctttttttgtgttaaagggtgagctcattaaaaaggaaaactaaaaaaaaaaaaaaaaaaaaaaaaacaggaacacccacatttccaactccacctcccctctcaaattgttcaagatgcacacatgtttattgtatatcagtagacctagctctttccacagttatcagtggttaacacaaaactaccagggatatatttttcctttcatttaaatttaaattccattccaacaaagcaaccaaaacaactaatgtctagttttttagcttctggggaattaggttcccaggtaagaactgaaaatggagaaaaaattgtgttgccatctttattcaraaagtcattattttcagcaaaatggagctgaggcagaaaatccaggttgcaggactgggaaaaaaggagtgtctgccccatgggac

SEQ ID NO: 912535 - DNA, 639 bp, Homo sapiens
atgagatctgatggtcattataagggggagttttyctgcacaaggtctctttgcctgctgccatccacatgagatttaacttgcttctccttgtcttctgccatgattgtgaggcttccccagccatgtggaactgtgagttctacattaaacctctttcctttgtaaattgcccagtcttgggtgtgtctttatcagcagtgtgaaaacagactaatacaagttccatatccaccctgagtaaaggcagttggcttatacttggaattaatgtatgctaacatttttttttctggggaagacctgggaagatgagtgtcatatgacagagcaagagtttgaaaagatttatttgctaaaatatagttttcacctagttcctcagtagaaaaatgaaacaatgataaagaagttaaagaaaagtaacaactaaaaaatgctgaccctatgaagcaaatgtcaggaaataaagcatcaactctttcctttatctatcatcctgcttaaacttgacatagcttctagtccagtaactcatgattcagactgcactctctcttttagataccacttcctcaaatgtcagatgaccttttaggcaattttgtttaaaaagtgtttctacaactactttattcc

SEQ ID NO: 912536 - DNA, 598 bp, Homo sapiens
ctaacttcgggggctggccgtgggatacaccatttcttatatgtcacttattctttcactattagcatcatcccctgttatagttgattttwtgtgtcaacttgactgggttaaggaatacctgggtaaacatttttttctgggtttgtttgtgagggtgtttctggatgagatcagcatttgaatagctggactcagcaaagtagattgcctttctcaatgtgggtggacatcgtccaatccatttaggacctgaacggaacaaaatgtgtaggaggaaggaattttcccacttttccctgcgtcatacttgacaggaataactcgttacacctactcctgcacttggactgggatttagaccactggcttccctggttcttaggcctttggacttgaaatttggatttggactaacactggcttttctagatctacagtttgcacacggccagttgtgggacttctcagccactttctcacaatgtcttgtcctctctttctatatatatctatctctctttccccctcctccttctttctcaaaccctaacacatcccccaattacaaactatttcctcttccaagctttcaaag

SEQ ID NO: 912537 - DNA, 606 bp, Homo sapiens
gtagagatggggtttctccaagttggccaggcttattgcaaactcctgacctcaagcaatctgcctgccttggcctcccaaaatgctgggattacaggcatgatccactgggcctggtgtaatattttttcttttatgttgaccttgcaggatctgatgactatgtgtattggggatgttcatcctgaagtaatttatttaacattttttgtagtataggtatgtagggaatgaatcctcatagacttttctttctgaaaatgttgtttgtgttttctttttattttcagtgtacagaattctgagtaaactattttttctttcagcatgtaaaagatttttgtaacattaacttctggcttctgtggcttctgatgaaaaaattgctataacttttctttctatatttcattttattttctctgtttttttaagattttctgaatgtctttggttttcagtagattttacrttgtatgtctggggtgggtgcattttttttttttaataattagccaagttgtggtgttttgagttttttgagtctgtggtttaatatctgtcaacaattttggaaaattatcagccattttatttgaagtcttt

SEQ ID NO: 912538 - DNA, 606 bp, Homo sapiens
gtagagatggggtttctccaagttggccaggcttattgcaaactcctgacctcaagcaatctgcctgccttggcctcccaaaatgctgggattacaggcatgatccactgggcctggtgtaatattttttcttttatgttgaccttgcaggatctgatgactatgtgtattggggatgttcatcctgaagtaatttatttaacattttttgtagtataggtatgtagggaatgaatcctcatagacttttctttctgaaaatgttgtttgtgttttctttttattttcagtgtacagaattctgagtaaactattttttctttcagcatgtaaaagatttttgtaacattaacttctggcttctgtggcttctgatgaaaaaattgctataacttttctttctatatttcattttattttctctgtttttttaagattttctgaatgtctttggttttcagtagattttacattgtatgtctggggtgggtgcattttttttttttaataattagccaagttgtggtgytttgagttttttgagtctgtggtttaatatctgtcaacaattttggaaaattatcagccattttatttgaagtcttt

SEQ ID NO: 912539 - DNA, 718 bp, Homo sapiens
acttggctcacactgcagagtaccttgaaaacttaaactcgccttgtagagtgcatttgtgacaaattacagcgttccatatcttaagcagatgagtgaatataattgtgaaatgacttaaattctacttacacaattactgaaaatggaattctaagtcaatccactgttatttcttctctgtactactaacagtgagtttgactttctttccccttaatcaactggttatggcattctgtatgcagagtcttaataactccttcatgggtataagtaatcagaactgcatattgattaaatttcaattataatgaaacaagattttaagaaatcccagaggagggttttctgaatcaagacaattaaggcttttattgaacttcagagatttataatattctgacatgcttcttttctcctgagtgattgatgtgactcataatttaaaagggaaacaaaggaaatatgtttttttcaatctgcaataaactacagtttcacttgtactaaattatctctttttaaataagggtttttagaattcttttttctttcttactatgagcttgtagtgttttatstgtgcgatactttagtgtcttcacactttgcattttcttaacagatttgtttctaacaaaaacttgaaacacttttgatctcagatttcattattatccactgaagcttcttagtccccttttcacagcacagc

SEQ ID NO: 912540 - DNA, 655 bp, Homo sapiens
tcacactgcccagagcagttccctgtcatcatttgagatgtctcatgatgataatttccttctctgctatcatgtatgctgatgggctgatgctgatgagcttctgtctcctccctcagtctccactaagtctcccagtaaaaggctggtgacctctttcccccagtttgttttcactaaacttggattcagaagacctgagtttcagtcctagttctgtcctttgctaactctgttctctgacaagccactgacctctgaggtccagccttctcatctctaaaaggggacgctattgatgtccctgataaggacataaatgaatagcagctgtggagcacttgtaaactctgaaaccctttacaaagctcaaggatgttgattacgcttgctgccatcccagacctcgcactgttctttaataccaacaattcaaactttacagcaattttcacctcatttcgcaagctttgagtggggatttaatgttttagatttgggtaggaatctaattctcaggacaaaattcttttttagaatttaggttctggaagagtttcttatctaggcactattttatgaggcctagcttgaggcgatacattgtaattactctktgcttcagtttccccatccagagaatgaccataataag

SEQ ID NO: 912541 - DNA, 653 bp, Homo sapiens
tacatgttattacacttcatgttttacaaaaggctttcagatacaccccttctttcaatcctcacaatttccctgttaactaaaaattttatgctcattttaaagcctgaagaaactggaaactgacatttagagggccctaactactcaagatcatatagacactcaggagcaaagatggacccaaaaccagaccctgcactatctctacaaccacttctctaatcctagacaagcagacagatggacagatagataggcagacagatagacagataaagaaccctatactttttgcataaagagtgcttagtaattatctgttgatttattggactaaatgtgttttcttttgaatcaaatgtgatgccactgactcaccatcacatgccttagattacttgcccattagaggaacaggtttaacaactatttgtttgagtacctactatggacaaggcactgttgaaagtgttgggggaatacaaagggcgtcctatatcagttatattcttaaagacagtgaagagtgratgagacatacactgtgcacacaaagctataagcagagtgtgataaatgccattcatttattcaccaaatatttattgccatcaactattaatacattccaggcactgggaattcaatga

SEQ ID NO: 912542 - DNA, 501 bp, Homo sapiens
gcaacttattcactaccatgagaacagtatgtgggaaaactcccccatgactcaactaccaaccagcaggtccctcccacaacatgtasgaattatgggagtacaattgaagatgagatttgggtggggacacagggccaaaccctatctttctgcacttggcccctgccaaatctcatgtcctcacatttcaaaaccaatcatgccttcccaacagtcccccaaagtcttaactcatttcagccttaactcaaaagtccacagtccaaagtctcatctgagacaaggcaagtcccttctgcctatgagcctgtaaaatcaaaagtaagttagttacttcctagatacaatgggggtacgggcactgggtaaatacaacaattccaaatgggagaaattggccaaaacagaggggcaagagggcctatgcaagtccaaaatccagtgggacagtcaaatcttaaagctccaaaatgatctcctttgacttcatgtctcaca

SEQ ID NO: 912543 - DNA, 652 bp, Homo sapiens
tatcccgatagtttgttttcatagaataagaaggtaatattatgtgacaggatgagattacgacattcactgaaagtcagtacactattcacatcattattaggacagtgctattttcccattatgttggtgactaaaagtttaaagcttgtttttacaagatggctggtacctttggatatagttcatggaaaagtgaatgattttccattacaacaacgacaattgtattggtacctaatgctttgtgtgtcacacaaactggtggaagccatctcttcatccccacaataacaccattaagcagatattattaatattctcactttacatatgttgaaagtgagacataaagaggtagacccaaagtcatgggcctctttgtgccaaggctgggacttgagcccttgtgtaccattctcctgtgaacattcctaatcactgggccaatgtacagaaatgagaacctgaatactgatgggagaaaataagggaaagagctctagaatataggcaagtgcgrtgccatcaataaagacttactttctttccaaaatacacacctttactaattccatgacaagatacagttcagttggcacatccatctcctcaatcagaagaacgatattgggatgcttcactcttctta

SEQ ID NO: 912544 - DNA, 530 bp, Homo sapiens
cataatgaggcactaattattatagggctaagttttcaaatgctgttagattgcctggacgttttttcttcttcctcttcttttggttggaatattttattcacttgtaaagtgagatggtaacatacgtaactataaaccagatggtaaaatttgctagttgaacaatttatcagggagataaatcaataacatttaaaacagcgtgtgacaactgaatttctctccatcttgaataaaacatttaaaaattgttttcaagtaaaatttgaaaaaaaaaatcatgtaaaagcctccaaatggcatcaaacatttttaatttatcacctactgagatatgtcaagcctggagaatatcaaaaccatgcttcacaagtcttaaactgttagtgtttgaactagtaaaagtaaatgaccactaggatatggcttaaatacaatagaccatacacaktaaattaatttttaacattcagactttaaaatcattattttatgtttaagcaaagacgactataatttttaaaata

SEQ ID NO: 912545 - DNA, 593 bp, Homo sapiens
tcaggttattagatttttttcctgtagagttgtttgagcttcttatgtattgtgatcattaatcccatgtcagatggatagcttacaaatgttttctcccattctgtggtttatctctttattttgtkgattgtttcctttgctgtgcagacccttttcaacctgtgattccatttgttcatttttgctttggttgcctgtggtgttgaagtactattcaagaaatgtttgcccagaccaatgtcctggagagtttccccaatctttaattttagtaatttctgagtttcaggttttagatttaagtctttattctattttgatttgatatttgtatatggtgagagataggagtctagtttcattcttctgtgtatgaataggcagctttcccagcacagtttattgaagagacttctttccccattgtgtgttcttggaagctttgtcaaaaatgaattcactataaatgtatggattttatggatttctgatggttgctatattccgttccataactttatatgtttttaatgacagcgccatgttgtttttgttactatagctctgcagtataatctgaagtcaggaaa

SEQ ID NO: 912546 - DNA, 661 bp, Homo sapiens
aatcacttatacaatatctttttgcaatgtaaggaaacatattgacagggtctggggattagtacatggacatttttgggrtgccattattcagtttaccatagctcccaaattctgtattgagttcagatcagatatgtagctcctaaacacacaagtaccataaaggctacttgtctgaaactcagctcacttgtgcctaccaagtcctcctttatctaatttatgaatctccatttgaaatttcttttttttttctttttttttctttttttttttttttttttgaggccgagtctcgctctttcgcccaggccggactgcagtggcactatctcggctcactgcaagctccgcctcccgggttcagctttcccgacttattatcacatccagagatatgttactcatctatggcactctttcttccctacttctcacacatatccagggattaaatctcatttgtccttcctcctttgcatctctactgctgtaatctcagttcaggaagtcacaaagggcactgagatgctgactgaggtgtcattcctaagaacaatgtccattctttagagtctggatactttcagctcatttttttttttttttgtagctcattaaatttcatcagtacttaagtacttgcgatttccccgat

SEQ ID NO: 912547 - DNA, 575 bp, Homo sapiens
gtttgaacatcataaatataatgttttactgaaaagagtaagtattttgaaagaaacttagaatgcttttttttatttaggataattgtctacatatttagaactttaaaaaaagtaaatttttaaaatatccatgtacaatatttttaagataatagctcctactgcttaatgttggtaaacatacaagcctgtcattgacatactgttttgcatgaactattttctttcttttctcccaacattttataatttttttttttcctgagatacaggatcgatgaagaaatggtacaatacgcgttgagaaagtctctacccagattcaatttcaatattttctaacattttaccttgtcccctgccacgtcccccattcctgtctgtttctctgctttttagagcacccctggagcttgtctgagctgggacaattggcacttgctaggatagaagggatgggatgtgaacaggcrgctgaatacccaagcttccctatgccttcaggggaaattcaacttggtttctcaaagctttcccagtaggactgtaccttagttgcctgcagcagtaag

SEQ ID NO: 912548 - DNA, 549 bp, Homo sapiens
atgcaatcaattacttgtctcaacaatttcagaaattcctaatatagttgcatgtgcaataaygatctgcctgcatgcttattcattatggtcatgtattactgattataaaaaagaaagctcaaaattccacagatattttttgcttcttctttcctatttctcattaattacaagacattgaaacaaaacatctttggagaatatgcctaactaaaccataataagatttctcatttaatcactatatttttgactacttgctgtgtaccagaagctttgtcaagtgctttcatactatttcaggaaaagacaggttatgttgctgtaaccaacaccaccaaagatctctgtggctacaaccacaaaagttaatggcttcctcacactacaggcccattgaagatcagcagtgggattttgctcgcagtagttattcagtgagccaaattaacagagaagtcaccattctgaacatttgatcaccatgccagagaggaaggggtctctggagggtcttgtaccagccctgaaatgacacagatcatt

SEQ ID NO: 912549 - DNA, 602 bp, Homo sapiens
cctagagagaaccataaataaaaggatagaagaaggtttcattcaatgcctagaatgtgtcagggtgagatggacaatccccttccctaaattctactccccagacccgaggggcagcggtaagcaagaagtgactctacacatcctagaaatcttaagctttgcaatggaactgagctgcattctctcagagagaagtaacaatgcctgtctgacccacttcaaagagctcttcggaagataatgcatacatgtattccgtaattgtcacactggtatcgtatccatcatctgctcctccatatatatttctgtgagcctgccctaaaaagaacctcttttctgcccggactcaactctttccccagatttcccatcagggcttgccccagaaagactgaattcttctactaccatgccacatattgctcatttccttcttccaaatctgatgtgtgtagaaaacctgttctacctgtggctatacattggccttatcacagtctcttctctttrtctcacctacctcaatcgaatcagtcaccaacatctgtttattctacttcaaaaatttctctcaaatctaggctctccattgtcaa

SEQ ID NO: 912550 - DNA, 609 bp, Homo sapiens
ccccatctctactaaaaatacaaaaattagccgggtgtggtggtgggtacctgtaatcccagctactcaggaagctgaggtgggagaattgcttgaacctgggaggcggaggttgcagtgagctgagatcatgccaccgcactcccgcctgggcaacagagtgagactcctctcatcttaataaaaaaaattcaatatattgatatcaacataataatatatgggatatggtgtaaataaaacatgttattaattgatcagtttcttctaaacattttctaaaatttaaaatactagaaaattttaaattacatatgtgacttgagaaccactgcctgctcttccctgttggtggagacatcgatacttgatctggttatgaaaacttaagagtagtcatcagataatagtgtagggtgatgagaatggagggtaaaggtagaagtggaagcaagggccaaggctgggaggtgtgagagagtggagggagtttggctccyttcagctgtggagttgcatgcaggagacagaggtgagaaggagaatggatttgcagcttatgaccgaatgatgaacattacatcactctaaagactgtgatgtcaatgg

SEQ ID NO: 912551 - DNA, 634 bp, Homo sapiens
catcactacatccctcatagattatagtcaatttagcaaaagggttaaaaagaaaagggagccttttgggtttattctatatctacaaagagaatatttcatcccctttcaggaattaagagagtgagagagagatcacaaaatttagagatttctgcaaagagtgaaactgacattttctgatcttctcttgtgaaattaaaatgagaaaaatgagaatcaaggacaaatgatgacagctcatggctgctagaaaataaggcacttggttcccagttccatagatttacgaagttttatttattcacagggaaactctacactgactgggtgtaagctgtacgtgagtttgggaccattttctttcctgggaatactacagatgggaccaaaagtgtatgcataagagaaaagtggtgttaatttccagaaaactctagccaaggatatggtttagcacccttggggacgatatgtatctagatgagcttcatttgtggcagccccacttcaccgaggcccattgaagccattaactatatacactaaacccatataccatwatcaaagatggaaatgacagccaactaaaaagaagactgcaacttgatcatggtaggtcaactaacgaagt

SEQ ID NO: 912552 - DNA, 627 bp, Homo sapiens
tcttatttcagataaagcaggctttaaaccaacaacagtaaaaaaaaggaccaagaaggacatgacatgataaagggttcaattcagcaagaagacttaacyatcttaaatatataggcaaccaacattggagcacccgtattcataaaacaagtacttccagacctacaaaaagagttagatagccatgcaataatagtgagggacttctgcaccctactaacagcattagacaggtcattgaggaagaaaaccaacaaagaaattctgaacttaaactcaactcctgaccaattagccctcatagtcatccacagaatactgcccccaacaaccacagaatatacgtttgtcttatctgcacacagaacatactctaagatcaaccacatactcagccataaagcaaatctcaaaatattgaaaaaaatttgaaatcaagttaatcatacttccagaagacaatggaataataatacaaattaccaaaaagatcactcaaaaccacacaattacatggaaattaaacagcttgctcctgcatgacttttgggtaagcaatgaaattaagggagaaataaaaaaatcctttggaataaataaaaacagaggcacaatatatgaaaa

SEQ ID NO: 912553 - DNA, 507 bp, Homo sapiens
agtccccacaaagagtccctacttgggccccacctagtggaggtatgagaagaaggcctctgtagatctataagaagaaggccagacaccagaactgtagatccaccaatagcttgcactgtgtgccttggtaagctgcagacactcaacaccagcccatgaaagcagctgggagggaggctgtaccctgaaaagccacaggggcagagttgcccaagatcatggtaacccacctcttgcatcagtgtgaccgagatgtgagacatggagtcaaaggagatcattttggagctttaagatttgactgcccagctgtattttggacttgcttggggcctgtagcccctttgttttggccaattactcccatttggaatggctgtatctactcaatgcctgtatccccattgtatctaggaagtaactaacttgctttcarttttacaggctcatagacagaagagatttgccttgtctcagatgagactttggactgtggacttttga

SEQ ID NO: 912554 - DNA, 588 bp, Homo sapiens
agcattttgtcattgtagctccaaagatttttttggttgtaaacacagagattatactattatataaatgtgttattctgcagagtttgtttctaatgacacacttttaaaaatttactttctacagttatttggaggagaggaggcatctaaatttaaaaaaaaatagaagtagaaggagatgatgaagaactgacctatggcatcaagtgatctatgtggtctatgcaacataaaacactaaaagtaaaaccagttattatttttggcaacaaaggttattcttgttggtcattcatagggaccagacatctatcttgttttattgctaattcagaaagtgttatgtttagacatctgatatattacaaaaaaggtttgtaaaacaaaagtaattcattgtaatgtaagtaggtcattcagtctatgctgttacaatgagttaaaacctaactgatttattcagctagacagctacaataataaacacttcacaaaattatatatggtgaattgttatttcatttagatactgactgrtcttcaaaaattcatgtagcttaaaaatatacatatgatcatcatagt

SEQ ID NO: 912555 - DNA, 633 bp, Homo sapiens
atgtttaagagagagtttaaaatgtagtatctgagtaacaaatatttagtaaataatctctactttctattttaatatgttgtaccaaaatttatattttctgagcaaaccaatctatatgttgtgctcctaaattaataaagtgcttatattttataaagtacaaaataacttctgtagaagttgtcattgttctcaatatttttatattttccatattttttggaaagtccccaaaaattaactcccttaaaagtcttcttgtaaattccagtaaattacatgtattcaaagcaaggagttcttgcttggggtttccaaaatatgttattttccacttgaattcgaatattgtcccagagatcatgaaggttcctagaatgtttattcacaattctaactattctaacaataatatctggattctacaacctctatcaaaagtcccaatactctaaaatatccttgcttggtaaacatactgaaatccttgtccttagagttaattcctctttttaatccaagatgactagaagaccccaggagaaaaatgatatataaagaaaaggtattatcactgaccaatacatttgytcattcatccattcattcacttagcaaatactaccaagt

SEQ ID NO: 912556 - DNA, 601 bp, Homo sapiens
tacctgtttacaaagaaaagtatatcattcaaatsaatttgaaattaaaagaaagagagggagaaattgcagtataatttcaataatgcaatgtagatactgtgaagtagactatatggaggagtcaatggtcatgcagatgaaataagagtaggataaaaaagattcagtaaacttctttgaaggagactcatgtattattcaccaggtattcactcttctttctttattagggcagtgtaaactttcctgacctactaatatttatcctggtcatatgacttgctttgaccaatgaaatttgtgtgaaagtggtaggaatattagttttcagttgatgctttaagggacttggcaagttgttttgttttgttttatttcattttttaccagatctctttcaatgttgttctctaccatgaatacagaatttcttaaatagcctgtggtatctgaatgaagagatatgcagagcaaacctgaatagaatgcacaagctggagccaagttcaactaagtctaacacaaatatttcttgatgtaaaccactgagatttggggattgttacacaccattattatggcaaaacctgcctgatac

SEQ ID NO: 912557 - DNA, 614 bp, Homo sapiens
ataagtaaaaataaagacatctatagtttaaaaattaccatattgctatttcataaatattattattattgtttttattttgaaaaaatacatagattgtgcatgcccaatgaattctggtgggtctccactgctccaactcctcttcttaataaggcccagctggctctgccatagcttctgttgaactgtgaccttcaggtactgagaaatctatagagcataaggaagatgccaggatacctgggaatctggggaatggagttaaatccatttatattaaaataattactgaccaagagaccagaccttcaagaagactgacacactccaaacagatctttggatggaaggcatgaaaagtagacagagggaggacactgacaataggttgaagcgggaggaagctgggaaacccgcactgggctgccaagcaaagagacttattccaggagcccagtggctcctgaagaaggggtgagttaaataggtgaataggrgcccactcaccatggacctcttgaatcctaattgcaggaggccccataacccagtgcagacatttgagctggcagggagagctgcttggagaagtgacagggacgggactacag

SEQ ID NO: 912558 - DNA, 569 bp, Homo sapiens
taaggggcttcccccttcactggcactgattcttctccttcctgctaccatgtgaagaaggatgtggttgctttctcttctgccatgatggtaagtttcctgagacctccttagccaaatggaactgtgaatcaattaaacctctttcctttataaattacccagtcttagatatgtcattatagcaatgtgagaatggactaatactataaactggtaccgcatagtggggtgctgatataaagatacctaaaaatgtggaagtgacattggaactgggtaacgggcagaggttggaacagtttggagggctcagaagaagacagaaaaatggggggaagtttggaacttcctagagacttggagggctcaaaggacaggaagatgtggaaaagtttggaacttcctggagacttgttgaatggctttgaccaaaatgctgatagtgatatggacaataaagttcaggctgaggtggtctcagatggagatgargaacatgttgggaactggagcaaaggtgactcttcctatgctttagcaaagagactggcagaattttgccctct

SEQ ID NO: 912559 - DNA, 619 bp, Homo sapiens
ccgtaacatgaatagatgctgagattgttttgaattgttcaaacttttccgtgagaatagattctgtgctttcatgtgttgctcattaaactgcctgtgaaagaagatgagtaacagcgttgcaccacgcgtaaggttattcaggtcctacacaaaaacctctctgtgaattagctaacgcttttctgaaaatcaatatgaaagcattcagatattaggaagaaagaggaagcaaatcaggatttcatgtatcactctagcatgaaactccaatggggaaattagtctaaaatcatccaagagaagctccagtctgtatataatgataataactaggaaaatgggaatttttcactgaagtttttccttattgctatactcagttgatataatgtaaccatttgcatctattaaacattattaggttttcctcatgtgaaaatcctcaaggcatatccacatgtcttagcctatgaatattttatggtgataattatttacgatgagtggcagtatttttttagtcaatctttggaagaaaataataaagctacaaattcctccagtttactgtaagaagaataaaaagttcccagycactgagtcacctttggcagca

SEQ ID NO: 912560 - DNA, 556 bp, Homo sapiens
gtggtatgaagaagaggtccagcttcattgttttggacatacatacagagttttctcagcaccatttgttgaaggctatctttcccgcaataaagttcacaaatggtttcatgatctcctttcacagagggagaattctaagcaaatttctctacccctcctacatttgaaggtggtgctttgaaaaaagacaagtatgtggtgaatgaaaagttatttttatttttattttttttattttttgagacagagtctcactctgtcacccaggctggagtgcagtggtgctatcttggttcattgcaacctccgcctcccaggttcaagcaattcttctgcctcagcctcccaagtagctggaattacaggcatgtgccaccatgcccagctaattttttatttttagtagaaacagggtttcaccatattggccaggctggtcttsaacccctgaactcatgatccacccgcctcggcctgccaaagtgctggaattacaggcatgagacaccatgcctggctgaaaggttatttttcaagtattttctttcttcac

SEQ ID NO: 912561 - DNA, 545 bp, Homo sapiens
ctattattggtgtataggaatgcttgtgattttggcacattgattttgtatcctgagactttgctaaagttgcttatcagcttaaggagattttgggctgagacaatggggttttctaaatatacaatcatgtcatctgcaaacagcaacaatttgacttcctctcttcctacttgaatatcctttatttatttctattgcctgacggccctggccagaacttccaatactgtgtttaataggagtggtgagagagggcatccctgtcttgtgccagttttcaaagggaatgcttccagcttttgtacattcagtatgatattggctgtggttctgtcataaatagctcttgttattttgagatacattccatcattacctagtttgagagtttatagcatgaaggggtgttgaattttattgcaggccttttctgcatctatcgagataatcatgtargtttttttgttggttctgtttatgtgatggattatgtttattgatttgcatatgtcgaaccagacttgcatcccaaggatggagct

SEQ ID NO: 912562 - DNA, 639 bp, Homo sapiens
aactctttacacaaattatctgcaataggacagactgaagaattctttccragcaccttcccaccacagtctgttcttattctccaagtttcactgaataattcatgagcaaaaggatatgagcatggaaagagcagcagccttctaggagcaccattccagaggccatcccaacatcaagcatacttactaatggtgtttgtggggaatgaaaaagatgctgagtcttctcatggccatgtggcccagggaagaacaccatcagatgaatggccttattcttcttgctctgcaattgcagatgccattacaaagctaggttaaagcaaaagactctacagcagcttaaatatctgttgtcagccactctgcctatacacatcctcagaccattaggggagtcacttgggttccagccctggtctgctaagataccttctcattgtcaattggcatctgccttgagaggcagcttctctccctgttttgcatccagtctatagtggaatgtgttgaccacacattgtccccagtgagattttctacctctaaaaccactattcccataagcctgaaagagtctggttatatgagttggctttgtccccacccaaatctcatcttgaattgttttttctg

SEQ ID NO: 912563 - DNA, 589 bp, Homo sapiens
ttatgccttccgctatgattgtaagttttctgaggcctccccagaagtagacaccactatacttcctgtagaactatgagccaactaaacatttttcttcatgaattgtccaatccccaggcatttccttatagcaatgtgagaacggactaatacaaatggcaaggagatttttctttgatattcactgtgagaaccaggtagggctcctggaggtaaaactcactaaaatgtggaagtccccctaagtctaggtgcccttgcagtttttgaccctcagacttattcctcctgagcctctggcaggttgtcagttacagtttaggctttcctacctaaactgttgaggtttagataccggtttaggttttcttaccatactggttcctgtggagatttctgccctggtaagctgtgattctctgtatctgcctgtctgtccaattttgggggcagtggtttgccatgtgaaatgagaattgttgattttcagtttgttcagcttyttacttgttgttaggatggactggaggctaccaagcttcttacatactcgccatacccatttctattcactccagacacacac

SEQ ID NO: 912564 - DNA, 563 bp, Homo sapiens
taaatatattatagaagtagaagtaagggaagttgtacttygtagttcactacacggcctagagagaagcaagaaagaaacaggtgtcatgttcattggattgcaatatacaacgcaattgtattttggctctatctagtttcttagtcataatgttcgtatttgtacatatcaggaattcaacaatattctttatagtatgatttatactaacacacaaacacacatactgttgtggtttggctgtgtccccacccaaatctcaccttaaattgtataatccccttgtgtcaagggtggggccaggtgggcataattgaatcatgggagtagtttcccccataatgttctccaggcagtgaataagtcccacgagatctgatggtttcatacatggtaattcccctgcacaagctcttttgcctaacattatgcaagatgtgactttgctcatcctttgccttctgccgtgactgtgaggcctcccagccatgtgaaactgtgagtcaattaaacctctttcctttataaattatttagtctcaggtatgcctttattagca

SEQ ID NO: 912565 - DNA, 631 bp, Homo sapiens
cctgcaccaattttaatcaacttcacatcccagtggggtttctcagctgcacagatattatacctccagtgacagtcctcgggccagcaagataaacaagagcagaaaaagaaataaaagatgcaatgtcatacaatgacataagcctcagagaaagtaaactattaaaggactttagaaatgatgcccagaaaaaggcattctgagaagttgacatttgaactgagaccagaataggaaggaagaacaagtgtaaagtgctcaaggtaagaagaaacttctcatattcaaggtagttggagtgaagttagtgactgaaaactacgtcaatgagcaggagcaaggctgggtagggttgtaaagtcagagctcaaagtttaggttttattcaaagtacaaatggaaaccactgaagcattttagggggtcctgatatgccatgattacgtctgaagcagtgtggttacagagaagattaaaaaattaaaaggtcgggcatttaaaatacaattaacaaatatagctccatcataaaacattcatttgcatcatctgtcatgatttcttttttcttcaacttcattttgttcwggaaaattaaatcaatgtcgtcagcatttcagaatgctga

SEQ ID NO: 912566 - DNA, 583 bp, Homo sapiens
tcccttactagccgtaaacatttttctcttgctcagctgatgaccttggctgcagtgaccagtgtagtctcaccttgaatactgccttcacgttttcatcctgtctccctatctgcctgagctaatctgtttcagggttctctttgttcactacatcctgagaattaatgtttatcctagtttggtgatttctagcagggaaaaatggtctctttacaaaatcttgttaatgatatttcacttcagggaccaagacctgttttactgcagtttttgcctttgccttcttcaaatcattatcttttgctcccaactgatagcaaagagccaaacgcccaggtttaatttgcaatgtccttgcttaattcaaacttgccgctatactctcagagcagcccaatttatcttttgaaaacactttccactgtaaaatactttcaactcttttctgttctcttgctgtgtattacacatgcttgtgttrctatcttacacattggaggaaattagacttgtctagttcaggaaattagcatgttctcttagatattttgaaaggtaagatttacctgataatcagtac

SEQ ID NO: 912567 - DNA, 600 bp, Homo sapiens
tcccatccccgtatccatgtgttctcattgttcaactcccacttacgaatgagaacatgcactttggttttctgttcctgtgttagtttgctgaggatgatggcttccagcttcatccrtgtccctgcaaatgacatgatttgattcctttttatgactgaatagtattccatggtatatttgtaccacacttgccttatccgtgctctcattgatgggcatttgggttagttccatgtctttgctattgtaaatagtgctgcaataaacatacgtatgcatgtgtctttatagtagaatgatttatattcccttgggtatatacccagtaatgggattgctagggcaaatggtatttctggttttagatccttgagaaatcgccacactgtcttccacatggttgaactaatttacatttccatcaacagtgtaaaagcattccaatttcttctcagcctcaccagcatctattgtgtcctgactttaataatcatcattctgactacagagagatagtatgtcattgtggttttgatttgcatttctctgatgatcagtaatgttgagcttttcttcatatgtttgttgaccgtgtaa

SEQ ID NO: 912568 - DNA, 597 bp, Homo sapiens
ttcagtgtattgcctaacatataaaaagccataaaacgcctttatgtactctgaagtagaaatgacatttcyatatcttacagatgttaagatgtagacttacacatgcagttgctcattgcagacaaaatgttaaataatggaagattgataaatgatagcacactgatatggtgtgatgattaatactgagtgtcaacttgattggattgaaggatgcaaagtaccattcctgggtgtgtctgtgagggtgttgccaaaggagattaacacttgagtcagttgactgggagaggtagacctaccctcaatctgggtaagcaccatctaatcagttgccagggtggctagaataaagcaggcaagagaagatggaagggcagacttgctgagccttccagccttcatctttctcctgtgctggatgcttcctactcttgaacatcggactccaagttcttcagcttttggactcagacttacaccagtgattttcgagggggctctcaggccttcggccacagactgaaggctgcactgttggcttccctacttttgaggttttgggacttggactggcttccttgctcttcagct

SEQ ID NO: 912569 - DNA, 595 bp, Homo sapiens
gttcagtgtattgcctaacatataaaaagccataaaacgcctttatgtactctgaagtagaaatgacatttcyatatcttacagatgttaagatgtagacttacacatgcagttgctcattgcagacaaaatgttaaataatggaagattgataaatgatagcacactgatatggtgtgatgattaatactgagtgtcaacttgattggattgaaggatgcaaagtaccattcctgggtgtgtctgtgagggtgttgccaaaggagattaacacttgagtcagttgactgggagaggtagacctacccttaatctgggtaagcaccatctaatcagtgccagggtggctagaataaagcaggcaagagaagatggaagggcagacttgctgagccttccagccttcatctttctcctgtgctggatgcttcctactcttgaacatcggactccaagttcttcagcttttggactcagacttacaccagtgattttcgagggggctctcaggccttcggccacagactgaaggctgcactgttggcttccctacttttgaggttttgggacttggactggcttccttgctcttcag

SEQ ID NO: 912570 - DNA, 617 bp, Homo sapiens
aggtagacccacaatgcatgggaatacgacatgactgaaagaatgtacaaggtaagtgcataatctgtacagctaaatacatgggacactgactgccctgagaagccaggctttctgttcaaactatagctgcttcaataaaagcaggaccgactgaggagcccaatcatatcctttcttacattacttgcctgtattatgtagaaaatgatgacatagaaagaaaggaaaagtggggtaaccactagagagtgttagtgggatgtgcacataccgagaagtgaaatacaaacagctgagttggttttgtgcagcattttcacatatgcatatataaaacacaacctgtgtaatttgggtgattttgcatttaagataaatgcttttatatttatatttaaagttggcagtgccataatatgaagaatggtaaattttattctaaaaatttaaatatttaatgtttaaacttagaacattaaatagcaaataaagataccatgaaaagttgaaagacacaccagagaagaaaggaaaaatcttttatatttkattaccttaaatggcacaatttttcctgctttttgaacaaggagccccatatttttgtttggtaa

SEQ ID NO: 912571 - DNA, 649 bp, Homo sapiens
tatagtagaaaaagtattagatttgcttattatcaagagacttgtttatatcatagtttgccccagcacaatggagccaatcatttaatttccattggcttttgtaagaggtggacagggtaatacctaaaatcacctccaattatgatagaccatgaaattagagactgtataatcaagtacaggccaactagttataaatccaaaaataggaaagccaacagaatatggggtacgtagcataatggaaaaagcttagtgttattttggaaacacttctaaggaagtgtaggtcttgaatcaaagattgaaagaaatactaggtttgatggagcgggtattccaggtgagagagagatggcctttggttttagaagaaacagtaataaaccctatctgaagacatttaatttatattttaagagattggcttttgttctcctttaaaagaactaaaaactaaaagagaatcaagaaactaggccaggcacggtggctcatgcctgtaatccctgcactttgtgggggtccaaggcaggaggatcacttgagcccaggagttcaagaayggtctgggcaacatggcaagacccccatctctacaaaaaaaaattaaaattaaaatattagccagatgtcgtgcacatct

SEQ ID NO: 912572 - DNA, 601 bp, Homo sapiens
aatgtattttagttaatgcataagtttagaaggccaaagatgaaaaaatgaataaataataaacarttcataaccaaattactctcaggtggaagttctagagtttacccaataataaattagaacttgacaagtaaatgaaggcatagattgtatctagcatgttcatttgccatttgcacagtctttcagtaagctatctaacattcataccacattcaaaaccttttaatcaagaatacattggagaaatgtgcataaatatcatactactatcaaatttaatagtttgtatacaccagagtgtatatgcatttatacatatccatgttaatctccaaacttcagaatattttatacttttctgtataacaagttgactttcttgcaagatagcattaaccaagataaggaaaaaaggatgaaagaggcattgtgttgctcttagagagtctgttgtgacttctttacaaactctattcttggtgcaaacagttagctggcacattgatttaatatttatttttaaaaccccaataacattaatttttattgatgacaccaaatctccaatgacctgcttatcaagaccttgcttact

SEQ ID NO: 912573 - DNA, 601 bp, Homo sapiens
aatgtattttagttaatgcataagtttagaaggccaaagatgaaaaaatgaataaataataaacagttcataaccaaattactctcaggtggaagttctagagtttacccaataataaattagaacttgacaagtaaatgaaggcatagattgtatctagcatgttcatttgccatttgcacagtctttcagtaagctatctaacattcataccacattcaaaaccttttaatcaagaatacattggagaaatgtgcataaatatcatactactatcaaatttaatagtttgtatacaccagagtgtatatgcatttatacatatccatgttaatctccaaacttcagaatattttatacttttctgtataacaagttgactttcttgcaagatagcattaaccaagataaggaaaaaaggatgaaagaggcattgtgttgctcttagagagtctgttgtgacttctttacaaactctattcttggtgcaaacagttagctggcacaytgatttaatatttatttttaaaaccccaataacattaatttttattgatgacaccaaatctccaatgacctgcttatcaagaccttgcttact

SEQ ID NO: 912574 - DNA, 538 bp, Homo sapiens
agacaccatgtagcaacaaacaactaatacttatccagtgcttacctatcttccaaatacctgtcaaaagcttagacacatagtgagtgctcaatacgatactaacattactgttattaatgactatccaggctctgtatcaatagtgtctatttcttactgtatttactggtcatattggtgaaaaggaaagtggaaatgacagcacaagaaattgtacgttagatatccaggcactggcatgtacaacaaaaggaagtattaacaatgactctgataagaagttaaacagattgctgaacaagtgggaacttgcatttgctatattcaattattatttttttcaattcaaggatatgtcttccaaatgtcttctgatttttattagccttagcacttacatgcagacaactatacatttctgggtctaagagtgctctcaaaatctgttttgactgcarttgcttttgaaatgattcttccaggaggctccctgaatgtcagccccagtgaagtgccttgggatcttattctctga

SEQ ID NO: 912575 - DNA, 538 bp, Homo sapiens
agacaccatgtagcaacaaacaactaatacttatccagtgcttacctatcttccaaatacctgtcaaaagcttagacacatagtgagtgctcaatacgatactaacattactgttattaatgactatccaggctctgtatcaatagtgtctatttcttactgtatttactggtcatattggtgaaaaggaaagtggaaatgacagcacaagaaattgtacgttagatatccaggcactggcatgtacaacaaaaggaagtattaacaatgactctgataagaagttaaacagattgctgaacaagtgggaacttgcatttgctatattcaattattatttttttcaattcaaggatatgtcttccaaatgtcttctgatttttattagccttagcacttacatgcagacaactatacatttctgggtctaagagtgctctcaaaatctgttttgactgcaattgcttttgaaaygattcttccaggaggctccctgaatgtcagccccagtgaagtgccttgggatcttattctctga

SEQ ID NO: 912576 - DNA, 609 bp, Homo sapiens
cccttcaatatggcattgcagaatgctaacttgctaagtgctagggttgttcacttttgagctgctcacttttgagcacacaaggttagaaacgacatgaagaggtttgaagaaccaaaggaggaagaaagggaaggaagaaaaagcagaggcctatatttatgtttctttgatttcttttgactttgattcacccaatctcatttgcacgaggtagattgaaatcatgacttccaattagttacctggcatagcttacacttctcacatgtattattgtattcagtctcatctgaatccaaattatactttatattaaattttactttcaaatcctgatttccaagacatctgctattcaccatttagagcttaacagacacaaacattcatcttttataactaacagagtttggtaatattaagggcagaattccagtccaataatttactgttcagacttctctgcactttgtacccttggccaagcacaactgaytgagcacaacacattggccagtggatctccagcccacaggcaccttgacctactctctgctcacttcattctagccattgctctgttctaatattgtattggtcagtgat

SEQ ID NO: 912577 - DNA, 616 bp, Homo sapiens
accagcatgggccatgcaaagctagaggaacagaaagtgcctgactgttttgggcaactggattctgcctgagctctgcacaaatgtgcctttgtctcactctctctgggaagctacagtgagccctaagckgccctgttgcctacctggccttcactgctgtgtctgctttcatttaagttttaacagcctctcccacctccaactctggcagtagccggtctcgcctatctacaggcacagctcctgttggatttctcttcatggcaacagctctcagcaggtgctgggtggctgttcctcccctctgccccttcaaaccatctggtaggtgtcactattgcacgtggcttctctaatactacccacatcaccggaaatggtcctttcataaactctcttcaatcacctcactggccgcaccatgtgtttcctgccaggaatctgatggattgaccagcgagtgaaaacacggggacagggcagaaatgtggacctcaaaaaaggatcggagctcgggctggtgtgagctactaggagctggctccagcacatccctggcttcgtcctgtacatcacagtctttccatcatgtttcagccctcgagtgaagcac

SEQ ID NO: 912578 - DNA, 598 bp, Homo sapiens
taaatgttgattgcaattttttttactttttaaaaagttattatactttaagttctgggatacatgtgcagaatgtgcaggtttgttacataggtatacatatgccatggtggttttctgcactcatcaaccagtcatccacattaggtatttctcctaatgctatccctccccagcctcccacctgctgacaggccccagtgtgcgatgttcccctccctgtgtccatgtgttctcattgttcagctcccacttttgagtaagaacatgcagtgtttggttttctgttcctgtgttaggttgctgagaatgatggtttccagcttcatgcatgtccctgcaaaggaaatgaaccaatccttttttatggctgcatagtatttcatggtgtatatgtgccacattttctttacccagtctatcattgatgggcattttggttggttccaagacttttcgattgtgaatagtgctgcaataaacatacgtgtgcatgtgtctttatagtagaatgacttataatcctttgggtatatgcycagtaatgggattgctgggtcaaatggtatttccggttctagatccttgaggaatcacc

SEQ ID NO: 912579 - DNA, 642 bp, Homo sapiens; identical to SEQ ID NO: 912216

SEQ ID NO: 912580 - DNA, 716 bp, Homo sapiens
gctactttcagttagcatagtgttttcaaggttcatccatgtttcagcatgtatcactacttcattccttttgtattgccaaatgatattccattatatagatattycacattttattcctctatcattagttggtggacattttggttgtttccacttttcagttactatgactaatgctgctatgaacattcatacacaggtttttatgtagatacatgttttcatatattttgtggctccccctgccctgggatttagggagccttctcagcccctaatagcatgagccacagtgtagaacagtagataagagggcaagtttgtctggagtcagactgccctgaggaggaatcccagcttcactcagtatgagaccttgggcaagcctcttctttttgagacagagtctcactctctcacccaggctggagtgcagtggcgcgatcttggctcactgcaacctccgcctcccagttcaagcaattctcctgcctcatcattccaagtagctgggactacaggaatgtgctaccatgccagactaatttttgtatttttagtagagattgggtttcaccatgttggctaggctggttttgaacttctgacctcaggtaatccagagaccttgggcaagtctcttaaaccctgagcctcaattttctcatctgtaaaatggggatattaatacctaactagcagaggtagcatga

SEQ ID NO: 912581 - DNA, 644 bp, Homo sapiens
ccctcaaagctgtcccaaaccagaaaatctaaagaattatcagaaattctaattttttggtttaatattttgaaacggtttgttatatattaaaggtctattaatacagataacaccatgtgtctactaaaggaatgagttgtctctttgagagtattaattattttgttcaattcctaacagctcatagtaaaaacagaagtggaaggaaagagtttgagtagtaaaatgaaataaaatgatgcttcctgtaattttcttaaaagatgcttggtgaataggcactttaaagagtctctgtgtcatgagaatttgtaagatgcatccatagggaaaccttaaagagtatattagaccaacaagaaagaaggaatatcaagaggattgttgaaatactctgtagaataaatgttttgttctatgtttaggctccagactaaaagaatgccttttccataaataacatgtgaaaatggatctttctatagaatgaagtaaaaaagaaattatgagattcatatttatgctctagttcagtttcataattgacaaatattaatttaaaraggaaaacaatccagtaactttgggaggaactagtcaaaatgagtaagtttgttgagaatgaaatgtgactctgaaga

SEQ ID NO: 912582 - DNA, 559 bp, Homo sapiens
aatatggtgattactaaactctaaatgatggttacagtgatattagtagtgygttagggagctcttgccatatgcagaacatttaatcattgttgctaaaacagtccatgtttagctctgaaatctgattatttttatgacatcagtattatcacagatccctaggtttaggaatttgctttctaaatgaaactgtatgaccacacatctgaaagctacaagcaaaagatgcaaggttaacccctggtgggcattctccacagtctgaaatgtgaaccttgccaggttaagtagggctccttgggaagaaagagtggggcacgccaggagcagggctgtgtgctctgcatagcaaaggttatatatctctgtgtggagatagtcatagccttcctggtcaagcccagggatctgggccaaacacgaagctaccagcggttagaatgatttgaaccattcagattctagcctgcttcctaagctttgagggagattatgatcttatcatcaacacctgatccaactaaagtcaatcattctcatgttgcctatacaattc

SEQ ID NO: 912583 - DNA, 607 bp, Homo sapiens
atacataatttgaagatattttctcccatcctgtgggttatcttytcttttcttgccagtgctctttgacatacaaaaggtttctaatttttataaaacctaatatactgatttctttggttgcttgtagttttggtatcatatttaagaaacagttgcctaatccgggatcataacgattcattccaagttttcttctaagagttttatagttttaactcttgcatttatgtctataatctcattctgagtcaatttttcattctagtgtgagttatgtgtccaaatttattcttttgcacacggatatctagttgtcttagcgccattcattgaaaagaatacttttgtcctaatgaagaatcttggcacatttgttgaaaatcaattggctatacatgtgagggtttatttttggattctcaatcctatcccattgatctataaatctttctttgtacgccactacacccaatcatctttgctgtaaattttgatgttgagaagtgttattccttcaatgttgttttttccacaatttttttggttctcaacaatttgggttacttatatttccatataaattttaggacaaccctgtcaattt

SEQ ID NO: 912584 - DNA, 586 bp, Homo sapiens
acctaaagcagatacagcttagacaacacccaaattctttcaaataactgaaaaacctaccaagaaggactggtacatacaagctcagactgcaaggactacaataaatacctaattcatcaatgcccagatacagatgaacaagtatcaagaaaatccaagaaaacataacctcaccagatacactaaataaggcaccagagaccaatcctaaagaaacagaaatatgtaacctttaagacagagaattcaaaatagctctgtttaggaagctcaaagaaattcaagataacacagaaaaagaattcagaattctatcagataaagctaacaaaaagattgaaataattttttaaaaatcaagaagacatcttggagtttaacaatccaattggcatgctgaaaaatgcatcaaagtcttttaataacagaactgatcaaactaaagaagaattagtgagcttaaasatacgctatttaaaaatacacagtcagaggagacaaaaataaaaataaaaagcaatgaagcactgctataagatctaaaaaacaaccccaaaatggaaagtctaagagttactggcct

SEQ ID NO: 912585 - DNA, 574 bp, Homo sapiens
cttgtgcttcccgagtgaggcaatgcctcaccctgcttcggctcgtgcacggtgcgtgcacccactgacctgctcccactgtctggcactccctagtgagatgaacctggtacctcagatggaaatgcagaaatcacccgtcttctgcgtcgcttacgctgggagctgtagaccggagctgttcctatttggccatcttggctcctcccccgatttctctttttttttttttttttgagacagactctcactctgtcgcccagtctggagtgcagtggagcgatttcggctcactgcaagctctgcctcctgggttcatgccattctcctgcctttgcctcctgagtagctgggactacaggtgcctgccaacatgcccagctaattttttgtatgttttagtagagatggggtttcactgtgttagccaggatggtttcgatctcctgacctygtgatccacctgccttggcctccaaagtgctgggattacaggcatgagccactgtgcccagccataaactactcttatcttatgtagaaaggctgaatgatgagccaatcaaaaataata

SEQ ID NO: 912586 - DNA, 528 bp, Homo sapiens
aggaggttgaggaaagactgaggaactgtgtcaggctgtggttgactaaggagacatgacaactagttgcaaaatgtgattcaggattctaaactggattctgaaatgaatacaatgaatatcattgggacttaytgaggaaacactaatggaaatgaggattagatggccctaatgcatcaatgttaatttcctgaattttaaagttatattttggttatatagtcaaattgccttgcttataagagctatatactaaaatatttcaggtttagaacttcaggtccaaaattactctcaaatgttcaaaatagagaaaattctctgtttgtacctccaactttttattacatttatagttattaaaattatataaatataaaatacatatgcatttgtgtatatatgtgtatatatagatatgcatatatatagatatgcatatatgtagataagtgatacacataaaaccaataatggactcatatctaatctatgcaagcccttcacaaaagatttgatattgcc

SEQ ID NO: 912587 - DNA, 636 bp, Homo sapiens
tctttggagaaatgcctacacaaggttgtttgtccatttttaaattgggttacttttctacttgttgctggatttcagggttttttttttaatatattgtggatacgaaactcctatcaggtaaatgatttgcaaatattttctccccttttgtagattatcttttcactttcctgatgatgtccattgatgcacaaaactttttaagtttttgaagtacattttatttactttttcttttgttacctgtgcttttggtgttatatttaagaatccattgtcaaacccaaggtgatgaagatttatccctgttttcttctaagacttttatgattttagctcttatatttagtcacagatcaattttaagttagttagtttttgtatatggtgagaagaagggggtccaacttttttcttttgcaagtgaaaatccagtggtatcaaagcaatttgttaaagggactgttctttccctcattgaatggacttgacacttgtgaaaatcaattagccatagatatttagatttatttctggtctctcaattctatttcattggtctatatttctatsctcattccaatactacactgttttgagtatagttgtaacatttttcattgcaattacaga

SEQ ID NO: 912588 - DNA, 671 bp, Homo sapiens
ctttctggctgtgtcatcctattgtggaaggcagaagggcaagagaatgtgtgtgtgcacatgcatgggggaagtcgggggkcggggggagagagagaaacagagagagagagagaaagagggctcaaactagagcccacatgacctaatcataacttttacaagtcccccctctcaacactgttgcattgaggattaagtttccaacatgtgaactttgagggacacattcaaaccatagcatggtagtcttttggaatgcaaacatttaaatgtatcagtgattcaccaaatattttacatactatcaacaaatgtgcttgaaattatatttctgtattatacacagtttccacaagtatttatatatttttggatagaaggttattcaactgaagggttaaagagaaatgttagagttatttctgttagaataaatcaatatgtgttcaaagaccatctcaagtactcagtgaagatttaatggggaatttggacaggaaaatttcaaggttggaaaaggtgaatataatggcagggaaactaagatgttattttttgagagattgtgtgaatttcagttatgtattatgaactcggttatttaattctgccctcttattcaacctgatgtcagattttatacagataaatgccattatgcttttatt

SEQ ID NO: 912589 - DNA, 655 bp, Homo sapiens
aagcttctaattccctgcacacttttagtctcactctagttatgagttttttttttcttttgcaattgtgaacagtttattatttcctatactatggaaccacttgtaaattatcccagttcttttccttgagttctcatattctctctctctctctctttttaatttatttaagctctgggatacatgtgcagaacgtggaggtttgttacacaggtatacacatgtcatggtggtttgctgcacccatcaacccatcatctacactaggtatttctcctaatgctatccctcccctagccccccacctcccgacaggccctggtgtgtgttgttcccctctctgtgtccatgggttctcattcttcagctcccacttatgagtgagaacatgcactgtttggttttctgttcctgtgttagtttgctgagaatgctggtttccagcttcatccatgtccctgcgaaggacacgaactcatccttctttatggctatatcatattccatggtgtatatgtggcacattttctttatccagtctgtcattgatgggcatttgggttggttccaagtgtttgctattgtaaatartgctgcagtaaacatacgtgtgcatgggtctttatagtagactgatttataatcctttggg

SEQ ID NO: 912590 - DNA, 585 bp, Homo sapiens
gtttattcattcattaaccaagcaaatgtaataggtgttagatttctggtagggagagaagtaagcatgatatgtacaatgacaacgaagaagcttacttggtagaacagagagtctgataggagttgttaggaaacagacagagagagcaaatatctggacaccctgagagacagaagtcagtggctcatgagaaactgttctaaagttttgaagaagagaaacatacaagaaaagtggtattagagaaaaattaatccagaagtgtactcaggatccttggtggcaggttagtacacacatgcacacacatatataatctgcttacttgaaaaactggtttggccatgctaaatcttcaagaaaaacagtatttaaacatggcaatgaatacactcgcaggcaaaaacggtccataatccctgactctggttttcagttgatatcagatagccccattctagcycctttctaggaaattttttgtaatcccatcatcaaacataacgtagattgggttttccattaccattaaaaagaaaataccaagaagtttttcatcggcacccagaaatccatgtggtt

SEQ ID NO: 912591 - DNA, 643 bp, Homo sapiens
ctagattttatctttcctgtrtttctgttgaacatatgctgttcaatgtgaatttcattcccatcagttttgcctcaggtagatctttgtactggagagaccactgggcaatgagatttgagatttcatagggctcaggttgcccagccctcccaaaccttgctgcagacttgcctgctattgtagtgctatacttccactatcaccctgcactatagttattgtttcacctttctgtaacccacattagattataaaccctggatgcaaagtgcctgtgtttgctcatcatcattgtaaatttcagtttttggctgctggcccttagaactttccaaggagcccctatttcagatgcactattgcttccctttgcttcctgtgcaaagatgctcattccatgcaggtcttataccagtcagtagtttttcttcaccaggtaacattttcaggctcatagaaatgctttgccacctagttttattttagatgctgaccacagatttttataccagtctctgttttcacagggatattcagagagatttaaaaagtatgtcgcaataaagatgcagcatctttatcaacagtttttacgaagctgaaccttgtctctttagttatagaatagaattccagtggc

SEQ ID NO: 912592 - DNA, 643 bp, Homo sapiens
ctagattttatctttcctgtgtttctgttgaacatatgctgttcaatgtgaatttcattcccatcagttttgcctcaggtagatctttgtactggagagaccactgggcaatgagatttgagatttcatagggctcaggttgcccagccctcccaaaccttgctgcagacttgcctgctattgtagtgctatacttccactatcaccctgcactatagttattgtttcacctttctgtaacccacattagattataaaccctggatgcaaagtgcctgtgtttgctcatcatcattgtaaatttcagtttttggctgctggcccttagaactttccaaggagcccctatttcagatgcactattgcttccctttgcttcctgtgcaaagatgctcattccatgcaggtcttataccagtcagtagtttttcttcaccaggtaacattttcaggctcatagaaatgctttgccacctagttttattttagatgctgaccacagatttttataccagtctctgttttcacagggatattcagagagatttaaaaagtatgtcgcaataaagatgcagcatctttatcaacagtttttacraagctgaaccttgtctctttagttatagaatagaattccagtggc

SEQ ID NO: 912593 - DNA, 598 bp, Homo sapiens
tctaatattgacagtggggtgttaaagtcrcccactattattaagtgagagtctaagtctctttgtaggtctctaataactttctttataagtctaggtgctcctgtattgggtgcatatatatttaagatagttagctctttttgttgcattgatccctttaccattatgtaatgcccttctttgtcttttttatctttgttggtttaaagtctgttttatcagacactaggattgcaacccctgcttttttttttttttttttttttgctttccatttgcttagtaaatattcctccatccctttatactgagcctatgtgtgtctttgcatgtgagatgagtctcttgaataaagcacactgatagtccttgactctttatccaatttgccagtctgtgtcttttaactggggcatttagcccatttaggttgaaggttaatattgttatgtgtgaatttgatcctttcattatgatgctagctggttattttgccgttagttgatgcaatttcttcatagtgttgatggtctttacaatttggtatgtttttgcactggctgataccagtttttcctttccttatttagtgctt

SEQ ID NO: 912594 - DNA, 620 bp, Homo sapiens
gacttcatctttctcccgtgctggatgcttcctgctcttgaatatcagactccaagttctttggcttttggactcttggacttacaccagtggtttgtcaggggctcttgggcctttggcaacagactgaaggctgcactgttggcttccctacttttgagcttttggcacttggactgggccactactggcttccttgctcctcaacttgcagatggcctatcatgggacttcaccttgtgatcgtgtgagtcaattctgcttaataaactccctttcatatacgcatacattctattagctctgtcactctggagaaccctgactaatacagggaccctactatcttgaagaccatgaagaatgtgcagatcacaatcagctcactgaaacaataaccttatatttcacaaaatttccatccagcttgcactgtcttctgtgcagagccccggtgatgtttccccctcccctgaatcctccccctcctcatcaagcagtgcaagttctcatctaagcagttgtgatgttaatgccctgtattggacctatttkgattcgacaaatagaaagttaaaagaaaaaaggttttaagggtttttttttagaaagcagcagac

SEQ ID NO: 912595 - DNA, 632 bp, Homo sapiens
cactttgggaggctgaggcagtcagatcacttgaggtcaggagtttgagaccagcctagccaaatgccaaaacccctctctaagtttacagagacctgagcatgtttaaaggctaacagggagaagtcagtaaagaggaggaggctgagggggcaggaagaagatgtaacatgggccaggctgagcctgaaaggagctgagcccgggcttccagtcacctctccatagtggagacagccctaagggtctcagatcaccccggagttcaccatcccagtgaggaggagaaggaagacaaggcaggaagggacaaaggaacatgtaagttgttagacaactgggaccacaccagtttgtaagttactagtaccaggccccaattatttaaagcaccaccattttggggtagtgtgactaaaacttatttttaaagttattccatgaaacaaagttttctagttttttaccagaatacatttttagatcctgtaaatgcttagaaaagggaatcccaactggcagcctgtacatccaatccagctggcatataagtattttgcctaaacrgtgttagaaaatataggaaatttcacttaaaaatctagactgctaaattcttttgaaaacgaaga

SEQ ID NO: 912596 - DNA, 611 bp, Homo sapiens
ggttatgcatttgagtttcatccaaataattgttcaccaagccattgttactgaataaaaatgcattggcccacacacataggttaacaatcttaattaatgatcttgtggcccactaccaaaaggcttgaatgcccctgctgactttaagtgcttagaaaatagatagctgatggctgtacaaccatgtaaatgtgcttaacaccactgaactgtggacttaaaaacggctaaaatggtaaatgttatgtcatgtatattttaccacaaaaaaaaaaaatgttcaggccaagaacaatagttcatatctgaatcccagcactttgggaggtcggggccggaggactgcttgaggtcaggagctcgagaccagcctgggcaatagagtgacaccttgtctctaacttagaaaaataaacaaagtttttaaaaatagcacagtgcagtggtatgagtacaagcttttgggtcaagcagagaggtactcaaattatgactgggctacttatcggctctgtgacctcaagcaagttgctgaatctctctgaatccatttcttyatctgcagaatgggagtaataatgcctaccagtctaattaggtgggtagcc

SEQ ID NO: 912597 - DNA, 624 bp, Homo sapiens
gctcaaacatcatgtgatttccctaatgtcaccccttaatgagtaatagaggtacaatttgaactgaattagcctaactgtgaaaccagggctcttaaccactattccatactcagtgtgttatctccccatccctctggactggataaatgtctctgcatcttcaagggctggtggagctcctagctgtggtttctcgctctcctagaactgctcactcttgaagccagtaatcttttcttagcactactggcacagaatataaaatctaaatattgtccatctactaacatttctttaaccaagtccccaaaccaaagggaagaaagcagctatcttttacatgatattattgtctcccaagctatctgggaatcttcaggatgattaaagtccctctctagccagttgcaatgactctaagtcctagatgattcacagaaaaaaaaaaagggggatgggggtggggaggactacttggcaattaggaaggagtaggatcacagttatgaaagctataaatatctttcacatgtcttctgtagactgggctgcaaaataagaaagttccaawatcctatttattagttatcaaaaagcacaaagttgcacttcaaacatatc

SEQ ID NO: 912598 - DNA, 665 bp, Homo sapiens
cactaagcagtgggggaactgagaggcacttgtgaaattcacaacccaggggcacaggctcactaaaagactgagacccaatcataggacyagagaccacttttcctcccttaataccaactaccacattactgaaggcctatttaccagagttctttttatctggtacatcatgtctagctttcaacaaaaaattacaaggcatactaaaaggcaaaaaacacagtttaaaaagacagagcaagcactagaaccagactcatagaattatcagactgtgaatttaaaacaactatgattaatacactaagagttttaatggaaaaaggagacagtatgcaggaacagacggataacataggcagaaagatggaagtgctaagaaagaataaaaaagaaatgccaaatataaaaacagtgtaacgaaataaagaatgcttttgatgggctcattagtagactgcatgtagctgaaggaacaatctctgagcttgaggatatataaacagaaacttccaaaactgaaaagcaatgagaaaaaatattttttaaaaaacagaatatccaagaactgtggaacaactacaaaatgtgaaacatacacataatgggaatatcagaaggagaataaagagagcaaggaacagaagcaatatttgaaggaa

SEQ ID NO: 912599 - DNA, 649 bp, Homo sapiens
tgctagcagctattattccagcatacttggtgtataggcaggcctaccttattatttattgtccaactcaggccctttgaaagtaaaagagtgatctgtaagtacagtaggataacaagcataaaccaagacagcctgacaaactggaatatgtagttaccctaactataagttatgttgtaggagatgtcgttgggaaagtgagttggggtcatttgttgattatttatctcttggaagcaaaaattaggcttattctgtcaaattttgattttaacatctgcatgtatacaacctggctaggcaataatgataatcacaatagttactatttactgagtgcccactttgaggtttctaacttacattctcattgatccttacactgactctgcaaggtgcctattatgcctgtattcatgcccagtggctgcccaaaataatgactgcaaactttgtggcttaaaacaacagaagtttattcctcatagttctggctaaagtctgaaatcaaggtgtctatagggccacactctctctgaaggttctraagggagaatttgttccttgccttttccagcttctggtggccacgtcacttcaatctctgcttctgtggtgatactgactccttctcctctgcatgtct

SEQ ID NO: 912600 - DNA, 694 bp, Homo sapiens
ctagagttgtgtgatttaccaagaaacacatattttttttttaaacgaaaaagatgaggtttaatttttttaatatcatttggaaatgtttgaatttaggtgaaatatagtgcatctggaragatacagcttaagtggcgagattctgagatgcaatgtggtttctcatcccccttcagtttcctgttttgctgggtgatcttggagtccttccttccccttgacagttcctggctgcttgccatcatctgaaaaagtgaagtccacaccttgccccagccttgtagctgtctctggtgaagagagggcaacagtgtagaaagctctgggacagaagatcgctgccaggggttacctgccacatgctgtgaaagaatttcaacactaaacagtgcctgtgcctctatagcatgtgaaatagagattgtcactcaaagaggctctctctcagccagctctctcactttcttcatcctcctcagatatgtaggaggaagatataaccaggcagtgtttccgcagtgtttgatcatggaatagcctcataaatgaagtgaaagcccctttggagtcatctcatccagtcacccataggccaggcagcattgaaactgtctataggataaaaaattgtgtatcttttaaaatatttccatggagagaggcttcattcctttttggttactttgacgat

SEQ ID NO: 912601 - DNA, 599 bp, Homo sapiens
ttgataggtgtacctgaaagtgatggggagaatggaaccaagttrgaaaacactcttcagaatattaaccaggagaacttccccaacctagcaaggcaggccaacattcaaattcaggaaatacagagaacatcacaaagatactcctcaaaaagagcaatcccaagacacataattgtgagattcaccaaggttgaaatgaaggaaaaaatgttaagggcagccagagagaaaggtcaggttacccacaaagggaagcccatcagactaacagcagacctcttggcagaaaccctacaagccagaagagagtggaggccaatactcaacattcttaaagaaaagaattttcaacccagaatttcatatccagccaaactaagcttcataagtgaaggagaaataaaatcctttataggcaagcaaatgctgagagagtttgtcaccaccaggcctgccttacaagagctcctgaaggaagcactaaacatggaaagaatcaaccggtaccagtcactgcaagaacatgccaaattgtaaagaccatcaatgctgtgaagaaactgcataaattaacaggcaaaatacccagctagcat

SEQ ID NO: 912602 - DNA, 611 bp, Homo sapiens
tcaggctagaattctcttccttgggtgctgaactccgttcctagcgtatggataggaagcaccaraaaatgccatccgcaaggccaggccccacaaactgacgtgtggtacagctgaggatggggatggcaaaggcagaaagccacagatgaaccgaaatacatggcagggccaggcccgtcaatcaggacaagccacgtacttgttccttccctgttagggcagatgtgctcgcacctcccggcctcggccccagagaagctactatctgctcccctaggcgccaacattccttatttgatccttgccatcaagcttttattctgatcaccaccccccgctatacagacacacatatacacatctatagctatttccacatttccacaccacattcacatcttccacatacacacacatccaaaagagctgcgtgcacttctgatggtcaaagcctatagcccattctcagctgccatctgtcttgcctgctgcaccacacacgtgcatacacacacacattctctctctctctctctctctctctactctactctgtccatcccaatactgcatcaactgtgaacaagccaggtactattaagtaagga

SEQ ID NO: 912603 - DNA, 586 bp, Homo sapiens
tataattaaaaatagtcttgcgatagagctaccgattgtcctaatgcttttcctttttagggakccatcaatattgctgttaagatcacatatatagtgcactcatgattataatatttgaaatatctaatttttattatttggtaggcatcaagcactggggtaaagagtttaaaaccattatcttaaaacattttgattttcatacgaaccttaggaggccacagatgagaaaagtattttatatatagggagatttgataacgtacctgacgtgacaactacactcagatttctgtgattacagaaatcatgtgtgcccttcttaaaggacatttctaccatgtataaccatggacattgcagattaaacgatgttgaaatttcaagagtgtggcatagatattttcacataattttatcataaacttaataattgcacttacttttatttaccgttctaggtcagtaccattgataataaaaagagattagacagttatgaggacatgccctgtgctagacacagtgagaagtgactactttgtcctcttccatttcactcaatacatttacagtagaaacc

SEQ ID NO: 912604 - DNA, 593 bp, Homo sapiens
taagtaagctacaatattctctagaacttttggccacactctgcagctttccattttcagaggctggatggaggtaattattagggaaggggagtaatctagagtgtcttctaaactatgcagtgtatggtgatgagtttaggaacacaggttctccagtcccacagcctgattcaaattccagctctaaaacaatccactctgagaatgtgagcaagttctaaggcctcagtttcctcacctctaaagtggaggtatcaatactactgatctgccatcttatattgaagatacaatgaaataacactgagagatcacagtgtaagacacataatgcgtgataaatacatgttcactattgtaattattctgaaatgcccatttatatttcccacactggcccgtgcaaactattttgagatagggcgaaatcaacgcatcatcacactgaaacccccggtcacaatcagatgcagtttcctataatatgactttaaattgtcaaaggatgccataaaaaacacaaagagttggtttccaccacatgaattcagggagyttctcatattctatgcccagataaatagtgactg

SEQ ID NO: 912605 - DNA, 604 bp, Homo sapiens
atttatatgttataattctgtcagaargggagacccctcataaatgggacttgtgcccttgtcaaaaaggccccagagatctccctcacccattccactatgtgagggcacagtaataaggtgccatctatgaaccagaggatgggatctcaccagtcacctcatctgctgctgccttgatcttggacttttcatcctccagaactgtgagaaataaatttctgttgtatataaaccactcagtccatggtatttcgttatagcagctcaaatgtactaagacatagaataaatgtgctacaacaaccaagttctaaagggaatctattaaaaaatctcgaattatgtatgctcatctgtacataattctaaagggcaactactttctttttgtagaaactaagactttccatacatataagagtaagtgagtttatgttctccctcccttcataagacaaagggcaccaactctgtagtttaaaagactatattgactttcagatttttagagaggtgccactatgaatccacagagcacttaataagggttttaaaataattaaatcagtagtaacaaagtaaaggccatcacagatgcaca

SEQ ID NO: 912606 - DNA, 608 bp, Homo sapiens
actagccctggcaaggacttccagggtatcctaatgtgatttagtaggcacagatgtcactcatrcaaatgttggtattgagtggtccagtctagtgcttgtaaaatagtatcaaaagagtttaggcagtgggcaggacaccagagtctggaagagctgtgttgtgattctagaaggtctagcctttcatagcatcacttttgccactaatgacagatgtggggatcaggaagagggctaacaagtatttacttgagaacactagccaaatgagctggggagtttgggacaagcaaggcctcacttctttgagggagtctggggtgtaaggaaaggcaagaaaaattgctgtgggttgagccactatggaggttaggaggtatggtgcagtgaggttatccaaatgaacattactggtccttgatagacccaaccaagtctgtttgggcatattacttaattctgttcctcagtggggaatatgtctgagtttgttcatgtttgtgcttcccataatgactaacatcgtaattggaatagaactgcagtgctgtaagtggtcagttagtaaaggtaatggcagaggggaaagtaagccaaaagcaggg

SEQ ID NO: 912607 - DNA, 570 bp, Homo sapiens
agtggatctactacattatttggcaacctgggagtattcggtatagggccatatagtccaacactaaggaacaggctgcaaaaacaaggtggggaaatgcctagtatacattacaaagcatcaactgaaatggctgaaagaaaatagaatctcatgctgaaggaacagtctctccagaagatttatttacacaaaacaccttatttaactaggtttgatgatatatacatgagatattatgatagttacatgttcaacacatactctgtgtgttggttcaattgtatttttattccaaaaaagtcctttttcccacaatgattttagtttctcttattgaaaaagcaatatatactcattatagaaaataaagtgaagcaaattacaaaaaacactaagaaacaacctcaattaatacttgcttaacccattttatgaagatacgtgtttatgagtgtatgtgtgtgtatacagacagataaatatcaagtgttatttttataagtccaatgattacttctttagaaaaaagagyccacaccattttctcctgcttttttgtggtttaaa

SEQ ID NO: 912608 - DNA, 581 bp, Homo sapiens
ttccataagaataattattggggccaggcgcagtggctaatgtctgtaattccagcactttgggaggctgaggtgggtggatcacctgaggtcaggagtttgagaccagccttgtcaatatggkaaaaccccatctctaccaaaaatacaaaaattagccaggggtggtggtgcacccctgtaatcccagctacttgggaggctgaggtaggagaatcacttgaacctgggaggcagaggttgcagtgagctgagatcaagccactgcattccagcctgggtgacaaagtgagactccgtctcaaaaaaaaaaaaaaataataataataataataattactggccgagcatggtggctcacacttataatctcagcactctgggatgccaatgcaggagaatcacctgaggccaggaatttgagacctgcctgggcaacatagcaaatcctcatccctacaatatttttttaaaaaattggctgggtgtggccgagcatggtggctcatgcctataatcccaacattttgggaggccaaggcgggcagatcacctgaggtcaggagtttgggaccagcctg

SEQ ID NO: 912609 - DNA, 606 bp, Homo sapiens
atcccttgtttttaatttagaaagaaacattaacttttctgaagttagataagaactagatcaccatagcacatcccaacatattcaaggatgctccagtcccaatcagttttactaactaatcttcagttaactagaaatatcaacttcctaaccacgatagttaattaaaatattactgtaactaagatagtaactaaattctttggacttgtggccatttaacaattttttaaacagagaaaaagaagagaaatggtattgtgtaaaatatgccattattgactttaagtattccatttgggtcaagaacagagaccatcttttgatatggacaagggattctagagatagtggggagactggctttctattatccactcagtgggtttggaaaccactcctgatgcattctctaatttgcagtacactctcctgctgtcaggattgactgtcaggccaaaaggacacctgttctcactcttartagaaactgctgctaaaccgctgatactaaacctaataggagacaaaggaggcagctcggagagcctgagctgaattgaaaggtgcttgagaactggttggaaatctggaatgttaaga

SEQ ID NO: 912610 - DNA, 619 bp, Homo sapiens
gatcattaaacactttaatttgctgcatttcaaatcatactatctgtcccaggttagatgtagttcatgctgagaaatgtgggtaaagaattcaagtccattttaaaattctccaattctgcaggaaaccctgcaatgattcttgtatcacgaacagttatacctcttagcacgattagataaaagctatgaaatatgattctttcacagacagttttggtaagacactttataaaatttccacaactctttccctttaatagtcaaaatgttggcaaagtttaatggcaagtataaatcctgatttataaatcctgagtagaaagaccccaaaccgtaggctaagcttgttttttcctctcaactccctgattgcttcttctaagccatctttgctggcttcacctactggcctcctgggaccttctcttcttttataccctcatcttcagcttaatgtggccttcttagagagagtttctctacccaaccaatataaagtartcatatagcccgtctctctttctttctccctcttcttccctactcccagctgtatagaacatattatgacacccctgtccatagaacacaggtttcccaaaagtaaggccttcat

SEQ ID NO: 912611 - DNA, 656 bp, Homo sapiens
tgtatttattttctaaaaagaatttcacgccaattgctgacaaacttagaccaagtaagaaatcatattaatcaagaaccaggtctagtgatactattacaaattatttatcttttaacatcatagattagattttttttcttattgactgtttcttaatgctatttaaaataactgctttcttattttgtagtatattggctcaaataattgttctaaacattttacatatccacacttcagtttgatgtagaatgtaacctgtattattttttaatgtatattttattttgcttcagagtctgaatctacatggaaacagcttgagtaaattgagagatctctccaagttaacaggacttcgaaaactaaacattagctttaatgaatttacctgtttagatgatgtataccacttggtaagaattgttcctttgaatctaaaaaagtgaaactcatagaagcagaagtagaatggtggttatcagggcctaagggctaggggaaatggggagatattggtcaaagggtataaactttcagttataaattagacaagttctaggtatctgatgcacagcaagtgtggtgatggatgtgttaatttgattgtggtaatcattacacarttatatcaaatcattacattgtacacc

SEQ ID NO: 912612 - DNA, 456 bp, Homo sapiens
aggggaaaatgccaccaatctctttgcatagcaagagtgatctttactccagttcccaacaagttccttgtctccatctgagaccayctcagcctggaccttattgtctatatcactatcagcattttggtcaaagccattcaacaagtctctaggaagttacaaactttcccatttttcctattttcttctaagccctccaaactgttccaacctctgcctgttacccagttccaaagtcacttccacatttttgggtatctttacagcagcacattactctaccaataccaatttactgcattagtctgttctcatgctgccaataaagacatacatgagactgtgtaatttataaaggaaagaagtttaatggactcacagttccacatggctggggaggcctcacaatcatggcagatgaaggaagagcaaaagcaggtcttacatggtggc

SEQ ID NO: 912613 - DNA, 620 bp, Homo sapiens
tctacaaaattctttcacagcaatacctacatcattggctaaaataactggggactctagcttcaaatattttgcagctctgttgttggtgcatacacgtttaggactgttatgtcttcttggtggactgaccrttttatcagtaggtaatgttctgtctgactctggtaatttcctttgcttcaaagtttactttatctgagattaatgaagccactcctgctttctcttgattaatgtttaggatatctttttccattcttttactttcaacctgcatatattattatattcgaagtgagtttcttgttgacaacatacagttggatcatgttcttttaccttttagctaatttttatcttttaattgatgaacgaagaccatttatatttactatagccaactgacctgttagggcttatgtctgccattttgttttcttgttttatatttgtttcctttgtttatctttcttctgttttcttttttgtgccttcctgtgagcttcctgaacacattttgaaattctatttttatttatccatagtgttttttagtgtatctcttcatatagttttttttagtggttgttctattacaatgcatatacataacttac

SEQ ID NO: 912614 - DNA, 607 bp, Homo sapiens
ttgacccacaggccatcttcaaggtgtggaagccaaaatggaccagaagtaatttctatttcctgccagatagaacacaagcaggagccgtagttgccaaaaatgcccgcgcacacaggctagtggtctctgaccctcctagggcactgcttgggttggaatggcggcgctcacgcaggattccttcaattctgcactgtcacaagcccacagggctggagaggctggcagcacaaagaggaatgagactcgcttgctggtctcatgaagttcacagcctagttggggagcctgcaagtaagaagacaatcccgatgcaggagggcaggcgtgtgaccccgaaacagtgtagagaaggagcctgcagcctgtggtgggggagggtggtgctgagcggtccaggagagacctgacacatagcaggattgaagatgatttgccaggcaggctgaggcagtgagcagggcaggagaggaggcagacacgtgccgaggagckcaaggcacattaaacgaatggatgaatgaaggaaaactagccatgctgtgtttaaggaaaacaactgctggtaataactgagttgggcaatgaaattaatggtgtgaat

SEQ ID NO: 912615 - DNA, 652 bp, Homo sapiens
acgatttcagctcactgtaagctccgcctcccgggttcatgccattctcctgcctcagcctcctgagtagctgrgactacagacgtccgccaccacggccggctaattttctttttgcatttttagtagagacggggtttcaccgtgttaaccaggatggtctcgatctcctgacctcatgatccgcctgcctcagcctcccaaagtgctgggattacaggcatgagccaccgcgccccaccccaaacttgcaaagttatttaaagggctacccacttgcaaacttctttaaagggctacttttaggttattggagctgcttcctctgttgcaccaagagtcacaagtgtctggcagttctatttccctccaggtagcccacttccaatgactgactgctgaaagaggatgaaagcccagcttctttgcctccacaagcaacaaactccacagtgaaatgtatgttctgaggcttctcgtgggatcaggctgagccctgaactttaccttgtttggcttatttcccctccttttcctgcttcttctacttcttactactaggtgtaacttgttaataaattacttgcatagacattcgtattttagaatatgcttctgagaagtctgaactaagactgtaaaaattttttga

SEQ ID NO: 912616 - DNA, 619 bp, Homo sapiens
ctctttacttagtggccactgttctatccaaattggcttatctgttaaccattttaaaggtataggttctggaggcttaacaatggccaccatcaaaaatgatatcctaatctttggtggaaactttgtctttccgcttgaagtggttctttcaaaccttgcaaattttttcctagtcccatactagggacataaccccatttcatgcatcatctgttgattctgagggctatgtaattgttctggaattagaacttgtgctccccattgttgtaataaatctctcccccataaatttatagatacagaagttataattggttgaatagtcccaggttgtccatcgggcccttcacaatgcaaaatataactgctttgatatacttcaggggctttaccaactccaactatgttaaattgagtgggttgaattggccacgcggacggccagtgctgtagagaaatgattgaaatgtccgctccggtatctaccaaacctttaaatttctttccctgaatagttgtttcacaggtaggatgtttatcagtaactcratttacccaataagctgctttgtcttgtttatttgtgcttccaaatcctcctgttcatttaatt

SEQ ID NO: 912617 - DNA, 603 bp, Homo sapiens
tgccaggcatcaaattataagagcttcttgtaagaagtaaataagtgtttgcagccactgtcaggacaaataacagctggagtaggactgtatcaagagaggaggttataggagacaagagtcagaatatgctggacacaacagggagtgtgctttttcttctaagtgcaaaaagctagggaaatgtttaaggcaggaaagtgacaatggggaaacgggtgagaaagaaggtggcgattcaaatggcagccacggtggaaaaccactgccttagactaggggagggtctagctgcacatctaaaccaattatagctgtcggagtccacacagaagcaatggtaagagaggtctcctgagaggaagcagtgagaaaggccaggtgtcaggagaaaatcttgcccttaataagcttcatgtggcagcagctaaaagtgctcctggagtgaaactccaggccccattttgcacagactcttaagaaaaataagatttaatgccagcattctawggcctccctcctccgcctttgtttttataattgcaactcattttttatagtgtaaacaaccatttcaatgtcctaccacatggtaccagctta

SEQ ID NO: 912618 - DNA, 657 bp, Homo sapiens
ggtcaccgtactataagtttacatatttaaaattagtaaatcatgctaataaaatgtaaatatgggtatttttttaagaatatcatatgtatttatgatatttaagatccccgaaagtgaagatcctgtcttgttaagatcttattgcactgtagatgttaatttaaacatttactattgatgaggtggcctagaagaagacctagttctgagccttaggaattctaacatttaacgtccagtagagaaatgtgagctggtaaaggacaccaaaataaaatagccaggaagttgggagaaagtataagacaacatggtgtaacagatgtccgtgtaaaacagtgtttcaagaaagaggaacagtaaattgtataaagtgatgttgagaagggagggaagacatggactacaaagtaaacagtgaattaacgaagacagggacagttgaattggtagcataatagtgttaaatgccatgttagttaaaaattaagtagaatatgcagaaattgagaatgaacatgtagacaattctttcaaaattttgtgaakaggagaaatttaggataatagctataaaagaatgtgtgtatgggggaaggtattcatacacacatattttaattaagcttttaattttgagataattgtaaactc

SEQ ID NO: 912619 - DNA, 663 bp, Homo sapiens
acgtaagtcatatgaagggagttgcatgataaaaagctttctgggggcctggtgtagtggttcatacccgtaatcccaacactttgggaggctgaggtgggaggrtcacttgaggccaggagttcaagaccagcctggacaatatagcgagaccctgtctctacaaaaaaatttaaaaagtagccaggcatggtggctcgcacactgtagtcctagctactcaggaggctggggtgagaggatcacttgagcccaggaattcaaggttgtagtgagctatgaactcaccactgcactccagcctgggcaacagagtgagaacctgtttctatgtatttaaaaaaaaaaaaaggccgagcacagtggctcatgcctgcaatcccagcactctggaaagctgaggcgggtggatttcttgaggccagaagttcaagaacaccctagtcaacagtcaacatgacaaaaccccgtctctactaaaaatgcaaaaattagccagacatgatggtgcatgcctgtaattccagctacttagaaggctgaggtgggagaatcacttgaacctgggaggcggaggttgcagtgagctgagatccctccactgcactccagcctgggcgacagagtgagactctgtctcaaacaagcaaacaaaaacacaaa

SEQ ID NO: 912620 - DNA, 624 bp, Homo sapiens
attctgactggcgtgaaatggtatctcattgtggttttgatttgcatttctctgatcagtgatgttgagctttttttcataagtttgttggctgcataaatktcttcttttaaggagtgtctgctcatgtcctttgcccactttttgatggtgttgtttgcttttttcttgtaaacatgtttaaattctttataaattatggatattagacctttgccagatgggtagattgcaaaaattttctcccattctgtaggttgtctattcacgctgatgatagttttgtttgctgtgcagaagctctttcagtttaattagatcccatttgcaaattttgacttttgttgcaattgcttttggcgtttttgtcatgaagtctttgcccatctctgttttctgaatggtattgcctaggttttcttctggggtttttatggttttgggctttacatttaagtctttaatccatcttgcgttaacttttgcatcaggtgtaaggaaggggtccagtttctgttttctgcatatggctagccacttttcccagcaccatttactgaataggagatcctttccacattgcttgtttctgtcaggattgtcaatgttgtagacggttgtaga

SEQ ID NO: 912621 - DNA, 406 bp, Homo sapiens
gagctcattcactatcaggaggacagcaccaaggggatggaactaaaccatgygaaatccacctccatgatccaataatcacctgccatcaggccccacctccaacactgagtattacatttcaatgtgagatttaaagatgacatatatccaagctatatcaccttcctattcagaatatcataggcaatagaggaagaggctgtacatctgcctgactgccaagcctggtgtttgctttgataattactcttgatcacatcaaggtttctaatcaaacaattggaaaagattagaaatataattctggatgttttgtaacatcatacaatctttatctttacaactgaaaataaagaaacatggaataaatggagaattgcatataagtgacatgcaaattgct

SEQ ID NO: 912622 - DNA, 650 bp, Homo sapiens
tatattttaaaatccatttagattatgctgaatatataattcctataatatatgttctgtggtaatttagaataaaaatcccttcggtatgtgaatttaaaacaaattataggcatataatcattgtgaagtatctattcttcaaatcacttttttgttctttttagttatacaaatgggaaacagtaaaatttgccttttatacttgagtccaatatatattatttgagcaatttctaaatctaagatactgtcataaatactttaggaaatagcgaaacaacattaataagacataacatttgccctcagggcatttatatagggatacgcataagcaatcattagatgaatcagataatgtttcatgataaaatggaaaccaaataaatttataaacgatcatagaccttagatagcatggtcccaatctgggagattacaaggaatattttgttggatcttgacgtattggccaggatctcagccagcagatgatggtggtgggtgatggttgagggagggatgctgtggaatgaaggaataacattyaggatggcatagcatgaacaaaaccaggaagtgaaaataaatgcaaagatgctcttaagtcactgtgagttctctgctgaagcggaagaaaacactgg

SEQ ID NO: 912623 - DNA, 639 bp, Homo sapiens
gtagatgtgtggtgttatttctgaggccactgttctgttccactggcctattatatctgttttggtaccagtaccatgcaattttggttactgtagccttgtagtatartttgaagtcaggtagcatgatacctccagctttgttctttttgcttaggattgtcttggctatgcaggctcttggctatgcaggttccataagaactttaaagtagtttttttttccaattttgtgaagaaagtcagtggtagcttgatggcgatagcactgaatctataaattaccttgggcagtatgacaattttcatgatattgattcttcttatccatgagcatggaatgttcttccatttgtttgtgtcctcttttattttgctgagcagtggtttgtagttcttcttgaagaggtccttcacatcccttgagttggattcctaggtattttattctctttgtagtaattgtgaatgggagttaactcatgatttggctgtctattattggtgtataggaatgcttgtgatttttgcacattgattttgtattttgagactttgctgaagttgattatcagcttaaggagattttgggctgagacaatggggttttctaaacgtacaatcatgtcatctgcaaac

SEQ ID NO: 912624 - DNA, 564 bp, Homo sapiens
taactataatttttggttttgtaatttaactgagaataggcattgtgctgttgaggtcccttatgtcaaaaggttggggtgaatgtagcttatttaaatagaaatagaagaaagtctgaaatagatgagagagagagatgaggatttaaatattggaaaaaaatagatggcagaaagtagagtagatcatgaggctgtaagcaagcaagtcaagatgtggaagaagcagatatgaaaatcaaccaggtaaatattacatataagagatgcggaaatagaattgtttcttatttccgttaacctcaaagtcaagaatatctgttctggtttagagtaaaattgaaattgaaaaatgattctaaaacctgagtgattgtcaatgctgtaactaaattctccttttgtacagaagcaaatatatcaagtagaattgttttttgccttaggctttgtattttttccctcccaaagaaatgcatgttgttaacagtgaagaacccccaggagttaygtctttacttcattggtccataagcaaatgagaacaatcttctccatcactgg

SEQ ID NO: 912625 - DNA, 667 bp, Homo sapiens
cagagagcagattagcatttgccagtagctggggagtaactgttaacatgtacggagtttctttttgtatatagtaaaaatgttctgaaattagataatcatgatggttgcacaactctgaacacataaaaatcacttaattgtacactttaaattgtagaatatcaactatatttcaatataactgttaatagttttttattcctaagcattattaataaaatagaagacaatattttgatattcttgcttgttatttagaaaagcatgttatttgctgatctgtaaacataatgactcacttaagctcataactttgtgtgtgtgtgtatatgtgtgtgtatgtgtaagtggtaacagacccaaactaaaatacttctacttgtgttttcacttggcttttcagaagtttatgaaacctattaagacttttgaatgatttttatctttcatattttaatctgttttccttcttatttagagatgacactacagataggcatcaaaatttctagaaaactgtataacttttaaccaagtaattagacttctaggacttaaggatataactggacaaatatgcaatatacatgtgctaatatgttcatcatagtattatttatartaacaaaaattacaaactatacttaacagtctaataacaggg

SEQ ID NO: 912626 - DNA, 607 bp, Homo sapiens
gtgagcttctcaagtgagagccatgtgtccccaaaagaaaggagggtttatccataagactttgctctccctttcaacactgtggtgggaagtactctgttaccaccccaagttggcatagctcgattactttaagttctccaagtcacgaacagcacatagaaaatgcagcaaactcaagtcaagacaatagagagatatgctgagaacttaatactcaagccttaatcaggcaccagatgccaagaaaccttcactctcaacaaacaacacaatccactaattatctgtagaattgttgtagttggtactcttcacattcacttactccttagcaaagattgctcttgaatggaaaggttgcagaaagagccaaagccaatttggaagaagtgagaaacttacaggtttgaggaatggtgaagtcagcgaaggatctagcctccttagatgatgaacaggcaaagtcagagaaggaaccacagtgagagaattggcagatgcccctaataaaatcacacaactcagacacacacacagacacacaaatattcatgcrttatacccattcaagtaactggatatttaattcattctatgcaatgaa

SEQ ID NO: 912627 - DNA, 620 bp, Homo sapiens
actctgaaaacagactaacaacaacaataaaggtgagtataaatattaaattacatttggcatatgtcatcttagtctcaaaakagttttgcaaacttgtaatttggaagacatgagtcatgcatgcattaacatagcttgtattgtcttaaaattattccagattggttccacattatggcagtaaacaagtcacctcaaatgtctgtagttattgctgtaattgatcaacttgtcaaagcagaaagtgaaagaactcagacttattgagctactcttaagttacttctgcagttggtgactgagctacctgctgagtggatagggacctgacaggtggaattgtgcagacagtagctatgggacattgggtttccttctttgaaaactatcaggtccagaagtcacatataactccaacttccaagtttttcaatgatacttcttcacaagtgagatcactgtttctaaataaaataaaagaatggactggataaagaaaatgtggcacctatacaccatggaatactacgcagccataaaaaaggatcagttcatgtcctttgtggggacatggatgatgctagaaaccatcattctcagcaaactaacacaaaaac

SEQ ID NO: 912628 - DNA, 603 bp, Homo sapiens
accatgccacagactgactcaaataatgcttttagaattctgatatattcttccaaagcaagttgtaatcacacaagtattactattcttgtatccaacatcccccaaagatgttaatcactcaaactactgggtagggcaatatgactactctccaataagtgaggttaatctttacattctttctaaatgatttaccaacttggctttgataactctatggcttaacggacataactggcttaaccatcatttcttttagaggtaattgctgtggtttgaatgtgtcccccaaagttcatatgttagcaacttaatccacagtgcaacagtgttgagatgtgggaactttgaagtgattaggtcatgaggactctgccctcatgaatgggttaatgtcattattattggagtgggtttgtcataaaagtgagtttgacgccctcttgccctctcttttccttccacctttagccatggaatgatgaatacaatatgaataatccaccagacgctggggcaccatgctgttggatttcccaacattcagaactgtgagtcaaataaatttatgttcaktattaattatccagtctgtagcat

SEQ ID NO: 912629 - DNA, 625 bp, Homo sapiens; identical to SEQ ID NO: 903458

SEQ ID NO: 912630 - DNA, 682 bp, Homo sapiens
aaatgcagtccaacatgaatttgtaagctttctgaaaacattatgagatttttcttgtgactttctttttagctcatcaattatcgttagtgttagtgtattttatgtgtggcccaagacaatccttcttcttccagtgtggcccagggaagccaaaagattggacatcctactgtatagagtgagggaggcacatcatcacatgaatggttgtataattaaactcatattaggcatcattaaacttctgtttgtagttggatatacttcccttaggagctggggaagacattttattttggaaatggctcatgcattgtttagaatttttttttaaataaagcacttaacacatgccaaatacaagaagtaggaagaacatttacatgatctttgggaagacagtattaagtaaaggtgaaaccaagaagtaatagtttctgccttctttgattttttaatttaatttaatttttttttttttttttttgagatggagtttggttcttgtcacccaggctggagcgtggtagcgtgatttcggctcactgcaacctctgcctycagggttcaagtgattctcatgcctcagccccctgagtagctgggactacaggcacccgccaccacgcctggctaattttgtattttttagtagagatgaagtttcaccatgttggcc

SEQ ID NO: 912631 - DNA, 622 bp, Homo sapiens
tttgacattttttttaaatttgatttttccataagttattggggtacaggtggtatttggttacatgagtaagttctttagtgktgatttgtgagattttggtgcacccataatctgagcagtatacactgcattttatttcatcccttctcctcctcactctcctccacaagtccccaaagtctgttgcatcattcttaagcctttgtgtcctcatagcttagctcccacaatgtgataccaccttaatcctgcaagaatggccataatcaaaacatatcctctttattaaactgtcttttcatgtatttgctcattttctatttgcattgtttttttactcgagatttgagagttttggatatattctagatgctaaaatgtcacacatacgatttgcaaatatttcctctcagtcatttatagatgacttaaagatgttttaaattttgacaaaatgcgatttattattttttcattttatgattgtcaagtctttaccttttttttacattgctctcttttctttttccttcgtttctatgagttactggtacatttaagttttagaattcctgtttgatttatttatagtatttttcagtgtatctctttatgtaca

SEQ ID NO: 912632 - DNA, 629 bp, Homo sapiens
cccagtgtaatatccttgcctatagatggtatttggactgttaaaggttttttgctcattagtaggatataaartgggttttcacttcaattttaatgtgcatgtctccaattacaataaaattaacccagctttttaaataatttcaactttagttttagatttaggcggcatatgtgtggatttgttacatccgtatattgagtgatgctgaggtttggagtatgattaatcccatcacccaggtggtgatcatagtactcagtagttagttttcaactcttaccctcctctttctcacccctctagtattccccagtgtctgtttttcccatctttgtgtccacgagtagttgatcttttgctcccacttataagtgagagcaaacttttaaacttttaagacatattttgataaacagaatattttaattttagtgtagtcaatttaatatatgatatataagatatggtttgtgttttatcgcattttacattaaaaattcttctctgcctccaaatcacaaatatagttccatatatttccttgtaagatgaagttcaattcctctatgtctgtttattcaactttattttttaaatgataactaatgttctaaataccattg

SEQ ID NO: 912633 - DNA, 610 bp, Homo sapiens
aaatctcaagaccttgccaaatgtctcttggggaacaaaagacactggtctacgtaaatatcctgtctctctgttgctgtctctctccccaccagccccataaataccccaaactacacatagtacatttctctataatatccttgaatctcctccatccagtcttgcctccctatgcccttctctcatcttgaagggcagtagttcagtagtaccttttggcaggaagccaggaactgcaaagctctggccagtaggagaatgtctgacccttatgtttaaatccacattagcaccgcaggccccgtgagagagtaaatgggaggagaggctgtcttctttcagagctagctggtaggtggtctgtttgcctttgttccagccctatgcagttctctcctgtgtttcaaaccacagcctgctgggctttgtaaatgtagcagtctttggtagaagatctgatctttcaaattatggaacctgggctctttttwaaaaaaaaaaaaaaaaaaaaaaccttcaacatagcaaatcagattgtactttgagatgaataatgaggagtccaaggaaagggtttcagaatcctgaaaggagcaattaaaaataa

SEQ ID NO: 912634 - DNA, 610 bp, Homo sapiens
aaatctcaagaccttgccaaatgtctcttggggaacaaaagacactggtctacgtaaatatcctgtctctctgttgctgtctctctccccaccagccccataaataccccaaactacacatagtacatttctctataatatccttgaatctcctccatccagtcttgcctccctatgcccttctctcatcttgaagggcagtagttcagtagtaccttttggcaggaagccaggaactgcaaagctctggccagtaggagaatgtctgacccttatgtttaaatccacattagcaccgcaggccccgtgagagagtaaatgggaggagaggctgtcttctttcagagctagctggtaggtggtctgtttgcctttgttccagccctatgcagttctctcctgtgtttcaaaccacagcctgctgggctttgtaaatgtagcagtctttggtagaagatctgatctttcaaattatggaacctgggctctttttawaaaaaaaaaaaaaaaaaaaaaccttcaacatagcaaatcagattgtactttgagatgaataatgaggagtccaaggaaagggtttcagaatcctgaaaggagcaattaaaaataa

SEQ ID NO: 912635 - DNA, 716 bp, Homo sapiens
ctgttagatgaggtaatatgacatcatcttaagggccactaaaaacctgactctaggattcaccaagtcctaggattgtattctgtctcygccaggtatttgatgtatagattttaaggctcattttcctctatacaatgggaacaatagtagaactatttccatggtagccatggaatagaatgagatattataactacagtcattccagtaatttgctaatcattcttctgatgatttagttagggagttagagcttttaaaagatagctgtttgttttattgtaagaaaatatacctgagacctctgttgagaggagtcaggaagggagactattttagcatctgtttcacaaaaatgatacctgaacttttgtaaaaaagaaaaaatcttcgaacacttaaagatctccattccctttttttgtcatgaaataaataaattgtccactagaaagttggtaaacaaagcagtagcagattgtaaactctaaatgcatagtgaatttccatgtttaggaattcatgccctccaaataatcatagatttatataatcatacagctaaggatatattaattgcagtattatttctctaaaatgtattgaagcataatatatacacagtaaagtatacaaatcagatgtacacagttcaaattattttcacaaagtgaataaatgtgttcacccagctcaagatacagaacaactct

SEQ ID NO: 912636 - DNA, 563 bp, Homo sapiens
caatggtgttctaatcatgaaagtggttagaattaaaatggagtcatttaagctaacctgtagtcccagctactcrggacgctgcagtaggggattgcttgagctcaggagtttgaggccagcctgggcaacatagcaagaaatagtgccacatatctacaactatctgatctttgacaaacctgacaaaaacaagaaatggggaaagtattccctatttaataaatggtgctggggaaactggctagccataagtagaaagctgaaactggatcccttccttacaccttatacaaaaattaattcaagatggattaaagacttaactgttagacctaaaaccataaaaaccctagaagaaaacctaggcaatcccattcaggacataggcatgggcaaggacttcatgtctaaaacaccaaaagcaatggcaacaaaagacaaaattgacaaatgggatctaattaaactaaagagcttctgcacagcaaaagaaactaccatcagagtgaacaggtaacctacagaatgggagaaaatttttgcaatctactcatctgaca

SEQ ID NO: 912637 - DNA, 563 bp, Homo sapiens
caatggtgttctaatcatgaaagtggttagaattaaaatggagtcatttaagctaacctgtagtcccagctactcaggaygctgcagtaggggattgcttgagctcaggagtttgaggccagcctgggcaacatagcaagaaatagtgccacatatctacaactatctgatctttgacaaacctgacaaaaacaagaaatggggaaagtattccctatttaataaatggtgctggggaaactggctagccataagtagaaagctgaaactggatcccttccttacaccttatacaaaaattaattcaagatggattaaagacttaactgttagacctaaaaccataaaaaccctagaagaaaacctaggcaatcccattcaggacataggcatgggcaaggacttcatgtctaaaacaccaaaagcaatggcaacaaaagacaaaattgacaaatgggatctaattaaactaaagagcttctgcacagcaaaagaaactaccatcagagtgaacaggtaacctacagaatgggagaaaatttttgcaatctactcatctgaca

SEQ ID NO: 912638 - DNA, 606 bp, Homo sapiens
aaaataagtaaacattgatgatgatgaggctgatgatgaaggtggcgatgggtcacattcagaggatacaggaatcctgggatgtcttttggggaaaaatgaccaataaggatgaggctctgcagatggattttctctggccagtcctttttcctgaccacatccgctccacttgatgaatgacttggtccttcttgagatcttcaataaaaatagctctctgacccttgtttttgtttttctccatttgacagcagagaactaggagaaaggagagtttgctattctcaccatatctcaaaacagttaactgaaagctcagctggacgtcactagggtttagtctcaagacataagcctgacttctcagttttcagtgtgggtttctcagcagttgggtttgagagtggtaagactctagaatccccaaccagatgatctgtcccgcctaacagaaaaaggtgatgctgcccttatatataaagctcagatctttgargtgtctgttttgttcagaatatttcttttctaaccacctttaaaatgaaatatgtattcttcagacatacaggccagtgctaaccaaatattttcatcatacagatt

SEQ ID NO: 912639 - DNA, 623 bp, Homo sapiens
aggacaaatccaagttcaagacaagctgagcrctgttgttaatctattaaaccatcccactatgccattaacagaccaaaaagaataagaaagaagatgacttgaaggtcattattggtcattatgtccatgggttatccacgtgagccggagtaactaagaaatagcaagtaatgtcctgtggaactcaggattgaatctgaatcgtggctaaataattttctggttatgtgaccttgtgcaagtcactaagtcttgggaaatctctgaaaaacagacataatagcaatgcctatgtcacagcattactgccatgagaattttatgataaaataagcttgcattgctgcaacaactataaattttcatatgagtttcaacagattaatgaaaagaaaagtgcttttgacatggcatgtatgcaccattgttctctggcttgtgaataaggagtaaagatggaggcaaaaatggagatggaagagctatggtaaggggcctgcttccaaatggaataatgaaaattggcaccaggtgaccacaaggttggcagtattcagtacttagtagtgatggaagaaattaaaccaattagctactggaaaaacagcacccatagaaag

SEQ ID NO: 912640 - DNA, 610 bp, Homo sapiens
agaagtctggcagacttatggacttgggaaatgagtgagtttgtaggacatcatccagggcccactggaggtttgggcttgatgattaagtgagagcaaaaggcacgtgtgtttctctctggctgtgctcagccacctgactgcaggagcagagggagcgggtggctggctttcagcagagtgcagttttgccctgggagcacaattaattgtggggcaagagagtggagagtgttagagagggtggatgacaggctggaccatatagtctcagctgggaggaggggaaatttgcaagaaacagagtgagacacaaaagtgaaaatttggagtcattgaagtgtcttggagttgggaggcagctggaaaaaggaaagttgtggtcaaaaaaagcgtgtttgaaattgagagtctggagtagctacagtttctgcagtgacaagaatatacaggtaggagtgggtgactcagggagggtggagacaaggtctctaggggtggagggaccaagagccagarcatgaggaggactctctatgtgcatgttggaatcacctcagcaggaaaaagtgcccatgaactgggagctaagtcttcaatgcatagggat

SEQ ID NO: 912641 - DNA, 603 bp, Homo sapiens
taatgctcacttggaagtagtccatttaatctttaatgaaggtctatggtatcagtactagtattatctttgttttacaaaaaaaaatacaattcaggcatcaagttagtaacttccctagggtcttactgctagtaagtggccaaatggattagaacctaagacatagtatcagtgtccacacatttaaccagaatgctatattacttcacagaagagatctgatagcttctacagattagagttagaaaatatttaggacattaagaaagaaatgttagttcacactggagtgaagtggcactggaaaagacaaaacaacatcaaaaagagaagaccagagcttgtgtctgtaggaaaggtgataagtgaagccagcatgaatttgtggaatatgtaagaattttccagggataatcagaaatactagggaaagagaaggccatagaagacagaacttgcaatcagctagaatgaacactcattaacttagatagtactaaagagaattcytaggggcttgagaactttcaacttggaagcattctagaaatgaaaggctaatttattatttaagagttcttgcctcctgatatgtgcttg

SEQ ID NO: 912642 - DNA, 532 bp, Homo sapiens
tgacccccaaaccaaagatagacttgctagatctgaaagtcaccattagttttgcyggcctgttgcctcttgaaaccagatataaaatatgacaaagactttgcccaggaaaggaactttttatgagtttagaattttaggataataaaacacagaactaataaaaggaaagtcttcaacgttccaaatactcatctctatcattttcttggagagaaccaagaaagccattgtattatatggctttgtagtatagaaaagaaaaaagtgagtctatcatttagggcccaaatgtatggatttaatgaatctccatgggcaaaaagagtttttaggttttaggttaaataacaaaatgtgaagagaattgctaattctgaagagagcctagattcagagaaattttattacatattaaaaatgcttcaaagaagaaatgaattagatggggatgtaaactcttatcacacctcactatgctgctctaatgatttctctattaacaattccttcatagataaagctgaatata

SEQ ID NO: 912643 - DNA, 609 bp, Homo sapiens
tgagaatctcaggaggtattcagcatctataaactggtaaagcaaaatcagtagatctattttctttcagtaacaaaatctacagaaagagaagtgctacaaaattttgtgactattgggcatccataaaaatctactgagaagacattttggggaacccaagttataaaaataacgattgagaaatattcctatcacttatttttctttgcatttttatttgctattctctacttacgtggttagaaaattatattcacaaagaacataacaaatatatccaagccaagagttaaaatgctttgaaagacggaggatcttgagtcctttcctataagtaacatagagtacatgtaatgtagacaacatattttgtatcatatgcagtgtctgtgtgggaggtgacctcatgggctactttccagtacaagcacagtattcctcattctttgtgtgccctccattctctactctcattatttactcttttcctggtctgaaacactcctacctactttgagtaccaaagctttacgcttctccaactttcgcctcaaatgccacctackctccccttcttataatgtaagacttcctccagagtctagt

SEQ ID NO: 912644 - DNA, 595 bp, Homo sapiens
ttggtctctgatgctggtagtttgggcactcagcagcagctgtagccaggtcagccttggtgagtggaaatccatgttgctgagcctgtgcataacctctatccctsctgccatggccactttgttcacaagcccattgcatgatgatggagttactgggaaaaaaggctgactggtatccacagaacaggtcatcctatccacttgattatgaagatccttctatactaaggtcaccctttgtgagcattcacgtgagatgaaatatcttaacatttttcactcagagaaatctatccacatagctgtttcccaactttgcttatcaccagttttccaatcacattccctccaagtccctgaccatctgatgaaagcactggctacggcctgtgcatcaggatgtaatcccatgtctggacatttctccttccaagaaaagtgagcaaaaagttgtattccttgtagttctgcccgccgggtaattttccttcactaatgtccttcagggatgttccaggacggggacgtagcactacagctgtccatttttgggtgatgcctgcatatcacgcataatcatctgtaaaccagg

SEQ ID NO: 912645 - DNA, 595 bp, Homo sapiens
ttggtctctgatgctggtagtttgggcactcagcagcagctgtagccaggtcagccttggtgagtggaaatccatgttgctgagcctgtgcataacctctatccctgcygccatggccactttgttcacaagcccattgcatgatgatggagttactgggaaaaaaggctgactggtatccacagaacaggtcatcctatccacttgattatgaagatccttctatactaaggtcaccctttgtgagcattcacgtgagatgaaatatcttaacatttttcactcagagaaatctatccacatagctgtttcccaactttgcttatcaccagttttccaatcacattccctccaagtccctgaccatctgatgaaagcactggctacggcctgtgcatcaggatgtaatcccatgtctggacatttctccttccaagaaaagtgagcaaaaagttgtattccttgtagttctgcccgccgggtaattttccttcactaatgtccttcagggatgttccaggacggggacgtagcactacagctgtccatttttgggtgatgcctgcatatcacgcataatcatctgtaaaccagg

SEQ ID NO: 912646 - DNA, 578 bp, Homo sapiens
atttttgtttttcagtagagacgggatttcactatgttggccagggtggtcttgatctcttgacctcgtgattcacctgcctcagcttcccaaagtgttgggattacaggtgtaagctactgcgcccaggctttaatgttttatttcaacaaaaaatttacttaacacaaaacaaactgcagggctgatgaaaatatagttcagaagaaaagttttagcttcatcttttcctctcttcactgacctgctataccagtaaagatattgtcccaaaattttaagttctatattggcttcatggagactttagtcttcaattttacttatggtaaagagaggttaaggacatcagttcatacgtaccaccacaataataacttcaagtgaaagccactataaaccacaatagaacacttacatgtcttaatttttatatggttgtacttttttccccttaaatctctaagttattttattgagaacagtcatgtgtcatctagtgacagacatgcagtcagagaactgcatcattaggcaatttcattgytacaggaacatcatagtgtgtactcacagaa

SEQ ID NO: 912647 - DNA, 634 bp, Homo sapiens
tcctcagacaactagtcactgatcatctgagtcaagtagcattcctcactccaccccatcttcccggcaggtcacgttctactactctgttttatttttgacacaatatttatagttgcacaaacaattttttggcaatgattctgtcttattccacatgatatccccataatctagagtattgcctgatggatagtagggcttaataaacatttcctgaacgaataacgaataatgaatgaatgaatgaatgaatgaatgcacgttcttcatctttactgtggacacagatggaatccacctagactgatctttatcaataatatgcttcatggccactcgctaatgttgcagcaaaaatgtaacatgagttcaacgtgtatcagtataacttagcctctttcgttttgtttttgggtttatgactgcatgagtatatctgagttcgtataaacatcctgtaaataaagaagggaactgttccctgataactttctcaaaaaaaaaaaaaaaggtgctagagatcttgtagggtctaagttatattcaaactgargttaatgcctggggccaatatttaccagaattatgatggtggctttctgggtatgcagtggtctttcacaggtggcca

SEQ ID NO: 912648 - DNA, 671 bp, Homo sapiens
aatatatagccaaatacagaataatgtagcacwgtaatcgtggtgcacaagtaacccataaccttaatatgaaaattaaaaaatgaaagtattaagaatagctaaaaccacaaaaatttggtaacagatttataatagagaaaaaagtaaaatctgacttcaagaacaagaacgggggaggagaaagttaaattcagtttttatatgcaattgaacttaagttgttaacaagttaaaatagttggttataactacaagaagatttatacaaacctcatgttaactacatattgaaaacctatagcaagtacacaaaagatagggagaaatgagtcaaaccaaaccactacaaaaaataatcaaagaacaaaagagaaaacaaaaggggaagagaggaataaaagaactgcaacacagtgaaaaaactgcgaacaaaataacaatagtaagtccttacctgtcaataatcactttaatgtaaatgggctaagtcctcaatcaaaagacatatagtggctgaatggattaagaaaaggaaatcaacaagatgcattcatattctgtcatagagactcactttagctgtaaggacacaaatagactgaaagtgaagggatgggaaaagatattccatgcaaatggtaatcaaacctgcaaataataaccaagga

SEQ ID NO: 912649 - DNA, 577 bp, Homo sapiens
cgattttagatctttcctgctttctcatgtgggcatttagtgctataaattttcctcttaacactgctttagctgtgtcccagagattctggtacattttgtctttgttctcatttgtttctaagaacttctttatttctgcctcagtttcattatttacccagtagacattcaggagcaggttgttgagtttccatgtagatgtgcagtttgagtgagtttcttaatcctgagttctaatttgattgcactgtggtctgagagactgtttgttatgatttctggcttttgcattttgctgaggactgttttactttcaattatgtggtcaattttaggataagtgtgatgtggtgctgagaagaatgtatattctgttgatttggggtggagagttctgtagatatctattaggtccacttggtccagaactgagctcaagtcctgaatatccttgttaattttttggctcattgatctgtctaatattgacagtggggtgttaaagtctcccaytattattgtgtgggaggctaagtctctttgcaggtctctaggaacttgttttatgaatttg

SEQ ID NO: 912650 - DNA, 566 bp, Homo sapiens
aaactaacaaggcttttatggtagaagggagcatcgaaatctgaggccttctgtgccttctctccccgctgctgtgatggcagctggcaactgggccctactgtccrttaacaaaacagagagacggataactatccagccgaggccagcttcctcacaccaggcagatccacagtggactctcaggaatcttcagcaccctttacaccagcagtggtcaaagtggggggtgcagctgccttgggactgagagatggggatggacacatctgcagggaggggtcaggctctagcccctttccccaggccaccactcctcagaggctggtcctccaccccagcttcagggacaggggatgcatggtggaaaccactgcagctgctgcattagcaaccttcaagagccaaagattctcttctctctagccagagagggaaggcaaacaggttagggtgacctgcagctcagggtcggccccaggccaggccactgcctgtactgactcctgggcctctatgcagtgcactccactttctagggcaggctgcttgccaaggattcacag

SEQ ID NO: 912651 - DNA, 620 bp, Homo sapiens
ataagaagacttctaaaaatatggataaaagtgaaaataaaaacacttgccaacacactaccaagtaacagttattatcatattgtaatttattatgatagcattttctgcatgaatatatatacatttcttcctttcaagaatagatttttactcatgaatcccttttcacttaaaacatcatgactttttaatgtcattaatattatcttataatctgcattagaataactatatatcattctatgaatgcaccattaattgactccagttgttcatttagacgtttagagacttttaatgagtattccttatcattgtgtgtatgtgttatttctctgtttaaaatggggggtttgcttctgaatttctttgggaacttaatttaatagtatattactagtagggtttcaactttttaatttactcatatattacaatttcaaatttcaagaaacaataggagttaggttttggttgtgtgagcatmataaaagaaggtacaccacgaactcctcacattcttactaacttatagtcctttgcatttattttgcatatgtttttaaacagaaaagaaaatgagtttctttcttattgtcaagtgaatatattacacc

SEQ ID NO: 912652 - DNA, 636 bp, Homo sapiens
aaagagaaaagacattatttacagaagcataraagtcaggcaaatagcagattttcagtggctaaaataggctctagaagcacacccacccagattctactgccaaaaattattatcttcagtgcttaggataaaataaccatatcaaaattccatttccaagtaaacaaaccattgaaaatgaggttgaaagcaggacagtgttagagatgtaaagactaagagtgtttactagttgcaaactcagcccagtgtaaaggatattcctcaatacaatcaaacgtgaaacttaaggaaaaagtaggatcccaaaagatgatgagcaaagaaatcagtaaagcatgctgatgaatctaaatgagagttgacatgaaaaaaaaattgttattggagattttaaaaatgccttggaactgatgtatttaaaaacaatacatatatattttaaatcttttataacatcatatagcttgggaagaaaaattgaaatactgattaatcttagagtttattaagataaacatgcattgtcaaaatttatgggcaagcactaaaataacagatataataaaaataaatttcaaagtagtaaagggtggaaaaagagtaaactcagtaaagcaaacaggtaacgtg

SEQ ID NO: 912653 - DNA, 606 bp, Homo sapiens
ggatacaagattaatgtacacaaatcagtagctcttctatataccaacagcgactaagcagagaatcaaatcaataactcaaccccttttatagtagttgcaaaaaaatacttagaaatatacctaaccaaggagtcgaaagacctctacaaggaaaactacaaaacactgctgaaggaaatcatagatgacacaaacaaatggaaacacatcccatgctcatggacagatggaatcaacattgtgaaaatgaccatactgccaaaaacaatctacaaattcaacacagtccccatcaaaataccaccatcattcttcacagaattagaaaaaacaattctgaaattcatatgggaacaaaaaagaacctgcatagccaaagcaagactaagcaaaaagaacaaatctggaggcatcacactacttgatttcaaactatagtataaggccatagtcaccaaaacagcatggtrctggtatcaaaataggcacatagaccagtggaatagaacagagaatccagaaataaacccagatacttacagccaactgatctttgacaaagcaaacacagacataaagtgggggaaaagacacccttttcaa

SEQ ID NO: 912654 - DNA, 617 bp, Homo sapiens
acctttcattaaaactcttttattctttctgctttgctataatgaaaaaatcttaacctgtcacacctgtagtgattatagaagggtctcaactctggtggggagagaagctcagaacaggcatgtataattttcaaagaccacataactgcttcaaaaaaaatgacagctgtcaccaacattttacatccaaaaacaagtttaattgttcagactggtgttttaaaaagctccagttattggaaggctcctcaatttttgtatagccagagactcaaataactctaggctagaaggttttatttactgatgagagagggcatattcaatatcaaaaaattgtcatttttatttgtttgcattgaggctgagactaaaaagccaagcagcacaccaaaaggagaaaatttactgtatgcaaattaaaagctaaaataattgcctgccatgaaaagaaaagtgaagcacaggagcctgaggtaggccatayttgacttactcatctttagaacaatcttaatgcccatcgtttcaccttccacatagtaaatagtaaatgtctggtgcatgaataagaataagaggaactgaatagacatttctcaaaataagatata

SEQ ID NO: 912655 - DNA, 656 bp, Homo sapiens
aagcctaggtttggagagtggctctaccatttgctacttagaaggccttgggaaagtcatatcacttcaatgggattaagtttcattatttgcaaaatattaaagtatctatattttaaagaaatttgttttatgttttgaagatattataaagcttaaatgattacctatccccacaacctgacacataattggctctctataaaacatgtaaatatgaatattacacatttaacctttcatgattttatttcacttcttccttttgatttaagtaactcacctcactgcctatgcacttaaggttaataaatactggaaacaaattggaccctaattatgttcatgtcatctctgattattttttcctaagaggtctctagtgaaatagtcacttatttctgtcaattagcttagatcttaaacatataatgtttattatttatgtacacacttttgtaaactttggcaattatttagactcacaaaatgacatttcataatggaaggcataaatattcatttaagcaaaacaatagtaacttaataaatattctaatagctgccaccattaatggatattagccaagatattgagctataatagataatatatctgaggaygaagaagaggagataaggagggaataaaacaa

SEQ ID NO: 912656 - DNA, 673 bp, Homo sapiens
tgtgggtgcctttactttatgccaatagatcattgtctaaaatctcgacrtatgctgtttttcaaataataaaagtgcattaattattttgtgatgcgttataacattttctgctatctttttttatgacacaaatctaattagtacatattcttgagacatctaaagtaagaaactttattaaacattttcaaacttcttcctgagctagtagaagagcaagccaaatgaatttcaagtgacattaaaaataatcacagcaaaaggcttgagaaaaggaatgacatagtcagctttaaatatgtatattcctatcacatgctaatcatacttgcaaaaattgtagaattgcttatttggtatcattacttgcttgaactacttactacattcttgaaggtaattagtcctcagtaaccacacttccatgtattcttctttaaatagaatacctttgtatctaaagttagatatagagaagttaccttctttaaatagatgcctttatatctagagttagaacttaaagagaaatatctccataacagccaaaaaacccagatgtagcgtattactgtactctactatgttcatatttttttatttttcaacacgtaacctaacaggaaagaacatgtaaataaataatcactaaaacaaaatcatgttagat

SEQ ID NO: 912657 - DNA, 576 bp, Homo sapiens
ggctataggttttagatacatgttaggcaacattttttcatttgtctgagggctgaattgagggacatacaatagcttaccactttttttttttttttttttgtaaaacaagtgttgagatcagatatattcttctaccatttttgaacccccaccaactctgttccacaggaaaaaggtattaaagaggtacactggagcaattctctattccaacacattccctcttttctgctacaaaataagtgtaggaaacaactcatagaagaagggaagttcagtgcctctgggctttatctttgcacagtgcgttcctatggatccaaccttgtgatcttgtcctactgcagagatcacaggatttggtcttatgaggagagagccagagtgttaggtgttggaaccaatatatttggttgtgctggaattcccaatgcttacacaaagtctccttctggttccacactctgacaagatgagagcaaagtgccctgggtgatcccaagactcaggcactatgaatctatacttamatataccatcccctagtctaaatcagggctgtgtttcttgtct

SEQ ID NO: 912658 - DNA, 593 bp, Homo sapiens
aaaacgaaagaaatccacacaaagtatggactttagttaacaataagatattaacactggctcgctaattgttaacaactgcacccactgatctatgacgctaacaataggggaagctgggtgtggggtacacagggaccctctgtatcagccttctgatttttctgtaaatgtaaaactattctaaagataaaaaggtttttaaaaagtcagtgaacattcgctctattccactttttcttccttaaaaaaactgccttgcctaattttacatcattttagagatcaaattgcaaaggcagtaaaacatatctgtgtatcttaatattcaatttaactgaattagtcatgattaagctaaaattgttcaacataagaaactaaaaattaatagttaaaaagcttgaaaatattttattgagtgattaaaatatcaaataatttatataggatgagagatgtattacattttataagtttatgtaggataaaagggctaaattatctaagacaattaagaaagactatttagatagcaatggctaaattaatgaaataatactgcaaayaggaaaaacatcactaaagcaatg

SEQ ID NO: 912659 - DNA, 591 bp, Homo sapiens
cccttaactcttagctgggagaacccccagtcaattggctccgcagatctctctgcttatctgtgagagtacttagctccttgcaaatatctacatttcctgttccttattcactgttatatccataaagccttacacagtgcctggcccatgtttcctgagttgaaccttgccttctcagtgctgttaaacaagcacatcacctctaaagtcaaaatcccaagagtccttcaggcctatttctgagtgggagagaggattatcagaatattagcctttggctggaggtggtggttcatgcctataatgccagcagaggcaggaggatcatttgagcccagccaaggcaacattagtgagaccccgtctcttaaaaaaaaaaaaaaaaaaaaaaaaaaaaagctcactcacatttcattccaaaagaaaaggagaaagccatccagattttaatctcataaagatatcagkggaacagaattagaagttatcaaatttgttatgagaaaataaaaatgtctgaatctccaaacactgatacatttagagttagtgaagcaaggctggtaaaagtgggtaagcaagtagaag

SEQ ID NO: 912660 - DNA, 591 bp, Homo sapiens
cccttaactcttagctgggagaacccccagtcaattggctccgcagatctctctgcttatctgtgagagtacttagctccttgcaaatatctacatttcctgttccttattcactgttatatccataaagccttacacagtgcctggcccatgtttcctgagttgaaccttgccttctcagtgctgttaaacaagcacatcacctctaaagtcaaaatcccaagagtccttcaggcctatttctgagtgggagagaggattatcagaatattagcctttggctggaggtggtggttcatgcctataatgccagcagaggcaggaggatcatttgagcccagccaaggcaacattagtgagaccccgtctcttaaaaaaaaaaaaaaaaaaaaaaaaaaaaagctcactcacatttcattccaaaagaaaaggagaaagccatccagattttaatctcataaagatatcagtggaacaraattagaagttatcaaatttgttatgagaaaataaaaatgtctgaatctccaaacactgatacatttagagttagtgaagcaaggctggtaaaagtgggtaagcaagtagaag

SEQ ID NO: 912661 - DNA, 596 bp, Homo sapiens
aataaaagcataacaagattttcttagagcaaaaacctgcttatgatctgacctgtaagaaaaattgtaaaggcttataaaaggtttattaaaatcttacctatggtcaaactgattaagattgaatatatttgtctataaggttttattgaatatatttgtctattgggtgtaacatcaataatgcactaacacaacagtgacatttggcttacttggtataaaaatcatacaagaagcattgccaaatacaaaatggtgcttggtttttttttttggctctatttgtataaatgtgttattggtatatgttccaaaattatgggaaactcctctaattctgatatggcttaatgtatgttattaatagttataattgttatgtgaaattgctatatgccacagaagtgaccaaatttccatatcaattgtggccttaatagtggctgtcctaagactttttatcatccacagacaatttttgtcctgttttaatcctctttggaagatgattttatagtcaactgtacaattctaacaggtgttcttaaatgsaggtttctgataactttggagattattacgttagaatagag

SEQ ID NO: 912662 - DNA, 665 bp, Homo sapiens
agctggttattatgcagacttgattgtgtggttgctttatagtgtcaacgacctatatgctcaagtgtgcttttgtggtggctggtaacagtctttcctttccatatttagcactcccttaatgactgtgcaaggcagtaacaaattcccttagcatttgcttgtctgaaaatgatattatttctcctttgcttatgaaactagtttggctggatatgaaattcttggttggaatttcttttttcttttttttttttttaagaatgctgaggctgggcgaggcagctcaggcctgtaaccctagcactttaggaggccgaggtgggtgaatcacctgaggtcaggagttcgagaccagcctggccaacatggtgaaaccccatctctactaaaaataaaaaaattagccaggcatgatggcgggcacctgtaatcccagctattcaggaggctgatgcaggagaatcttttgaacccaggaggcggaggttgcagtgagctgagattgtgccacttcactccagcctgagtgaaagagcaagactctgtcaaaaaaaaaagaaaaaaaaaaaaaagartggtgaatataggcccctaagtctcttctggcttgtagagtttctgctgaaagttccactgttagcttgatagggttccctttgtag

SEQ ID NO: 912663 - DNA, 657 bp, Homo sapiens
catgagcggccatgggcaggcctggaaaaagcaccatctgattggccgaaaggcatcaaggaagttctcactcagggtctcgtactttacctggaactggaagcccagcccccagactttaggccatccctggcttgaaggtggggtttcagtggggacccaccccttgctgcctaggaacctttctgccttttgccaccatcaacatgccatccatggtgcccaggctgtctgcatcaaggggcaactgcaggcctgccttgagccaccctcagtcccccaacctccctcctgtgctcattggcacccaaagtttcagccttagaggttattttttgggggggtcgaggaagcagggggctggcatgtcagcaccatcctgagtgtgcacacacccagccgggtcacaacagtgcctgggcttggctgttgagacacatccatagtgggtgctggcagcagggagaggccaggagtgggagaagcacttctgagcctgcaggggcagggagcttcctgggtccctgggagcttcctgggttccctgagagcacagggatgcccaggtccagagccacagctgagtgactgcagctkcacccaggagtgtgggcttccactctgccaactctgtagggtgtgggactcccactggga

SEQ ID NO: 912664 - DNA, 624 bp, Homo sapiens
atgaaaagtgattccattatgtttcagtgattttatgatttgaagaagatccttctcaaatgttgtgtcattcattcgtgatacacaccaaggccccgtggcctggtgccatgtctacttattttctgatgtttggcctatggggtacaacatgctttacttcatgctgagctgtctggtgtttgctcagttcacaaagtcttgataagcctgtgatagacatgttgcaaatatgattcaggctgacccattgcaaatgaggcatcctcgggtcctggtgtctgatgttagtacacctgcacatcctgatgcccccacagtgcccgccagacgatctgcctgacctgcatgtgttcaggagagctgggctcccgctgctcaacagagagggcattgagctgggaagaagaagcaactaattctgccgtttaagttcgtggttttctttcaatcatttcatggctctgggcctcagtttctcaattggaaaatggcaacattwgtcaatataaatgtcacctgtgtttaaagatggattatttactttcactggatgaatgagggtttgtggtggtgaggtggctaaggcagttgtttaggctaggaatgcccagttgtcaattc

SEQ ID NO: 912665 - DNA, 643 bp, Homo sapiens
cacacaaaaggaaataggacaatgcatatgcactctatacatttctgaaatattgtgttaaataattttscactgatgacccactctgatggagaacagcaatggcacaattcatcaaaacattttaacaatagattaatttgggattaataaattagttagtggagcacctccttggtacttgtttttcgagataaagcagcaaatgaaagagatgaggtccttgacctttttgaggaaagtacaaaagcctgagatgggaatgtacctggaagattcaagaaaaatcaagaggtctgttgctttctgagctgggacacatgaaaggagaagatattagaaaggctttaggaacctcccatttctctatccaaagcatccagaatgattctgtaaatggggaacatctcaagagatgaatgaaagagggcagagaagtaaaatcatgggtgcatttctttttttttctctcagttgcatcttgactgtctcagttaagacactgagcatctttgcattcctggaagtctttgtcagcattctatgtagctactccatttcttttgagcttgtgggctgcaaagaatctaagataacacctgaggttggttctcttccaatattccagtattccaatactcaa

SEQ ID NO: 912666 - DNA, 603 bp, Homo sapiens
aataaacttctaaagaaatccaggaaataaaggaagagataaatatcttaagaagaaatcaatcagagctcctggaattgaaaaacctacttaagaactttaaaaatgtaattaaaatctttatcagtaggctggaccaagcagaagaaagaattttagagcttgaagactagtatttcaaactaacccagtcagacaaaaatacaggtttttttaaaataaaatttttgagaaatatgggattgcaaaaagcaaccaaacctatgaattactggcattcctgaaagagaaggagaaaaggcaacatatttgagaaaataaatcaagaaaaattttctaatctgttatcaaggtaaatatccaggtacaagaaatctggagaacacctgcaagatagtatgcaaaatgaacattaccaaggcatatagtcaccagactgtccaaggtcaatgctaaagaaaaaatattactggcagttagagraaaaggtcaaatcctgtacaaagggaaccccatcatgctaacagcagatttctcatcataaaccttagaaactaagagatacggggggcttattttcagcattcttatagaaaataaatt

SEQ ID NO: 912667 - DNA, 603 bp, Homo sapiens
aataaacttctaaagaaatccaggaaataaaggaagagataaatatcttaagaagaaatcaatcagagctcctggaattgaaaaacctacttaagaactttaaaaatgtaattaaaatctttatcagtaggctggaccaagcagaagaaagaattttagagcttgaagactagtatttcaaactaacccagtcagacaaaaatacaggtttttttaaaataaaatttttgagaaatatgggattgcaaaaagcaaccaaacctatgaattactggcattcctgaaagagaaggagaaaaggcaacatatttgagaaaataaatcaagaaaaattttctaatctgttatcaaggtaaatatccaggtacaagaaatctggagaacacctgcaagatagtatgcaaaatgaacattaccaaggcatatagtcaccagactgtccaaggtcaatgctaaagaaaaaatattactggcagttagagaaaaaggtcaratcctgtacaaagggaaccccatcatgctaacagcagatttctcatcataaaccttagaaactaagagatacggggggcttattttcagcattcttatagaaaataaatt

SEQ ID NO: 912668 - DNA, 630 bp, Homo sapiens
acacgccccatcgacatggatttttctatttcgaaaatataaacattactctttcttcatttgaccaatcaattcgagttttaaatttcttcctctacttagtacctttttttttccttgcaaatataggtttcaggaaactcagtagattccactcttgcctgggatacttagattaaccccctacagcctctggcaggaacaaaggcatggatgaaagagagaggagcgtggtgatacaaagctgactgcagagacacatggcttctgccaatgccagaggaacaggtgagccggctggacaagacggacactcagatgtcttgcttctcaaatgtcttgcttctcacctacctctggaggaaaactcagaggatgcctaggctcaaaccaatctttattatactggtgccacaacacagcattgcacctctttgatgccctacccccattccatttcatcttaaaaaaatacaattctttgcattgaatttattcccctcctcctcccacatatgttgatgaaaatcggttgatggtgatagatacaaattagccttgctaactaactggaaatcttccagggacatatcagcaatracgatttggaaagcagtatgctgtggagtc

SEQ ID NO: 912669 - DNA, 597 bp, Homo sapiens
ctaaggatatgtatcccataacatgttgtaaaccgcaaataaacacaataacatttatgtaaaaaaaaactttggtgacccctgatacgtactctatcaacacaatgatatcagactttttgatccttgccgatatgagggaagaaaataggtgtttcattttttatgaatgaggttgaaattttttttgtattttctttttgcacaccttgtatttgtatttttttacctcttatttttttcttgaggaaatcagctctttttcagtgtcatgagtaggaaatatgtcctcctatttgttgcttttctttttactttgatcatgaagtttgtttttagcatgcagaaatgttttttacgtgattaaatacatcaatctattgtgagttcagattttctgacatatttataaaaatcttacctatttttttttattttttaccttttaatgtttatacactggatccatttggaattttattgtaaaatgtgatgcagtgatgaagtcttattstttctccagaaggctagtttgttttatgaagtccccttttactgaagagaccatattggaaaaactaattagaaacatcatct

SEQ ID NO: 912670 - DNA, 571 bp, Homo sapiens
tagacactgggcactggggactaccagatggggaaggtggtaggtggttgagggytgaaaaactactcattggatactatattcactacctgggtgttgggatcatttgtaacccaaacctcaaagacatgcggtttactcatgtaacaaacctgcacatacacccattgaacctaaaatacaagttgaaaaaagaagaaaaaggaaaaacactgaagagttttacaataaaggtaaaacagtgccactcttctcacagattttaagaaaatgttcatttttttatgaaccatatgttcatgttagcatataatgggcttatttttgttaaaaaaaagggaaaataagaatcataagcagcatattgaagagggaagggactattacactaagaaggaagaaagggcatttgcagagggtggagttttgatgttgtttttgacgtcaaagatccaatgacctttgatgattatctgtggaataacctagattattgataaagctatacagaaaaggtactctaggagaccacccttgctgcttgcatcacatccctttagcttgccttgaa

SEQ ID NO: 912671 - DNA, 571 bp, Homo sapiens
tagacactgggcactggggactaccagatggggaaggtggtaggtggttgagggctgaaaaactactcattggatactatattcactacctgggtgttgggatcatttgtaacccaaacctcaaagacatgcggtttactcatgtaacaaacctgcacatacacccattgaacctaaaatacaagttgaaaaaagaagaaaaaggaaaaacactgaagagttttacaataaaggtaaaacagtgccactcttctcacagattttaagaaaatgttcatttttttatgaaccatatgttcatgttagcatataatgggcttatttttgttaaaaaaaagggaaaataagaatcataagcagcatattgaagagggaagggactattacactaagaaggaagaaagggcatttgcagagggtggagttttgatgttgtttttgacgtcaaagatccaatgacctttgatgattatctgtggaataacytagattattgataaagctatacagaaaaggtactctaggagaccacccttgctgcttgcatcacatccctttagcttgccttgaa

SEQ ID NO: 912672 - DNA, 606 bp, Homo sapiens
acccctgtggtaaacttctgcctggacatccargcatttctatgcatcttctgaaatctaggtggaggttcccaaaccccaatcttgacttctgtgtactggaagctcaacatcaagtggaagctgccaaggcttgaggcttgcaccatctgaagctacagcctgagctctacattggccccttttagccatgactggagtagctgggacacagggcatcaagtccctaggctgcacacagcatgggtacccttggcctagccaatgaaaccactttttcctcttaggcctccaggtctgtgattaaaggggctgacatgaagacctatggcatgccctgaagacattttccccattgtcttggggattaacattcagctccttgttacttttgcaaatttctgcagccagcttaaatttctcctcagaaaatgggatttttctcttctatcacattgtcaggctgcaaattttccaaacttttatgctctgcttctcttataaaaccgaatgtctttagcagcactcaagtcacctcttgaatgctttgctgcttagaaatttcttctgtcagatacactaaatcatctctctcaagttcaaatt

SEQ ID NO: 912673 - DNA, 631 bp, Homo sapiens
ttattttttaaaccatttgctgataatatcccctttcctcacagatttgaaatgttccctatattagatactaaattcctatgggcattagagtaacttttaggatcttaattctgtttctttgctttttcatgcattcttgtactagtgcgagaataattgttgaggctttaaagtacatcttaacatctggttctacaagttctactaccttccgtttacacatgtgttcttgtctattcttgattacccttccagatgaagagtaattttgaattaatgtttcaagttataaaacaatttccaatgggattttcgttaagttttttaactaattgtgagaattgtgtaatatagtggtttcaaatggtatcttgacccagtttgaggccctggctagagagtagtcactttttttcttgaacatttgattttgttcacaccccaatcatgtaccccaaactctgggccactatgcatcaacccaaattgccccatagccagataccaggcaacaagggccagtgcctagtcctcagagctcactgaaattattcacacyagccaatcttaaacctacttgccctgcttcacagtttcattcctgcagaaaccacaataaagggacgtg

SEQ ID NO: 912674 - DNA, 579 bp, Homo sapiens
cttttgaaagagggtggtaaaaagtcacacgacaaagaccgtgaatgcagggaggggtgaagaattggggctattaatgtaatcaatggttagatggcagtatttttaaattatttctagccatctcaatcaggtaagttaatataattaaaacccatcattaataatattggctttagtagaaacaatcatattctttctttttcattactttaattttaggggagctttaatatctggttgtacaggctactcttataattcttttttaagattttcttggttattctcacctacagtttttgttcttgcagaactttaggatcattttgagaagtttaatttcccatgggttttgactagatttgcactaacatctataaactatattgaatcattcaattcacaaacatgttacatctttccatttattcaggtcttcttttatgtaaytccataaaatttaatagttctctttccaaaagtcctgcacatttcctagtacctttatgcctaagtcatctatattgctgttgttatagtagatgtaatcatttttaatttttttcttttacttaa

SEQ ID NO: 912675 - DNA, 579 bp, Homo sapiens
cttttgaaagagggtggtaaaaagtcacacgacaaagaccgtgaatgcagggaggggtgaagaattggggctattaatgtaatcaatggttagatggcagtatttttaaattatttctagccatctcaatcaggtaagttaatataattaaaacccatcattaataatattggctttagtagaaacaatcatattctttctttttcattactttaattttaggggagctttaatatctggttgtacaggctactcttataattcttttttaagattttcttggttattctcacctacagtttttgttcttgcagaactttaggatcattttgagaagtttaatttcccatgggttttgactagatttgcactaacatctataaactatattgaatcattcaattcacaaacatgttacatctttccatttattcaggtcttcttttatgtaattccataaaatttaatagttctctttccaaaagtcctgcacatttcctagtasctttatgcctaagtcatctatattgctgttgttatagtagatgtaatcatttttaatttttttcttttacttaa

SEQ ID NO: 912676 - DNA, 606 bp, Homo sapiens
gatagttagctcttcttgttgcattgatccctctaccattgtgtaatggccttctttgcctcttttgatctttgttggtttaaagtatgtttttttatcagagactagggtggcaacccctgctttttttttgctttccctttgcttggtaaatattcctccatttctttattttgagcctacgtatgtctttgcacatgagatggttttcctgaatatagcatgtctatggttcttgactctttatccaatttgtcagtctgtgtcttttaattggggcatttagaaagtttacatttaaggttatttttgttatgtgtgaatttgatcctgtcattatgatgctagctggttattcttcccattagttgatgcagtttcttcatagtgtcaatgatctttacaatttggtatgtttttgcagtggctggtaccagtttttctgttccatatttagtgcttccttcaggagctcttgtaaggcaggactggtggtgacaaaaatctctcagtatttgcttgtctgtaaaggattttatttctccttcacttaygaagtttagtttagctggatatgaaattctgggtttacccacaaagggaagc

SEQ ID NO: 912677 - DNA, 569 bp, Homo sapiens
gggagcatgtgactgtggagtttaaatattaaaaggtcataattcagaaggggaagtagacttaattttaatggctctaaagtatagaactatgactggaggctagaatttatgagacattttaccataggttagtaaaagttgaaataaactaggtaagcaagtagtttataatttcttaaaatatgcaagtagaagttggatgtccacttgaaacagatgttgtaagaatattgtatttgatagggtttgaaatatatagcttctaaggtccttatcaattattggatccttatcagttatatgccttgatggttatataacactgatctccgaaccctaaagagcaatatttggttttgtaggtgtttacaattaatcacatttgtagatgtggtaatggttctagcagtcaataaacctacttcagtagatacgtatttgttttagcttaaarttttggctgatatggtaagttgattcccactgtttatgttttaccattttccaaaataaaagattacacatttaaagctattgggcaaaaagttaactgtttgagctgttaa

SEQ ID NO: 912678 - DNA, 611 bp, Homo sapiens
gagctgagacaggcccactcaggatttgttgagggaaagaagctggatagattgttcttgttagctcaggctggcatgtgtctcccagcaggtctcagcacaaatgggaaagcttcccaactrtagtgggaagggttggagctgagacttgcacccccaagatccactgtggggctgagtctggaaagcctggtcttgttggctcagagggttttacatctccccacaagatcctgcagagccagaatagttccctgatttcagcaggacgtaccagaactggggctggtctcccttgagatctgctgtagaatggaggccgaagaacttgatcattggctaagaggagtgcacttctcccagcaatacactgaaggctcctaaagagagaattttgactgcagatggatgcagaattcttgtcatgggggatatgaatgggtcaccttttattctgctattttggtgacatcactccctggatctcttttctatttacgctaagtctgttggtgatctcttccagttccattgcttataaattaactctatgctgtatcaggggaaccagcccccaatatttcaatgtaggttctttctattttccacaa

SEQ ID NO: 912679 - DNA, 538 bp, Homo sapiens
tggatcatttgaggctaggagttcaagaccagcctggccaacatgctgaaaccctctctctactaaaaatacaaaaattagccaggtgtggtggcaggcacctgtaatcccagctacttgggaggctgaggcagaagaatcacttgaacctgggaggcggtggttgcagtgagctgagattgcaccactgcactccagcctgggcaacaaaatgagactccatctcaaaacaaacaaacaaacaaaaaacaaaataaaataaaataataaaataagagacagcaatatcaactctgcctagtgaaaagttgttgagagagtataagtctgaaagttttttgtgaattctgaagtgtggcctcattgtcatacacattgttgttatgtgacatagtaagcagttgggcatgactttcaagtttctatctggggtagcatctttgatgccytacattatttgcttgaaagctcattacattagccttcttataacattgtatgaatggctgtgatgaatacattgaactatacctataaa

SEQ ID NO: 912680 - DNA, 617 bp, Homo sapiens
agaccacctcagcctggattttattgtccatattgctatcagcattttgggcaaagccattcaacaagtctcttaagtaaagttccaaacattttcctatttcttctgagccctccaaactgttccagtctctgcctgttaccctgttccaaagttgcttccacattttcttgtatcttttcagcaatgccccactctgctggtaccaatttactgtattagtcctttttcatgctgctgataaagacatgcccaagactgggaagaaaaagatgtttaattgaacttacagttccacatggttggagaggcctcagaatcatggcgggggagaaaggcacttcttacatggtggcagcaagagaaaatgaggacgaagcaaaaagcagaagccccaataaacccatcatatctcatgagacttattcactatcacgaaaatagcacaggaaagactggcccccatgattcaattacctctccctgggtccaagccacaacacatgggaattctgggagatacagttcaagttgagatttgggtggggacacagccaaaccctatcaacattgaatacaatctgtmgtatcaaatattgaaaattctagtgatgaaa

SEQ ID NO: 912681 - DNA, 602 bp, Homo sapiens
ctgatgctctccttccccctgcttcctgaacaggccccaatgagtgttgttcccttccctgtttctatgtgttctcattgttcagctcctacttataagtgagaacattcggtgtttggttttctgttcctgtgttagtttgctgaggataatggcttctggctctatccatgtccctgcaaatgacaacatcttgttcctttttatgactgcataatatttcatggtgtatatgtaccacattttcttatccagtctatcattgatgggcatttgggttgattccatatctttgctatttggaatagtgctgcaatgcacatatgtgtgcatgtatctttacaatagcatgatttatattcctttgtgtatatacctaataatgggattgctgggtcaaatggtatttctggttctaggtctttgaggaatcaccccactgtcttccacaatgattgaactaatttacattyccaccaacagtgtaaaagcatttctttttctccacagcctctccagcatccattgtttcttgaatttttaataattgccattctgactggtgtgagatggtatctaattaaactaaaatgcttctgcac

SEQ ID NO: 912682 - DNA, 607 bp, Homo sapiens
atgccgaacattttttcatgtttcttggccacttgtatatcttcttttgagaagtgtctgttcatatcttttgcycatttttaaagggggttatttgttttctgcttgttcaatttccttgttctatgtttgtattaaacgtatttaagaagcaagtcatcttggacctgtaataaagacaaacttaagttccttatagattctggatatcagacctttgtcagatgtatagtttgcaaatatttgtaggttgtctgtttgctctgttgaaatttattttgctgtgcagaagctctttagtttaattaggtcccacttaatttttgtttttgttacaattgtttttgataacttagtcatacattctttcccaaagctgatgtccagaatggtgtttcctcggtttttgtttaggattcttacagtctgaggtcttatatttaagtctttaatcaatcttgagttaatttttgtatatggtgatgggtaggggtccagtttcattcttctacatatttcattattttggacagtcagttatcccagcattattattgaatagtgactcctttcccccattgcttatttttgtatttatttagcttta

SEQ ID NO: 912683 - DNA, 607 bp, Homo sapiens
atgccgaacattttttcatgtttcttggccacttgtatatcttcttttgagaagtgtctgttcatatcttttgcccatttttaaagggggttatttgttttytgcttgttcaatttccttgttctatgtttgtattaaacgtatttaagaagcaagtcatcttggacctgtaataaagacaaacttaagttccttatagattctggatatcagacctttgtcagatgtatagtttgcaaatatttgtaggttgtctgtttgctctgttgaaatttattttgctgtgcagaagctctttagtttaattaggtcccacttaatttttgtttttgttacaattgtttttgataacttagtcatacattctttcccaaagctgatgtccagaatggtgtttcctcggtttttgtttaggattcttacagtctgaggtcttatatttaagtctttaatcaatcttgagttaatttttgtatatggtgatgggtaggggtccagtttcattcttctacatatttcattattttggacagtcagttatcccagcattattattgaatagtgactcctttcccccattgcttatttttgtatttatttagcttta

SEQ ID NO: 912684 - DNA, 607 bp, Homo sapiens
atgccgaacattttttcatgtttcttggccacttgtatatcttcttttgagaagtgtctgttcatatcttttgcccatttttaaagggggttatttgttttctgcttgttcaatttccttgttctatgtttgtattaaacgtatttaagaagcaagtcatcttggacctgtaataaagacaaacttaagttccttatagattctggatatcagacctttgtcagatgtatagtttgcaaatatttgtaggttgtctgtttgctctgttgaaatttattttgctgtgcagaagctctttagtttaattaggtcccacttaatttttgtttttgttacaattgtttttgataacttagtcatacattctttcccaaagctgatgtccagaatggtgtttcctcggtttttgtttaggattcttacagtctgaggtcttatatttaagtctttaatcaatcttgagttaatttttgtatatggtgatgggtaggggtccagtttcattcttctacatatttcattattttggacagtcagttatcccagcaytattattgaatagtgactcctttcccccattgcttatttttgtatttatttagcttta

SEQ ID NO: 912685 - DNA, 610 bp, Homo sapiens
gccattgcttttggtattttagtcatgaagtctttgaccatgcatatgtcctgaatgatattgcctacgtttccttctagggtttttatggttaggtttttatgtttcagtctttaawccatcttgagttaatttttgtataaggtataaggaaggggtccagtttcagttttctgcatattctagccagttttcccaatgccatttattaaatagggtatcctttccccattgcttgtttttgtcaggtttgctgatgatcacatggtagtagatgtgtggcattatttctgaggtctctgttctgttctattggtctatatatctgttttggtaccaagaccatgctgttttggttactgtagccttgtagtatagtttgaagtcaggcagtgtgatgtatccagctttgttctttttgcttaggattgtcttggctatatgggctcttttatggttccatatgaaatttaagatagttttttctaattatgtgaagaaagtaaatggtaacttgatggaaatagcattgaatctataaattactttgggcagtatggacatttccatgatattgattcttcctattcatgagcataaaatgtttttc

SEQ ID NO: 912686 - DNA, 647 bp, Homo sapiens
gcacttatcataatggattataatttatctctgtttatttgtctcctacaagaaactgtatgttccttcaagacagaaaaacttgcatgcatcttcatggcatgtccagtgcctttcacatgcctggcacagagcttatgttcattttttccataaacatttgtttaatgtgggttgaataaaggaacatgtaaaggaatatatgtgaaaaggatgggaacactatgcctacatgcccatctgtaagaaccagcatgacaaagaaggtagagaaaacctttaaaagtaatttatgtgactctactaataagtactgagaaaagaaagagaagataaaatgagtgtttgtggtaataaagtctacagtgagagtgttttgactgagcagggaagtagcttaaggcctgggctcaaataagcctatagctatgtcctgatctgagagagatgcagcaaattagcaatacttaataaatattgcatagatgaaggtgttggtgtgtggaagggtgggtttgaacagcagtcagcctcaaaaacaggaaagatgtgaaagtggaagagcaagaacagtctgatatactaaatrtttgtgatccacaccagtatattctaacaaattggctaggatgcagtaacctagaatt

SEQ ID NO: 912687 - DNA, 633 bp, Homo sapiens
ttggcctcccaaagtgctgggattacaggcatgagccaccatgcccggccaaaaactccaacttttagaggcctatttacagcacttgtcccatatttgttcacactttttctgtatgtgtgttgtgaattataratctggcttttcctacaaatgtggcttttcctgtgtagtcatcattaagcatgattctaagaagtagctcaaaatctcctaagaccaaaaaccacaaaaaacaaaaaaaaaaacaacaaaaaaccaaaaccagaaaagggatacattttgcagaataatttatattttcttctcttcatggcatcagttttctcaggagttctttttttgagatggagtctccctctgtcacccaggctgtagtgcagtggtgcgatctgcaagctccgcctcccgggttcacgccattctcctgcctcagcctccggagtagctgggactacaggtgcccgccaccacgcccggctatttttttttttgtattttcagtagagacggggtttcaccgtgttagccaggatggtctcgatctcctgaccttgtgatccacctgcctcggcctcccaaagtgctgggattacaggcgtgagccaccgcacccgggctcaggaggtcttt

SEQ ID NO: 912688 - DNA, 665 bp, Homo sapiens
ggtctagaattaagtgcctttgtagtgaattytgccaagtatttaaggagcaattaatttcaataatacataaattattccagctggtgaaaagaggaaactgtcttcaactcactttataagtattatataatccttgtaccaaccaggcaaggacagtataggaaagcaaaggcatcagccgatcatactaaattcattaatgtttgtagaagatatcatgaccaagttaactcagaaatgtaaggctggcttaacactcaaaaaaatcaaagtaaaggaaaaactacagtaacaaaaagcagatccatggtttactggggctggagagaaggtgagtattaactgcaaaggggcctgataaactttttgtggtgatggaaaagttctaaacctgtttattgtgttattcgcatacatttaccaaaacttactggactggatactctaatagggtaaattttattatatataaattatgcctcaataaacctgattttaaaatatcaaaataataaatctttatactaatttttaataatcatgtgatcatctcaatagaaatgcaatggagaaattttgataaaatttaacattgatctataataaaatctcttaataaactagaaatgaaacaaatctcttaacctcataaagactctcta

SEQ ID NO: 912689 - DNA, 699 bp, Homo sapiens
attaagtccacaatattaaaaaatgcttttttatcacccaaactagattccttggtgagaaagggggtatcttgttcactattatataaacagctaagcacaatgcctggaacatctacacacttaatatttttggatgaacaatttgtgaaacacactcagtttctagagctttgctacacagtcttatcttattctttctgcagccctgagagctaagcagggcagaaattattacttttgctatggctgccgccaccaccaatatcccagatgaggaagcaaggccaatggggttaagaacctgctcaatatcatagaacagtccattttaaaaccagggctaatgcctcttttgctgacttctaaaaggatgctcttttcattacatctgattcctctctgaggaaaattcaagttgatgtctcagactataaggacactcctctacccataagcacagagcttggagatgggggttgtatggcctctgccttactaagcttgcaagtggatgggacccagtgagcatggctgatacttggaaagcagggtgtgtaaacagttggataaatgccaccatccatatagccccagatgtttggcytgatgtgtgaacatgttaaatgtctcataaaattaattaagataaaaatgataacagttatgctatataccatgttaatttctaccagccag

SEQ ID NO: 912690 - DNA, 629 bp, Homo sapiens
tatatttaggatagttagctcttcttgttgcattgatccctttaccattatgtaatggccttctttgtctgttttgatctttgttggtttaaagtctgttttatcagagactaggattgcaacccttgctttttttttctctttgcatttgcttggtaaatattcctccatctttttattttgagcctatgtgtgtctttgcatgtgagatgagtctcctgaatacagcacactgatgggtcttgactctatccaatttgccagtctgtgtcttttaattggggcatttagcccgtttacatttaagattaatattgttatttgattctgtcattatgtgaatttgattctgtcattgtgtgaatttgattctgtcattatgatggtagctggttattgtggctgttacttgatgtagtttcttcatagtgttgatgttctttacaatttggtacgtatttgcagtagctggtactggtttttcctttccatatttagtgcttccttcaggagctcttgtagggcaagcctggtggtgacraaatccttcagcatttgcttgtctgtaaaggattttaattctccttcacttatgaagcttagtttggctggatatgaaattctgggtt

SEQ ID NO: 912691 - DNA, 541 bp, Homo sapiens
aaaatgagcaaagtatatgaacagacatttctcaaaagacatttatgcagccaacaaacttaagaaaacatgcttatcatcacttgtcattagagaaatgcaaatccaaaccacaatgagatactatctcacgccagttagaatggtgatcattaaaaagtcaggaaataacagatgctggagaggatgtggagaaataggaatgcttttacactgttggtgggagtgtgaattagttcaaccattttggaagacagtgtggcgattcctcaaggatgtagaactagaaataccatttgacccagcattcccattactgggtatatacccaaaggactataaatcattttaccataaaaacacatgtacaagtgtgtttattgcagcactgttcacaatagcaaagtcttggaaccaacccaaatgcccatcagtgatagactgsataaagaaatgtggcacatacataccacggagtactatacagccataaaaaggatgagttaatgtcctttgcagggacatggatgaagctagaaac

SEQ ID NO: 912692 - DNA, 604 bp, Homo sapiens
aacaccatgggacgcatatgaagtgccgttagtgatgctggaagtgctcccaagaagcagagaaaagtcatgacattacaagaaaaagctgaatcgcttgatatgtaccatagattgaggtctgcagctgcggttgcctgccatttcacgataaatgaatccagcataaggacaattataaaaaaagaaaacaaaatttctgaagtcatcactgcagctatgccagcaagcatgaatactttacactttttgcaaactccctttttatctcatattaaaaatgcagcgtttatatgtaagtaggattgctgtaagaaaggcatacctatagactctaatatgattagagaaaaagtaaagtaattgtatgacaactctgtcagcacactttttctgtgaagggccagatagtcacacaaaagtggccatagataatagataaataaacaggcatggctgtgttcccataaaactttatttacaaaacaggcactgggctgaatttagcccacaggcctttgtttcatggtccacgtcctagattaaaatgtagtttaatcaygctgggcatggtggctcatgcctataaacccagcactttggg

SEQ ID NO: 912693 - DNA, 679 bp, Homo sapiens
aaatcacagaggaagagcaatctgagcagggacagtgggtgaggagcttgctacatgtgtttggggtgcctgtgatacgttttacgggagatattcagaagggtagttgagaacgcaggagaaaagttagtgctaggcctgagactggaaagcaatcatcaaagtcactcactacagtcatgcaggagtcaggatgaactatccacacagtctatgcataataccacacctggtgtttaaggacttataaaggtcataaaaagctgtttgtttgtcctcaaatataaggggagcagaaggtacacacccagaacattattatgagcaggtataaacaaatatacaaaagataaaatatgtattaactgcatcagtaagtaagaagcagcctattggggttgtttggagtctgtttccccatggaatcaccacattaataacaatattactacaggctaattctcttggagttatatttgtctttttctgaaatttgacaaagtgctgaatctggcagtgcttgtccaagtaaaaccaactccatacagctttgcaccagctctgtcactaagcccccaaaatgatttagagataaaatacccttggaaatctgtgcactacgacttctsataaagtgtcatactttggaaaatggacgacagcatatcagcactttctt

SEQ ID NO: 912694 - DNA, 641 bp, Homo sapiens
tccttccatctctacctctgcatggaaagcattttgctcctttaactttgaaatatgaaggtgtaaatatacaatattgtaagaatggtgcttctaccaggtgcggtggctcatcctgtaatcctagctactcaggaggctgaggcaggaggatcacttgaggccaggagatcgagaccagcttgggcaacatagcaagaccatgcctctaaaaaactgaaaaataaaaaaattagccggccatggtgatgcacacctgtcgtgccagttacttggggggctaaggtgggaggattagtgagctgtgattgtgccactgcattccagcctgggtgacaaagtgagaccctgtctctttaaaaaaaaaaaaaaaaaagggtccttcttaatcattttgagattgcccattcctttcaaaatgtaatagagaaatggactctctgcccctttcaaagtctaataaatagagaaatggactctctgcctagaaaaatgcacacatggaatttaraatacattttgggctaccagggtacccctggctaagatctgatgtgtacccagagcctgtattaaaatttgttgcttcacaccatgccaccaattccctgcctctcctgacaaagtaccattaatgacaa

SEQ ID NO: 912695 - DNA, 623 bp, Homo sapiens
ttattgctttaactcaattgatatttgcatatacgtttgtgycagtaaatggacaaccaaaaaagcagaagtgataggaggtatgtaagatatttattgcaaataactgtcttacaaaattgtggggctggctagacaaatttgaaatctgtaggacaagctatcaaaaagggcatgctgaagctcatagcccaggctgaagccgctgtccacaggtggcatttcttctttttcaagaaaccctcatctctaattttaaggttcatcagccaattgattcaggctcatccggattatttaagacagtctgccttactaaatgtcaatttttatgaacattaatacaatttataaaataactttcacagcaatacctagatttatgcttgaaagactaactagaggctataccctagccaagttcacacatctaaaagaccatcacgatgccccattatcctgttagcagacaggagacgagaaagctgagttttgttagtcctgtatgcatctgagctcagacattcataaatcattcaactctaaggtaaaatgaaataaatagaattgtaaatagtgactctcaggagtcaccgttagtaaccaaagaaaaaattatgatc

SEQ ID NO: 912696 - DNA, 618 bp, Homo sapiens
ttattctctatataatggagagctctggaggggttttatacagaacataatataatataaattatttaatacatgtgaaaagacttagaattgtttatgtcatgtagtaagccctctataatttcttgttattattatcatcatcttcatcagagcaatgtttattaatcctcttaaaagaatttctacctaatgttcatattctaatgtacaaaactgtgagtttgcttttggtattttcaaagcactttctttgcaaaaacaaattgcaggaaagttgctcccagttttagtctcctactctgaaagaagtctggttccaaagtcaaccacctgctttaatctccagaactcactccaagttaaaatcactcaactccagtctatcaccaaacacgaaaaatttcagtttaaaaggatctccagcatctgtctggcaccatggtcgacaaagccagagtgagccagggctcctgcttatatgaaaaggaggagtctgagtatatttgcctggtgatctttgcaaaaaatgaagagaygaccacagaggagacccagttcagggaagtggagaaatgagcaggcagctctacacagaccacaaaaagttaatcaggc

SEQ ID NO: 912697 - DNA, 563 bp, Homo sapiens
aaaaggaatgcttttacactgttgatgggaatgtaaattagttcaaccattgtggaagacagtctggcaattcctcaaaaatatagaggcagaaataccatttgacccagcaatcccattactggttatatacccaaaggaatagaaatcattctattataaagatacatgtggccagggatggtggctcatgcctgtaatcccagcactttgggaggccaaggcaggtggatcacctgagatcaggagttcgagaccatcctggccaacatggcgaaaccctatctgtactaaaagtacaaaaattagccaggcgtggtagctgggcacctgtaatcccagctactcaggaggctgaggcaggagaatagtttgaacccaggaggcggaggttgcagtgagccaagatcacaccattgtactccagcctgggtgacaagggtgagactccacctcaaaagaaaacaaaaaaagatacatgcacaygtatgcgcattgcagcactattcacaacagcaaagacatggcatcaacccaaatgcccatcaatgatagactgtata

SEQ ID NO: 912698 - DNA, 627 bp, Homo sapiens
tcacaagactgcaaacaagatgctgtttggaccatgttcctatgtgaagatcataaccctccacttggtcctcctccatgctcctccatggcctcaactcctagagktcctctccataggcagttacaacatgacagttaccttcttcaaggccaccaggagaatttctcaattcaatccgctaaggcagagtcttctataatgtaatataatcaagtgactgattaccccacatcctttgctatattccattagttagaagcaattcagaggttcttcctgcactaaaggaggaaggattattcaaaggtgaactcactggaggtccctctagggtgtgtctgtcatggtagctgcattcatttttggttggttcttcctgaaattcttttgcataaatgtgtagatacacatatattttcttttagcctcttctttcttatatgatggatacgagaccatagatcattttgtactttgctattttcacctagcagtagatgtgggaaatcatttcatataaagagatggagatcatttttcttttttttttcaaaatatgtttaatgttttcctcccaacttggagaggtcttttctggtggctgtctcagtggggtctaagccc

SEQ ID NO: 912699 - DNA, 612 bp, Homo sapiens
acccagaacttccaatactatgttgaataggagtgttgagagagggcatccttgtcttgtgccagttttcaagaggaatgaaagccacagtctttttacaacctacactagaaagtgatgccctatcacttctgccatattctgttcattagaaggaagtgactagatccaacacccactcacgggaaggaaattacctagggatgagaatatcaggaggcaggcatcagcaagtgccattttagaggctacctgccacaatgaccatttgtttattttcccaacacagtctcaatctatgcctttaaatatttgtcccggttaggtttcttctttccctgtttctcttttcttcctttccctctaatttctatacaaataaaactataagctataaggtggggccaaacacgcttgaaaaaataaagaatatttacatagtcaaaaaatactccccttagtatacatatttattacaaaggggaaaaaggtagctttacagtggagaagtatggcagacatcacctgaatttgacracaaaacctaactcatcagccacaggacaagtcgaaagcatgtacaacttgataggatggaataagaagaacaca

SEQ ID NO: 912700 - DNA, 501 bp, Homo sapiens
ggcacaatgcagccaggctgtgctaaagcgtagcaaaagtgacctttactgcagtttccaataagttcctgtcctgatttccatctgagacctcctcagcctggacttcactgtctatatcactatcagaattttggtcacaacaatttaatacgtctctaggaaattccaaaccttgttgcatctttctgtctccttttggatctcccaaatggttctagcctctacctgtttcccagttccacatttttaggtatctttatagcagtgtccctcttcttggtacaaacttttatattatttaatccttttttttttttttgagacggagtctcgctctgtcacccaggctggagtgcagtggcgcratcccagctcactgcaagctctgcctcctgggttcacgccattctcctgcctcggcctcccaagtagctgggactacaggcacccgccaccacgcccagctaattttttgtatttttagtagagatggggttt

SEQ ID NO: 912701 - DNA, 622 bp, Homo sapiens
agcacaggatctggagcctgtatggatccaaacctgaggtccactacccaccttcttctagaaaatagacatatgccctacctcatcaagtaattgtgagtttttaatattttaatgtktaaaatattaatactgataacagtgctggcaaaggactctcaaagtgtctgttatgataatgatgatgatttttacttcagaaatagctaatttttaattttttttgagacagtctcactctgtcgcccaggctggagtgcactggtgcaatctcaactcactgcaacctctgcctcctgggttcaaacaattctcatgcctcagcctccctagcagctgggattacaagcacgtgccaccacgcccagctagtttttgtatttttagtagaggtggggtttcatcatgttggccaggctggtctcggactcctgacctcaggtggcccgcccaccttagcctcccaaagtgctgggattacaggtgtgagccactacgtccagcctactattcatttttattccatctcaaagattataaagaggtctagcttcataatcattcattataattatggtcagaactccacaatttacacagctatttcatacatattagaaac

SEQ ID NO: 912702 - DNA, 632 bp, Homo sapiens
ctagaggaatacaaaccaaaattacaatgmgacaccatttcatgcccattagggtggctaccataaacaatacacatagaaaataataaatgttggtaaggatgtagagaaatttgagaggcactgttgagaatgtaaaatggtgtggtcactgtggaaaacagtgtggtggttcctcaaatgattaccatatccagcaattccactcttaggtatattcccaaaagcattgaaagcagagtctcaaggagataggtgtacacccaaattcatagcagcgttattcatgatatctaaaaggttgatgcaacccaatatctattgacaaatgattggataaacagaatgtgacatacatatacaatggaatatcattcagtcttcaacagggaagaaatcttgacacacgtacaaacacgggtgaaacctgagaacattaacattatgccaaatgaaataagtcaatcacaaaaacagaaatactttattattccacttatgtgaagtacccagaatagtcaaagttataggcacagaaagtggaatggtggttttcatgggctggggggaggggagaatcagaagcttttaaatgcatatagagttttacttttgcaagatgaaaagaattc

SEQ ID NO: 912703 - DNA, 584 bp, Homo sapiens
agaatggtgaaaatgggatagaraggtacataaatggaggcaagatttctttacatttgttttacattggaaagctcagcatcctactgttcaaggtcattgccaaggtctgatttttcaaattccaaaaatagcaacctcaggcatatatgggttaatatgtcaatacattatgcatttataataaaaaataaaataccattttatacccaccacattagcaaacatcatacagtatcaaatgctgtcataaagaaaactcttggtgttgacaggtgtgggtattactacacccattcagaaaatggtttggcattttattgtaaggtcaaggaggtgaatgaatgccctattaactagactcctagattcatatcctagaacagggtttcctaatatgatatccaatgaagctcatagttaaatttcacaaatccattaatgtggatggttagaaagacattacatgtttgacactcagcatttttttttcaattacaaatttgtcaatacaggcaagtagtcacaatgttgagagcaataactgaccctatccacaaaatgtcacaatattttatattata

SEQ ID NO: 912704 - DNA, 601 bp, Homo sapiens
aagagccccccccccaaaaagaggaaggtaataaacggggaggaatcagacaccagggaaaagaggtaatcggccacccacggcaatatggagacagggcagaaaggggagggaaatgccaatttctcctcacaggggtcagctagagtcctcctaatttccttaggaaaagtaagcctgttttccctaacggtatccccgcgcccagtcgaccctgccttccaggctgcttctcacctccccaaacagaagtggacgaaaagtaaagaaagtgaagaagaaaaaagtgaggggaggaaaactccgaaagtacacaaagaatcagagtgagcaatgaggttgagagcgaagtggaatgcagagtgccccagctggacagctggcagccctgtgagtggcctgacagaaaaagagccaccagctaggagaaagcatcagccccttaggcccgggtctgcaccgcgtccgcccagaggcctgttgggccagtaggcggctctgcaccctgctgcccacacctcaaccccatcccgcacactccgtcagcamatattgggaagccaggcagaaagcgacaaggaaggtgaagtgaacaagaggg

SEQ ID NO: 912705 - DNA, 551 bp, Homo sapiens
tattcttttgttacagccctctcatttaaatttttcttgaattttgcctcttgttataaagggtggctttgtgttgatctttttcaggtttgtggttttctttcagagcaaagtaaggcagcttatttcttttgggcatttttgccccattttttaattgaagtacaattaatacacagtgaaatgtaaagatcttaactgtgcattttaagggaaacttcaagacatttgttcattgattcacaaaagtgcagaaatctcagcgatttttcaaaaaatgaactaacccatgtaaccggcactcagatcattcttggtaccccaaaagtccttttttgacacttcccatcacaatcccaccaaaggttaacctttatcaagacttttaacaggatagattagtttttttatatagaaataaaattacactctatataaatagtatatgctctcctgttttggcttctttcacttaacattaagtgaaattcattaagtgagattcatccatgccatggtggttatagtgtkgttatagttcactcattctc

SEQ ID NO: 912706 - DNA, 607 bp, Homo sapiens
attgcttttggtattttagtcatgaagtctttgaccatgcatatgtcctgaatgatattgcctacgtttccttctagggtttttatggttaggtttttatgtttcagtctttaawccatcttgagttaatttttgtataaggtataaggaaggggtccagtttcagttttctgcatattctagccagttttcccaatgccatttattaaatagggtatcctttccccattgcttgtttttgtcaggtttgctgatgatcacatggtagtagatgtgtggcattatttctgaggtctctgttctgttctattggtctatatatctgttttggtaccaagaccatgctgttttggttactgtagccttgtagtatagtttgaagtcaggcagtgtgatgtatccagctttgttctttttgcttaggattgtcttggctatatgggctcttttatggttccatatgaaatttaagatagttttttctaattatgtgaagaaagtaaatggtaacttgatggaaatagcattgaatctataaattactttgggcagtatggacatttccatgatattgattcttcctattcatgagcataaaatgtttttc

SEQ ID NO: 912707 - DNA, 618 bp, Homo sapiens
tgtgaatttactggtaactcacttatatttaaattattgtcatatattttcgtatctttttgttcatactttagatcattttgtaaaatgtaacagaagtagagaatcatataataaataacatgtgatggttaatttgaatgtgtcaacttgactgggctaagagatgcccagataactggtaaaatattatttgtaatttcatctgtgtggatgtttccagagagattagaatttgaataggtagactgagcaaagaagatccaccctcacagtgtgagcaggtgtcattcaaatcactgagagtctgagtggaagaaaaggagtagcatagaaagggtatatttgctctctgtgtttaagctgggatccatcttctcctgccctctcagactggtgttctcagttcttgagcctttggactcggactaaattacaccaccagctttcctgggactccagcttacagaccattgatcatgtgactcctcagtcttcatatgcctgtgttggctcacatgatatgtaattctattgcttctatctctctggagaaccctgatgaataccccccatgtactcattcaacaatkaactcacagcatctataccctcatt

SEQ ID NO: 912708 - DNA, 589 bp, Homo sapiens
tctgggaagtcaagcttcctttcaagttagtacaagtcacaaactaacacatagcaaatagtaaaaaaaaaaaaaaaaaaaamaaacaaaaaacaaaacaaaacaaacaaacaaaaaacaaaaaaccgtgctatgtactgggctgtatttggtgaataagacagatctggctggttcccttgtagagtccatagcctgaagtgaggaagagacttcatatttgtgctctgatggatggtggaggccttcttacgagggtatggaggcccagagaataagagtgaaagttcctccacaagagatgccacctagcaactagaagaaacaaatcctcttttattctaccaactatcttactggaacagttaatttacctaatagaggcaggcttaatttttattcttaaaagcaaaaattttttttttaattattgtaagttttagggtacatgtgcacattgtgcaggttagttacatatgtatacatgtgccatgaaaattttaaagaaatttttatttcttaaaaataataatttcatcttaaacaaaaccaccaaaaacagaattttatttattcccaaatctgtctt

SEQ ID NO: 912709 - DNA, 622 bp, Homo sapiens
agtgacagttcctgagagctttctctgtactaccgttttaagataattgtttataatagaaaatgtcaatcatgtagaaacagaatagcataatcgactcctgagtagccatcatccagcctcaacgattaacttacagcccacctggtttcttccatacacctagattacttggaagcaaatccaagccatttcttttcagtatgtgcagaaggctctcttaagtcccaatgtgaccatgccacaagctggtgaatgacatctggtggcaggatagggtccatgctactccctggattagaacaggtcctctgcaatctggtgctgacatctctccacttcccaggagtccctacattttcagctatgctcaatgttgttctcccaaacatcacatttaaaaaatccaccacttagaactcctgacctcaggtaatccacctgcctcagcctcccaaaatgctgagattacaggtgtgagccaccgtgcttggcctggtcttgcccttactttcaatggcaaaaacagcaattacttttgcatcaagctaacactawtttgtcttcctctgtggacagtgaagtggttgagaacagggactgagacttatgttccctggtg

SEQ ID NO: 912710 - DNA, 573 bp, Homo sapiens
cccacttccccaaaccaagccacccagcctgggtttttacctctttctgtcctaagtaccctgagtttcttggtcagggtactctggtggaggtgggcagatagtctctctgtttggcttgtaggaatgttttggaaggctcaactcagggcccctacagaccttctccactaagccctcctccctgcaagctatttccctaaaccatctaccttactaggcaggatcacagcaagtccaaggtaggctgaaggtcacagcaatgctacctttgtcttgttggttccattagttcacctcttgtacttaagaggtaaagcccagactgcaagttgatgcccctcttcaaataagtactataaatatactagagctatccctgaaaagatgcatttgtacttttatatatatctgattttatatatatatatataatttttctttgtstttatttacaggtatgtactaatctataggtatgcaaggagaggtatagtacaggaacaggcaggatttgtgtgttcatgtgcgtatatttataatatgtgtatttatagatatatatagcctgtg

SEQ ID NO: 912711 - DNA, 645 bp, Homo sapiens
gggaggggttccaagcttgggaacaaggggtaattccagttcttagcaggagggggcagccttggcatcctggggtcagcaatgaaaagtcagaaaatggaaggggagkgcctgagagtgggggtgatggcaaactgagagccattgacagggacttggcctgggaaactcttttcccatcccttgtgaagaaagaccaaaacccattttattcttattaaaacacacacacacacacacacacacacacacacacacacacacacacactctcacacttctagtgaagttgagtttaatcgcactataaatggcttgcaaaaacctttcgggggaaaatgacacttttcatgccttttggtctattaattctatcgtcaagaattaagtataaaaataactgaaaatgcagattaaactttactcagaaaatgatcatttcagtgttattttgaataataaaaagctgagtatctctaataatctctaataacagggaactagttaaatagtaaataagtaaatgtaatgttatatagctgtttaaaaaatcacaagcttagaatgctacaggaaaatagccataatataattctaagctaaagatgaaagatgcatacatacacacaaatagcaatgtaattt

SEQ ID NO: 912712 - DNA, 543 bp, Homo sapiens
tttcctatctgtaaaatgaggataatatccactcagaattgttgatgactatatgtgagatgcaaatcatacagcacagtgtcaggtataaagcaaatgttaaataaaaatctagttttttttttaacttratatgttttttttgagacggagtctcgttctgttgcccaggctggagtgcagtggtgtgatctcggctcactgaaacatttgcttcctgggttcaagtgattctcctgcctcagcctcccaagtagctgggattacaggcatctgccaccatgcctggctaatttttgcatttttagtagagatggggtttcaccacgttggccaggctggtctcgaactcctgacctcaggtaatccgcctgccttggcctcctaaagtgctgggattgcaggggtgagccacggcacccagccaaaaaaccagattttataactcagacattactcctttccctctccaatttattagactgtcaggtgtctggcagcaggaacagaagtgggcttactggggccaattcacatcatgga

SEQ ID NO: 912713 - DNA, 643 bp, Homo sapiens
caaaacttgctctcagacaccaccttccaagtcctgaatagatggtctggactttgaaatgggggatacttggtacttccccaccgccaaacgtcctttttcatataccgtgtgtcatgtctaaagcacatataaactgtgtctggcacataagtgctcagttaatatttgccatgattatttcccaaggcctgttggtatctctttggacactctgtctaaattttattctgcctcagtttgtcagggttctggacaaattgtccacagggaggactcaggcctcggctcagattgggcaagaacaaaccacacccctgccatcagccaagctccttgcctaccctgagtccatagctgccctttccagaggagacctgagggtgcacccacgtaaagggggcaatttcaatgcacaaaagaaatactactatagctgtgaaaaggtactgctaggaagggcataaaagggcccctggctgaatgccaagtataaaacagaaacagagtcctcaaggacaagttgtcaggagccacaagaagggggtccttccagaagctgtgggaatccagggcagcgggaaaaagycttacagggtcaggggtaagagctagtggggaaccttcatcagcctggagcagg

SEQ ID NO: 912714 - DNA, 610 bp, Homo sapiens
gtatctgaaagtaaattaaacacttccttaagaacagttgatatttgctcttgcaaattggtctaaaccagagagatttcatggtaatcagctgctaaygaaaacaaccagtctgctactgctagcctttgtttttcactaataatatcaaattaaaaaaatatttaatttagaatagtcttaagtaaaaaagcaaaattgtatatcaagaaagtttggttattttattgatgacattagggatctcttcaaatttctgtgaggacatcaactaaaaggtttctaaaaacacacaacacttctaagaataagtatgagtgagaaagaaattgtatgtatgtaaatgggaccgtggatttaaagtttaccaagtttgttgaaagattgacaaaatctgcataatccttgttgatgagttcgaccatggctgttttaagaagtttatagtagagctccaggtcatctctcagttcttccagctggacccgcttcctacagtcagacacaaaatgatcgacatcgaaatcttcctgaaaaataaaaccagagaagaaaaaattatagcaatgatatcacagtgacatatacaaatgaaatggaagaaagagta

SEQ ID NO: 912715 - DNA, 578 bp, Homo sapiens
atgatgacatatgtttattctgcaaatcaaagttagcaaggtaaacaaaaatccccgtggatacgtatctgccatatagagacatcattatgaacatccttctgagaagttctcccttctgaccctgacakggaagggtgaactttttggcctggcagatgatggatttcgtgcaatgtgcacaaggagaagcatatgtgcattaaaccgtttcaccagcataatttatagcaatggtcgatggctggttctaccttctagctcttctggatttctgattgggtgtttatcctcattttttttctgagcaagttgaggaggtcacgtaataagataaggagagtaatggcatgtcacactttagtccaaaggagactttgattctggagtccctttataaactctctctttttcagtttcttctaagttgccaatgagagtattatgacaacttctttggtttttaagagaagaattttcattctcaaggtaaaaatacattgttatcaccaaatataaaattttttactctgaactaaacctgaactgtcaaatggatacatcaatgtaagcaattt

SEQ ID NO: 912716 - DNA, 549 bp, Homo sapiens
ttagtaaaaggtagagcaaggactcaaaggcagatctgattgcattgcttatgttttattatctcccaactytcttttgtgtatatcttttatgcttgactacacattttctttttgttacctaagaagggcctgttagttttacaaaaatcttaaaataaaatcacctgagaatagataactgaatagatctgagattaattaacagaatttatataacattttgcatttgcaggatattggaacagaatattagggggtagacagagaagattctttaggaggacttgaccttaacagttttacaatttaaaaatattatttccaaagtaataagcattgttttcttctagggtggagactagaggttattgttcttttagaaaaattgcttgaatggacatttagttgagcatgtcaaagggcaagttctctgcattcctgggaatgccataaattctgtgaattcaccccaagcagagactttaggctgagatagtaggcattctactcagtaaagtaaatgtgtgcccctaaaactcagaagag

SEQ ID NO: 912717 - DNA, 661 bp, Homo sapiens
tctgaaatcttacttggaacactttcactttgtaaaaagaatctttcattgtatatgagrataatctatctaccaagtgtactggatggattcccaatgaactttcctcatgtctgacttgttcctgggtcttctacctcttttttcctaatggttgtttttcttttttttttttttttcttttcttatttttttctctcttgtaagcacatggacatactaataaatatgtttatactaaatattcaagcaaacccctttaaatcctgagtttgttctggctacagctgttttccctccgtccatctctactaatcttttaaaaagattttcccgtagccactttatttgctttctacttcccagtgtttcacttttttttcatgtcatggcacacagagaagatgataaatggccaagcctatcagcagctatggggatggttccagaggatccagctgccccaggaccctctggttattccagagtgccgagagaatcaataacatggtgttcctggaatctgccagggcttgctgctgagctcggctcaattcagctcttaccaacctacattttgcctgcatcacaaacttgacttgtttccgctcaaggtcacttaagacttatttgctgttaaacataacataccctttcactg

SEQ ID NO: 912718 - DNA, 431 bp, Homo sapiens
gaacaagcaacctacagaatgggagaaaaattttgtaaactatccatctgacaaacggctaatatccagaatctacaaagaacttaaacaaatttacaatgaaaaagcaaacaaccccatcaaaaaatgggcaaagcatatgaacagacacttctcaaaagaagacatttatgcagccaacagacatatgaaaaaaatgctcatcatcactggtcattagagaaatgcaaatcaaaaccataatgagataccatctcacgccagttagaatggcgaccattaaaaagtcaggaaacaacagatgctggagaggttatrgaaaaataggaaccctttgacactgttggtgggagtgtaaattagttcaaccattgtggaagacagtgtggcgattcctcaagaatctagaactagaaataccatttgaccca

SEQ ID NO: 912719 - DNA, 606 bp, Homo sapiens
cctcagacccaccactagagcagagattcctatatcatctcattatttgcatgatattagcatgctgtgttaccaaatccattgtcattcccctcagcaactaccaccacccataccccttattttcatgctattcagttgcctccttaaagggagaagtacagaagcctcatcaggaaaacagaaaaagaacagaaaaacaaaatcagccaagtgaaatctgctggagactttgtcctccttaatccatcatgaaagtttacttaactaagatacaaatcccaaaaggattacacattccatgttctgtcattctatctgccccaagttctactgatattcaaaattatcttaccaaaaaaaaaaaaaaaaagagtttggaacataagcaaatacaactctaaacccaatctgggaaattcttacttgctaaatgctcacttgcctaaaagccacacaaattgtatttcaatcactgcagcctcgtcattattcttaaaagattttgtcaaaatgaaagcrtcaaaatttaaacagacaaaattaacctccaagtttcatgtttgtttttaatgacaaatataaaaataaattttaaggcagcac

SEQ ID NO: 912720 - DNA, 611 bp, Homo sapiens
atcaaggtgtctgcagggccatgttttctctggaggctcagaggagaatctgttccttgcctctttcagccaccattcctaggcttttggaggcattactcccatctctgctcctgtggccacactgcctccttctcttctgtctccatctccctctttctcttacaagaatacttgtgatggtatttagggcctgttttagtctccttgggcttctacgacaaaatttcatagcctgggtaacttaaacagcagacattcatttctcatggttctggaggacggaaagtccaagctcagagcaccagcatggccaggctcctgcagagggccctgctcctggtttgcaggtggctgccttctttctgtgtcctcacatggcacacagagagtgctggtctcttcctcttcctataaggacacgaatcccatcatgggggcctcacccacatgacgtcagctggatctaattacctcccaaaggccccacctccaaataccactccactgagggtttcaacttcaacaaatgagctttggtgggacacaaacactcattctatagcagggcccatcagataatccgggakaatctcctcatctcaagatct

SEQ ID NO: 912721 - DNA, 614 bp, Homo sapiens
gggtctctctaaattgtccaggctgattttgaattcctggrctcaagcaattctcctgccttggcctcccaaagtgctggaattacaggcatgaggcactgtgcctagccttgctttctcttttctgatactcttttgcttcagattttaatatatatgtatatatttttaaccctgttcagctgttctgggtctgtttaaagtcccagtcaaaggaacctgggtgccttcctcctgaccttggtgtaaaatgaagcaaaggataaaaatatataggacttgcagctccccaaatgcagcttctcattcctgctactgggtattatttattgctgtgcttctcttcccccatgtttgatactctctccatgtatttatttgggcatttattgctgtgctgcttctttgcatgtttgagatgatttccacgtagttaatttaaacagctgtttttacagacaacatttctgtttcaaacgttctttcctgtttgcaaaccagcgtttcttacaagtgggttgctgccactctgctaatttattccactttaacaatacaatttcttgttttcttcagatttttcaaaacctgagaattgaatttccagaaatgcc

SEQ ID NO: 912722 - DNA, 585 bp, Homo sapiens
agagggagaaaggtgagagagggtagaagaagagaaaataaatattttctcatcatggtccatgtttctcaaggctggtctaagagttgcttgaaattctgttgcatcctttggaatcagtctgaagcatttcaaacttcgagtattccactcccactggcaggcccgtccctccagagaagatgagatgaaacaggatgtcttagcctgacaccattaaaaatttgatttatctacctctctttgttctgattccatgcacttcaagcaacctcttgattataatccagcttccatggcctccagggacaccgtgtgatggtcaggctgataaaagttttgtaacttgcataggttctatttctcactataaattgatatgctgcaggtcactaaatgctttcaaatggtaagtattgtgtgttgaccaacaaattgtctaagtagcaaaaaaaggaggggaggggcagacatgcaaatggaggcacaaaaattcaccggctgacagtgccagactcaaaagaacccacccattccctcatgacatgccaaraggagctggctttcccatggactcacggggtc

SEQ ID NO: 912723 - DNA, 664 bp, Homo sapiens
agtgtttggtttttataggctacaacctcaatttctaataaaagttcttttaacaaattgtttttcaactaaagattttcacttccattacaaagcaccaaaatgaatgctttataaaatgttgcgaacacatttattctatatttaagcaaaaacttcattccttttggggggaaagggagaagagagaagaaaagcaacaaaaaacatagtataccattaacatttcttatagacaaaatatttgagatccactactctagaggatatattcttatgttattgattgattgactgattgattgagagagatggagttttactctgtcacccagactggagtgcaatggtgcgatcttggctcactgcaacctccgccccagggttcaagtgattctcctgcctcagcctcccgagtagctgagattacaggcgcctgccaccatgcccagctaatttttgtgtttttagtggagacagtgtttccccatgttggccaggctggtctcaaactcttgacctcaagtgatccacccaccttggcctcccaaagtgctgggattacaggtgtgagccaccatgcctggcctcttatgttatttatataaacattataaatggctccaagtcaaaataataacaytgattaatgttagtaatagaa

SEQ ID NO: 912724 - DNA, 505 bp, Homo sapiens
aaggaattaagtacatggggacaatggtgtcatccctaggggttaccatgtatccctggtaacttttgaatttgagctrcatacatacaatgccaattacaaatagtaatagtgatattaatttaaaaggatgtctttttgttttcaagttggggagacaaaatatacatacacttcttattataaaatggaaagtgtttagtgtcctaagagaggcagagatgagattgcattccagacttggctagaaagtcagggctggtggaaatttaggtacaagtgtgagtttgtattttgtttaaatatacttcaatggaactggaatgaatgccccagtctccaagttcaggtcatgttcagcagtgctttagcctccaacaagttttttgggtaaaagcaggtgccagaaaatatgtaaagttccataagggtgctgctagcatctggtaaaagtcaagggtttaatattactagttaaaagctttttaaacactcatcaccttct

SEQ ID NO: 912725 - DNA, 505 bp, Homo sapiens
aaggaattaagtacatggggacaatggtgtcatccctaggggttaccatgtatccctggtaacttttgaatttgagctgcatacatacaatgccaattacaaatagtaatagtgatattaatttaaaaggatgtytttttgttttcaagttggggagacaaaatatacatacacttcttattataaaatggaaagtgtttagtgtcctaagagaggcagagatgagattgcattccagacttggctagaaagtcagggctggtggaaatttaggtacaagtgtgagtttgtattttgtttaaatatacttcaatggaactggaatgaatgccccagtctccaagttcaggtcatgttcagcagtgctttagcctccaacaagttttttgggtaaaagcaggtgccagaaaatatgtaaagttccataagggtgctgctagcatctggtaaaagtcaagggtttaatattactagttaaaagctttttaaacactcatcaccttct

SEQ ID NO: 912726 - DNA, 686 bp, Homo sapiens
gctagtgaaaacttgattataaatcagtctgatttggtttgaattctttcaatatggctgtattrttaagatccctgctattctgattaaataaatctacttgtttccaagcattatctatctaaattctgtctcatttaatttatagtacaataaaaaggagactagaaagcagaaaaaaagtcaaagtgaagagctaggaatagaagaagagacggaaagaaagaacagaagccatatatgtgattagttccaaggtggaataattttataatctgaaaactaacactctgcttttgaaatatatagtaaactatataatatgcaagtacatagagtagatgctaaacatattattatctacttcgtctatcaatatgcttcatctaacagtatactaccttataaataatagcataacatttataaaatttagaatatagaaagtatctattcataatatgaaatatattgtgcatgctaatatactagcatattagaattaggccctctagactgtgccatgaggaatggtgcattctggcccagatactacacttttcccacagtctttgcaacccccagaccaggatattcccttgggtgcctacaccaccagggccctgggtttcaagcacaaaactgggcagcctattgggcagacactgagctagctgcaggagttt

SEQ ID NO: 912727 - DNA, 650 bp, Homo sapiens
aactgcttctactaagtagggagtatacataattcatatcartgagtaaaaaatctctacacagcttccttctctttaaagacttgcggggagaaaaattagattcagacaaggtgaactgtgtttatcagagcataaggatgagtctttggatatataaagggaagaccagaggcatatttttgaaacgttgatatttgtaaagaggatggagcgggggagagggtgtgagaatgagctgagtgatattatgcgatgcttctgtcaagttggtggacataatctggagctgtttgtgttgttgttatataacctcatccattgcccctagaccttcacaaaaggctgccacatatataatttgtcattttttttttcattttctctttttccttttgcagaaaacaagaaaataaacctgagttccacatgatggaacatgttagtcatgagaggtgatgttgagagactcttgggagtaagaactcccatgcattagtgccatgagaatgttaactttaagactgcacagaagttctagaaggaaggatccaggttggggatgctgacatgtaggttaaattggaattacctgtgtcaacaaggacgatgaagctaatgtatttaagtaaccaatattttgctggaag

SEQ ID NO: 912728 - DNA, 567 bp, Homo sapiens
taactataatttttggttttgtaatttaactgagaataggcattgtgctgttgaggtcccttatgtcaaaaggttggggtgaatgtagcttatttaaatagaaatagaagaaagtctgaaatagatgagagagagagatgaggatttaaatattggaaaaaaatagatggcagaaagtagagtagatcatgaggctgtaagcaagcaagtcaagatgtggaagaagcagatatgaaaatcaaccaggtaaatattacatataagagatgcggaaatagaattgtttcttatttccgttaacctcaaagtcaagaatatctgttctggtttagagtaaaattgaaattgaaaaatgattctaaaacctgagtgattgtcaatgctgtaactaaattctccttttgtacagaagcaaatatatcaagtagaattgttttttgccttaggctttgtattttttccctcccaaagaaatgcatgttgttaacagtgaagaacccccaggagttaygtctttacttcattggtccataagcaaatgagaacaatcttctccatcactgggag

SEQ ID NO: 912729 - DNA, 629 bp, Homo sapiens
catgggagctctgggtctgggataggaaagtggttgttgtctcactttggagcaaggggtcctttgtaccctatcctcttcactgactaattagggaatttgagctgccctggggaaaagaggttctttctggatgagggcaatttccctgagggatttggctgagacttggtacctcagtcctgaaacaagaagcagaacaacatacacctcagagtggtgcacagtattgaggctcaatggtggaaatgtgttgggatactgtgaggaatgagaagacaattcttatgtgggtgtgtgtctctgtcagaaaaaggtttcataggagaggtgatatttgaactaccttgcaagatggcagtatattcttcaggtagaatagagacatagtattccacccagagggagattcacaagcaaagcctggcactttcaaaaaaaaaatgtatgtcattcagagtgactaggagtgtagggtccaagatgaggggaaggagaacaggatagtgaggtgataataaggaatgaagctgaaaaarcagcagggtctagattatggagggccaaataggcccagcagtttgcattttattctaatagcaaggcaagcctttgaataaaggagggtc

SEQ ID NO: 912730 - DNA, 597 bp, Homo sapiens
agtaatgtataattctataaaaagttttaaaaatatacagaattttattaattcttcttgtaccccatgattgataacttaaacaccattcccagtgaatgtgcctaattatggggcctttatgagtatgtgattctttcccaggctttctgctttgggggttgtaggcacatgtggtggccagagcccggagcaattctttggcagaggctaactttggtggggacaaaacagaactaccctgtgcagcctggaccttaaaagaacccctttgagcaccccattttggttggctgaacttttcatttcctttatcacttctggatcaatgagctgaaagtgttcttgtgtgtgctaaaaggtagacttagatccaaaggatttatttgccttggagcacgccctttaggaaggcatatccgctctttagatgagagtcttagagttgtttacaataactgctagtctgctttcctatatgagtaatttatctcargaagtgacttgagtcttcagaaatctggcgcaatgcacatcaacacatctgggcttaggaaaggttgtgttggcaaggcagccatggtgaagtggacttga

SEQ ID NO: 912731 - DNA, 623 bp, Homo sapiens
tggaataaatgaaaaagtcaaatgaaattagtaacttctagcactttgggaggctgaggtgggcggatcatgaggtcaggagttcgagaccagttcgagatggtgaaaccctgtctctactaaaaatataaaaattagccgggtgtggtggcacacacctgtagtaccagctactcaggaggctgaggcagaagaattgcttgaactgtgctcaccgcggaggttgcagtgagctgagatcgccccattgcactctggcctgggtgacagagcgagactccatttcaaaaaaaaaaaattagtaatttatgaagaggcatataaattatggcttatttaattgtgcatgactttacttggcatttttaagaaaaacacagtggtgaaacaattgtaggctatcttaacatagtctagatcttccatagcttggagtcttagtgaaagacacaattggaaccccttcagggttctaaatattgtgattacctatgtctatggagcagtactaacaattaagaaatggcataagtagctttaatatctatctctttgctcttttatcgccaattaaatttttttaaaacttgtaatttmtgatttttttattctagtttgcatat

SEQ ID NO: 912732 - DNA, 588 bp, Homo sapiens
cacacgctggctcctcttccattccaccatgagtggaagccatctgaggccctcatcaaaagcagatgctggtgccatgctgcttgtacaccctgcagaactgtgaaccaaataaacttcttttctttataagttacctggcctcaggtattcctttatagcaacacaaatggactaagacactactgcacatgaattttggccccatcttatccctgggcacactatgagctatccaatcacctgctttggcttaaactagtccatctgctctgcaatgtccttctactctgccttcttctccgattcctcataatatttggtcacagccatccttcatggcctacttccaatttcagttattctaagaaaccttcccttacaccctttctagtgagtatgaatccatgttttatcataccttctctctctcttgtataatttatcagtctacttttgtcagttatttttatgaatatccttttcctgcttcagattgtgaccttctagaggacaaagaccacctctcatttctctttcyatccctcctggtgttataggagttactaagaaattattttaggcaga

SEQ ID NO: 912733 - DNA, 620 bp, Homo sapiens
gttataacaaactaccttagactgagcaacttataaacgacaaaaatttatytcttacaattctagaggctgggaagtccaagagaaaggcagtggtagattgattgtctagtgagggcccactttctggttcatagatgtcttctagttcggtccaccttggtggaatgggtgtgggacctcaatcccattcataaaagctctgcccttttgaccttgttacctcccaaggccccacctaatccttatcacattggggattaagtttcagcatacgcattttcggggatatagacattcagaccatagcaaggggtttctccctaaatggggctaggatgtatcagaaaaagaaatatttaacaagccctaaggctgggaggagaagcgtgcacctgttcaaataactgaagggaatgaaagaagctggaatgtggagcagcaagtgggagatgcgagaaacataaagctggagagctggacaggagtgaaactatgctctttgacaacatgttcataacttaatgtttcatctttctggcaacttcaattaattgattttaaacagaagcattatttttaaaggacttttagtgcaacactccagagagtggagtgaa

SEQ ID NO: 912734 - DNA, 528 bp, Homo sapiens
gaaaatgtttcattgaaaaagttgaaaatatacttgtgttacaaaaaaaacaatttttgagctcctaacagtttatgaaacaccttgaagataaggaataaaaataaataaaacacatatgtggttgcaaatagttcaaggtataatgagagtgacaaaggggcaaggtagtaatgataatatattgctgactgactgcatgcatagcagcggtatgtagaacatgttacaacagtacagaggcagcaaaaagatgcagtagcctcacatttctgaaagcattagtgcaggtggccatctattgaataaggaaggcagggaagggatgtgcaaaaaagtagcagcacatctgtttctgaggaaaatgaatagctgaccagctgcaaagaaaaatgttcttgatcattgttgagggcccarctgagatgagaaaccacacatgtgtggattcctattatttcccagtcatgctcagctgctacatgtgggagcatacacctggaatgtaggattgccaattttgtacga

SEQ ID NO: 912735 - DNA, 570 bp, Homo sapiens
gcccaaacactgttctatcccttgtgaaaatgttaaccatcargtcaagcaaatcttgcctgactacttgagaaatgacaggagtaaccagtactgctcctagcagctgttacactcaacgccacgactctgaacccacccaaagtctctctatctttcttctgcaggctcttccagcaggtagaaagcagctcagctccacactagagacatttctagacttaaatccagattttattcactcaggttatattaaattcaatttatattcatacataactcttgattaagggggaaaaaaaatagaaagttccaaactgtagacaaacaatgggaagcctgtgggcctggctgcttagaaggatgggcacatctgagttgggcagggggagggaggaaggtgcagtacaggcagcagcagcattgggagggagctgggaccagaatgccaaaattaagctgtctgggcagggaggcaggctgcatgggtaagcacagattgaacagctgcgagactctgcttcattattttgcctgggaatggccctaaatgccctcatgcctatatct

SEQ ID NO: 912736 - DNA, 652 bp, Homo sapiens
tcttactcccattttacagacacaagccrgaagcacagagcagtttagttgctcagcaaatacaacaaagcaggcatgcagtgaggtcagtctgctctccaactctcaaggttagtgtgaaatggatgctatataaaccatcacagattttttagcagggtagcgatgtgacttaaggggcagaagactcaaatttagcacagtctttgcaaccagactgttgagttcaaatcctaaaattaccactttgtgatcctgagcaagttgcttaacttccctgaatttcgaaggaggaacatgcataaaatggagacaataaaatctcctccacagggttgctatgagaatggaattaatacatataacgagctttgaagtatgtctgacatgtaaggatcctgccattgtaattattgagaaaaccctgccggaaatgtggaacgtatattgttagggcagagtcaaagcaagcaaagcaaagccatcctaactgatgagggatgacgagtgcctgaaatagggcacaaagctggagaggagagcagcagagctactctatgcttgagagctctaccctaaaatgcaaataccattctggccatgccaccttggagaacttgatccgcagggagcagctggcacaccaatgaac

SEQ ID NO: 912737 - DNA, 645 bp, Homo sapiens
tggttttgctgtagtttggtatcacaccaaacttttaaagtatagtttaaatcaatggttttgctgtagtttggtcacacaccactgattagggcacagagrttttgagtgttcatgctataatcccagggtaaacatatatttggatcactgacggtattaaaaccacattctaactgcatggttcagtgaatcaatttcattatcttcatatatgttaaacagagcttgttgactgaatctgtccttcaaaacataatctggtagaaaatttcatttatttcacaaaatttgaattggcactttcttgctacttatctcaatacactagaagaacagaaatagttcctctattaggttcacaagatgactaacaaaaaggcatcatattaaacaaaccctctattacccaattttctacctagaggggtgacgtgggaaatgatttggcctttaatgatttctttcacgtccaaagtttgctcttgttttcatgattctgttgatctctggattccacaagtatgcaaatgacttaccactgtgcaaacaactatgcattagtcagaacgttcataaagttttgcataggaacctggaagaggttcatcataaaaggacagatataatttaaaatttggtagt

SEQ ID NO: 912738 - DNA, 664 bp, Homo sapiens
ctctggattgctctggcagtagtgacattggcctttttaagagtatcatgcctataaataaaaggacgcattaaaaggaaccttgaaaacttgatctaaattatctcatttggtccttatactatcactgtgaagggagggtaattgcactcatttgattgaatcttcaaccaagactctaataggttagaatttgaagagatctcagagatacaaaaatacactgctttaaaaaaaaattgagcacagataaggagcgcaagccctagagacatgaagtgatttgtcctctgctagataagaatggaacccagacctttgactgttagctctttcactccatgataccaatacatggactggtaaatgctttgtcttcaatcttctctctcacataaagttgggtcagggaccatgggaaattctgttttatcttgaatagttcagatagaacaatagtcacacatgtcaccaagcccatccttacttaataagcctaactcccaaagcatcacttaattggtcacaaatctgcagctgcctcagagcacatgcctcatccacctctccaactatttctgtcaagaaataataaaactctttctgctcaccctgaaaatgatttcctttgmcattctttctttctttctttttttcttgagag

SEQ ID NO: 912739 - DNA, 677 bp, Homo sapiens
ctggtgtggatccagtcttaacaaaaaggaaagagaccctagtggctctctatctctgctgtgcctggcccctctactctagtttttgaacctcagatttcaggggtgtgacatctagcttattgtaaatgcaggcttgattgttaatgaatgagagaatacttagataaataaatatcttcctgtgtgtccagggggtgagagccagtactagcttcatgggcataagacctgtgcagttacataggcccccttcctcttccctgctcagaaggacctcatatttggtataaggttctgctgttttcttcggaaattcttaataatttttgaacaaagggcccctcgttttcatttttcactgagccctgcaaattatgtacttacctggttctggtgaggagcagggcatagtgtggagtggcaggccgcccctactcaactcattgtagactcttgctagggaacagttggtaggactactggctttgtgttgccacatcatttgatttttccaggggaagctgaatattggatatttatgtggaatttcctgatttttaaatattggctcaaatctttaaaaaatttttggatgaaagcatatgtaagagctagygtcggcctgggggctgcttgtctcccactactgaacagactgaaacatctttttttgt

SEQ ID NO: 912740 - DNA, 597 bp, Homo sapiens
actggaaaaaaaaatagtattcttagtgtagattgcaaaaggaaagaggatatgttagatgatttgcccaaaatttaaacaggattcgctttttaaattcaagcctttttgctttcattcagatctggtcaccagacttactttttccttaaggcatatatgaatcatcttgttctttcattcagaaatcaaaagttcaggcctagatcagtatttaccaaaactggtggaacactacctttccactgagagtgcattacctttttttgagtctttgaaaagaatgtcagctgaacatggtctggaagtggccaaaactctgtgggtggggagaaaggaagaaataacctatctcccatttaaaaacctaccacctattaaataaacggcagtcttgttctgtggagtattcatttgggttatctattctgatgaacaaatacaaattcttggtagggttttcttgcttctggataaaatgcttagtgttgctttttgttgttcaatcttargttttgtttcattttgtttttcagggtctcactctgtcaaccaggctagagtgcagtagcgcaatcatggttcgtggcagcctca

SEQ ID NO: 912741 - DNA, 705 bp, Homo sapiens
tagtttttctgtgtcttatatatttttttctctgttcctttcttcctgcttttgtattaaacatctatttttagtgtaacattttaattcctctmttgattttaagcatattttactggcttattttcttagcagttagtgtaacaattagaatgtccattgtaactcatcacaatctattctggatttatacttatttaattcggtaaaatacagaaactttgtttcgatataattccatttccttccttcctctttctcttttaaaatatatatatttatacatatttactgcttcatgaaggattttcttaagtgatattgacttgtacatgtattttctgttataaacccaacagtacagtatacagtcaggaccacatagcaattataaatctatacatacctaacaagagcactctcaaatacataaagcaaaacctgaaagaattaaaagaacaaataacaattcaacaatatttaaagatttcaataccccattctcaataattgacagaaaatctaaacagaaaagcagtgaggatataaaagacttcaacaaacacatcaaccaactgccctaactgacatttatagaatactgtaacctactactatcagaatacatgttcttctcaagcacatatgaaaaattgttcaagatacatcatatgctaatccataaaataaatcctaataaattaa

SEQ ID NO: 912742 - DNA, 635 bp, Homo sapiens
tttcctcaccccaccaggtcccaagaggatgagaggagtcaaccagaggcaactggtactcggactctgaactcttggaagctcagatcctttatctgttcccaggaagtgtgcctgtcagagtctattgacactgaccaagctgtgaacctgggctcaaatggattgtgttgaaccatctctgtgatggttaatattgagtgtcaacttgattggattgaagggtgcaaggtattaatcttgggtgtgtctgtgagggtattgccaaaggacattaacatttgagtcagtgggctggggaaaagagacccacccttaatctggtgggcacaatctaatcagctgccagtgaatataaagcaggcagaaaatcgtgaaaaggcaagactggcttagactcccagcctacatctttctcccatgctggatgtttcctgccttcaaacatcggactccagagttcttcagttctgagactcagactggttctccttgctcctcaagcttgcagacgcctattgtgggacattgtgatcatgtaagttaatatttaataaactcatatatatatatacacatayatacatgtgtgtatacatatacacacatatatatattagttctgttcctttagg

SEQ ID NO: 912743 - DNA, 593 bp, Homo sapiens
ttatcactcagatattcagcctagtacccattagttatttttcctgatcctcttcttcctcccaccctctgagaggccccagtgcgtgttgttcccytctgtgtgtccatgtgttctcatcacttagctcccacctataagtgagaacatgtggtatttggttttctgttcccgtgttagtttgctgaagctaatggtctccagctccttctgtgtccctgcaaaggacatgatctcattcctttttatggctgcatagtattccatggtgtatatgtaccacattttctttatctagtctatcattgataggcatttaggttgatttcatatctttgttattgtgaatagagctgtcataaacatatgcatgcatgtgtttttttttttttggtagaacaatttatatttctttgggtatttacccagtaatgagattgctgggttgaatgatatttctgtgtttaggtcttagaggaatcaccacactgtcttccacaatggttgaactaattccacaatggttgaacactcccatcaacagtgtataagcatttgtttttctccacaacatcactagcatctgttagttt

SEQ ID NO: 912744 - DNA, 623 bp, Homo sapiens
tcaacattttccagaggaccaatgcatgatgctagcaaatcttgcatgggtaaaaaactatttaaaccaacttcaagaaattaccagttgtcaactttcaataaagtataacagaaaatattcacaaatacgtgcaaaaactaaaaaaatacttctctcttttctaactatgtttctgtgtgaggctggattttctttatacacctcaacctgatgaacatattaaaacagattaaatatgggaatcaggtatgagaatttagctgacttctattgagtcaggtattaaagaaacttattaagagtgaaacaaagccactcttctcactttttaaaagacatagttacttttataaagaatatgttatttattataatagatatgggtttttcattattttaaaaataatttttactttgagaggctgaggcaggtggatcacaaggtcagcagattgagaccatcctgcccaacatggtgaaaccccgtctctactaaaaatgcaaaaattagccaggcgtggtggtgtgtgcctgtagtcctggctactcaggaggctgaggcaggagaattgcttcaacctgggaggcrgaggttgcagtgagccgagatcacgcctctg

SEQ ID NO: 912745 - DNA, 562 bp, Homo sapiens
gatcacttgagctcaggagcctgagaccagcctgggcaacacrgtgaaaccccatctctaccaaaaatacaaaaaacttagtcagctgtgatggcaagctcctgtggtcccagctactcaggaggctgaggtgggaggatcgcttgagcctgggaggcagaggttgagtgaactgagattgtgccactacactccagcctgggaggcagagtgagaccctatctcgggggggaaaaaaaaaaaaaagtgcctctctgatccctgatggcagagagcataactgactagtggccccagctactgcactctgaaatccatcattttattcacactgagcccatgcttcccaagggctgtccttagtcaaggactaaacatggcagaaataccaaggcgggcctgttcctgggagatggaagactcctttgatgggtaacttttgctcaaggctacaccactggtgttaaacattcttagaagtgccctgcattctcaggctctttcactcaccttccctttcttgcttctctccctcacaaaggcaggtaggcattgtggtctc

SEQ ID NO: 912746 - DNA, 550 bp, Homo sapiens
atttaaactgtaattttctctttagccataaattatttaataatttgtttttagtttttraacacacgggttttaattttacagtattttattgttttccattttaattctttgtggtcaggaaaaataagctttaagatgataatttaaaaaaatttattgatacttcctttgtgatctagtgcttagtcaactttgctaaatgttatatgtacgtttgcaaaaaaaaagtaaattatctaataacctcaagttgttttttgattacactgttaattatggggttcaaatctcatttatgtttctaatttgttatccatacataacgtaatttgatccatacataatgtatagatattatagatttatgtacttatggatttgtttgttttccttatgtttttcagtttttgctctatgttttcctaggttcacagaaatttataattgttacatcagcaagtttttcattctatctttgtttattattatatcactattaatgcttcctatcttaaactgtgttttatctgatagtaatattgctaca

SEQ ID NO: 912747 - DNA, 641 bp, Homo sapiens
tgcttttgctgagccatttgtaaagcaacacaaacagacaaatggggckcttctttgcccattaatttgtgtctgtgatttcgtttgccaccgaaaggtgagcctgtttattaggcatctgctagacaacagagaccactttacttaacctaaggtgggatcttagagacagcaggagtcacatgactgtctccggcagccttcacaatcttatgtgtagtcagctctgcaagtcctgctatgtggttcaactaaaactacagctggggatctgtccattaaagcgttgatatcctaataaatctgcccctccttcctagccccagagttcaggcttttcctgctcatctggacccttgaagcagctcctccctatcttgctgaaaaggtagagatctaatcataacactcccatgggctagaatcttcagcagctccctactatctgtaagcagctataatgaccttcaaggacctctgcagtgctgactttacgtaacgatgtaattagatggtaagttctcttagggcagggactgtgtgtcttgttcagctttttatcagaaatggcaaagtggcttgtgcttcacaggtccagaagagtctcctgaactggattaaatccaaagtaaaaagaaaaa

SEQ ID NO: 912748 - DNA, 582 bp, Homo sapiens
cattttaggagcctaagaaaaaaatttttgtcagttcttcataccgtgttttatgcctcaattaacagaataagctgtgtgtgcatatgaatgctgcacatccaattacttttttcagcggtatggaaatggtaactggaccctcgtctggaagctttgccactgtggctatcacattcaaagggaaaacgtgtatctaggaaaccagctatgctgaaggtgaattttctcagggatcagtttttttctaccaaggaatcatgtcctttttgggagcagggattctttcagccttaaaagaacaatgatttttatagtacacaaatcaaaactttattttttggaaaacaattattgatcaacatgtatcatcagcaatgcagcaaagtctccagccagactgcagagatttaggctgctcaattctccagtggccctgggggttgagagatccatagtgattgctacttgcaaagctctattaatgacacaactttttccatgctttcatactaaaatacaaaagtatgccaaagaaaccacaaaagtkatatgtaaaaagagaatagtcttaagtagaga

SEQ ID NO: 912749 - DNA, 600 bp, Homo sapiens
atcattgaatgctgtggagagatgtggagtagcacgtcattatacagtatttccaccctatggatataatagataagaataacctcaagaacacagataatattaaaatgtagtaaaaataattaaaattatgagtgttgagcatttattaccttatttctagtataacttaattatttgtaagcttatacaattttatttgttatttctattttttatttatttttgagacagagtctccctctgtcgcccaggctggagtgcagtggcgagatctcggctcattgcaacctccatctcccaggttctaagcgattctcctgcctcagccgccagaatagctgggattacaggagcgcaccaccacgcccggctaattttgtatttttagtagagacggcgtttcaccatattggccaggctggtctcgaactcctgacctcaggtgatccacccaccttggcctctcaaagtgctgggattacaggcgtgagccaatgcacctggcctacaattttatttttaataatggctgtgttcaacaactggctggcaaaattctcagacrtttaacaattgactcctgagagttagtacagg

SEQ ID NO: 912750 - DNA, 588 bp, Homo sapiens
gctcccctacctgtctgtcttcagctagaatgcttctgtaacagcccacaggactaagctttgcaaggcctgtggttagtgtctccagtacccaaaagatacatatttttattcagttaaaattggccattttaaccatttaaaaatgttcacttattgacttccagtacatttacattgttgtgcaattaacagcaaccacaatttaattgcagaacattttatcacgccagaaagaaacggagtgcccattaagccaggcttgtccaccctgcagcccatgggccatatgcgacccaagacagctttgaatgcagcccaacacaaatttgtaaactttcttaaaacattctgagatttttttcaatttttttaagcttatcaactattgttagtgttagtgtactttatgtgtggcccaagataattcttcttttccagtgtggcccagggaaaccaaaagattagacatccctgtattaagcmgtcatgccctattaccttctcccaactgtccctgacaaacactaatctgctttcagtctgtatggatttttaaattctggacatttcatataagtggagtca

SEQ ID NO: 912751 - DNA, 581 bp, Homo sapiens
agcagtgtataagcattgccttttctctgcaacttccccagcatgttttttttttttttttgactttttaataatagtcattctgacttgtgtgagmtgatatctcgttttggttttgatatgcatttttctcataatcagtgatgtagagcttttttatatgcttgttgtctgcgtgtatatcttcttttgaaaagtttctgttcatgccctttgcccgtttttaatggggttgcttgcattttttccttgtgaatttgtttaagttcctcatagattctggatattagtcctctgtcagatgcacagtttgcaaaatttttctcccatgctgtaggttgcctgtttactctgttgatagatgcatttgcagtgctgaagccctttagtttaattagatcccatttgtcaatttttgcttttgttgcaattggttttggagtccttgtcatgaaatctttgcctgttcctatgtccagaatgatattgcctaggttgtcttccagggtttttatatagactcagttattgtaataatcttctgaacctaaagaaggtgataggaacatttaactagaagt

SEQ ID NO: 912752 - DNA, 668 bp, Homo sapiens
gggataggattccctatttaataaatggtgtttggaaaactggctagccataygcagaaaactgaaactggaccccttccttacaccttatacaaaaattaactcaatgtgaaatatagacttaaacatcagacctaaaaccataaaaaccctagaagagaacctaggcaataccattcaggatataggcatgggcaaagacttcatgactaaaacaacaaaagcaatggcaacaaaagcctaaattgacataagggatctaattaaactaaagagtttctgcacagcaagagcaactatcatcagaatgaacaggcaacctacagaatgggagaaaatttttgcaatctatctatctgacaaagggctaatatctagaatctacaagaaacttaaacatatttacaagaaaaaaaacaaccccatctaaacgtgggcgaaggatatgaacagacatttctcaaaagaagatatttatgcagcctacttacatatgaaaaaagctcatcatcactggtcattagagaaatgcaaatcaaaaccacaatgagatactatctcctgccagttagaatggcaatcattaaaaagtcaggaaacaagagatgctggagaggatgtggagaaatatgaacactcttatactgttggtgggagtgtaaattagt

SEQ ID NO: 912753 - DNA, 620 bp, Homo sapiens
cagttgagtatatatacatatatatatttatatatatatacaacaaaatatatatatatatgttagagatcggtgtgggaaagggagagaatatagttatttgaaatttcarttccttttaaaaagagacttggaaaaagccttcaaatatttattctactaataaagtttttgaggtacctggaacatagtggaaaatcatgtaagattatataattaaataaatgatttcaggaatgaaaattaaattaatgactatctaactaaatattttccttgtcagtacaaatagttgtctgtggctgagattatctgctatccatcaacacatcctctctctcacttctagataacatggctagacttcattttctttcaagtttttcttgcagttatatatggctatgtgactatttatctccattgaaattaataacattagccccaagtttgtttgtgtgtcctcttgactcttttctcatttttattggctacagcctgaacatagtggaaattacacattgaatatgcagtacccttggtaataacaatgaatattttatactatctaccgttcacacaatgctggcatcatctacttattgttttatatttgcttt

SEQ ID NO: 912754 - DNA, 635 bp, Homo sapiens
gtacctatgagaccataaaaccaagttgctttagaaaactttgttttaatttgctttctaaagcagtcagctaggctaaaaaaattcattttgtcttttctgcgatactttacaagaactgtgtgatcatcattttactttatccaccattttttgtgccacccctttgaactcagttttgtttaaagtcaaatattcagtgttttttagaaaatgttatcatgaattaccagcaggaaggattcaatgcaactatggttcttttcttcaagtagtgatagaaatttcacgaacttagcaacactgaaaatttggccttacacttgtaacatttgccacgtgatactttaaataatcttccaaatgtcaactgtaatattatctcttcctgctaagacaatggatgggcctaaaattggctaggaaaagacaactgggtctatctagcgttcttggaggaagatgccagaaaatcttgattaataccatcactccctctggaattaatttttagttctcccatcaggtgtgttgatggaaagaggtcttacagttctagtaattgccctggattccttcrctgtccttcatcaggacctctaatgaagtctgagctgtagcctggggttgatgcc

SEQ ID NO: 912755 - DNA, 663 bp, Homo sapiens
tagttgatcctctgagtttctgttgcctgcaatcaaagaaccctgcaagagataggtgtatcgcattctctcactgaactgtgattctttggtctaattaaaactatagcaggcatgcattaaatastgcacaccaaccaagtacaaaatacttatgtatagtatttcatttaattttcacaatgagctttcaaggtaggtaatactctcccttttcagatgacaaaaattattttctgagacatcagttaattttcttaatgtcttagacacagttactagttatgggaccaagattttctcactgactttttctaattcccaagaccacattttcccacaatgacttattttttccatatcctcattgtctagcacattccttggcacatcatattcccaataactttacagtgagtgaataaacagagtaagaaatatccacgtccatgtcttcattagttcatcaccaatataaaatggcctacaattataaagtcacatttttatcctttgcctctgtcatcataaaattttatttgccatttagtactatgaaaacattggcagatctatcatctatttcaaacattgccttagcataccaataatctcgtttattttatgattgtttctgagcttaattgtgactgccactttcag

SEQ ID NO: 912756 - DNA, 469 bp, Homo sapiens
ttcaagaaggttgatttatttcaataattacagcataccattcaggacactagggaaaagtctttgtrtttgtgtgtgtttgtgtgcacatgtgtttcattaaatattggaggagaaatttaaactttctctctacctagtgtcaactatagtaaattcttgaattttgtactttatggatgttattttaataattttcattagtaaagataatagggaggatatttctagcagcaaaatggaaacagaaaaaaaaaagtttgaggcatttacttaagaaagaaaaagaaaaatttaagattattaagtattttacataacaccaataggcattaaccaaagagttatcgaaggtgaaaataagatttcatgtgataacatttttcatgaagatatattttttaaaattacaggttaattagtgataagtaatcatctgcaatactaattttaagatcctgtcataatc

SEQ ID NO: 912757 - DNA, 652 bp, Homo sapiens
tacccaaaggattataaatcagtctactataaagacccatgcacacgtatgtttactgcagcaytatttacaatagcaaacacttggaaccaacccaaatgcccatcaatgacagactggataaagaaaatgtgccacatatacaccatggaatatgatatagccataaagaaggatgagttcgtgtccttcgcagggacatggatgaagctggaaaccagcattctcagcaaactaacacaggaacagaaaaccaaacagtgcatgttctcactcataagtgggagctgaagaatgagaacccatggacacagagaggggaacaacacacaccagggcctgtcgggaggtggggggctaggggagggatagcattaggagaaatacctagtgtagatgatgggttgatgggtgcagcaaaccaccatgacatgtgtatacctgtgtaacaaacctccacgttctgcacatgtatcccagagcttaaataaattaaaaagagagagagagagagaatatgagaactcaaggaaaagaactgggataatttacaagtggttccatagtataggaaataataaactgttcacaattgcaaaagaaaaaaaaaactcataactagagtgagactaaaagtgtgcagggaattaga

SEQ ID NO: 912758 - DNA, 612 bp, Homo sapiens
aatctcttgggcacttctgaatctgtctattctccacatatttgactgcaagaccttccaagattatgactagtgatttacttccactttctaaaccttgtacaaattccccccaactccaattgtgttcaggagacataaagggaatgggattctgagaaatgtagttccactttaaccaagtgatatggcacacttcagcaaaattccagaggaaaaagactggtcatttattcattcattcatttaaataagaagtatattgtgccagtaacactcgaggcactcagcttgcagagcttcaaacagacttaatggaatgtaaaacatagcagaacagacattataaacacgtttcaaatactgaagtctataattataaacatgatagtgctgtgaaggaaaattaacatgggcccatgagagaaaatgacagagtaggaagaagttagactgagtggtagagaatacttcactgagagatgacatgtaagctgagacatcacaaatgaagagtgcaagaaaatattytagaaaaaaaaaaaaagcaagtagccccatctcaaaatgccctgaaaggggttgagtacacttgcgacaacctcttcctta

SEQ ID NO: 912759 - DNA, 623 bp, Homo sapiens
agtataagtggacccacacagttcaaactcattttgttcaagggccaactgtacctagcatataccaggcccatttctaagggcctaactcatttaatttttgcaatgtccctgtagggcaggyactatgattattatcatcttaattttatagatgagaaaactgaaatacaagacagtgaggtaaccttgcccaaagttacagggtgagctacggatgagccaggatgcaagactaagcagtgtggctcctgtgaaactcacacactaatgccacagcaccaccactggatgtcagcataccaaattgaaggagcagcagccttttaaggaaaaaagcggaacagcatttactgagggccttccaggtgcaaaacatttatgcatacattttctaatttaatctaagaggttaaaaacaactttttatggaacaaaatatacaacacttagttcagttagtaaagtgactgacttgcatcagaggagctttttgttcatattttttaaattggaaaaataataaaattagagtagacttagaagttaagaggatctgtccctagattcctcattaacaaagggctctttccagctattcacacttgatcacacaataaaac

SEQ ID NO: 912760 - DNA, 623 bp, Homo sapiens
aggtgaagtgactgtggaggagaaagagttagagtaaatggcccaagctaggaattaagtggcagtcacagccagtcttgggaaaaaatatagcacccacaagcattaggatggggacttagtctatcagagggctgatgccaatgcataacacagacaaggaaacagaaggcaatctgtctcatctacagttgcatcagacacagagtcaatatgaaaggccaagggacaacattctttagtgggagcctgcaaacaaccgaagggtacacattgacctgacgccacttccccacctcatcatgctgcatgtagccatgaaactcatagtctccctgaacccaagcaaagaagaaagagcagaggaaaaaagccactgaaagtttaagtgtctgttctaaagagttggatttatccagaaagcaatgaattttaactggaagtcagtaagatacattcaagtggcatataagtattccttccttaagcagaaatgggtgctggcgagcaagcagtattcagttatgcagaaataaagttatatttctacccacctcagtcacagtgtayaaattttaaatccactctatatgtaagggccagtgatttatcagtgctgaatt

SEQ ID NO: 912761 - DNA, 653 bp, Homo sapiens
aggagagctaaacagctaataatcatttttgaaatgtttaatttcattattctttaggaaaacacaaacgaaaatcacagtgatattctgtacatactaattagactagcaaagaatagaaagacatgaaaatattgacttggtgaaatgtggagccactggaactctcctacatggctgatggaactgtaaattgcattaactactttgcaaaagtgtttgagagttaacattaagccatgcttactctataacccagaaattccacttctagatgtaactgacaaaaatgcatatatttgagcctaaaagacatgcacaaatgtttgtatcagcactatttgtagcaactaaaaactggaaacaattcacacacccataaaccatgaaactgataaattaactctggaatatttatacaatagaaattataaagcaatgaaatgagcaaactaccgctacacgaaataaccaatataaataaatctcagaatcacaagtctgtgcaaacaaaacaaaaaacagacacaaaataatagtgtgtataattctatttacaaatggaacaaaaacaggcaacaacaatctacggagttgaagtcaggagtayagttagctttgacagaaaaggcaatgatggggttcaggattca

SEQ ID NO: 912762 - DNA, 613 bp, Homo sapiens
tccagaagtgggtttttcttttatattacatcattaggctgaaaattttccaaacttttatgctctgcttcttcttgaatgcctcgctgcttagaaatttcttcccctagataccttaarttatctctctcaagttcaaagttccacagatgtctagggcaggggcaaaatgccaccagtctctttccatagcaagagtgaccttcactccagttcccaacaagtttctcttctccatctcagaccacctcagcctggatcttattgtccatatcactatcaccattttgatcaaagccattcaacaagtctctaggaagttccaaactttcccacattttcctgtcttcttctgagccctccaaactgttccaaccactgtctgttacccagtttcaaagttgcttccacattttcaggtatctttatagcagtatcccaccatctggtagcaatttactgtattagtccgttctcatgctgctaataaagacatacccaagactgggtaatttataaaggaaagcgttttaatggactcacagctccacatgactggtgaggtctcacaatcatgtcaaaagacaaaggaagagcaaaggcacatcttatc

SEQ ID NO: 912763 - DNA, 614 bp, Homo sapiens
aagcaaagtgatttcagggtgktcccatctgcagataagaggtggggtcatgtgggtgaaatgccgaggtctggaatatgggttgtccacaggccccgtggcctcctgacctgtggcctcggctgcctgactgatgggagctgactgtgctgagtgaccctgagagtgggtggcggttctgagcactgctttctccttgttagccccttcccagtagttccctgcttctgccattcacagtttttctttattggaggtgtggcgtctcagcgtcctggggcattgctttggctcaaggtcaaggtcagcttcttcctccagccccgaggttgggctcagcagggccacacaccttccctttcagagtgcacagagctttccagtggtggcttctaggatctgaagttccaacactaaaccagtgacaaagctgatttccaaatggctttaatgacagacaatctgcataccaatcgactcgtctgcgcacatgcaggctcagaacaatgcgggaaaatatgcaaaaaggtctgagatgtgatggcaattgcttcccagtatgctgaccttcggtaaacgaaacaaacaaagtacagttctctttggatgagaca

SEQ ID NO: 912764 - DNA, 620 bp, Homo sapiens
tgtatttgaatcaatttttttttttttggagacggagtttcactctgttgccccaggctggagtgcaatggyatgagctcggctcactgtaacctccaactccagggttcaagcaattctcctgcctcagcctcccaagtagctgggattataagcatgcaccaccacgcccagctaattttttgtatttagtggagacagcgtttcaccatgttggccaggctggtctcaaactcctgacctcaggtgatccacccgcttcggcctctcaaagtgctgggattacaggcatgcactaccacaccctgccatgaatcaattattataaaataactattaaagtattagctaaatgagaaggaatcatgcttaggattaaatagcccttctttattaaaccttcttaccaaaaatgtgatgggaaaactattcaagaatgaaagcaaagattgcattttgatggtttcaacagaaaaatggataagcatgatatggttcatacaagcaatggaacatgattcagccttaaaaaggaaggaaattctgacacatgctactacatgggtgaaccttgaggacattatgctaaattaaataaaccagtgcaaaaggaaaaatat

SEQ ID NO: 912765 - DNA, 634 bp, Homo sapiens
ttttcacttcaaaaaaactttagaatggcaccattcttccttctacatctatgtacatttgaaaccttataaagacatttcttggcaccctcaaaaaccaccatccgagcctaccttattcccaacaacagacccactttctcatgccactacccaagttagggaacaatcttctatgttttctgtgacactgtgacatttaaatgtcctcatggctcctgaggtacccactaccagactcatcagaacctgtccaatcaaatcaccccatagtactcaacccaacccactcctcagggccagagaagtccacattctgccctcatttggactttagaacctctctctttcacagactgccctccctcacccccatccaactccactgtgattttatgatataataagaaatataaggccaggcattgtggctcatgcctgtaatcccagcactttgggaggcccaggcaggcagatcacttgtgagaggtgaagccagctgaacttcctgkgtcgagtggggacttggagaacttttctgtctaggtagagaattgtaaacgcaccaatcagcgccctgtgtctagctaaaggattgtaaatgcatcaatcagcactctgtaaaaatgcacca

SEQ ID NO: 912766 - DNA, 623 bp, Homo sapiens
aataataaacttgtgtgatggtttttatttttwaaagatatttgtatatgcatttactaacttgaactttttaagaactctctaaaggaaatagaaaaacaaacctttgtctttgtatttcgtagatgagaggcaatattgtttggtgggtaagagcatgggctttggaggtatatccattaggaatactatcaggtgtaaataacagaagatctgactagcacaatttaaaaaatagaggagtgcgcatatctctttgacctactgatttcatttcctttggatatatacccagttgtgggattgctggatcacatgatagttctagttttaattttttgaggaaccttcatactgttttccatgactgtactaatttacattcctacaaccagcgtgtgcaaagattcctttttctccacgtcttcaccaacacttatcttttgttttttgttaacagccattgtaacaggagtgaggtgatatctcattgtggttttcatttgcatttccccgaagattagtgatattgagcattttttcatacacaagtccatttgtatgtcttcttttgagaaatgtctatttaggtcttttgcccattttaaaaatcaggttatttg

SEQ ID NO: 912767 - DNA, 610 bp, Homo sapiens
tagggtatggaaatgtaactgatttttttgtgttgactttgtggcctcctactttgctgaattcatttattatttcttacagtattttgtgtggaatctttagggttttctacatgtaagagcatatcatctgcaaagaaagataatttcacttcttcttttccaatctgagtgccttttctttttcttgcctaatttcctttgctaggccttccagtactatgttgaatgcaagtggtgaaaggagtcaggtttgccttgttcctgatcataaagagaaagctttcattctttcaccattgagtaagatatatgctccgggcctttcatatatatgacctttattgtcttagggtgatttccttctattcctagtttgttgagagttttaaattaggaagcagtattaaatttaatcaaatgcttgtatgcatgtatcgagatgatcatgtgatttttagccttcattctgttactgtggtgtatcacataaattggcttttgtatgttgagctctccttgcatcctggggtaaacccacttagttatggtgtttggtcattttattgtgctgttgaattcagttgmttgtattttgttgagtattttt

SEQ ID NO: 912768 - DNA, 651 bp, Homo sapiens
tcaaaataagatttaaaaactctgcattctggatggaagaccctgtctggtgattagttgcctggaagagcttgttacaagccaaatagaaggagctgtcatcctgttgatggtttccagggactaaggctccaggacctgcagtaatttcatttgtcatcattgcaaaaccagatagtcacgtgagctgccaaggcctgcagcggagcaggttcacttgccaactgtccttaggaatcggaacacaaggtagacaaggcaactgctggaaatgaattatttctagcagttatattatcattgtcgtgaaaaatggaggaggcagtgaggttggatatacttgtaaaaatttcccaactctaggcaaaaacttctaatgatgaagatatctccagaaatcataaaaataactatctcccttgtcatggtgagaacaggctcggaggaagctttgatcagacagggcagcaacaacagaccaagaggaggagaaagaaatgtgaccctgggagaacctccctaccagcgtgtygggtgtcagctagagggaattcacctccagcaagacagcctggagcacagtgtcccaggagaataaaaacacaggtgatactgagtcaagcaagagtgccagaggaaggtggggaaatc

SEQ ID NO: 912769 - DNA, 597 bp, Homo sapiens
tcttccttaccatgttcttcttttcttcctgattgtttcaggggaccctgctataaagaactacctgagactgggtaatttatgaaaaaaaaaggttcaattgactcacagttccacaggctgtacaggaagcatggatgggaggcctcaggaaacttacaatcatggtggaaggatgaaggggaagcaagcaaatcttcacattgtggcaggagaaaaagtgagcaagagggaagtgctacatacttttaaactatcagatctcgtgagaactcaggatcacaaaaatagcatgagggaaacctgcctctgcaccagagcccctgtcatagctgcctctgagcctgttgccgccacctctgagaagatggctgtgctactcacatatgagatcctgtcaaatctgccagggatgtcttcaccaatggctatggatttggcttaataaagcttgatttgaaaacaaaagagaagaatggattggaatttacaagctcaggctcagccaacactgagaataccaaagtgacgggcagtctggaaaccaagtacagatggactgaatatggcctgrcatttacagagaaatagaacacc

SEQ ID NO: 912770 - DNA, 597 bp, Homo sapiens
  misc_feature 483: n = A,T,C or G
tgctttaaagagagagatctgttctgttccgttggtctatatctctgttttggtaccagtatcatgctgttttggttactgtagccttgtagtatagtttgaagtcaggtagygtgatgcctccagctttgttcttttggcttaggattgtcttggcaatgcaggctcttttttggttccatatgaactttaaagcagtttttttccaattctgtgaagaaagtcattggtagtttgaaaacaaagcactgcatgttctcactcataggtggaaattgaacattgagaacacttggacacagggtggggaacatcacacactaggggagggggggagggatagcattaggagagatacctaatgtaaatgacaagttaatgggtgcagcacaccaacatgacccatgtatacatatgtaacaaacctgcacgttgtgcacatgtaccctagaacttaaagtataatttaaaaaaaagagaganaatttctgtctcgatagtattttcctgttaattttaaatatattcacttataaattgcatttatttttctaaaaacaggcttttatatttctggccaatttttccccattaatt

SEQ ID NO: 912771 - DNA, 516 bp, Homo sapiens
gccatatgcagaaggttgaaactggaccccttccacacactatatataaaaatcaactcaagatggattaaagacctaaatgtaaaaccaaaactataaaagccctggaagaaaacctaggcaatgccatcctagacatagaaacaagcaaagattttatgacaaagttgctcaatgcaattgcaagcaaaatcaaaaattgacaaatggaaagtgcttctgcacagtaaaagaaaccatcaaccgagtaaacagacaacctagagaatgggagaaaatttttgcaaagtatgcatctgacaaaggtctaatatctagcatctataaggagcttaaacaaatttacaagaaaaaacaaaaaccccatcttaagaagtgggcaaaggacatgaacagacccttttcaaaagaagacatacatgcaaccaacaagcatatgacaaaaagctcmacatcagtgatcattagagaaatgcaaatcaaaaccacagtgagataccaaatctcacaccaatc

SEQ ID NO: 912772 - DNA, 651 bp, Homo sapiens
aaccaaaaagaacaaacctggaaacatcacattgcctgacttcaaattataccagaagcctaaagtaatgaaaacagcacggtattgaagtggctacgttgtcttgggtaaatacccagggtttgttttctcgtgtcgagaaaatttaggacgaggagtttaggaatggaggtttaataggcaaaagaaagagaaagaaagagaagggaaaacagctttctttgtctagtgagaaagagcggacttcctagaggaaaaggccagctgtcagtggatgtgctggattttgtagtcctgcttgaggaggtggtgtctgatttacataaggctcacagattgtttcaatcaagtatgacgtttacatggtgcacagggaaggctggttgtcctaccctaatcatattatgcaaataaacttcctccttggagggtgcaatcttgtctgctccttaccggacatgtggctgacaaagagaaaggaagatggagccgccatgttgaacatgattggcacaactgctggcgtctgtgtctgcagctcaattttacaggctgttctttgttagaaaatgatttacagctgtttttcattaaaaggaaacccttacagaggacttcygtaccctcattatctgcctaagtaatttcttc

SEQ ID NO: 912773 - DNA, 581 bp, Homo sapiens
ttcttctcctcttgacacagcctgacttccttaaagaagatttgactggccagacagctgtgttgacccttaagccttctttgattcgtgatttttttttttaacaaacagaatagaaattcacaacccaaatcctttcctaagccccaatacttgtgaatttgctagtgttgtgcctgaaggatgtggacatttcagtaatctataagcagaaagttaaagattgggtctacacaataccaaaagctttcgatgaaaagcgagagagaaaaaagcgagcaatcagccagaagctttattcaaaggtgatacttgaagttatgtgggctaaatctatttaactacctaaaaattacacttttcactcagacaacatgtcaataaacagacaaccaagaatacacagtcacatcttctctcaaaaatgttatccataatgatcacttcataggttgtcatagggagttttcacttctttatatatttctgtattgtccagctcatccaaaatccagcacacgtttcttttagttctgaraaaagccaagctattatcttttcaaaatgacaaaagaaaatgc

SEQ ID NO: 912774 - DNA, 655 bp, Homo sapiens
atcattgaattcccagtgcctggaatgtattaatagttgatggcaataaatatttggtgaataaatgaatggcatttatcacactctgcttatagctttgtgtgcacagtgtatgtctcatycactcttcactgtctttaagaatataactgatataggacgccctttgtattcccccaacactttcaacagtgccttgtccatagtaggtactcaaacaaatagttgttaaacctgttcctctaatgggcaagtaatctaaggcatgtgatggtgagtcagtggcatcacatttgattcaaaagaaaacacatttagtccaataaatcaacagataattactaagcactctttatgcaaaaagtatagggttctttatctgtctatctgtctgcctatctatctgtccatctgtctgcttgtctaggattagagaagtggttgtagagatagtgcagggtctggttttgggtccatctttgctcctgagtgtctatatgatcttgagtagttagggccctctaaatgtcagtttccagtttcttcaggctttaaaatgagcataaaatttttagttaacagggaaattgtgaggattgaaagaaggggtgtatctgaaagccttttgtaaaacatgaagtgtaataacatgtat

SEQ ID NO: 912775 - DNA, 646 bp, Homo sapiens
tttattttggaatatttgcattatacttaccaattgagcatctataatccagaaatctgaaatccaaaatgctccaaygagcatttcctttgagcatcattttggcattcaaaaagttctggattttgaagcatttcagattttagatgcttggattagggatactcaacctgtattttcacttttttctgaggatcactgagccagggctgagtcaatctcatgagagccaccaaagcccatgcattctagaaaattaacttcattccctgggcctctgtgtcttctacttttaaaaagaggagaaaacaccagcttcctctgagagcccctggcacacccgcgatccaatgctggtggctaagttctctgcagacctagaagcttcataatgaggggaaggaagaggtggggcatttagattctctttgcacaatttcttcccccagttgctattcagctctctatctcttggtgagattgtaaatgttttagaaaatagtttatacgaaatatgttccttcctaaatctcataaacagttactcctttccacataaaccttaaccacttatgcccatgataggttccaattagccacccacatatctgtggaggggaaaaatatgttctagcatatacacaca

SEQ ID NO: 912776 - DNA, 577 bp, Homo sapiens
ccctaatataagaatctgctcaaaatggattaaagtcttaaacaaaagtcattgaattatacttaaagtgtgattcttgtttacatacacagttgggtcttgcgtttttattcaatttaataaactccttttttaattagttttttgtaaatttcacatttactgtaattattgatgtggtgaattaaaatctacctacttgctaactgttttttattagtttcttattatctttcatttttcctctttttctgtagtggatataggtgaaagaagtccaggtggtttcctgctcctctcataggggctgatattctgcttcaccggtcttgcaccaggaaaaatgctttctcatgactcttcccagtattttttttgtgaactccaggtgttcttgcccgttaaaccttacaagaaagtgcaaacttgcccccagggcctccatacaatttctctcacttaatctatctaaatcatcttmttgttgtccagctaaaaccgccctaggtaattaagcgcttgcagtcctgttgctttggaggtgcttccctttctttaaattgtgggatagttgatt

SEQ ID NO: 912777 - DNA, 593 bp, Homo sapiens
cctatgatatactacctagacaatgcaaattaaagtcagattgctgatgtcaatactagtagcaccacagggaagataaaaaccaacaattgggagattacatcattacagatgtaatttcctcaacatctttaagtgtacctaacgaaagattgatagcaaatttaatgagcagctgttcttatgctgaatgcacatgatgctattatataaaatggaaacaactggaaatgtgtcagaaatgcgctttacatcattagtcaaaaatgccattgattgatcagtatcatactgtgtttggccccagcaactacttctgcattgttcaggacaaatgacatgtaaaagaaagtttcaggtaaaatccatgtttaagaaaaaaaaacattttttcataaagaaaatgtcagtgtctttttgaagcaatatgacgatgaactgtctcctgtcacataaaggaaagtaactcttttggcaaattatgttgtcttatcttttgccaggtactcatttggtaaactgctgcatatattgttttwctctcatagctataaattatatctggtttcttctaaattgcaacttatttaatg

SEQ ID NO: 912778 - DNA, 622 bp, Homo sapiens
tttggatgtgacatcaaaagcacatggaacaaaaggaaaaatgaactgagaccacrtcaaactaaaaagcttttgcaagcaaagggaaaaaatacacaaaataaaaaggcagcttatggaacgggtaaaaaacttgcaaattgtatatctgataatgtgttaatattcaaaatatgtaaggaactcccacaactcaatagcaaacacacagacacacacacacacacacacacacactccaattaaaaaatgagcaaaggcttgaatagagaatagggaaccctgtacacccttggtgagaatgtatattggcatagccattatgaaaacagtaaggaagatttttcttacattaaaaatagaagtgccgtatgttctagcagtctcacttttggatacccagtcaagggaagcgaaataaatgtatcagagaaatatctgcaccccctgcacctctcattttcattgaagtaatagtgatgttgccaagatgtggaaacatagtgacattgtcaagatatgtccccccactgggaaatgggggaaatagaaagatattagtcaaacggtataacctttcagttataagatgaacaagttctgagtatctaaggtacagcgt

SEQ ID NO: 912779 - DNA, 590 bp, Homo sapiens
gctcccctacctgtctgtcttcagctagaatgcttctgtaacagcccacaggactaagctttgcaaggcctgtggttagtgtctccagtacccaaaagatacatatttttattcagttaaaattggccattttaaccatttaaaaatgttcacttattgacttccagtacatttacattgttgtgcaattaacagcaaccacaatttaattgcagaacattttatcacgccagaaagaaacggagtgcccattaagccaggcttgtccaccctgcagcccatgggccatatgcgacccaagacagctttgaatgcagcccaacacaaatttgtaaactttcttaaaacattctgagatttttttcaatttttttaagcttatcaactattgttagtgttagtgtactttatgtgtggcccaagataattcttcttttccagtgtggcccagggaaaccaaaagattagacatccctgtattaagcmgtcatgccctattaccttctcccaactgtccctgacaaacactaatctgctttcagtctgtatggatttttaaattctggacatttcatataagtggagtcata

SEQ ID NO: 912780 - DNA, 655 bp, Homo sapiens
tggagatgacagcaccatgtaygttattgcccctgaagacctttaagtgagacaagatgtggaagcgtagacaaatgtattaatgatcttgtaggcctaggctaatgtctgtgttcatgtctttgtttttaattaaaataatttgtgctaaagaggaaaatgtttatagaatacaggcatgcagaaagaaatattttgtacagctgtacaatgtgtttgtgttttgcattattaccaaagaatcaaatttttttttatttcaaatttataaagtaaaaaagttataataagctaaggctaattgattattgaagaagaaaaaatgtctttttaaataaattcagggtagcgaatggtatagggtttataaactctacagtagtgtacagtaatatcctaagccttcacattcgtagacactcactcaccaactcatacagagcaacttccattttctgcaatctttattcatggtaagtgtaccatttttaaatctttttaaacagatttttactatacctattctatgctaatgtgtgcttaaatacacaaatacttatcattgtgttataattccctgctgtattctgtacagtaagattctgtacagttttgcagcctagaagcaataggctataccatgtagcctaggcat

SEQ ID NO: 912781 - DNA, 611 bp, Homo sapiens
ccaacaaacagattataatatctgtacagttttctttcttcttgaggactcacaatatcttgagattcctgggcctgttagaaagtgccattctttacttgccacaagtcaagawccttataagggaactatataggcaagataccaaaccagtttttccacagaacattttatcagctgtataaattcaatctcaattcctcaaagcagcctggtcatacccgaaaatgtgccattctattcaaagccttggaaaaataaccaatgtctccaagtatgtcccattacaaaagaaaacagattcttactgaattttatccaaataactgtattgccataaaatcaaggtactcatgaatactttccaaatttggggaaatcaggtaaagagaaaggtgaattttgctcatagaagtccactttcccaatttctctaagctgtacagagctcaacagaaaaaaaaatacatattttctttacttttcttccatcagagtagcagcctccaaacaggatgctgaccactcactccagagctgctagccacaagacaagcagctcttcttcagtcagtcaggagttttctgttgggccctataggatccagctg

SEQ ID NO: 912782 - DNA, 606 bp, Homo sapiens
ttgtatgaattcacctaaatgggtgatrttatttcatccagctccgtttattatcttgcaacaaatgaggaccaaatttccttctgtacctctggtctctctgcaaaggccaagattatatttacaactggctgtggaaaattcctacttgtacatgccttggatacaagttcaggattaaactcctcctcccctttaaaccaggtcttcctcatggcgtctctatttcgagctaagacaccaccattctctgagttccctgtgtccaatatcacagagcctccatccactgccccagtcctatttgcttgtcccctaacccaaaccactaccaaggcctatttctcacatcctgccatgtctttctccaacatttctcacatgcaccccatacttcctttttatttcccttcccccataacgtgcagcaccaccctgccccagaacatcaccatttccagactggactgctacaacacctccctgttccccagctcccacacagaaccccagtcaatacactgctgcacaattattttcttacagcatagttctagttccatcacttctctgctgaaagcctttcaaaacatttcagagcctctg

SEQ ID NO: 912783 - DNA, 588 bp, Homo sapiens
gaagctgcagtgagccacgatcgtgccactgcactccagcgtgggcgacagaatgagaccctgtctcaaacaaacaaaccaaaaagcagtcatcctcagctttacttccagtatgtctcaccattctgtagagtgctaattgtaattcacaattctcactgccaactttgttcaactagcgttcacgttaaaatttcaagtttagatgacaatgcaaaacttgctatatttcactaatctgagctaatctcataattaatgactaaaagttttatatataatatgctaggctatttagattttcaggtctttcatcctgatataggcaccttggtctgcccttttcaacaaggcagccataaaattacaggtttgtaattatcttcattctttaggacttcataaggagccattaaaatagttaaacgacattttatagaataatgtactgcgcagacttttcactatgatgacartttggccgtagagcatgttctgatgtctgggttttttttttttttttaatcagtagagagtgcgtttggcctatgcattagtagattactactagtcttgaacagttccatc

SEQ ID NO: 912784 - DNA, 588 bp, Homo sapiens
gaagctgcagtgagccacgatcgtgccactgcactccagcgtgggcgacagaatgagaccctgtctcaaacaaacaaaccaaaaagcagtcatcctcagctttacttccagtatgtctcaccattctgtagagtgctaattgtaattcacaattctcactgccaactttgttcaactagcgttcacgttaaaatttcaagtttagatgacaatgcaaaacttgctatatttcactaatctgagctaatctcataattaatgactaaaagttttatatataatatgctaggctatttagattttcaggtctttcatcctgatataggcaccttggtctgcccttttcaacaaggcagccataaaattacaggtttgtaattatcttcattctttaggacttcataaggagccattaaaatagttaaacgacattttatagaataatgtactgcgcagacttttcactatgatgacaatttggccrtagagcatgttctgatgtctgggttttttttttttttttaatcagtagagagtgcgtttggcctatgcattagtagattactactagtcttgaacagttccatc

SEQ ID NO: 912785 - DNA, 588 bp, Homo sapiens
gaagctgcagtgagccacgatcgtgccactgcactccagcgtgggcgacagaatgagaccctgtctcaaacaaacaaaccaaaaagcagtcatcctcagctttacttccagtatgtctcaccattctgtagagtgctaattgtaattcacaattctcactgccaactttgttcaactagcgttcacgttaaaatttcaagtttagatgacaatgcaaaacttgctatatttcactaatctgagctaatctcataattaatgactaaaagttttatatataatatgctaggctatttagattttcaggtctttcatcctgatataggcaccttggtctgcccttttcaacaaggcagccataaaattacaggtttgtaattatcttcattctttaggacttcataaggagccattaaaatagttaaacgacattttatagaataatgtactgcgcagacttttcactatgatgacaatttggccgyagagcatgttctgatgtctgggttttttttttttttttaatcagtagagagtgcgtttggcctatgcattagtagattactactagtcttgaacagttccatc

SEQ ID NO: 912786 - DNA, 654 bp, Homo sapiens
tgatgacatcatgcccaccctagaaacgccrtccgcccgcttccggcctgggcttcctaggacggacgggaaacttcctacagctggggagggcccgagacccgagtccagcagctagaggacacaatagaaaatacacaaaacaagagaaacccaggaaactctctaaacatgggccctgccactccttgcaccgggtcacctctgtgccatctccacaggcgtctgctcgccctgactagagacaggaaccaggagtgcccactgggtgagccacgaccttgagctcagtacaagcaggaagttcctgcttcattcaatccgaactgacttcaggtaaatacaggggtcccaattgtgggccgaatcgtccagatgctcagggcggccagcctcagcctaagggaagcccagcatctcttttagttcaacagacagcagcttttcttcttctttggatggctgcactctcaagagttttgtttgaattttttttttttccccatgacaaattaagtcaagattttgtaaggggaaacttcttactcctccccatggtccctaccctccctgcaagaatccagaagcactgttgactgttacagattcccttttgtaaatgctacaatgcaatgaaacaacatggtaggggca

SEQ ID NO: 912787 - DNA, 632 bp, Homo sapiens
tcatgatagtaaatgtgttctcgtgaggtctgatggtaggtaaaaagtgtgtggcacttccygccttgcactccctcttctgccaccatgggaagaagttccttgcttcccgtttcccttccgctgtgattataagtttcctgaggcctcacagtcatgcttcctgttaagcctgtggaactgtgagtcaattaaaccaaacaccgcatgttctcactcataggtgggaactgaacaatgaggacacatggacacagggtggggaacatcacacactggggcctgttgtggggtggggggagcggggagggatagcattaggagatatacctaatgttaaatgacgagttgatgggtgcagcacaccaacatggcacatgtatacatatgtaactaacctgcacgttgtgcacatgtaccctacaacttaaagtataataataaaaaaaattaaacctcttttattcataaatgacccagtctgaggtagttctttctagcagtgtgagaacagactaatacacaaaccatttactaaactgacaaaaaagaaatatatatgtttaataatctaaaaacaaataatagatataatgaaaattagaaattatgagggattatgtttactaaca

SEQ ID NO: 912788 - DNA, 652 bp, Homo sapiens
ggatggattacagatgttttcaccctctcagaaataaaattgttgactccttgaaataaggcaggatataaaggatgcagctgccctctaaggctgagataacatctcagttggttccaaaagaattcaggtaactctgtaaaaccatcaacagtgtgtctcaccacttaattctaatccacagttgcttgtgaatatagggccatcctcagtgacatgaggtccttagccgaatttccatgctcaagggagaggctgggagtgaggaggagcctgcacaccatttccctgccagttcccaactgccaagggttcagacccattgagtggtttaaggctcctgcaccaaccattctggagggcagaggaagactctatgtcagccctggtgccagcctgcaatagcaactgtggtttagcaaaaagagcattcaccctgtgtattggtcagggttgtccagataagcagaaccaataggaaatatattgatatatggagagagattttttggaaggaattggctcactcagtgtggaggctgagaaatcctatgatctgccatctgcaagctgcgggcccaggaaagtctagctgtagttctastccaatcctgcaggcctgggaaccagggcagccaaaaaagtaagtccc

SEQ ID NO: 912789 - DNA, 668 bp, Homo sapiens
gccatctgtgctcggcaaatctcggaccaagaaaggcctcggtgtttcctaggaacagttctgttgcatgtgtaatggagttgggtaagactttcccatctccccagagaaggtgatgattagtttgggaaagaacaaccaacaggaaaccaaggttggctgtgctgaaatacaaatgatgggtgcaaataaccaacagaaagctttaagtggtattttgaaaatcctgatatctatttgagaaataattagggagctgttgtaaagagccaggagcctgcccaggagaaagggtagagtgaattgtgaaggatgcttctaccaattccgtaatattctatttaaaattaaaaaatgaaactgcagcaaactatttagatatttcaaaatatagtcagtacatgggtgttatttatctcattctctgaactttttgtgtttgcaatggtttataataattcccagaactctatgaaggattagattccaaggcttcatagatcaaataaaaattactgttttagtggaatcattgtgatagaagtggtagtaaaaagtgaatcccaattcaattctgattaatcttaattctccttactaccrtttatgtcaggatcattttacttaaaggtgaaaacagaaaatttaccacttattttcttctccag

SEQ ID NO: 912790 - DNA, 633 bp, Homo sapiens
tcgaatgccatgagttcaatgctaatgaatcaayaatatatattaaacaagattacgtggatatattgatttaaaaagttgtgatcagaggtgcacagcaacttaaccttgtatttctccttggagcaatgattcagcattcactaatccaatgtttgtcactaccttataggatataacttacaacatcttatggaatagaactactatgaataatgataatgaaatgtataagggttagaaaggaaagaatgaaacagtccttatttgcaaatgatattagtattaacatagaaaatccaaaataatccataaggattataattaataagtacatttaataagtaaattaataagtaatatttctatttacaaatttattatataaaaatcaattatggggggagggataaaagactataatttgggttcagtgtatactgctcaggtgataggtacaccaaaatctcacaaatcaccactaaagaatttactcatgtaaccaaacaccacctgttccccccaaaacctatggaaataaaaaaataaaaataaatacaaattaaaaaataattttaaaagtcaatttcatttctatgtaacacaaaatagaaacgtaaaatttaaaaacac

SEQ ID NO: 912791 - DNA, 633 bp, Homo sapiens
tcgaatgccatgagttcaatgctaatgaatcaataatatatattaaacaagattacgtggatatattgatktaaaaagttgtgatcagaggtgcacagcaacttaaccttgtatttctccttggagcaatgattcagcattcactaatccaatgtttgtcactaccttataggatataacttacaacatcttatggaatagaactactatgaataatgataatgaaatgtataagggttagaaaggaaagaatgaaacagtccttatttgcaaatgatattagtattaacatagaaaatccaaaataatccataaggattataattaataagtacatttaataagtaaattaataagtaatatttctatttacaaatttattatataaaaatcaattatggggggagggataaaagactataatttgggttcagtgtatactgctcaggtgataggtacaccaaaatctcacaaatcaccactaaagaatttactcatgtaaccaaacaccacctgttccccccaaaacctatggaaataaaaaaataaaaataaatacaaattaaaaaataattttaaaagtcaatttcatttctatgtaacacaaaatagaaacgtaaaatttaaaaacac

SEQ ID NO: 912792 - DNA, 622 bp, Homo sapiens
gctgtatacttaggagggactaagctatgaaaacgaatatgagtaaamcacccatgaagacattctaccctcaaggatggatgtcacattgtatttaggaacttgaaagactggtctctagttctattctttttctctccatttccaatctattttgaacagccttctttttcctttcatgccattggtctcagttcccttactttatttaacgtaggtcattttggtcttgcataactcaatatcttttcattgaaactattttcattggtgttccacaccaacttatttaagtatactagcaattaactaaacttcagtggttctgtacaccttttcctcctaaaatgtgcctcattttggaaaaagattctgatttccctttgggaggattgtctttgttccacagaatacagtctatttagtgtcctagtaagtacagtctgcaaatcaaggcacttagctcttcagtagccaaagaatgagcacacgactgaagctagactaaggagttgatctttctggaatttaagtcatgaacagggtgaaaacagaacaaaaattcacacaggcggcaggtctaaggggatatctattggcatccagagctatgctgattcct

SEQ ID NO: 912793 - DNA, 531 bp, Homo sapiens
agatttgggtggggacacagccaaactgtatcaccagtagtactgttctgctacatgggcttatgacttgtgctcccttgattcccagtgtcttagagatacttaaatagaatcacactttgtatttttacttaaattttttgtctagaggactgagaaaatattcatgggagctggaccttgaaaaagcaagaattaggcaaaaatttatttccctgactgaaccctggttatggtgattaaaactgctctttgtgagctaaacatgtttcctttgattctactgagaggttttgaaatgactgcagaagccaacacctgctcacctaaataatgcatttgtgtctcattgaagatttgcctcaatgtctaaaatatttagctgtttaaaaggtcaggtgggaagcttgtatgaatagtatgactatatttggaatttttccacctgtgatattgagtaatgctcwttcctgctattgtatttttttatttttaatttttttatttcaataggttttgggggtaacaggt

SEQ ID NO: 912794 - DNA, 641 bp, Homo sapiens
cttcttccctttctcttctgggtctagcttttcttggggtatggcagagagaagaaaagggaaactaaagaatcwtcaggttttacagacctggccgtgtattggtggtggggaggcaactctggtgccatgcaggcttcatctagagaccccagtcctactccggcacaaactcttcttttctgctgctagtggtgtcatcaccttagatgtttccctgctgctgatgtggatggcttccttagggtgatctttagaacattcttagtgagacacagacacatctccctataacccacctatgccttaggctcattcatgggcctttatcttactttgtctacttatctcctgggtggggaccttgtctcctgccctctcccctaaactcatgtttcttcacataaaaacacagaaataggaactcttttacactgctggtgggagtgtaaattagttcaaccattgtggaagacaatgtggcaattcctcaagaattgcccgaaataatatttgaaccagaaataatatttgacccagcaataccattactgggtatacatccaaaggattataaatcattctactataaagacacatgcacatgtatgtttattgcagcactgttcacaataggaaag

SEQ ID NO: 912795 - DNA, 632 bp, Homo sapiens
aatttccctgccagaaataatgatcttaagatcctgagtatatcaattcaactcaactaactcagtcaagcagttctctctcttggttacagcatggggatcagaggtcaaaacagagtaaaaattagagcttctggacctgatggacaaatgtcacttcacacaaagagaaaattactattccatgaccataggccatacccccaaacttgatttaatgcacactgatgatcagtagcagtttgagagttaataagggtaagttaaactcatagagagtttagaagtatcaaaaatagctaaagatcccaagtattatctttctgcaacacttgagagtaccaaactaataagcaaaagacactttatttttatttaaaactaaagtcatagaaaatttcaaactgaagcatacaacatccaatttcttcaacaaatatttcctgaatagcttttatgtaccaggtactatgccaagccctgtggatgcaaaaataaaaatgacataacccaagatctggaacttcattttagaaggaaaataaaaatgagttagtgctagttaataataygtaaaattatggtgcagacaagttccatttcattttatgaaaacccaagagaaaatattg

SEQ ID NO: 912796 - DNA, 657 bp, Homo sapiens
  misc_feature 227: n = A,T,C or G
gcaaagattgctagcagctattattccagcatacttggtgtataggcaggcctaccttattatttattgtgcaactcaggccctttgaaagtaaaagagtgatctgtaagtacagtaggataacaagcataaaccaagacagcctgacaaactggaatatgtagttaccctaactataagttatgttgtaggagatgtcgttgggaaagtgagttggggtcatttgntgattatttatctcttggaagcaaaaattaggcttattctgtcaaattttgattttaacatctgcatgtatacaacctggctaggcaataatgataatcacaatagttactatttactgagtgcccactttgaggtttctaacttacattctcattgatccttacactgactctgcaaggtgcctattatgcctgtattcatgcccagtggctgcccaaaataatgactgcaaactttgtggcttaaaacaacagaagtttattcctcatagttctggctaaagtctgaaatcaaggtgtctatagggccacactctctctgaaggttctraagggagaatttgttccttgccttttccagcttctggtggccacgtcacttcaatctctgcttctgtggtgatactgactccttctcctctgcatgtct

SEQ ID NO: 912797 - DNA, 601 bp, Homo sapiens
cttgtcaagtccacttcaccatggctgccttgccaacacaacctttcctaagcccagatgtgttgatgtgcattgcgccagatttctgaagactcaagtcacttcytgagataaattactcatataggaaagcagactagcagttattgtaaacaactctaagactctcatctaaagagcggatatgccttcctaaagggcgtgctccaaggcaaataaatcctttggatctaagtctaccttttagcacacacaagaacactttcagctcattgatccagaagtgataaaggaaatgaaaagttcagccaaccaaaatggggtgctcaaaggggttcttttaaggtccaggctgcacagggtagttctgttttgtccccaccaaagttagcctctgccaaagaattgctccgggctctggccaccacatgtgcctacaacccccaaagcagaaagcctgggaaagaatcacatactcataaaggccccataattaggcacattcactgggaatggtgtttaagttatcaatcatggggtacaagaagaattaataaaattctgtatatttttaaaactttttatagaattatacattact

SEQ ID NO: 912798 - DNA, 685 bp, Homo sapiens
caacatttcttctgagtcctctgcttattttatgtcagcagctgtatcactttatcttagaaatacttgggttttcacagtatcaacacaaatcataytctgttgctttgtttctggaaagtggttaagcaactgtataaaagtcataggaaattaatgactcacataacggaaaccatttactaatgtgacttttgtctcagatgccaagtagtctgagtttgtttccatggtaacccatcagtataacaaatggtcgcaaactaactttgctacttttttggttgtttgtttcatttggacagctttctgatagctgtgtgtgtgcgtgtgtgtacacattaaagattatcacacacaaaaaaaatctgagtaattgccttagttgcacaaacaaaacctttttttagagagattgtttgagaatccaaggctattttgatgttacaaaacgataaagattacttaacatatctttctacttcagttcctattaagaaagggcacacagtcatcaatttttaagcccatacatttaaaaaattcatttataatatttgtttatttgaaatgtatcaatcataggagactctgccagaaacaaggcagagagaacgggaaatgaggacactgtcttgggagactgaagactgagtgaatgatggaagaagtggaggcagccagc

SEQ ID NO: 912799 - DNA, 511 bp, Homo sapiens
tacatttcttatgtactttatttttattattacattgtgatatataatgaaataattatacagctcaccataatgtagaatcagtgggagccctgggcttgttttcctgcatctagacagtcccatctgggggtgatgggagacagtgacagatcgtcgggcattagattctcgtaaggagtgtgcagcctagatcccttgcacgtgcagagttcacaacagggttcacactcatgagaatctaacgctgccgctgatctgacaggaggcggagctcaggcggtgatgcgcccgatggggagcggctgtcaatacaaagcttcactccctcacccactgctcacctcctgctgggaggcccagttcctaacagcccacaggtccacggctggggggttggggagccctgctctactcattttccaaattactttcccaaacatccacagagygccacactgaagaacgtgactgtctcatgttctaacttgtctgaggatatttttgtcca

SEQ ID NO: 912800 - DNA, 606 bp, Homo sapiens
taattgtggaatttattttgctataaggaatgagataggtatctaattgtatacttttccaaatgggtagcctgttgtcctgttacacttcatacaataaatcctttatcagtgctttgctggcaaattggtatcctgtattgtatgttaaagttaatttgttagagtcaccttattttacttgtaaatttttacaggaagcagtgcattttgcaatattcttattttaagaaaagatgtatagttattttatatttgttgagttaattagagctatatcagttaattatatcaggattggtgggtagaattaacctttttataagaagcatagagtcttacctcctgttttaatttggattgcccaaaaagcagacccagagacaaggatttaggtggagttagttttctggggaagcacaaaacagggcagactaatgaacaagttttctctgtgtactacttgagtcatccctgtaggctttctgasaagtcatgtgaaacacacctttgattaatattccatggttcaggagaaagctgtaaggaaaagaatatctgagatataagcacttgaagtggtaaactctcagagcatggagattg

SEQ ID NO: 912801 - DNA, 545 bp, Homo sapiens
aaagcaatttagacattcaatgctattcctatcaaactaccattagctttcttcactggagaaagctaatttaaatttcatatggaaccaaaaaagagcccgtatagtcaagacaatcctaatcaaaaagaacaaagctgcagacatgacgctacctgacttcaaactacactacaaggctacagtaacgaaaacagcatagtactggcaccaaaacagatatatagaccaatggaacagaacagaggcctcagaaataacaccacacatctacaaccatctgatctttgacaaacgtgacaaaaacaagcaatggggaaaggattccctatttaataaatggtgctgggaaaaccggttagccgtgacagtagatttctcatcagaaaacaaggaagtgagaaggaagtggcaaaacatttttcaagtactgaaagaaaagagctatcaaccatgaattttatatcaygtgaaactgtccttcaggaatgaagaggaaataaagacattctgaaaggaaggagaactacaagagtttgcagcta

SEQ ID NO: 912802 - DNA, 595 bp, Homo sapiens
tgacatttattttattctgccttttcttagagttgtgtacctctgtttcttctttgagtgaaatctttatagagatttaatttcatttatttctgtatttcccataaggtgaactatatgtgattgaatagtaggtacttaacaaacatttgctaactgaataatagcatgttggctgttgtgcatttgaggaatgttatacatgtaaaaaagccaaaacagagacgatgcaattttctttgttttgattcatattttctgccaggcagtaacatctggattgagacccatttttatgaaaatttatagctaaataaaacagggttggaactgcaggcttgtaggaaagtggttactctttgaacatagttcaaaattcttgaacatagttgcatttagccctggctctgaaaggattttaacttctctgttcctttcctttcagcccatttaacgttaacaytggcaaacagagaagaaagttatgacgggaaaggaatttattaagtgtgcacattagctcctttatttcacagaagtagaaactgaggctcacagcctttaagcgattgcccaaacttgtactatcatttta

SEQ ID NO: 912803 - DNA, 651 bp, Homo sapiens
aggtgccatactactaagtcagaactgtgtatccccttatataatggtgctgtccaatagcacttactaccaataatggggcctctgttgtcatatgtgtagtaagtaacagagcatcaatatcctgagggtatactttctagggctactcccagtaccaaccctttcaccaaaagcagagcctgggacaaagatctatagttacgtaatttactttggaacactggagagttggaataagaaaaggaagtaaaaccaatacaaggagttcttacagctaagggtgactcatcacatgatgccaccaaaacattctgagatgcctaataaaatgtaccttaaaactatccacccagtggaaaaacaagagaattaatccgtgggctcctatcccccattgataaagtgctgcctcaaggaatgtcaactccctcacacttctaagtactgtatgcatgaggctcaaagaattcctgtaggcttcccggctggcttcctaaactttgtcttcagagaagccatggagcaggaaatgtgaggtgcagaaaatgtarataaggcaaagtgcagtcaggctatcttgtgcaaagcttgttgaagtacacagaaccaatgcaccatggctgggatactgagtgaggtaggggcaag

SEQ ID NO: 912804 - DNA, 635 bp, Homo sapiens
tcgtgtctgtcagcccttgccaaaacagtagtgcagcagtgtgtcayctcctggcagcacaatgctgggcaaggtccaaccgtcctgcctggtatacaggcttatggagcagcctcctttgaagatctccaagtagacttcaccgagatacccaaatgtggagatctcatccctaggtttggactgcctttatgaattggctcagacaacgggccagcgtttgtcgctgacttggtacagaagacagcaaaggcgatcgggtgtagatcaaggattagaatgcagcccccttgcaaccacagtgaaaaggaccccagactgtcgtcttgaccactcccacagccgtgaaagtagaaggaatcccagcctggatccactacagccgcatgaaacccacagcacctgagacctgggaggcgagaccaagcctggacaatccctgcaaagtgactctgaagaagacaacaagccctgctgcagtcacacccggaagctgactggtccatgcatggccgaagcatgaggaaactcaccatgggacttattttccttatattttggacttgtacagtagggacttcaactgaccttccgcaaactaaggactgttaccagtgtatacatcaggtcactaa

SEQ ID NO: 912805 - DNA, 635 bp, Homo sapiens
tcgtgtctgtcagcccttgccaaaacagtagtgcagcagtgtgtcatctcctggcagcacaatgctgggcaaggtccaaccgtcctgcctggtatacaggcttatggagcagcctcctttgaagatctccaagtagacttcaccgagatacccaaatgtggagatctcatccctaggtttggactgcctttatgaattggctcagacaacgggccagcgtttgtcgctgacttggtacagaagacagcaaaggcgatcgggtgtagatcaaggattagaatgcagcccccttgcaaccacagtgaaaaggaccccagactgtcgtcttgaccactcccacagccgtgaaagtagaaggaatcccagcctggatccactacagccgcatgaaacccacagcacctgagacctgggaggcgagaccaagcctggacaatccctgcaaagtgactctgaagaagacaacaagccctgctgcagtcacacccggaagctgactggtccatgcatggccgaagcatgaggaaactcaccatgggacttattttccttatattttggacttgtacagtagggacttcaactgaccttcckcaaactaaggactgttaccagtgtatacatcaggtcactaa

SEQ ID NO: 912806 - DNA, 522 bp, Homo sapiens
tacaccaatcagacatagatttggtcttttcacatagtcccttatttcttggaggctttgttcatttctttttattcttttttctctaaacttcccttctcgcttcatttcattcatttgatcttcaatcactgatactctttcttccagttgatcaaatcagctactgaagcttgtgcattcatcacgtagttctcatgccatggttttcagctccatcaggtcatttaaggacttctctacactggttgttctggttagccatttgtctaatcttttttcaaggtttttatcttctttgccatggatttgaactccctcctttagcttggagaagtttgatcatctgaagccttcttctctcagctcgtcaaagtcattctcaatccacctttgttccattgctggygaggagctgtgttcctttggaggggtagaggtgctctgatttttaaaattttcagctttactgctctgttttttccccatctttgtggttttatttacctttggtctttgatg

SEQ ID NO: 912807 - DNA, 620 bp, Homo sapiens
ccattttaaaaatctgctgtgcattcatttagcctacatttaatgagtactgactaggtgccagacatcagtctggatactgggggtttgcaatgactaaaacatggtccccatttgggagggtattgaatttcactgaagactgaattccattgagattgattcataactgagtaagttagtacagtaggataaatatgataagagaggcatatgcaacatgctgcaggaacatagagaaaggttatcagacaagtttagcaaagcttcacagaagtagtgacaacttaggaaatataaacaggaaattatatataaacaggattttaggggctaaggaaggagccagcgacgttgtgggctgggcgaatcctgtgtggggcatcagaactcatagatgggcacatggcacatgtagggtgccctgcttcacagaattggtgtgcaaggggagatagtggaagatggagcaggaaaattaaggagagctcagtttgtgggrggcctgaatgccatccctaagtctgtcgattgaggccatcctgctcattctttggtccctgtcctgattggtaacaccgagggtgtagtaaaaatatctaacaagctgtatggcacag

SEQ ID NO: 912808 - DNA, 594 bp, Homo sapiens
gttatactatgaacttccctggttctcctggttgctgatagcatatcatgggacttctcagcctctataatcatgtgagccaattccaaacatgaacatcctcttatgtatctctaaatgtcctattgattctttctctggaaaaccctggtttatctgctatatctaacaggtgtttctaatattagaaatatctaacagcatctaacatattcaataatgtactgttattgttggttttattacagttgaattttaagtttcatctcaaatgttagatctttcatagaaacatctaacagcatcttaacagattcaataatgtactgttattgttggttttattacaggagaatttaagcttcatgatagtagacatttactcctctgtttggctcactactgttttctcagcacccagaacagtaactggcacacagtaggcacttcataactatttgctaacygacaaccaaatgaataacaaaagtaaaagaactgctgaacagtgagccaagatcatgccactgcactccagcctgggcaacagagcgagactccgtccaaaaaaaaaaaaaaaaaggaactgctgaa

SEQ ID NO: 912809 - DNA, 665 bp, Homo sapiens
aaaagaactctggtctgcaaatgcaaacaagactttcaattataatactggttttgatgcgatatgtttactttagcataaagtcattagaacaaagtgatcgctttgtcaaccttctttcctattcagtacacctgtgagattatctaatctcagttgcagttcaagaatttgcactattgaattcatattgtattcacaatggtagaagccaaaaaaagaaaaaatcttacaacttgaataattactattttttcattaatcctaaatgtaacggtgatgtaattttcccaatggaatggttaaactcctatgctaaagttgagactagcttttaaaaaacagctttattatcttcctacattcattttaatttgaacaaattaagattctcgggggggccttttttagtttgtttatcttgaagtccactgctcccagcataaaggcttatcagaaggagataaagatatttccagaatctaggcagcccccctttccacaccccaccccctcaaaaaagaaaaagtttctaagggactagttagtacagmtaagtcaatttattttcaaactaagtgaaaataagtaagtcagataagtcaaatataggtgtgataatattaaccaattgagaagcaccccagggaaaatttaaactcata

SEQ ID NO: 912810 - DNA, 608 bp, Homo sapiens
tgcaatcaataacagtataatctatgttcataaataagagtacagcctcagaagagtgtcgggcagtgatgaatcattcaggaggcctgctttgctgctgttcagctacatccatgcttaaagcttttcagtgacggaaacacctggcttagcaccctctgatttcagcctcctctgaatagctaaatctcttttttccctcttgttctaaacacagtttaaccatggagcccttacctgatggtaagctccaaagagagccactgaactccaagaggagtaagttagtttctgcaggtcatacatagactcacatgcagatctattttttgtggcagggaactgttgaccgtagaatgtaccactcacagtgtacagaagatagggcctaataaacactttaatttccagggactgtcaggcagggttaatgtgagcagggagagggaaattagtagttagtcagggagaataatagaaaaggagactatttcctcttacaaatatctgtaatctgtgcctcttaccattagtctcccaactacagatattataayagtagcaacgacacaactcctccaaggaatatagagtttcagccttcttcc

SEQ ID NO: 912811 - DNA, 640 bp, Homo sapiens
tttcaatatgtgaataactataaacatgcgtaattaattggtaaatcaaatagctgtataataaagccgaagaagaagtttcattcagtagaaagggctactcagctaaagagaagagagaagtttaaatcacaagatttgcaaaaaataagtgtcacagcaggtaacataaggagggccgtgggaggactaagtggtgatatggaaatctgtgatgtgggctctctgtcaggaaagacttctccactgaagcattacttaaatcaagagctaaactatgaggaagggaaatcacattttccacaaatgaatcagcatctgcaaagtcttctgtaatttctatgaaaactattaatagaagtaataataaaattttgtgaaacgagctatttttctgaagactactggaagaagaatgatatattttatttattccaaacagatcaccggccccactcaatggaatgcacaatatagtttaattttcctatttgaagtaacataacacatatgtttattaccattgctacaaactttgagaagtaaatatggctaataatggcagggaagcagtttttaacrtctgattatgtgtgattaatatatacaaaatctgaactcttcccaccacgctcattgc

SEQ ID NO: 912812 - DNA, 595 bp, Homo sapiens
acctctgccccaccaggttcacaccattctcctgcctcggcctcccaagtagctgggactacaggcacccgccaccaagcccggctaatttttttgtattttttagtagacacggggtttcaccrtgttagccaagatggtctccatctcctgacttcgtgatctgcccaccttggcctctcaaagtgctgggattacaggcgtgagccaccacgcctggccctaccctttaattttttaaaaacaaatacttctatttatcactaagtttttttcagatgtatttatccacttgtaaaattctacagtgatgaatgtgaaatccaaaagaacaagtcatgagaatatggaaggacaagcaacttaaagtaaaattgtcttttcccaaatggcagctttaaacaaatagtcttagccatgttagtttgagagatacacaagttttaaataactgtagatacctcaattattctagaaatgaaaatagaaatactttcacttatttgccttatactttttctatttagaggttactattcaatatattctacttgaaactctttattttctttatatttgtagaatgtattgattt

SEQ ID NO: 912813 - DNA, 594 bp, Homo sapiens
taacatttctgcctaaatccttcctgaggcaatggatatatctggctgaatcaagggacagcctaatacaaggaagtataaataagaaaagtacattaatatatttcaaactatattattcccatgatattwgtaattgcaaataattccagcacgaatcttccacttatcttgaagcatttaaaccttctagctcagtagacagaataagcttttttcagcctcatgcattcataccactgttttttctttctatctctctcaattcaaatctgtgtgttaactcttatatattactctctagatactttctgtatgtgtcacagcatgccaatatattctaagcatttaagaataggaatcctgtcttgactatctgttttagtcagcttaagctaccataacaaaaataccataaactaagtgacttaaatgaaaattcacttccttacagttctggggctagaagttcataatcgaggtccatgtaatttggtttctggtgagggctgtctctttgtgttgcatgtggctgtcttctcactgtgtcctcacatgacctctgtgatgatgtgagagagtgcaagctctctg

SEQ ID NO: 912814 - DNA, 643 bp, Homo sapiens
agacaaacacaccgtttcagggaagaacaaagyaagctcctttgcataaaggaagggacctaccattgtggaaaaagcattatgtgtcctaggtacatacattaacctgataacctcaataacttagtatagataccataaatactgatgtaatagaatataccagcctgacaaattaaagtgaccatgctattagaacaagtctgcctgttattattgtatttactattactaccattaggtgtgaccatagtggtagtagtagtatttgggcacatggtgtctcaggccctatagaacaggcacattatataaaatatttcttatcctcacaataaccctaatatatgttgttattctcatttgacagatgggatacagagtttaagcaacagtttgatatctttttaaaaagttcaacttgaggaattaagcttcacagacagaaaacaaagccaggaagaagtggagttgcaaaaattgaaatgaggctatctcccaagatggtgtagtgtgacacatctgtaaatcttaagtctataaaccaaggaatgcaagctttgaaattgtatttttttcaaaactgagctaaatttttattaaaatatggagaaatactatattttttctggtaccaaattcc

SEQ ID NO: 912815 - DNA, 706 bp, Homo sapiens
ttcttgaggataacagagcagaaggattagaaaagtctgggtatttgattatatcaaggagccactgaatcaactctgtaacagtctaccttaatatttttcttctgtgaaccagtaataaacacctaataatggagtcattttcagttgacgattctattttttcaatagaaaataactgataatttggcaaaagctacaagaacttacaaaggaggttagctctatatgtttaagaggagactcgagatttgacaatcttctatttgtatgtaatctgtcaataataaaactagataaattaagaagaaaatctcaattgatagctggcaattctgcaaccaaggacaaaaattattatacctaatatggataggaagcccacaccaataaaatttaaatgaagaaatatgctattaagtggtacaaatacttgttaggaaaaccagaatttcataatattaaagaccaaaggaaagtcacaagttagacatgtaatggaaaatctgaattgaagcctatgtacatactctactagaaaacaaattcaccctttaataatgtttttgctctagtttactggaatgaaaaaagaaagaaaaccagacaaagacaagaaacattttacatacataacayagatgggcaatacaatttagtttaaaaaagttttaaaattaaatatttttcattgtaacaaatatga

SEQ ID NO: 912816 - DNA, 625 bp, Homo sapiens
tctgatagggtaattctgagaaataaagaaactcaatccatgtaaattgcttaagacagttcctggctatagtaggcgctcaagaaatgttggttgttcatactattattaatatatcaagtccactttttgctttttaaggtggatcaaggaaagctgagggcaaagttgggccccagttcagcccctgcagcttttttctcttgccgttgatcagcagtaatatattactcttctctaaatcagcaccgcccctgatgcccagaccttccctccatgaaagtctacttcaactccaaatcacaaatgcgaagtactgggtagcagtacatcttttcactggttaattgtccactgaggctatactgctttttatttcttggtagagcttgaatgtgactaggaatgtgatttctgatctctcaaaaacataatattaataggactttaaggcctgatgaaacttcaaaaggattctgtgcagtaatttgtctggaaccgtctagataaaaaaattcttttcttacctaaaakaaagaaactgcagaacagcatagtctgcaaccttctttgttgttcctgttgttggatttggggctcaaatcctcctgaataaaaaaaaaaa

SEQ ID NO: 912817 - DNA, 699 bp, Homo sapiens
ttgctgtacacctagtcagtgttacctggttaatacttagttatttgctaatgattttgtgtattttcattttgtgttttcgttagatcataaattcctcttggcagggaccacaaatattgtacaattgtcagtgtaactagtatgaccgaagacacctaatagacactcaaaaaatgtagctaaactaatcaatagctttcatatcttagaagtgcaggagtaaatagtatgaaatgtaaggctgcacattcattaatgggaaataaaaattataaataacctcaaaagacatctaagaagaactgctcaaatgaagagtattttagcattcagttattcaacagtatcagggaacatctgttagacacctactattatgtgtgtatttgtccataataaattcattatttaaatatgaggttttgtaaatgagtgaggctcagagaggtccacagtcacactatcattaataatgacaaagcttgccaggcatggtgattcatgcctgtaatcccagtgctttgggaggttaagaccagaagattgcttgatcccaggagttcaacaccagcctcggcaacatagtgagaccccatctctacataaatacaaaaattagctgggcatggtggtacacacctrtagtcctagctattcaggaggctgagggtagaagatcacttaaatccaggagtt

SEQ ID NO: 912818 - DNA, 558 bp, Homo sapiens
tttttccatatggtaagacacagaggtctagtttcattcttctgcatatagttacacagttttctcagcataatttattacaatgatcatgctttttatttgtatgttcttgccatctttgttgaagatgagatggctgtaaatgtgtagatttatatcaacgttccctattctctttcatttgtccatgtgactgtttttatgcgagtactatgctgatttggttactatagctttgtagtaaattgtgaagtcaggtaatatgacgccttcagcttttttctttttgctcagtattgatttggctttttgggggtctttcattccatatatatattaagacttttcttatatttctgtgaagaatgtcattggtatattgatagaatttgcatgaaatctgtaaatagctttggaatagtattgccattttaacartattaattcttccaatctatgagtatgaaacattttctactgttttgtgtatcctcttcaatttctttcatcagagatttatagttttccttctatacatcattcacttctttggttaga

SEQ ID NO: 912819 - DNA, 464 bp, Homo sapiens
cttctgttgaggttttttttktctcacatggtgttcccttgatgtggtgtgctttgatcaagggcttttctttgttgggagacatttgattattgatgcaatctccttactaatctatttagttgttttatttctttgtgatttatcctgagtgagtttggtgttagaatttgttcatttcatctaggttatctaatttgttagcaagtaattttcaactgtatccttatataatcctttttgtttttgtaaagttggtcataatgcctccgctttcatttctgatattaataaattcaagtcttttctcgtttttttctaacccatctatctaaaggattgccaattttgttaaccttttcaaattaccaattttttgtttgtttctctctattggtctttctattacctatttcatttatctatgacataatcttttttatttccttcttttgcttcttttg

SEQ ID NO: 912820 - DNA, 464 bp, Homo sapiens
cttctgttgaggttttttttttctcacatggtgttcccttgatgtggtgygctttgatcaagggcttttctttgttgggagacatttgattattgatgcaatctccttactaatctatttagttgttttatttctttgtgatttatcctgagtgagtttggtgttagaatttgttcatttcatctaggttatctaatttgttagcaagtaattttcaactgtatccttatataatcctttttgtttttgtaaagttggtcataatgcctccgctttcatttctgatattaataaattcaagtcttttctcgtttttttctaacccatctatctaaaggattgccaattttgttaaccttttcaaattaccaattttttgtttgtttctctctattggtctttctattacctatttcatttatctatgacataatcttttttatttccttcttttgcttcttttg

SEQ ID NO: 912821 - DNA, 605 bp, Homo sapiens; identical to SEQ ID NO: 912220

SEQ ID NO: 912822 - DNA, 562 bp, Homo sapiens
ggagtcaggggctaggcgtggtggctcacacctgtaatcccagcactttgaggaggtcgaggcaggcggatcaagtaaggctgggagtttgagaccagccttgccaacatggtgaaatcccatctctactaaaaatacaaaaattagctgggtgtggtggtgggcacctgtaatcccagctacttgggtggctgaggcacaagaatcacttgaactcaggatatggaggttgcagtgtgctgagatctcaccactgcattccagccggggcaacagagtgagactgtctcaaaaaacaaaacaaaacaaaaaacaaggagtcagtattaggagaccaagtaggcaattagcacttactaatcagcctagtattccagaagaggaatatggtctatcagaaacaggaggcaggactctgagacaccaggtgaggctcagtcctgcagtacrtcaagctgggcaggtaatttagagaaagacccagggttgacatctgaggcaccaggtgagggtcttcctcttaggaaaatacaggagctcaagagctagatcataaggggac

SEQ ID NO: 912823 - DNA, 588 bp, Homo sapiens
gtatcaatgatttattcctctaaattgctgagtagtatttcacttgattttaaaaaacattttaatccatttatttcctgataaacatttatttctagcttttggttgttatgaataaagaarctatgaatatttgcatagaagtctttgcatggacataggctttcatttctattgagtaatacttaaaattctaatgactgggttacatggtaattgcatgtttaacttttagccacctatgttttcagttgtgcaattcatcaactcattgtgggtttaccactcacagatgattgtcctgaacttactaccacactgccttgcctcactacaggagtctaaggaaggaggaatacacctatcttcacctcatcatgcctttgtctttcaacatgttggttctgtttctctttctgaaagcttctttctttctcagcaaggctcttattacaagatggccaggttactaccatatcaggttaccaccttactagatcagcaactgcaaggaaaataaagggggaaaaaaagcaccttttttctttctatatgttttagcaaagtccattgttcactttcacttaa

SEQ ID NO: 912824 - DNA, 632 bp, Homo sapiens
tctgggaatgaatgatcacacttcaggtcataagagataagatacacctctgtttactgtccaaactgaaagaaattatgcaccactcccttcaataaatacatctgctaagataaatgtaggcatgtgcttttaaacctatacatatgcaggacacatatgtaggtatatgaaaaataaaacaagctgggtgcagtggctcacgcctgtaatcccagcactttgggaggcagaagtgggcagataacctgaggtcaggagttcgaggctagcctggccaacatggcgaaacactgtctctactaaaaacacaaaaattagccagtcgtgatggtgggtgcctgtaatcccagctacttgggaggctgaggcataagaatcgcttgaacctgggaggcggaggctgcagtgagccgaaatcgcaccactgtactccagcctgggcgatagagcaagactccatcaaaaaaaaaaaaaaaagggggggggaaaaaaagaaaggaaagggaarggggatggggaaaggggaaaggaaaaggaaaagaagaaaaggaaaattatctgctaaaataaaggcaggtatagtttggtgctgtgctgatatgtacaagatacaggtataatcaagctgt

SEQ ID NO: 912825 - DNA, 615 bp, Homo sapiens
aacatcttctgaaatgatagtcctagattctgcccaagcttcccasaaatttgtaaaatctctaggtgaatccagttatgataagcaatggaaaatacattgttataagcagagtagaaaaagtgccaatagaaaaaaaatcataaaattaaatgttcccatttaatgaagcatgtggcagagccttcgtcactttgtgtgtgtgtgtgtgtgggtgggtgggtgtgaatgagagggagaatattgtcaggatcgttgagaagaaagaagggagtttatgcctttgtaggttttgtaggttagtgggctgcatcactgccttcattccttcttcctgcctaagcaattttttcattaactcacacatttatttacctgttatgctcaaggctgtctttaaaccatgttgtgtcctctctcacctctgagtaaaagtggattttatcatttataatctctgtaactctagagttgacacttggcttttctgagcctcaatttttttttcacctgtgaaataggggaacacttttctcttgaagttgcttaggatttaataagcatgtgtgtgataaaaggtcacatgtataccagcagtcttcaaaggtgatgtat

SEQ ID NO: 912826 - DNA, 608 bp, Homo sapiens
agttcctttttcatgctgttagaatgcaggttttaactcatttacaaaataatcactttagacataaaagaakagcccactctcccagctcactggccagtgatgagtcttgctctttataaagtagttttgacctccagagaaaatgcagactttcatttaaaatgagattattctgctctgttgctcggtgcaggtgttgagactctggccatggttcactgacttggagaaggaatgtgttcagtttttctcttaaaccagacatgcttgccatgcccctgctgagtccctcaaaacatttcaatggtaacagaatctagcagataaaatcccagtcgtgtgcaaaattaacattttctccaggcctaatggtttgatgagacattcttatctcttcactgcttacttacacttctttctttttacttaagaacaggaattgtgctttttagagccttgtgtataatgtaccagctcttcagaaatgattgtactaaacattgttcttattattattcaaaagtatttctaaagttggaatgtaacttcattatagagttcaaaaactgtatcttggttcactcgctacctctgcccgcccccgt

SEQ ID NO: 912827 - DNA, 573 bp, Homo sapiens
atatgccaccctgggcaacataatgagaccctgtctcaaaaacaaaaaaaacaaaaaaaaaaaaacagaaaaaatcatccaggtgtggggcacatatctgtagtcccagccattcaraaggctgaggtgggagggtcgcttgatcccaggagttcaaggctaaagtgagctaggatcacaacactgcactccagccttccagtttaggtgacagagtgagactctgtttctaaaaaagaaaagaaaatacggtccaccaagatatcttgacttactggctgtcttacctgtgtgagaaagggtataaataattccactggagagtggaactataaacattattacaaattcctaaacactaaagaatcagacaggacatatttctgagctctttccttttttatggtggggaaactaaggcccagggagttcagtgaacagttcagctgcttctcacagcaggtccctcctggggccacggtattgccatcaagcttccttgttcattagaagagctgactgattaatacatttctaaataccatcaattatgagataatatcctatcacctt

SEQ ID NO: 912828 - DNA, 575 bp, Homo sapiens
ttgttgggttggttaacatcatagttggataatgagcccagaaggtgctgcaggcctgggacattgtcatcgttgatggcatggatgatggctttcatcacaaaggagtcttcctcatccttgagagagacagccaagatggaaacagagttacattgctagccatgcttttcttaccaacataaaagaaacctgtgctcacttgttaacaggggcattcagaggaaagtaagccatttactccccaaatccatacagtcatggagggacctaggaaggaatttttgccccttccatgttgcaaacaagcactatctactctttatctgggctttaatatcacctgcagtatagcccagagacacaatgtccaagatccagatttcaaataatgatgataagtaaccctttgtgtttatcttaagaatctgtcaaaacatagttcctaaaaccactgtgaaaatttttaggtataacacagactctcttcctggataaggaaaaagaaaagcctattgcagcaaagaaatgatrcctttgaataagatattctcaatttgcaatttttccaatta

SEQ ID NO: 912829 - DNA, 650 bp, Homo sapiens
tttttatctagattttatctttcctgtrtttctgttgaacatatgctgttcaatgtgaatttcattcccatcagttttgcctcaggtagatctttgtactggagagaccactgggcaatgagatttgagatttcatagggctcaggttgcccagccctcccaaaccttgctgcagacttgcctgctattgtagtgctatacttccactatcaccctgcactatagttattgtttcacctttctgtaacccacattagattataaaccctggatgcaaagtgcctgtgtttgctcatcatcattgtaaatttcagtttttggctgctggcccttagaactttccaaggagcccctatttcagatgcactattgcttccctttgcttcctgtgcaaagatgctcattccatgcaggtcttataccagtcagtagtttttcttcaccaggtaacattttcaggctcatagaaatgctttgccacctagttttattttagatgctgaccacagatttttataccagtctctgttttcacagggatattcagagagatttaaaaagtatgtcgcaataaagatgcagcatctttatcaacagtttttacgaagctgaaccttgtctctttagttatagaatagaattccagtggc

SEQ ID NO: 912830 - DNA, 650 bp, Homo sapiens
tttttatctagattttatctttcctgtgtttctgttgaacatatgctgttcaatgtgaatttcattcccatcagttttgcctcaggtagatctttgtactggagagaccactgggcaatgagatttgagatttcatagggctcaggttgcccagccctcccaaaccttgctgcagacttgcctgctattgtagtgctatacttccactatcaccctgcactatagttattgtttcacctttctgtaacccacattagattataaaccctggatgcaaagtgcctgtgtttgctcatcatcattgtaaatttcagtttttggctgctggcccttagaactttccaaggagcccctatttcagatgcactattgcttccctttgcttcctgtgcaaagatgctcattccatgcaggtcttataccagtcagtagtttttcttcaccaggtaacattttcaggctcatagaaatgctttgccacctagttttattttagatgctgaccacagatttttataccagtctctgttttcacagggatattcagagagatttaaaaagtatgtcgcaataaagatgcagcatctttatcaacagtttttacraagctgaaccttgtctctttagttatagaatagaattccagtggc

SEQ ID NO: 912831 - DNA, 489 bp, Homo sapiens
atttttttctctctctcttttgcccctcctagaaatcctcaccctacacaagccccagtctcactcttggccctccaacagatgcctggtgaatttggtcccagtaaggtccaggtctccttttctgtacaagacttaaggaaaattaagtgggtatcttggcaagtttttagatgaccctgacagatatatagattgtttccagaatttaaaccaagtattcgagctcttctggaaagacattatattacttttgaatcaaaccttaacactgagaagcaggccactttgcaagcagcagagagatttggggatgagctgtgtatcacatatagtgtcagggaaggggccgaacttyatccagctgggagagatgcagactctaaatgggatcccagtgacaagatgggagaatggaagaggagatgttttcaggcgtgcataatagagggcttatgtaagactagaactaagcttctcaactgtacc

SEQ ID NO: 912832 - DNA, 566 bp, Homo sapiens
tttttaactctttctcaggaaaggttgccccttttcctgatacataaattcaggtgtcaaatacattaatcaacgttgctttaggtcattaacaaccttccygtctgaatcaagaagcaggaagtttgggtttttattggataggctactacttttcttttttttttttttttttttttgagacggagtctcgctctgtcgcccaggctggagtgcagtggaaccgtctcggctcactgcaagctccgcctcccgggttcaagccattctcctgcctcagcctccgagtagctgggactataggcgcccaccaccccgcccgactaattttttgtatttttagtagagactgggtttcactatgttaggcaggatggtctcgatttcctgacctcgtgatccacctgcctcggtctcccaaagtgctgagattacaggcgtgagccaccgcgcccggcctaggctactacattttatttttattcattcattcaagaaacatttactaagaacttactccctgataagtactgtgtggtatgcagggataagttgatggctcatgt

SEQ ID NO: 912833 - DNA, 695 bp, Homo sapiens
caacctgtcttctaaaaagtggctatttcattttgctttccctccaagaataaatgagaattcttattgatccccatccttgtcattgtttggtattgtcagtgttttgtatttaagcatttgaataggtaggtagtggtatcagttttaatttgctatttcctaatgacatatgatgttgagcaatttttacatatgcttattagccatctgtacatcttctttggtgaggtgtgtgttcagatcttttgtcaattttttaactgggttattccttttcttattgttgctttaagagttcttcgtatattttggtaacagtactttatcagatatgtctttcacagatgtttttccccagtctgtggcttgtcttctaattctcttgactgtgcattacacagaagtttttaatttgaatgaggtccagcttatcaattacttttttcatggatcatgccattggcggtgttgtatttaaaaagtcattgccatgcccaaggttatctagcttttctcctatattctagaaattttataattttgtgtgttacatttaggtctatgatccattttcagctaaatttgggggaagatgtaagatctgtgtctagatttttgattttgcttayggatattaagttgttccagtgccatttgttgaaaagactatcttttcctcattgtattgcctt

SEQ ID NO: 912834 - DNA, 590 bp, Homo sapiens
tcatgtcctttgaccactttttaatggggttgtttttttcttgtaaatccattccttatgtacactgcatattaaacctttgtcagatgcatagtttgcaaatattttctcccattctgtggtttgtctgcttattctgttgatagtttgttgtgcagaagctcttatgtttaattagatcccacttgtcaatttttgcttttgttgcgattgcttttggcatcttttgtcatgaaatctttgccagtttctatgtcaaaaatggtattgcctaggtcatcttccagggtttttatagtttttagttttacatttaagccttttatccctcttgagttgatttttgtatatagcataagaagggtccagtttcaatcttctgcatatggctcatcagttatcccagcaccatttattgaacagggaacctttccccattgtttgtttttgtcagctytgttgtagatcagatggttgtaggtatgtaaccttgtttctgggctctctattctgttccattggtctatgtgtctgctttttatgccaataccgtgttgttttggttactgtagccctgtggtatagtctga

SEQ ID NO: 912835 - DNA, 623 bp, Homo sapiens
catttgaaaagtctactaattttagagttgtgttaaacctaagttaaagttggaatagggttttccccggaccaatattaagtgaagtggatcaccaagtggagtagcggcacgaaggtggtttctttagacttttaagtccaactcctacggagccgtttggtattaggcatataatctaagctttctgagcctcaatttccccattcacaacaaaagggcaatgcaggctcttctcataacttcaaggggcggtggtctgatatagagtactatgaaaacaaaagcagcacaccaaagtaacacattattattatgatcacttatagaaccattacccgctaggatgaaactccccacacaagagatgaagcccgagagaaaagagttgaaggggaaggtccccacgaggagacagtaaccgaactgcagcgccccggtcagcagtatatacagcaggtacgcgtccagcaacttcagacgctgcggagtggagctcaagtactcttctaagaaccgcgaaatgacagacactaccgacgccgacataactgcacgcaaggtactccrgtccgcgccccaaactcttggaggacccgtcgaccacaccggatgtgctgttt

SEQ ID NO: 912836 - DNA, 614 bp, Homo sapiens
atatggggttaacaaggaataatacaaactgtcattcattgagcatctcatttgtactgggcatcttacaagtgtccttacatatacagatgctcaaagacaggttatttaatgggccaaaaccattctrctcatcaatgataacactatgattcacgtccagcaggggtgtgtgtgtgtgtgtgtgtgtgtgtgtgtgtgtgtgtgtgtgtaattccaaagctggtgcttttaacctctaccttgcaatgacttaaggtccctgggtatgaaggagaaaacaggatgagttatctgtgttaccgcatgtcattagaggtgaggacataggtgagctttctactcattttacaatctagaaaacaagaccagagggaacctgtgtcctgtcagtgaaccataacagaacttgaatccaggtctctcacctcctcctccctgcctaccccatctccatgggttggactgattgattacctgagagatcagttgggcacaacacagtattccacacttctaggggcttggaagagggcatacataaacaccaaccagtgccctgccagtagggcagatggcatgggaatttgtcctactgttaaggaacagctagt

SEQ ID NO: 912837 - DNA, 633 bp, Homo sapiens
tatggaatatattttaaaactaggaaaccaacttttgaaacattgatcttatttgtatttctcatttctcattaatatattttttttctgtttcataatccaatccatggtatcatgttgcattgagctcttatgtttttaacctcctatgatatctgacagttactcagtcattcctttctttcctgtgaaatttacggttttgaggtatagtgggcagattttgcagatctctaaatttcattttagttgattttttcccccagtaggctgttgttatggatttagggttgaatataacagtagttaagtgctcttctcttcacatcatattactatgtgtttaaatccatttgtactgctctaaaggaacacctgaggctgcgtgatttataaagatcatagttctgcaggctctacaagaagcatggtgccggcatctgcttttggtgagggcctcaagctgcttccactcatggtggaaaggtaagggaagccagcatgtgcagagatcacatgttgaaaaaggaaggaagagagaaagtgaggaggtgccaggctctttttaacaaccagctatmccagaaaataacagaataagtcactcacccccacacccaccagccagggcat

SEQ ID NO: 912838 - DNA, 554 bp, Homo sapiens
ctcaagtaatattctcttctgtctctatagaaacagtctttctgtctctaacacatcatcaraggagaatacttgttacttctctcttcaaaattattgttctcttgagcccatccccctatacttattgataacttcttctgctatcctttaaaacaaaatggaaaatcgggtcactcccaccctaatactgcgcttttccaacgggcttaaaaatcggcacaccagaagattatatcccgcacatggctcagagggtcctatgcccagagtctcgctcattgctagcacggcagtcccagatcaaactgcaaggcagcagcgaggctgggggaggggtgactgccattgccgagttagttgtttgattaggcaaacaaagctgcccggaagctcgaactgggtggagcccaccatagctcaaggaggcctgcctgcctctgtaggctccacctctgggggcagggcacagacaaacaaaaagacagcagtaacctctgcagacttaaatgtccctctctgacagctttgaagagagtagtggttcttccagc

SEQ ID NO: 912839 - DNA, 596 bp, Homo sapiens; identical to SEQ ID NO: 912454

SEQ ID NO: 912840 - DNA, 674 bp, Homo sapiens
tccaccattgtatgtcatgcattggataacttaaggagtattttattgcttttcttaaaaaatgatctgtgaaaattagtttgagagttgatatgcacaggtacagtgctttcgaggctgtgtgtgccctctccacacagtctcatttttcatatccagcaaaatcaagaatgatgacattgttggcatccacagagcatgttatattcagaaatcccaaatcgctttcttatctgaccttgtacaaagcagaatttggcactgttatggcgcttcttttggactgtcatgtctctaatcactttttcttatttatattttgttgtttttgttgggttctctttttatgtgtattattaaaggtcaatgctccctgggtcctttatctcccaccacttaaaacctagggaatggaatttctaggatggaacatatcttgatgattttatttggataatgaggatgtgggatgttgagggttaaatgaggaatgcagctcaaagtgctgctgatgtttataactcagacatttttgcctctcgcaaaaggttgaatcmtaaggttgaatcctgggatggattggctttgagccaggttctagcaattcatgcacctttcttattcattttcactcttttccctggggttaagctattaaacatggtggcacttat

SEQ ID NO: 912841 - DNA, 628 bp, Homo sapiens
aagctaaactcttaaccttcattttcttacttgcacctccacccaatcactaaatcctgctgatgctccctgccactgtcttaggagtcccccacttttgtccccagtggcamtgtttctcatttcccaccttgcttactgcagcagcctctttactggtctagtttccctctaatccacccaccaaacagccaggctgtcatctgaatatttccattctctgcttaaagtcatttagtagcttcttattgccctcagggtagaggtgaatcttctccatatggcttgcaaggcccttcgagatgtggcttctccccacctccccaggttcctctctctggaggatccttacctcatatcaaattactttcagctcttatatgctgtgctttcttgcctccagggcatttatttcatttgtctgaataagcccttcttgtttttgaggcctcactatcactttctacagaaagcctttttgatcagttctcaaattcaagtcaaatgcccctccctacttactatggtctgaatgcatctccccaaaattcacaggtagaaatgtaatcatcaatgtgattatgtatttggaggtgagtcctttgagaggtggttaaatcatgaaggc

SEQ ID NO: 912842 - DNA, 567 bp, Homo sapiens
agcagggtacaagcattcccacgtctccacatcctcaccatggagggcctttaaaatgcagagtctcaggacccttggatttttggttccaggatctagtgtgaaggcccacaatctggattgctaaagctccccagctgatcctgatgctggtggccctccaaacacgcttcggttggggttttattaaggttcagtcactgggagggccttcagaaggagattccatcacgtgtatccacggtttgctgagtcttacacatgccaggcagttggaggtagtctgaattgagccctgtattccacaactccaactggtgtcaacacagcttaggaagaatacatgtggcattccctcacagactctgatgtggcaagtgcagggcagatagcctgtggccctcggtttgggaagctgtgacatcctggaatgggtgctgggtctcagacatgcaatttccccacccatccttgtcctgcccctttaggaaggcatttgaccatagtgggtctcagacttgttgtgagagaaarcgtgacctgttctcagagctgtacaaagggcta

SEQ ID NO: 912843 - DNA, 461 bp, Homo sapiens
atacaaatacacaaataaatgaaggtattttaaggtagggcagatgctttaaaaaaggctgggtgagtctgaagaaattgtttgggtactgattagactagctagcctgagaaagttccacaggcatcaactgaaaagcgatcatagtgacaagaccggaccaggcctgcagaggtctggaggggagcatttcaggcagagggaaaggtgagtacaaaggaactaaggagcaagcaggagctgaaagatccatctggctggacacagtgcaagatcaaagggccaaaccatgcaagatagcatggactgcagtagcatttggaatgcacgatggaagctgttagagcgtgtggcaaagaccaccagtcatcctccaagaccakgctccccttcttcctacaggctcatagctgtacaaaacaagaccaagttctccagccacccttgcaattgggtgtgga

SEQ ID NO: 912844 - DNA, 644 bp, Homo sapiens
ttcttgcctaagcaaagtgcatctacactccaaacctttgagagaacggctagtagttgtacttattacttctactcacattccattgaacagaacttggtcacgcttaactgcaaggagactggggaatgacattgtctattgggggggcattttctgtctggctaaaactctgggtagctattacaaaaggaaaagtagaaaagtagattggaggacaaccagctgtctgcaatgagaggaagcaagagcaatgctactacataatacttagtagtgttgtgtagaagaagtaatacaattgtcttaaactgtacaaataaaattcctttgagaaattataacaccccaagaatagaatgggacacagaggataacaaaaagcattgagttcaatcctctacgtcacttctttcagaaagggtccaggaccctgaatgggcttggagaccaaaaacaatttgtgaataatagatatgcttattctcttgattatggtgatggtctcacttgtgtatgcatatgtcaaattttcaccaattttacatttttaaagatgtgcaatttattgtatgccactgataccacaatgagcttttttgttttttaagraaaaaagagcatggaatgtgacaccagcattt

SEQ ID NO: 912845 - DNA, 701 bp, Homo sapiens
attttgtaattttcactgtgacattttctttttctgtctcatagtagagttgatcattaaataawgtaataacaacctagttggtgaccactactatggaggaaagagaaagtactttggtttatgagaaatatatacataaaaccacagctacaatttaaaatctgccttcattggaaatcagaaaaatcccaaataatgatgcagtgtgactaatattttctagagaagcctataagacgtcatttaaacatcatggatttcatgaattttgctttatttcatatgaatcccagggcacagccaatgcaagggataaagatatcattcatcatgatctagcatctaaataaaaatggttttaccccactgccaacacctatgtttatttaaatttaaaactgttggccaggcgcggtggctcacacctgtaatcccagcactttgggaggcctgaggtcaggagttcaagacctgcctggccaacatggcaaaaccccgtctctactaagaatacaaaaattagccaggcatggtaaagagcacctgtaatcccagctactcagtaggctgaggcaggagaatcacttaaactcgggaggcggaggttgcagtgagctgagatcggccactgcactccagcctgggtgacagagtgagactctgtcaaataaataaataaataaataaataaaataaaa

SEQ ID NO: 912846 - DNA, 589 bp, Homo sapiens
ttcagagtactttataattgagtttctgattaaaattcatgcgggaatgattcatcatcctactgaaccagatttctattttgcttttttcttttatttttctcactakggttcttcagtttccatctactgatattttattatattccctattgctataaactagtgctcctagttcatttctcagctgttccactaatttgatatttactcctattcagattccctaataaaaatgctaactatgatcatatctaagagtgactgctgtggcaccctacaagatccttcctacctccaactggacctactcacatttatcatcaagctttgattcttcagtcagattgcaatattcccaactacccttctttaagcctgctaaacacaaattggcaaataaatccaatttgaagcatactctgtcaattattctagaaagcctcagatgcagagccaccttctcatttactaatgtaatactaatgacaaagaaaaaagttgaagataaaatagaatttaaacttacctattctcataattgcttatcttattgtttctatgtaataaacttttctataattacctc

SEQ ID NO: 912847 - DNA, 635 bp, Homo sapiens
tccacagtttgaaacgggctctgtatttagctactgagcaaatcagaccctgaatcttcacttttaagaagacagttttacctacagtaattcttcttgatttcctattcaagaggatcattctaagccaggaaaataagtaaagttacattcttgtaattatttgtaatttttccttcgggggagaagagtttcttatgtggccttttattttttgaatctcatttctaccattgtttcatattttaacaaacagctcagcttttcataatcattaaattctatacaatctaattatgaaatgaaagacttttcaatttcatatgtattatgatagttgatatgacaattgacatgaatgaattatgagtgacttcacattattaatatattaaatgactttgctgatagcaaagtcaataaacaaaaagtgaaaatctgccatttactatacaatgaaagaaaaagatgcattccagatgcaaatttcagtcccaatgactttctattagaatcccttaatmtctaaaggatctatcacttaatctctaaaattgttatacctctttaccttcaaattactttttatatcagtttgaggaggtcatataagcttctctaaattatatgtcatg

SEQ ID NO: 912848 - DNA, 589 bp, Homo sapiens
cagctatgtaattgtttatactcatsattttaagacattttagagttatgcgtactacataacattgccagcgctgtgcactgagagttactttattaatggacatctcatgctttctcctgttatcagctcagcacatgagattctagaactttgccttgaatgcttagaatagaacttagtcatgctacggaggttgaactccctcatactttatgttaacttttaacttttagttgaacaatgcatatatctaggataagtgtagttatttataaacaaaaaacttaagactgacaatatagccttctagttaatcgcttttaaatttgaagttattaaaatagttttagtatatattattagtataaatgtgtttagagctgatatcaaaagaaaagataaaataaattgtaatagctgaaattattttacatgagatactcagctaagtaaaaagtttgttcaaggccttttacaaatgatagctagccagtagttactctgtttgaacacaagaatataatgactcagttaaggtaagtactgtctgttaaactaactcagtaggctgattcatatttataca

SEQ ID NO: 912849 - DNA, 677 bp, Homo sapiens
cataacaagcaataactcatgtaagcttcttaaaaataagacgaagaaggtatttttattatattctacaattgataacagtagtttgactccagataacacattcggagccattgtactgcatagcctttctgaggttcattgctatctccaacatacatggaaccccctggacacctgggagaggtaaagtgttaaaagtgatggtggtaaagctaagggggttgggtagaggggttggtgcagaggtaggatttaaaatgaaatgtacagccaggcttggtggctcacatctgtaatcccagcactttgggaggctgaggagggcggttcatgaggtcaggagtttgagagcagcctggccaacatggtgaaatcccgtctctactaaaaatacaaaaaaaattagctggacatggtggcggacacctgtaatgccagctactcgggaggctgaggcagaagaatcgtttgaacgtcagaggcggaggttgcagtgagccgagatcgtgccactgctctccagcctgggtgacagggcgagactctgtctcaaaaataaataaataaataaatcatacatgacttcacttacgttctcaccagtgcattttttgtgataggaaaagaawggaaaactatatctacatgatgttttggataaaataattatttag

SEQ ID NO: 912850 - DNA, 571 bp, Homo sapiens
atggcactattccacaaagcaaagacatagaatcaacctaagtgtccatcaatgaaagactggataaagaaaatgtggtgtacatatatgtatactatggaatactactcagccataaaaaagagaataaaatcatgccttctgcagcaacacagaaggaactggaggcaattattttaagtgaaacaactcagacacagaaaggcagatactgtatgtttacacctataagtgggagctaaacaaagggtacatgtgaatatacagagtggaataatagacattggagactataaaagctgggaaaatgggaggggaggtttgagggctgaaaagttacctattgggtgcaatgttcactattcaaatgatgtgtacattataagcccagacttcaccactacgcaatatatgtgtataagaaatctgcacttgtaacccctaaatatataactatttaaacaagtttaaagctggaagataatgtacttaacgtttaatccarttctcgattttacacatgggtaaattgtggaccagtgatttgtcaaagttcatataactagttata

SEQ ID NO: 912851 - DNA, 632 bp, Homo sapiens
caagtaggttttatcagaagtgatcctaaggaacaagaaatgtaaaggagactgggaagagccaaagaggagagaggagaaagccaatctaaatgtaattgctgtgactcagtctctctagagatccccacaaagccttcgattgtccccctgcactctatggtgtttgtatatgccatatccattaacctgtctcccacaggcctcccacacagtgacatagctcttgacatacctgatgaagctgaaacaagacccttattaagctacacctctttgcagtcaatggctgggggcaaataaataaataaataaatgagtagagagatgacgtatggtgcctaatggacatcttaagaaaataagtagtattatcaccccctttttaacaattactgaatcattcatcagagacacacagtaacttgacaaaagttacaagtttgcaagtagtgagctcgattccaagactgaacctgatcttaataaagttaattcatttactatccactccatcctggggctcagtttcctcacctgcaaaaatgaatttcaactcaatgttctcataaaaatatttatttatgttggtaaaatrctgataacacagacaaggctaaaatcttttgtga

SEQ ID NO: 912852 - DNA, 635 bp, Homo sapiens
catgccagaaacagtggtgaagaggatagtcgtgagagccctcctcattgccatataattgtacaaaattctaaatataatgtaagataaataaatgtctagactactaagaaaaaaaaaacatgctacttggaaaataaaaagtaaagttaaatacaaaattctgagaaaaagagggcatattttaagaattgtctgtgtcatactgccttttttccctgcataaacagggaaaaaagaattatgatgtatgtctttagacagctataaaatatatcctttcaccaaaattttctcaaggacatatttccaggtattgaaggccaagtttcaaaagaaattttggaacagagatattgttgatgaaaatggatgctgacagatatatttattgaagaggtcagtaaataagaacactgaaagcaacacttgcagctagtcagaattatccaacaattgaaacaaacacattagaaaaaatatgcaatataaaaacacacagcaatgttttcacagttctaattagattactaggakggcggaatactggaaagataaagatataaaatatactcttctctttcccatgtattaaatccaaagttattgtgtaggctattagagttacataaagg

SEQ ID NO: 912853 - DNA, 601 bp, Homo sapiens
ggtcatgatgtgagtggggctttggcgacagatgttttaatagactcagccatttaacctccctttcttctaggccttggaccagatgaagcttattatgaagtggaaatgggcgacctggaagaggtatggtcgattgaaatgatcgggtctcactgttttccatgcgggacaatccccttcccgggcctggctataagaactctcgaggtcttttctttgagggccacactcacatacacactccaatcactgccgtggttaacccttgagagatgatgacctggtgaggcgactgcccacacagccttgattagagagcgttcaggatccatggaccaaaccaccgggcagcccaggaacccagctgcaggacaggagcctcgccccagtttactactcagcatccttaagagccagcaagctcaaccacatcccagtaaacacacgggcttgattacagtccttgcaggcgaggaaacaagaataaatcaatgcrgatggagggtgttctcggcctactgtgaaatctcaggatcccagcaggcgagcttcacagttctcaggggcagatagaggggattctttctctatagggatc

SEQ ID NO: 912854 - DNA, 620 bp, Homo sapiens
tcttattattttgaggtaggttccttcaatacctagtttattgagagtttttaacataaagagatgttgaattttctcgaaggcctttcctgcrttgataatcatgtggtttttgtcattggttctgtttatgtgatgaattacatttattgatttgcatatgttgaaccaccttgcatcccgggaattaagccaacttgctcgtagtggataagcattttgatgtggtactggtttcagtttgccaatattttattaagaatttttgcattgatgttcatcagggatattggcctaaacttttctttttttgttgtatctctgccaggtttaggtatcaggatgatgctggcatcatagagtgagttagggaggagtccttccttttcaattgtttggaatagtttcagaagaagtgttatcagcccctctttgtatttctggtagaattcagctgtaaatctatctggtcctgggctttgtttggttggtaggctatttatcactgcctcaatttcagaattcattattggtctattcaggaattcaagttcttcctggtttagttttgggagggtgtatgtgttcaggaatttatccatttcttctatgttttctag

SEQ ID NO: 912855 - DNA, 628 bp, Homo sapiens
ttgtcagcatcctatctctctttgctctgcraatccagtgtcagtcgctctttctctctgattcactagaatcaaacagagctttcacagaccaggggaagaggctaaatgatttgcctgctactaacatgtttagagagaaattcaaatcttctggctttaagtgtattaaattactcaacattaaattactgaccacattgtcagttcatggcaagtttcagttgataggttctttttgatcagtgactatctttcaatggtcatttcccagttttggtttctacctaaacttcactactggtcagccagaaattcaattcactcttggtggctggatttattcccatcaaatggaaaacacttctggttaaataggagcttgctaagaaaatgcaaggacagcacaaattaatgaacaagaactaatcaacccaatttggtgaatctcccacgaataaaaccaaatctaagttccacaaaatatcttgatgactcatttttatgggagaatgtgttgtagtcccacagctctctctgaggacataaacactcttagacttctgaaataatttgccctttgtacaagatagactcagctaaaagaaactataaaaatgttattaaa

SEQ ID NO: 912856 - DNA, 645 bp, Homo sapiens
acttaaataattaaaatgctattttgcaagaactgattggtgtgcaagaaagctcatgagtctcttgtctaagcttctttaaatctgttttctgaaaaacatgaagtcttgctttgccaaaagtaaaccaactccagtggcacatttgggtcgaaagtctgatttcagagtaaatccaaagctatccatttggagaagggtgaatcaggccaagacatctcttccagaggctttgctgaaaacctgcttctaggcccaggtagatttccaacacaacatgctgggagggagtgataaagacacagaaggttttatcacaaacacagctggagcgtctcaggctggtaatatttatttttaaagataatcttgctttagttcatttccaagcatcactaatgcttcaagctgtgattttttttgaaccgtgaaagttcacatgcctattcccaggaatctacagttctctatcagaatttaagtgtttgggactgagggcaggtgttacttctatcaatagcttctgaaaattactataaggatattctagatcatctgaatgacaatcttggagccaataaccatcgcacaaacacatttttgtttgagactactgtctgaytacaccaactagttagatttcaa

SEQ ID NO: 912857 - DNA, 602 bp, Homo sapiens
tctgttgaagctatgccccttgggactctggctcattgaactctcaggaagtcccttaggaaagctccsctttctgtactgcctttgcccaccctcaccaccttggggccactactctgggactctattctctctcaagtggcctcttacaaatacaaccatcctaggcagctgtcacatcacctcccgttttctcaagctcagcttctaccaaatatgcatgtcagaaagggttttagaggagctaaaatcagtgacttcatttttgaagagaatgactgtcatgggtaattgacagaattactgcatcttagccatagaagcattggaaattgtgcagaagctaaatggtttttgccactcaatatagttaaactctggaatgactttcgggggatacgtgatgaaagtagcgtgtttttctttaaccctggctactgaactggaattatggagggtcactggcattttttcaaagctctgtaggcaatttggataaacaaccagagctaaaactctggattagagagttagaccgacttttgaagtgtaacagggactagggttgtcaccttccacatgaaatcatgagcttttggggg

SEQ ID NO: 912858 - DNA, 602 bp, Homo sapiens
tctgttgaagctatgccccttgggactctggctcattgaactctcaggaagtcccttaggaaagctccccyttctgtactgcctttgcccaccctcaccaccttggggccactactctgggactctattctctctcaagtggcctcttacaaatacaaccatcctaggcagctgtcacatcacctcccgttttctcaagctcagcttctaccaaatatgcatgtcagaaagggttttagaggagctaaaatcagtgacttcatttttgaagagaatgactgtcatgggtaattgacagaattactgcatcttagccatagaagcattggaaattgtgcagaagctaaatggtttttgccactcaatatagttaaactctggaatgactttcgggggatacgtgatgaaagtagcgtgtttttctttaaccctggctactgaactggaattatggagggtcactggcattttttcaaagctctgtaggcaatttggataaacaaccagagctaaaactctggattagagagttagaccgacttttgaagtgtaacagggactagggttgtcaccttccacatgaaatcatgagcttttggggg

SEQ ID NO: 912859 - DNA, 603 bp, Homo sapiens
gtcaggagccccttattaaaggtcctctgttgaagctatgccccttgggactctggctcattgaactctcaggaagtcccttaggaaagctcccctttctgyactgcctttgcccaccctcaccaccttggggccactactctgggactctattctctctcaagtggcctcttacaaatacaaccatcctaggcagctgtcacatcacctcccgttttctcaagctcagcttctaccaaatatgcatgtcagaaagggttttagaggagctaaaatcagtgacttcatttttgaagagaatgactgtcatgggtaattgacagaattactgcatcttagccatagaagcattggaaattgtgcagaagctaaatggtttttgccactcaatatagttaaactctggaatgactttcgggggatacgtgatgaaagtagcgtgtttttctttaaccctggctactgaactggaattatggagggtcactggcattttttcaaagctctgtaggcaatttggataaacaaccagagctaaaactctggattagagagttagaccgacttttgaagtgtaacagggactagggttgtcaccttcca

SEQ ID NO: 912860 - DNA, 509 bp, Homo sapiens
agatgtatagatttaaaaaggaaacatgctgtattcaaactcactatagattcatcttaagaataaattaatttcataactgtactcattatctgaaacatgcccccagagattctggtcattaccccaaaaccctgtaagggaagtttaatttatatcataagcatattcaaaggaatgtcttagtaagagtcccactaattcttaaagagctgggaaataaacctagactactattacagaaaacctttgcctttacggaagtaagatcataatgctcaggacttccccaaaattccatttaccttgttttagaaaatcagcaatagtactcaattgttatatatatttatttgattttataagcttgagaatggaaagttgggacatacatatttacggtacggaaatcaagatgatttctggccttctattttttccatctgccaatrgagagacctagcccagtgccaatgttcacttacctttcaattgcttatttgctagct

SEQ ID NO: 912861 - DNA, 613 bp, Homo sapiens
agaatgtaactagtgacaaaaataacatgcttactgctttccataargaaaagtggaggtttttaaaaaagtaaagtgactaaaagtgatcttggcaaaaagaaagtctctctcttcttttctctctttttcctgaaagacatgtttcttcctttctccctatacattactcatactttaataaccatctttcaaagactactaattcaaacattgaagggaggtcaatctcttctgaatatctattttaaataatcaatacaagaaaattaatcagtaggtaatattatgtgatttacatttaatgactatgttttaaaaacatgaaaaataaactgcatgcatataaacccacctgagaggaacgctgatattacacaaccttcatgtaaatagctatatcttgtttggaaagagttaaagttgatgctgtattaaaattaaatatttttataatttattaggacattatatgctaacttgattatgcttaaccaaacgaactaaaaatgacattaagataatttaaccaagcttatactaaaggcaaattatgtcaaacccaaaaaacagaagtggtacaatttaaaaacaattattaattattgaagaa

SEQ ID NO: 912862 - DNA, 237 bp, Homo sapiens
aaagtaaggactcaacattgagcaaagttacagtactgttttattatttcttctaagatgtttacaaaagcaaatgttttcaaaacaaatactatyttaaataaatgccctaaatatgtcttactacctcattactttatatggtctattaccgtgaagataatatcagtgatatgatgtatcagtaggtaaagagaatgctttagagtatgatcttgatgaaattaagactataaa

SEQ ID NO: 912863 - DNA, 562 bp, Homo sapiens
aaaagacttccactatgcctgaaataattggtttaaagcatcagagaaaagtatgggcctttgaaatatgcctgaattaggaatcatttgagatattaatccaagttggtttgtccactgctgttattaacaggtttcagagttttccagacttcagcaactttaaaaaagcataacagagttttaaaatgtaaatattcctttttatgtggcaacttattttctgggagaaactgacatatttcagatttggcattgtattaatcctttctcatgctgctaataaagacacacctaagactgagtaatttataaagggaagagctttaattgactcacagttcagcatggctggggaggcctcaggaaacttataatcatggcagaaagtgaagcaaccacgtccttcttcacattgtggcaggagagagaagaatgagtgtcccttataaaaccatcagaactcatgagaamtaactcactatcactagaacaggaaaggggaaccaccacgtgattcagtgatctcctcctggttcctcccatgacacatggggattat

SEQ ID NO: 912864 - DNA, 726 bp, Homo sapiens
tactgatgggaatgtaaatgataaaaccactttggaaagcagtttggcagtttcttagaaagttaagcatacacttacatattacccagtaattgtactcctagctgtgtacccacaagaaatgaaaacatgtctacacaaaaacttgtacataaatgttcatatgagcattattcataatcgctctaaactgaaaacaacccaaatgtccatctactggtgaatggatgtacaaaatgggatatatccacacaatgaaatattattcagcattgaaagaatgaactaccaatacatggtacaacatggatgaaccgcaaaaacattatgcaaaatgaaataagcctgacacaaaagactgtagatcatatgattccatttagataaaatttctagaaaatacaaatctatagaactagaaagcacatcagtagttgcttggggctaagaggaaggatcgactgtgaatggcaaaagggaacattttggcgagatgagatgttctaaaactggattgggggaatgtagaactctaaaaagttaccccccaaaatcattaaactatacagctacggggatgaattttaaggtatgtaaattayacctcaaaaaaggggtttgaaaaaagaggactcccccgaatggcaattgagtggtagatgagtgagtgaatcacacaattaaaaaatatttcaaagtatttaggagacagtgttcaaagataca

SEQ ID NO: 912865 - DNA, 621 bp, Homo sapiens
gcaccatctgttgaaaagggtgtactttcccttcatgtttttgtttgctttgtccaaggtcaattggctgtaartatttgagtttatttctgagttctctattctgttccattggtctatgtgcctatttttataccagtaccatgctgttttggtgactatggccttatagtatagtttgaaatcagatagtgtgatgcctccaggtttgttctttttgtttagttttgctttggctctgcgggctcttttttgattccatatgaatttcagaattgctttttttctaattctgtgaggaatgatggtggtattatgatggggattgcattgaatttttagattgcttttggcggtatggtcattttcacaatattgattctacccatccatgagcatgggatgtgtttccatttttttgtgtcatctctgatttctttcagcagggttccatagttttccttgtagaggtcttttgacgcctttgttaagatatattcctaagtattttttttttttttttgcagctattgtaaaaggggttgagttattgatttgattctccacttggttgctgttggtgtatagaactactactgatttgtgtacattattcttgta

SEQ ID NO: 912866 - DNA, 609 bp, Homo sapiens
tcagcatctctcaaagttatcatttgcttaggctgttttgaacctytttttgccatgtgacaatttttaatattctttgaacttaatttccatggggtacacattacaagattctaatttgacaaacacttacatggtcctgtgtgcaggaagctcgcctctgtatcactgtagtattcataaaacgacagtaactatctaggtctttggccttttcgtctctcctctaagccacaggtctgaaaactttttctgtaaagtcccagatagcaaatctttttggctctgtgggccatacaatctctgtcacaattactcagttccgcccttgcagccacagacaatatggaaacataatgaccatgactgtattcccataaaactttatggctaacgaatactggattccatgtacttttcacatatcaatttttttttccttttgatgtttttcaaccattctttactcatgggcaatacaaaaacaggcagtggattggatctggtccatggaccacaacttgccaacccctgctctaaactaaaatgggtaacctagatgatatcagtacttctttccacactagccagatcagtattctgtattac

SEQ ID NO: 912867 - DNA, 547 bp, Homo sapiens
tctgctacagtgtttgtgaactgattttggttaaaagractgcaattctcaatgatgcattacagctcagttcagcaatgagccatgtaaccttggacttaacctatatagagcttagtttttaggtttgtaaaataaggggcttacaccaggactgaaatagcaggaaagctgtagagagagcagtggagcagtctctgacagttaaaacatacctaagaaacatatctgtcttgccaggcaagaacaatctctacttccacatatactcaggcttataggttacaatttcatcatcttccctctcttattctcccgtccagcctgccctcaatgtgcaatatagtttatgtggaaattatttcccattatggctctatttcttttcttcaatagggacaacactttcaaaatatttaataagtagcagttaaagaataacatcaatgaaaattttttaaatgtttttttttccagaaattactgctgatgtttacttaaatagggtacctatttccaattctgactttaatagtttcttaaaaga

SEQ ID NO: 912868 - DNA, 628 bp, Homo sapiens
gctttgggtcttgggtggttattctatagtgaaggtcctggttttgacagatttgttcacagtcatttttttctaatgtggggggttaggttatgagagaaagccagggtttctttgcagttcactctgcttgcctggaatctcatttgatattaccatgggctaaaactgccaaactagggaatttggccagaaaatctaatctgtgaacacaagcaatcatttatattttctcaaactactcaccttgggttgtatttaagacttattctgaaataaactgtagctttaagactataagagaaagctgcttattaaaaagtttccatttgccatgtgattggcataattagcatcttttctatcaaatgtttttgcctacagaaagtaaattttaagtgcattttcaaaggtttgttaaaataaaaggggtaattctggttgcatctatttttcaaggcaaattgccaaaaaaagatcaatgtggtagtgccttttgtttaaaaaagcattttacatacatttgaaatccagacagatstattaagctaaacaccttacaaaatatgatttattcaattgtcctggcaaagacttaagaagaagatgtcattttgagctcttttgt

SEQ ID NO: 912869 - DNA, 659 bp, Homo sapiens
aacagtgggttccttcccttgtctgacagtgaaacctatggctcacttcagccctctctcacctagtcacgtggggtyactggagcatgattgcagttgtcttcacagtagtctccttaacatgctacagtgggatgccatccactgctcagtatcatcagaacatgttgtctctgtgtcctcacttccaatgtctgcttatttttatcctcctcactggttttcaaaggcctccttatccacttgccaatctcagccaataagctccttctctctggccacagagttagagggctgcctttcttccttttccataattcaactcacttgtcagacccagctcaagctcctctatctgaatttctatgtagggaggctgttgactaacgggccatcggggctgcctcattactctgttgtctggaacatacccatctttgcaaggaattgcacaatgtattaacggcttctgaaaataaggcttaccatgcttcttggaaaactaggataaaatttatctgaaataaaatgaccaatgcaagcttaaaaaagaaacccacataaactaaactttttggaaacaaaacagaagtttttggcctgaataacttcctcaaatttactccagttaagggcttatttatagagacaacccaaca

SEQ ID NO: 912870 - DNA, 553 bp, Homo sapiens
tccttgtatcttatgcaaatttctgcagccagcttgyattttttcccagaatatgggtttttgttttccatcacattgtcaggctgcaaattttccaatcttttatgctctgcttcccctttaaatataagttccaatttcagaacatatctctcaaagttccacagatctctaggacaggggcaaaatgcctccagtctctttgctaaaacatagcaagagtgacctttctattccagttcccaacaagtttcttatctccatctgagaccacctcagcctggacttcattcttcatatcactatcagcatgttggtcaaaaccattcaataatctctaggaagttccaaactttctcacatcttcctgtcttcctctgagccctccaaactgttccaacctctgcctgtttcccagttccaaagtcacttccacgttttgggtatatttatagcagcaccccactctactggtaccagtttactatattagtcctttcttgctgctataaagaactccctgagactgggcagtttataaagagatttaatt

SEQ ID NO: 912871 - DNA, 559 bp, Homo sapiens
ttttaatttgcattttcctgaagacatatgacatggtgcaccttttcttttctttttttaattatactttaagttctagggtacatgtgcacaacgtgcaggtttgttacatatgtatacatgtgycatgttggtgtgctgcacccattaactcgttatttacattaggtatatctcctaatgctatccctcctccctcccccgaccccacaacaggccccggtgtgtgatgttgcccaccctgtgtccaaatgttctcattgttcagttcccacctatgagtgagaacatgcggtgtttgtttttctgtccttgcgatagtttgctcagaatgatggtttccagcttcatccatgtccttacaaaggacatgaactcatgcttttttatggctgcatagtattctgtggtgtatatgtgccacattttcttaaactagtctatcattgttggacatttgggttggtcccaagtctttgctattgtgaacagtgccgcaataaatatacgtgtgcatgtgtctttatagcagcatgatttataatcctctgggtatatg

SEQ ID NO: 912872 - DNA, 659 bp, Homo sapiens
gtcctttctaggtaaagaatattttttcctcagagctctagcaagcagctccagggaaaactcaagccttcaatgttttagctttcttgtgagatttatttattttttaaataaatcagaaacctctctttctatagatatgtgaactttctttaaacgaggagatctctggccctgaaaaactttgaaaccactggttcaggtgaagtcgatcattacctgctatttcactgccatgagagtgagaagtctgtcgtgagagagggttaagggagtcagggcattggcgcacctgctggtcccctgtgccagcctgagagcagaactgttgggaaatgtctccagtggccttggcaggcttacccatgaatgttcagcaccaaattatgaatatccatgacatcatatctaaatgttagggtagggctgaatcaacttccatttaatacaaaatataaacattatgaaaattctttgtttcttctaataactaacgtggccagatgtcactatcacttcacatcgtaatatcagattgtcaccattcattattgacccttcgattactctttaaatgaaaatggtacgttagctgcctatgatgcaamattttacacttttaaatcgtttcttgctgtaattttatttttatctcaaat

SEQ ID NO: 912873 - DNA, 781 bp, Homo sapiens
ttcatagcaatgactataaaaaataatcagttataattttatttctatcttaaataatattgaaaggcacaaccttaaacagtagtttcccattgtgattcaayatataattaaaactaaataggctttgtaatatacttatcaatttttttattttaaaacattataattggaagatgtaataatagtccctaccttataaggttgttacatttcaatgaattagagttcatgcaaaacgcctaaaatcatgcctgaaacatagtaaacattcaataaattatatttattacacaattaacaatagaatttacagtttgcctgacaattacagttagagttgagtacggttttatgctccaccattaatctttttgacaaatgttcaactttcctatatttagattgagctcttaatattcatttaaaacatctagggttatgtctttcatttcagtaaatacttcctaaaccttcacaaatgtagtgactaatctataccccaaatattctctataaccatgatctggtagctaggccacataaataaaacataaaaattacagaaattcgccaattaaacatgccataactatatcttaatagcagatgcttttttcaataaaatgtatatagtgaataatattttaagacggagtttctccttaacgtttaaataatattcctccccaggtaaatgttacaccaaaggcaaattttgttaatgttcgattctcacacaggaaagtttataacaaatatcaactggctacaatacatg

SEQ ID NO: 912874 - DNA, 592 bp, Homo sapiens
aaacagcctctaaaatagccttttcaatctcaaactcgattcaaacttcaggctgagggactaggaagaaaaatcaggtctgaaggatccaaagccaggcamgaggcactgaagaagcgagccactcccccatcacatgctctgtgagggggacaagggaacttttcccatttcaattgttcctacatatgagtgagaacatatgacatatgtctttccgtgcttggcttattttacttaacataacgacctccaatcccatccatactgctgcaaatgacaagatttcattcatttttttttttttttgatttaatcatattccattgtgtatatataccacggtttcttcatccattcatctgttgattgacgcttaggttgattctatatcttgactattgtgaatagtgttgtaataaaaatgtgagagcagatatctcttcaatatattaattctctttcttttggatatatacccagtagtgggattggtaataggtcatatggtagtactatttatagatttttcaggaacctacatagtgtttcccaaagtgactgtactaatttatattcctaacaacagtat

SEQ ID NO: 912875 - DNA, 656 bp, Homo sapiens
ggtagcaatagggtatcttgatcaccttttttaaggtgactctttgttctggttaaaatcaatttcagctgtgagcattcctttaggtgttcatgtatttacttgtttttttattgtgatttgagagaggcgcagaggaaggagtttcctttcccagacaccagagctaggaagacatgaagacatgattctaggaaaactgttctcaatcttggccgtatactgtattaggattatctgggaagctcaaaacaaacaaaaaatatcaagttcactttgaactctggaagtgggaccctggttcctaaatgctctaaaagctccccaaataattctaatggatggcaggtgctgccagagttaagaaccattgctttagaattttctagcatggtttccctgtaggtcactagttttgtggcattctctccgggaggtacggctcatagggcttctcaaacatcagtgcacctgagcagtcaactgaggcactgtttcaaatgcatgctgcccgggctatatgatcacatcagaaggcgtccgggaattttcactttttccgttgctagcagtggaagggtcacagaccaaacactaaggcctgagyggtgacaaccgaggcgagatgatggtcaacagggaatgcctcgtgggag

SEQ ID NO: 912876 - DNA, 610 bp, Homo sapiens
gtcccataaagccaggcaggatagmcttcactgaacgtttccacagcagcagggttggcagtagtggggtggttatcaccagaacaggattttaatttcattttggatggagaagcatttctactttatctctggagatgtatgtgaaacaggatttttttccatggtttatttcctgactctgacctcaggtcaaggacataaaggagaccaagctgccttaaaaaacctttcgctttctaaagcagagtgtgtgtgctgggggatgggagagggggagaaatatgagtttgaatcaattcccagatgacttagaaactgaaggggccttctcaaatctttatgtgacactgcaaaattgtgtgttttttttctgcttttcttatcatatctggttcattcaatgctacagtctttcccaaggatgctttttttaaaacataaataattttatttaaccaattgttatcatttgttatgtgccaggattttataagtgtcatctcacttaattctcccaaacgcttatatgagacagccacaattattattcctatttcacagattttaaaaatgcaggtgtaggggggttgaatagcttgcctaagat

SEQ ID NO: 912877 - DNA, 653 bp, Homo sapiens
ataaatttaatgccaaaaatgtggttattttactgaaagaataaggaactgtgctttactaaatttgtccaaatcacatgcacttcagttgaagttagaataaaaactaattctatttataaatgtattttctatatggaaataacatgtttcttctgtatattacatctacagggaacattgctgttgtcccaattatcaaaaccattggtttaggccttggaatcttaatctggggatcatttaatgccttaactggctgggcaagctcaaggtaattcaagtcaaactagttcaactaagatttcctgcatccatattctatgtaaagcaagtgattaccgagaggaataacatatgattcttattctcacagagtttatagctggtaaaacatacacatcatatatgccaccttctattgctatttgccctaaattcttaataagtgatctagatatttgatcaagatatagtgtagcattaaatctgggaaacagaggtagagagagaaaaaggaaactgatktttattgtccctttctattgtgtgacaatttgctggacatgttctatgcatcattctcatctcactttcacaaatacgtgaggtaagcactatcttataagagagtagataaaaagagattaagt

SEQ ID NO: 912878 - DNA, 597 bp, Homo sapiens
  misc_feature 284: n = A,T,C or G
ggctcctttttttattctaactgtaaaatactctttgaacygaggaagatgtgacaggaattacaagttttacctttgttctttctgacaactaaagagtatttaaaagggtttcccattaaactttttaagttttatccactgtattaattggatgtgagctattatgagaatgattacagagtgaaagtgtaaattgtcttgaatttgaatgtcttttaattaagcagtttctcaaactgcttctttcagtgtgaaacctaaataggagacacaagataatnttagcaccaaatgaggcctttaggatttagcttacttgcattcattcagtaaatattcattgtacttattttgcaaaaatgttgtattggctacctaaatcagtgaagggaaactacaaaggtaaatcagaaatgtactgtgagatcaagaagcccgtagctctgaggagagacaaaagtgtctaaaataatgagagtgtgaagtggagaaatgggctagtattgtaggagacagacaagaggaggagaagcttaatcaaggaaatgacaccataagctgaatgtaggctccttttgaggggtagcgtagagc

SEQ ID NO: 912879 - DNA, 628 bp, Homo sapiens
cctcagtaaatgtgaaagaacagaaatcataataaacagtctctcagaccacagtgtaatcaaattagaactcaggattaagaaactcactcaaagttgcacaactccatggaaactgaamaacctgctcctgaacgactactggctacataatgacattaaggcagaaataaataagttctttgaaaccaatgagaacaaagacacaacataccagaatctgtgggacaaagctaaaacagtgtttagagggaaatttatagcactaaatgcccacaggagaacgcaagaaagatctaaaatcaacaccctaacatcaaaatttaaagaactagagaagcaagagcaaagaaattcaaaagctagcaggcggcaagaaataattaagatcagagcagaactgaaggagacagagacacaaaaccccttcaaaaaaatcaatgaatccaggagacggttttttgaaaagattaacaaaatagatagactgctagccagaataataagaaaagagagaagaatcaaatagacaaaataaaaaatgataaaggcgtatcaccacttattcccagtgtttctgctttcatgtcctcctcattggagagatttggaaacccattatgtggat

SEQ ID NO: 912880 - DNA, 651 bp, Homo sapiens
actgctttatccccagaatctagaaaagtgcctctcacaagatatgaacttaataaatgaatttttaaacatgtatccccaaaacaaaatatagaaaacattaagagtattccctaaagtagctcagagaaacaaaacacagtgacattgcaggtggccttccttaataaaataccttgcttacttccttttccatctggcagtagttgttttagggacaggactcaacaggcccagtgagaaggcacagcagcttttgcttagtccattctgttaattccagaatgatttgaaggcttagagaagaaatcacaaaaccaaaacatatgacctctgacacaatcatcttgtagtaaccatatttctgaaaaaaaactgccacaggcaatttaagagaagaccccgaactaagaggtgggctcagtcctcatcaggaaatatcaagaagtaccccttgccttctccttcaattcttttaaatcagataagtaagaacatttaagctgtgtttgtggaatcagttgaaaatggcttagmcagggaaattatttttttttcccctttctaaaatccttttggttttgctctgatttcacttcttctctcattctctgatgacactattcaatgactgattttatttctctaaaa

SEQ ID NO: 912881 - DNA, 533 bp, Homo sapiens
ttaacatatggaaaaaaatagtagcatctaatatytgtatgctggtttacagtgtacatattcaccaacctaattaatcttactagtatcatgctgctctaatggtgtattattcttcattccaggccaatgttttttcctaagaagtcttctggtctcctgtgagaaacttgatgagtgacacggctaagcccgacaggccaaagcaaatggtgttaataattcaacacatatttttcgactttgttttgctcaaagatgtcaactccagatagggggaagagctgcttctctgtcttccaaaagcctcaaatatttcaggctcgccaccgcccatgagccgtggttccttccaccttccacttcaagagtaagtattccatgctgccagagcagtgagtcataaaggtggccgtgttgcatcctcatcttcctcttggttcctttcatttttctcccaactcacctccctgcctctggcctgagcccctctcattcactctcctcttccgctccagtgatctttcaaaaat

SEQ ID NO: 912882 - DNA, 466 bp, Homo sapiens
actgcatctgacttaaatggtcactgggagggtaaactagttactattggtgaagcatctgggaggtgcctgacacataaggttatgagctgaactgtgtttccccaaatccatacattgaagtcctaaccccagcatcccagggtgtgaccctgtttggagataaggtcttcacaaatgtgattacattaaaatgaagacattagggtggacccccccatgacttgtgtccttataaggagaggaagagacaccaggtctatcagaccattcttgcattgctataaagaaatgtctaagactgagtcatttataatgaaaagaggtttaattggctcagagttctgcakgctgtagaggaaacatggaactgttcatctgcttgtcttctggggagggctcaggaagcttgcaatcatggcagatgggggagcaagagagcaagtgagcaagtggggaggtgctt

SEQ ID NO: 912883 - DNA, 603 bp, Homo sapiens
gctgatcactggctgacaaaattcattctataattcactctgaaattgacagcattgtcctagatggatggcatgcttggatgacagcacctaaatcttacctagagattcaaggtgagaaggtttttgaacccttaattcatgttcaccttgtaaagaaggatgatcatccttctactgtttatattaaaatgattagacttggtaatctttaaaaccacaacaaaagctggacttctttccaaagaaccagaacgctttacctctgactttgtcttctgctaattcccttcctggtcattctgctcaagccactctgacttccttgctaatcctcacacactgcaggcactctccccacttggggactctgccaaggcagatctctctacttttctcccaggtgttcctgtggctcaatcccacaccctcttctctgtctccttctcagtgaggcctactttggtcagcctatgtacaagcattctttttgcttyctatgatgctctacattttttcttttgtctatagcacttataactttataatctactagagaatttacttatttattatgtatattacttagtcactcctctaagt

SEQ ID NO: 912884 - DNA, 530 bp, Homo sapiens
ttgatttcctcatactcatttttgcatatagtttgcatgcatttcaatgtmtagtaatttcatatatttggagtaagactgatagatggaagggagtcattcaactaaattgttgaaaggggaaggccctgagagagctcaactgttcttggtccttggtggcctcactgggcagtaacaagggcaagtctattgaagggcaagttcaccttgatcagataagctgagtctcgcactctggaagagacttgaagttctgttggtcaggtactttccctgaacacagtccctgccccccaaaaaatgtccccctccccaaacaaaaagcatggagaaatggtcaaaacaaccgtggctccatatatacttctttctcaattttgaaatctataaatatttatagacattctttatttgacaaataaaaattgtatatatttatcatgtacaactcgatagtttgaaatatgtatacattgtggaatggatcagttgaactaattaacatatgtatcacctcacacactagc

SEQ ID NO: 912885 - DNA, 530 bp, Homo sapiens
ttgatttcctcatactcatttttgcatatagtttgcatgcatttcaatgtatagtaatttcatatatttggagtaagactgatagatggaagggagtcattcaactaaattgttgaaaggggaaggccctgagagagctcaactgttcttggtccttggtggcctcactgggcagtaacaagggcaagtctattgaagggcaagttcaccttgatcagataagctgagtctcgcactctggaagagacttgaagttctgttggtcaggtactttccctgaacacagtccctgccccccaaaaaatgtccccctccccaaacaaaaagcatggagaaatggtcaaaacaaccgtggctccatatatacttctttctcaattttgaaatctataaatatttatagacrttctttatttgacaaataaaaattgtatatatttatcatgtacaactcgatagtttgaaatatgtatacattgtggaatggatcagttgaactaattaacatatgtatcacctcacacactagc

SEQ ID NO: 912886 - DNA, 643 bp, Homo sapiens
tgctggaataatattcttgatatattatgytaaatggctactagagaattacatatgtgccttgcgcatgtggctcatgttatacttccgtaggacagaactgattagctagtgacagaatattactaatactttttttaacctttaattttaaaatgagtattgattcacaggcagttgtcaagaaatatacagggaggattcaagcatcttcacccagccttctccattgtcaacaacctgtgtaactatagtatgatatcaataccaaagaattgagaccggtacaagccaccaaacgcaagatgaggagggcttttaatagaagattgtatatcttcagtctattcctggctgaagagatacttcatcttctattcatttatttaataaattcattcatctaaaatatatttacattcctcatgtcaggcactgtttaaggctctgggaataatacagtgagtaaaaaagatctgatccctaccctcactgagcttttattctagtttggatggcagaggacaaacaaataaatttgtaatatggcaaagtaatgccataacatggcatgaaaaggagatagttatgggtaggaaatagaccttttctttttctttttcaacttttattttaggttcag

SEQ ID NO: 912887 - DNA, 643 bp, Homo sapiens
tgctggaataatattcttgatatattatgctaaatggctactagagaattacatatgtgccttgcrcatgtggctcatgttatacttccgtaggacagaactgattagctagtgacagaatattactaatactttttttaacctttaattttaaaatgagtattgattcacaggcagttgtcaagaaatatacagggaggattcaagcatcttcacccagccttctccattgtcaacaacctgtgtaactatagtatgatatcaataccaaagaattgagaccggtacaagccaccaaacgcaagatgaggagggcttttaatagaagattgtatatcttcagtctattcctggctgaagagatacttcatcttctattcatttatttaataaattcattcatctaaaatatatttacattcctcatgtcaggcactgtttaaggctctgggaataatacagtgagtaaaaaagatctgatccctaccctcactgagcttttattctagtttggatggcagaggacaaacaaataaatttgtaatatggcaaagtaatgccataacatggcatgaaaaggagatagttatgggtaggaaatagaccttttctttttctttttcaacttttattttaggttcag

SEQ ID NO: 912888 - DNA, 643 bp, Homo sapiens
tgctggaataatattcttgatatattatgctaaatggctactagagaattacatatgtgccttgcgyatgtggctcatgttatacttccgtaggacagaactgattagctagtgacagaatattactaatactttttttaacctttaattttaaaatgagtattgattcacaggcagttgtcaagaaatatacagggaggattcaagcatcttcacccagccttctccattgtcaacaacctgtgtaactatagtatgatatcaataccaaagaattgagaccggtacaagccaccaaacgcaagatgaggagggcttttaatagaagattgtatatcttcagtctattcctggctgaagagatacttcatcttctattcatttatttaataaattcattcatctaaaatatatttacattcctcatgtcaggcactgtttaaggctctgggaataatacagtgagtaaaaaagatctgatccctaccctcactgagcttttattctagtttggatggcagaggacaaacaaataaatttgtaatatggcaaagtaatgccataacatggcatgaaaaggagatagttatgggtaggaaatagaccttttctttttctttttcaacttttattttaggttcag

SEQ ID NO: 912889 - DNA, 565 bp, Homo sapiens
aaaaatttaaacacaaacattttaaatgaaaggaaaatatcatttttattgaagcatttggagacatatggctgagaatctatttaacaaccactaaaaagacacaagctttcctttttctctcttcatgtcattgtaaatattcgcacatgcttcacttctattatattggcccagcgaatttgaaaatatggtgtgggttacaagagggttaagaaaagcctagaataaactcagattaaggcacaactcgtagagtggtcagggaataataataccctgttaatcttccttttcctcagaagaaccaatggagttttgtgggttattgagatagatgtgtgtgatgtagaagacaggagattttaggactaggaacactagcatgaaatagaatgtgacttcctgtgatggttaattttatgtgttaacaattctagatgtttctgtgaaggtatttcttagttgagmgtaccatttatcagtactctttggattaagcagattaccctccatgctgtgagtgggcctcatccagtcagttgaaggccttaagagaacaaag

SEQ ID NO: 912890 - DNA, 597 bp, Homo sapiens
aggggaatcaactcctttctttgaaaactggtgaataaaggggaaaaaaatcaaacatttattctccctttgttatatgagccatactactgaataatcacataataaatgagcagacatttttctttataggattcctcagctgattaatgaataaagaatgatagaagtagaatatcaccaattgcagtgcttaatgaactaatggatctatacatagatcataatggtagctagcactcaaaaagagaggcaaccatttattacatgcctccagatagaggaacattacctgtgaaatagtcttgtcaaaaagatttgaacctgtgtctgatcaagcctctagatccatatattaagttatggaaaatatgaggacataaagacatattattaaggaataccacagggatgtagaaaaatgaaggttttaggagactcaacaaataaaaatctgatttttgtcaacaaataaattgcaggatggagtgggggtctgggggatcttacagatcaaaggatgcctaaaagacttatcagccaatcataatgagtaaattttaattggmtattgattgaaactattttttaaaatta

SEQ ID NO: 912891 - DNA, 544 bp, Homo sapiens
cctcaaagtatgatcccctggccaggcgcggtggctcacgcctatagtcccagcactttgggaggccgaggcaggtggatcacttaagctcaggagttcaagatcagcctggacaacatggcaaaaccttgtctctactaaaaatgcaaaaatttaccggggcgtggtggcgtgcacctgtggtctcagctacttggcgggctgaagcgagacaatcgtttgaactagggaagtcgacctgcagtgagccgagattgcgtcactgcactccagcctggggtgacaaagtgagaccctgactcaaaacagaaacaaaaacaaagtatggtcagcagcagattgagcgttacctggaagcttgtgagaaatccagattctccccgaggtatctgaatcagaatctgcattttaataagaccccttcttgccccttgaatgccttccctgactcctcaaggcaggcttctagattcctgccctctcctcccagygttctttgtccacacccccactagacagtgtagcttcttgaatgcttagccac

SEQ ID NO: 912892 - DNA, 647 bp, Homo sapiens
ctcctggctcaagcggtctttctgcatcagcctcctgagttgctaggactacaggtgcatgccaccacacccagctaatttttaatttttttttttttttttgcagagatagagrtctcactgtgttgctcaggctggtctcaaactcctggcctcaagccatcctctagccatagtctcccaaagtgctgggattataggtgtgaaccactgcacccagccatcatttccgcgtttacatctgtgttcttcttattggtcatacttaggtccaaaaaagttagtttaccaaacacagactgtactttccaggttattaaattatcaataaggcaaattcagaacttttcagagattctgcctttaggttcctttagttttccaggtcagttaggttcctatcattcatccctttgtgttagttttgtagatcactcatttccacctggccagatagtttaactttcatgtatatttttttctttttatcattattcagatatctttctgcatgttactgctcttcgattttatatatttttatatactaacatatatggccttagcttagagtgcctttctttaagaatagtaaaggctgttgtctctaagtcaaactgcttatgtttaaatcctgtttcttcttt

SEQ ID NO: 912893 - DNA, 593 bp, Homo sapiens
actggagagatcctatcaaagaaaatggatgtcatgaaaacagaaatggttcaggcagagaaaacggctgctgagattattaggaagctggagaaacaggagtagaaacacttaaacaaggaaaagaaatgctagctgcacttgccgtcccatctttggaaaacagaactccagaggagtgtgcaaagacaagtgtaaaacccaaaaagaagaaaaagcaaaagccccaggaggctcctcaggagaatggaatcaaagacccatctaactctttctccaaacctaataaaaggaaatctttttccaaggagaaattggttagcagccatcgagaagagaccgctggcagcatcagtcttcccaacaggaagacgtcttcacccaaggaggaagcagttaatgatcccaaagaggcaggcaacaggagtgtcactaagaaaaaaacaggaaattccccttcaaagaggaaggagctggtcagcagtggacctgaagaggctgctggcagcaagagcagctccaagaagaagaaaaagttacataaagtaccccaggaagatgagartgcaaacggacgtcccccgtcaggcggg

SEQ ID NO: 912894 - DNA, 640 bp, Homo sapiens
ttgccctcagagagcagaccaccaaatagatgagaaaggaaatgtatagtkaagaaatttttatccactttattaatttattttatggccaaataaaactttatcaatgacagggttagagggccatgtaggcagagaataatccaaggcaatggagaattaggcttccatactgaatgatgaagagcccagctgagccagaataaagatttctgtaggacactgacaacactagaacagtgagttgagggcagagtctagagaccttgaatgtcagggcaaaacttttatgagcagaggaatgacaatctaaatgttggtaagtattatcagacagaaatgtatggaaggagaatacagagacagtttcccatcataacgcaggtgaggagaacagtcaaaatcagtgtggtagtaaagttaaatgtaaatgccatctacagttaagtttccctttgtactataactagaagaaaaactgctttgcaacaatgttcagaaacccaagtcttctttgacctacttcatatagtaatgaaaatataatgatcctttcctctgtgtgtacactaaatactgcttagagaaacttcatcttgataccatttgtaaatacttaaatgagtcccatgggtctcca

SEQ ID NO: 912895 - DNA, 478 bp, Homo sapiens
aaaaccttagatattctgtgtctcctgtcaaggmtgagaacagaccttatttatctttctgtctgcaaactaatgtaagcctcatgaggaaaagaaggatttattcttcagcatttacccataattagcattgaagcccaaccctcccctgcctcctcaggcagaagctgaaactgtacattctatctctgggaaaaggtgctttggcggagttgctccaaaaaccccctcccagtcactactgtgccctgccccttggggctgagctaaggctgcaactatctcctagggaaatggtgccttggcagttgctttgaaatctctccctgttgccactgtgccctgaccaacaggattcagactgaaacttcacacggtctcccatgaaaatagtgctttagtggagctgctccatatacccttcccagttgctgctgtaacatgtccccaatgctggaacagaagcaatgccaggcat

SEQ ID NO: 912896 - DNA, 544 bp, Homo sapiens
agcatgatcagatcaagctcacccagtgattaagtagagatgcaaatcttatgtgatgcccaatctgcccctcaccatgccattcaaaaagcagagtagaaacaaagataaactgatgtattcacctactaaaattaagattaaatgtttacagttctctagcctcagctttctcaatattccacatgaagctgaaatcacacttgggcccagttcatagaattatactcatctttcttccctgggatctaagtgtgttccctccaaatggaatgaaagagattcttcatctctatctcaggttcaggtaacacaggcttgccctctctcatctcccagaaatatgagcctactgataactccttggcttttaaaaatttcacattttataagagttttagggaagatttgaagaattttttaaacatctgaaaataaaataaaagtttgacaatgactaaattgaaggcatttataatgtgtcacaaaacagaaatggtttaagaaaraaatatatctgggtccatatgctagatctgccatt

SEQ ID NO: 912897 - DNA, 606 bp, Homo sapiens
gttctttgaggcagaatggtggggctgtattgagaagggaggaagagctagatcttctgttttgtgctcttccatgttgtgctataaattggaaaaagtaataagcctttggtactaacgtagaaatgcagtcatttaaaaaacatttttatcatgtaaagtgtttcctaaattgtggcaatctagcactaggcagcacggatttaattcttattgcaaaaaatatcggttgaacccctactactgtactgggtgtggacgacaatgtagagaaaggaaagcaatcatctccagaaaacataagccctcaaatacagctgtgcccattgtccagcaagagatgagaagagatgtgccagctacaaaaccttttcttgctctttgggattctaggagttgcatcttctctatctccagagcgaagaccagttgtccacttctagtattcctatgttgggtatttgtagttgagaaaaacctgtaccatttcataacgctcacctaamtaaacgatcagacaatgacacacattagaccatcttcattgttcaaaatgtggaggatctaagcacttttccacacctaaccgggctgccatttcctgtg

SEQ ID NO: 912898 - DNA, 576 bp, Homo sapiens
tttgctttttttttttactacccacaaccaagatttttgtattctattgaaaaataatatgtgaaagggattgcatgtggcctgcaaagtctaaaatacgcactctttgatcttttgcagagagtttgccagcttctgttctagaaacttgagactcccttcaagggtggagtctaattcctttcccttgaatctggtaactttattacttccttgtaactatagaatgtgactgatgtgacactgcctaatccccaaggctaagtaagaaaaggctatgagatgctccccttgctcactgaagcaccgccctgaggctgccacattaggaggaaaataaaatatgagaaaatagctaccacaaggtagtgctttttttggattgtgtatttaacaatgcagttaggcattaattatccatctgtgccttatcaattaaaatattacctatttgttgttttaaacattcctgttaaaatttgatagctataatgttgagtgaaraaagtcacatggaaaacaaaaaaaaaatgctatatgattccatttctataaagttcaagaacaggcaaaaat

SEQ ID NO: 912899 - DNA, 613 bp, Homo sapiens
ctgagatttcagtacatctgtcactcamacagtgaacacggtacctaatgtgtagttttttatccctagctcccccctaccctcccccttcttagtctctgaagtccattatatcactctgtatgcttttacgtactcatagcttagctcccacttataagtgagaacatatgggtttttggttttccactcctgtgttacttcacttacaataatggcctccagctccatccaagttgctgcaaaagacaatactttgttccttttaatggttgaatagttttccatggtgtatacataccactttttctctatccactcattacttgatgggcacttaggtggttccacatctttgcaattgtgaattgtgctgtgctgttcatgctcattcttatgtgcttataaaaatattaaacttccattgtccaagatcttttgaaagtagaaagataaatttctaatctgtccaacccaccttcctatgcaaaatgtagatgatgcaattgctattgttaatccttctttcagtaatctaggaagaatatactcagtgttaaaataaattctcagccaagatttaaccctatcaaagattttgaaaatgggaaat

SEQ ID NO: 912900 - DNA, 594 bp, Homo sapiens
tgggaggaaaggagtggccagrccatagaggcagaggccatcaaataaacaaccttgcattttgctaatgtttatatgtgttgttgatcttggtctaaaagtgtgaaaatgtcgctggatgccaactgagaatttcttggttctaagcctggtccaaactcaattttgctgggtgaccttaggcaattccctgcccctttctgagtctcggtttccgttctgtaaggcaagggggttggactagttggtctagaagtgattttctatgtgttccatctcatggaaatgtcagaacagctttagagatgaaaatgctggactttgtgtcctggttcccctgaagtctcatgggacacctggggactaggttggtgtccaggcaggaggcacaacaccaggactagttggtgtcctggcatacccagattagatgcagttctgccattgcatggagcaggagggggtcatggccaggcacccaacacagccatcttcccttcccagaacacacacagaccccagatgctgggctctggaacccggaagctgcactgggcagaaatgggccccccttcccactccccaccagctgca

SEQ ID NO: 912901 - DNA, 566 bp, Homo sapiens
tcctagcaccatttattgaatagggaaccttttccccattgmttgtttttatcagctttgtggaagatcagatggtcatgggtgtgtggccttacttctgggcccctattctgttccgttggtctatgtgcctgtttttgtaccagcaccatgctgttttgattactgtagccttgtagtatggtttgaagttggataatgtgatgcctccagctttgttctttttgcttaggattgcctgggctagtcaggctcttttttggttccatatgaattttaaaatagtttttttttctatttctgtgaagaacgacattggtagtttcataggaacagcattgaatctgtaaattcctttgggcagtatggcctttttaatgatattgattcttcctatccatgagcatgaaatgtttttccatttgtttgtgttttctctgatttctttgagcagtgtttgtaaatctgattgtacagatccttcacctcctggttagctgtattcctaggtattttattctttttgtggcaattatgaatgggattgcctttctgatttggctctt

SEQ ID NO: 912902 - DNA, 566 bp, Homo sapiens
tcctagcaccatttattgaatagggaaccttttccccattgcytgtttttatcagctttgtggaagatcagatggtcatgggtgtgtggccttacttctgggcccctattctgttccgttggtctatgtgcctgtttttgtaccagcaccatgctgttttgattactgtagccttgtagtatggtttgaagttggataatgtgatgcctccagctttgttctttttgcttaggattgcctgggctagtcaggctcttttttggttccatatgaattttaaaatagtttttttttctatttctgtgaagaacgacattggtagtttcataggaacagcattgaatctgtaaattcctttgggcagtatggcctttttaatgatattgattcttcctatccatgagcatgaaatgtttttccatttgtttgtgttttctctgatttctttgagcagtgtttgtaaatctgattgtacagatccttcacctcctggttagctgtattcctaggtattttattctttttgtggcaattatgaatgggattgcctttctgatttggctctt

SEQ ID NO: 912903 - DNA, 579 bp, Homo sapiens
gtacctaccatgtgctaattaacaccgttctagattctcagcaacaagcaaggaacataattgatacaaacttctgcctcttggagctctatttgttgtaacccagcgagttacagagaaacgccacactctgagacgaattcaggagtcctttattagccggcgaccgagagacggctagtgctcaaaattctctcggcccgaagaaggggctagattttcttctatactttggtttagaaaggagaggttggggggaggggtctagttaaaacaatcctacagaagtaaagtaggcaaaaagttaaaaggataaatggttacaggaaagtaaacagtactaggtgcaggggctttaattctatcacaaggtgatagaagcggggctttgggctttatcaaccagacacaaacgcggggggctctgggtgctgttaaccgggcgaattcctgggaactgcgggtatggcttgccacagtaccttatcagttaattgcattcttggatgtgctgggartcagcttgcacaagttaagtccctgaggaagcgggtgggtaaggggctgcaagtgaaggag

SEQ ID NO: 912904 - DNA, 668 bp, Homo sapiens
gtggccccagcagcatgaccttctctgcacatagcccctccagtgtgaccctattaaacttccctgaagctcttgcctctttgccaacagccccttctctgctgygctgcccattgcttccttgcaatgtactttccctctaataaactttttttctttaactcactactattttggtaaattctgttaccacccttgacgccagccccagtcagttggcacccagaacagtttctagcttctgagggagatgggagaaagagtgatgaatgatagaagggcatcacttattgaacatgtgccatggccccagctgtgcccaggatccagtgtctgtgactggtcagtccttgcaacaagccttgaagtgagtcctattatacagatgaaaattatttatagatgaggaaatggacgctaatgtggctaagtatgacttgcaacattggcttagatcaccccaccaatgtggctcatgtgagaagagagaggtggggggctgtcttgggagtcattttaaatgcaaaataaatgatgatggtgagtttgaaaaacctcaatgtgtctctaagtccagagcttaagaaaagccccaaaaagtgcaaaatagcctttttactgtaagccaaaaagtatctgagacaggtctaaatcaattgagaaattta

SEQ ID NO: 912905 - DNA, 666 bp, Homo sapiens
tgcttgaggaaggtttgctgaggcttgaccggcagtgcagagccagacaggtgatgatgaggggatggggaggggagtgtgggcaatctaggttgggacagtgtgactttctctactactatgccctccttaccttctgcttccaaggggaagctggatagggcctcctatttgaaaggagtgagaaaaacagaaggaggaaaatggaaggaggaaaaccagaagtagtcagtcattagtcaacagagagaccaggagaaccaggattgaaagaatggcctgggacatttccccagactgcttcatgagcacctctgaaaaatagcaagatgcccagccactggccctttgcaggtaatgagtgcaatttggggcttcaactctaaagaagatcttctgggtggcaccactgttgttattttgctttttttaaaaaaaattaaaaaaaatttttttagagacacagttttactctgtcacccaggctggaggcagtgggatgatcatagctcactgcagcctcaacctcctgggctcaagtgatccttctgcctcagcctcccaagtagatgggactacaggagcatgccaccatgcccagttarttattattattattagtagtatttgtagagatggggtgtaactatattgcccaggctagtc

SEQ ID NO: 912906 - DNA, 580 bp, Homo sapiens
gcaaatacattcttccaattcgtgggttgtctcatcactctgtttattatttccttagctgtgcagaaactttttagtttgatgtagtcttgtctatttttgcttttgttgcctgtgcttttagggtcatgtgtaaaatataattgcccatgctgatgtcatgaaattctacctctatgttttcatctagtagtcttacagtttcaagtcttatgattaagtcttaatccattttgagttagtttttatatatggtataagataggatctaatttcattcttctgcatgtggctatgctcttgtgacaacaccacttattgaaaggcccgtcgtttccccactgtgtgttcttggcaactttgtcaaaaattaattgaccatacatatgtggatttatttctggattatctaattctgcttcaattatctatttgtcggtttttacactagtactatgytgttttgactactatagctttgtagtatattttgaaatcaggtagtgtgatgcctccagctttgtttattgtgctcaacattgctttggttattcaggctgttttgtggttccatatacat

SEQ ID NO: 912907 - DNA, 591 bp, Homo sapiens
cgggcagcatggcctgcaggtgccagagacaccrgccaccaatacccacagctccctgccccctcccgtgggtctgcctggcatctcagaagggacccgtggaaccttctggctagaaagcaaaccagctcctttcttctagcttccaaacattcgtttaaagaagttggacatactcatgaatttatttcagaaaatttagataagcacaaaaaggaatacatagaacttacctataataccaccactcagaggtaaggatagtgcatatcacggcaactataccagttacttccacatactatacaatactagaaataaaaattacctcctggaatgcacacacacacacacacacacacacacacacactcatttatatgacaaagttgggatcatacaattcatgttattgtttagcttgcttctttcatgtaacagtccagcggaggataatttacatccatggtcctctgtggcatttctaatgccgctttattgtgcccctgaacaccttgggtatccatcaaagcccttctcacagtgcagcagagtttttcacaagtgcatatttgcccccaggctgtgagt

SEQ ID NO: 912908 - DNA, 596 bp, Homo sapiens
tccaagaccatcaagaatgtgcctctrtgaatctgcaagaaccacagaattactgggcttgggtgccccttaaagcagatatagcttaaatcacaacacccaaatcatgtcaaatatctggaaagacttcccaagaaggacaggtacaaataagcccaaactgagaggacaacaataaatacctcactcctcacttcacaggcacacatgtatatcaacaagtgtaaaggccattcaggaaaacatgacctcagcaaatgaactaaattaggtaccagggaccaatcctgaagaaacagagatatgtgacctttcagatagagaattcagaagtcactgttttgaggaaaatcaaagaactgcaagataacacagagaagaaagcattttatcagacaaatttaacaaagacattgaaataaatgaaaagaatcaagcagatactcaagctgaaaaatgcaattgacatactgaagaatgcatcagtcttttaacaacagaattcatcaagcagaagaaagaattagtgagcgtgaagacaggctacttgaaaatacacagtcagagaagaaaaactgagaagaataaaatcaata

SEQ ID NO: 912909 - DNA, 625 bp, Homo sapiens
ggcttccctcttctctggtcaccctgtcttccaacccactggcccagggctgcctctcaccttggggagccccacacaacagccgccaggcctaatagagaaagaacactgcttgaaccagggtggtgaagctaaaagggatggatggctggagggtgcacctgaggcccttctgggtggtcagaaagcccaggaccctctgaagggaccctgggggaggcagggagagcaggcagctggatgccactggccatagacttataagtctaagaggggagcctcagctggttggggggctgcaggttgcataggtgaggctgggcgcttcctgctgggaaaagcagaagagggagagtccatggcagggaaggcgggtgggctcactgggtggagctcagctgggccagcaggtactgtggtccccttggctgaacagcataggcaacccctaagagcaacaggccaaggtgcatgaggccgctggctggtggtagtgcttcagcgggggccagggaccctggcttcagccacatgctagcagctatgatggtacctgggagagagggaagggggctgtgtgtccctscctggcctgtgaggtgtgttgtgggatgactgtgtgcat

SEQ ID NO: 912910 - DNA, 589 bp, Homo sapiens
caaattctaacaattttactttctaaatatctcttggatctatccatttgttcctgccaactcaaccctactcaatgttaccatgtatgggaatgtccaataattcaccaatttaatacaagacatataatagttttaaattttatttctaaattgcctataattgagagtatttttctagaaaacagaaaacaataaaaggtatatccactgaaaatatcaatgtttactagagtcttatgtttaaaaaaatcataagcatgcacattacagaacaggcataacctataatatgcacattagttaaattctgtacttataaaaagtctaggggaagtaactgaaaatataaattttaaaatatttctgtagtcatagattaaaaggtaaatgtgtataagcaatataattctcactatattttattctgcagaaataccttaaacgacactgcattgtcaaagaatagtatgtcctctacaattaaaaaaaatacaagaatttgcattcttaataaamatggcattgtggcataagaggatgtagcttagtgcctcttgcaaggcaatggaaatatctgagttgacaa

SEQ ID NO: 912911 - DNA, 629 bp, Homo sapiens
ctctgttgagcaagtctattagcaccatttttcaagcagcgtgtgattacttcatatctctgtgtcacattttggtaattctcataatagttcaaacttttccttattattatatctattatgatgatctgtgatcagtgacctttttatttatttatttttatttatgtatttattttgatacagtgagatacggagtttgatacagaggttgctcactacaacctcaaattcctgggctcaagtgatcctcccacctcagtctcctgagtggctagaactacaggcacaaaccaccaggcccaggtaaaaaaaaaaaaaaaaaattatagagatggggttgctcaggctggtctcaaactcctggaatatctttgatattactattgtaatattttgggggaacagccatgcctatataatatggaaaactttttttgtgtgtatgcgatagagtcttgctctgtctcctgggctggagcacagtggcatgatcacaggtcattgcagcctcaacatcytggactcaaatgatccttgcttaattgataactgttgtgtgtgttctgactgtttcaccaaccagccattccactgcctctgtcctcttcttgggcctcccttttttc

SEQ ID NO: 912912 - DNA, 626 bp, Homo sapiens
acatcagccattcatacaatatgaaacctcatcactgyttcgtggattgaagaaaacttagaagtatgggatggaaataaaaatagaggtaaaaactgaatatatataagaaataccacttgccaagagtcctagcccagtcccaataaaatttatacagttttaaatgtgaagtttccttaaacttctttagcaactcttgctgtttgagatgtctctaatttatagataggcagaaatttcagtaggtgtttatcttgttccactttggaaaaatcatttggaggaaaatgttttatttcattattttcccttttaactaggatttcaggccaacaagtttttgtctacttttctcccctgacttcaaagaaattctaggcattttgttatacattaaaatcacgcaatttgtataaatattatcttccttttacaaaaagcccatggcaagggtaatgcatcctagagtaaaatcatagtttttttccccttttttttcatgaactttagcacactatacttagtgtgcctacactatagcttaaaataacttcaaaggtttttgagccactgaaattagtgcaccctaaaaaagatagagctgttatcagaaaaaaacaata

SEQ ID NO: 912913 - DNA, 635 bp, Homo sapiens
tcccttgtaagtgcgttaattatattcacattgttgtgaaacagatcttcagaacattttcatcttgcagatttgaaactctatacccattcaacaacaactctctttttcccctttctccttgccgctggtaataaccattctactactttctgtttccattaatttatctactttaggtaccacaaataaatagaatcatatggtatttggctttttgtgagtgtcttatttcacatagcataatgtcctcaatgttcaactatgttgtggcatatgatgggatttccttcttttttaagtctgaataatattttattgtttctatataccacattttgcttattgtttcatttgttgatgggtgtttgggttacttaacaccccttggtattgtatatagtgccactatgaacatgggtttgcaaatatctctcagagatcctgctttcaattattttggatacatactcagaagtagaattgcaggatcatatggtaattatatttttgagtttttgaggaaccttcttactgtttcccatagtggcggcaccatttaaaattcctaccaacaatgcacaagggtaccaayttttccacattctcacaaacatttgttattttctgttctt

SEQ ID NO: 912914 - DNA, 595 bp, Homo sapiens
ttttacaaataacagttttttaagaaagtaattgttttctctgaatttcagttagagacatttaactttattaaagtagttttaatcataaaaaaatcaaaaygtaatcctttcatttcttttaattgatcaaagatgtatggatttttgaataagtttatatattgttatagcagggttttttatgcgttttatataatgaacttttcagtaactatctttgctgtcgtatttcttattcaacattcattctctcaagtgcatctgcattgtctaatactgaatcatgcaaataagtaaactgtatcaaataagagacacgtaaaagggaagaagtatgaccaaagcataatgagttttaaattatcctcctcactctcctccctgatgttattcttgtagctccacagtccctctcatttacttacattgatttaaacttgttatttttgtttggaaaaattctcgtgtctttttcatatgcgtttgtctgtattcttcaattaacctggaaactattccaggggacttggttctcccaacggttgagagaaccagcactttgttgagttgtggctgcttctgtgtggtgtga

SEQ ID NO: 912915 - DNA, 620 bp, Homo sapiens
cgtatgttctacttgctccccacacaaaagatggtcagtgcttttaattttaactattctgatgggtatatattatggtttaatttgcatttcccttataactaatgaagttgaaygtattattatatatccattttgattatttggatatcctcttttgtgaaatacctctctcatcaattttgtattagctagtctctttttcttatagattggtgggaacttgtatacattctgtatacaagtcctttgtcaattatacatatggtatgtgtcttttcctactctacagctttcttattcatgctcctaatggtgtgttttaattatgggaacttctaaattttaatgtagtctaaaatgtatttatgtttttccgtttatggttaatgcatcttgtttaggatagtttgtgtactttaagatcacaagtatagtctcatgttttcttttaaaagtgttactgttttatagttcacatttggatgtaaaatcactcagttatttgttaattagtgtggtatgaaggtcaaaattcattttctttcatgtaaatatccagttaatccaacacaactaattgaaaagactatcctctccccactactatgcagtactgc

SEQ ID NO: 912916 - DNA, 633 bp, Homo sapiens
tcttcctaaaaaaactcctgttaacactgacatgtaacattttgtgtagatacgctgatgaaaaataatttctagcattgtctgatttttaaaarttaagaatacttgtctgtgtgcagtagctcacacctgtaatcccaacactttgggagcctgggataggaggattacttgagcccaggaattggatactagcctgggcaacaaagcaagatcatgtctctacaaaaaaataaacattagccagacttagtagcatgggcctgtagttctagctacttaggaggctgaggtgggaggatcacttgagcctgggaggttgaagctggagtgagctgtgattttgccactgtattccagccagggtgacagagagagattcacagtttggaattctaagttagcaattattttccattatcactttgaagttttctactatgtttaatgaattattttatctgactaattttaacattatcttggttcttggttttagactaattttactattgtatgcctaggagtgtttctctttgtctacttatcctgcttggtgttcacagtacttttatgaatttttggcttgatgtttttcatttttgggggtaaaactcttagtcaatacatgtt

SEQ ID NO: 912917 - DNA, 633 bp, Homo sapiens
tcttcctaaaaaaactcctgttaacactgacatgtaacattttgtgtagatacgctgatgaaaaataatttctagcattgtctgatttttaaaaattaagaatacttgtctgtgtgcagtagctcmcacctgtaatcccaacactttgggagcctgggataggaggattacttgagcccaggaattggatactagcctgggcaacaaagcaagatcatgtctctacaaaaaaataaacattagccagacttagtagcatgggcctgtagttctagctacttaggaggctgaggtgggaggatcacttgagcctgggaggttgaagctggagtgagctgtgattttgccactgtattccagccagggtgacagagagagattcacagtttggaattctaagttagcaattattttccattatcactttgaagttttctactatgtttaatgaattattttatctgactaattttaacattatcttggttcttggttttagactaattttactattgtatgcctaggagtgtttctctttgtctacttatcctgcttggtgttcacagtacttttatgaatttttggcttgatgtttttcatttttgggggtaaaactcttagtcaatacatgtt

SEQ ID NO: 912918 - DNA, 633 bp, Homo sapiens
tcttcctaaaaaaactcctgttaacactgacatgtaacattttgtgtagatacgctgatgaaaaataatttctagcattgtctgatttttaaaaattaagaatacttgtctgtgtgcagtagctcacacctgtaatcccaacactttgggagcctgggataggaggattacttgagcccaggaattggatactagcctgggcaacaaagcaagatcatgtctctacaaaaaaataaacattagccagacttagtagcatgggcctgtagttctagctacttaggaggctgaggtgggaggatcacttgagcctgggaggttgaagctggagtgagctgtgattttgccactgtattccagccagggtgacagagagagattcacagtttggaattctaagttagcaattattttccattatcactttgaagttttctactatgtttaatgaattattttatctgactaattttaacattatcttggttcttggttttagactaattttactattgtatgcctaggagtgtttctctttgtmtacttatcctgcttggtgttcacagtacttttatgaatttttggcttgatgtttttcatttttgggggtaaaactcttagtcaatacatgtt

SEQ ID NO: 912919 - DNA, 611 bp, Homo sapiens
gatcttaatatattaaacaaataattacacagacaattacactattaacttgtaataaatacaaagaaaattacagagtttygtgaggtttataacaggaatttctaaccactgttggtgtttagagacatcctcaataatgtagcaacgttcaaggacaaggaggttagaaaaatagtaaaagtatcttaattttggttctcctagaagtatattcagagataagtattcaagtgctagcagtgttttgggctttaccatggaaatgggacattacatggatgaagcagataaattatggctactggactttatggtatatgtgactattgagatgtcagccatgcctgcagccatgcagatgtcctggctcccaggaactgatctagagtagcattcctctccacttaatctgcatcatttccccatcaggaaaaacccagaaaatgactcccttctttatttgttacaaaggaaataagttcttattctattagacatttggactaggtctactattggtccctttacccctgtggaataggcttttcttgtccagtagcattgctttgggggattgcttcttcaatgttatgagtttacattcgtgg

SEQ ID NO: 912920 - DNA, 678 bp, Homo sapiens
attgagaaataagacaaattacaaaaagtctctttacttgataaaataaaccaaaaaataataaaagccagcaaaataaaaactatcaaaaattataaaggaaatggaataaaacctaatgctatgaactttgaaaagaggaagctcagaaagggagaaaggaaaaatacagaaatgctgaaagacagacaaacagaccaacagaaaaaaaagggaggtggaaagagagagaaaaagagggaagagaggaaattctcttcaatttatgcaaagctttatttaagggattttattaaaatgatatttatagtatcccactttataatattttaatctatcgatccataagaagaaatgtttgaaataatgcaactttaacattcttgatgattaattctgggtgatggaattgcctgtgtaagtgtatgtctgtgtgggtgtgcttattgccttttattacttttcttttttgcttgaattgatcatgtacaatttttattaaaaataatgaccatgacaatattaaaataatctttttatatttaaaaatatgtatatgttttatattatatatttatattttcttatatttaamatatataaaaatatgttttatgttatatatattttgtatatacataaatatatttatatattcataaatatgtactatgtatt

SEQ ID NO: 912921 - DNA, 637 bp, Homo sapiens
aagaagtattttgtgtcataacgcatagcctatacttgaaaaataagtgtatcatgttgctgtgaagttttttatagacatttattagtttattttggtttgtaatgttgctcaagtgttctatatccttcttaattttctatctagttatttattcattcctgaaaggtaggtattgaaatcgctaactatgaatattgaattgtctgtttttcctttaaattccaccagtttatgcttaagatattttaggacactattgctatgtgtttatatgtttatagtttgtaaacttttctgatgaattgatacttcatcattataaaatgcctctctatgactcttggacaattttttgtaaaaacatatcttgttcgataatgatagccactcagttgttttggtgactctttatttagcatggctttttccattcttttattttcaacctatttgtgtctttgaatccaaagtgtgccttttgtagatagcatatgtttatattgtgttgttttaattcattatgtgaatgcttactctttaattggagcatttaacccatttatatttmatgtaatttctgataaagtagaatttctgccattttgccatttgttttcagtgtgtgactgcacat

SEQ ID NO: 912922 - DNA, 664 bp, Homo sapiens
tacagctgtggacagaaaggttattgggagaaagaaaaaggagaagggaggccaaggcgggtggatcaccagaggttgggagttcgagatcggcctgactaacatggtgaaaccccgtctgtactaaatatacaaaattagctgggcatggtggcgtgcccctgtaatcccagctactcaggaggctgaggcaggagaatcacttgaacctgggaggcagaggttgcagtgagccaggattgcaccaccgtactccagcctaggcgacagagtgagactcagtctccaaaaaaagcaaaaaaaaagaaaagggagaaggggccaggcgcagtggctcacacctataataccagcactttgggaggcagaggggggcggatcatctgagctcaggagttcaagaccagcctggccaacatggtgaaacccagtctctactaaaaatacaaaaattagctgggtgtggtggcacacacctgtaatcccagctaccggggaggctgtggcagaagaatcacttgaacccagaaggcagaggttgcagtgagcagagatcgcgccactgcactccagcctgggcgacagagcaagactctagtctcaaaaaaaaaaaaaaaaraaagaaaggaaaagggagaaggtagtcacctaagtaataaactat

SEQ ID NO: 912923 - DNA, 548 bp, Homo sapiens
caaagtgctgggattacaggcatgagccaccgcgcctggcctttttttttttttttttttttcaaacagagtctcactctgttgcccaggctggcgtatagtggtgtgatcttggctcactgaaacctctgcctcctgggttcaagagattcacctgcctcagtcttctgagtagctgggattacaggcacgcatcaccacgcctggctaatttttgtatttttattagagacagggttttgccatgttggccaggttggtcttaaactcctaacttcaagtgatccacccgccttggcctaccaaagtgccgggattagagatgtgagccactgcgcccagccccaagttgcctaattaggcgttattgaaatggaagaccaagcaggaagctggtggctcagaagatggggcttgttcttcatgtccacggtgctcactagtaraaggttcgggcaagtgcttatcttcattggaagaggatgatggctaatatcaagaccagaaaagttcagccacttgcagtaggtcccagcctccaggcacat

SEQ ID NO: 912924 - DNA, 765 bp, Homo sapiens
cagcaccatttcttaaatagggaatcctttccctattgcttgtttttgtcaggtttgtaraagattagatggttgtagatgtgtgatgttatttctgaggcctctgctctgttccattggtctacatctttattttggtaacagtaccatgctgttttggttactgtagccttgtagcatagtttgaagtcaggtagcttgatgcctccagctttgttcttttggcttaggattgacttggcaatgcgggctcctttttggttccatatgaactttaaagtagttttttccaattctgtgaagaaagtcattggtagcttgatggggatggcattgaatctataaattaccttgggcagtgtggccattttcacaatattgattcttcctacccatgagcatggaatgttcttccatttgtttgtgtcctcttttatttccttgagcagtggtttgtagttctccttgaagaggtccttcacatcccttgtaagttggattcctaggtattttattctctttgtagcagttgtgaatgggagtttactcatgatttggctctcagtttgtctgttattggtgtataagaatgcttgcgatttttgtacattgattttgtatgctgagactttgctgaagttgcttatcagcttaaggagattttgggccgagacgatggggttttctaaatatgcaatcatgtcatctgcaaacagggacaatttgacttcctcttttcctaattgaataccctttatttctttc

SEQ ID NO: 912925 - DNA, 632 bp, Homo sapiens
tatattcaacatttaatgaacctccacattgacatcatttgagattttgaaattagatgtgccaactcacaactctgtcagttactttattttactaaatctcaagaggtttcaagacctttgctgaagtgaggcaggaggtaagagaatggaagttttgagaaaaaaccattttatataagactgatgtaaataggtttcctcaagtgaactttcgggttaaaggatgtaaacactagggctactgaatacagatggcaaattactcactcaaaataatgaacactttgcttggcaacatgtagtgaatgaatctctttaaatcatataatagttaatacagattataattatcaaaatgtgttttaatagcaacaacatgtttttcctctatgaacttatgtatgtttgattactagtgtggctgatatttttctgtacatgaaccatctattgtcctccatgtaaaaattaaagattcatattatttgtccattcctttagggttttaacattttccttacttatttaatgaggtcttaatatgcaaaggctatttgctgagctgtcctctcaaattggtttgagataattarctattaacaatgggctgttgcttttaatgaataggt

SEQ ID NO: 912926 - DNA, 613 bp, Homo sapiens
gaaggcaatcttaggagagggtggaatgagatggaagttcctgcggacctaccgatcctattctctcccacccagtccctagggaagmgtaataggaaggggagaaggttcgttatgaaatcctggggccagaaccaagggcagatacaccccggggactttctcctaaagaacaagatgtctttccaaattctccacctgcaggtcctgtcctctgtgaagatgaacggggtggggtggtgaggtggcggggtgttgtaaacctgaggaaaggttggagggaaaatcaagccacccacctactccagccacgttgcccggcggtgttggtgaggctcgatgccggcgtgcacggcaagcgcgaattcggaacctggcgcccttgaccaagcctgagatcggaaagggggcatcgcccagggccagcgccctgggggcagggtgccgtgcccgccagaaaagctcgcctcagttttggcagtaatgattttcctagaagatgccagagttcgcgaagatcggagtgattcgcggatttctgcgctcaagctagaggcgcagcgaccccgagctcccccacactgggagcctcggggcagcattctcggggccc

SEQ ID NO: 912927 - DNA, 635 bp, Homo sapiens
aggctacaaggaagcatgtagaaaaggagatggcatggcttcacacaatacttcgggctctaattacatgtgtatttggtatgagaactaaaaggaaaattataaggcttgcattgaagaaaagaagttggcagatagaggaaataggagaaattggaggtaagtgccgtccagctgtatagtacatagtgcggagtatgcagttaaacgcttcttagaaattactacaaatagtccagtaatggcagaatcagtaacctggtcaactagatgccaggtataaagtagtatctctaattttacatatttgcacttaagcacaagcgtgtgtaataagaattttttattcaccagaattcttggaaaataaacagaatgtatttgtgctagttggtagggtataaaaggaaggacttctcactcctctacggccgcccctatgtgggtagaactttgattaatgttcaagggagaaagaatatgaaatagggatagaattggcagagctggtgaaagaccacccatgtcatactgtgactcttcaagtgttcactaaagcctatctgatgggactagatttcctatggaaactggtatgagrgaaatgctgtattcagaatctccatgagagatgc

SEQ ID NO: 912928 - DNA, 637 bp, Homo sapiens
tttaaggtgttctactgtagcagcacaaagggactaagacatgtctctgtcatcacatgacactttttctgttgtgtctaaattctcctcttcttattaatatgccagtcattgggacagggttcaccctaatccagtattgttataacttgattacatctgcaaaaaccctatttcctaataaagccacattcacagacactggggttaggacttcaacatccttaggataggggattggacacagttaaacccacaatagtgggctattcacatttatacttgaaattcatacagagttcacagacaatccatctcaacttttccatttcctgtatatttttacttttagttatacatacagttgtacataaatagcctttaaacagctcttccattttattctaaaatgtttctaaaatcagaacaaagactgaaactaaacttctgtggataaacaaattgcattgtggaaagaaaatctgatccgcaaagcttcaaaattgtattttttgtacatgaaaagaakaatgtattagcttattcatgttttcattcacttcttcaaaatttatctttgaataatacttactggaagcaatagagtctctcatgaaacttccaatctaattgtgca

SEQ ID NO: 912929 - DNA, 613 bp, Homo sapiens
gctttggacctcaagctaaaagtgcaaacagtctgcctactttccccataaacatttccccaaaataaagggcttttttttttttttttagcacttgcttacttgtgttctcrctttctctgtcttcctctccctccctccttctctccctgctcactgtcatcagctgggtcccaatccagtttctacacctacattcatgactaatgacccaccagcagcccctaagagccactaggctgtaatgaacattttcctaccagttacatgtggtaggtctgggaggagccccccatttccaatgagggtatgttaaatacagttagaatgatgcgggatgtggactctggagccttgctacatacaaaatgtggtctgaggaccagcaacaaggcatcatgtgagaacttgctaagtatgcagaaccttagaccccaccccagaactactgaatcagaacatgcattttaacaagatctcttggtgatctgaatgtacattaaagtttgaggagccttggtataaaatttgaatatattttgagagaagactgtggaatttggtgggggatggggaagtggtaggattcttatgtacagggctatttacagag

SEQ ID NO: 912930 - DNA, 613 bp, Homo sapiens
tcccagtcttcatctatccacatgttcttcattggctcctaaatttggggccaaatttttagtgaactacagggttcttgccactttttctagtttttcatttctatrtgcatctatggcttccgctactgcctatgtgttgctgactctcagatgaccatcttcagctccaaacccctttcctaactctaagcccagatttcccaaaccctctaatttcttctgtggtacatctaactgggactttgaaacgtgactatctccaaatgaaacaaatggcatctcacaatgcagtctgctcctgtttttcattttcctttcttggataatattatcactattccctttttctccctaatggaaaatcttaaaggtatcctcagttatattgaatgtgtcctaaactatgctgggtgctaagaaaacagaaaattaagacaaagttcctgctctcaaccagttcacagatactaatttaaactaacaaagcacctgattcgtgcaactatagaaatatttatgggaacagtgcagagctaacccagagaagggaatgattaactttttccagggtgtggtgtgggatgattatgaactgggttttcaaaaccaa

SEQ ID NO: 912931 - DNA, 613 bp, Homo sapiens
tcccagtcttcatctatccacatgttcttcattggctcctaaatttggggccaaatttttagtgaactacagggttcttgccactttttctagtttttcatttctatgtgcatctatggcttccgctactgcctatgtgttgctgactctcagatgaccatcttcagctccaaacccctttcctaactctaagcccagatttcccaaaccctctaatttcttctgtggtacatctaactgggactttgaaacgtgactatctccaaatgaaacaaatggcatctcacaatgcagtctgctcctgtttttcattttcctttcttggataatattatcactattccctttttctccctaatggaaaatcttaaaggtatcctcagttatattgaatgtgtcctaaactatgctgggtgctaagaaaacagaaaattaagacaaagttcctgctctcaaccagttcacagatactaatttaaactaacaaagcacctgattcgtgcaactatagaaatatttaygggaacagtgcagagctaacccagagaagggaatgattaactttttccagggtgtggtgtgggatgattatgaactgggttttcaaaaccaa

SEQ ID NO: 912932 - DNA, 670 bp, Homo sapiens
tctatgtttataagaagtggccaatctgtttttcaatatgggggtaccattttctattcctaccagcaagatgtaagagttttagccagtcctggcaacatacagagaccctgattccgtaaaagtaaaaataataaaatcagtggggtctggtggtgcgcacctgtggtcccagctactcaggaggctgatgtgggaagattgcttgagcctaggaggttgagactgcagtgatccatgattgtgccattgcactgtagcctgggcaacagagcgagaccctgtctggaaaaaaaaaaagagtttcagttgctccatatctttgtcagcacttaatacactgatcttctcaattttagccattctagtggatatgaagataccctaacatggtaattaacattttctgatgatgatgttgaggatcttttcatgtgctttttggccatatgtatatcttcttctattttctgattccaattttttaaattaaaattgttttaaacttttatttaaaactttttttagagatagagtctcactatgttgcccaagctggtctctaactcctgtcttcaagtgatygtctctcttcagcctctgaatttccatttttaatggcttgcttgtttatgagatttgtaagagttctgaaatattttggatagaa

SEQ ID NO: 912933 - DNA, 624 bp, Homo sapiens
ggtgccaagccactcatgagggatctgcctccatgagccaatacctcccactgggcaccacctccaacmtcggggaccacatttcaacatgagctttggaagggacacacatacaaagcatatcaagaatggtggggtggggggctggggaagagctgtggtttgaaagaaagatcattaagaattgtatagtaagtgctggaggtggaaagcattttcagcagccatcacataagcaaaggctctgagacaaggagagcactgatttcagtggcagccctgctgcaggcgtgtactgtaaacaagtgattaatggaaggcatggtgggccttgctagatcagatccatgccaggcactgcaaaggctagacattgtgcatggatagcatttccatgagttttcacagtgggcctgcaaaaaaggaaaccaacacacatgaagtcataaaccctaaacattgtaccaattaatctgaaaacaaaaattcaggaagtgagagatgaacatgaatctgagaaaaactcatggaggaaagacctcaggctaagcctttaagggtggctaagattactgggtatatacccaaaggattataaatcatgctgctataaagacacatgca

SEQ ID NO: 912934 - DNA, 626 bp, Homo sapiens
caagggatgctatttgtggactgaatgtttgtgtctccccagaattcatgttraaaccctattccccagtgtgatagcattaggagttgggcctttgagaggttagtaggattagataaggtcataatggtggagccctcataaatgggattagtgcccttataagagtcacaagagagcttatttcccttctctgctctccaccatgtgaggataaaatgagaagtcagcagtctggaacccggaagagaaacctcatcagaaactgaccatgctggcaccctaaaactgggacttccagcctccagaattgtaagaaatatacttctgttgtttataagccacccagtttaggatattttgttatagcagcctaaactgactaagatattattccattttgcagctttctcttaaacacggggagtgggaaccctcatgaaaacatctttgtacttttctttgaccattaccgaatcaatcactaacaaaggaagtaaaattccccttaggctcaccagatacatcttctgaatttgaaaacggagttttttttttgcggggggacaggggagtggatattccaaaattatgcaaacaactctgatggcgtaagaacatcttca

SEQ ID NO: 912935 - DNA, 604 bp, Homo sapiens
agatcattttggagctttaaaatttgactgccccactggatttaggacttgcatgggcctttgttttggccaatttytcccatttggaaaggctgtatttacccaatacctgtacccctattgtatctaaggagttactagcttgcttttgattttacagtcttataggtggaagggacttgccttgtctcagatgagactttggactgtggacttttgggttaatgctgaaatgagttaagacttttggggactgttgggaaggcattattggttttgaaatgtgaggacatgagatttggaggggccaggggtgctatgatatggtttggctgtgttcccacccaaatctcaaattgaattgtatctcccagaattcccacgttcccctcggtcccctgggagggacccaggggaaggtaattgaatcatgtgggctactctttcctgtgctactctcatgatagtgaataagtctcatgaaatctgatgggtttatcggggtttctgcttttccttcttcttcattctctcttgctgccaccatgtaagaagtgcctttcaccctccactatgattttgaggccgccccagccatgtggaa

SEQ ID NO: 912936 - DNA, 604 bp, Homo sapiens
agatcattttggagctttaaaatttgactgccccactggatttaggacttgcatgggcctttgttttggccaatttctcccatttggaaaggctgtatttaccyaatacctgtacccctattgtatctaaggagttactagcttgcttttgattttacagtcttataggtggaagggacttgccttgtctcagatgagactttggactgtggacttttgggttaatgctgaaatgagttaagacttttggggactgttgggaaggcattattggttttgaaatgtgaggacatgagatttggaggggccaggggtgctatgatatggtttggctgtgttcccacccaaatctcaaattgaattgtatctcccagaattcccacgttcccctcggtcccctgggagggacccaggggaaggtaattgaatcatgtgggctactctttcctgtgctactctcatgatagtgaataagtctcatgaaatctgatgggtttatcggggtttctgcttttccttcttcttcattctctcttgctgccaccatgtaagaagtgcctttcaccctccactatgattttgaggccgccccagccatgtggaa

SEQ ID NO: 912937 - DNA, 693 bp, Homo sapiens
ctttgcccattttttaatggagttgtttgtttttgttattgttcggttgtttgagtttcrtatacattctggatattagtccccagttggatgcatagtttgaaaatattttatcctattctacaggttctgcattcactttaacagtttgattaaaaagcagtttttgttcctacatgcctttcctttccagtgtctgccctgtatttaacataaaagacattgggccactttctgttgggggtcctgtgattctgccctacaagacatgcttagttaatggcctcatctcagacaacaggccagcagggtctgtctggagccacagcctcattactgtccatggctctcacatgtgcccttgatcattccttctgtctgctttgagtagactgccctccttcagctcacagtgcagcaattgttttgacatcttgttatcacacatcctattcataggcacagataagaaaagctgtgtccaaataagcatagtgctattgcattttcttcattagatcagatgattaagttatctaattatgggtatccttaagtccatggtggccagatttacaccattataccactgagcaagatttgtattgctggttgaatccagagaaaacacagactaaatttaaattttgtgttttatccctttagctttccttagttccaagagttctcttt

SEQ ID NO: 912938 - DNA, 669 bp, Homo sapiens
gtggagattgtgaggaaagagaagataaaaaaattacctactgggcactatgcttattacttgggtgatgaaataatctgtataccaaacccctgtgctacacaatttggctctgtaacaaacctgaatatgtatcctgaacctaaaataaaagttaaaaagaaataactgtcttacttgtttttattaatctattttaagtgtatatacagttcacatttattacaatgtttaatattagaagcatattgagtctctataaagtttggtgatgtttttgtgatcagaaatatgctgtaagaacgtaactcttgttgatatcaattagcctatggtaaaataggttttgttatacacacttttacttaaagttgtagttttcaagagcctcctgaggatgttaagtgaggacttactgtatgtttaagtgcttattatctatctctacaaacaagaatataaaccctttaaggccagggactttctctgaccggtgcctcacattatcccctttatatcttggctggtgcagagttggtgctcataattattcattggctgactatgtaatcacctaatttaatagctcctyctcaaaccttattctcctttaattttcagacactctgacaatgattttatttaatgttaatgatattgattcagtct

SEQ ID NO: 912939 - DNA, 637 bp, Homo sapiens
aatcccatctcaaagttcatcttccttaaaacaaaatataatgcaggtgcaaagggagaggagttgaaaatayattacggaataacagagctttaaaagccagtcaaaattctttgaccctgatagaactctaatacaggtcacattggtaagagtaactatttaaaagcacttagtgatgtagatcaataatgattggatgggtcagcaccaaaaatgtctgttatttgacatgaaggaaattaggcagaaacctctatgagccagttcattgccgtcatcatttctgatgcattttttctaaaatatgtagatttttacaaattaagataattagtaagtcagaagtacgatactttgtaaaatgcctaatacatagattagaattacatgaaacaacaaataatgataatgaagaaaatcagcatgtaaatgtaaaataactctcacaaatattaaactactttttcagcaacagaaaagtcattagttttaaaataaaaattagtttttggattccctacattaatgaaactgctccttggcttacaaatggcatgacatttaaaatttttgacccattcgcaacaaacatctgtagttaaagtgaggctatcacagtctcttagtctataac

SEQ ID NO: 912940 - DNA, 571 bp, Homo sapiens; identical to SEQ ID NO: 912318

SEQ ID NO: 912941 - DNA, 648 bp, Homo sapiens
cacaactgaccaacattaacattaaaatagaggaaagactgataaaactgactcttcgtagcaataagataccaaattccaacgtgattatgacatascatcacgttgaaagaaatcaaagtattttacccccaaatatagtttgttgatatattttgaaatggcaaaacctgcaaatggcaaaacccgcaaatggcaaaaccctgcaaaaccatctcttgttgggaaatttgcattttgtagagaatctccttccttttctaggtcttttcctgattcaggagacatttaaccaagagtctgataccttttaaggtctgaaaggagacatttaccatttattcaccctgaagcctgctacttaagtggtttcatctgcataacaagaaccttggggccaggcgcagtggctcctgcctgtaattctagcactataggaggccgaggagggcggatcacaaggtcaggagttggagaccagcctggtcaacagggtgaaagcagaactgcttaaacccgggaggcagaggttgcagtgagctgagatcgcgccactacactccagcctgtgggacagggcaagacctccgtctggcggcggggggtgttgcagcggggaacaagaacgttggcttccacaaccccctt

SEQ ID NO: 912942 - DNA, 648 bp, Homo sapiens
cacaactgaccaacattaacattaaaatagaggaaagactgataaaactgactcttcgtagcaataagataccaaattccaacgtgattatgacatagcatcacgttgaargaaatcaaagtattttacccccaaatatagtttgttgatatattttgaaatggcaaaacctgcaaatggcaaaacccgcaaatggcaaaaccctgcaaaaccatctcttgttgggaaatttgcattttgtagagaatctccttccttttctaggtcttttcctgattcaggagacatttaaccaagagtctgataccttttaaggtctgaaaggagacatttaccatttattcaccctgaagcctgctacttaagtggtttcatctgcataacaagaaccttggggccaggcgcagtggctcctgcctgtaattctagcactataggaggccgaggagggcggatcacaaggtcaggagttggagaccagcctggtcaacagggtgaaagcagaactgcttaaacccgggaggcagaggttgcagtgagctgagatcgcgccactacactccagcctgtgggacagggcaagacctccgtctggcggcggggggtgttgcagcggggaacaagaacgttggcttccacaaccccctt

SEQ ID NO: 912943 - DNA, 316 bp, Homo sapiens
gaattcccctaaagaagtaggttttggactgtagctaactgaaagctgaatttttttttctttttctcttttctttttttttttttttttgagaaaggatcttactttgtcacacaggctggagtgcagtggtgtgatcacggctcagtgtagcctcaacctcctgggctcaagtgatcctctcacctcagcctcctgagcagctgtgatgattggcacacaccaccatgctcagctaattttttgtagagatggggtttcatcacrttcccctggctgatcttgaattcctgaactcgagcaatctgcccacctt

SEQ ID NO: 912944 - DNA, 551 bp, Homo sapiens
tttgatatgttgttaagacaactaatacacatcagaattttaggaagctcatacagttttgtaacacatattaataacacatttatataaatataacccaaagtaagttaaatattattttacattggacaatacttcctgtataagtttaacataccaaaaaaagcctaatatgtctctctttggtttctattatctaaaaaatcttggaccctattatctaaaaaattagattagtttgaagtcaaaaagactgaatttagaacattaaatttttgcttttagaaagtttgtcaaatatcaaaggtacaaaacatttgatatcacaaaatagcatcacaggtcactcatttagccaaaatgatacttcaaagattaaaaaaaaaaaagaaacctttattatttaatagagatgagactcagtttctaaaacaataaaacctaagaaagcatgaagccaamtaaatctgtctctctcttcccttttacctgcagtttactcaaaaggtaaacaaaaatcttttattatctcttattaatattacatgaaa

SEQ ID NO: 912945 - DNA, 519 bp, Homo sapiens
actctgctgctgattattattattattattattattttgctgtgcggaagcgttttagtttaagtaagtcccatttatttatcgttgttttagttgcatttgcttttgggttcttaatcatgaagcctttgcctaagccaacttggcttctttcagactattcttctatgtccttcctcattctaccactctgtcttttctttgctgattcttcatagaattgtcttcttcaactttctcttatattccttatatcactctttatattcatcctagaaactttgcttggcctttatcaaactgttctcaaatccatcacaataactacaaccccattcccacctttctaattgtctctacatggctctatcatcaattcagcatggtcaaatggagcttatcatcttcagcccccagtcagcttctttctttcgctccttccagtgactcaattcataagttttaaaaacatctctgactctmcctcatactcctcatccaatcagtagtgaagttcct

SEQ ID NO: 912946 - DNA, 655 bp, Homo sapiens
cactcacaggcccaagtgcaaggacctgggggagagaatgatttcaaaggaggggtgattggcacccctgggaccttggcaccctctgcccagccctgcctcaaggttctgcttcctgcactttgtcaccatgctcctccactgccccaggtgtggctctcgtggccctgattcaatatgcactacacccagcagagctataagggtctggctccctctacctaaatttcaaaggatgacctggagagcctggagcccaggcagaaagcagccatgaggtggggccactgcagggaacccacactagggcaattcccagtggagccatggggggcatggccacattgagaccaacagttagagccactggcatatgattatatctggggagagctgcaggttcaagacccaggcaaggagccaccatggagatggggcctgctcaaagccccattaagagaactgccatgggaatggggctcctcaaagccatgagggcaaggccatgccccagtgggttcagaaaggggaacttcaaccccrctaggactggcaggaagagcctcgagtcaaagaagattattttcaagctttaaggttttgaattgctcaggaaccattaccctcttctgcccttaaataagcatccactggt

SEQ ID NO: 912947 - DNA, 577 bp, Homo sapiens
actcaatttagtcccatgtgcataaatttcttgtgaagacctggatgaattaatggttccgtgttctatctgaggtggttgtgaacatggaattttttctaaatgaagaatgaaaatcaaagggttaaaaacaaataaaatacttaaattgaaatataaaactaaatactatttcggattttaaagtgagtataatttgaacaaataaaattatttaaaaacaaaaacatattagaaactcgcaaagatatattcctccaccatatctatgttaccatcctcttgttcaataatcatcttcattcatgtcttgttcatcacaaggattaaaatatgcatgaatggaaatgttatctgacatttacataatattccaaagattttggctgtattttgttcaaaaaactgaaagagtggtgattgattaatgtgcctaggtcctaatttattttgtcaggataaagtaatagacacagagaaagaacttctctcttgtttacacraagcacaagagaatattaacctcatttgaaagaattatgtaaaacaaattatacactactgaccaacacagagt

SEQ ID NO: 912948 - DNA, 657 bp, Homo sapiens
tttaaaaattttttgaggatgttttcaatttaaaaaaggagcaaaggcaattcaataaagaaaacatagtcttttaaacaagtgatactggaacagtaacgcatccaaatgcaaaataataaccctctacatattcctcatacctcatacaaaaattaactcatataactaagtgtaaaatgttaacttctagaactgtatatggccttggtttaggcaaggaaattttagatgacacaaagagcgtaatctataaatgaaaaatgtgataacatcaaaattacatacttttgctcatgaaaagagactattagagagaaaagtaaagctacagatgcaagaaaaatatttgcaaaatatttactcagtgaagggcttgtagccacaatatatcatgtagtctcaaaattccgtaatggaagaaacaactcaatggaaagtgggcaaaatttagacagtgttcaccaaaggaggtacatagatggtaaataagtacaaagaagatgctaagcagcattagtcactagggaatgcaataccatcacacacatattagaatggataatttaatggaaaaaaaaacacattatctcaaaggctggcaaggttgcgaaacaactggawctcacatacactgagtatgtgaaggtacaatgt

SEQ ID NO: 912949 - DNA, 629 bp, Homo sapiens
caaataaatggaaacatattccatgctcatgggttgaaagactcaatgtctttaaaatggycatactgtttaaagaaatttacagattccacagtattcctaacaaactcaccaatgtcattcttcacagaattagaaaaactagtctaaaattaatgtggaaccaaaaaggagcccaaatagccaaagcaatcctaagcaaaaagaacaaagctggaggtatcacactagccaacttaaaactataaggctacagtaatcaaaacagcatggaactggtacaaaagcagacacatagaccagtggaacaaaatagaaaactcatgaagagttagaaactctcagtaaaatctttctgtcatcccacttgaagatctcagcataaccaaattttctatgaagtgtttgtcttatgttaacaacctgatgtaaaattatggtgaccccaaagacatcttttcttagttaactctttcttgtaatgaaaatcagcacaaatccttgaaaaagtaagcattcaacaaacttaagttttgttcttagtttgaaaggaaaagttggtatctcgatgtattctataggctaaatatgtttccatcaggaagttatttactttcccaatctttttc

SEQ ID NO: 912950 - DNA, 630 bp, Homo sapiens
tgcttttgaaagtcctccggactctgatagtctgtgattcccagaggaggaactcgggaaaattcatgactctccgttcagccttcccacacatgctactccagagcaccagagagacaaaccacaaaatcgggcacagcagaaaaaaagctggccccacagccaggacactgggtttctagcctggatccaccaattactcataggatgactgggagcaagtcacttcaccactctgagccttggtttccttatccataaattaattaacagatgcccaaagtccttttttgcaaggcacagtgcctggcacctagaaagttctcggcatgtgttagttattgtcatcattattaattattacgccctcttccaatagttcccaccagcttcaagtaagaaagaacccttttaatgcaaaaatgaactagagtcctcttcccatctaataggtttaacatctagaatcaattaattagaaaaaatatagaacatcaaaaaatcactatgaattgttattcaattcatcaaagcactttcatatatgcttgaaaaatgtgaaacatttttctcatcaccgatgatgttggattctcaaaacccttrcaatgatactgaggagctgggctg

SEQ ID NO: 912951 - DNA, 581 bp, Homo sapiens
gcattttcaaaaacatcccttttcctgtatactgttctcaagttaatgttaggccctggagtcatgctggagctggagatgggattcacagacccattaatgaacactttgcaccaaaatagttargtcccttgctcctggcacctgtcctggtgagaaagggaagcacagttgcccgctgcctggcctcacctcctgcctcagaagtcagagaacttaggaagaaagtgcagtgagccatgtagatgcttcataagtaaactaatgagcataggctaaaatatttcattttctatttgaataaatgtatgcggtacaagggcaattttgttacatgcatagattgcctagtggttaagtcagggctctagggtacccatcacccaaattatgtacattgtacccataagtaatttttcatcatccaccccctctcactctctcacctttccaaatctccatcgtctatcattcctctctctacgtccatgtgaacacattttttaacacccacttaggagtgagaacacacgatatttgatgttctgtgtctggcttgtttcacttcggataatgacttc

SEQ ID NO: 912952 - DNA, 714 bp, Homo sapiens
tgttcaagcaaggaggttgtcattggtgacctctgagaaaaagcttgacagtaatgaaagcacaaaactttttcacattgsctttgcctttcagaaaactttgttagttaagtcaatggaagaattctccacacacacagcaaatctgacattatatgacctggcaatgggtttgacttaaatgatgaaatcaattaggtgaggagtagaaaatagaagaaactctgaaatggatcacaggtccttcatcctgtttcattcttagctctgtcccaccatccccactctcttcacgaagtcataggtgcttaaatatatttcttttcccttgctccctaaactctctctgatctctgaaaactctgaactgaggcaggagaaagttatagagctataatccaagctgtgattcagtatcaagtctcctctgctaattcaggttgtatattctggcctatatttgataacaagatgtatgcattattcctgaaatgcaatttctactttgtacctgaattccattagcagatccctattcctgagttttcgctttgatcacttactttgcacctcagttgctctaaggctgggactgtctgggactgtgattcctgtctgtcttacaggcagtgaagttttgctgctaaaccctatatggtggctaaggcactgttctcttacttagcaacaggttttcttaacacccatctgctc

SEQ ID NO: 912953 - DNA, 571 bp, Homo sapiens
ggtctcgcagtctttgattttcacatagaatttttatcccatcttcaatcttcttctccattaatgatggttcgatgttgcattgggatttgtttcagctacatgtaaattattgctctcttcacgtgttcataactctctttctctttctacaaattcctcaatactataaaacagactaagtagaagaaacatgctccttgtcttcaaaactccccatggacccctggaacacatcttttgccattactggagagtgagagaaagagaatgaattttgaagccaggcaaaactggtttcaaattacttaactttatgcagattacatgatggttttttaatctgtttcttcttctgcaaaagggtaatgataatgcaaaatgacagatctgttgtgaaaattaaatcagctccccccaccagaaaaattaagatgttcaaaagcattagcttctatacaatgaacacataycataaggaaactgagaatcaatgaggtcaaataattcattccatattacaagaattagtagaaccaagactcaaacacaggcatgtctgattctaaat

SEQ ID NO: 912954 - DNA, 573 bp, Homo sapiens
agtgttaccaacaacttgagtgagtttttttaaaaggtcacagtggtaaagtgattaagggcatgaatgctacccttggacygtttaggttaaaatcccaacctcccctcttactaggacagaaagttaaatggatatgaatagccattggtgccagtcagtcaaatgtgtgttcaaatcccaaacctatcatcacttaataactgcatgttttaaaataagcctctgaacatccctgagccaaaggatggggaaagttgtgtgcaacaactggatgttaaaggggagcaattccagtgaggagaaagaaataaaatgaggattccaatgacagacgcttacctgctatatttgatggacagtagtaagttggtaggctggtgtgaatcctttgggagaggggccatttgggaaggactctggtcacttctgcagtagagtcaacttctaaccttctcagtgttccccatctttgtgtgttctcaccagctgacatgcagagcccaatgataggtgccccttatcaggtaaaggaggcaagaaaagcattttgacaaatcacttagaattgaa

SEQ ID NO: 912955 - DNA, 644 bp, Homo sapiens
aaaattaagtgagttatatatttttaaagatggcatcagaatatttataaaataacayatttcttgtttcttaatatgccagatcctgggagttaagttcaatattattgatcccttggacagcatggtgcctatcaagagtttttagacttctgtttggctattgtttcatgacagcgctttgtggaagttggtcaagaaaaaagagatacaggaagttatagaaggcacaaaagagtataattttagtctctttaaggagagagtatcttctctgtttcttctctttctcttgcaaattgtttgcagaacgaggacttgtgtagcattcctgcttaaagtcaactcagtgaaatccacaattgaaacacacatgacttgtattgctatctcttaattttcataatcttttgagatctcaccaaatgtcatttttttccatgtgacaattcaagatggaactcaacttgattttcagttttgcctctgcttaaactcatctgtttctgtctgagcccccttaggtggataaatgtaagactgcgtactccttgctgcctaatttatactttgtttagtctgaagaaagaaaagtgtaaagaaaacacagcataaatgagcagcactattaacagtgagctgag

SEQ ID NO: 912956 - DNA, 644 bp, Homo sapiens
aaaattaagtgagttatatatttttaaagatggcatcagaatatttataaaataacacatttsttgtttcttaatatgccagatcctgggagttaagttcaatattattgatcccttggacagcatggtgcctatcaagagtttttagacttctgtttggctattgtttcatgacagcgctttgtggaagttggtcaagaaaaaagagatacaggaagttatagaaggcacaaaagagtataattttagtctctttaaggagagagtatcttctctgtttcttctctttctcttgcaaattgtttgcagaacgaggacttgtgtagcattcctgcttaaagtcaactcagtgaaatccacaattgaaacacacatgacttgtattgctatctcttaattttcataatcttttgagatctcaccaaatgtcatttttttccatgtgacaattcaagatggaactcaacttgattttcagttttgcctctgcttaaactcatctgtttctgtctgagcccccttaggtggataaatgtaagactgcgtactccttgctgcctaatttatactttgtttagtctgaagaaagaaaagtgtaaagaaaacacagcataaatgagcagcactattaacagtgagctgag

SEQ ID NO: 912957 - DNA, 656 bp, Homo sapiens
cattttgaaaaggatcaaacaagacaataattgtctgtgaatgacaaaagktccagggtagttacaatagaaaacatgattgacaaagaaatttggttatttccgtggtttacattaactgaacctagtaaccttaattatgattgatagcatatactcgaacattagaattttagaactcctatataattttggaacatatattaacattactcactaaaatgtaacctgaagaaggtcaaatattattgttattttggcaatcccacatgactaaacatgtgaaataattctggttacctcactcttagatgctccaggggccctctgcatcatccaaaactcaggggtcaggaaagacaatttttgaagctgaagtttgatttttggaagcccattaaatatgttagaggttcaaatcacttgatattatgaactagaattccagattactataagttatttattttagccaaaataatgactcaaacatgtttaaacaaggcaaaaacctttactcattaagagggaggacttagttttccaactagtctatctcttgttttcttctttttttttttggtagtatatttgcaaggcaaaccaaaatctttccttatcctttattattacatgaaaatcaatggggagaaagc

SEQ ID NO: 912958 - DNA, 628 bp, Homo sapiens
ccaaactgagatatactataagtaaaatacacaccagatttgaaagacrtgatatgaaaaaataatgtaaatatctcattaataatttttacattaattacatttcaaaatgttatactggatatatttggctaaataagatatattaataaaattcactcacctgttgcttttttcttttttttactttttaattggctactagaaatttatttgccttctgttgataacattaatgagtgcttttttttctgtcttttactttatatctcattccttgagacagtaccatagcagattgtgcttctcagtcaatatgtttccttttctagcctattgaaaaattttgccatgcaacaatatctcgataatcttgaactccctatagtatcagtgagacttttaaaacaagacctaatgctccttgtggtcatgactacatagattgtcaatagaaaagcctaacactcagcacaaccacaagcactacctgtgattggagtggtgtcttgaaaggcaggcggatggtggtccgtgcaataaaattctggttttacattaatttatgaaatatatctcacataaccttgattgacactaaactgcacattgctttttctaattgaac

SEQ ID NO: 912959 - DNA, 615 bp, Homo sapiens
catcttgcaatgcacatctttaagaacgttcaaaacacaaaatacccataaggtttcaaayttttaaaaacagtgtggcaattcctcagtgatctagaactagaaataccatttgacccagccatcccattactgggtatatacccaaaggattataaatcatgctataaagacacgtgcacacgtatgtttattgcggcactattcacaatagcaaagacttggaaccaacccaaatgtccaacaatgatagactggattaagaaaatgtggcacatatacaccatggaatactatgcagccataaaaaatgatgagttcatgtcctttgtagggacatggatgaaattggaaaccatcattctcatcaaactattgcaaggacaaaaaaccaaacaccgcatgttctcactcataggtaggaattgcacaatgagaacacatggacacagaaaggggaacatcacacactggggcctgttctggggtgggggaagggggagggatagcattaggagatataccaaatgttaaatgacaagttaatgggtgcagcacaccaacatggcgcatgtatatgtatgtaacaaacctgcatgttttgcacatgtaccc

SEQ ID NO: 912960 - DNA, 615 bp, Homo sapiens
catcttgcaatgcacatctttaagaacgttcaaaacacaaaatacccataaggtttcaaatttttaaaaacagtgtggcaattcctcagtgatctagaactagaaataccatttgacccagccatcccattactgggtatatacccaaaggattataaatcatgctataaagacacgtgcacacgtatgtttattgcggcactattcacaatagcaaagacttggaaccaacccaaatgtccaacaatgatagactggattaagaaaatgtggcacatatacaccatggaatactatgcagccataaaaaatgatgagttcatgtcctttgtagggacatggatgaaattggaaaccatcattctcatcaaactattgcaaggacaaaaaaccaaacaccgcatgttctcactcataggtaggaattgcacaatgagaacacatggacacagaaaggggaacatcacacactggggcctgttctggggtgggggaagggggagggatagcattaggagatataccaaatgttaaatgacaagttaatgggtgcagcacaccaacatggcrcatgtatatgtatgtaacaaacctgcatgttttgcacatgtaccc

SEQ ID NO: 912961 - DNA, 669 bp, Homo sapiens
cctttgcccactttttaataggaccttttattcctgttgagttgtttgagttcctcgtatattctggatattagtttctttcagatgaatagtttgcaaaatattttctcccattcaacaggttctctcttygctctgttgattgctccctttgctgtatagaagctttttagtttagtccaatttatctatttttgtctctgttgtctgtgtttttgaagacttagtcacaaattatttgcctagaccaatgtctgggagagtttttttttaaggttttcttctagtatttctatagttttgggtcttatgtttaagtctttaatccactttgagttgattttgtatatggggagagatggggttcagtttcattcttctgcatttggctatccaattttcccagtgagagcctagattcaaatccaatttcactggactccaaaattcatgaattttctttctatgatgtcaatgtactgcccagttttctagattaggaaactttgaaagggtgttatgtaataaatattatttttttttgaaaactggctcccctctgctgtttaatgaggtgatcacaatgcttcaaatgcagtggatcaggtgagagttgatggataatctaatgcagttgtcagcaaagggaggggccaaagtacagcacac

SEQ ID NO: 912962 - DNA, 669 bp, Homo sapiens
cctttgcccactttttaataggaccttttattcctgttgagttgtttgagttcctcgtatattctggatattagtttctttcagatgaatagtttgcaaaatattttctcccattcaacaggttctctctttgctctgttgattgctccctttgctgtatagaagctttttagtttagtccaatttatctatttttgtctctgttgtctgtgtttttgaagacttagtcacaaattatttgcctagaccaatgtctgggagagtttttttttaaggttttcttctagtatttctatagttttgggtcttatgtttaagtctttaatccactttgagttgattttgtatatggggagagatggggttcagtttcattcttctgcatttggctatccaattttcccagtgagagcctagattcaaatccaatttcactggactccaaaattcatgaattttctttctatgatgtcaatgtactgcccagttttctagattaggaaactttgaaagggtgttatgtaataaatattatttttttttgaaaactggctcccctctgctrtttaatgaggtgatcacaatgcttcaaatgcagtggatcaggtgagagttgatggataatctaatgcagttgtcagcaaagggaggggccaaagtacagcacac

SEQ ID NO: 912963 - DNA, 598 bp, Homo sapiens
atacaaaaaattagctgggtatggtggcgygtgcccacaatcccagctacttgggaagctgaggcacgagaatcgcttgaacctggtaggcagaggttgcagtgagctgagatcatgccagtgcactccagcctgggtgactgagtgagacgccatctcaaaaaaaaaaaaaaaaaaaaaaaaggccaggtgtggtggctcatgcctgtaatcccagcactttgggaggccgaggtgggcagatcacctgaggtcaggaattcaagaccagcctggccaacatggtaaaaccctgtctctactaaaagtacaaaaattagccaggcgtggtggcgggcgcctgtaatcccagctactcaggaggctgaggcaggagaattgcttgaacccgggaggtggagattgcagtgagccgagattgcgccattgcactccagcctgggctacagacagagaccctgtctcaaaacaaaaaaagtgcaatagtttgttacctatattcaaaatggaagaaaatgctcaatttccataagaagttaatgaaattatagacttttttccatccaatttcatggacccccagaattctatgcacaaa

SEQ ID NO: 912964 - DNA, 575 bp, Homo sapiens
agaaatccattcctggaagaggaggaacagttcccaggaaaatggggctgaggcagtaagaccrccagctgggatacagaggagccgcctatagggacagagaaatcctaggcaccccggagtgccagaaaggcggtgggttacttcgtggggcactgagattggctgaagctgtattcccagatcccaaaggtgaacaaaccatgagccccggctctgcagccctgctggcctcgcagagaggcagcttgcattacatggatgcctggactcaggcaagaccagcagaagatcccaaatgctcacttttcccaagtccacacgataaacagtgtgtgcttctgactgtgtcccaagctacttgacacctccactaaacccaaagagttaaacagaattcgtttctgggaagaattccactttgcattctgctacattagttcaaagctcttcttcgaaacaagtttggaaacgacacaaaactccagaaaattcaggagtggcatttggaaaacctgaggctgagggtggagaatggcccacagagatgctgtttgtcttgtctttcttcacac

SEQ ID NO: 912965 - DNA, 574 bp, Homo sapiens
gatggcatgaaaagtgagacaaattttaaaattaggcagattcagtttttaagtgattttcttgtatacccatacatcatctgcacattaagcacttttctctaattaagccagggaaaatacagagtaaygataatatctgtgaggtcagctgtgatcagaagtgcccacaggctgcatctcttaaaaacagtccatggcacctcaagggacactgcaaagacagtggccgggaatgtaattgagctttaggaaatgattaaagggaagtaaaatcatctccaactcaacattaatgcgtttgatttcccgggtgagaacaggatttgcgtaactgagtggttctttctttctacagtcctggatgtttggaaagccagctcttacagttagctttctttgctttgctaacattatccatcagaaaatcgaaatgcaaacagctcctatttcccaatgaagaactttctctgatttaccttaccatcatcaggcttcaccatctcaccttggaagcgttcaatcttttggtcaatatttctagaccaaaataaagtgctctcaagcctgttct

SEQ ID NO: 912966 - DNA, 601 bp, Homo sapiens
gtcagaaatcctatctataggaacaatggggatgcaaatggtcagtgtctagtgactttcagttacaaggaagtgggtcaaagtgcagagtgattaatgcttaattataactatatttctgtccagaattcttggtaatcctggacaggcgcagtggttcacacctgtaatcccagcacttttggaggctgaggtgggcggatcacaaggtcagaagtttgagaccagcctgggcaacatggtgaaaccccgtctctactaaaaatacaaaaattagccgggcgtggtggtgcacgcctgtaacctcagctactcaggaggctgaggcaggagaatagcttgaacccagaaggcggaggttgcagtgagccgagatggcaccactgcactctagcctgggtgacagtacaagactccatttcaaaaaaaaaaaagaattcttggtaatcctgtgaagatggcttcaaagccatttacaatcgctccaaacaaaataaaatacttaagtataagcttaataaaatattttaactatgctgaaaagtacaaaatggtaatgaaatgaattaaaraagaccaaaattaaatggaaggacatgct

SEQ ID NO: 912967 - DNA, 603 bp, Homo sapiens
cacttttattcccttttgtattgtacagcaatcatgtacaataaaaaagttcctcccygcattgatctgatatctatgcctactttttagtctaatcagaataaatctcactcatttttcacaaagcagttcttcaaatatttgaagagagctcacttgttcccctgaggactcctgccttatagaaaaaaaatacaagaaaagaaaattgcctgccctttcaacaattgctcagatgacacgatctccagacacctcattatactggtcatcctgtttgaacttgctccagctcatcagtgacactctggaagcagcttgccctcaactagacatagaaattcagctgcaggctgattgctgtgcaatacataaggaattgctgtacaatacagaaggaagatacagctacctcctttctatggcaaacattccattcatcctgaattattaggatacagacagcctagtttagcctagattagcattcatacctagactgttggtgatctgtggactatttaatatgtaaggcatgatgcacaggctcagaggttataaactgaggttataagcccatatggacagttccatgcttagata

SEQ ID NO: 912968 - DNA, 633 bp, Homo sapiens
acagaacttttcggtgcatggctttgtggcattaagtacatttacattgttgtgaaccctcaccaccatccctttctagaattttatctttcccaaatgaagttytgtacccactaaacactaactccgcattcctcccttcccatccacactttccaacacctagaaaccaccattctactttctgtctctgaatttgactagtctagttattttgtacaagtagaatcatgcagtatttgtctttttgtgtgactggcttatttcccataaaataatgtcctcaagattcgcccaggttgtagtgtacgtcaagtttttttctttttcaggctgaataatattccctatatttatataccacattttgcttacctgttcatctattaatggacatttagcttgcttctactttttagctattgtgaattatgctactgtaaacaccagtgcataaatatctgagtccttgctttcagttcttttgggcatatatccggaaatagaattcctggattgtatggtaattataggtttaatgtttttaaggaatcaccatcccttttttcaagtgcgtacatcatttatattttcatcagcaatgcacatgaattcaaattcttccacaccttc

SEQ ID NO: 912969 - DNA, 596 bp, Homo sapiens
gtaaaatactgtggagactagtctcaaaaatgacaattactggtgatctagtgtctatgagaaaaatatattctaaattcttagacaytgttttacaaaattattattatttttatttttatttttttattattatactttaagttttagggtacatgtgcacattgtgcaggttagttacatatgtatacatgtgccatgctggtgcgctgcacccactaactcgtcatctagcattaggtatatctcccaatgctatccctcccgcctccccccaacccacaacagtccccagagtgtgatgttccccttcctgtgtccatgtgttctcattgttcaattcccacctatgagtgagaatatgcggcatttggttttttgttcttgcgatagtttactgagaatgatgatttccaatttcatccatgtccctacaaaggacgtgaactcatcattttttatggctgtatagtattccatggtgtatatgtgccacattttcttaatccaatctatcattgttggacattatttttaacacatcttacttgtgaaatgaagactagccagcatttaccagtgttgataatcatcct

SEQ ID NO: 912970 - DNA, 596 bp, Homo sapiens
gtaaaatactgtggagactagtctcaaaaatgacaattactggtgatctagtgtctatgagaaaaatatattctaaattcttagacattgwtttacaaaattattattatttttatttttatttttttattattatactttaagttttagggtacatgtgcacattgtgcaggttagttacatatgtatacatgtgccatgctggtgcgctgcacccactaactcgtcatctagcattaggtatatctcccaatgctatccctcccgcctccccccaacccacaacagtccccagagtgtgatgttccccttcctgtgtccatgtgttctcattgttcaattcccacctatgagtgagaatatgcggcatttggttttttgttcttgcgatagtttactgagaatgatgatttccaatttcatccatgtccctacaaaggacgtgaactcatcattttttatggctgtatagtattccatggtgtatatgtgccacattttcttaatccaatctatcattgttggacattatttttaacacatcttacttgtgaaatgaagactagccagcatttaccagtgttgataatcatcct

SEQ ID NO: 912971 - DNA, 638 bp, Homo sapiens
gtaaaagttctctgcaatgaaaactatgaaacattgatgcaagaaattgaagagggcacaaaaaaaattgaaaagatattccatgttcatggatcrgaagaatcaatattgttaaaatgtctatactacccaaagcaatccacagattcaatgcgatccctataaaaataccaatgacattttttatagaaatagaaaaaaacaatcctgaaatttatatggaaccacaaaagacccagaggagccaaagctatactaagtaaaaagaacaaaactggaggaatcatattatctgacttcaaattatactacggaataatagtaaccaaaacagaatggtactagcataaaaacagacacatacaccaagcggacagaatagagaacccagaaataaattcattcacctacagtaaactcattttttacaaaggcgccaagaacatgcactgaggaaaggacagtctcttcaataaatggtgctgggaaaactaaatatccatatgcagaagaataaaactagattatatctctctccatatacaaaaaatccaatcaaaatggattaaagacttaagtctaagacctcaaactacaaaactactataagaaaacattggggaaactctctgggacac

SEQ ID NO: 912972 - DNA, 638 bp, Homo sapiens
attttagcacaatgcctgacataggcagtaaataaaagtattttaatagaaaaataaatattatatcttaaacagtgtttgaaatttactggaatcaacttttaaagcatagcttctcctcatcttttaggaaagtactatggtttaataaaaataaatggactttgcctttatacatccagggcttttttcctaaggtcaccaaatgagctgttttaatccttttatgagcttcagttctcattcttttgaaacaaaactgatctgaaagtatattgtgacaattaaatgagattatctatataaagtgcacaggacaatgctggttcacgttaggcacccagccagggttataggatccaacatagcccagctcatttgacccatccaccctagctaaaacatgctgagtttgcagaaagtctcgttattagttctgactttggcctggcagtttccaaaatctaaaatgctctcttttacctttctaattaaatttgaaagccattcctgaactcctaaatttataaattttaaacaccaatatttcacaaataatagmtgttttaatttttagtttggtttcacaatagaaaatctgcagtcttttaataagaataataagtgaatattttagc

SEQ ID NO: 912973 - DNA, 535 bp, Homo sapiens
gtacatctggtagaattcttctgtgaatccatcaggacttcggcttttttttttttttttttttttggttggtaggctatttattactcatttaatttcagagcttgttattggtctgttcagggaatcgatttctttctggttcagtctggggagggtatatgtgtccagaaatttatcctctcttctagactttttagtttacatgtatagaggtgttcatagtagattctaatggttgctcgtatttctgtggggtcagtggtaacatttccttcatcatttgtaattgtgttcatttggagcttttctctttttttctttattagtctagctagtggcctatatatcttattaattttttcaaaaaaaaaaacagctcctggattcattgatcatttgaataggtttycctgtctcaatttccttcagttcagttctgatgttagttatttctggtcttctgctatctttgatttgctcttgcttatcttattctttcagttgtaatgttaggttaatttgagatctttct

SEQ ID NO: 912974 - DNA, 675 bp, Homo sapiens
tgcagaaacgttccatggctgttcccttccagtctcctcggacggaagcaaggggaccacccagtcacctttgcacgctgcggctgtttttgtattccgtgtgctgtttgagcgcttatgtctttcaggcgaattaattcttcagtttcaattcgtgaatgggaaagaaacttgccttgtcgctcttgcccttcccccctcttgagccccagggaatagcactttactcgcgacacaattttgggaatggaggggggcagagtggggagaaatccgctttgccctttggctctaagtcacctccgcctcttgtccgcgccgcgttcgggttgtgactttgtttatgtctgctggtgttgtacgcggtgttctctattaaagcttctctctggatatctatgctagccccgtgtgaaggtgtttcagttctccaaggatgaggccgtggtttgagtgcccacagttaggttagggtactttgcaaatccttcccctccctcttatttcttaacttcagaacttcaaaggggtgagtacacgggcgagccaccagtaagcaccgatttccttcattgctcctttcagcctttggcacaatcatctcttttactatctattattaktagtagtagtattttagagacaagatcccactatgtttaccaggctggtctc

SEQ ID NO: 912975 - DNA, 608 bp, Homo sapiens
aagatatccacttttaaatttaatatcctatagtttcactaacaagtaggtgtcttttgacttagtctgcttgatatttgtaatagatttgtctatacttgcacattcttattttttctaagtataaaatactattaacttttcatatatttattctcaccatttcctctcatctcttctgcaattatgattggacatatgttagacctctattctattctccaacctctattttatgttttcatatttgttctctgctgtaatttaagaaattacactacagattttacctttttcccccattgcattttctttgcatttttgtcaaaataagcttgtcatttatgtgtcatctattgctggcatctctattatgttccattgacctactatctgtcctttaatcacaacaaactgtcctgattttgcagctttttactaacttttaaaattgagtagcatgggtccaccaactgtattcctcttttcaaaatttactaggccattgtagtacttttgcttttccatgtaaattttagaattagcttgtctatatattttttwaaaaaatactttaagttctgggatacatgtgcagaatgtgcagg

SEQ ID NO: 912976 - DNA, 490 bp, Homo sapiens
ctactaaaaatacaaaaattagccgagtgtggtggcatgcacctgtggttccagctactccagaggctggggtaggaggattgctagagcccacgaactcaaggctgcagggagctsagattgtgccactgcattccagcctgggtgacagagtgagaccctgtctcaaaacaaaaacaaatccactttaaacaaattcacacagtggaaacaaacactgtaactagtaacataaatatgggatagagagaatgtcacatattgtgaatatttaaataattttaactttcttaattttaactttagcagaagtatactgtgtaacatttttctcttcactagcaaacttctgcactattttgggaactgtgctaatagcactggtattcctagtgtttaaagctgtgttgacatgacaaagtactataattttaacttgttattgtgaggcagaaaccgcctcattaatttctgcttcattgaaaactga

SEQ ID NO: 912977 - DNA, 641 bp, Homo sapiens
ctattagggataataatagtactttccccagtgttgtgttgagggttaaatgagatactgtgagcgaggagcccgctccatgcctggccctagcaggtgctgccctggttctattgwaatggctggacaggttacctgactcctctgcgtactgctggcactgtgacccaagtgttttgactttcagcacagccttttatattgcctcagtcaaccccatgcccaccaggccactccttactctgtcccctgtccctctcacctcctcacttccccctccttccttctcccccacactcccccagcagaagatattgcaagctttgaggttgcccatgtgctttcagctcagagatctatgctgacagctgaggggtctgtaagtccaccagggcagtccttaagttcaaattcttgccctactctgtggcaacaagtgaccctagaaactgcataatgggtgaaacttaagcttcagaacatgagccccagttcacagtctgcctgtttcctcttatagtcaagggcgagcatccaaatgccccttcatttatcattgtcattgccactctgaaaggtcagagcgcattcctctcattgcctccagacacttggctctgggctgtgattagacttggagg

SEQ ID NO: 912978 - DNA, 584 bp, Homo sapiens
ctaatgctagggatggagatgtcctgccctcaatggactcaacaggggctacacaaatcaagagcggtatagtgagtaatatggtgaggaaataaatacctcttctaagaagcaaatagacttgaatatattagatagaaaaatatactaatgcctgcactgaatatgtgattagctttttttgtttttttttttttttgactgtctcactctgtaacccaggctcaagtgcagtggcatgatgtcggctcagtgcaacctctgcctctaagggtcaagtgatcctcctgcctcagcctcctgggtagctgggagtacaggcacacccagctaattcttgtattttattttttgtggagacggcgtttcaccatgttgcccaggctggtctcaaactcctgtgttcaagcaatccatccacctcagcctcccagagtgctgagattacagatgtgagccaccgtggctggccatgttgagcatttcttgaawaatagcagaaacaattgcttccttaccaaaatggtatttttcatttttggtttaatgggtaagactggagaaggagacacttggccactatt

SEQ ID NO: 912979 - DNA, 629 bp, Homo sapiens
atgcatattatatgtatagtaggaagcttgacgtggcctccagggcccctgtaacacacaaaccgatggtgcagatagacaygaaaatagataggaaatagctggctgctgagatttaatagcttcatttattcgttcctttgttcctagcagtaaatactgctcggcccttaatatgtacaagctctgagtgatggtgggcacaaaaattactaaagcagctttattgttgttaaagagtttgccacctgattatgagaactctagcagtcatgatacaaggtgacatttacacaagagaaataccacagagtgatatatggcttggaaataaggaaaaatatttcttggaagggagagatttgaagaaaatgttttggacatttagaattctgagtcttaaactggctcttaaatccagaatttcaagaaatggatagaggaaagagagacattcaattcagaaagaatagcatgagctgggaatcagggaaaagcacagaatatttttaggcaaactgaaaaataagcaaagggattactatgaagtcaaactgcaaagtcaagccattgatgtcatactaaagagttggacttcattctgtaaacaaggagaaggaaaggcaagg

SEQ ID NO: 912980 - DNA, 629 bp, Homo sapiens
atgcatattatatgtatagtaggaagcttgacgtggcctccagggcccctgtaacacacaaaccgatggtgcagatagacatgaaaatagataggaaatagctggctgctgagatttaatagcttcatttattcgttcctttgttcctagcagtaaatactgctcggcccttaatatgtacaagctctgagtgatggtgggcacaaaaattactaaagcagctttattgttgttaaagagtttgccacctgattatgagaactctagcagtcatgatacaaggtgacatttacacaagagaaataccacagagtgatatatggcttggaaataaggaaaaatatttcttggaagggagagatttgaagaaaatgttttggacatttagaattctgagtcttaaactggctcttaaatccagaatttcaagaaatggatagaggaaagagagacattcaattcagaaagaatagcatgagctgggaatcagggaaaagcacagaatatttttaggcaaaytgaaaaataagcaaagggattactatgaagtcaaactgcaaagtcaagccattgatgtcatactaaagagttggacttcattctgtaaacaaggagaaggaaaggcaagg

SEQ ID NO: 912981 - DNA, 618 bp, Homo sapiens
ccttaactctcttgttaactactgctctgtgttggtaccaggtttgtgaatgatcaagccactggcagaagattactttctaagagtgagagccttcccagggcttcgaatctggttaagtgaaagaatggagaagacggtaaattttaagaaaccatctgatggatgttattaggtcacaaagttgacattcatcaagctaataggcctatcgtttattgcaaactacctgaggtcgggtaaattattacctggattaaaaacctgatgctgacactggttaacacttgttacttacctttctgaacctaaatttctccatctgtaaaataaagtatacacacctactcaagagccaagcagagggaacgagataacctatataagccacctgtatagctgctgtgcaaagaagctgttgaataaggagttggggctggaaactctgacctacctctttaagttttgtaataaaccttccagttctaactagtcaatgaatgacccattttgattctcagacctgccactgcttctayctatctgaaaaaaacaaaacaaaacaggaatttgaaaatctgttatagaagtacattttatgtttagctattttttttt

SEQ ID NO: 912982 - DNA, 450 bp, Homo sapiens
ttgaatgatatcaaagcagaattaaataaatggaragatagttcatgctcatgaataggaatactcaatattgtcaagatgccaattcttccaaacttgatctatagagtcaatacaatatcaatcaaaatcccggaagaagaacagagttggaggactcacactacccaacgtcaagacttaatataaagctacagtaatcaaaacgatgtggcataggcaaaaagaaaaatagattgacaaagagataaatataacaaaatagagacattagaaatagatccaactaaatataatcatctgatctttgacaaaggagaaaaggcaatacaatggagcaaagatagtcttttcaacaaatggtgctggaacaactggacatccacatgcaacaaaatgaatctagacacagattttacacccttcaaaaaattaactcaaactggatca

SEQ ID NO: 912983 - DNA, 618 bp, Homo sapiens
acaataacagtgcgaaaagttaacaccacactgtcaatattagacagagcaacgagagacaaaattaacaaggatattcaagacttgaactcagttctggaccaagtrgacctaatacacatctacagaactctccaccccaaatcaacagaaaatatattcttctcagtaccacatcgcacttattctaaaattgaccacataactggaagtaaaacacccctcagcaaatccaaaagaacggaaatcataacaaacagtctctcagaccacagtgcaatcaaattagaactaggattaagaaactcactcaggcggtggctcacacctgtaatcgcagcactttgggaggctgaggcgggaggatcatgaggtcaggagatcaagaccatcctggctaacacagtgaaactctgtctctactaaaaatacaaaaaaaaaaaaattagcctgatgcagtggcaggtgcctgtagtcccagctacccgggaggctgaggcaggagaatggtgagaacccgggaggcggaccttgcagcaagccgagatcgtgccactgcactccagcctgggcaacagagcgagactctgtctcaaaaaaaaaaaaaagaaaagaaaa

SEQ ID NO: 912984 - DNA, 611 bp, Homo sapiens
cctgctacctccactggagcaggtgctagtatccacagctgagagacctgaagatgaatcctgtcacaggactctttacagacactcctcagtaccagcctggagcccagtaacttcactgggaggctagacccagaagagcaataacaatcactgtagtctggctcttaggaagccccatccttagggaaaggggaagagcaccacataaagggatcaccccatgggacaaaagaatctgaacggcagctgtagaatcccagatctttcctctgacagagtctactcaaatgagaaggaaccaattctggtaatgataaagcaaggttctttaacactccaaaaagatgatactagctcaccagcaatgggtccaaaccaagaagaaatctctgaattgccagaaaaataattcagaaggtcaacctatggacataaaaaattaaatataaagaatttagaaggtggattattaagctactcatggaggcaccacagaaaagtgaaaaacaatttaaggaaattttaaaaataatacaggagatggacaaaaaatytccagagaaacagatagcatcaataaaaaataatcaaaacttttggaaataaaa

SEQ ID NO: 912985 - DNA, 599 bp, Homo sapiens
aataaccagtactttggttttcattcccttactaagtactttaaggtcttatatgtcataattttattgcyaacatcaaatatttattttattttttagaaaaataactaaacatgggcaaaggagatcctaagaagccgagaggcaaaatgtcatcatatgcattttttgtgcaaacttgtcgggaggagcataagaagaagcacccagatgcttcagtcaacttctcagagttttctaagaagtgctcagagaggtggaaggtaagagggcttaaaacatgctaacaaggtaattaaaagacagtttccaattgaggatgcaaaaaaaagcctagttggcattctcgtagtgggacgctattacatagcaaaagacattggttttgaggataatttacttaaatgttacaacttaaacttacaaataattattttgtagaccatgtctgctaaagagaaaggaaaatttgaagatatggcaaaggcggacaaggcccgttatgaaagagaaatgaaaacctatatccctcccaaaggggagacaaaaaagaagttcaaggatcccaatgcacccaagaggcctccgtgagtatcttg

SEQ ID NO: 912986 - DNA, 514 bp, Homo sapiens
attcccagctacttgggaggctgagacaggayaattgcttgaacccagaaggtggaggttgcagtgggccgagatcgtgcccagcctgtgcgacagagtgaaactccatctcaaacaaaaatcccaaaaaacaaaaaaagctgagattaaatgggaactggaagtttggtactgttaccaccttgtcctagcaactgtattgctagcaattgtgttgctgggacaaggcagtaactgtatcagtctccttctgcccaatcgtgttgacaccacttttctttgaccacctgtggatactgatgacctcccctcacctcattttattttaacccttttatttatccctcatgtcaagcatcatctcattctactgaggtgtcatcttttcttcaccacagtttgagagctacaattagacaatgtgaattttggatggattaccaatgtgttaacaatatgtgaggagaggtaactgtatgctatagagaaataaatttaaaaacaattgattaat

SEQ ID NO: 912987 - DNA, 583 bp, Homo sapiens
catcacacatactatctacaactcagttattgaatacaaacttcctctaaaaaacaaactaaaaaaacaaactagggttctttagagtaatgyctgatgtgagttcattgtcggaagaacataattaatttgaaatactggttgtataccagaaagtgaagaattactttaagaatgatggggagggctgggtgcagtggctcatgtctgtaatcccagcactttgggaggccgaggtgggaggatcacctgtggtcaggagttcgagaccagcctggctgacatggtgaaactccatctctactaaaaatataaaaattagccaggagtggtggtgcatgactgtaatcccagctactcaggaggctgaggcaggagaatcgcttgaactcaggaggcggaggttacagtgagcccagattgcgtcactacactccagcctgggtgatagagtgagacttcgtctcaaaaaagaacaaaaaaaaatgatggggacatgccagaaagatatggtcagcttggagatattctcacaagccaaacgtggtacaatctgagcatcgccatagagaatgatagggct

SEQ ID NO: 912988 - DNA, 624 bp, Homo sapiens
agaaaactggtaccaaggtggtggggagctgatgtaaagacctgaaaatgtggaagcaactttggaagtaacaggcagaggttggaacagcttggagggctcagaagacaggaaaacgtaggaaagtttgaaactccctagagatttggaggactcagaagaagagaggaagacgtgggaaagtttgaaacttcctagagactcgttgaatggctttgaccaaactgctgatagtgatatggacaattaaatccaggtggaggtggtctcggatggagatgaggaaactgttgggagctggagtaaaggtaactcttggtatacgttagcaaagagactggccacattttgccactgccctagagatctgtggaactttgaacttgatagggatgatttagggtatctggcaaaagaaatttctaagctgcaaagcattcaagaggaatcaaaaggacaaatgtttgaaaaatttgcaggctcacaatgcaatagaaaagagagccatattttctggagamaaatttaaccccgctgcagaaatgtgcataaataatgaggagccaaatgttaatcaccaagacaatgggccaaatgtctacagggcacgtcagagaccttcac

SEQ ID NO: 912989 - DNA, 624 bp, Homo sapiens
agaaaactggtaccaaggtggtggggagctgatgtaaagacctgaaaatgtggaagcaactttggaagtaacaggcagaggttggaacagcttggagggctcagaagacaggaaaacgtaggaaagtttgaaactccctagagatttggaggactcagaagaagagaggaagacgtgggaaagtttgaaacttcctagagactcgttgaatggctttgaccaaactgctgatagtgatatggacaattaaatccaggtggaggtggtctcggatggagatgaggaaactgttgggagctggagtaaaggtaactcttggtatacgttagcaaagagactggccacattttgccactgccctagagatctgtggaactttgaacttgatagggatgatttagggtatctggcaaaagaaatttctaagctgcaaagcattcaagaggaatcaaaaggacaaatgtttgaaaaatttgcaggctcacaatgcaatagaaaagagagccatattttctggagacaaatttaaccccgctgcagaaatgtgcataaataaygaggagccaaatgttaatcaccaagacaatgggccaaatgtctacagggcacgtcagagaccttcac

SEQ ID NO: 912990 - DNA, 613 bp, Homo sapiens
gtttcccctattatcagcataatccattgtgtgattgatgaaccaatattgatatgtaattaactaaaagccccagtttaaattagggttcgttccttctgttgtacacttctatgtgttttcacaaatgcataacgtcatgtatccaacattatggtataaaacagaattgtttcactgccctaaaattttcctgtactccccgactcccaccaccatacatccctggtcttcacatatcctcccacatttttggcaaccagtgatttttctactgtttcaatagttttgccttttctagagttttatataattggacttgaccaacagagacctctcagttaactaaaccttagacagattttttccttactatgagccccttgactttctttttgttagcgcatttactttagaaacctggtaattgtaaattgtctctctgtccttttgagtagatttaaatcttcttccagcctcagtttaacaatccaggaaatgtctttattgagaacctgagaatcatccctttcaaatataaacatggaagaggattgcacctctatctmtcagtctcgttgggagggtaaggggcataaggattagcaaacac

SEQ ID NO: 912991 - DNA, 586 bp, Homo sapiens
acatcatgctatacatgataaatacatataatttttatttgttaattaaataaataacaaaacaaaaacaataccctatgttcagattataaatgcattcatgttaacttctagttacatacatggtgtaattttttacaattagaaacataatcaattgggggttagttcttgtatgtgatgtgaactctgtgtctaattttagctttttaaaatgtacttagtctttgatttttaactcatctatttaataataatttaaagtttattgtttggaaataaattgaaaacaaatttttgtaataaactatttgtaatataaaatgaagtaaagtttcatgtataattatgcaatcagtggaaaataatataattcatatcacacatttattatgtggtttttaattgaattctaatgtaataaaactcatggtatattactctttgaagaagttccattaaatttattctatcaatattaaaagatacattcytataaataaatgtggtcaaaattaatatcatgaatcttaaattaattttgtagttctctttctgttatactggagaacataaatcatttgac

SEQ ID NO: 912992 - DNA, 492 bp, Homo sapiens
aaatatttcctcaaatgcaaaagaagataaataaaagattatttctttcaagttttgttcaaagtcaaagtcaggcttaaagatatgaaagtcaytggtaatgttgtcaagtgatgggttgaaagtgagttggaaagagaataaaaaagggagaaaatgggaccattgactaagttgaagccgtttgagatattttcttaaaggagaaagacaaaaaggtattttatagagtcaagggagtttgttttcttttgcatttttttttttgtttttgagtgaaatatattaggacattttgagtgaaatatattgaggtaaagggaatctgcaataaagagaaaagctctgatgaaaaagaaagaggagcgctttcagaaaaaaaatgtcctttcttaagttacaagatatgggatacaatatgcaagggaatgacatagctcagacagtttaggcaattaaattagcgtgcagtctggttgggtggccactatt

SEQ ID NO: 912993 - DNA, 565 bp, Homo sapiens
aacctgcagtattttattatgggtatatgatctgaagttctaagtgaagggtttgctttaaatattggcttatcctcatgataatacaattttattctaagagacgggtcttgctatgtggctggagtgcagtggctattcacaggcacgattatagagcactacagcctcgaattaccaggctcaagcaatcccccgcctcagcctcccacgccgctgggactacaggcacaccccaccacacccagcagtaaatgtaattttatgtataataattcaatttatgtaaattttgatgaatacagccatcttgtaatgtgatattaatactgtaattatcaatcaacatgtaagttagcaaccgtgtgcaaaattaggctctgtggcaacacacaacaaaactgaacagcctaccttggagattataatccagtttggaagacattatgtatgtatctcaaccctccgcactactgatttcttgggccagataattcttcactgtggcaggctgtcctgtgtactgtaggatgtttggyagcatccctggcctctaccccataga

SEQ ID NO: 912994 - DNA, 686 bp, Homo sapiens
tattcataaactttcatatgcatttttcatggtatccttctaaccttctgtgtaactaaaacrggtatgattccattttgcagatagggtaactgatggtcaaagagtaacacaaaagcacaaaagtaacttacattcaagtaaaggactctgtctctttaaaatctcaaatacagcaacctttctccccgcagtatactcagggattcttgggccagcttccaagcctgcaaatcctcgttctagtacacggccaggaggaaagaattccagggaaagatctaaattacaagagaatctgtgacatctgcctggcaaaatattatttcttcaaaaagtccattttttcagaaatgacattgaaggtctaacaacttgccatccttcaaaacctgatgaaatttgctgagggagagagagaaaaacaagaggtgaggacagaaagaataagtaaaggttcctgattaaactctgtagaacaaccaagtaggagaatgaataccaatggtaagtcacaggctcacaggctaaaagtaaaagctgcccaggaagaaagagaaagttctggaagcaaagaaatctcaagtttctcagtgggtaatgaaaataactgtgtcattttagatcacacaccttacagaatagaaagaaaaaaacttatcttaagatacactcaagttttttga

SEQ ID NO: 912995 - DNA, 664 bp, Homo sapiens
gatttaaaattagacaaacacatccagatcatatttaaaattgtatttaatttatagatttctcttctcaaactgcaggaaaaatgggtctgattgtcctttgttttctatctaccatcctaggaacractgtatcttaaatctaaagagccctatattcaccctccaggggcaagctccccttagtgcatcagaggagatctgctctgtaacagtgaccactggagactttctagtacctccactctaactagtccaaaggagaaaaaccaagcaagtttattttccggcagggtgccccataaaatgaagactggcaaaaataacaaaagagcacaaaccagtacaatcaggatacagttgatgttgagattccatttacattctttgcaagccttcttgcttcctatctctgtcatcacgtaacatcctttaccataggaagaggaggtggaataagagaaataggatgcaactttaagaaggtgggagggtaaggtatgaaattgacttatcgaatattatatttagacggaattttaaagattgtgtgatctagtccacccattttattttcttttatagatgagtaaaatggtgaccctaagagattaagtagctagtctaaagtgttctaactagtaaatggaagagccaggattat

SEQ ID NO: 912996 - DNA, 546 bp, Homo sapiens
atcattgctttaccaaatgttattaccattgcctgattatgtgtctgttttccctacctggctgaactcccttaggttaaaagataggtgattttataatcatcagagaaatggcaaatcaaaaccacaatgaggagcagcatctcacattagtcagaatggctattactaaaaagtcaaaaaaaaaaaaagatgctaataaggctgcaaagaatagggaacatttatacagtttgtaggaataaaaattagttcagctactatggcaagcagtttgaaaatttctcaaagaacttagaactaccatccaaccctgcaatcccattaccggatatatatccaaaagaaaacaaatcgctctctacatgtgctctcatgttcattgcaccactattcacaatagcaaagacatggaatcaacctaggtgcccaccatgggctcaatggactcaacaaagaaaatgtggtacatatacaccatggaatactatgtagccataaaamtgaatgaaatcatgttctttggaggttattatcctaagtgaa

SEQ ID NO: 912997 - DNA, 608 bp, Homo sapiens
aaaatcagattttacctgtaaagttcttaaagcagtacttggccaatgtatcctaggttaggatactgctggtattttgtttccaagatgcatgctactgatttttttcccataagaatttttagcatgaaatttatttcagtgcattacagttttattttcaaaggaaacttaacctagaaatcaaggcaaatcccaaaagttattaactaatcttttcagttctaatatcatttataggaaaacaggaaaagaaaacttgtagaaggaaatagtgcaaatggagaaacaaactggggtgagagaggagagaataaggaagggtgagaagaatgaggtggagaaatggagagaatttgggaacattgtatagatagggtgataaacagaaataggctagagagatagaacgtagacatataaacaggtacagagataaacagagaattaaaatggaaagagtgagaagctcartatcttaaagggaagcttgtccattgatcatattgtaataaatgtatatatcatgtaaaaatccctttaagcagtacaaaataataccagttatatcaaatatttaaaatatctattttgtttcatagttttta

SEQ ID NO: 912998 - DNA, 521 bp, Homo sapiens
atgctgccagtctgtttgctaaaacgtaacaagagtcacctttgctccagtttccaacaagttcctcatctccatctgagaccacttcagcctgaactttattgtccatatcacgatcagcattttggtcaaagccacttaacaagtctctagggagttccaaactttcccacattttcctctctccttctgagccctccaaactgttccagcctctgcctgttacccagttcgaaagtcgcttccacattttcggatatcttttcagcagtgccccactctcctggtaccaatttactgtattagtctgttctcacgctgctaataaaggcatacctgagactgggcaatttacaaaggaaaggggtttattggacttacagttccatgtggctggggaggcctcacaatcatggcagaaggcaaggaggagcaagtcacgtcttatgtgaatggcrgcaggcaaatagagagctggtgcagggaaactcccttttcttttaaaaccatcagatctcgtg

SEQ ID NO: 912999 - DNA, 670 bp, Homo sapiens
tgacatagctagtcccaggccaggcagctggtaataggggtctggctggagactctgtgtcrtctgccttgcccatgctaccccaggtggtggcagctgctcagagccatccacacagtgcacacttgccagttcattctatggagcccacacttctccacgaggaatgaagagggatgctgcaaggaggggcagggggaggtcataactgggatgattgaggcttcagaaagtccctgggcacatcccagcctacctgctcctcctcttccagggtcaatgtgtggtctcgaacaggttggcaagagctcaggacttggggctggggctcctcgcctttaagatggagcaagctggctgtgacttgtgttgaattcactcctacagtgcaagaattcttccaggacaaaacaagagcctgcccctggagtctgcattttagcagagcagggagtgctggatcaccaggacaccatacagaagtaagtcctgcagagatgcagtctggaacaaggctgtgaagagtcagcaagcccagtggtgtccagagtggatgccgggtctcagggggaccctgcccagaggtcctggggagctgagtggcagacagggaggtgggaagcggagcagaggagcaggtcttgatcacagagctccaggccctctgagg

SEQ ID NO: 913000 - DNA, 569 bp, Homo sapiens
ctaatctactttcttaaagggctgcatttatgaaactcctgcctttcacaaaagcaaggacatacccatatgtggaagcccctgttaattcaaaacctcttaacactcttgatcatgttgagctcaacattcctggcacccaggacaatgtcagtacctcagccttcacattatctttgtgagcaagcatgttcatttctgagatggtgctgttccttcttgcaatgaaattcctcgggtcataaaaaaaaaatctgccttctagacttctccttatccaaacatttgtttctgttaaagtcactcagtatattctggaagtaaggctgctattgatgctttggaaatgtttgttccagggtcctggtgaggatcacttcttcttccatgagctcctcaagacattgtctttattccttttaaatgatcctggtcttgaatagaagttctttctgctacatgctattttgctgcagttaactatgccttcaatgtttctttttcctctgttctgytaagtctcacaggaacacttaactgagtttctaactattcaatctgcttctttg

SEQ ID NO: 913001 - DNA, 584 bp, Homo sapiens
aattcacacataacagtattaactttaaatgtaaatgggctaaatgcgccaattaaaagacacagactggtaaattggataaagagtgaagaaccatcagtgtgctgtattcaggggacccatctcatgtgcagagacacacataggctcaaaataaagggatggaggaagatctaccaagcaaatggaaaacaaacaaacaaaaaagcaggggttgccatcctagtctctgatagaacagactttaagccaacaaagatcaaaagagacaaagaaggccattacataatggtaaagggatcaattcaacgacaagagctaactattctaaatatgtatgcacccaatacaggagcacccagattcataaagcaagtctttagagacctacaaagagacttaaactcccacacaataataatgggagactttaacaccccaccatcaacattagacagattaacgagacagaaagttaacaaggatatccaggaattgagctcagttctgcaccaastggacctaatagacatctacagaactctccaccccaaatcaagagaatatacattcttctcagcacc

SEQ ID NO: 913002 - DNA, 643 bp, Homo sapiens
attatactggctaggacctctgacccatgctggataaaaatgttagtagcaaatgcccttgtcactctcctgattttaaagaaaatactttcaaatgttttgttaccatgatggttaattttatttgtcaacttggctgggacatagtgtccaggtatttggtaaaacactattttggatgtttctgtgagtgtggttttttttttaatgaaataaacatttaaatgggtggactctgggtacagcagattgcccttcataatgtgagggggtttcatccaatcagttgaaagcctgaatagaagaaaagactaactttgccctagcaaagaagaattctgccagcacataaccattagatttcaactgccacatgggatgttcttcagatcttcagccccccaccccaccctgcaggttctgaacttgccaacctgcataattgtgtgtaccagttccttaaatctcatgtatgggtgtgtgtgtgcacgtgtgtgagggaaacaaacacacacatacacaaacaccctcatcctatttgtcctgtttctttggagaaccctgackaatacaatcattcaaaagattttgtggttatttgttaaataaaaatgttttatcacttaagaaagttctattccta

SEQ ID NO: 913003 - DNA, 497 bp, Homo sapiens
gcttagagagattaagccatttgtctaaaatctcaagggactaaattcaggttcttcggttcttagtccagtgtttgatggtacaaccacactaatatttattgatccttttaactccacaggaatgttttcttttgatagttcattaccttagtaatttggatctatcacaaatatgattacattatattcttatactgtatttgattattttatttaagagggcaattaatccatagggaaagaagtgatttttctcctttataaccagtccctactgttactggaaaaaaaaaaaaaaaaacacacctggtgccctagagtgtctgaactacaatataaaaccatcatgtataactcagtacagtacaacttcagtaggacttacaactttgagaagacctaaagaccaagtacctttgctaggaaccagacatgtgacatgcatccttkaaaggacttgaaaaaaaatcaaaagagcattttcgaaatatcct

SEQ ID NO: 913004 - DNA, 570 bp, Homo sapiens; identical to SEQ ID NO: 905715

SEQ ID NO: 913005 - DNA, 644 bp, Homo sapiens
atccaaaggaaagtctccaatttttcscttctcattattccaagactcactgaaagatgttcattcagatttccacagcttgcataaaagctttctaaaaattttactccttttcactccacaattatttttaaagataccagcaatttgcattctcttttttgtttaacatagaagaggcctctccggccaacataaacgccatggaagtagactatagagctgataaccattccctggaggccactgaagtccacagtacatggacatggcagtttgaggtttttttgtgacaggatccggtttattctgcctcagcagggttgtcccgggtaaagggaagtcctgagggccagttaaggccgatggtggaagaagaagcgggcatgcaacccctaaaattcagtgaagccaggcctaggcctaaagacagctgggataggtcaggacagggtggaaggaactggactggaaccatgcctatagggctgtggacccaggctacacaggtgtccagggaagcagggcacagggtcatgtgacatgcaacactggcgcagggatcacaagtaagtgcaaaaacaagtaagcacagactcacaggccaaagggtcacccagccacgactaggctggtcatgtgga

SEQ ID NO: 913006 - DNA, 629 bp, Homo sapiens
acaagtcaaagaaacataaacaaaacccacacagtctgaagaaacaaagccagsttcaaaaccagacttagacatgatacagatgttgagattaggaaagcaattaaacataactatggttatacatatatacattataatttgccaatattcaataaaaataaaaaagctctaataaaaataagaaaggagacaatatgcaagaacagattagtaccataaacagagagacagaaactctaataatgaatcaagaggaaatacaagaaattattttaaattctgtgcaataaatgaggaatgcctttgatgggctaatcagtagactaaaaaccgctgaagagtcagtgagtctgaaaatacagcaataggaacttcccaaactgaaatgcaaaatacaaaaataaaaaatactgaatagttaagaactgttagcaaatttcaaaaggtataacatatgcgtaatgggaataccagagagaaaagaaagaaagatagaatagggaagaagaaatatttgaagaagtaatggcagagaattttccaaaatgaatgacagacttcaaaccacagattcaaatagccagagaacaccaagaataaattaaaacaaaaaatccatgcacagg

SEQ ID NO: 913007 - DNA, 586 bp, Homo sapiens
aaagtgaaagtgaggaatcactcagtgaagaagagaagggaagagaactaggcatctggcccttccttcctagatgccttcttaggcatgggctaagatacctggtagggtcacgttacctcatgcttagagcagaggctgccacacaggtatttccagcatattctgctctgaaagagatcctctagaaatttgttttaaaaatttggaggtgatttttttctgtgtcaaagctttttctttcagcgattgtgattatactacatttaaaaatgaataactatgccaggcagggtggctcacacttgtaatcccagaactttgggaggctgagggagaatcatttgagtccaggagttcaaaaccagcctgggcaacaaagtaaaatcctgtctctacaaagaaaagaaaagaaaaattagtcagtgatggtggtgtgcacttgtagtcccagctayttgggaggctgagatgggagggttgcttcagccagggaggttgaggctgcagagtcttttttgtaccagtgcactccagcctaggcgacagagtgagaccctgtcactaaaacaaaaacaaaaaagga

SEQ ID NO: 913008 - DNA, 643 bp, Homo sapiens
cttatattttcactttttagaaaaagaaaaataaatgaagaagagcagagagcacaggatagcaggaatcttaacacatctctcagaacccttcctaaattccattccaccaagaatcaagttagcctctttcttggtattggacatttaaaaaaaaattctcatttttaaataaatgtaataaccaaaaactcttctttaattattaggctgtttataggcaatgtgattatacttatatcttataaataatattattccagcaagtctaatcttgaagaaaaatcttatatttgaacttattagcctcatgacatatttattccaacagaaacattacatttgtctgattttgcaaaaaataatttttttcattcttgaaccaattgatcggagtgtgaattggattaaagtctcttggttgttttgctgatcaaagaaaaaaatctaattttacacaattaactttcaacctattaacattagtgaaaaattaaagattcaaacataytaaacaagtgcaaaacaaaacagagcagtggcttaaaatatgtaaaatgatgaagctcatattagtttggtagaaaaagtgtggacttaagtagcagagagaactgttttaatttctggctataccatatac

SEQ ID NO: 913009 - DNA, 768 bp, Homo sapiens
cgcgcacccactggcctgcacccactgtctggcactccctagtgagataaacccggtacctcagawggaaatgcagaaatcacccatcttctgcgttgctcacgctgggaggtgtagaccggagctgttcctatttggccatcttggctcctccctgtcacattttcttaatccagtctatcattgatggacatttgggttggttccaagtctttgcttttgtgaatagtgcctcaataaacatacatgtgcatgtgtctttatagcagcgtgatttataatcctttgggtatatacccagtaatgggatggctggtatttttcaggtaattcttaactgtaagcataggattaattttcttggccatcattctctgagtcattgaaaacatagtttggtagtcactccaattgagttaaaggattttcagtttcattgggtaaaatcactataattcgaaacaccattattaatagacactctaaagacactcatcaactttttaacacatcgagcctcgtaccattataaaagaagagtcagtttcaaagtttaacaaattttgaatctgtgaccactatttgcatcttatatctatgctcctaacaaaaggcaaccaaattaaatggaggatttattataaggtcactgtcattgtatacttgtatttccgtgtaacctgtgataactatttcttgtgttcactacctctgactgttttaagcgaaagcacacaaggaacgtgttaaaggtcagttcaatattgc

SEQ ID NO: 913010 - DNA, 644 bp, Homo sapiens
ttgccctcagagagcagaccaccaaatagatgagaaaggaaatgtatagtkaagaaatttttatccactttattaatttattttatggccaaataaaactttatcaatgacagggttagagggccatgtaggcagagaataatccaaggcaatggagaattaggcttccatactgaatgatgaagagcccagctgagccagaataaagatttctgtaggacactgacaacactagaacagtgagttgagggcagagtctagagaccttgaatgtcagggcaaaacttttatgagcagaggaatgacaatctaaatgttggtaagtattatcagacagaaatgtatggaaggagaatacagagacagtttcccatcataacgcaggtgaggagaacagtcaaaatcagtgtggtagtaaagttaaatgtaaatgccatctacagttaagtttccctttgtactataactagaagaaaaactgctttgcaacaatgttcagaaacccaagtcttctttgacctacttcatatagtaatgaaaatataatgatcctttcctctgtgtgtacactaaatactgcttagagaaacttcatcttgataccatttgtaaatacttaaatgagtcccatgggtctccacgga

SEQ ID NO: 913011 - DNA, 589 bp, Homo sapiens
gagagatcctatcaaagaaaatggatgtcatgaaaacagaaatggttcaggcagagaaaacggctgctgagattattaggaagctggagaaacaggagtagaaacacttaaacaaggaaaagaaatgctagctgcacttgccgtcccatctttggaaaacagaactccagaggagtgtgcaaagacaagtgtaaaacccaaaaagaagaaaaagcaaaagccccaggaggctcctcaggagaatggaatcaaagacccatctaactctttctccaaacctaataaaaggaaatctttttccaaggagaaattggttagcagccatcgagaagagaccgctggcagcatcagtcttcccaacaggaagacgtcttcacccaaggaggaagcagttaatgatcccaaagaggcaggcaacaggagtgtcactaagaaaaaaacaggaaattccccttcaaagaggaaggagctggtcagcagtggacctgaagaggctgctggcagcaagagcagctccaagaagaagaaaaagttacataaagtaccccaggaagatgagartgcaaacggacgtcccccgtcaggcggg

SEQ ID NO: 913012 - DNA, 529 bp, Homo sapiens
tatttggcatatatgcatattttggggctcagtgtctttcatcgttatgtttatggttataatgaccacatctctcacccattagctgtgtggcttttgaggtcagtaagctattcttcccagagtgcttgacatagggcctgcggcatggtaaatacccacagtttttgagtttcctgtgggttgagcatttagaatcatctgtttgtttaatcaggacatatttctccagtaccttcaggggtcccagtactatgtttaggaacttagccatcacttgcacagtaaacagtatctgtggattttgtcattcaacaaacactgccattgttcagtcactcaacaaacgctgttacggcatccaccctggggaaagaagggtctcttggcagagggggccgctctccagctaatgctgtgctaaagatgcatggggcagaattctaatagcatcgtgtgtttcattttgcccattacaacgccattmtattttaaagcttgtctttctaactctcctatttttcttcta

SEQ ID NO: 913013 - DNA, 634 bp, Homo sapiens
cacttgtgatggtcacagttcagggacacaggcccaataaaagactgacacttagttatagaattataggaccctataatttttaccccatacctcaccaacatatcaacagggttccagtgtaataacagtagattatatacatataaaacagctgtgatgttcagattctatttaagaaggggtttttagggaagtctaaaaacaacaggtgaaacaaataatgagtacactcgaggaaatggaagactttaacacctacagccacagcaaacattaaacacagcccaactcccagccaggttaacacaaaatctgacactaaaggcctatttgcctcagtttctattacctgatacatcacgtcatgctttcaacaaaaaattataaagcataataaaaatcaagaaaaaattatttaaatagacagcaatcatcagagcacagacatagcaaaattttggaattatcaaactaagaatgaaaaaagtaaacaacatgaaagaacagatgggtaatataagcagagagacgaatgctaagaaagtatcaaaagaaaacgctataaataaaaaaagccacattgtaacagaartgaggaatgtctttcatgggctgattcttaacctagaca

SEQ ID NO: 913014 - DNA, 648 bp, Homo sapiens
agctactctgatcacatcataattatctggtgctctgtcctctcattactatattctactaagatcttaggaaagaaatgcatcattagtaattagagaggaaactgaractcagagagttcagtcattcttttcaagtcatacaagtggaaatatggtaagctgtgatttatatccaggcctttttaacatacaaaacctaatgtgttaacatttccgatcaattttcctttcctttttttttttttttttttttgagacggagtcttgctctgtcacccaggttggagtacagtggcgtgacctcggctcactgcaagttccgcctcctgggttcatgccattctcctgtctcagcctcccgagtagctgggactacaggtgctcatcaccaagcctggataacttttttgtgtttttagaagagacgaggtttcaccgtgttagccaggtcttgatctcccgaccttgttatccgcccacctcggcctcccaaagtgctgggattacaggcgtgagccaccgcgcctggcccaattttcctttctataaggatagtcattgccttaaagtttgaattcctggaaaggagtacttgtgtctcattcactctggaatcccctgtcccaggcacaatgtctggccaaa

SEQ ID NO: 913015 - DNA, 615 bp, Homo sapiens
agatacattttgtcaaatttagtcacctaaaattaagtataatgaggctaagttcatcatccctttttcagcctgcaattatttaaraaaatcatacaagtagtttatgttcataaaataatcagaaaatacagaaaatttttaaggataattgaaaccctcagtcataatgtggtaacattttagccacatctttctagatttttacagcttcattttattttacaaaaacaaaaatgtattcaacaaaattgagatccttttatataccagatgcccaattagatatttgagaggcataagagaactcagacaaaaatttttgtcttaaagtcttaatgtttttcaaatttatgattttactttgttttgctacacatattttacaagccattacatatagattctacatttaatgactatataatattctctcatattcttgtacaaggtcataagtcttattaacttatgcttttctgcaccaagaaaagttaaagaaaaaccagcataaatttagtatttactctgggcaaatagttacaaatgttgtaagggagatgtgaacaacaaaacaaaacagcacaataacaaatacagtaagaaatagctcca

SEQ ID NO: 913016 - DNA, 599 bp, Homo sapiens
gaagtcaaatgtcaagaccccatattttcttcctggaaaatagctgaaaaatgatatacatgaatactaccataagagttactcatagggatagacgaagggcatgaaaggaagaaaataggtcagtaacagaatatgtgacacgggaaaggggcacacttagatttttccactcacatcaagagttctctctactatccctctcaatgggcttaggaaatctccttgtaagaaacttctagataaacccatacgcaactcaaatatctgctctgccactttttagatagctaatttggggcagatttcttaactcctgtgagccccagtttcaacagtttgcatggagatatctactttacagggttgctttgacgattaaattgactaacgtagtaatattatgcaatgtgcttgcagaaaattgctcaaaagatgtaatttttagctttttataatgtggatagcctatgtggytagagcagagttgctctagtgttcagcaaactcccccagccccattgccaaccctcagcccccctcaggtacaagaaaagctaaaaaaaaaaaaaaaatggatagcttcaatacaatggtgt

SEQ ID NO: 913017 - DNA, 512 bp, Homo sapiens
aaactttttgctcccaaggctccattacactcctaaaaattatggcagacctcaaaaagctttcatcacrtaaggttatatttgacacagaaattgagaaattttaaaaaatgttaatttatttaaaataattataataaacctgttacatgttaacataatacttttatgaaaaataaattttctaaaacaatttttttttaatttttgcaaatctctttaatgtctggcttaatagaagatagcagattctctgctctatagtcagcctgttgtgacaggtcattctggttgaagtatgtgaagaaaatacagcttcatgcaaatatgtactattgtcccttgtatctgtgggggattggtttccgcaccactgcgtctaccaaaatgtgcacatactcaagtcacagcctgggggaacctgtggatatgaaaagttggccctccatatatgcaggtttcacatccttggatactgtgttttccatctgcatttggttgcaggtgtggga

SEQ ID NO: 913018 - DNA, 512 bp, Homo sapiens
aaactttttgctcccaaggctccattacactcctaaaaattatggcagacctcaaaaagctttcatcacgtaaggttatatttgacacagaaattgagaaattttaaaaaatgttaatttatttaaaataattataataaacctgttacatgttaacataatacttttatgaaaaataaattttctaaaacaatttttttttaatttttgcaaatctctttaatgtctggcttaatagaagatagcagattctctgctctatagtcagcctgttgtgacaggtcattctggttgaagtatgtgaagaaaatacagcttcatgcaaatatgtactattgtcccttgtatctgtgggggattggtttccgcaccactgcgtstaccaaaatgtgcacatactcaagtcacagcctgggggaacctgtggatatgaaaagttggccctccatatatgcaggtttcacatccttggatactgtgttttccatctgcatttggttgcaggtgtggga

SEQ ID NO: 913019 - DNA, 613 bp, Homo sapiens
ttgttggtagatgatttgacaattacaaaaaagcactaagaaaaataaacatcactcataaatctatcaccatttatttatatttccttgcagtctatttgtctatatgtgttatataatatataatttgtatacatacatatctgacatgattatatattttcaaatattagagtatatcatactttaaaatagtttacatttattgagatataatttatgtaaaattaaatttatttttaatcctaaaccactcatgactcctcaatgtagtcctatctggttatgatttattttcttctaaaatactactaaatataatttgccaaggatttattaggattttaaatgtatttacagctgagttgggtctgtgctcttcttattttatttttgtgcggtttcgtatagggagtatgtttatgtatgactgaatcaatatttttcaaacatttctgaaacacctcctataatggagatcaatgttcttttgtaatttatattatcctgtatatttgtatatttgtctctctatattgtmcattataatttacatcataatataaattatgttatatcacaaaaatttgaattttgtaatttatattatctt

SEQ ID NO: 913020 - DNA, 651 bp, Homo sapiens
tttcaaagccaacatctattttcatccctstgcctagcttttctgttttttttttaatcggtacattcttatatcttgattttaaaatccattgtccagtttttctgtgtacgcttatatttatccataacatgaaccaacccagatgtggaaagaataaaaaatgcattgtctcctttacaccaccctgcgtggaaatgtgcttgcttctgcaccatctaatgcattttgttgtccaaatacacacaccagagactgataacactgttagccctgagactaaccaggtcagagcacatcaggaacattgcagatagaaaacctaccatgccaatgattgtggtcatttttagcccagtggagggagctggtttgacatcagagacacagctaatgtcagcaggatacagcacataaaatcacatttctcctccttcgtaccttatgcaaaccaaggaaactggttttatttccaatttggcaacaaaaaagaacaaggtgctaatctttcaaataaagatggaaatatttttcctagtgactgacttttcagcactatttctaagtgaactgtccttggggaagcaacccaggatataattttactgtcacataaaacattgcattatattttagtcaaatacattttat

SEQ ID NO: 913021 - DNA, 592 bp, Homo sapiens
tcatttgatgccctctgaattccattttgcaagatttgatttccttcaagtgtggttgatgctgtggctgtcactgctytctccatggaaatgagaaagcctgtacttagtccatcatggagtagatttgcttctctcttctctataacttattcaaagcagtgagagtttgtgttccaaacccgggttgtgcctcagccccatccaaagatgtctccaattactcaattgatttcttattgtgcatctactctatgcttcaaactgggtcagatctaagagtaatgatatttccgggactatagaatatattagaagtaatttgagaacaacatgggatagcgtatggtgaaggatcacacaaaagaatacaaacaacagttcaaagaaagcaagggtaaattagctagcatcactgcaataggcttgaggatacaaacaggattaaatttcagctagccccaaagaacacagctattatggctataaaaaattctccaaagtgcctccctcttccctcaccctcaaaaataaagctaaataataaaaagatataaatgatgatttatttaattttttacataaacatatg

SEQ ID NO: 913022 - DNA, 557 bp, Homo sapiens
actttgggaggctgaggtgggcagatcacctgaggtcaggaatttgagaccagcctgaccaacatggtgaaaccctgtctctactaaaaayacaaaaattagcagggcatggtggtgggtgcttgtaatcccagctacccaggaggctgaggcaggaggcaggagaatcgcttgaacccaggagggtgaggttgcagtgagctgagatcgcaccattgcacttcagcctgggcgacagatcgagaattcatctcaaaaaaaaaaaaaaaaaaaaaaaaaatctaccagctactgcttttaccaaggacctctcatcagaggtccaatgccaaggatttcagctcagatcctaagcaggaaattattctttccatcacacaaggtgttaagtttcttcctgttgctgtaagaaagaatgctgctggcaactgggaggatgcaggctgggctgcatgctcggccaatgaacttgggtttagacagatgaccagatagctctggcaccacagggctgtactttagacctaggaaggcaggtcccagcattttgcaaagca

SEQ ID NO: 913023 - DNA, 586 bp, Homo sapiens
ttagactcttagcatcaaaaagatccttaaattaccatctatcccattaactggaatctctaaaacrgtgtgtcttgcaaggataaaaatcataaacacaactgagtattgatggttcagtaaaagctaattgactaatacatattggttgaaaacatacaatttttttaaccgctattctaggcttaacaggagtttaaagagacacacaagcaagttttctcagtgattttataagttaacaaaacaggtgggaggtcatttatagaaatgccataggaactaacaagaatatatttagtctgtataaaatatccccattaacaaaaaataaatatattttccttctacctcttatccataactgctagcaaagtggatgagccagcatgtggcctggaagggcatcttgtcctattagcatccctaagcccaccacgcaaggcaacagtatgcctgctactgaagctaccaagcttcaagacaagttttctagttccacccagaacacaatgccacgatcccttttataagaacattctagagcaacctctgcaaattataccataactagccttttattcaa

SEQ ID NO: 913024 - DNA, 625 bp, Homo sapiens
tgttgcctattaagaaaggaccaaaagaagtggtcttgttcagccatagcattgtactagaagaggcatcatttctatttttacaaatacaacctcaaagaggtaaaaaagattaacgtctgtcaagtcaacctcatccttctattccagcgtcagtaattaaatgccattcttgtgatagttatcattaatgggagagactgatttggcccatgaattttgaaaaataaatgcagtgaaagaaagttccaggaaagggctgttctgggctcagcagtagctcttctccactcaagacacagaatgtgaatatcaacagccagatggtcatccaggtagtaggctctgaaaggcatcagggaggaccctctggcaaaatctgtcttttatcccaactgtcactgtgtatggaatttcataagcattcaatcttttgagttaagcagtgtcaattatttttcttcttttctctattcattcaagaattatttattaagcattaatgatgtatcaatgagtacgaggtactagaatgaaaaaaaactgttttagctattaagatgtccacagyctactgaaggagacagaaaacaagcagtgacacaatagctaacatgtatcacat

SEQ ID NO: 913025 - DNA, 553 bp, Homo sapiens
ctacagagagctaggaattcttttgaaggaggtaagactsgagaaatttcttgaggattgatcagatttggaaggctgaagagaagccagtaaagcacagcagatgggcaagtgcagtgtgtgtcttgagactgggcaaggtgcgatagtgagtcctctaatttgggtagatgaagcgattactttgcttcaaggagtagtggtagttacctttggagagattgttggggtgtgattaggggaagtcttaaataccagactgcccaggaaactggtttctccctgcagccaatggggagctgcctagggcagcatccttgcataccagtgtgaatctaccagtgtgaatgtagctacccaagcaactttttgtttgttcacagatctgttgtccaggcattttgtaggaggctgtgaaaagtctgggtagatctccaaagtacagttttcctacaaatagctggtttgtgtactgagggcctaagtccattcctcagaacaaactgtagaggaagaaatacatggatggttgtcccacaggttcaactctttc

SEQ ID NO: 913026 - DNA, 557 bp, Homo sapiens
gtaaaattgagtgctttgagctctaggccagcattaaaatgaagactgaatgattattctgataaaatccatacacaaccatcaacatttgggagtgatcctaaatctatttatgatttgggcaggtgggttttcatgactattgtctgtaacaatttttcataagtcagaactgaccataatttaaaaagtggtgattgatttaaaaataaagccaggcataggtacagaaaggaaaatactactgcaatagaggtaggagaactattacaacagaaaaaacgctcggaacataagatctgcaaagctctgaaaggataaacagaattaaattttatttatagggaagagtaaacaaggctagaaagaactggatatggaggagtgagatgagctagtggtgtaatcagttgatcgaaaaatkttttttccctaaggttagctgattctcaggagggacttgtaaaagagagaccaaagttgaggaatctggaaaaaactgcctaaattttggtaaagttaggttacccagcatttttccatattggtcaatagca

SEQ ID NO: 913027 - DNA, 584 bp, Homo sapiens
gcaaaacagtctccacaagagatcccaggagaaacagaacagctggccaggctcacctagctggtcccataacttttcccaccatcctgccaggcaaaccttgtcatctcagcacctggatccaagacactttgctgccatgtttcctcacatctcatcctctctcccttcctagtcagaattccacatttgtcactttctgacctgcatttgacaacactcaatgttgtcttatccaaacaacatctatgattcagccttcttgccctcaagtccagcatgttcccctctggctccaagcccctttccctccagccttttacaaccacatcactccatgtaagtcacttgtcctttgaaccagctgatctgtgggctgaggaaagggtgctggagctgagctgtagatgttctctttgctgtctgtcattctaggggcttgccaacattgggcagagtctcctgctggctgaaactctctcaccacaaaggatttcattttatgtcagcagtttcataggctgagggagtgatagagataagagaaacatgargagaatatgccacaatgactaaactcaaga

SEQ ID NO: 913028 - DNA, 594 bp, Homo sapiens
tctattttataaataagattataaaaggccaatgagtgcctggctagagataagtataatgtgctatctctttaaaaagcttttccttctattacggaactttggaaaaatgytaaaaaccttttgaagactttctcattacagaatcttcaatggtagtgtccaagctagttagctggttgttgtgctccctaaaacatgggattatttaacactatatacaaaaatgtttgtcaatattattactattagctcctaaacagaaaaaaatgactgctcccactaccacctgcaatttgttgagtcctatcatatgccagatattagtctaatcttggaagacagctagtattatactcaaatcaaagaaaaggaaacagaggcacagaggagttatataatgtgctcaatgccatagagctagattagcaggaagctagaattctgttccaaatctttctgggcttcttctcagtatatcttttctatttctagagctgtggccatttttaggggtctgttaacattgtgaataattctgtgtaattttctgtttattattttttttcattcagctaagaaatttatatttca

SEQ ID NO: 913029 - DNA, 645 bp, Homo sapiens
taaaaaaaccttatgatcatttcattagatgctaaaaatttaaataaaatgcaacattgctttatgataaaagctgtcaacaaacagcatatagaaggaacatctcaacacaataaagaccatataggacaagcctacggctaatacactgaatggcaaaaaactgaaagcacttccactaagatctggaccaagacaaggattcccactttcactgcttttatttaacatagtactagaagtcctagccagagtaatttggcaagagaaataaataaagggcatccaaattggaaaggagaaagtcggattatccttgtttgcagatgacacaatcttatatttacaaaaacctttaggctccaccaaaaacccttagaactgataaatgaatttagtgaagttacaggacacaaaatcaacatacaaaaatcgatagtgttgccatacactaacagcaatcaatctgaaaaagaaatcaggaaagcaatacaatttgcagtcaacacacacacaccctaggaatacatttaaccaaaaaagtaaaagatctctcactgatgagagaaattgaaaaggacagaaaaaaatggaaagatatcctacattcatgaattgaaakaattaatattgataaaatgtctg

SEQ ID NO: 913030 - DNA, 611 bp, Homo sapiens
cttaggcaaggatttcataactaagaacccaaaagcaaaagcaacaaaaacaaagataaatagctggtacctaattaaactaaagagcttttgcacagcaaaaggaacagtcagcagagtaaacagataacccacagagtgggagaaaatcttcacaatctatacgtctgacaaaggactaatatccagaatctacaaagaacccaaacaaatcagtaagaaaaaaacaaaaaatcccatcaaaaagtggactaaggacatgaatagacaattatcaaaagaagatacacaaatggccaacaaatatatgaaaaaaatgctcaacatcactaatgatcagggaaatgcaaatgaaaaccacaatgtgataccaccttactcctgcaagaatggccaaacaaaaaaatcagaaaacaatagatgttggcatggatgtggtgaacagggaacacttctacactgctagtggaaatgcaaactagtatagccactatggaaaacagtgtggagattccttaaagaactaaaagtagaactaccatttgatccagcaatcccactattggrtatctatgcaaaggaaaagaagtcattattcgaaaaagatactt

SEQ ID NO: 913031 - DNA, 623 bp, Homo sapiens
aaatatctctgaaaggcctggaagtagttctgtgtgkctgtagcgacagatatgggttcttagctttttgcagtggcacaacatcaagcaagagacataagcagcaatcaagtgtgaatggaactatccaagcataagaacttcaattttatggggaaggctaggggtgtttgtttgaaagttgagaaagtttgagacatgatcagatttgcattagagaatgatgactgtgaccacagtgtggaggatgacttggaggtgttgagactggaggcagggaacttattgtggaaatgtaggtgttaaatgatgagggtggtggcagtaggggtggacaagaggagatgtatctgaaagacaagtgaaataaagcctgctaatataagaagggccttccttcttctgtgtgctcctatatcaccctcttctttcctggcattcacttgtgtagctgccttttttgcattgtgagagtaaggcattcacagtggcatcaccagcatttagcacaggcctggtatggagtagggacccaataaatatttgttgaatgaatcattaaataaatgaatgagaaatccagccatgaggtgatgattcctgcattagaatagtagaagata

SEQ ID NO: 913032 - DNA, 638 bp, Homo sapiens
ccgcctcagcctcccaaagtgttgggattacaggcrtgagccaccacgcccagccagtccctttttttaaccaaaatgttttttattcaaccacaattgcacttaacccatttaaccaccttatttttttaaaactgtttctatattcgtagaattatacgtattaatagttagccttttgctaatcctaacattcatttttttttcctggtgtttttggagcctagataatcatgatacagtttaaatttgtggtttctagtctccagttgtttatcaatctttctttgtactatttattctttttaaatagtctgatttttaatgtttctgggtacacaataggtgtatacatttatggggtagatgagatattctgatacaggcatgcaatgtgaaataatcacatcatgaagaatggagtatccattcatcccatcaagcatttatcatttgtataaaaagcaatctaattgtactcttttggttatttttaaatgtacaattaaattatcattgactatagtcatgctgtcatgttatcaaatcgtatgtcttattcattctttctaaatattagccatctacacctctccctgccagcaccccactacccttcccagcctctagtaactatc

SEQ ID NO: 913033 - DNA, 618 bp, Homo sapiens
actggaagagttaataactaaaaacagcttctgctacacttcataaatatttctcatttttctttgttagaatacatatttctatcatatatttaatagtatgtgataaacaagcatactgaataaataagcatattcttttgaaaatgcaaatatcatggggatgtggagttaaggaccattagtcatccacattctgctcatatgagctacataaacatttaatgaaatgtttgcccagttcttagcaagcttagaagtaatatgaaagtagatagtagtagttaaaattgtaaattctgaagttatactgctcaagtattcaagagctaatatttgaattctagctctatgactaacaagctgtgaaagcttggacaactaacttaatctcttggtgcctcagtttcctcatctacaaaatggaataatagttgaaactttgctgggacttgcccttttgacaaaaacagagtaagtaacagggacttaatttatgtttccttctaaacccaaaataaacaaataaatagaataacaatagttttcaagasacaggatatcaggcaaccaaggacagtgatctctaagagatgagaaaaaaattgaggcaagacc

SEQ ID NO: 913034 - DNA, 607 bp, Homo sapiens
ggtctcactctgttgcccaggctggagtacagtggtgtgatcttggctcactacaacctctgcctcccaggttcaagcaattcccctgcctcagcctctcgagtcgctgggattacaggtgtgcactatcatgcctggctaaattttgtatttttagtaaagacagggtttcaccatgttggccaggctcgtctagaactcctgacctcaagtgatcctcctgccttggcctcccaaagtactgggattacaagcatgagccatcatgcctgaccaacaagttttttaagtatgctaaatccttgtcttattcaggaggagaacaatactgaattaactttaaattctgtttgaaaaatattatttcatatgtaggttaacacaggaagtttcagttgtatcaacttttttttttttaacttaaaataagtgcttgaaaatatggctaaatgttagatttctcgtctgggtaataggaacgttctgtagttttctgtatattttacataattataaaaattaaagtctgkctgggcacagtagttcatgcctataagtccagcactttgagaggccaaggtggaaggactgcttgagcccaggagtt

SEQ ID NO: 913035 - DNA, 675 bp, Homo sapiens
aggcctccccagccacgtgtaactgtgagtctattaaacctctttttctttgtaaactacccagtctcaggtatgtctttatcagcagcgtgaggacagactawtacaaatactgtgttttgtgattttctttcctttaaggtctgcgtgttaacaggtataagaatctcattgaggcacatggggattattttctctgaaccattaaccatgttaggaaatgttctagatcttatatcccaacaaatatgacacggactgcagatattagatatttattaggtacgtggaatagtttaaaaataaaaaaaaaacaggtaaatctaggttccagataactttaaaaataaattaaacaatttatttaaatgtttttttaaaaaataaaatatctcagacgtggtggctcatgtctgtaatcctagcactttgggaggccaaggcaggcagatttcttgagcccaggagttcaagaccagcctgggcaacataacaaaatcctatctctactaaaaatacgaaaaattagctgggcatagcggcgtgcacctagagtcccagctacctaggaggctgaggtgcgaggatcacctgagccaaagaggtcaaagttgcagtgagccatgatcacaccactgcactccagcctgggtaacagaaccacaccctgtctca

SEQ ID NO: 913036 - DNA, 639 bp, Homo sapiens
tggaacctgaatttggtgtttgtcggggactgggaggagcagctgtgccctaacatgttatgttaggaagctgatyagacaaaaaaggagaatcaaacattcataccataggcttactgctttatgtctttttttcttgaaatcatcctattcaaaaggagtttcagaaggtaactcataattgatatttaagtctacacatgatcttgaacacattaactatggattataaaagaatgatattcaatacaatgattacatgtttttaaaaaacggaagaataagtctgtacattttcttctaatttaaccatcggttgtttatttctagcctgtatttttattaaaaagttgtttacatatgcacatatgatttttaacttaggtatcaattttcacctaaacattgatgacagtatgacctaaccctcttaaaactcttgtggaattccattagatcacttccgtcccaccccagtgctagagaatagaaaataatcagtaattattagcctttttccttatcattacaatcttaaatggctatgaagtattctattatgtagatatatcataatatctttacctattctcttattgctggatatttaggctgcctctaatttttcaagattatata

SEQ ID NO: 913037 - DNA, 627 bp, Homo sapiens
cggggactgggaggagcagctgtgccctaacatgttatgttaggaagctgattagacaaaaaaggagaatcaaacattcataccataggcttactgctttatgtctttttttcttgaaatcatcctattcaaaaggagtttcagaaggtaactcataattgatatttaagtctacacatgatcttgaacacattaactatggattataaaagaatgatattcaatacaatgattacatgtttttaaaaaacggaagaataagtctgtacattttcttctaatttaaccatcggttgtttatttctagcctgtatttttattaaaaagttgtttacatatgcacatatgatttttaacttaggtatcaattttcacctaaacattgatgacagtatgacctaaccctcttaaaactcttgtggaattccattagatcacttccgtcccaccccagtgctagagaatagaaaataatcagtaattattagcctttttccttatcaytacaatcttaaatggctatgaagtattctattatgtagatatatcataatatctttacctattctcttattgctggatatttaggctgcctctaatttttcaagattatatataatgctataa

SEQ ID NO: 913038 - DNA, 601 bp, Homo sapiens
gagaagtctgaggtgaaattttgactttagstgcctggagaagaggctgtagaaggacatttgctagcactatccagcaacgcagggtggggttcaaaggcgtgtgttataagacgatgtttctgtgggtatgtgttgttgtgataggctgattattcctactgactgaataatatggagtcaaatcctgtcataaatgtgatgtgtctcattccaggccttgctttaatgcactggcattttgagaagaaaatgatagacagctgcagctcgctgctgtgctataacagtgccatgttctacgtcagtcgacgggccgtcagaagggcataatttaaatggagaagccagttgctacttcccttcacctgggcaatttcagttagaactctttcaggcactcaaaagacacaggtttttgccccttgaaaaagacctgggagtcctaggactctttaggtttactcttgtctagtgtcaactgcttaaaataccaatgctttatcatccacaccccatcccaatatatacgaaacacatctctcatcacctatcaatctttttacattgttcattcagtttgggagccggtatatgaaga

SEQ ID NO: 913039 - DNA, 543 bp, Homo sapiens
gagagtgcttacaaaggggattccagggagagttgttttgtggtgatgagactattctgtgttactgattgtagtggtagctacattacttcatgcatttggtaaaacttattgaactatatacaaaatataaaagtgaattatgccatgtgatattgtgatataataaaaattatgtatttggtctctgtccctgattcctgagacagagcttctaaaacccttgccagatagggatgctaggagtatcttttgttcttatatttggtctttgaccctggttcttgacacagagctccgaagaactttttaatttcctgagtgataggagtatctgatacagagctcctacatccctggaatatcctggattataggagcatctcttgctctaatgagttgactcttggtaggctcctggatagccttagaataggagctgattgcyatgaaaaccaaccatgtaattagaggataagaacttttagccccaaccccttattccccaggaagaggaaaggggctgaaaatttagttgattac

SEQ ID NO: 913040 - DNA, 574 bp, Homo sapiens
ctgatttgtctctggcactttcaagaatttgtatatttctttgtcatctgatgwttcattaaaatgtatcaaggtgttggagatttttttttcatactgcttgtagatttttttgctttccttcctaaattcatgttcttagcctattgtgactcggctatatgcaagaagtctggctcagccttcccaacattttatgtgtccaaggcctacttttactttcccctgagtagttgttaataccccaaactctgggtaacccaggtcagtttctgttccccaggcaactgtagctcctgtactgcttttatctatttctggattgccatcagggcttccttgagagcttcacatttacttaaaagtagacttgataaaattttctgatattttgtagcgctacaaggctttttaggaaacccagtttggccaattgacagaaatggaagtccaacttgggtgggataactattattgtcaatcactttatatagaatgaaacagtggtgcagagacatgactttgaattatgcaaggtcaaagtgccaacatacttcagatgtggaacttaaag

SEQ ID NO: 913041 - DNA, 582 bp, Homo sapiens
ttctccaggatgctcaaagcacagttcctgcctgcttttcaactgtgctcatattagcccagtatgaatatttaaaacaaagtcctctgatttcacatcatttacagtatagctggagagactatatgtaaatgtacaagttaaataaaagatgtaaataagcactctcttacaaaagtagaagtctacaaatcagtacacgtgttgttagttataatatatccaggaacatacgttatttggttaaaagagcaatttgagccaagattcttagactaaggagaatatcaaaaggcaaagagaagagaacattccaaatgggtgggggaagcacgaataaaagtataataatcccagcaccctgggagaccagggcgggaaagtcaacagcttgagcccggttgtttgagatcagcctgggtaacagagtgagatcccatcgctacaaaaaaattaaaaattacccaggtgtggtggcacatgcctgtggtcccwactactcaggaggctgaggtgggaagattgcttgagcctggaaggctgaggctgcagtgagccatgattgtgccactgctctccagc

SEQ ID NO: 913042 - DNA, 508 bp, Homo sapiens
agagaaacaaaggaaaagagacataattcaggaacaacagcctttatatcctcacatagaaacaaaacattgggtaatagagggaatgttttyctataagaaaaactggtaaagatgcaggaaaaataagatgaaaaaaatctgctaagcagctcaaggtctaagaagttttaaaatgtgcagatggcatcccagaaatgatgtctggggccatgacatccagggtccccacatttcctcctcattgagcctgacctgtactgccatctttctccccaggtttaaagaaagtttaacgaataggaaaaataaaagtattgattattttttaatttgtgcgttccctgtaggaagcctcgcagatttcacagtgtacattcaaaccctcaggtgaaaaatttatgactggagttcatttgggtggagacagtgtgcagtgtcattctgttcaaatgctgtatgtagcatttcatgccacgaagtgcagagatcaggagaagagaggaat

SEQ ID NO: 913043 - DNA, 619 bp, Homo sapiens
aacctggttaaaaattaaagttattaaaagtttcaagatggcaacagcaaagcattaaaccaagcccatctgagcacggggtcctggcaactgcacgggtggtacatacatgatgaaactggcactctctctttcttcatctggaattctttctagactaattcctcctgcctcaggacacttcggccacccttcacagcataagcagaactggttcaatagcagttactcagtcatatcttcaaaataacagggatcccacaggagaggagggggcaagacccaagaccagacctattcatggaggctggaccagaagggggctgacaaaaacccaggtgcaattatggccagagaaggggtgagcagacaggcagagctgagcatcgaagtaggtgggaggacacagttcaattctggatgcgtttattgtgtgatattcaaaagaactaagaagtggcctctatctttgaagcaaaagttcagatcttcagggcractggagccaggctaaggattttaaattcattttgtaggagatggggacccactttaaagcctaagagaagtaacgtggtgtaatttctgttttgcaaagatgacttttgccacaatggag

SEQ ID NO: 913044 - DNA, 625 bp, Homo sapiens
tttcccatttatcccaccggggcagtttgtcttctagtggcctggattgccacaccagtggcagttacgtgaaggaatgtccttagggcaacctggagggagttggagagctccagcctctattgcagagcagccaatagttcagcctgccttttccccctgcatttctctttttccttaggcttgtcttccttgtcctgatctcagttataaaagactgaggaggctaatttgaggatctcctgcacagaggcactgggttccaaggctgacttttgtaattttctctgagttcatttttagccaaacagtattacagtggaaaactaggattttggtttcaaagtttcagggaattaaactttttccagttcttaaggatgcatcctaagggtgtgttctgtggtatggagatgtgattacccatttgcagagagagaacagaggagaaaaaaaggaaaaaggaacaagaagttgtcccctattactttcctattatactgaatggggtrtcccccatttgtccttagggttctggaataaactggtcttactgtgtgcccttaaccctggtcccatctcattacaatgacccacttgagaacagaggagataccagagtgaa

SEQ ID NO: 913045 - DNA, 591 bp, Homo sapiens
tggaggaagctcagggcagactcaccagtggatgccttcacacgtgcgggcttgctcttgtgtctgcctttctcggctgtcaggaggacattgtactcctgtcctggttccaggcctctcaggacataggaagtggtgtttcttggaagctgcactcccacccactggcctgtggggagactgtaattgaggcggtagcggtcaaatttggccaacggtgtcttccagagcagggtcaggctggtctctgcagtttcagaaacctgaaggtccttgggcgtgtccaactctgggaggagaacagagagatgaatgctcttcaggctgcaagacagggctgcttctggggctgaaagtcaactgcatctgggctggaatcctaggtctgccacagaggagctgagggaccacaggagagtcacatctctgggtctctctttttacttttgtaaaataggtctaattatacatcacccacatgaccccatcggagtctgagaagattgaaaataatgtcatggaatatccattccataaaatgctrctcagatttaaagcagttaaaaggaaccaactattgataaaagaagc

SEQ ID NO: 913046 - DNA, 564 bp, Homo sapiens
tcttcctgcctttgctttgagttgtcccgcctttccagactgaaccaatgtacttctaaygcatattgattgacgtctcatgtctccctaaaatgtataaaaccaagctgtgccccgaacaccttgggcacatgttgtcaggacttcctgaggctgtgtcacaggtgcacatcctcaaccttggcaaaataaacttcctaaattaactggattttctgggaccactctgtgcttatctctctttaatcttccccctctcaactcattggcctaacatgtgttacttggtcaccgctagccacagggagactgggaaactgagtgttgagcttttttagcctctgtagtggtgagaagagagaagggatttgggaatttccttcgggtggccacttaacactgtctgcctcataattggccctccttttacaaaagaaaaactgagactcagaagagttcttattcgctccaaggatcaagctgctaagaagagcttgaatcaacatttctttgacttcaagttcacaaaattttcaataagcaattcttactgactgagggcat

SEQ ID NO: 913047 - DNA, 647 bp, Homo sapiens
aagaattgaggtttgggaacctctgcctagatttcagaagaggtatggaaatgcctcaatgctgcaggggcagggcgctcatgaagaacctctgctagggcagtgcagaagggaaatgtggggttcrgagccctcccacagagtcccaactggagcatcacctagtggatctgtgacagaagggccactgttctccacaccccagaatggtagattcactgacagcttgaactgtgtgcctggaaaagccacagacactcaacaccagcctgtgaaagcagccagaaggaagactgtaccttgcaaagccacaggggcagagctgtccaagaccatgggaacccacctcttccgtcagtgtgacccagacacaagaaatggcgtcaaaggatatcattttggagttttaagatttgactgccctgctggatttcggacttgcacggggctggtagcccctttgtttggccaatttcccctggaatggctatatttactaaatgatggtacgtacccccattgtatctaggaagtaactaacttgcttttgattttacaggctcataggtggaagggacttgccttgtctcaggtaagactttggactgtggacttttgaattaatgctgaaatgagttaatactttg

SEQ ID NO: 913048 - DNA, 562 bp, Homo sapiens
ttgaactttatagaaatggaatcatatagcattttttttttgttttccatgtgactttyttcactcaacattatagctatcaaattttaacaggaatgtttaaaacaacaaataggtaatattttaattgataaggcacagatggataattaatgcctaactgcattgttaaatacacaatccaaaaaaagcactaccttgtggtagctattttctcatattttattttcctcctaatgtggcagcctcagggcggtgcttcagtgagcaaggggagcatctcatagccttttcttacttagccttggggattaggcagtgtcacatcagtcacattctatagttacaaggaagtaataaagttaccagattcaagggaaaggaattagactccacccttgaagggagtctcaagtttctagaacagaagctggcaaactctctgcaaaagatcaaagagtgcgtattttagactttgcaggccacatgcaatccctttcacatattatttttcaatagaatacaaaaatcttggttgtgggtagtaaaaaaaaaaagcaaa

SEQ ID NO: 913049 - DNA, 615 bp, Homo sapiens
catcttgataccaaaacctggcaaggacacaacaaaaaaagaaaatttcaggccaatatccctaatgaacatggatgtgaaaatcctcaataaaatactggcaaaccatattcagcagcacatcaaaaatcttatccaccacaagcaagttggcttcatccctggaatgcaaggtgcttcaatgtatgcaaatcaataaatgtagtccatcacataagcagaaccgatggcaaaagctacataatgatctcaatagatgcagaataggccattggtaaaattcaacatccttcatgccgaatacactcaataaactaggtattgatgaaacgtatctcaaaataataaaagctattaatgacaaacccatagccaatatcatactgaatgggcaaaagctggaagtattccctttgaaaaccagcacaagacaaggatgccctctctcaccactcctattcaacacagtgttaaaagttctggtcagggcaatgaggcaagagaaggaagtaaagggtattcaaataggaagagaggaartcaaattgtctttgtttgcagataacatgtttgtatatttagaaaacctcatcatctcagcctaaaaattcctta

SEQ ID NO: 913050 - DNA, 597 bp, Homo sapiens
tgtgtagggaaactccaccttataatactgccagatttcatgagacttattcgctatcaygagaacagcacgggaaagacctacctccattattcaattacctcccaccaggtccctcccaccacaacacatgagaattcaagatgagatttggttgggtacacagcccaaccacatcggtcacttagcacaatgcctggtacatagtatgtaaatattagcaatcactagtactattattgcaatgagccagtttaccaacacagattgatttttctttccttatacacagtcacattcataaaggatggtaaagaacatacctccccttcctatagtggttcaaatccaccgtcttgtcaagaaattcactgaattccaataacgtatttcagctttttagtactcaccaatttccattcattcagaccctcctaacttgccttattctaaacaggatttaaaactgttatttatttatttatttatttatttttttgagacagggtctcactgtcgcctaggctggagtgcagtggcgtgaatatggctcactacaacttctgcctcctggctcaagtgatcctcccacctcac

SEQ ID NO: 913051 - DNA, 596 bp, Homo sapiens
agaaacttcttggtgatgtgtgcattcatctcacagaattgaaactttcttttgattgagcagtttggaaacgtctttttgtggaatctgtaaagggatatttctgagcactttgaggcctatggtgaaagagaaaatatcttcacataaaaaccagactaaagaattctgacaaactgctttgtgatgtatgcattcatctcacagagttcaacaattcttttgattgagcagttgggaaaccgtctttttgtagaatctgcaaaggtatatttgtgagtgctttgaggtctatggttaaaaagaaatatcttcacataaaaactataaagaaggtttgtgagaaacttctttgtgatgtgtgcattcatctcacagatttgaaccattcctttcattcagcagtttggaaacagtctttttttaggatctgtaaagggatatttttgagcactttgaggcccatggtgaaaaaggaaacacactcacataaaaacaagatagaagatttctgagaaatatctttttgatatatacattcattscatagagatgaactttcttttgatgagcagtttggagacagtattttgtag

SEQ ID NO: 913052 - DNA, 543 bp, Homo sapiens
aatagcagatatgtgggtgagtgtggctcccactgagtacctagcaggttttccccaggttatctacaaasagtgacttttgaactgtttcatgtgagtcacgagtatgatgtccccagcttttttcttattcctcatgattggcttggtcattcagcctacattgtaggcttgcattttctattactataaaaagtgggacagggattttgatacggatttgagttagcttacagattgctttggataatatgacaccttattaaccaaaagccctgccttctcaaaatgacccttttcgatcttgggttttagcaatgtttcataatgccctgtatcccaaagctcactatattgcccaggctgttcttgaactcctggcctggcagtcctcccacctcaggctcctgaatggaggagattactgtcatgagccacagtgcctggatctctcataaagttactttgcttgatggatggctgactagtttttattgctgcaggggaatacaaaattagggaccccctattccaccactttga

SEQ ID NO: 913053 - DNA, 607 bp, Homo sapiens
tatatatgctggctagatctttatctatgtgtagctaatggatattactgttagctctaggacaacaatggtactgttctgtcccgttagrtatttttattgatgactgggataaagccagaggtgtcatatttatcacatttaggaataaagtgaaggatgagggcactaaaaataacaaataacagccaggatctcttctataaatggttggggtagggtggaataataggccagatatattaaaaataatgttttatttcagggtaaatgccaaaatgcataccccaccaaaaaaaaaaaactatcaagagtaggatgtctcttctactatttatctgttcattcactttatagtacatcttacaatttgtaattatatatttgtttgctcatttgttcactgacagccttcactaatgtatgttaagttccaagagacagggacaatgtctacttggttccctgctgtatccccagtgtgactagataaaagaataaattatgcaaaggataggagaagacaagcctaaaaaaacaagctgtgtagagacttgggatttctcatagactgcaagctcaacatcagtcaaccatgctgggacta

SEQ ID NO: 913054 - DNA, 602 bp, Homo sapiens
gtttgagcccaggagtttgagaccagcctgggcaacatggagaaaccctgtctctacacaaaattcaaaaattagctgggtgtagtggcacgtgcctgtagtcccagcaactctggaggctgaggtcccttgagtctggaaggtcaaggctgcagtgagttgagatcatgccactgcactccagctttggcgaaagagtgagaccctgtcaaaaaacaaacaaacaaaaaacaaaaataaaacaaaaacaaaaatataaataaaaaattaaaatccgcgaaagaaaagaaagaaagaaaaaaaagaagagaaaagaaaagaaaggagggagggaggagaaagtaaggaaaaaaaatacttgggaaaaccatgttttgattgaaaactataaggctaaagacaaaagaactgtacctaaggatcatactctcctcggttaattttttccttacagagtcacaagttaacaattctgaaattacattgtatgtgtcctagggttgaacaaataagagaataaatsgcagatcatggaagccaggtttctccctgtcagagaacgttacaaagttacaaataagcaaggcattgaggctagaatg

SEQ ID NO: 913055 - DNA, 618 bp, Homo sapiens
agcacatagaaaactgaaacaattttgcaaataggtaaacagatttatataaatgtggtctgattctccaagtcttgctgtaagctttaataagttgttggtattgtgggttcttttggtaaactttttgagaaatgtaccaactagcgctatttggtgtgtgttttttgcttctactctaatgtcaagtcagtgggagaagctttgtgtacttgctttggtaaactgattctgagtatcttatttccttatgtgcgtggaagtgcacttaatgaatttctgctacagtgtgtggtaaggatgctatttttaaagtctgagttcccagagtaaattttttaaataggattagggttttatcttataactaatataataaagcttaaattagaattataaataatatatgtatatgtatgtgtgtgtgtgtatctatctatctatctatctatctatctatctatctatctataatcccatcatggggkcaagaccctcatgacctcatttcatatatatatatttcatatatatacatatttcatatatatatatgtgagtcagattcaaaaacagcaacaaacatagaatattaaacctcaaagttattctaggcca

SEQ ID NO: 913056 - DNA, 642 bp, Homo sapiens
atgatgtgggtttctatgtgtggtgaagggcagcagtactaggccttaggaatatattaattwtgaaaaataaatatcttgatactcaaacttaatgacagtttacatacaacatgcaacttaaaactaagtggggtgaaaatagatattttcttccactttgtctttttccagagagaggaatatgattgatgtctagtacccctttccctgaaaaaagaaaaaggatacatgtgttatcaccaaagacttagtagtgtagtaggaaacaataattagagaaaaaaaaaagctcttaaaatggaatgtttggattctgtccctggatattcacacaatctttgttacaccttaggttagacaatttactgaaccctcctcacttccgcgaatgaggcacttttcacactgaataacagtgatgggatgtgtggagtaataatttctcatccagatgggtgcttaggtagcatcttttgctgtgaactaatgccagtaaaacaaatatgaacgatcttcaaaaaatgtgaaagagtaaattgtgattagttctttggatgcaatactctatgacatatctaatgaattcgtttggtacaaagatttttttccgcctaagaagtaatgtggtgaaaatctgat

SEQ ID NO: 913057 - DNA, 583 bp, Homo sapiens
tttttaagtagtttttattcaaaattaataaaaaaagaaatcagctattcaatattatttttggtcaatataaaaatgacataataaaacagaaatttcactttttgatttatcacggtagccagaaatggttaaaatccacgagattaagtgataaataattcaaggagagtcaaggacagtagtcaaaaaatacttgaagaatgaaaacagaaaatagatactaatctaagccagcaattatttggtggtttattcttttataaggtcaaatgtttgttaattcatttccataaacacatataaattacccattatatttaacacactgaacttcatacagtaaaagccatttttcctcagaaagtttacaatcattttcaggatgataactgtatgtgtatgttcatcagtcatttagtatctattcaaagagttgtcatgttaattgtggggaccccaaagggaataagaaatgtgtaaattcatatatatacatatatatgtatatgtatatatatatatacatatatatgtatatgtatatatatatatayacatatatattttttgagacagtgtc

SEQ ID NO: 913058 - DNA, 662 bp, Homo sapiens
catgttgtatgattttaagtatrtgacattcggcaaaaggcaaaactatggagagagtaaaaacatcagtggttgccaagcgttagggagtagagaaggaatgaatagagcacagaagattttctaaggcagtgaaaatactacatatgatgctataatgatggatattgtccaacactggacagatatgtaattatatatttgttcacacccattcaatattcaacaccaagagtgaactctaacctagaccgtggactttggatgatactaatgtgtcaacgtaaattcatcacttttaacaaatgtaccactctgattaataatgggaaagactgtacaagtgttgggggagaaaatatacttggtatctctgtatcttcctccctctcaattttgctatgaatcaaaaactgctctaaaaatgtaagtcttcaaaaaaaaaatagaatagttgttttgtaaaatctcctgcttgggtttgttgatttttttcacctgattagatttacatatcacatgttcatcaggaatactacgtaattggcaatgtgctctcactgaattgcattaagaaacatgggatgccagaatgtcgcattattggtgatattaactttgatcacttgatttagttgatgtctgccagattcctcccctgt

SEQ ID NO: 913059 - DNA, 546 bp, Homo sapiens
tatgtgacagattgcatttaaaaatgcagtcaaaactttatttcattcacaaaattattaaaactattctatataattaccttcagtgtatttgtgtacagtgtacatgaaacagaaatgcattttgtgtttagacttgggtcccatcccaaagatatcctattatggttatgcaaatattacaaaaatcagaaaaagtccaaaatccaaatcacttctgatttcaagcatgttggataaatgatactcaacctgtaatcataatgacaatagtaataaacatttattaggaacttacagtgtcctagggaatgtttgcactgttgtacacggtgtcttgggtcaggttccttaggagcagggcttttatgatgcaccttacaaagtgaaggccctcaggaaagactcaataatgagtgagaaaagcaagctaaagaaaggactcccagcctggtgatctgyccgcctcggcctcccaacgtgctgggattacaggcttgagccaccacacctggccacagttctgcttttagccagaccccagca

SEQ ID NO: 913060 - DNA, 706 bp, Homo sapiens
aaacatctcatgtaccccataaatatatacaacttgtatgtacccataaaaattaaaaactaaaatgtgtgtgtgtgtgtgtgtgtgtgtgtgtatatatatatatatakagagagagagagagagagagagagaaagggaggacagaatattcaaagcctgcaattcattttcagtgattagttgactctactcttattaagaggaacacacacaatagtcccccaccgttttctcctcgactgtgccgcaaaaatgaatacaacaaccataacatgatgaatttttaaatacatctcttgctcctaaaaaaaaaaaaatgtagctggcctgtcaaaatagttgctgccttccaaatttccagattacaggtgttcccttaatgacttaaatgattgtctttctgccaagatgacaaaggtgggacaattgatgtaactattatccatcttgtaaagagtttataaaatccttactcatgattggcttcacacgctgattaatagacactttctatttcagactttaattaaaagcaataaaagcagtcaactgcaggccatgaatgtgttggtgacaaaaaaaaagtgccattagagagatggaagatcaagcactgaacaaatttagtgtgaagcctcgtaagtggatccatatgtctgtgcttaaagccgctctgtgatagccacaatagccaagggattgc

SEQ ID NO: 913061 - DNA, 578 bp, Homo sapiens
cccagcaggaaactttgtaactatatgtagagagttatatagttaaataggaatctatacatataactatatatagctatatgtaattatttatatttcatttatgtaagtgaatatacagataaataaaatttcaggaacatgccattccttgcaaataatatgtctgattttactgatttttgataaacagatatgcaaatatatttttaagaatgcatctcaacaacagagaacgacttctcagttggactgaatattcaacccttcttattttgaggacaattatgtatatttatgcctgagtgggtgtgtgtgggtggtgtgtgtctgtgtgtgtgtgtgtttataaccattatatggtataaatctcccttatcagtaccaccaacttaaagtgatattctctttctcttttccaacaaagataaagttaagtttttcacggaaatgttacctatatttatatatatgcacacacacctagacccacgtatgtccatgtgtgtatgcatatgtgtgttttcagccagkcatattcgtatatgcaaattgcttgtcttacctcttaaattgtt

SEQ ID NO: 913062 - DNA, 548 bp, Homo sapiens
catgcataccttgctccatcctgaaggaatggtctacatttacctggctccatcctgaaggaatggtccttgcttacctgggcccatcctgaagaaacagtccatgcttacctggctgtattctgaaggaatggtccctgcctacctgattccatcgtgaaggaatggtccacacttatgtgactccatcctgaaggaatggtccatgcttacctgggcccatcctgaagaaacagtccatgcttacctggctgtattctgaaggaatggtccacaattacctgactccatcctgaaggaatgttccatgcttacctgggcccatcctgaagaaacactccatgcttacctggctgtattctgaaggaatggtccacacttacctggctccatcctgaaggaatggtccatgcttacctgggcccatcctgaagaaacagtccatgsttacctttatccatcctgaaggaatggtccccacttacctgactacatcctgaaggaatggtccatgattaactgggcccatcctgaagaaactgtgcatg

SEQ ID NO: 913063 - DNA, 548 bp, Homo sapiens
catgcataccttgctccatcctgaaggaatggtctacatttacctggctccatcctgaaggaatggtccttgcttacctgggcccatcctgaagaaacagtccatgcttacctggctgtattctgaaggaatggtccctgcctacctgattccatcgtgaaggaatggtccacacttatgtgactccatcctgaaggaatggtccatgcttacctgggcccatcctgaagaaacagtccatgcttacctggctgtattctgaaggaatggtccacaattacctgactccatcctgaaggaatgttccatgcttacctgggcccatcctgaagaaacactccatgcttacctggctgtattctgaaggaatggtccacacttacctggctccatcctgaaggaatggtccatgcttacctgggcccatcctgaagaaacagtccatggttaccttkatccatcctgaaggaatggtccccacttacctgactacatcctgaaggaatggtccatgattaactgggcccatcctgaagaaactgtgcatg

SEQ ID NO: 913064 - DNA, 654 bp, Homo sapiens
aagaaacagtccatggttacctttatccatcctgaaggaatggtccccacttacctgactacatcctgaaggaatggtccatgattaactgggcccatcctgaagaaacwgtgcatgcttacctggctgtattctgaaggaatggtccctgcttacctgattccatcctgaaggaatggtccacacttacgtgactccatcctgaaggaatggtccatgcttacctgggcccatcctgaagaaacagtccatgcttacctggctgtattctgaagaaatggtccacacttacctggctccatcctgaaggaatggtccatgcttacctgggcccatcctgaagaaacagtccatgcttacctggctgtattctgaaggaatggtccacacttacctggctccatcctgaaggaatggtccatgcttacctgggcccatcctgaagaaacagtccatgcttaccttgctccatcctgaaggaatggtccacacttacctgactccactctgaaggaatggtccatgcttacctgggcccatcctgaagaaacagtccatgcttacctggctgtattctgaagaaatgttccacacttacctggctccatcctgaaggaatggtccgtgcttacctgggcccatcttgaagaaaca

SEQ ID NO: 913065 - DNA, 654 bp, Homo sapiens
aagaaacagtccatggttacctttatccatcctgaaggaatggtccccacttacctgactacatcctgaaggaatggtccatgattaactgggcccatcctgaagaaactgtgcatgcttacctggctgtattctgaaggaatggtccctgcttacctgattccatcctgaaggaatggtccacacttacgtgactccatcctgaaggaatggtccatgcttacctgggcccatcctgaagaaacagtccatgcttacctggctgtattctgaagaaatggtccacacttacctggctccatcctgaaggaatggtccatgcttacctgggcccatcctgaagaaacagtccatgcttacctggctgtattctgaaggaatggtccacacttacctggctccatcctgaaggaatggtccatgcttacctgggcccatcctgaagaaacagtccatgcttaccttgctccatcctgaaggaatggtccacacttacctgactccactctgaaggaatggtccatgcttacctgggcccatcctgaagaaacagtccatgcttacctggctgtattctgaagaaatgktccacacttacctggctccatcctgaaggaatggtccgtgcttacctgggcccatcttgaagaaaca

SEQ ID NO: 913066 - DNA, 517 bp, Homo sapiens
tacctgggcccatcatgaagtaacagtccatgcttacctggctgtattytgaaggaatggtccacacttacctggctccatcctgaaggaatggtccatgcttacctgggcccatcctgaagaaacagtccatgcttaccttgctccatcctgaaggaatggtccacacttacctgactccactctgaaggaatggtccatgcttacctgggcccatcctgaacaaacagtccatgcttacctggctgtattctgaagaaatggtccacacttacctggctccatcctgaaggaatggtccgtgcttacctgggcccatcctgaagaaagagtccatgcttaccttgctccattctgaaggaatggtccatacttacctgaatccatcctgaaggaatggtccatgcttacatgggcccatcctgaagaaacagtccatgcttaccttgctccatcctgaaggaatggtccacatttacctggctccatcctgaaggaatggtccttgcttacctgg

SEQ ID NO: 913067 - DNA, 548 bp, Homo sapiens
catgcataccttgctccatcctgaaggaatgrtctacatttacctggctccatcctgaaggaatggtccttgcttacctgggcccatcctgaagaaacagtccatgcttacctggctgtattctgaaggaatggtccctgcctacctgattccatcgtgaaggaatggtccacacttatgtgactccatcctgaaggaatggtccatgcttacctgggcccatcctgaagaaacagtccatgcttacctggctgtattctgaaggaatggtccacaattacctgactccatcctgaaggaatgttccatgcttacctgggcccatcctgaagaaacactccatgcttacctggctgtattctgaaggaatggtccacacttacctggctccatcctgaaggaatggtccatgcttacctgggcccatcctgaagaaacagtccatggttacctttatccatcctgaaggaatggtccccacttacctgactacatcctgaaggaatggtccatgattaactgggcccatcctgaagaaactgtgcatg

SEQ ID NO: 913068 - DNA, 548 bp, Homo sapiens
catgcataccttgctccatcctgaaggaatggtctacatttacctggctccatcctgaaggaatggtccttgcttacctgggcccatcctgaagaaacagtmcatgcttacctggctgtattctgaaggaatggtccctgcctacctgattccatcgtgaaggaatggtccacacttatgtgactccatcctgaaggaatggtccatgcttacctgggcccatcctgaagaaacagtccatgcttacctggctgtattctgaaggaatggtccacaattacctgactccatcctgaaggaatgttccatgcttacctgggcccatcctgaagaaacactccatgcttacctggctgtattctgaaggaatggtccacacttacctggctccatcctgaaggaatggtccatgcttacctgggcccatcctgaagaaacagtccatggttacctttatccatcctgaaggaatggtccccacttacctgactacatcctgaaggaatggtccatgattaactgggcccatcctgaagaaactgtgcatg

SEQ ID NO: 913069 - DNA, 605 bp, Homo sapiens
  misc_feature 581: n = A,T,C or G
ctaaaaatacaaaaaatagccgggcgtggtggcgggcacctgtaatcccagttacttgggaggttgagggaggagaattgcttgaacccaggaggcagaggttgcagtgagctgagaytgcgccactgcactccagcctgggctacaagagcaaaactccatctcaaaaaaaaaaacaaaaaacaacaacaaaaaaatctctttatatcacaaagccaggacttgatatctgccacattcacatagcaacagcatatattaccattttatattacatattaagtatgttaaaataccagttaaccatcattaaactgtattctaaaacttgacattcattactttgtgtaatcttcacaacaattctgagataggtactattactatctcccatttagagtcagataatgaggccaaacagttaccaaaggagagaggctgggattcaaatctacgtactctcctctccaggagagtcagacaaaccttttctgtaaaaggccagataataaatatttcaggtgttgcagaccatatacaatctctgtccccacttcacgaaaaaccacccttagatcttnagacttacaaaaacagaccagtca

SEQ ID NO: 913070 - DNA, 514 bp, Homo sapiens
actgtcaaaatgaccaggcaaaatttttcaactgaattcaactgaaatatataataattgaacctgtaaacttaatgaaatgctaaacaatatcatgtattgttgtagaaaaaataaactagaatstaaaaataaataagtgacacagataaaatgatagaaaatataaaaaagatagaagaaaaggattaaagaatgaaaatatctaatatgcttataaatggatttctagaataataaaacaggaataatggaacaaaggcaatatttgaagagataatgactattttccacaatcgatgtaaggcatgaattatcagtttcacaaagcccagtgaatctcaagtagaataaatagaaggcaacctatagttagacacattattataaaactgcaagaccaaagacaagaaaattattttaaaagcaaccaaggaaaaaggggaaactacttacaaatgccaaaaataaggttacaaactgacttttgacagcaacaatacgaaacagaaaa

SEQ ID NO: 913071 - DNA, 594 bp, Homo sapiens
cagagctgtcaatggatatcagtgagaatggaatgaattattcactgagacaatcagctatccataaggaaaaagaaaaacaagttgtatccttaacttcacaccatgaaaaattgcttattttgtagcttctactacttctgagaggctttttccttcacagtgaccaatgggacaatgacaaatgtctttacttttattcaagataagaggttttcctagagagtcatagtggaagcacgctaaataaactgaagctactaaagagtagtaagctttttagtagacagcagttggttgtcacataaagggcatttacaaatacaggattcaattccctggtgattgtaatattttggaacgctggtcacttctaagtacatggcctttcctttaaggaaagcttaagtggtaatgttgctggtttaccaagtgaattctggcaagtcttacaagtatatttgtaaactgtaattatattattraatgtgaagctgtacaattcgctgctttgaaaataatacttaggtaaaaagctatcctctcttcttctactaagtattggctggaattggaggagtgattttttttctt

SEQ ID NO: 913072 - DNA, 526 bp, Homo sapiens
tgatctaggtcataagggcattcccaaccccctacaaaatagatgctgttattatgcctataacatgcagcttccgcatagccaggatctttaaaatgcaaacctgtaggctgcacaccagacctacttcagaaactctgggagtagggcccaaagatccgtttttaaacggtactttggatgcttctgttgtatgctcgtgtttaaaaacccactccactacactgtaccatgatagtctctgccctgtagggatgttgtgaggattaaaaagataatccatagaaagtatttagtgctgtgtctaacacacaataagtgatcaatagctgttagctaataatatattattttaggttacctgaattagaactaaatctcctcttgcaaagacacaaccaagtcatctcttcttcagcttcacatgttttaagaaataataataataataataawaatatgaatgccatagacttagctcacaatctccttcttttctttttcaaacatcaatcataattcactg

SEQ ID NO: 913073 - DNA, 598 bp, Homo sapiens
gggtaactcagtttattaaaatgttctggagttcatgtctgttaactcagtgctatgccacccatatgcctgccttttggtctgtgctgcagtctaacatctgatttgctmgagtccaggagtaagagtcagtatgcaatgggagaccttgttaagaacccagaatggtgggtatcagttcattgtttggcccacagattgttagctgaagctcagatgcttgctcccatctggcagttggtatttgttgtatcaacacagctataacttacccactgaaacaaagttgctggatctaattctcctaaggtacccaagaacctcaaggccacttacaaatagacatcctgtgcatcattttaagggagctttgacttacagctcttctattcattgacttacagctcttctattctctgtttcacatgtgtttttgttagtcaactcagcaaaaaagaaaaaaaaatcctaggaaacttccagcaagtaagacttgagtatttataggaagaatccattcggcattaccaccatcaaaaattccagggagctgttaggggaagacagatgagcaagaagcaaaagtctgctaaagggc

SEQ ID NO: 913074 - DNA, 386 bp, Homo sapiens
atctaaggtctgtggaccttatctcakccactgctagttgtcactggagaaaccatgccagaatgaaggacaagatgaggtcaggaacctcccaaatgattagaagcataaggtcagctctcaggtctcaagagaactgctgtaaatgatgagtgacttatagccactgacttggataaaaagaaaattggctggcttccccctctgctaatcagtgagcctatgtgtcaggagctgcctggaaaaagggtggtgaatggggaagagagttgcagagaccgtctctaaggagaggggcaacagataatccacgcttctgagggtctcttactttacacatctcccaaagtctttgcctctcaccagaaatctagcttttgttcttc

SEQ ID NO: 913075 - DNA, 386 bp, Homo sapiens
atctaaggtctgtggaccttatctcagccactgctagttgtcactggagaaaccatgccagaatgaaggacaagatgaggtcaggaacctcccaaatgattagaagcataaggtcagctctcargtctcaagagaactgctgtaaatgatgagtgacttatagccactgacttggataaaaagaaaattggctggcttccccctctgctaatcagtgagcctatgtgtcaggagctgcctggaaaaagggtggtgaatggggaagagagttgcagagaccgtctctaaggagaggggcaacagataatccacgcttctgagggtctcttactttacacatctcccaaagtctttgcctctcaccagaaatctagcttttgttcttc

SEQ ID NO: 913076 - DNA, 635 bp, Homo sapiens
acggagggtaggggcaaaggaatttgagtttaggacatccttttaaatgttgtgagtttggacatcctttttaaaygctgtggagcagggtaaaacctgctgtctccgcgacgttgggggttatccgaaggagacctttgctgtgtatttgtactgaaccatcattttctttatttttaaagaaaagtagaatgcacacatgtaatacaatagaaagtaaaccttattggccatgcctgtaaacagagaccatctgaaagaaactatgtttttgattaccctgtatatttccagctcaccttgatattctacagacctttgatttcagtttggatcccttgggcttctggcttctaaatttttatttgcattttctttgttagataagtgagaaccaaacccagtgaggtatatgaacaagccatttcacctttagggttttgggatgaggagtaaaaatgctgagtgggttaatcttgcctgaaggacccaagcttatgcttcaaatttattgagattccacaaatcactcacagaaacttaaacaactgggaacggatcccagagatgcagagttggaggagtggcagggagcagagcacggtcatttaaggatgttgggtatgtggccaggt

SEQ ID NO: 913077 - DNA, 663 bp, Homo sapiens
acctctctgaacggcagtttatttctctaaaaaatgaggggattcaattaagaaatctctcttgagcatgaatttctgtatctattaaaaaaggagcaatgaatacttgctaagtatacatggatctaactacrctgttgtttcatgtttcattgttttgtgaaaatggagaaaagaagcagtgtagtggattttttttacacaaatagaaatttgttataaatttaaaaattcttttaaataggtggtcgttggcaaacctttacaaaataaaaggcatcagtgtgtctttctttggtggatttttgtgaagcaagtaggtaatttcccgcataaaattaagatgctagctcttttatttagacccgggtttctcaacctcagcactactgacattttgggccaaatcattcttttgatgtggacgctgtcctatgcattgtaggctatttagcagcattcctgggcctgctacaagcacatccccttcctgctatgacaaccagactactgtgacaaccaaatacatctccagacattgccaaattcccagggagtagggtgaaataaatacaccccctggttgagaacctgctttaggcacatgtatgtgttaattttaatggaatgcttctgtgctcctaatcaatgtatttttattgt

SEQ ID NO: 913078 - DNA, 636 bp, Homo sapiens
agattcttcctcctacctctatctgtgctgtgaaaagaagaattagcccgtaaatcccagacatactgatacttggatagttagcccatgaagaatgtcatttactcagcctcttgtatgatccttctttggkgataacttttataatgctatggaaaggctctggctatacttgttacagtcctcacacatccatcaagagatgagaggtagagtgaggggaacatgcgcagaaaggaggagacatcgctgggaattacagatatttccaacacgatcaattaatcagatggctttttcagataattgctcacaaatctttatactacgaggaaggatttctgggctccattcatatcactgtgagtggcagttggaaaaggagcatccagagctaactgaatttagctagaagacagatcttactggtattatggagggacttaactccttggaagaatcttaacaatgtcttagggtttgttaatttaattttagttgacttaattttctactaagagtatagtgttctgttttcagcaatagtaagaaagaatgtcttgtggaagcaatttcatggttgcctttcatgtaaattttagaagcctaaaagcacaggcgatcaatctctagtct

SEQ ID NO: 913079 - DNA, 562 bp, Homo sapiens
cataaatgatatggatataagagactttccccacatgcctcattactttgatatttatagtcagcaatgcggtttgaaaccactgacattcatcgaaatgtcatattttagttgacttgaaagctcttttagcttctgttgtttgaaagtttagtctatggtaaaatttctgctatagacacaattcaaatccacattcacacggaggtcccctcacctcctcatctttattttttatttttatttatttatatttttgagacagagtcttgctctgtcacccaggttggagtgcagtggcgggatctcggctcactgcaagctccgcctcccgggttcacgccattctcctgctcagcctcccaagtagctgggactacaggtgcccgccaccacgcctggctaattttttgtattattagtagagatgtggtttcaccgtgttagccaggatggtctcgatctcctgaccttgtgatctgcccgccccggcctcccaaagtgctgggattacaygcgtgagccaccgcgcccggcccacctcctcatctttagattaaaa

SEQ ID NO: 913080 - DNA, 654 bp, Homo sapiens
aaggaaacaagagtcaaaggcacgatattcataaaacacttggaatctataacccactaaaattcaggctaccagccaaatattayaacatcttcaaacatcaggtaacttaaggtgtatgatttgaaactgataacacataatttccaaagagctctgtataggtaaacagtggtgatgcagtgagctatttgtgtcgagtatttatttctttgctgtctaattgctccaactccctagacgttaggagtctatcacctgctgttcctcagctgctaagatcagagaatataacacagatggagtgagctatgttctcacggctgctgcttcacagagataaggctgcaggttggagaagtgctcagctctgccttcctctgaaagagcctgaacagctatcaataattcccagttactcctctaccgttatgttaaacaacactgccttgcatacacaggtgcaattagataaaagagagttgtttaaatcacttgaaatgcctgtagctttattattgcagatctttgtgttgtctctcgtcttttctttttttaaaaaacctctttttcctgcccactccctcccccaggtctactgccaaactgcaatgatttaagaacctggttaaaatattgggtcacatttcttca

SEQ ID NO: 913081 - DNA, 668 bp, Homo sapiens
cagggactatcacagaagaggtgggcatgtaaaattgtaagggtcaattktgaggggtaaaattagatcagagcttttctataaagtaaatattaatatcaaaagcacactgatgcaaagccagtgttggagcccatatgtcagaataacagggttttcttgaagcactgatctactctttaatagcaagttgtaaaagtttataaaaggtttatggaaatcttaccttatggtcaaactgattaaaattagataagttgtttataagattttattaaaattagctttaacattaataatacactatacaaaggtacaatttggttttcttttctgaaaaaaatttttatgtaagggataataagagatttttgtttaccttatgagtaaaattcaggggagaaaagaggatgggggagaaaaagatttatttggcctcatgctatctttattagatcttattgtttgggaaattgagtctactcactatcaaagggtaaatgtcttcatattatcatcttggctaaatgaatgactattttagaataacttgtgattctattttgtgatatcaagtatcttaaaactttaatatttgacatattttccagcagcaaaatattagttttaaattcagtctttttgacctcaaagtaactgtttttgga

SEQ ID NO: 913082 - DNA, 640 bp, Homo sapiens
atcaagtgcagatggatcaaaagtctgcaaaatatctcaatcactgatctaaggagcagtttagggagggttagactcttgtaacctccagcttcatgacttttaatgcataatttctaactcatggctaatgttagtactacaaaggcagtctagtccccaggcaagaaagaggtctgctttggaaaagggctgtcattgtctttgttttaaactataaactaagtttctcccaaagttagttcagcctatacccaggaataaacaaggacagcttggaggttagaagcaagatggagtcagttaagttagatctctttctctgtctcagtcataattttgcaaaggtggtttcaaaagtagatgaaaattcctgataaattggatttaagtttaggggaaagagaagtcaaggttgacgactaggtttttagtccaagcaacctagtgaaggtggtacctctactaaaacggggaagaggggccagaagagctttttgagaaacaatcttttggtcatattaatattgagaactctatataaatcgaattatcacttaaactgtggtgactctggtactagagctcaggagagaaattastgttgaaatacaaaattttggattcaaaagcacactga

SEQ ID NO: 913083 - DNA, 635 bp, Homo sapiens
ctaaatttttttcaaagttttcaacttctttgcctttggtttgaatttcctcctgtagctcggagtastttgatcctctgaagccttcttctctcagctcgtcaaagtcattctccgtccagttttgttccgttgctggtgaggagctgtgttcctttggaggaggagaggcgctctggtttttagagtttccagtttttctactctgttttttccccatctttgtggttttatctacttttggtctttgatgatggtgatgtacagatgggtttttggtgtggatgtcctttctgtttgttagttttccttctaacagacaggaccctcagctgcaggtctgttggagtttgctagaggtccactccagaccctgtttgcctgggtaccagcagcggtggctgcagaacagcggattttcatgaaccacgaatgctgctgtctgatcattcctctggaagttttgtctcagaggagtacccagccgtgtgaggtgtcagtctgcccctactggggggtgcctcccagttaggctgcttgggggtcaggggtcagggacccacttgaggaggcagtctgcccattctcagatctccagctgcgtggtgagagaaccactgctctcttcaaagctg

SEQ ID NO: 913084 - DNA, 687 bp, Homo sapiens
tacacatcctcacctctcccccacyccctgaactgaacctcttcctggacctggaaatctttcccatctaaactgaaacactatggctactagataaccattaagggatctgtgtccattttcatgatcagacataaaaatttcaagtgcgtgccttgctcctcaaacaattttcttccaatgaaacaattttcttcctatgaaggctgtgtcatgatgattaaggaagataacacgtgtgagatggtacctagaacagcactggttaagtatcattatcatattcttattatagagctgctaaacaccttccaattcaccttggagttcaaggtctcataagtacaaggaatattatatttaggaaataattcttttaaccaccttgaataactcactgactagtttttgccttctattatctttcttatttaatatctgaattactgggagaagcaacacacaaaataatttatgtgtgttgaaggtgagggtggaggccccaatcattccccaaagatgtcaaagaaaatgagaaataataggaagctaagtctgcacaaaactttctgtgtatgcacaatacccatttcaactaaatgtgtgaaacgtacattagctaagccacttactgaggatgaatacccaacaagctgagaggtaattactccggtggctctgactcat

SEQ ID NO: 913085 - DNA, 648 bp, Homo sapiens
ggcgattatgtttcaacacataaatttggggggattcattcagaccatagcaattgtatactcaaaatttgctwagagagtaaatcttaaatattctcaccacacacagaaaaataagttatctatttgaagtgatggatatgttaattagctctatcgtggtaatcatttcacagtgtttaggtatatcaagatatcacattgtacaccataaatataatcaatttcccttgttaattatacctcaataaatgtggaaaaactaaaaataataagcatatatcaagtttacaacaatgcaataatttgtattaagaaatgaaagaaacttgggtgtggtggctcatgcctgtaatctcagcacattgggaagctgaggcaagcggatcacttgaagtcaggtgttcaagaccagcatgaccaacacagtgaaacctctgtctctattaaaaatacaaaaaatagctgggcatggtggcacaagcctgtaaacccagctgctcggaggctgaggcatgagaatcgcttgaacccgggaggcagaggttgcagtgagcctagatcacgccactgcactccagcctgggagacagagtgagactctgtcaaaaaaaagaaaaaaaaggaggggagacagattcgaaatgg

SEQ ID NO: 913086 - DNA, 648 bp, Homo sapiens
ggcgattatgtttcaacacataaatttggggggattcattcagaccatagcaattgtatactcaaaatttgcttagagagtmaatcttaaatattctcaccacacacagaaaaataagttatctatttgaagtgatggatatgttaattagctctatcgtggtaatcatttcacagtgtttaggtatatcaagatatcacattgtacaccataaatataatcaatttcccttgttaattatacctcaataaatgtggaaaaactaaaaataataagcatatatcaagtttacaacaatgcaataatttgtattaagaaatgaaagaaacttgggtgtggtggctcatgcctgtaatctcagcacattgggaagctgaggcaagcggatcacttgaagtcaggtgttcaagaccagcatgaccaacacagtgaaacctctgtctctattaaaaatacaaaaaatagctgggcatggtggcacaagcctgtaaacccagctgctcggaggctgaggcatgagaatcgcttgaacccgggaggcagaggttgcagtgagcctagatcacgccactgcactccagcctgggagacagagtgagactctgtcaaaaaaaagaaaaaaaaggaggggagacagattcgaaatgg

SEQ ID NO: 913087 - DNA, 683 bp, Homo sapiens
atagccttcagttttgctctgatcttagttatttcttgtcttctgctagcttctgaatttgtttgctcttgcttctctagttcttttaattgtgttgttagggtgtcgactttagatctttctgctttctcctgtgggcatttagtgctataaatttcctgctaaacatggctttagctgtgtcccacagattctggtacattgtgtctttgttctcattggtttcaaagaacttacttagctctgccttattttcattatttacccaatagtcattcaggagtgggtttttcagtttccatgcagttgtgtggttttgagtgagtttcttaatcctgagttctaatttgattacactgtggtctgagagactgtttgttatgatttccattcttttgcatttgctgaggagtgttttacttccaattatgcggtcaattttagaataagtgctatgtggtattgagaagaatgcatattgtgttgatttggggtggagagttctgtagatgtctattaggtctgcttggtccagagctgagttcaagtcctgaatagtcttsttaattttctgtctcattgatccgtctaatattgacagtggggtgttaaagtttcccactatgattgtgtggaagtctaagtctctttgtaggtctctaagaacttgctttatgaatctg

SEQ ID NO: 913088 - DNA, 593 bp, Homo sapiens
ggaaactgcggggagtgcagtctgttctagtcttggtctcacagcagaccctaccagggcattagatattgccctaggtatgcatggaaacaccgaggttccctgcccctccttggctggctggcatctgcatccacatcagcccaaactcaggccaagggtggggtgcagctcagaattaaactctcaaaatcacaccttgggcctgcaaccagctggggagggatgctgcttaggcaggcagtgtaggcaagacattgtgggtattgtgatctgatcacatctcagtctcacagcagcccattgcagggcagtgagtattgtcctagatatgtgtgtagtagcctggtttccctctcagtccttggctgggcaattgctgcagtcatgtcaacctgaactgagtccaaggcagagttcagattagcattaatctctcaaatgatgccttgagcctgcggctagagagggtgaggcaccacctaggcaagcagtatatggaagaarctgtgggtagcatggttgcttacatctcagtctcaacagcagctcagcaggatggcaagtatccacccagggctgcgtggatgtgt

SEQ ID NO: 913089 - DNA, 587 bp, Homo sapiens
agtatggccattttcatgatattgattcttcctatctgtgaggatggaatgcttttccatttgtgtcctctcttacttccttgagcaatggtttgtagttttctttgaagagctccttcacattccttattagctacattccttggtattttattctctttgtagtgattgtgaatgggatttcattcatgatttcgctctctgctcgcctattgttggtgtaaagaaatgcttgtgatttttgcactttgattttgtatcctgagactttgctgaaataacttaccagttcaagaagtttttgggctgagatgatggggttttgttaatataaaatcatgtcatcgcaaaaagagacaccttgacttcctctcttcctgtttgaacatgctttatttctttctcttgcccaattgccctggccacaacttccaatattatattgaataggagcggtgagagaggrcccccttgtcttgtactggttttcaaagggtatgcttccagctttttgcccattcaatatgatattggctgtgggtttgtcacaaacagttcttattattttgagatatgttccatctata

SEQ ID NO: 913090 - DNA, 577 bp, Homo sapiens
ttacattggacaaatcactttttccctgagcctgttttctcctgtctaaaagagagatgccacctgyaccctcacttccctcccccgccttccttccatcctttctttcttcatccaagcattagttgagctcctggcaaatactggcctggtggcccagacatgagttactctgtcttctggatagcttccacacccccaccaactttattggatcattgtgggggaataaatgataagacagaggtgatgctgttctttttaagaaggtacttcccaggcatgaggcatgattgatctttttacagcattcctgatctaaaggcaggatttcctttagtagcatccagtgtaactattgcctatctgttgggcagccctggaacaatcctgcgttttgtctgggggaagctgaacaggctcctatgtttgtctgctggccccatgtgtgggcacagacccagccctggcatctggtggagtcaccctggttaccccacccgcccccactctccccagtggaatacacacagcaggcaggcgagcctgggagtgtccaggcttcctagagcctcag

SEQ ID NO: 913091 - DNA, 681 bp, Homo sapiens
tttttaaaaatataatttcaacttttattttaaatacagggggaacatgtacaggtttgttacacaggtatacttgcatgatgctgaggtttggagtatggatcctgtcacccaggtagtgaacatagtacccaacaggtaatttttcaatccacacccccatctccccctctcatagtacccagtgtctatggtttccatctttatgtccatgtgtactaatgtttagctccctgttacaggtgagaacatgcagtagttggttttctgttcctgtgttaatttgcttaggattatggcctccagctacttccatgttggtgcaaagaacgtaatcttgttcttttttatggccgtgtagtattccctggggtatatgtgccacattttctttatccaatccactgttgatgggcacctaggttggttccatgtctttgttattgtgaatagtgctgcaatgaacatatgaatgcatgtgtctttataatagaacaatttatattcctttggatatatacccagtagtgggattaccaggtcaaatggtasttctaagttccttgagaaatctccaaactgctttccacagtggctgaattaatttacattcctatcaacagtgtatatgtgttccccttttctgtgcagccttgccagcatctgttttatttgactatt

SEQ ID NO: 913092 - DNA, 596 bp, Homo sapiens
tatatctgcgattttttctttagatattacatatgtaaacaaaatatcacaaaacattaagattcattggggtggcatgagggtacctgarcattcattactttagcctcattattatacttttttgtagaagggaaatattttatttgaaaataaatttccaaaattcaaaagaagccatttatttagcataagtgttcagagcactggttctggagttaggtttcttgggttatttcctaacttctcaactacagctgaccattgaaaaacataggaagttagaggcaccaatcccttatacagtcaaaaatccacatataacttttgactccctgagaacttaactatgaatagcccactgttgaacagaagccttgttagtaacataaacagtcaattaacacatattttctatgctatatgtattatatgctgtatccttcaatagagtaactaagaaaatattattaagaaaatcgtaagaaagagaaatatatttactattcattaagaagtggatcatcttaaaggtcctcaccctcattgtcttcacaacaagtaggctgaggaagaggaggaagaggtgggtttgg

SEQ ID NO: 913093 - DNA, 611 bp, Homo sapiens
ctaaggaagaatccatatctaattcatctttaaaatggcatctctaagcacagcgtttggcccttagcgtgcaatcagtaaagcattttgaatgaatgaatgaatggagtgacaaatggtgctttaaggcaactatttgcagaatattgccatagatgttatcaaacggaaacaaaagagacaaaccccacagttccctccccacactctccagtggcgcttcaggttggggtgcagtggagcaatcatctctcaatgcagccttgaactcctgggcttaagcaactgtcccacctcagcctccttagtagctgggactacaggtacatgcaacaatgcctggctaacttttaaattttttgtagagatgaggtattcctatgttgcccaggttggtcttgaacacctgaactcaagcaatcctcctgtcttggcctcctaaagtgttgggattgcaggtgtgagccaccatgctgagcctttttttaaatgtgaagtktctgacatagaaaataggttgggttctattttcagttggaaccaatggtctagcaaatgatgagctaaactatgggatacataggacatttggagtgtatttatgcttttgc

SEQ ID NO: 913094 - DNA, 717 bp, Homo sapiens
ctcatgctacctctgctagttaggtattaatatccccattttacagatgagaaaattgaggctcagggtttaagagacttgcccaaggtctctggattacctgaggtcagaagttcaaaaccagcctagccaacatggtgaaacccaatctctactaaaaatacaaaaattagtctggcatggtagcacattcctgtagtcccagctacttggaatgatgaggcaggagaattgcttgaactgggaggcggaggttgcagtgagccaagatcgcgccactgcactccagcctgggtgagagagtgagactctgtctcaaaaagaagaggcttgcccaaggtctcatactgagtgaagctgggattcctcctcagggcagtctgactccagacaaacttgccctcttatctactgttctacactgtggctcatgctattaggggctgagaaggctccctaaatcccagggcagggggagccacaaaatatatgaaaacatgtatctacataaaaacctgtgtatgaatgttcatagcagcattagtcatagtaactgaaaagtggaaacaaccaaaatgtccaccaactaatgatagaggaataaaatgtgraatatctatataatggaatatcatttggcaatacaaaaggaatgaagtagtgatacatgctgaaacatggatgaaccttgaaaacactatgctaactgaaagtagc

SEQ ID NO: 913095 - DNA, 629 bp, Homo sapiens
taaatgatctggaaactctctcagatgtttgccaactatatcccatgagccaatttggcccatcacctgtttttttttaataaayaaagttttattggaacatagttacatccatttgtttacgtattatcaatgactgataccttgcagtaatggcaaagctaagtagttgcaacaaagtaatagtagttacttatggcccagtaagcctgaaatatttaccatctggctctttgcagaaaaagtttgtcaagctttaactagattccagggcattgctgctcaaagtgtggtccttggaccagcagcattggcatcccttgcttatttgaaatgtagattatcaggccccaatctagacaaactaaattagaatctgcattttaacaggatccccaggtgatttagttgcacattcaatattaagaaacatttctcctgtataactaagtagctgagaactttgacttcgaggtcagagaatcctagctctgccattcactaacattgtggcctggagtaagttatattccctttctagtctcagttgttggatatatataatagggataatgatgctatatcatgggattgttttcagaaatgaaataaaatgaaacacctgaatg

SEQ ID NO: 913096 - DNA, 558 bp, Homo sapiens
aaaacctgtcccaacttttcttccccccrcaaccttttctacccaagctctcctctcacttaagcataaccaactgaacctgccctctgaagttttcattcagtaacagttgcactttttcagtagtactagcttttggttatcacataaagcacaaatggttaaaacatgccccaggaatggtttaatgtgttttttttctctctgaagtgtctcattttcctttcaattatagagggagcatacaaagaaatggcaagactttagtccccctagaaaaactgctagtggaggaattctcacctgaggtgggataaaagagaaagatgttccagggatatgctatccaatttgatagccactagtcacatgtgactactgaaaacttgaactgtggctagcctgaattaagatgtgctaagtgtaaaatatagacaggactgagtaaaaattttttatgctgattacatgttgaaattatattttaaatatattaggttaaatcaaatatattgaaactaatttcccgcccgtttctttaaaaattttttaatgtgg

SEQ ID NO: 913097 - DNA, 705 bp, Homo sapiens
tcacttctcaaatctcatgacccctcccaaatctcatgtcctcacattttgaaaccaatcatgccttcccracagtccctcaaagtcttaattcattttagcattaactcaaaagtccacagtccaaagtttcatctgagacaaagaaagtcccttccacctatgagccagtaaattaaaataaaaagcaagttaattactctctagataaaatgggggtacaggcattggataaatacagttgttccaaatgggagaaactggagaaaacaaatgggctacaggccccatgcaagtctaaaatccaacagggtggtcaaatcttaaaactccaaaatgatctcctttgactccatgtctcacatacaggtcatgctgacgcaagaagggggttcccatggtcttgggcagttctactcctgcggctttgcagggcacagccgctgctttcatgggctggtgttgaatgtctgaagcatttccagatgcatggtgcaagttgtcagtggatctaccattttgaggtctagaggatggtggtcctcttcttacaggtccactaggcagtgccccagtaggaactctgtgtagggactcacaagctgccaaggcttggggcttgcaccctctgaagccatggcctgaactctacattggcccctttcagccacggctggagcagctgggatgcagggcaccaagtcc

SEQ ID NO: 913098 - DNA, 608 bp, Homo sapiens
gtataaaatattacaaaaaagtgctgggtgaactctaaaaatagatgggcctgagattaaggaaagacaaagacaagattaattacattacagcaaatccaggcagaacaataattgatcaaagactccagatccaagttagatgttagactgtgggagaaatacatgctgggtaggattatttaattaacggaagtgaaaataggtaagactggtttgaacaaaggatgctattgacaaacttagaactgattgacttcatctctctccctatgagagactctgcaagaaaaatatctagaggcatatgttagaaaaatatgagtatggaccagaaagcaaaaggaaagtattaataaaagaaaagaagagactcaattgtggcaaacaatgctaaccccaagcctgtcagaaaagggaactttctgaaaggaagaagtatatagtagaagcaaatcttaaacattgcagaaaaagaagtgcytgacagaaacattaactgaagagcaggagcattaaaaaactgaggaaagaccatgtccttaggaggaaatggcagcagtgttcgtcctcactgggacccttagcacataagcctcagaaacaca

SEQ ID NO: 913099 - DNA, 583 bp, Homo sapiens
tgggcttttccaatggtcttagcaaacggcacaccaggagattatatcccatgcctggctcagagggtcccacacccatggagcctcactcattgttagcacagtggtctgagatagaactgcaaggtggcagcgaggctggggaaggggtgcccatcattgctcaggcttgagtaggtaaacaaagcagccaggaagctcgaactgggtggagcccaccacagctcaaggaggcctgcctgcctctgtagactccacctctgtgggcacggcacagctgaataaaaggcagcagaaacttctgcagacttaaacatccctgtctgacagctttgaagagagtagtggttctcccagcacggacaaactgcctcctcaagtgggtccctgacccctgagtagcctaactgggaggcacctcccagtaggggccaactgacacctcatacggacaggtscccctctgagatgaagcttccagaggaacgatcaggcagcaacatttgctgttctgcaatatttgtggtcctacagtgatgcccaggcaaacagggtcaggagtggaccttcagcaaactccaac

SEQ ID NO: 913100 - DNA, 593 bp, Homo sapiens
caaattcctggcagtactatgagcatttaatactcacaaatgattttctgattaaagagaattttttttttcagcccaattggagcaacacttggttacagttaggttagacctgtgatttttatgaaatgcctggttaaagtgtattgttctaactctctcacctgtatgaacctcaccccctcaatctctcccttcctttttgcatgaatcaacacaggtccctaatatgacaccatataatgtccccagccccagcctctttcatttagatcttgggtaacctcagcttattcagattagataaatagtaagtgcttggagataacaaccagaactcttcaggtcctctccataatacccactagtgatttctgtaatatcagagtttagtgcttttcccaattacaataggcttaccttgctccttgcaatttgaagtgaaatgtctgtgatttcagtatgtgcatagagcaatggacgtgtggcttaagagcacaagctacgtaawcctaggcttttctgaggattcagcagcctaaatgcatagagaatcatgagagcattactgcaggaacagagcatttccatct

SEQ ID NO: 913101 - DNA, 635 bp, Homo sapiens
atttaagtctttaacacatcttgagttaattttttatatkgtgtaagaaaggggtttaggctcaatcttcagcatatggctagccagttttcccagcaccatatattgaatagggagttcttttcttattgcttatgggaaatttgtcattttctctgaagataaaatggttataggtgtacagcattatttctgggctttctattctgttccattggtctgtgtgactgtttttgcaccattaccatgctatttgagttactgcagcctcatagcacagtttgaagtaagataatgtgatgcctccagctttattctttttgctttgtattgccttggcaattcagtcacttttttggttccatataaattttaaaatagtttttcctaattctgtgaagaacgtcattggtactttggtaggaatagcattaaatcagtaattattttgggcagtttggccattttcgcaatattgattcatcttatccatgaacatggaacatttttccatttgttggtgtcatctctgatttttttgagcagtgttttgtaattcttattgtaaaggtctttcacctccttagttagctatattcctggttattttattctttttgtggctattgtgaatg

SEQ ID NO: 913102 - DNA, 642 bp, Homo sapiens
aacaaaatgaggagtgtaggcagaactggtgtagtgcttttttaaaaggcaaggcatagattgctagctcatttttaagatgaacacactgaagctctgaaaagtcaactgacctgcccaagttcgcaaagctgaggcctgagtacagaccttttgactccaagtctagtgctctttcctctcctctgtgcttgggcacttggctagagaacagagccataaaacaaattaaagcacgaggggaaaatcttgacctacaaatgcacttttcttctgacctccaatgaaacacaagcagaaaaggaaagttgcaaaagccagattgtcttacataagcatctcatttgagataaaaccttccttgctggtatcattaatcaccttacctcttcccttcctctaggaatccctggtgacagagcaacccaagctgttttgtgtctgtattgcagctacctcaagatcaattagtatttttcacaaagctgtcatgtaggaagacgataggggatgcagacaaagtcaactgttgagaggccacagtgtgtagttgagtagttggtgaggacactgacrcggcctcctgacatcttatggtgtcagcctgagctttgaatatggccatttatgattttatggtaa

SEQ ID NO: 913103 - DNA, 439 bp, Homo sapiens
agggcaaaggggaagaacacgatggtgagtaagatgcaattccacatttcaagcagctttctttttcagcgagtgtcctcaattatttcccaatttttatcttctttctcacgggaacgaaaagcccacatctctgaggatgtatgctccaggctacacgccaggaattctggatcaccttctttttaagagtcattaaaaacagcccagctgtgccttgcagtggaaatcactagccgctgttgtcttcatgtcagtttgtcattgttaataagataacattggttttattattcttaatctaccataaaactgtatgtcaactctcctatcaggaaaaccttaccagcaatggaaacatgttaatattaatatagcattgccatttagyaacagattatgtggttgacataatatgtctgagtttctttgagggtgt

SEQ ID NO: 913104 - DNA, 553 bp, Homo sapiens
gtaggaatgactctgtttggcaagytttcgttgcagtgggcaagtgccacatataaacttcatgtggaaatatgcacaaatacctaacagcgggcattcaaacacacttgtttgaagatgctaagcttcttataatactttcttcttttgcatcataagagaaaacattcatcatgtgtcagggggcagggggtaaaaagagagagaaacacaaaatgaatcagatattctccatgtaagcattgatagtcgcttggccaacctagcaaaacattaaagcaagagcatctggtcttggttatcctctgcttttcccttgagagtcttcttccttcaacaggcatctgtttatctctgcctcccatcctccactttctaagttctccaaacatgaagctggtactgtttcctgtgttgcatttcactattgggaacctgacgttccagtttttccctccttctcacctaaactgtcctgcatttcatttcctcagagctttgctctgttctgctctgctctctccaaactgaatgattctttctggctcatgtg

SEQ ID NO: 913105 - DNA, 553 bp, Homo sapiens
gtaggaatgactctgtttggcaagctttygttgcagtgggcaagtgccacatataaacttcatgtggaaatatgcacaaatacctaacagcgggcattcaaacacacttgtttgaagatgctaagcttcttataatactttcttcttttgcatcataagagaaaacattcatcatgtgtcagggggcagggggtaaaaagagagagaaacacaaaatgaatcagatattctccatgtaagcattgatagtcgcttggccaacctagcaaaacattaaagcaagagcatctggtcttggttatcctctgcttttcccttgagagtcttcttccttcaacaggcatctgtttatctctgcctcccatcctccactttctaagttctccaaacatgaagctggtactgtttcctgtgttgcatttcactattgggaacctgacgttccagtttttccctccttctcacctaaactgtcctgcatttcatttcctcagagctttgctctgttctgctctgctctctccaaactgaatgattctttctggctcatgtg

SEQ ID NO: 913106 - DNA, 593 bp, Homo sapiens
tggaagggagcctggagagctgggtgccagccctggctctgcaccccttaccagccatgtgcaggtcatggcagtgccctgtggatcctacttcctgarcctcccctctgcaggcttgatgccactgctgtcatttcggcctctatcccacaactcgcacagggcttgcctcacctttaggcctttgcacgtgccatgccctctgcctggagtgccctgcccctattcctccactcagagctgcttcccgttccgaggaaaaatcccatgccccaggtagactgcacgcacattttcttgtgtttccacaccctgctttgcagagcagcgggcaccctggttgtagtttaagggacgcctgagagccccattgaggatggagattggtcccccttgcctggcacacgcttggtgcccagcacttgtgtgtccattgagtgagcaaataatggaatgtctggaggcatgtgacgcctctgctgtgtggcttggtttccccatctttaaaataccagatgtgggccaggcgcagtggctctcgcctataatcccagcactttgggaggctgaggcgggaggatcacctgaggttg

SEQ ID NO: 913107 - DNA, 634 bp, Homo sapiens
atttggtacagctggcaactaatcttgcacagtacctgcaaaagaaagttcactgtatcaacaaactagaggaaattggctttgagcaaccaaaacatgaaataattagaaataaaactgagatatttttccaagagtagaaaaatgagcaaagagatggagagtaaaagaaaaaaaatgaaattaggaaataaatttaggaggcctagcatctgaaaaattaagttccagagagaactgagaaaatggaagggggacacttatcaaatacttttaacaatttttgaagaacagagagcatgcactttcagattgaaattaaatgtctagagaattgattaaaaagccatatcataatggtactgagtgtctccagaagccatactagaaactagagaagacaatggagcaattaattacaatctgttttgaacctagaattctgtagttggcctaatagaaatagttgtaagagcagattggagacatttgtggatattcaaaatactcctttagccttccttacaccctttccaaggaygccactgaaagaggcactttgtcaaaatgagataatgaattaaaagaggaaaatgtattatcataaacaaggggctagaactacagctaagag

SEQ ID NO: 913108 - DNA, 604 bp, Homo sapiens
tgttactgcctttgggatgagtcagcctaatacagaaagattgtttctttctctttttaattttacttttctttctttaatttccagcctcaagggtgatgggagaagatgtaagaaaagttatagggaaaaatgcaaaccttcttggaaggccaaaaactttggagaataatttagctgaaggcagctaaattctcttaagggcaaaggttagataacaagggaatgtaaagaaacatatctagaaaaattggtttacttatgtctcaggaaaccaacctttgatcattcatgtgcaagactgctctctacttaggggtcaacaatgttaatttcccacaaattatgtttgctccaggcctttgtcttcaaatctgtactaaattaatacaaagttctctggcttagtgggactgtactctcattggtgatgctaagcagtgcagtcccctagctgcattctcaggcaaaataactgtgtctgaatactttyttcattggtcgctcagccagagtgtgcgggatggacccaacacaagagaacaaagctggggcctaatacaagtcccccagagttagagcacacagtccagaagttgggagc

SEQ ID NO: 913109 - DNA, 590 bp, Homo sapiens
atcagacaaattgtgaataatactctactattctaccacyatattagtacagatgtttactgacctccaatgattgacttaagattttcaactttacaatagtatgaaagcaatatgcatttaggggaaacggtcctttaaattttcaattttgattttttttcaggctagcaatatgcagtataatattttctcacaaggctaggcagcggtagcaagccacagctcccagtcagccatgcaatcaccagggtaaacaacagattctcaaccacgaactgtgctaccagcctgtattaggccattcttgcattgcaatgaagaaataactgagattgggtaatatataaagaaaagagttttaattggctcatggttccacaggctgtacaggaagcatgatgctggcatctgctgtttcaggggaagcatcaggaaacttacaatcatggtggaaggcaaaggtggagcctgcatgtcacgtggccagagcagcaggaagagagagaaggggaagtgccactcactttcaaacaaccagatctcacaagaactctctcaatatacaacgccaaggggggatggtgcta

SEQ ID NO: 913110 - DNA, 592 bp, Homo sapiens
actctttcatgttaaaaaacactcaataaactaggtattgattgaacacatctcaaaataataagagctatttatgacaaacccatagccaatatcatactgactgggcaaaagctggaaacattccctttgaaaaccggcacaatgcaagaatgccctcttcaccactcctatttaacataatattggaaattctggccagggcaatcaggcaggagaaagaaataaagggtatgaagataggaagagaagatgtcaaattgtcctgtttgcagatgacatgattgtatatttagaaaaccccatcgtctcagcccaaaaactccttaagctgataagactttctttgtcttagtaccagctcctctttgtaaataacaaaatttttcatttccagatgtctatttcattctttttcatagctatatgttcttttaaaatttctacatgttgttccrtaattcatcatttattaaaaatggatgccattcatttatctttttaggaccctaaacacttacattcaaatctgtgttaggtcataataattttccctgagatgaattcatatgatgggccattttggtggtat

SEQ ID NO: 913111 - DNA, 555 bp, Homo sapiens
gaacaagtctcatgagatccgatggttttataaatggcagttctccttcacatgctgtcttgtctgctgccctgtaagacatgccttgctcctcttttgtcttctgccatgattgtgagacctccctagctatatggaattaaacctctttcctttataaattacccattctcaggtatatctttattagcagcatgagaatgaataatacaataaattggtactgggtagtggggcactgctataaagataccccaaaatgtggaagtaactttggaactgggtaacagggagaggttggaaaagtttggagggctcagaagaagataggaaaatgtgggaaaccttggaacttcctagagaatagctttgaccaaaatgctgatagtgatatggataataaggtccaggctgaggtggtcttagatggagatgaggaactttctgggagctggagcaaaggtcactcttgctatgcaaagagactggtggcaktttgcccctgccctagaaatctgtggaacttttgaacttgatttagggtatgattagggt

SEQ ID NO: 913112 - DNA, 652 bp, Homo sapiens
cttagggaggaatactgtctttatactgggcaggattcttccaaattcattctctcattacaacatgagatttggataaactgcatttacttaatgggctcaaattttaaatatttagtttgtgaactaratgactgtggaaggtcaacttatatattctggaagatagagaaggccttgtttgaacaaacctagaatgtgcaaatttgtttgtcaatatagccaaaatctccttcaaataatgggagtttaagagtttatgaatcaacctgaacagcttgctgatgatcatttaatagactgtgtgggaaattgagtttacttcaaatttatgaactgatggagctattccctataatgattaacaatgagtcatagaagaaaccaagggtcattctcaggcacatgcgcctaatgtcaggtgtggagagagtgagaacagttgtagaagagggaaaggtctcatgacatctgttagctaattttcatttttaaagtgaagacacagactggaaaaattttaaggtgaacttagtacctaaaacatctccaaaatgggtgctttgtgaaaagcctgggtcaaaatccccgaaagattattattaatgtaagaaagcaataactcagaggaagctgtaataatatcacaata

SEQ ID NO: 913113 - DNA, 613 bp, Homo sapiens
tcagggaataagactttcatcatgtcctcagaaaggtaatttcagtctaatagatttcattaaactctgcattttaggttgaaagcatttctaaatgcattgctatggagtaaaacacaacatagtaaaaatgttcccaagttccttgtccttacttggcgtagtctcattatttcagttatattcctttggaccaccctaaagtattgtgctcttctttcatgtttacatcctttcgacaatttaaattcatttaataaaatctacaggagggagagacctttcttgttaacatattaacttctggggaatgtctgctttcatataattatgcatagacttcatattcatataaatattttttgcctgcaggggggtaaaatggatctctctcatgaatattcaacagtgccatttcttctagcaagacacagacatctttcttcatggttattaagcactaggatgtctatatatattttctccttcatgttgtgtttgcataaaastgatgagatacaggaactgccaaagcagacatttattattccaggtacctcaatattatagggccttcatccaaataactcaataatatttttcagattcaaat

SEQ ID NO: 913114 - DNA, 612 bp, Homo sapiens
aaaaagtgtggataaaaataaataacacatgaggagarggagaaatagtagtttggagtaaaagaataaataattgggttatgcaaccagagaaatccaacattatgaagctcagagcaagagaataatattgtatttcagcacaattataccagatgtccaagaaaatgaagctatatgtttgccaaggcctagtttttggaaactggcaaggttgaacagcagtctacaaacctgactgacatcactaagagacattctggtcatacgatatgatgggaaactggacaagctgttaataactaaatgaaactttaataatatgccaatgccttggactcctacttctcaggctacctgtacctcaaaaggtagacattatttgggagggaatttctgagaacttcttcctactgggacttcaaactctgtgatgttgtagctcccaacagactgatcgctgtgtaaccaaatgcctagaaatgtatctgattaaaatgggcaaatcgtaacagcagccagcccaacatgtcactgtgtgctatgcacaaatgtacatcatccttgttttgtagatgtaaaactaccaagtaaaatagagaaatacaatgg

SEQ ID NO: 913115 - DNA, 576 bp, Homo sapiens
ttttgaatatagcagggtctgagaatccttgctttgtgggttactgttaaggcaatgtttctaatattttatcacaaagtaggatatgtgctgtgtgtttttgttaaatatttcttattagtacaaggcagttamctttaataagtgttttattagaattttggggtgggtgaggcagctgaagtctgtaatcccagcactttgggaggttaggtagaagaatcacttgagcccaggagttccagaccaccctagacaacattgtaaatccccatctctaccaaaaaaaaaaaaaaaaaaaaaaaaaagccagaagtggaggcacacacctgtagtcccagctactcaggaggccaaagcaggattacttgagcctgagaggtcaagactgcagtgagcctggataacagagaaagaacaagaaaaataaaagatagacctggcccatgtttttaaaattaattttttaaataacttaaaaataaaaaagaattttgtttgtttcaattatgaatgattgttaaatcacaaaacaaaagtctgtagctcttcagatggtacagctttctcctttaa

SEQ ID NO: 913116 - DNA, 633 bp, Homo sapiens
taactggtggtattttctctttgggtattgctctgcacctataaattatttggtagcaattatctcttaaaatgtatccaaatgcttttcacttgcttcctgaattccaagtaagccttyggttgagatattcctaagaacttattttaatgttctttttgtttcttcctctgacagagggatatatgggtgatttttttggcttgcagtatgtgtaatttgaagagtgctgggagcttccctgaccaaaaataactccatctgtatacaatttgatcatatctcattccttgcagatttaaaaaaaatgagtataaaattctaaacttcctgataacatcagatttatcaggtaagctgttaaaatcacaatttaaatgaatcagatttgtggggagttggaaaccaggttaggtactgtaaatctttggtgtgtgggccacagacattactgcttctataaacagatgaatctgtaagagtcaatgggctgaaataagaagaatgaatgggagttttctcagcagtgagtcctgtctttgattttcaatgtgtctcttatcaactttgtttctatagattcttcacttctctaaccccaaggttccttcactgcaaaaaggatgctattct

SEQ ID NO: 913117 - DNA, 307 bp, Homo sapiens
ttttttatctaagcatttgtagaaaattgactagttgtttactattctctcattcccttttgyttttaaatttttcacctaaccttgccatggaactaaattatagcaactggaatattgatgggaatgatatatgcaactccaaactctgcccctaaaaacatccagtgcaattctccctatattctcactcttttcttttttatcaacaagatgctgaaaacataatgccagccttaaaaacttgagggatggcagaacaattagatggaagaaactggggtttctgaatgactatgtgagcaga

SEQ ID NO: 913118 - DNA, 307 bp, Homo sapiens
ttttttatctaagcatttgtagaaaattgactagttgtttactattctctcattcccttttgcttttaaatttttcacctaaccttgccatggaactaaattatagcaactggaatattgatgggaatgatatatgcaactccaaactctgcccctaaaaacatccagtgcaattctccctatattctcactcttttcttttttatcaacaagatgctgaaaacataatgccagccttaaaaacttgagggatggcagaacmattagatggaagaaactggggtttctgaatgactatgtgagcaga

SEQ ID NO: 913119 - DNA, 642 bp, Homo sapiens
cagttctaacccactacttagggccactgtcttcccagtccttgaccataacagggattgatggccagccaaaatttaggacattygcttatccccttcatttcaccatggatgaccatacattttctcatagttttctgcttatgcctgagtgacctatcccctttctgaaaacagacttattttcccaattacaggtcatagttcgatctggagagcctcatgagaagacaacagggcaggaagtggcacttcttctagctctaagtgcttgccttaacacacacacatatacacacacaaagactctcccatgacatattgcttctcaactaaacagctctgtttggaatatgaaaggtactggtagagctgttaatgtacccccagtccagattattttaaaactcaatgttaattatccatgaaaaaaaaatcctttgagacctgagacaaagaggatatccagcccccaataacaaattttctaaagtacagattactacaatcctgtcagcccccatgtatcactcccattttttttttgtaaagaaaccatattgggattatagatttgttcaagatctgagggaagttaaggaggcagcagtgctagtccacccaatagttcctaatccttac

SEQ ID NO: 913120 - DNA, 571 bp, Homo sapiens
aaatagttaagagcctttttggaaatgactgtattcaatgaatttgaattcctgggtttgggctcatgccaaaaccactctatgaagctctacaaagcagtgatcacgagcctttgaattgggataatacctgtcaataggtatttttaaccctaaaagaaaagttgggaacagcccctgctttgggacttccaaatttagaaaagcctttcaccctctatgtggctgaaaaacaagggagagctttggatattatagctcaaagactcaggtataatcccagacaagtggcttacttttctaaacagctaaaccaagtggtggctagatggccaggatgcttgtgagttgtggccaccactgctttattagtagaagtagcctgtaagtttatcttgggacaacaatttaaattgtgcagtagcctggaaaatcaagtmcatggtatcctagaggcaaaaggacatcaatgtctaacagggggccggttactcaaatatcaagccattctgcttaacaccccagatgttattcttaaagtatgtctactctgctaccctgctgccagatt

SEQ ID NO: 913121 - DNA, 619 bp, Homo sapiens
tgtttgctgtataccactttgaacctagtattgaacactagcttaataactctgarttgagccaatcaaattcaaaacatattcttgaaacttagatgaatttctgataattcaaaatcattgatcctgctttgaacaatgtaggtttttcaggatatttgaatttattgaatatttaagtagctaaattttcttaaattcttatggattcttattggaagtctcaattatagaatcaaatactgtcattgaaaggagcatcaactcaataaagcagagagatcaatgccatgtctaaggatgctggtctatttcctttaggctgcattagcttacactggacttgaacaggttactgaactaatgagtgtttaatcttactgtaatttataacatgacaacttattgaggctgaaaaagtgatcagtttcaaaagctctcccttaatatgtgggaagtagtttgcacactgggcaagtataaatcacaaagtaataacagtcgtgtaagattgtaacaaatataaattgctatgtaaatattaaatagattacacagtatttttaagccccgaaacatcaaatcactttgcaaagaactaaatgtcaaatgacatggt

SEQ ID NO: 913122 - DNA, 619 bp, Homo sapiens
tgtttgctgtataccactttgaacctagtattgaacactagcttaataactctgagttgagccaatcaaattcaaaacatattcttgaaacttagatgaatttctgataattcaaaatcattgatcctgctttgaacaatgtaggtttttcaggatatttgaatttattgaatatttaagtagctaaattttcttaaattcttatggattcttattggaagtctcaattatagaatcaaatactgtcattgaaaggagcatcaactcaataaagcagagagatcaatgccatgtctaaggatgctggtctatttcctttaggctgcattagcttacactggacttgaacaggttactgaactaatgagtgtttaatcttactgtaatttataacatgacaacttattgaggctgaaaaagtgatcagtttcaaaagctctcccttaatatgtgggaagtagtttgcacactgggcaagtataaatcacaaagtaataamagtcgtgtaagattgtaacaaatataaattgctatgtaaatattaaatagattacacagtatttttaagccccgaaacatcaaatcactttgcaaagaactaaatgtcaaatgacatggt

SEQ ID NO: 913123 - DNA, 619 bp, Homo sapiens
tgtttgctgtataccactttgaacctagtattgaacactagcttaataactctgagttgagccaatcaaattcaaaacatattcttgaaacttagatgaatttctgataattcaaaatcattgatcctgctttgaacaatgtaggtttttcaggatatttgaatttattgaatatttaagtagctaaattttcttaaattcttatggattcttattggaagtctcaattatagaatcaaatactgtcattgaaaggagcatcaactcaataaagcagagagatcaatgccatgtctaaggatgctggtctatttcctttaggctgcattagcttacactggacttgaacaggttactgaactaatgagtgtttaatcttactgtaatttataacatgacaacttattgaggctgaaaaagtgatcagtttcaaaagctctcccttaatatgtgggaagtagtttgcacactgggcaagtataaatcacaaagtaataacagtcgtgtragattgtaacaaatataaattgctatgtaaatattaaatagattacacagtatttttaagccccgaaacatcaaatcactttgcaaagaactaaatgtcaaatgacatggt

SEQ ID NO: 913124 - DNA, 583 bp, Homo sapiens
caaggtttttaacttctttgcaatgggtttgaacttcctcctttagctcggagaagtttgatygtctgaagccttcttatctcaacttgtcaaagtcattctctgtccagctttgttccattgctggtaaggagctgcattcctttggaggaggagaggcgctctgatttttagaattttctgttctgtttttttccccatctttgtggttttatctacctttggtctttgatgatggtgacgtacagatggggttttggtttggatgtcctttctgtttgttagttttccttttaacagtcaggaccctcagctgcaggtctgttggagtatgttggaggtccactccagaccctgtttgcctgggtatcagcagtggaggctgcagaacagtgaatattgctgaatagcaaatgttgctgtctgatcattcctctggaggtttcatctcagaggggtacccggctgtgtgaggtgtcattctacccctactgggaggtgcttcccagttaagctactcagtggtcagggacccactcggggaggcagtctgtccattctcagatctcaaactccatgctgg

SEQ ID NO: 913125 - DNA, 602 bp, Homo sapiens
gatctcctggggtgtggagagtgggagagggagaggatctggaaaaataactaaygggttttaggctcaatacctggtactaatttgtacaacaaaccttcatgtcaggggtttacctatatagcagacctgcacatgtacccaggaacttgtaataaaattttttttaaaagttcattgtatatagttcaatagatatgtctttttcaaatgttatctattataaatttaaaccatttgtaaatggcattgtgcttttaatttcaaattcttcttgtttattgcagatatataagaaagtgatggactattgaatattaacattgtatcctgcaaccttaccataatcacatattacttccaggagtttcccacgtttttattatcattcaggttacaaatatttcactcccattgtgattacttcattttctcatagtgctttttagggtggaatatatattctccaaacatttggttatattttacttaactatgttactgggttccaaatgaatcttacaatgatctggaaacattcactgtatgatgttgattctttaaaacttgcttttcttaatcagaatagtatctgttttgtt

SEQ ID NO: 913126 - DNA, 586 bp, Homo sapiens
acattttaatctttcatgtttttgttcatattttctctcatatatctctccagaaacaagtaagaacattattattctgccaattcayatgagtaaagaataaattaagaagcctatatattttccaggcattcccttcacaacaaaacaaagttttcaatctgattaagttgcataaagaaagctttaaagtgtactaaattataaagttagatctacggtccatggacattagaataaatacacattctatgacctgtttggcatcaaattcaaaatgctctgcttttacccaaacatctactgaccccttagaggattctacccggtatttcctcactgtctcctaagtaatatgtatgctatgttaactagagctaaaaggtgccttaaagatgtattcatagccatatgtgtatggtatattttaaattaaatgttttttaaaaaatcattgagacacattggtactgggtcccttggaatcactggacatatttatatctatttcttatcaactatttaaattataaggttaaatgtagatactgacataacacataattttttgaatttttaaacattt

SEQ ID NO: 913127 - DNA, 652 bp, Homo sapiens
tctggcttatatcacctagcataatgtttcgaccatgctgtcataagtatataatttcctttttaaggctaattaatatttcattttatatatataccacatgttgtttatccatttatctattgatggacatttgggttgtttctgccttttggctattgtaagtaatgctactagatgaccattgaggtacaagtgtctatttgagtccttgcttttcaattcctttgggtatatacctagatgtggaattgccggagcatatgataattctatgtttaactttttgaggaactgccatactgttttccacagtggctgcaccattatacatttctaccagcagtatatgagggttgtgacttcccacatctttgccaatacttgttatttttttatcttcttgatagtaaccattctaatggtatgaaatggtatctcatcatggttatgatcaaacattttaaagaaaatctttctgtgtggctgtgatcgtctctgaattaaatagtgtctagctctggggccaagcagctttgggtttaaacaccagmaggaagtcagctccacaagggaaggagctttaggctgttttgtgcaccaacatatccctgatccatagaacaataactggcacgtagtaagacatgaa

SEQ ID NO: 913128 - DNA, 704 bp, Homo sapiens
attccatttctgctgaatttaatgtttgtgaagattgccctacacatttgaaccatttttctactatattttcataacttgtaatgataatactctcattccacattatatatttgtttctatacaaaggtccttcacaagcctcaaatttttggacacttttgatgacttgtgatgtgttggggggcaaggcaaccacagataacaaacaccctgcaattgtggataagatccttcacaacagaaaggtgtccaaacacatacaccagcaaccctgctgagaaacattgtgctgatatgcaaggttagaaatagtatagacgatgcaggccataaggcaggataaatggcgagaaactctctgggtagatcaatccttaggtgtccctaaattataccttcctacatgttttaagtctgtcgctatgtagcttaataaaacataaaataaaatttatataggcataagtaccctctacctgatttaatttcccaattgttaatggtaattcaagaaaaatattaaaatacaccaaaagaaagttgttagaaggcccttgatgttcactcattgcataagcttccacccaatagtgattctcaaccttggaagcatgttgaatcattctgagtgcttaaagtgccaatgcccagcacttartccagaccatttaaaccagcatcttgcagatggagcccaagca

SEQ ID NO: 913129 - DNA, 653 bp, Homo sapiens
ccctttcctattatacatttcccttaaaataaaaaaattgaacacatttatctttcctttagtccatcctcaaaataaaactcttcctttcctctctccttgattaccatccccaaagctactaaatgacaaaagggtttcatctgacctcactcattgtatgttatactgcatacagtttttaaccgacataaaaactacagaaacaggcaaaattcctaagtatgaagttgtagaaatttttataatgtaagggtatctgtgaaacaaccactcagaggtaaccactattctgatttctttcatcatagactgctttatctaatttgaaatttatatgaatttattcatgaagtatgttctactttgcatctaatttattttttgatattcatctgtattgtgtgcaaaggtggcttgttaagtctcattagctttatattatttagttaaatgcatatgctgcaactaattttttttattgtgctactgatgaacatttgattatttcccagtttttggttcttttgaatggtactgctatgagcattttaatatgtsccttttggtgaacatgtgaatacatttctgttgagaatacgcttgagtggaagcgctgattatgggacaggtccatgctccgttttagtgat

SEQ ID NO: 913130 - DNA, 715 bp, Homo sapiens
gcacacagcggaagagaaggttggaaaagtcaaagagtggctcttgagtgccaggttgaaacgtttagtttattgccattggcagtggggacatagtatggattttragcatggaaatggcatgattagggctgcacttcagtaaattcacctatcacttttagcttagagtctatgactatctttgttttgttttgttttgttttgtttggggcttgggtgtgggagaaaagtagcagtggataaagctgagttcttctggcccaaactaaaggcttagggccagtagttagagagttcttctactcagctcccaccacttaaagaaaaactcatttacagccacatccaaatccatttagaaattcccaacccgctctcacttcggtttcaggggcaatatagaaaaggcaatataaatgacaagctgtgcacagcaagggcttcagagactgacatctagatttcagtccttggttcaaaggttactttctctaaacctcaattttctaatttatgagaatcatagtagtgcctactcacagagttactgagaatattaaatgagatagtgaatagagaaccctcagaatagttcaccaaagtctagaatgttgtaaatgctataggataaacatcctggtttctgcaataaacaaattacaagtaataaaaaatggtgagaaatctatgaacttagattcttaaaagagac

SEQ ID NO: 913131 - DNA, 680 bp, Homo sapiens
aaaatttcatatagttttgagttttgaaagtatactaataccttctatatttaaaaaattaaatcactaagaaaaaggggaataaaatctattactgagagcaaactgaagcagacttgctttttagattgagcaactgaataaatgtgctgctctacaacccagaatttttattgtagaagaacagacatgcaagaatgaaaaggcaaagaactcagtggagaaggataagaactggaggtgctggtataaattcattatttctaagttatgtatatgtatatgaatatttatgtgtatatacataacgtgtaggggtgttcaatcttttggctttcctggagcacattgaaagaagaatcgtcttgggccacacacaagatacactaacactaatgacagctgatgagctacacacacacacacacacacacacacacacaccccaaaaaaaaaaaaaacacctcataatgttttaagaaattttatgaatttctgttgggccacattcaaagccatcctggaccacatgtagcctgcgggccatrggttggacaaacttctgtaagtgtatacacatgcatgtatttcgtgacaccacctgctgaaagggtgaagaagtaaacaccctccagtagcaatgagcacacccagcacccattccccactaaaggaatctg

SEQ ID NO: 913132 - DNA, 653 bp, Homo sapiens
agagagactctgtctcaaaaaaaaaaaaaaaagtgattcctgtagtagatttgggcaaaataaactgaaaaccttctggaaagacttcaccaccgtrgatgtcattaagaacattcataattcatgagaggaagtcaaaatatcaacacgaacaggtgtttggaagaagttgattccaactctcatggatgactttgagaggttcaagactcaagtggaggaagttactgcagatgtagtggaaacagcaagagaattagaagtggagcctgaagatgtgactgaattgctgcaatctcatgataaaacttgcacagattaggagttgttccttacagatgacccaagaaagtggtttcttaaagatggaaactactcctggtgaaaaggctgtgaaattattgaatgacaacaaaggatttagaatactatataaccttagttgttaaagcagtggcagggtttgagctgactccaattttgaaaaaaagttctacttttgggtaaaaaatgctatgaaacagcatcaagtgctacagagaaatctttcacgaaagaaagaggcaatcaatgtagcaaacttcattgttgtcttattgtaagaaactgccagaggcaccccaaccatcagcaatcactgctgggatcagtca

SEQ ID NO: 913133 - DNA, 626 bp, Homo sapiens
ccttgcatctcaggaataaaacctatgtaatgatgatgaattacatttttgatatgctgatggatttggtttgctagcrttttgttgaggatatttgcatctatgttcatcagatattggcctgtagtttgttgttgttgtttccttgctagattttagtgtcaggatgatactggttttgtagaatgagttagagaggaattccttgattgataccatctattttttttatgtttggtagaattcagctgtgaattcatctagtcctgggcttctcctgcttgataaatatttttaatacaaattcagtttcataattaactactggtctgttcagatttttttaaatttatagagaaaaaatatttatttggtttatagttgtgcaggcagtagaagcatgggaccagcacctgctcaggtttgggtgagacctcagaaagcatccaatcacagaggaaggcaaagggagggccagggtatcacgtgtcaagagagaaatcaagagcaagaaggggaacatggcagggtgttttaaacaaccagctctcgtgcgacacaacagagcaaggactcgctgatcgccaaggggatggagctaagcaatttatgaagggtccactccc

SEQ ID NO: 913134 - DNA, 503 bp, Homo sapiens
tttgaaaaaactatgagaaaggaaaattataaccaattgcccagaagacatgaatttgaaaatcctaaacaaaatattaacggacagaatccrgcaatttaataataaaataatttaataagtatttaacaaaataatacagcacaactaaattacatttattccagaaacatgttggtttaccacttaatcaatgcaattaaccacatttatttataggataaagtagaaaaattatcatctcaaagattcagaaaaatctttaagaattcaacatccattcatgatttaaaaaaaaaaactcttagcaagctaaacgaatttcttttttctttctttctttttttttttttttgtttcattttttgagacagagtcttactctgtcatccaggttggagagcagtggtgcgatcttggctcactggaacctctgcctcctggtttcaagtgattctcgtgcctcagccggagtagctggcattacaggcatgtgccaccgc

SEQ ID NO: 913135 - DNA, 450 bp, Homo sapiens
gttgtgtccttcctgaattttcatgtcgcattgggtcagcttctcttctgcctttggagtccctgtttaatattacctttaggggcagtctgtcggtagcatatttttccaatttttgcttttggaagaaggctttgcttcaacccagtggtgagcacatgtgaggctgttgtttattaatcgaatatttcccccttttatttttgagacagagttttgctctgtcacccaggctgaattgcagtggcgtgatcttgactcactgcaacctctgccgcctggtttcaagcgattctcctgcctcagcctcccaagtagctgggatcataggcgtctgccaccatggccggctaattttttgggttttttagtagagrcggaatttcaccctgctggccaggctggtctcgatctcctgaccttgtgatccacccgcctcggcctcccaaa

SEQ ID NO: 913136 - DNA, 463 bp, Homo sapiens
atagatagatagatagttagaataagatggttgatagtcacatagaataagawggatgatagatagatgatagagggatagaaagataggatagatgatgggtagatggttagatagataggatagatgatagatagataatagatagatggaataaatatcgtataactgcataaacaaatgtatggaaataagcaaataatcatgacttaaataagatggaagtttgtttctctctgatatgataggaggccagaacaaggggtccaggttattgtacagattcaagatgtcaggcattttgaatgttgttgctccactattttagtatgtgactttctactcatggttcaatatggtggcatggtctccagccctcacatctccattgcagctagcagcaaaaggagagggaagagttcacattcacttttttacaaaattaaagagatttttatggtct

SEQ ID NO: 913137 - DNA, 634 bp, Homo sapiens
caatgagcatcggttctctgcttcctatcttaccctgctcactcacagctgcttcaggtgacctcctttttaggttcagagttatggctgacctcggctttaatcaaaaygaatgtattttggtttctcattttgtttattgcttctgtcttcaaattagaaatcctagagctcatcagatttacttttatgtttatttttgaaagagcatcctgctctgtcacccaggctgcaatgcagtggtacaatgactgctcattgcggccttgacctcctgggctcaagtgattctcctgcctcagcctcccgagtagctgggattacaggcacctgccaccacacctggctaatgtttgtgtttttagtagagacagggtttcaccatgttggccagctggtctcgaattcctgatctcaggtgatctgcccaccttgacctcccaaagtgctggaattacaggtgtgagccaccgtgcccagacgatttttatgaccatgaatggggacagatttcttaaacagatcacaatgagccatagttttaagggaataagttgataaattagactatattcaaattaagaatttctgtttattaagagacaccactaagaaagtgacaagacaagttgca

SEQ ID NO: 913138 - DNA, 585 bp, Homo sapiens
ctaagatctggcaatgagcatcggttctctgcttcctatcttaccctgctcactcacagctgcttcaggtgacctcctttttaggttcagagttatggctgacctcggctttaatcaaaacgaatgtattttggtttctcattttgtttattgcttctgtcttcaaattagaaatcctagagctcatcagatttacttttatgtttatttttgaaagagcatcctgctctgtcacccaggctgcaatgcagtggtacaatgactgctcattgcggccttgacctcctgggctcaagtgattctcctgcctcagcctcccgagtagctgggattacaggcacctgccaccacacctggctaatgtttgtgtttttagtagagacagggtttcaccatgttggccagctggtctcgaattcctgatctcaggtgatctgcccaccttgacctccsaaagtgctggaattacaggtgtgagccaccgtgcccagacgatttttatgaccatgaatggggacagatttcttaaacagatcacaatgagccatagttttaagggaataagttgataaattagactatatt

SEQ ID NO: 913139 - DNA, 632 bp, Homo sapiens
tcggttctctgcttcctatcttaccctgctcactcacagctgcttcaggtgacctcctttttaggttcagagttatggctgacctcggctttaatcaaaacgaatgtattttggtttctcattttgtttattgcttctgtcttcaaattagaaatcctagagctcatcagatttacttttatgtttatttttgaaagagcatcctgctctgtcacccaggctgcaatgcagtggtacaatgactgctcattgcggccttgacctcctgggctcaagtgattctcctgcctcagcctcccgagtagctgggattacaggcacctgccaccacacctggctaatgtttgtgtttttagtagagacagggtttcaccatgttggccagctggtctcgaattcctgatctcaggtgatctgcccaccttgacctcccaaagtgctggaattacaggtgtgagccaccgtgcccagacgatttttatgaccatgaatggggacagatttcttaaayagatcacaatgagccatagttttaagggaataagttgataaattagactatattcaaattaagaatttctgtttattaagagacaccactaagaaagtgacaagacaagttgcagagtgga

SEQ ID NO: 913140 - DNA, 562 bp, Homo sapiens
gagttatggctgacctcggctttaatcaaaacgaatgtattttggtttctcattttgtttattgcttctgtcttcaaattagaaatcctagagctcatcagatttacttttatgtttatttttgaaagagcatcctgctctgtcacccaggctgcaatgcagtggtacaatgactgctcattgcggccttgacctcctgggctcaagtgattctcctgcctcagcctcccgagtagctgggattacaggcacctgccaccacacctggctaatgtttgtgtttttagtagagacagggtttcaccatgttggccagctggtctcgaattcctgatctcaggtgatctgcccaccttgacctcccaaagtgctggaattacaggtgtgagccaccgtgcccagacgatttttatgaccatgaatggggacagatttcttaaacagatcacaatgagccatagttttaagggaataagttgataaattagactatattcaaattaagaatttctgtttattaagagacaccrctaagaaagtgacaagacaagttgcagagtgg

SEQ ID NO: 913141 - DNA, 538 bp, Homo sapiens
ctctgtcattggaaaaatatcttgaaacaaaacccaaatgtgacttctgttttccagcttggaagctgtcactcctgtcctcacaacgacaacaaaaaacaccttgaacaaactgaaaattacaacttttcttagatccatcagagacttgaggttaacagggaaaaccgttatcccccaaattggagaggcagtgagtcccagcctaacaggatcggaggctggccactggagccagaaccacggtgggaagacttacatgtaaacaacaaatcgctggaggctccatgcacataaacttgagaattaagaattaagggagcccagtcttagggggccctacactttcatgaacctccaagagctctgccagacgctcttatgcacatcagagaaaaattccctcctgcttcccacagggaaggggaaaagtaactactttgaaatatgccctgggtgttccgttctccttagcaaaagcctgmcccagggaaaccatttcacaagagtctaaccaccttgggctttagcagggcct

SEQ ID NO: 913142 - DNA, 564 bp, Homo sapiens
aaaaatttgttatagatctgatttattgttttcttccccctacccctcccttgttgggaattgtagtaaagcaaatcttacatgaaatcattagaccagacaagaacaatggcagaggctaytttgtgattactcaccgaatagaaaaactgcactttcacatcatcatacagaggtagaccgtcgaatacatcaattaatattttgtctgttgtaatgttatcaagtacctatgaatgaacacatggaattgagaactataaacctagataatgataacaatgaagttccttttcacttatcatgacttcctgtatttatcaagtacttttggtctcacagcccaatcactacatacataaataattattaataatctcttctagttgcaatactgttgtttatgcgtgtgtgtttacatttgctttttgttttctgagacagagtctcactgtcacccaggctgaagtgcagtggcatgatctcggctcactgcaacctctgcctcccaggttcaagtgattcttgtgcctcagcctcccaagtagctgggactataggcac

SEQ ID NO: 913143 - DNA, 640 bp, Homo sapiens
tatttacaattatacacatattacaattatatttcttgctgaattgaaccctttattattacataataatcttgtttgtcaatttttatggtttttaacttgaactctgttttgtctgatacaagtatagctatccctgctcactttgggcttccatttgcatagaatatatttttccatccctttattatcagtctatgtgtttctataccggtaaagtgagtttcttttagataaaatatagtggggtcttattttttaatccactcagtaagtctatatccttcatggggtatttaatctattaacattcaaagttattattggtaggtgaggaggttttgcatgttttcatgatggtggttatcatctttttacttccagatgtaagactcccttgggcatttcttgtaatgttggtctagtggtgatgaattatcttggtttttgtttatctatgacagattttatgtcttcttcatttgtaaaggatagctgtgctggctataatattsttggctgaaagatttttttctttcagaacttcgaatgtatcatcccattctcttctagcctaaggtttccactgggaaatcagctgttagtctaatggggattccattataagtgtgttactttt

SEQ ID NO: 913144 - DNA, 611 bp, Homo sapiens
atcagaaaaatgaaaatcagtaaacaatgagttaccgttttttccagtcattaatttatttgaaaaataaccagcattggcaaatgtgagggaaaaggcattttcttttctttttaatgaacttttattttagcttcagaagttcatgtgcaggtttattatataggtaaactgtatcatggaggtttggactacagattatttcatcagccacataataagcaaaatactcgagaggtagttttttggtcatctccctcctgccacactccaccctcaagtagaccctggtgtctgttattctcctctttgtgtccatgagttctcattgtttagttcccactaatgagtaagaatatgtggcatttgattttctgttcctgcattagtttgcttaggataatggcctccagctccatgtgtgttgctgcaaaggaaatggtctcattgaaaaagacatttcatacactgttggtaaatacattttgaacattaatttagtagcatattcacacacacatatatataacatagtaaggatatrtaggtatgttaaggatatttgtatagatttgtcacatatatacttatgtgtaaggacatttcttaca

SEQ ID NO: 913145 - DNA, 658 bp, Homo sapiens
ctgtcccacatccagggcacaggggtgtgagggctgggctcccaaggccttgggcagcttggcacctgtggctttgcagggtttatgcccacggctgccctcaggasctcggctggtgttgagtgcctgtgacttttccccactaaggatacaagttgttgggggtctatgaatctggggtctgcatgatggtggcctccagtgtggaggctccaaccccatgttttccttctgcactgccctagtagaagtttcatataaggctctgcctttttgggatgtttttgcctggacacccaggcatttccatacatcttccaaaatctatagagaggtttccaagcctctggtctcatgctccgtccaccaatggcttaacacaatgaggaaattaccaaggcttctagctggcaccctctgtagcagtgacccaagctgtagctgtgcatctttcagtcatggctggagctggagctggagctggagctggagctgcagggatgcaggcagcagtgtcctgaggctgcacacagagggggggcatggaactggcccaggaaaccattcttctctcctaggccccagggcctgtaacagccagggctgctgcaaaggtctctgaaatgccttcaaggccttttccctattgtcttgtcta

SEQ ID NO: 913146 - DNA, 535 bp, Homo sapiens
cctcccaaagtgctgggattacaggyttgagccaccgcacccagcctccaacaaatgactttttaaataaaatacagttctcaccttctccttttccattgactattctgtttccttttccatgggaaggtccacgtaaaggctctgacactttcttggggacacactgctaaggtagtatcaagaattagtttccattttaaaattataatgagttgcatcaagagtttcttgtcaatctctttttatgaaactggttctcactctgtcaacccagggctagaatgcaggggcctgattatggctcactgtggtctcaaactcctgacctcaagcaatcttcccacctcaacttcctgaatagctggaactacaggtgcataccatcatgccatgctaatgtttctattgttatctttgtagaaacacggcctcattatactgcccaggctggtctcaagctcctaggctctagtaaatcttcgacttctgcctcccgaagtgttgagataagcagtgtgcaccacaacaccca

SEQ ID NO: 913147 - DNA, 614 bp, Homo sapiens
gaaaggttgcccccaggaagtagcacttgagctacaatcagggagaaaactaggcaaagacacagcattcaggagaaggtagaagytggcccatgaggatggtggtgtggagaggtgaaccaatacccaggtcttggatttattgttgagctgctgaattaaccagtgctggctctctcccaacctctgcacttcttttttgcaaggttatatatttttttatttaaaagctagtatgagttgggatctgttgcttttctgagaccccatcctgtgaggtaaacagggggcctcactgtactctggggaagctaaagatggagaacagttttagagtgcctggagaagaggccctttaatagatcatttaagaagagggtgctaccgctagactgcccagattcactttctggctttgtgaccttgggctctctgtgtctgttttccaatctgaaaaatgaaataatgatagtatctgcctctgcctgcaagaccctgacctatcagaccaactaccttttcactagaactctcttcctgcactgtaccccaactggaccctcattaacacttaaaatgggcatgtttcccttttctagattttgctcaagaca

SEQ ID NO: 913148 - DNA, 589 bp, Homo sapiens
cttttaaaacatttggacatatttatcttatttgctcagctcctaactatatgaaacatatagcaggtattgattcctgtcaayaccacccctaccttaaagttttcagattggcatagggacatggcagaatgacacagtaggaagaaagcaacacacacagatgaagcctttccattgaagcccattcttacatgtaagtgattgtgctctctccacattttcatattcttctcacaagcacaaaaatacagtattctgtggaagagtttgccttttcattctttataaacaggataaaacagtcgaagctcaagtttttattaaaaatcttcaaaataacttttaaacttagaatattattcagtaccactgaatcgtgcctcatttggcagaaaggcaattctgtccatattacaatactgacagaacaaattgatctaaattttgcacagaagtgctttgttataaattttgttattaacttttatctgaacatagtacacctcgtgtataatattaaaattgcctgcttaattcatactttattccccagaagcaaagaggaaagtagattgtactgatcaat

SEQ ID NO: 913149 - DNA, 589 bp, Homo sapiens
cttttaaaacatttggacatatttatcttatttgctcagctcctaactatatgaaacatatagcaggtattgattcctgtcaataccacccctaccttamagttttcagattggcatagggacatggcagaatgacacagtaggaagaaagcaacacacacagatgaagcctttccattgaagcccattcttacatgtaagtgattgtgctctctccacattttcatattcttctcacaagcacaaaaatacagtattctgtggaagagtttgccttttcattctttataaacaggataaaacagtcgaagctcaagtttttattaaaaatcttcaaaataacttttaaacttagaatattattcagtaccactgaatcgtgcctcatttggcagaaaggcaattctgtccatattacaatactgacagaacaaattgatctaaattttgcacagaagtgctttgttataaattttgttattaacttttatctgaacatagtacacctcgtgtataatattaaaattgcctgcttaattcatactttattccccagaagcaaagaggaaagtagattgtactgatcaat

SEQ ID NO: 913150 - DNA, 655 bp, Homo sapiens
atttcttcctgtcttctctcagatcttactccattaaccacctcttctaattcgcactcccttgcagttcctctcagcctgtaactaagccaaaatattttctacattctccaactcctacctgaactttgaattttcctctggatttttccccaggtcttgtctttccttctcaaagaaatttcatgaaagattagtctaccttcacaatcttcagttaccaatattcaacttgttcagtctgtcatctcatggctaatatcaaatattatttttctatattttctaaatttttgatcataaaatatatttctttcacattagaaaaagatgataaaaatatgtgtgtacacacatttaaacaaacaaaaatctttgtgtactttgacgcaagttgtgacaaatactgctacaaaaactcttgatgtggaaggataaatgtgttcaaataaccttattcagccctctacacctgtttctctgctttccattacagaaaaattcttttgcaaagttgcctgtacttgcttttctatttcattttctctgattcatttctggacgstcgccaaataggcttttgatcccactattgcactgaaacttgactcatgaaaatcacagcaggttctttctcagtcctcactttacctga

SEQ ID NO: 913151 - DNA, 574 bp, Homo sapiens
cttgtttctaatgaattgaatgtaacaaaagtgatgggatgtcatttcagtccttaagttgcaaaagactgactttcctcttccttgcagattctctctctcttgctgtttttgatgaagcagactgctatgtagaagtggccaggtggcaagaaactgaggttagcctctggccaacagtcagcaggaaactgaggccctctgaccaagagcctgcaaggaattgaattatgccaacaaccaagtgagtgagcttgcaagtggatctttccacagttgatccttaaaattagacctcagccccagatgtcacaatgattgtagcctgtggaagatcctaagcagaaaatccaattaagttttacctacattcccagcccacagaaactgtgagatactcagtatgctgttttaagtcatttagtttggggtaatttattacatagcagcatataattaagacactagacattttrtttcttcgggatttttgtttttgtttttctttattttttatgttgttccaacatgtttgctttttcctcttttaataggttcaagaatagtgagaaaa

SEQ ID NO: 913152 - DNA, 636 bp, Homo sapiens
acagaagcctatgagtgaaatgtcttttccatattttttagctatcactctgtcaatacacgcacttgaaactggatgcacttgagaattaaaagatgttagatctataaagcattagaacagtgtctactaggtactactcaataaatactgtctactttgctgaagtaataagtatattaataacaaaatttttaaatattgaattaaatttttttattgtatatacagaagctccttcaatgctatcttttattttcaccatggcttcacattagcctatcacaaaattctactccttacctacgatctcagtgagaggttcttgcattaggatgtactaagaacaccaaagaatctaaagaactcacggttatggcaatttctacaatgaagataaacagggattatgcagtttggttgacattcaggtctccagtatgtgctctttggcctttcgtggtcacactatgtgctgctctgcttctatttatatcatcttcatcaaataacaggcctagtaggagaattgkaggcagggggtgaaggaaaaaacaaaatgtatgaaaccttcaaccaaacacagtgactttatgttaccagtactggtgggagatttgttataggactaaaaaa

SEQ ID NO: 913153 - DNA, 581 bp, Homo sapiens; identical to SEQ ID NO: 909909

SEQ ID NO: 913154 - DNA, 504 bp, Homo sapiens
gattattttgggttaaaatactcagtatgtcaagacgacatattctggggcagccttgatagggctcagatgggaagggccatctctggaaatgggawtttattctacaggtattaagaggaaaacagaggttttcttttaattaatttttttattatactttaagttctagggtacatgtgcacaacgtgcagctttgttacatatgtatacatgtcccatgttggtgtgctgcaacctttaactttgattgaggcactattcgcaatagcaaagacttggaaaacagaggttttaaacagaggcacaacaatcaaatatgcatttaggaagataacttgactactggtggagaaaacactggaaggaaaaagggaagaagagcagtttagaattctcttaagataataaggcatctataccctctgtttgtttcttagggatcattaattctctcaagactcaaaaggctaataatgattgctgtggaaaaatactactttc

SEQ ID NO: 913155 - DNA, 165 bp, Homo sapiens
tgcctagctaatttttaaatattttgtasaaacaggatcacactgtgctatatatcttggtctaaaactcctagccttaagcaatcctcctgtctcggcctcccaaagcattagggttacaggcatgagccactgcatttggcttctgctaggttttaattattc

SEQ ID NO: 913156 - DNA, 665 bp, Homo sapiens; identical to SEQ ID NO: 909772

SEQ ID NO: 913157 - DNA, 604 bp, Homo sapiens; identical to SEQ ID NO: 909773

SEQ ID NO: 913158 - DNA, 647 bp, Homo sapiens; identical to SEQ ID NO: 909774

SEQ ID NO: 913159 - DNA, 640 bp, Homo sapiens
cacagtctacatgaacttcttcactgtcacatttcaattaatgtccatacgtagtacttgataaatatctgtctccaacccatccctttttctttgacactccaaattcacatctctgaagctatgtcttcgaatgtaattgtcacaaaccaaattcatactctactactccatttctgctcttcctcctttctttcttatctatgattcttatggtaacagtgcaaaggctgggagaggaaaaatagaaatgtattaatgtaaagttgtcatactactcttgaagtgatataataccactttctgttagactccaatatgttgaaggtttatgctataagcactaaggtaaccaaaagatgctgcagactattatagcatctcttcaaacagacttcacagaaacttgcaagcagcctgtgtctatgacatcagttggcatgagcaacaggtttttgattttggagaactatgtttacctgacactgcaacaaaacaaaagcagctatacatgataggaatgaatacaaatattaacaactgataycattgaatttttggagggtgaggagcccctcaagacaaatagagactttcaattttaaaagagcagatattgtgtttgttcccctgacttatt

SEQ ID NO: 913160 - DNA, 651 bp, Homo sapiens; identical to SEQ ID NO: 909912

SEQ ID NO: 913161 - DNA, 636 bp, Homo sapiens
gcagcaatgctttgtgtttgcctattagattccatttttaaagggcaattcctatctattgggctcttactaagtgatattcyctccagtgttatagatcccattttctattaagcatctaatatacatcagatacttataggtttaaaattatttttagcatacaacaatgtgaaacaaaatgatgctctaataaagacgacaacaacaaaagcaatggcaacaacaacaaaacaacagcaacagcaacaacaaaaccatcaggttctatgtaaagcaggtggcaagaagaaatggcattaaaatagcgcagggccaaggaatctcaagagaggccctgacaattggcactgaatgttgattcttcagtaattacggagctcagtgacctgagaagaattggtggtgagcaagcttgcctcagctatgcttcccacccccgtgtttgtgccagctgggggcccagggctggtttaaattctagcaagactctcataccagtgcaaacatttacaaaatactgggtgtttatcttggcctcgaagaaaggtaagcatcttttggagttcacctgacattaaaaacatatttaaacttggggtattggcctgttgaaattgtcctatatggatgtat

SEQ ID NO: 913162 - DNA, 595 bp, Homo sapiens
agttgcctgggataattttcctccaggctctgggtacatggttacaatttacagaaaggtaaggggcaggactgcactgtgaacagaggttgtcttattgtggagataaagtcyctcaggtaacagttctcataggaatagataaaaagcctgtttgggtgggtgtggtcatggtcttagtttccttttccatgattaatattccctggttagtgaggggaacaggggatcgaaggcaattgtgttttttggaagaacttcccttagtcagataagaaaacttcagagagagctcctgcctgtgcttggagggagaaattaagggagggccagagaaacttcaattctggggcagcttctaagtccttccaacttcctttaatacaaagtgctcagcatgcaaaagtgccgtaccttggggtatcattttctgctgactagcccaaaagaatgaagcttaaaaaaaaaagagaatctccaaatttttctaatttataaaaattgaatgaatgtggcattgaatgtgtatatataatcacttttactttcaggagtatcttccaactctgaaattctatgattctaagacacattc

SEQ ID NO: 913163 - DNA, 648 bp, Homo sapiens
actcaaattgtgatgtaaatgtactgtaaagttttgattacaaaattttctcggggatggaatttacttagtaggactaatttgaaacawctgggaattctttttcttgtaaatatattgaccagttatagaagtttgctagtaatatcaccctttaacttcaaagtatatagctggggtaggctacaacagttatagatagctttgcatacttattattttagatactgagaccaatattttggtagaaagggggaacagaatgtaagaaagggaatataaacaaagagaagattgtacagataatggcttaaataatcttttggctgctggcaacattagcctgtctttaggttagacatcaaccccacagctagtcaggattatttttgtcctattcacttggtacttttatgtagaaagtactgattgcagctgttccccactagggtgtcactgaatgagttagctatttggaggtgtatgttcttctctgtagctctgggacatgtcgttgaagtggtatgggtgctcatgatgatccttagccccttagcacctttccatttggatgccgagaagtaaggtgctcatacttctcagtttgcttgtcatagtcccttttactcctattgtagatctgttggc

SEQ ID NO: 913164 - DNA, 658 bp, Homo sapiens
gggagtgggattggtggctttataaacagagaaagagagatctgaaggagcacacttggtcagtccccttgccatgagatggcctgtgccatcttgggattctgcmgagagtccccaccagaaagaaggttttcatcagatacagctccttgacctcagacttctcagcctgcataatgataagaaataaattcattttctttataaataacccagtttcaagtattctattataagcaacacaaaacagactaagacacacaccaacaaagctaaagtattatagtgggctacacctgaaagagccacaaggagcagactctctttgaggaggcatacttaggggagtctgagagggaaaacaaaaacaagggcagtagaagacttaagccttttcacatttatggttaatgtaaatttccatgctaaaggtctgttttttctcaattcctattactcatatgtgtcatttgcacctatcaatacaaaattacaaggtctgatgataaagcaagaaaacacatagtttgaagaggtaaagcaagcattagaactagacccagatatgacacacatttttgaattatcagatagggaatcttaaataattattattaatatgttaagaggtcctaatggaaaaagtagacaatgtgca

SEQ ID NO: 913165 - DNA, 618 bp, Homo sapiens
catttccagttaagtccatagtgagtaaacaagaaagcaggggatacagagagccaagtggacggtgattatcattcatagaattgatctgtctgtaggcgtaggtctcctttgctgggtgggttcaggacagggcttcggtcttcaggtggtgaaagacgatggggtgatcatggggttttaggcagaggacaggtcaaaactaacttatagggttaaaataaaacaaaaagacaaagaaagcaaatgtggaacaagggcaatttagggacaagagccagctgcatgcaatccttgatgatgacaatttctggcactgacttgatgtaaatcatttttacaaagaagcctaatggtttatcagtagtgctgtataaatacaaatgtctagtctaaatccttctgcctttagagcatgtcccatttctcctcttgtaaatgcagtggcatagctgacaatatataacaagagtcggtagcttactatgtttcagaggtggaagcgggcaacattcctcaatcggcttttcytttgttctatagattaaatatatatatattttttgccagttggtttacttttagcacatgttacaaagaactttagagaagagagac

SEQ ID NO: 913166 - DNA, 564 bp, Homo sapiens
ttaggctgtttttaatgctgcataatgaaatgaagagaaaattaatttccaggttatttccttattttataggcagagtgctttggatagaaaatgtctaaattctttttatatcatcacagagatataaatcattggctgtgcttgcaaacatcattctacgtatctgtaagtattcctggagaaacttaggtgttggctaagcttctgggtaaaactttttaactgcactcacttattagttatgacctggaggaaatgcataagcttcattcagcatgctgttccagtgagaatagtcacttcacaatatagatcctgtttgtgtgcttggtgtagaaacatatgtggccatgacccttgccctctaagagtacatggtctaatgaagaggaaacccataaatggatcaatgcaattcaataaagaaggtgcagaratatgggtataaaggaggtattatgacagtacctagcagcaatatttacctgtggtcaaattactactgactaacagattttctggtcaagaaattgcagaaacaatagccagatgtctatgcag

SEQ ID NO: 913167 - DNA, 621 bp, Homo sapiens
accacaataccatctttattttttattagtgtgttttttagaatccacrctatcaaatcataaaaacattgctaaaatagagaagggctagtcctagacatcaaagttaagttttatgtgtatataaaaaactttttgtttaagatggaatctcgctctgtcgcccaggctggagtgcagtggtgtgatctcagctcactgcaacccctgcctcctggattcaagcaattatcctgcctcagcctccggagtagctgggattacaggtgcccaccaccatgcccagcaaatattttttgtatttttagtagagacagggtttcaccatgttggccaggctggtcttgaactcctgacctcaagtgatctgctcacctaggcctcccaaagtgctaggattacaggcgtgagccaccgtgcctgacctaaagtaatattttaatacaatgtaacatccttcccaaatatactacagtctaatttaaatttatattgaacattaggaaatataaagtttgaaattactcatttttcaaatgaagaaattaaatggataaaagtctaatgattttatcaacaccacaggactagctagtagactgaacacaggaatggaagttg

SEQ ID NO: 913168 - DNA, 656 bp, Homo sapiens
tttgtgcagatggccacctgagtctgtcacctccaggcatagccaatgacaagtatcayttccttggtaaataaaattgctttattttactgtcactgcagcatctttacttttaaaagagaggagaatgggttgagagagaaagatttaagggaattatagaaggagaaattgcagacacagatgtattttttttctaagggcaccaggtgttttaaatgccaccagaagggtgctccaggcgattctgtgctgtccaagatagcttggcatagattatctgaaagcttttgtgtcttttcagcttttgattaaaggccagtgtcaggactcctctgggcttttgcttggtacagtaaagccgagggatttttttttaagctgttgccaaaaagatgccagttaggataattacatttcaatttaaattggtaattttatgaaaatttaaaccagaatatgtgtcacccaaatctccttactttcattcctcccaaacatgcacacacacacccctcttgttttgggggagacaatgacagcagcccaccagaaccttcccatgacccagagatatgtgccaggaattaaacagatgagagaaaattgaacagagcctgttttctccgtccaaatgtattttctagcttggattt

SEQ ID NO: 913169 - DNA, 611 bp, Homo sapiens
cacaaaaattttactgccagtatacttttccttaacctggaacgtcttttttaccactcttttaacctttttctcccccgtcctgatctcagtctcaaagaaagaaagttccataacaaaaatatttgtgggttgaatatctacctagatgctaaatgctaggctaattgtttacatgtgtgttaatttatttactcctctcaacaatgtcctagaagaggcttccttagagtcaataatgaggaaagtgtattaatctgcaaaaacctgagttcaaggcagggcctggatcaaatctataactctcttcctaatgcagctactcttactaaagtgttaacagtcttcttctgtttgaaaatcctcagtcactctttagtttccttaagattgatatgtttggagcatcattttggaatgcattgaactcccagacacccacccccagcacactccaaactctaacacaacttaacctgtaggtcataatytgccacctcacaaagctccttccttaggctcttttcttccccttatccttcctgctgttctgaattccaaaagtatttcttacattttctggaccatccactttaagtctttttttcata

SEQ ID NO: 913170 - DNA, 611 bp, Homo sapiens
cacaaaaattttactgccagtatacttttccttaacctggaacgtcttttttaccactcttttaacctttttctcccccgtcctgatctcagtctcaaagaaagaaagttccataacaaaaatatttgtgggttgaatatctacctagatgctaaatgctaggctaattgtttacatgtgtgttaatttatttactcctctcaacaatgtcctagaagaggcttccttagagtcaataatgaggaaagtgtattaatctgcaaaaacctgagttcaaggcagggcctggatcaaatctataactctcttcctaatgcagctactcttactaaagtgttaacagtcttcttctgtttgaaaatcctcagtcactctttagtttccttaagattgatatgtttggagcatcattttggaatgcattgaactcccagacacccacccccagcacactccaaactctaacacaacttaacctgtaggtcataatttgccacctcacaaagctccttccttaggctctyttcttccccttatccttcctgctgttctgaattccaaaagtatttcttacattttctggaccatccactttaagtctttttttcata

SEQ ID NO: 913171 - DNA, 654 bp, Homo sapiens
aatgtagggctcaagtcaaaactctgcaactcaggctgaactgaattcaaaaattaatttagcacttacttctttgccttgcaataaatattgatagcgacctccactttgagagagattctcaggcagaaactttaactctagagatactattaggaaatactataagttcttttgcttccaagcttccatcttatgatttgcattttatatttgtccctagagatcattttcctacacttttccagctttttctacactattctgtggccaagagactggcctctatccgtcacaccatgctgactctcttactctgcatttcttgttggttcagctatgggagaaaagagaggttaaaggaaagagaaacaggagtatttactccctcagctccctccttgtttgactgagggttagctgaggttgttttccactcaccaaaagacacttgtttgcagatgttcctgtcttatagttacaagtctcactgacattcaataactgctccctctcctcatccctttggtctcaggagtaataaaagcttcctaaaatattggtagccgttaagatctayaccgtaagtcatcacttacccagtattgtttcctaataattgtaaatagtctattaaactcatttctagtaccc

SEQ ID NO: 913172 - DNA, 646 bp, Homo sapiens
tactcccagaccctaacttataaattattaattccttcaccttcggctttcctgctttyctaaatagtcttcacatgaaatctgtagttagattttacttagtgctatagaaaaagatatttaccaagcaaatgctaacatgagaagattttgagtgctaaaattaggagtgcactcattgtattaatctgttttcacactgctatgagaactacctgagactgagaatgggtattttataaagaaaagagttttaattaaatcacagttccacaaggctggggagggctcaggaaacttacaatcatagaggaaggcaaaggggaagcaaggcatgtcttatatggagacaggagagagagcgagggaggaagtgccagacttctaaaccatcagatcgcatgagaaaggactcagtatcaggagaacagcaagggggaagtccacccccattattcagtcacttcccaccatgtccctcccctgacatgtggagattacaattcaagatgagatttgggtggggacacagagtcaaaccatatcattccagccctgacccctcacaaatctcatattcttctcacattttaaaataaatcatgccttctcgacagtgccccaaagtcttaattctttccagcat

SEQ ID NO: 913173 - DNA, 611 bp, Homo sapiens
accttaaatctgtaaagaagccagtgctccctactcacctattctgtggaagaatttttctgctacttacatgaagcatttagtttcagatgttctaaaggtcttcagggagcttgtagagctcaacmtttttgcaatgctaagtctgggactattcacaaatgtcaatttgagtttcggaggcattttagacagattagctataagcacagtttgacattatttgatacaatggaatcaattacaattagctcttacaagactgactctactcagtgctacatgctaccactgaggaacattgaggagcacaaaatatttatatcaggtgacataacatggaataagcataagtaaaggaagtggagtaaaaagctaatcattgctgaaactattctttatgacggtccctaagagaagttcttaagctaggtatttttgcaactactttataatgtaggcattctaatatccatatcactgtacatgaaaccaatactagaaaagataaaataattcatacaaagtttgtaaaagtagttaatagaaaaccaaagacttgaacccgtgtatgtgtatcttaattatatttatctatattttaaaatgta

SEQ ID NO: 913174 - DNA, 590 bp, Homo sapiens
cataagggtttgtaaaataaatgccagaaaagcttgcagacaacttttactttctactcttccacatatctcttttaaacaaatttttktcaaaattttgtgagtacatagtaggtatatgtatttatgggtacatgagatgttttgatacaggcatgcaatgtgaaataagcacatcatggagaatggggtatccatcccacatgcgtttcttctttgagttacaaacaatctaattacattctttaagttattaaaacatatacaattaagttattattgactataatcaccctattgtgctatcaaatagtaggtcttattcattctttccatttttttgtacccatttaccatgcctccccccaacctccaactacctttttcctcacctctggtaaccatcctattctctatgcccatgagttcaattaatttgatttttaaatcccacaaattagtgataacatgtgatgtttgtctttctgtgcctggcttatttcactcaacataataatctccagttccatccatgctgtggcaaatgactggatgtcattttttactgctgaataatactacattgttca

SEQ ID NO: 913175 - DNA, 616 bp, Homo sapiens
ctcaatatgtctatagtaagaatacaattaagaagtaatctgtttttgcttctgcctccagccatgawggagtaatagggctaagatttaccctcccattttaaacaacaaacaactaaaaaataaagtaaaatataatcaatggttttcagatattagacaatgggtagtacagaagaataacctctgagaaaaggaaaaaaaataaagtgagccctacaattgtcccatcttgctaactacaaatgtttccaggctagagcacaggaagaagaaatgcatagagagcctatgatattgctgaattgagaagacaagtacagagttcagagatgccaaggcatctagaattcacaggcagcatactggaaagaggcaactacctaagaaagaacctcagaggtctgcaaagggctccccttggggcttcgtcatgagcatgagcatgattagcacatgcagtgtgaaaagctccctatttcatggggcattgaatagagtcctcagaagggcattgcttcaagcacacctagaaaggattggcttcttttcaagcaacttactgttttacagaataaagttcaaaactactaaaaagaatgcaaatactctagaa

SEQ ID NO: 913176 - DNA, 482 bp, Homo sapiens
aatgaaaactataaaacactgataaaagaacttgaagaggacaccaaaaaaatggaaagatattccatgttcatgttgatggattggaagaatcaatgttgttaaaatctccacattacctaaagtaatctactgattcactgcaatacctatcaaaatactaatagtttttcaaggaaatagaaaaagaatatcctaaaatttatatggaaccacaaaagacccaaaatagcctaagctatcctaagcaaaaaaaaaaaaaaaaaaaaaaaaaatggaggaatccctttaccttacctcaaataatactgtggagctatagtaacccaaacagcatggcactggtataaaaacaaacacatacttcaatggatcacaataaattgccgagaaacagatccttacwtctacagtaaactcattttcaacaaaggtgccaaaaacatacattggaaaaaggacaatatcttcaataaaaggtg

SEQ ID NO: 913177 - DNA, 576 bp, Homo sapiens
atgccacaaaatgggttttctatgagaacttcactttcaggttattacattatctaattaattgttttaaaaaattgtagtcacttgcaatattttaaagttatttcttttcagattataaaggcaaaataaatttaacagaattacatattttttctacagaatctttttatgttttcatttcactttactaagtctcatgaagcctgtgtgctaattttgacaacagtttctatccagatcttatcagacaagataactcagacagtggtcaagggattccctaactcttattacagtggagtttctagtgcttctctaatatgtgtatgtacttcctccaaaattctgcttccctaacaggttcgtttttattctgtatggccaacctaaggatgtagaaaagccagaattatatttaagactttcccaactgtcagttttgtacccmaacaaactagtcattgctgtccctcagaaggaaagctgcctctcacatataaagaaccttcctcttggaagattctgtatcttaaaaggttgttttgaaatgttgatgtaccatataagtaaaaa

SEQ ID NO: 913178 - DNA, 582 bp, Homo sapiens
gctgctatcatttcttacatggtctactgcaaagtctcctaatcatgaactactaaacagaagcaaaagcaacttttgctcttgacccctcacagtcttatttcaacacagtagccagaatgtcagagtaactctatcaaaactcacattacttctccaaagttgttccatcacattcagaataaaagttaaagtcattaaaatggccttcaaagtttacactgtttggcacttgttacctctctgaaccacctcctactatcatccctgattgaattttgttccagctacacattacttttgacttgcctcaaaataaccaggcatgcctctgcctcaaagactcccacccaagcctcaccactcctgttcatacacctgcctcttttcctttaaatatttatatattttattcccttgcatcctacacatggatacacacacacacacacacacacacacactcacactcacaccctggccgcattcctgctgtattttgttccatagcacttgtcattcagtagcataaaatgtsttttaattacatagtctcttcatttactgtatattccccctctc

SEQ ID NO: 913179 - DNA, 498 bp, Homo sapiens
ttaggaaggaaaggaactacgaaatcgtgtgaaaatgggttggaacccatcagtgatcgcatattcattgatgagggtttgcttgagatagaaaatggtggctcctttctgtcttatctcctaktttcttcaatgcttacgccttgttcttctcaagagaaagttgtaactctctggtcttcatatgtccctgtgctccttttaaccaaataaagagttcttgtttctgaagaatgatgactagtcctgtctaaacctcttttatgtgaaacaagtacagatatgtttgcatcgacgtataaagttgaaaacaaattactctttaagtaagtgtggtaataatggaaggcgtgattatgtctaatgtttttcctgtcaattcttttcagttaaataatattttcctcaacacagttcacaactagcattggttggcaaagctaggaggcaaaagagaaatcaatgggcattgcccattttcagctgctcagagactga

SEQ ID NO: 913180 - DNA, 498 bp, Homo sapiens
ttaggaaggaaaggaactacgaaatcgtgtgaaaatgggttggaacccatcagtgatcgcatattcattgatgagggtttgcttgagatagaaaatggtggctcctttctgtcttatctcctagtttcttcaatgcttacgccttgttcttctcaagagaaagttgtaactctctggtcttcatatgtccctgtgctccttttaaccaaataaagagttcttgtttctgaagaatgatgactagtcctgtctaaacctcttttatgtgaaacaagtacagatatgtttgcatcgacgtataaagttgaaaacaaattactctttaagtaagtgtggtaataatggaaggcgtgattatgtctaatrtttttcctgtcaattcttttcagttaaataatattttcctcaacacagttcacaactagcattggttggcaaagctaggaggcaaaagagaaatcaatgggcattgcccattttcagctgctcagagactga

SEQ ID NO: 913181 - DNA, 666 bp, Homo sapiens
atttttaattcatagtcttatttttgacacaccaatagcatgttatctagagcaggaaacaaaggaaattgtgtttttagttgtattacatatctctcaaggggctgcactccaaatcraaataaaaaataaagggatactcttctttccttgaacaatgccaagtaagtgtgtatagaacaatctttttctcacatctcctctctgggatatgtctacctgggtgattagttattgggccatttcatactgtttggcaagaacctgaggctctgacttttaactttctttaatcagctattatatgtcaatataatgtatcataaatataatcatcaatatcaatcatcatcaatataatataatcacaatgattaaaattatactataggtcagactggtaaaccataatcccatctagctattaatagaaatgaactaattagaatataatttttcatagtgaattctatggagcacttattctgcatgctctgttggggaaatattcagtattttaacaagaaagttttcattggagacttacatcgcatgttaacatatttaaggctataagaagtcctacttttaagagttttaataagtttatttcaggatctcttatatttatgtgagtacaaattctttttatccttggaatatccg

SEQ ID NO: 913182 - DNA, 666 bp, Homo sapiens
atttttaattcatagtcttatttttgacacaccaatagcatgttatctagagcaggaaacaaaggaaattgtgtttttagttgtattacatatctctcaaggggctgcactccaaatcgaaataaaaaataaagggatactcttctttccttgaacaatgccaagtaagtgtgtatagaacaatctttttctcacatctcctctctgggatatgtctacctgggtgattagttattgggccatttcatactgtttggcaagaacctgaggctctgacttttaactttctttaatcagctattatatgtcaatataatgtatcataaatataatcatcaatatcaatcatcatcaatataatataatcacaatgattaaaattatactataggtcagactggtaaaccataatcccatctagctattaatagaaatgaactaattagaatataatttttcatagtgaattctatggagcacttattctgcatgctctgttggggaaatattcagtattttaacaagaaagttttcattggagacttacatygcatgttaacatatttaaggctataagaagtcctacttttaagagttttaataagtttatttcaggatctcttatatttatgtgagtacaaattctttttatccttggaatatccg

SEQ ID NO: 913183 - DNA, 609 bp, Homo sapiens
aggtttgggtgattccaataatcctggaaaatcacttctgtgtctgttctctttaagccagagacagtgaaacattgcccttaaaactggcttctcagatgccaatggagacaacaggatctcaggtagcagtggccaaccagccacacctaaattctaggagcaaaggagggcacacttattgcaatagtgttcagggcttacctgataatcatgatgattggtccagttggggtctttggcattctgcaattaacaatgggttggtaggactaaaatggatgagaaacccacaaagttcttccttgatttgtttaactggaacatttccaagtctggcaaatggaagtctgacttggtttaactttggagagtcataaatccatataaaattttcagacctaagtcatttccaacaccccagagcccttgaataaaaaacagacagtacccttgaggatggaacctgtgaaaacctaaaatgtactgaccgaggctgtgagtcctasccttccttgaaggcccttggtcggtcaccaaatagctcagtggtccttccttcactggcacagcataaagagcaatatacatacttttgaaatatttttt

SEQ ID NO: 913184 - DNA, 609 bp, Homo sapiens
aggtttgggtgattccaataatcctggaaaatcacttctgtgtctgttctctttaagccagagacagtgaaacattgcccttaaaactggcttctcagatgccaatggagacaacaggatctcaggtagcagtggccaaccagccacacctaaattctaggagcaaaggagggcacacttattgcaatagtgttcagggcttacctgataatcatgatgattggtccagttggggtctttggcattctgcaattaacaatgggttggtaggactaaaatggatgagaaacccacaaagttcttccttgatttgtttaactggaacatttccaagtctggcaaatggaagtctgacttggtttaactttggagagtcataaatccatataaaattttcagacctaagtcatttccaacaccccagagcccttgaataaaaaacagacagtacccttgaggatggaacctgtgaaaacctaaaatgtactgaccgaggctgtgagtcctacccttccttgaaggcccttggtcggtcaccaratagctcagtggtccttccttcactggcacagcataaagagcaatatacatacttttgaaatatttttt

SEQ ID NO: 913185 - DNA, 589 bp, Homo sapiens
tggtgccaatcctgattacagtcttttattattatatacgaggaaaattctatttcwtcctgttacacttgagttttcatttaatcagtttacaggttgccctttgccaattctgttaatttaatttcctaacattttcatttatgcgctctcagttccaactgtttcaaactcttcaggttccctactatgagttattgattttttttttcattttcatgaagcttcattcaagcaaaatcttacatgaaactcaaaaatacagaatacataagaacacagttgcttcgatggaagcaattgagtagcctcagcgttccatccaattatctttttccagctccaatccacagactgccatatttctcacaacttctgtccactgtctcccactccttcatctggtcaatcccttctcctatatcaatttttaattcttggaagtcttttctaccctgccattatctctgagatgtcacagcagtcaaatctacctctatcatagtacatcacatctatctgttagagtggggtatctctcactgacaaagggtcagatactgtttgaaaccaaatatgactcttgcat

SEQ ID NO: 913186 - DNA, 589 bp, Homo sapiens
tggtgccaatcctgattacagtcttttattattatatacgaggaaaattctatttcatcctgttacacttgagttttcatttaatcagtttacaggttgccctttgccaattctgttaatttaatttcctaacattttcatttatgcgctctcagttccaactgtttcaaactcttcaggttccctactatgagttattgattttttttttcattttcatgaagcttcattcaagcaaaatcttacatgaaactcaaaaatacagaatacataagaacacagttgcttcgatggaagcaattgagtagcctcagcgttccatccaattatctttttccagctccaatccacagactgccatatttctcacaacttctgtccactgtctcccactccttcatctggtcaatcccttctcctatatcaatttttaattcttggaagtcttttctaccctgccattatctctgagatgtcacagcagtcaaatctacctctatcatagtacatcacatctatctgttagagtggggtatctctcactgacaaagggtcagayactgtttgaaaccaaatatgactcttgcat

SEQ ID NO: 913187 - DNA, 611 bp, Homo sapiens; identical to SEQ ID NO: 911241

SEQ ID NO: 913188 - DNA, 609 bp, Homo sapiens
ttctctactctgagaactgaaacctttataatgttgctgagagaaattaaagaagacctaaataaatggaagagataaatcatgttcatacctctgggtacttaatatttttaagatgtacattcaycttaatttgctaaaaattcaataatatcccaatcaaaatcctagggagcttttgtttggtggaattaacaaatcggttctaaaatttatatgggaatccacagtatctacaagagccgaaatactagtgaaagtgaataacagagttggagaactaacataactaagaacttaacataatttcaagacatactacaaagccattataatcaagactgtgttatggttgttaagatagatacatagatccatagaacagggtagaaaatgaagcaaaaaaatatatatatatatacagacatatatgaacaactgattttcaaaagagtaaaagtttttcttctagggtttttatggttttgagttttacatttaattctttaatccatcttgagataatttttgtataaggtgtaaggaaggggtccagttttagttttctgcatatggctagccagtgtgcccagctatttattgaatagg

SEQ ID NO: 913189 - DNA, 667 bp, Homo sapiens
agtctattgttgaaattttccactgcattttkttttttcttaagtgtgtatttcatttccagaaattcctattacttttttctttatgatatctatttctctggagaaaaatttattcatatcctgaatttttttcttaatttctttaagttgcttttcacttttctacagtatctccttgagtagcttaataattaactttctgaattctttggcatttcagagatttcttcttgatttgaatccattgctggggggctagtgtgatcttttggaggtgttatagagctctgttttgtcatattaccagacttaacattctggttctttcttatttgggtagactatttcttcacattgttcttgaatttatttttgattggacttttttttattgctttttttcccctctgaaggatctgactttagtgtttgtagtttattttagcctaatttgattcttggtgcttttaggggtgaagactcagtatgagttccttagttatagagcatctttgtacactgggtttcccagatcctagttgtagtagttgtatacttggtgtgtgagaaggttcactgtatcctatgggattggaatcacagggatctcttgaagcttatcttgttctcttgtggtgtacactttatttatttatttatttta

SEQ ID NO: 913190 - DNA, 685 bp, Homo sapiens
ggataaccttaatcttagactggtgagcaatttatggtactttgatatcttccttttaggwgctttgggcattttaaattgatcatatagtgcatggcatgcagcattagaacaaaattagaatagatttgaatattaagcaaagggactggagcagaggcccagatatcaccactggaggcatcaaagggataaaactgtacttcatctcctccacaggagcatgcaagcgtttgtggttgtaggtgggtgcctctgtactctctcccaaacagcaatcctttctgctgttacaaaatgcaactattccttttggggacttccaagtcctttatggtcagtccatatgttgtgattgcactgaccacaaaggtgatcataggaaagcgtataactgaggatagaccaaataaattcagtcttatgattttatctggtataatcagaagagaggaagactttttcactggagatggcaagatagtggagtacatatatggtgtttccagcgactattttttactactatatgtaaagagacatctgttaatgaaatcagtagatctaaaagataatgaaagacattgctgaggatattatttgagcatctggacttggtgctttctaagtcattcttccctgaattttcagttgattgtgacaagagttcaaatttgagttaagt

SEQ ID NO: 913191 - DNA, 654 bp, Homo sapiens
ttctaacagaggcagggatttaagcttgtcaatccttcttcttctcggaattatatatagaatttagcaaagaaaattttaatagaatcaagtatttttattaattattgtgaagtttacacctagaaagcttagataataggagctcaaatcaagctttccttgaagtgtctgcagagatattgatactgcatgcttatagtctaatctgagtgttccaaagaatgaagtaactgaccagactttggtttctgcatttgaaaattagcaactcactgtaggttcaatacgttttgacagattggcttttgtatttttcccaaatattaaaacatagcttgaaaaatattgaatgattgattctacttttaaaagctcagttagtatgaaatgccagagattgctgaatgtctaaagacattcaaatacattgggggatggaagaagccttacctgcttataagagagtatgcctctggccaggcgcagtggctcactcctgtaatcccagcactttgggagtccgaggcaggtggatcacttgaggccaggagtttgaaaccagcctggccaacatgacaaaaccccgactctactaaaaatacaaaaattagctgggcatgktgccatgtgcctgtaatcccagctactcag

SEQ ID NO: 913192 - DNA, 629 bp, Homo sapiens
attcatattttctattgcttttcatgtcaatttagtattttcaatgtattggtrcaaaggtgtttataatatcttgtgttttaacatctatatactctcaaattatgtcctttttaatttttagtcatggtaatttgtggtcctccctttcttcttggtgaagcttataagttcattgatgttttgaattgttttgggtgcctcttgtggctcatctcacatcctattgtccttacctctatttctagatgcagctatgacattcagtcttcaactcactttgtgctgatggtgtccaactcaagcccacacatgatacttttccttattctcccagaagtctctacactgctgaagtatggggttaaaatagaagattgttgacagatagcatactgggtatgtactgcccctagggaactcttcagtatagataaatggaagcctataattaaatacttattttcaatcttctagtcaacaattttcagaagcattgataagcacaaataaaatatattggtgatcaacttaatagtacacccttaacattaatattcctacttgccttttataatttttgatccctcatccctgctccctgggataacctccccaatacaccatct

SEQ ID NO: 913193 - DNA, 513 bp, Homo sapiens
tagtgtctagttttcccagttctactttttgaagaaattatacttccttacccattgtgtatccttagcactgttgctaaagatgggttgaccatatatgtatgagtttacatctggtctctttattttgktccacttaatatatctgtctttatgctagtaccatactgttttaattactatggtttctaccacttctattctgtaaagtcctggaagtcttagccagaaccattaggtaagagaaagaaatagaaggaatcaaaattgtaaaggaacagaataaaatgttctctgtttgtagatgacatcatcttgtgtgtagagaaccctaaaactccacctacacaaaatgttagaactaataaacaaattgagtaaatatgcaggatacaaaatcaacgtacaaaaaatcagttgtatttcaaaacattaacaaggaaccattctaaaaataagctaaaaaacaattccatttacaatagcataaaaatcatacaatatttagaaata

SEQ ID NO: 913194 - DNA, 687 bp, Homo sapiens
atttcatacattgtgatggttagtttttgtgtgtcaacttgcctaggctatggtatccacttctgttaaacactaatctaaatacaccagtctggatgttgctgtctgatgaggttaacaytgatgatcagtagaccttaaatgaaacagatatcctccataacgtgggtgagtctcacccaatctgttgaagatcttaagagtaaggattaaggaagaaatgggatcctcaaaatttgaatgggtcatctgaaaatactataaatgaagaaaagggaattgtactcttaaattttactgaattttagaagtgtccctttcaccatcatttagagattaaacctgcattgactgaggaaactgtaatgccccgtccccaggtagtttccttgcaagatgctgttaatcctcctcagcgcccccctcccacgactcttttattctagacttgtacctagactcaagttctagcagaaagctgaggtcgaagtgtaccccatgagtagatatgccagaagccaaaagaactacataattttttcaatttatacacacagaaaccctgggaatatgtgagaaataagtattaaggttgtgggatagtaggaacataacgttggatctggctaaatttattgatacaggccagctaagcagagatccttcatttaatagtgcagcatgagg

SEQ ID NO: 913195 - DNA, 580 bp, Homo sapiens
gtaaattggtacagccattatggaaaacagtaggcaggttcttaaagatattaaaaatataactattatataatcctacttctagatatatactcaaaggaaatgaaataattatcttgatatttgcaatctcatgttcactactgcattattcacaatagcgaagatatgaaaacgtgttgacagatgaatgaataaagaaaatgccacacacacacacacacacacacacacacacagaggaatatttttcagacttaaaaaagaaaatcctgccatttgcaactctgtgtatgaacctgtagcatgttaggctaagtgaaatcagatgcagaaatacaaatactgcatgatctctctaattgtggaatctaaaaaagttgaactcacacaaacagagagtagaatgggggttgccagaggctgtggggtaggaaaaacagggagctgttgatcaaagggtacaaagtttcagttacttaggatgaataagttctggaaagmtaatgtagaacatggctactatagttgataatatagtattgcatgcctcaagtttgataagggaaaagatattaag

SEQ ID NO: 913196 - DNA, 600 bp, Homo sapiens
taagtaaagaatagtgatatggtttggctgtgtgccaatccaaatctcatctggaattcccacgtgttatgtgggggacccggtgggaggtaattgaatcatgggaacagttctttcctgttttgttctcatgatagtttgtctcgggagatctgatggttttacaagggagagttgccctgctcaaattccttcttctgttgtctgccaccatgtgagacatgcttttcatctactgccataattgtgaggccttcccagccacgtggaactgtaagtctaataaacctctttcttttgtaaattgcccagtctcaggtatgtctttatcagcagcatgaaaatggattaataaagtcacccttgattttgccattattaaaataaagaatatatattagtttgctcataaaataaaatactatatgagagttaaatgtatttatatgtccaacataagtaacatttaaaaatgtagtattggatgatgwaagcaagtcttaaaatatatatattgtaatgataagatacaattggccattgaacaccacacgtttgaatagcacaggttcacttttttgcagactttattctgcttct

SEQ ID NO: 913197 - DNA, 664 bp, Homo sapiens
tttcaagaatgtattacatgtatccaaacatcacacagtaataaataaatatgtataattattacatgtcaattagaaataaaatgctacttaaaaaataaaaaawttaaatctaaagcaaaatattgacaagaagaatctaacaatcattctcaaaattatttggccaagtagagatattcttcagtaatatgaagctgattttataccaacatatttatgaatataatatgtaagtaaagtagaaaatcaaatgattatattcattgatgctaaaagacatttaataaaatatagaagccactttcaaaaaaattataaatagaagaaaactttaaatgaatacacaataatttggtaaaaccaatagcagtgtttattctaaatggtaaacctcaaaatttatttttataaattcctaaagaaagaatctttttgtctgatgtcaacttaactattctacacctttgaggtcaaaggaaatatagagaaaaataaaatacttttcaatattttgtaatacaaaaaggaataaaattgtctcatgttgtcatgtaattacacacctacatggaagaaattctagtaaatgtctacaacacggaagagaccctagtaaattaataatgaaattattaataatgaataatgaaatgtatgcttt

SEQ ID NO: 913198 - DNA, 564 bp, Homo sapiens
cccaagaccacgggaacctaactgtttcatcagcgtgacctggatgtaagatatggaatcaaaagagatcattttggagctttaagatttgactgccccaytggatttcagactttcatagggcctgcagccccttggttttggccaatttgtctctcctttggaacagctgtatttacccaatgcctgtacccccactgtatctaggaagtaactaacttgcttttgattttacaggcttataggcagaagggacttgccttgtctcagatgagactttggaccgtgttcttttgggttaatgctgaaatgagttaagactttccatgactgttgagaaggcatgattggttttgaaatttgaggacatgagatttgggaggtgccagaggcagaatgatgtggtttggttgtgtcctaacccaaatcccatcttgaattttaatccccatgtgtcattggagggacctggtaggaggtaattgaatcatgggagtagtttccccagtgctgttctcgtgatagtgagtgagttatcatgagatctgatggttttataagcat

SEQ ID NO: 913199 - DNA, 669 bp, Homo sapiens
aaacacatgggatatttttaaacaaatcaatggaattaagagagggcagaagaatgtcaactgactgccagaaaaaatgaagccatagtctgaatatttggggaatggraaattctgtttgggacagggcaataattctactggtgaaatcccagggaaattattgttgaagtgaaagcaggtaccaggtatggcaatagtgagaagtgagtcccaaaccataggaatcaatgggaaaattttaaatggggaattgatctcctttatttctcacctcaaccttccagaagataagaagctccatcagtaaaatagctaggtatctatccattcatcgaatctgccaccaaaacagcactgacaaacacatctctgatttaatttttaaaaataagttggcaaaaaaacataagcatattttaagaggtgatttaaaaaaaaactagaaagaacaaagaggggataatttaccttagtgttattagaaaaaatagagaaacaaacaaacaaaaaaagcttaattacatcctgaaaaagcttgatgataatgcatccatgaaccaaaataggaactgtttaacatgaagcaacgaaccgtagcaataaaggccactttgacttcactaaagccaacaataaaagaaagttgggagagatagccaagaaaat

SEQ ID NO: 913200 - DNA, 617 bp, Homo sapiens
acagtcactctatttataaaataacgagtttcaagaagattaagtaacctgccacgttgatacagctaaaaagagatatgacttacatttgaatrtatttccactgcttacaaagccgcccacgcttaataaactgtgctgtactcctttcaccatgggtcatatcttcagcagaaagtgctgggacataaatcaagaacttctggttcccaaactgattcacttgccgccttatagttcacattctgaatcaactgctgttgtgttggtgacagtaaaagcacaaaagaacaatcaggcttaatttttttttaaagagtcccttcttggtatcaagactctggagtgtagcatgacaaaaaaatataccactgttgttataattatatgaaatcacaaaagtcaaagctgaccattattaacttcagtaaaaatttgacccacataatgaaatttccaagctttaggacaatatagatattagattgatccagaggaaataaattagacaacattttcttttaaaagtatatgtggcattaatgtggatttgtgaaataaacattatacctttgtattcatacaaagtcttgtataaataaatacatattttgttt

SEQ ID NO: 913201 - DNA, 652 bp, Homo sapiens
taagactgaatttgaagtaaatactattattattattgcatgtaatctaatcttgaaactcatttgaataggaaggccagaaaaaatattaggatatgaaaacaaatcaactcaagagatttgaaatagcatttctggcttagtttattgatcagagaactggtaacagaattatggaaataatttcctgatcaatatttttggaatggagaaaccttgagaaagggttgttggtgaattaataattttgtttgggacacttacatttgaatttcctattggatagatacatcacaatgtcttcgtttttcaggcacccagtaagggagtctataaagaactaattttcccctacattggaaggtggtgacaggaaggtattttaatcagggctctggtggaatacaagacagaaataatttccagggagaaactcttttttcaaacaattcaggcagaagagggaatggcaagatgaaattttggattctacatgtgctcacctatcatttaattttcattaccaacaccaagtatacacatttttaaaaatgatgaagataacatttcaattatgtwgtgtaaggatgaattaatcactacgtcatcatgcagaaagaactgatttaatcattaaaaacaaaacaattac

SEQ ID NO: 913202 - DNA, 663 bp, Homo sapiens
gttctttagcttaattaggtcccatttgtcaatttttctttttgttacagttacttttggtgttttcattataaagtttttgccagggcctatgtccagaatggttttatctagtttatcttccaaggcttttataattttaggttttaaacttacgtctttaattcatcttaagtttacgtttgtatattgtgtaaggtaggaaggaaggaaggaaggggtccagtttccatcttctgcatatggctagccagttatcccaacaacatttattaaataggaagtcctttcctcattgcttacttttgccaactttgtggaagatcaaatggttgtaagtgtgtggccttatttctaagctctctattgtgttctactggcctatctgcctgtctttgtaccagtaccatgctgttttggttattataaccttatagtatagtttgaagttgggagatgtgatgcctccagctttgttttgttctttgtttttgttttttggcttaggattgctttggctatttgggctcttttgtggactcatatgaaatttagtatagttttttcgaattatgtgaagaatgtcattggtagtttgatatgaatagcattaaattrtaaattgcttttggcagtatggccattttaacaataatgaatctt

SEQ ID NO: 913203 - DNA, 577 bp, Homo sapiens
acagtcaaagaaaatcttgttgttttgttacgtgctactaattttttgagggaaattgcggggcacwttgtgacgtagcaaaggttaattgatataaataccaaccaggttatttatctagttaacgtcattgatattataatctagatgattacaaaatctccaattcattgaaaaaagatgtaacttttgagaccagtaagacctgactttgaatctggagcttgatactttgcagttgcctgactctcatctcttaattttgccgcacttgatttgggccctaagaaaaaaatgggaacacaaccttgtacagcttttgtagatgaaataaactttataaataaaatatattcagcatatactacatgctcaacaaactattattattttattaattacatgtcattatttagacatcatgtaatgtacttattctgttttttacatttatattattattcttatttttaatattttgctgtcaaagctttagagcttagtactgagattctcaactgtcattaattacatttttgagcattttaataacattttatggaattccaatcagcgt

SEQ ID NO: 913204 - DNA, 579 bp, Homo sapiens
aacagtcaaagaaaatcttgttgttttgttacgtgctactaattttttgagggaaattgcggggcacattgtgacgtagcaaaggttaattgatataaataccaaccaggttatttatctagttaacgtcattgatattataatctagatgattacaaaatctccaattcattgaaaaaagatgtaacttttgagaccagtaagacctgactttgaatctggagcttgatactttgcagttgcctgactctcatctcttaattttgccgcacttgatttgggccctaagaaaaaaatgggaacacaaccttgtacagcttttgtagatgaaataaactttataaataaaatatattcagcatatactacatgctcaacaaactattattattttattaattacatgtcattatttagacatcatgtaatgtacttattctgttttttacatttatattattattcttatttttaatattttgctgtcaaagctttagagcttagtaytgagattctcaactgtcattaattacatttttgagcattttaataacattttatggaattccaatcagcgtt

SEQ ID NO: 913205 - DNA, 545 bp, Homo sapiens
ataaaaactctcatatgatataatatattcataccataatctagttttctagaaaatgttaagtaaggtagctgctctctgtctccaaccctggaatatgtgttcctcttcttgcttcttatatccactttaattgttaaagtaaaactgtgttatattttcctgtttacttctctagaattcgatttaactataaattattttaggacacagaatggttctcatttattctcatttatccttataaccatatttgttaccaaaacctgaagcaaaagttcacaggtgctacacagatttctgtggaaagtaaaaatgtgactcacctgacattttccatacatttgataaactaaaccatgtcaatctatgaaataagaataccagaacttttttaaattataagatctatagaagagaaaaatagtacttaataagtgatatattaaatgcattagattttaagatggtgattaacattakattaaaatggaaatactaacttttgaaatcagttcttaaaatagaactgatctattcaaagg

SEQ ID NO: 913206 - DNA, 545 bp, Homo sapiens
ataaaaactctcatatgatataatatattcataccataatctagttttctagaaaatgttaagtaaggtagctgctctctgtctccaaccctggaatatgtgttcctcttcttgcttcttatatccactttaattgttaaagtaaaactgtgttatattttcctgtttacttctctagaattcgatttaactataaattattttaggacacagaatggttctcatttattctcatttatccttataaccatatttgttaccaaaacctgaagcaaaagttcacaggtgctacacagatttctgtggaaagtaaaaatgtgactcacctgacattttccatacatttgataaactaaaccatgtcaatctatgaaataagaataccagaacttttttaaattataagatctatagaagagaaaaatagtacttaataagtgatatattaaatgcattagattttaagatggtgattaacattatattaaaatggaaatackaacttttgaaatcagttcttaaaatagaactgatctattcaaagg

SEQ ID NO: 913207 - DNA, 545 bp, Homo sapiens
ataaaaactctcatatgatataatatattcataccataatctagttttctagaaaatgttaagtaaggtagctgctctctgtctccaaccctggaatatgtgttcctcttcttgcttcttatatccactttaattgttaaagtaaaactgtgttatattttcctgtttacttctctagaattcgatttaactataaattattttaggacacagaatggttctcatttattctcatttatccttataaccatatttgttaccaaaacctgaagcaaaagttcacaggtgctacacagatttctgtggaaagtaaaaatgtgactcacctgacattttccatacatttgataaactaaaccatgtcaatctatgaaataagaataccagaacttttttaaattataagatctatagaagagaaaaatagtacttaataagtgatatattaaatgcattagattttaagatggtgattaacattatattaaaatggaaatactaactttkgaaatcagttcttaaaatagaactgatctattcaaagg

SEQ ID NO: 913208 - DNA, 624 bp, Homo sapiens
atttctgtattacttcctgtattcctgcctctaaatatgttctagtttgtcttatcctgaaagttttcttctttagatccttaaatttatctgtttcttttctttctctgaaaacrttttgaaatgtagacatatcttgctttcactgggtcattatctactcacttttcaaactcttttttttttttttttttttgtgagatagagtctcgccctgtctcccaggctagagtgcaatggcgcgctctctgcttactgcaaactccgcctcccgggttcctgccattctcctgtctcagcctcccaagtaactgggactacagacgcccgccaccgcgcctggctaatttttttgtattttttagtagagacggggtttcaccgtgttagccaggatggtctcgatcttttgacctcgtgacccacccgcctcagcctctcagagtgctgggattacaggagtgagccaccgcgcctgaccattacccatgctcttaatcatgatttgtgtttcctcttggccaaatcctgtgttggcctatctcacttataataagacggggactgctgtcctccagaaaatgttaactaaaagtactgaattcttcatggcatatgctgaat

SEQ ID NO: 913209 - DNA, 624 bp, Homo sapiens
atttctgtattacttcctgtattcctgcctctaaatatgttctagtttgtcttatcctgaaagttttcttctttagatccttaaatttatctgtttcttttctttctctgaaaacattttgaaatgtagacrtatcttgctttcactgggtcattatctactcacttttcaaactcttttttttttttttttttttgtgagatagagtctcgccctgtctcccaggctagagtgcaatggcgcgctctctgcttactgcaaactccgcctcccgggttcctgccattctcctgtctcagcctcccaagtaactgggactacagacgcccgccaccgcgcctggctaatttttttgtattttttagtagagacggggtttcaccgtgttagccaggatggtctcgatcttttgacctcgtgacccacccgcctcagcctctcagagtgctgggattacaggagtgagccaccgcgcctgaccattacccatgctcttaatcatgatttgtgtttcctcttggccaaatcctgtgttggcctatctcacttataataagacggggactgctgtcctccagaaaatgttaactaaaagtactgaattcttcatggcatatgctgaat

SEQ ID NO: 913210 - DNA, 640 bp, Homo sapiens
gtaaatcctgatttgggacagaattccaatatttatatgaaacatgaaaatgtggatcatttctctgttgttatgatatttatccaatggctctgttttgttccacttagggaagcctatttaattaaaaaaatacgtgctgatttgtgcatgattttgtcaggaagttatttgttgttacggctttgtatttttgctgttatgtatgtactctctcggtacctggctacacaaaattaatgctcctaacttatccagatcactgtgtcttggtaagcttctcccatcctgtttctcttactcttctgtgcccatcttcatatatgaactaaaacaatcctctaatttgcttaatgtctttaaagtggagtatgtagctgaatcaaacagaatatttgcaaaacttgtcactcatattttgagtttctactttagtgtcttagtgctttctcgatatgggagaattcatgtcctccattcagaagtatgcactaagtaagaggtatcatgtctggttcttgattaggtactaatcttgaaatattatcctacaataggttagagcacgtatatctcctgataatatattgaatatgatagayttaaataattggttaactaaatactaaagcaaattgct

SEQ ID NO: 913211 - DNA, 640 bp, Homo sapiens
gtaaatcctgatttgggacagaattccaatatttatatgaaacatgaaaatgtggatcatttctctgttgttatgatatttatccaatggctctgttttgttccacttagggaagcctatttaattaaaaaaatacgtgctgatttgtgcatgattttgtcaggaagttatttgttgttacggctttgtatttttgctgttatgtatgtactctctcggtacctggctacacaaaattaatgctcctaacttatccagatcactgtgtcttggtaagcttctcccatcctgtttctcttactcttctgtgcccatcttcatatatgaactaaaacaatcctctaatttgcttaatgtctttaaagtggagtatgtagctgaatcaaacagaatatttgcaaaacttgtcactcatattttgagtttctactttagtgtcttagtgctttctcgatatgggagaattcatgtcctccattcagaagtatgcactaagtaagaggtatcatgtctggttcttgattaggtactaatcttgaaatattatcctacaataggttagagcacgtatatctcctgataatatattgaatatgatagatttaaataattgrttaactaaatactaaagcaaattgct

SEQ ID NO: 913212 - DNA, 649 bp, Homo sapiens; identical to SEQ ID NO: 909922

SEQ ID NO: 913213 - DNA, 649 bp, Homo sapiens; identical to SEQ ID NO: 909923

SEQ ID NO: 913214 - DNA, 543 bp, Homo sapiens
ccctctggatttgtaggattctgccccagaggtygctctcacaggttgttatgtgcctgcagcttttccacagcaagggtgcaaactgccagtggatctacccagtctggaggatggtgaccttcttccacagctcaaccaatgagaactctgtctgtgggatctgacccacattttccctctgtactaccctggtagaagttttccatgaggactctgccacttcagcaggcttctgcctggacacctaggcttttctatacatcctaggaaatgtatgcagaggttcccaagcctcaaacactcttgcattctgtgcacctacaaagtaaacaccatgtagaagccaccaacacttatggcttgcaccctctggtgctgtggcctaagctgttcctggactactttgagccactgctggagctgaagctgacaggatacagggagccatgtcctaaggctgtgcagggcagcagggccctgggcatggcccacaaaaccattctctcctcctaggcctcagggcctgtgatggaaaaagct

SEQ ID NO: 913215 - DNA, 543 bp, Homo sapiens
ccctctggatttgtaggattctgccccagaggttgctctcacaggttgttatgtgcctgcagcttttccacagcaagggtgcaaactgccagtggatctacccagtctggaggatggtgaccttcttccacagctcaaccaatgagaactctgtctgtgggatctgacccacattttccctctgtactaccctggtagaagttttccatgaggactctgccacttcagcaggcttctgcctggacacctaggcttttctatacatcctaggaaatgtatgcagaggttcccaagcctcaaacactcttgcattctgtgcacctacaaagtaaacaccatgtagaagccaccaacacttatggcttgcaccctctggtgctgtggcctaagctgttcctggactactttgagccactgctggagctgaagctgacaggatacagggagccatgtcctaaggctgtgcagggcagcagggycctgggcatggcccacaaaaccattctctcctcctaggcctcagggcctgtgatggaaaaagct

SEQ ID NO: 913216 - DNA, 597 bp, Homo sapiens
tgtcagggtgtcggcagagtgaattgctcctttgcaacataatgaatataggctttgttacataaaaatcaaatcatgcaaatgcagtgctttcatcaaaayggagaaggaagaaattaacttaaaaacctgttacatattgtcttgccttattccatataatcagcattcatttcttattctgaatttcagtaaagtaaatttggttattttgtggagcatgttcattcatatccaaaaaaaaaccttctgttgttttcttcaagttttataaacagacccttttcagatatcagactatttgatatcttgactcttaaactcttgactaacttaaagttaagattctgacatcctcagtgggataaaaactgtaagtggaggtacttgtagtgatttctatcaactaatcttatttgtctaattgtgccactttttactaagctctttcaatccaagtactttattctcatgacctgaataagagctctgtgaaataaatactatcaatattttattttacaatgaagaccctgaggcacagaaccccaataacataacgcacatagcactttccatttcaggaattagaggaag

SEQ ID NO: 913217 - DNA, 578 bp, Homo sapiens
agaagacttagctagtctagtccttccacattcttctgccagcttttgttctggccctcctggcagccgattggattatgcccacccaaattgarggtgggtctgcctctcccagtccactaactcaagtgttaatctcctttggcaaccccctcacagacacactcgggaacaataccttgcattcttcagtccaattaagttgacattcaatattagccatcacggaactccatgtgaagatgaggaaaggattggagtgatacatatacaagccaagaaatgccaaggattcctggtcattgccagaagctaggaaagaggcaagaaatagattctccttaagcaccctcaggagtcaaccctgccaacaccttgatcttggacttctgactttcagaactatgagacagtaaatatctattgtttaagtcacccagtttgtgctactttgttgcagtagccctaggaaacgaatactccagctctgattgattcaagaaacaaaatatttaggggtactaatattgaattaataggttgctcaattattaaaatgaagaataagactgttacca

SEQ ID NO: 913218 - DNA, 704 bp, Homo sapiens
acaaaattaactttcacaaatactctaattgtcaatgtggcacttatattcctctccttacatacttaaatactatgatataaagccaatatatcttatgttacatgataagagaataggagacagaagaaaaccacagtattatatacacaatatatacacaaccaaaaatgcatttataaaaaaatggggagatcatatttattacaatcaaaattatcattgctgtaactggtcatgtagtcatagctagtatttataactactttattcaagtatccattctgtattccctttgtcttcaggaagcacctcagctggtagtgtttttttgtcttttgtggttacccaattttttattcctgaagggctgtgatcactaacaaccttgtcttcattgggctgttgtttcctattaaccttaatcacagggcatggtaatactaagcaaaactataagggatcacccacactctagatgtattttaccttacctacattatggactagcagtccaatttccccttggtagtcaggatcaatcaccccagatagtactttaactcccttctttgcctattgattgagaagcatgaggagttcaaagcggccaggtgagtcttagcttccatttcaatggaatcattattgtrtctcctaatggaaggactcctccctttgcaactaagacctccagcccagca

SEQ ID NO: 913219 - DNA, 582 bp, Homo sapiens
ctgtgctgagtttatattattatctatataacagatctcaaggaatttgcaaaaacaagtagttttttaaatctaattataagatctcagaaaacaaggtcaatatacaaaagttagttacttattaagaaattcatcctttgcagtgagcaatgagaaacaatattagtttctaaaaatgccatttacaattgcacagacatgaaaataaatactgagatataaatctgacaaaactttttaataatctacatgtcttttactacatgtgcaaaactacaaaattctgataaaagaaattacagaagatctaaataaagtgtgataagttcaacattacttcactattgttaagatgttaattctttcctatttgatgaatatattcaatgcaatcccaattttttagaaaaatactcctttttagatatcaacaaacatatatataatgtttatatgaaaagccaaaaaacctgaaatactcaataaaaactgaaaaarcataaagttggaggatgcatgctacccgattttaagacttactataaaggcacagtgtcaagacagtgtggtattgactaa

SEQ ID NO: 913220 - DNA, 647 bp, Homo sapiens
tcaatttgccaagaaaaaatgcaaatttagcaaggatattccagagaacagtaccagccagttctgctaacaccaaatgtagcagggaaataaagagagagtaatttgtatttatgaaatagggaaagcaaactaccttggggatgactattttcttattcctagtaaaagacccatttttgggaaatcacaacagtcaacagagaagcaggagaaacaaaagtcttcatttccctcaaaaacactttccttgacgtaaaaggagcttcgtttgttctcttactgcagtcacagcaggatgaaaccatatcataattcttaattccaggaaatttaggacaaattatgagcaagctattcttttaaaacagctgctatttttagtgtctttataattatttaacttcctggaaagaataacatatacaactcttcatcttccaggctccaatgtttgggctttttaaaaatgtttaagtaaatgttagagtagttttaataaaaacatgccaaattcaccttcttctacccacartgtttataggttcttctgtatcactatattacctaaaaaaaatggtcctgaaggaaagaaaaagtgaaagtgggggctttgaaaattatatattacaataactttatatttt

SEQ ID NO: 913221 - DNA, 663 bp, Homo sapiens; identical to SEQ ID NO: 909857

SEQ ID NO: 913222 - DNA, 606 bp, Homo sapiens
gttctagttgcactgactgttgaaaactgacatctgagttggaaaggagagaaatgtttaaaatagagacatgttgaactcaccaaataaggagggaaagaagagagaagaagaagaaaagaaataagaatgtatgtttctgcaagttcaacaattacgtgtgttaacgcaggagcttaaagtaggagctctggagtacacagactcagagcaccatgaacatagttgggaggcacagcaggttaacagagatacggagtgaagagatagctggaggatgcatggcctataggatctattgcttggaagaagtcaggagggcacaagacaagctgagactgcagtgaaagacctgaattttccaccttgagaggatgagctatagtgaagtgccttcatttgcccaagccctcaaagctaactcagaagttaactccttaatacagttttctttaatgtccagattcaagacaccctttgctctttactcttccccagtacttttcctctgcatactcttataaatatggtagccatgaatctcaktctgcaaacccaatttttttaactttaaaatttttaggctttaaatccagcattttaaaa

SEQ ID NO: 913223 - DNA, 621 bp, Homo sapiens
ccaccactgtagcacctctggggctacctcacacgttgtagatgctccataaggaaaaaagacaaggttgagcaaattgtactgagaaactggatgagaatggttggcctaattttrccccaagaattaacccaagcatgcaggtgtatctggtttaattttgcataccttccgtgaaaaatgacttaccaagcagaacttcacacattgcggttatgagaatgcattttttcattggctccagttcacatggtttaaatagcatttcatttcactatgagctttattttaatttgaaacttcacaaatacgaaaccatttgaatcaaaccagatgcaagcactcagaatatcctgctcgttcctgtcagcctgcttcacttgagaaacaattcaatttctcttgacttcaagcaaacccttattgagcaggcctctttttctctaattggcttttagacttctccaccctttactagctggtttgtggaaaaaagcaagtaatcttcaaaaaaaaagttacaccttttttccttaaaaacaagttattttgtttggcaattataaaataatacagaaatatgagtatgcatattgcatctatgtgttttgcttgcatatt

SEQ ID NO: 913224 - DNA, 370 bp, Homo sapiens
agcttcagtcattgttcttgctatamttacataaatacttaggtcaaaccagacaaagctaaatctattttacaaacaaatttattttcctctaattatgttcagtaaaaattgaaatgtctataacaactctgttattgtactgtagccctgtacattgttttcaagtttttattatcaacctgtagactggactgaatcttaaattcttctatgttcctctaatccaattttctcctatgtgattactaagaacagaaactgctctttcttaaggccctataaactaaactcaatgacttaatacaaatttcaaggacaagcttcatgcttgatgcatgggccacacagtgagttcattaaactaccc

SEQ ID NO: 913225 - DNA, 620 bp, Homo sapiens
aagtttgtactaatttgttacagcagcaattggaatataatacacttagattgtgatagaatattcttcataggtaagcactctcccatcccccacctccttatgcaagatgtactccctgccccttgacattggattttgtcacatgactttttgaccaaaaggatattactgaacgtagtagatgtaatgtgactatattaagctgttcttgcattgctatcaatagatatcagagactgggtaatttataaagaaaagaggtttaattggcttatggttctgcaggctttacaagaagtgcggtactggcatctgcttggcttctagggaggtctgaggtagcttacatcatggcagaaggcaaagggaatgcaggcacatcacatgataagagcatgagagtgagagagtgcattgtaggtgaggaggtaccacacgcttttaaacgaccagacctcatgagaatgcacatcatgaagacagcaccacgccatgagggatccacccccaagatccaaacacctcccaccaggccccaccttcagcactggggattacaattcaacatgaggttgtggggagtgkggcaaatgtccaaaccatatcattctgtccca

SEQ ID NO: 913226 - DNA, 580 bp, Homo sapiens
taaaaaacataaatatgtaagctccacacctgaacaactgaatcagaatttctgggcgtactattaaatctctacaggtaattctgataagcagccaaagttggaaaatatttaggcctgagtgatttctgtttgtttcagaatgtaaaacaaacaaacaaacaatctaatcactgactactgtttttcttgttcacttttaaaacattaagtagacatagtctgaattgaccacttgagtttctgccaaatttcacagcagacatattcttgcctgacatggtcaaaaaagttattttatgattcaaatcccttccaccccatcagacggatagtagaacgaacattaaccctgaaaacatcttcctctgagtcaaggtttctcgccattggcagtattgacattttgggttggataattctttactgtagggtctgtcctgtgcataataggataggtagmatccctgccctctacccacacaatgtgagtagcatacctcctatccccagttgtgacgactaaaaatgtctcccatcgtggctgactgccccatggagggcaaaatcaagggcaaaa

SEQ ID NO: 913227 - DNA, 585 bp, Homo sapiens
atcagggctctataaaaatacagcaaagagaggccatttcatttgaggaaatgttatatgtagatatttttaacttgagtctagaaaattttctagaagtataaatatgtagcttaaatatgtttcttaaagatcactggataactaaaactgatggcttgcctcacatccttgttttaagattcacctgcttaatacccaggaactcctgaaatttaaatacttgattaaacattaagacacctgaaaattaaaagtttaatgtaatcatctgacctcaaattatgccaaaaataaaactgctccttttctaaaatgattaataaaaaagatggcaatgaaaaattgtaacacaaaaagcagatgggtatcgattcacttctcttccaaacaaagtctttgcaactcagctttctcattgtaaatgtagagttttacaaatccttacctacttytcaaatttaactggaaaataaattgaaatgatgtatgtgaaagtattaaaactatgagccatatcagtgcaatatgatgaagagttgaggtaatttgaaaatatttagcctggagaaaagaagactcaca

SEQ ID NO: 913228 - DNA, 502 bp, Homo sapiens
atagctgtcctcatttacaaatggagatggtgatatctgttagtcccctgccttctactgcctgctgtaggacaatttcccattcctttcagcaacccttcagtgaagagaggggccacaaaggcaaaggaatcttagctaataggcactatagcaattttctaaatactttattttttttagagcaattttaggttcacagaaaaactaagagtcaggtgcagagatttcccatatgcttcctgccccacatgcatagtctcctgcattatcaacatctcccaccagagtggtacctttgctacaattgataaacctatatcaacacatcacaatcatccaaagtccatagttaatattagggtttactattgstgttgtgcactctatgaatctgggcaaatgtatagagacatgtatctattaccatagtaccacacaaaagcatttccactgctttaaaaactctgtgtctgcctattaaccctcccaaaccatcata

SEQ ID NO: 913229 - DNA, 604 bp, Homo sapiens
cacagaaatccaaaggtcaacagccagcctcaaagatcaaaggtagatgaatccacaaagayaagaaaaaaacagcacaaaaatgctgaaaatcccaaaagccagaatgcctcttttcctccaaatcatcacaacacttctccagcaagggcactaaatagggctgaagctgagatggatgaactgacagaagtggcttcagaaagggggtaataataaatttcactaagctaaagtattatgttctaacccaatgtaaggaagctaagaaacatgataaaagattacaggagctgttaactagaaaaaccagtttcaagaggaacataaatgacttaatggagctgaaaaacacagcaggataacttcgtgatgcaaacacaactatcaatagccaaatcaaccaagtggaagagagaatatcagagcttgaagacaatcttgctgaaataaggcaggcagacaagattagagaaaaaagaatgaaaagttgtgaacaaaacctcaagaactgtggggccatgttaaaagaccaaacttacgactgattggagtacctggaagagatggggagaatggaaaaaagttggaaaacacatttcag

SEQ ID NO: 913230 - DNA, 622 bp, Homo sapiens
aagtcccaggatactaaatcaatatgcagaaatcataagcattcgtatacaccaacaacagacaagcagacacccaaatcatgaatgaactcccattcacaactgccacaagagaataaaatacttaggaatacagctaacatgggaagtgaaggacttcttcaaggagaactacaaaccactgctcaaggaaatcaaagaggacacaaacagatggaaaaacattccatgctcttagataggaagaatcaatatcgtgaaaatggccatgctgctcaaagctatttatagattcaatgctatccccattaaactaccatcaacatttttcatagaattagaaaaaaatttaaaagttatataaaaccaaaaaagaaatcgcagagccaagacaatcctaagcaaaaaaaaaaaaacaaaccaaagctggaggcatcacactacctgacttcaaactatactacaaagccacagtaaccaaaacagcatggtactggtacaaaaacaggcacatagacaaatggaacagaatattgaactcagaaataacaccacacatccataaccatctgatcttcaacaaacccaawgaaaacaagcaatggggcaaggatttcctatt

SEQ ID NO: 913231 - DNA, 604 bp, Homo sapiens
ggattttgaactcctagcattcagagcttggagacgatacatgactattgttacagcaaccctagcaaactaatacactggcttataacaaagagtctgcaaaaattagagacagctcatataattttgtgccttatgagaagttattttctggcaatatatctttaagagaacatgaagtaaataccataaggtgacataaaggctttgaaataacaaattaaagccaaagcaaatttactgcctttttgtaaatgggatttactttcaccaaatctcatggtcctataaaagatgacatttgtgaagcattcattttaccacccattggcacttctcacaaagatactaaaataaactggtaaaacagctcttagtcttttctaggcattggctaccattaaaatcttcattttatttctgctcttctttaacataccttcttttagagtcctttaaaaaaattgtttggagagactgcatttttrttacaaaaggactgaatagaagaactattgattcagtgctttcctttcttctccactgtcaacaataattgatgttcctattgaagtgatatggtttcaatttgggtttgggttgc

SEQ ID NO: 913232 - DNA, 607 bp, Homo sapiens
acattcacattgttttataaaagaaaaacaggaacatcattttgttcctgatacttggcactgacatttctacatattattagaagtagcatttgtccctttactgtaatgttctgttttgaacagattkattttgacattctaacaaataaccaacatgtaggcaattgaatattttgattttttcccaaagaattagttaaaacttacatatacctttgaagagtcatcaacttttaggtagcatttaattaaagcaatgagaccagatgaaattacttagggaataaacagaaatgcatagacatttttgtttgttcttagttgccaatcattgaaaaaatgataaattatcaggcaaggtaactggtgatcagtttcattatcaaagaggaataaacaactatagaaaccaaagggaaattgtcatatgaaagtaaaaatccttttgggattagatagagggcactggtctagtaagataaagcaaccactcaaaatgttagaggtgatttgaaagcttggtatcccttgctgaagccaaatttacatatacagttgattttactatttactgaagtttactttcccaggagaaaaaagaaaa

SEQ ID NO: 913233 - DNA, 613 bp, Homo sapiens
aaatttttttatatggtgagaaataaggatacagttttattcttctatgtgtggcttgccagttatcccagcaccatttattaaatggagcgtcccttctccaatttgtgttttcatatgctttgtcagagatcaattggttgtatgtatttggctttatttctccattatctattctgttccattgttctatgactctatttttataccagtaccattctgttttggtaactatagccttgtaatacaacttgaagtcagataatgtgatgcctccagatttgtacttattgcttttgattgttttggttattctggctcttttttcatttcatataaattttaggattttctaattctgtggctactaatgttggtattttgatgggaattgcattaaatctgtaaatcgctttgggtagtatggccattttcacaacactgtttcttccaatccatgagcatggaatgccattccatctgtttgtgccatctgtgatttctttcagtatttttttttagctctcttcttagagatctttcacctgtttggctatttctaggtattttatactctctacagctgyagtaaaatttattgagttcttgattt

SEQ ID NO: 913234 - DNA, 586 bp, Homo sapiens
atacagccatgaaaaagaacaagattgcatcctttacagaaacgtggatggaactggaggctgttatcctcagcaaactaacacagaaaaccaaatrccacatgttctcactaataagtgggagctaaataatgagaattcatggacagaaagagggaaatagcagatactgaggcctacttgagggtgggggctgggaagagggagaggttcagaagagaaaaaactatctgatactatgcttagtacctgggtaattaaatactctgtacaccaaacccctgagtcatgagtttacctatataacaaacctgcacatgtactcctgaacctaaaataaacattaaaatattttacaaaaataaaataaattaacaattaaaaaaagaaaaaaatgagacaataaatagatcctgggaaaaactgtccccagaagtgttcttttaaatttgcactacagatgtaatccaagttgagtaaaatagaaaagcatggatttgctgttcctgaaagtcattcatggttaattgccgaacactttcatctgcagtgtctgtggaagggtagaaccttaagtagtttttca

SEQ ID NO: 913235 - DNA, 541 bp, Homo sapiens
aaaaggcagtggaattccaaaggttactaaatatactctggctttttcatggcgtgcaataataaaataatgctctcttttcatctgtttttgtctttttaggtaaaagtattttttcaggaaggaactttctaagatcattcagtacgtgtttggagtgaagccctgttcattttcatttctacaaatctcataccagaaagatctaatgcagccccactcctatgtgtagcttccatcagtgtcaatgccagagaggcccaagggccccctcgcacagttgagtatataacctcatgagtccacaacttcacttccccgagtgaagagaagaatggaagtgaagaaaagaatggaaattcaatcggtaccagcagactgtcagttcctccagtagcaaacaataaatgcatctgagraagttctggtgaaccaatcaacaggggggctttgttctgaacttggcggagcctacctcgtgccttgtaaatgtcagtgtgtgtacgtgtgagggtctgacattactcagcagcacatacca

SEQ ID NO: 913236 - DNA, 649 bp, Homo sapiens
tgtaggtactttgctaagctttgtatctttgctacataatatgatgccaattatatagcaggatttccatgaataaatggaacggtaagatggagcttgaaaagttttcyaccacatctccaactggttgcttaatgttcctgtgaatatattgcttagccattcagacaccacatatctaaaataaaattcatccgttctttaaaactttcttcccttaaggggttagtagtggtttttaacaatgtggttcatcagaaaggtggaaaaatcctaaggtccagatgtgttatggatccacgtgactattgaaaacatttaggaagagatgtggagataaaaacagtagaagtaaatatttttaggaagatagaaacgaaaattgctgggcattagctagcaagtatttgtggtctagccagaagtattaatggcatttttaaagtatttgaatatctgatgctattgaatgatagtataatggcattcccagagttatttaatattgatataaaattccagcttttgcccatttagtatgatattggctgtgggttggtcataaattgctcttattattttgagatacattccatcaatacctagtttattgaaagtttttagcatgaaggggtattgaattttattg

SEQ ID NO: 913237 - DNA, 621 bp, Homo sapiens
aaatgttacaagacagagacagaacagggaacattttaaccttgctcagggcatgcccttagaaactataaggattgatgatgcatcaagattaatttgatgacttgcatttcaaccaagagggcagattttcaggaacgcatattctgacttggagctgggaaaggcacaaaccctgggcccagtccatctttggggactgagaacagagagttgagaactcatcttactaataattcctgcaatattggagtgtgtgtttttaacttggagtcagacacacttttcctcacccgcagagtggacagtaaaagtaatccagaatgttgcatctgtgttagctcttcttagaagggcctggagctgctacaggaagtttctcatttggaattatgaagttctttcttctcttgggccactttctcttgcaagtccagctgggcattaccctgccccgtggaatttactccaacacagaatccttcatgcttaaccccaattccactgtctgggccttcggagtcagagccaaasctcagcagcagataaagtacaaaagctagcaaggtagaatttgaagcaaactgccctggtgtatggtttttagggctgccataacaa

SEQ ID NO: 913238 - DNA, 605 bp, Homo sapiens
ccccaggtaagaaaaataaatccttctaaagctgaaaattgatatgaatcactggttaaaaataaagcttccaagaagatttgttgatggatatggtgaatggatgtggctcaagttaaactgtcaaaatgcctgatgatcaccagctgatttttcaaccaggattccattcacaactgcacgtcaaatgaaggaaacctctctcaaactgcataacacaacttgaagacaataaagaatgagagtacattgcccattcattgagagtacattcaatgggttcgagtgaaattcttcaaaataattttgccttcaaatatactccagtgtaaatctgaaacaaaacatagtgaacatacaacataaactcagatttttcaacagtaattgaacaatttataggaaacatatgcaaacaatacttacatctaacaacaaaaatgcattaacttttatcttcagatgctgctctgtggcaggtctgggaaaasctgttagaaaaagtttattatatcctggactcttgataccagcatgtcaactagagtgcatgcatgatgaagcagggactttgcttggttaactgcttatctccaggatctagg

SEQ ID NO: 913239 - DNA, 639 bp, Homo sapiens
tcatatgctgtcaggctacaatggcagagttaaatatctgcaacagagacaatatggcacacaaagctgaaaatatttactgtctggccttgtacagggagagtctgcccaccccggtgtagataaagtataacataccatcaattaagaaaaaatgtaatgacaattataccaaaaagtagttataaaatggcagaaaaaaatcaaaggagtatcttctaaaagctattgccaaagtgattgaggcattccttgtacattatgaacctgagcatccactataaagaatatcccgttaaaagccatgcttaataattccatgcaaattgtagatgttaagacataatcatttaatcacaaatgtcttagggttacagtaacaaaagcagccagttcaagaatttacttttttatacctacattttcactatccttagagaaatatttcagctaagaaaaaaataattttcttttttgtctttttttttcttaaaaagaaggttaagtacctttggtaagtatctttcaaatatcacaagaaggcaccagcatgtatatctcagtaattttttagccttcatatattatttgtgaaataaaatacaaacacakaaaacaacacaaaacaaggtataaggc

SEQ ID NO: 913240 - DNA, 631 bp, Homo sapiens
tatatttgacgtaactctaagttctcgtaagaaatctcaaacctgtctctaaatctcctctgttttcatctaaagattttgttagtgtatatctttgagcattcagaagtagacagttgcaactacaaattcatttcatctgttccacaatggtttggttacattgaaggattatttaacgactctataacatcctagttatattttctgagaaatttatggtccttatcgggcctcaatcaaatgtcattcatgtcttatttcacatgtagttagaaggggagtgtgtgtaaaatatggccatgaggtgactcttgcagtatctttactcatcttggaaacagaaaaaatgagctagtttcataaacttaatttctttacctcttcagttttctctacctgaaatattgaggcttctctttaactcatcttttaaagcacagaatttcctaaactttttaaaaattaaatgacttttcctgattttgcagttttcttttcccttcatgaacgttatcactgcagaaaaagcaasgcttgtactttcaagactataaaataagcccagtttataaaattattatttggaggctaaatatggaatttcagatactcactctgaaccacaaaa

SEQ ID NO: 913241 - DNA, 573 bp, Homo sapiens
cactgtctcagtcataattttgcaaaggcagtttcaatatcacagttcctctcctccctgcttagggagacagtgtcccataattgttaagagcacaccctctgactcaagccatctaggttcaaatcctagccyttcccttctccagttgccgaactcgaacaagtattgtagcctcttcaagccccatttttcatatctgtaaagcggagatcgtaacaaactgtacatgtcgatgatgtccacagagttggatcaagggttacgaatctgacagcccaaacctccagactggctgtgctattatttcagttattctgacatggctctgatgcaatgtggacgtcaacaaagcattaaaagtgagagacagattagtaagcaactccctaagggtggatttttaaatatgcactaaaattgtggagaagttaatatactatattagttcactagggctgccataaaaaagtgccagaaggacgctaggtgactcagaaaacaaaaatttgttttctcacagttctggaagctgtgaatctaagatcaatgtgtcagcaggttgacttctga

SEQ ID NO: 913242 - DNA, 555 bp, Homo sapiens
gaaatgataagataatacctttattcaatggttagtgattgctttgtgacataattcctttttagctccttgaattaagtttgaaaatgtgattttggaattatttagtaaatatggggagctgtatcctgatcactttcttgacttgattacatatttctaaggaaaataaaatttaaaatttaatagtatatatatatccattttattacttttagagagtgagtaaaggaatacttaaagcatttggtaattctactgaaaagttggatgaagaactaaaaaataaagttaaaggtaatgtctgactttttgaactaaaacactatagttgaattcctctgtaccttaggacaagattgctggcacatatatttccaagtccacaattattaatgtataatttctctttatcaacgttgattagtraaaattattcagtgctccagaagtgaacagttttaccccatggtgtattctttttatgtattaaagatagaactatgatgaattacagttttacttttcaaaagcttaaaattataattagcagta

SEQ ID NO: 913243 - DNA, 586 bp, Homo sapiens
cccatcagcactgagaaagttataggggcagctctgaactaaagtctcaaatatagtatgatgtgaacgtgaccatacacgccccaggtagagttctggcagcaacccgctagaccacagacccctcgcaacaaccagatctttgtcttggtcctgttctcttccactaggttgaagagtattcagttctgtgtatctgtatcactacccctaccccagccttctaaggaggtgggacacttcatctgctgagccagcaactagaccttcatcatgacgtgtggggagggggctgatggagctcccaagttttgctcagaaaaagggagtgggtaagggatgaatgggagagagaaccactcaaggtgaaaagagtggaggatgggaaacctgcatacagagacaggagcaagggaagccatggagaggatttcttaaattaaagctcccctttacttgggcttctagaagcctccatgtcatttaaagtgattagaactggagagagaaagacacaaagtggccagatagtcaaaatgtcaaattcttttgaactatgccsttatctgcaactgagatattttca

SEQ ID NO: 913244 - DNA, 606 bp, Homo sapiens
aaaggatatttactagaaaggttattatgagtcctttattttttgctttttcaatctatcagacactgcttcagctaacagctctgaaggaccagccagaggtggacaaawcctgctatcaataacaaaacgaaaagctgagtagagtatgcacacatacacacacacacacacacacacacacacacacaatctgagtaaagactcactaaaatggactagatttgagggttcagtatcttaaagagaaagcctgctcattgagggaaagagaaacctgccattctatgctgattttcccctaaggctttttcctgtccatatcctgggcaaagaggctgagcaagtgagtcaggaataactcagtggcaaagaggaagagactctgagcagagcttttgtgagtctcgtggccccagggagacaaaaattgatgttcagccctgctaaggcaaccaggacttgaggggccaaaattccaaaggaaagggaagcagagagaaatgagaccaacaccctgagctgcttttctcgtaaagtttttggttgattattaaattgttcctgctgaaaggtagataaactgagtagaaatcagttgctaag

SEQ ID NO: 913245 - DNA, 614 bp, Homo sapiens
gttagtgataacctcatactatcatcaatacattgtgataaccttggaagaggagtgtawcagttgtgtctcatatatgctcattttttcctgagtgttttgccaatggcatggtcatagatggcagcgtataatgggagcagagaggactggggaccagctaagtggagcacaggcaaagtaatgttccagaagcctggggaaggtgccatccggggggacctaagccaggatttgaggtagacgtgggagagtagaaacaagtgggagactggaaacagctgggagtgatggacataactatttgccaaatgccatgatgggacagcgattaaaacaagtaaaaagtcatggttaagttcacacaaataacaggagacagaaaaagcctgtgagccataaaattaggcaaagctgaaaggagggagttggccttgagaccaggaaagaaagtgggcctgcactagaagagacagtcccagaaggtagcatgacatatataaaaagtcaagatgccaggcatagtggctcatgcctgtaattccagcactttgggagtccgaggtgggaggatcgcttgaggaccggagttcaagatcagcctgggcaacata

SEQ ID NO: 913246 - DNA, 625 bp, Homo sapiens
aagaaagatcttaaggaaaaggcagcatatggtttgctaactaccagagacatgaaaggctttcagataaatgcataagtctcattcattcaacaaatattttctgaggatttactaggggctaggtatgattgcagatgctgagtctgcaaagtaaacatatatacttatgtgaacacagtattcagcacctggggccctgcactgggattttatcagaattcttagacagcatttggataagcttattcctcatagatctctgctttctctctccaaaggatgaagctgaagactggagaagtgtatacaatggaaaggaatgggatctgtagtcaaagatgtggaatcaaactttgacacttgacaaactgagttggccaaatggttttacatccttgagtctcaggatccttctttataaagtaacccaacctcatcagggtggagtcatggcaaaacaaggtagggtatatacattgctggtggaatgcaaagtggtacagccacagtggaaaacagtttgatggttcttmcaagagttaaagctaccatacgacccagaaattccactcctacctacatactgaaaagaattaaagacagatgctcaaacaaatacagg

SEQ ID NO: 913247 - DNA, 648 bp, Homo sapiens
aataaggtaatttaagacttcagtggttgttccaacttacagcaccatctgcaaccccactggagacctcaaaactatcagactccacagacagtgctaaactgcaccctgtggatgtgacacgaatacagtttttctttcagtgtcacttaacgtcatgtgttacaaatgcttatgatctaatgcattgtattaaattttgaaacattagaagcttaaaaactctacaaaacccttatcatgacatgtatgtaggctgtttccataaagtcaacagaaattaaggggaaactacaaaatgtaagtgacaaaaaaagtgttaaataatacaattttacagtaggcatagaaagttatcacaggaagggatcttggagctctgtggttcaatttctccctgtccaggtgagtgcccaatggtgcgatgacttgtaaggtcatgcacgggtctatggtgtatcccagaattgtacccaaggcccagagcttcatgagcagcaggtcttctcatgcccagtctctcacsgtgggtgttctaacagaggcttccctcacttctggacagaatcatggctctttctctccatctgaatgaaggcttttcatcccatctctttccctctgggcccttccccatgaccactccct

SEQ ID NO: 913248 - DNA, 648 bp, Homo sapiens
aataaggtaatttaagacttcagtggttgttccaacttacagcaccatctgcaaccccactggagacctcaaaactatcagactccacagacagtgctaaactgcaccctgtggatgtgacacgaatacagtttttctttcagtgtcacttaacgtcatgtgttacaaatgcttatgatctaatgcattgtattaaattttgaaacattagaagcttaaaaactctacaaaacccttatcatgacatgtatgtaggctgtttccataaagtcaacagaaattaaggggaaactacaaaatgtaagtgacaaaaaaagtgttaaataatacaattttacagtaggcatagaaagttatcacaggaagggatcttggagctctgtggttcaatttctccctgtccaggtgagtgcccaatggtgcgatgacttgtaaggtcatgcacgggtctatggtgtatcccagaattgtacccaaggcccagagcttcatgagcagcaggtcttctcatgcccagtctctcaccgtgggtgttctaacagaggcttccctcacttctggacagaatcatggctctttctytccatctgaatgaaggcttttcatcccatctctttccctctgggcccttccccatgaccactccct

SEQ ID NO: 913249 - DNA, 670 bp, Homo sapiens
gaccataaaagccagagtccttgtacattatggtctgaggatttgcctgcttagaaacatcagagaccaaattattcaaaaaaaggaaaagccaaaagcaaggctcaaaatcttacgaagcaaacatcttggggctttaggggatgtcagggttaattcactgcttgctgtccccctggtttactcttcccctcatagaccccgtttatcgaggtcagacctggacaattctctgaagacacagagcagcaaataggagttaagggcagagtgagctgggttcagcagtagggagaggagaatttctcagcattgttttcaagctcaggtgaatgtcaggaaaagaactcacatcatttccaactgggatctaagaattcactgagcaccaactattggctagaagtatgctgaacactctaaatgccttacctgaatctcatctacccctcttagaaagtaggcatttcaaaatcatacttctctaagttcttaaagggaacaacaaagaaatgtgcaatgtgactcaatgacataagccgtggtttaagcctgtytgcgcttttcgagagtaatcatatgtaccattttgtaagccccttgctacgtaccagacactgtgccaggtgctccgtatgtattatttctagtattcctccccagatcctac

SEQ ID NO: 913250 - DNA, 670 bp, Homo sapiens
gaccataaaagccagagtccttgtacattatggtctgaggatttgcctgcttagaaacatcagagaccaaattattcaaaaaaaggaaaagccaaaagcaaggctcaaaatcttacgaagcaaacatcttggggctttaggggatgtcagggttaattcactgcttgctgtccccctggtttactcttcccctcatagaccccgtttatcgaggtcagacctggacaattctctgaagacacagagcagcaaataggagttaagggcagagtgagctgggttcagcagtagggagaggagaatttctcagcattgttttcaagctcaggtgaatgtcaggaaaagaactcacatcatttccaactgggatctaagaattcactgagcaccaactattggctagaagtatgctgaacactctaaatgccttacctgaatctcatctacccctcttagaaagtaggcatttcaaaatcatacttctctaagttcttaaagggaacaacaaagaaatgtgcaatgtgactcaatgacataagccgtggtttaagcctgtctgcgcttttcgagagtaatcatatgtaccatttygtaagccccttgctacgtaccagacactgtgccaggtgctccgtatgtattatttctagtattcctccccagatcctac

SEQ ID NO: 913251 - DNA, 611 bp, Homo sapiens
tcaagatgagaagatcacttgagctcatcggttcaagaccagactgggtaatatagggagacttcatctctattaaaaaaaataaaactaaatgacattgttccagagatcctagccagcatgacatggcatggcaaaaaaataattgatataatcatcagaaaggaagaaataaaattgtcattatttgtaggctatatgattatttacttagaaaattcaagagaacctacaacttatcagagcaaagaaatagaggtaaaggaatagctcagatgaactgattagagagattaacaacagaccaacatatgcatgtgcatttcacatatggcagaaggtcatataaaccagtggggaaagaatgaactattcaaaaaatggttctgggttgactgactatccatttggaaaaaaacaactttctttcattccagttacaaaaaaataaattccagatgaatttgaaaaggttttctaaatttaacatttatggaagaaaaatagagatttgttttagaactccaaggcagagaagcatttctaaaccaaggcacagaaatgacacataayaaagaaaagagtgatacacttttttgctatattaaaat

SEQ ID NO: 913252 - DNA, 634 bp, Homo sapiens
catgagactcaatgttcagaacactgagactaacttattttgtaaaatagatcatttcctatcagctggcaagtttagataaatgcatgttattaattagattacttgtaccctcacattggcataaatgagtaacatgtattcatttctaaaacactaatatttgtgtttacacaaatattacaccaaaaatatgtgtttacacaaatattacaccaaaaatatttgtgtaatacatttattgatttatagcaaagatacaggttaaagttgttttgagttttattgcatcacaaaactattaagttaatgctcagaagagaaagacatgttttgagaaaatagaaaagattccaggagtctattggccaaaaggaaaacatgccaaggagtgacatacacatacagccacatgcctctaagagtgtgtgatatggtttgactgtgtccccacccaaatctcatcttgaaatgtagttcccataatccccacgtcatgggagggacccagtgggaggtaattgaatcatgggggcagttaytcccatgttgttctcatgatagtgagtgatggttttataaggggcttccccagtcacctggttctcactcttctccttactgcggcaatgtg

SEQ ID NO: 913253 - DNA, 634 bp, Homo sapiens
catgagactcaatgttcagaacactgagactaacttattttgtaaaatagatcatttcctatcagctggcaagtttagataaatgcatgttattaattagattacttgtaccctcacattggcataaatgagtaacatgtattcatttctaaaacactaatatttgtgtttacacaaatattacaccaaaaatatgtgtttacacaaatattacaccaaaaatatttgtgtaatacatttattgatttatagcaaagatacaggttaaagttgttttgagttttattgcatcacaaaactattaagttaatgctcagaagagaaagacatgttttgagaaaatagaaaagattccaggagtctattggccaaaaggaaaacatgccaaggagtgacatacacatacagccacatgcctctaagagtgtgtgatatggtttgactgtgtccccacccaaatctcatcttgaaatgtagttcccataatccccacgtcatgggagggacccagtgggaggtaattgaatcatgggggcagttactcccatsttgttctcatgatagtgagtgatggttttataaggggcttccccagtcacctggttctcactcttctccttactgcggcaatgtg

SEQ ID NO: 913254 - DNA, 635 bp, Homo sapiens
tccacttccactcaatgaatagtaaatgtatttcatccacctttttcttaataacattttctcttctctagcttactttattgtgagaatgcagtacataatatatatatataacatacaaaatatgtgctaattgactgtctgtgttatcagcaaggcttccagccaacagtaggctattggttaagtttttgaggagcaggctattggtgaagttatacatggattttcaactgcattggtggaggaggggggtcagcatccctaatcaccacattgttcaaggatcaactataatttctttgctgtgcccaaaatttgagaggtacttataactgctggtagaatttttcctgtgtaaaaataggtggcatttgtctgagaaaaccaaacctgggaaagcacagattcaatctgaattccaaaagggtgtgctttcccatctgtacactaaaagatttccctgtaattccatttgctggtgactgcacatttttcaaattaaacttgargaaggaagagaacacttgtccttgagaagtttatagcaacagaagcaccagaatagaaactttagataacttagaaaaattaaacacctctaaacagcaccccaaaaaagttagccattttta

SEQ ID NO: 913255 - DNA, 625 bp, Homo sapiens
acattactcagactgtgccgacttgcagggtgaggttaagttgcagggtttcagccacccatcaatcctaaggtaactcacaaggcatatttgtattattccatcacttaagacaactttaatccagtccccyattccattttcatttctagtcttgaaatacttaatacagggtaaattgattatagaaaaaagtaacactcttggcatagaatttaatttttgcagtttattcattttaattggtgtctacactcaaaacctttgacaaacaagaaatttgaaagatctgataattaaacagttaatccaaacttcctcctgtaggaaaaattgtaatttttaggactaaaaccaaaaggcaaactttgaatatatttgtatttcttttcatgtttgagaaatcacttaaataatcactcgtatcagtcttatacataaaatttatagttttaaaagtttctttcaaaggctatcattaggtgatctggcactgtctaataaaattaaaaatacataaggccaggcaccatggctcatgcctgtaatcccagccctttggaaggccaaggtgggggcattgcttgagcctaggagttcaagacaagcctaggcaacatagaga

SEQ ID NO: 913256 - DNA, 558 bp, Homo sapiens
aaagtcattaagatctaacttctgcttctcctttttcttaattccattctgtgaagttaaataggcaatagttggttcaaacaacctacgatatttcctcattttctctattttgtaggtcctkagaagctgccattagctctcaaggctttgagagtccagccagtttctccagagtgaagtccccctcctcagaggaacaaatgctttcagaggaacaaatgctttctgagaaactcgccactgggcagatcctgccacccacctgcctgccgctgcaaagcagagcctgcccaaaaagctgccatcattcccggcactgctacataaatgctgagtgtggtggcttgaattgtgtcccttgaaaagatacgttaccgtcccaatccctggtacctgggaatgtgactttatttggaaagagggtctttgtaaatataagaagatggggtcacgctggagtagggtgtgctttaaatccaaaggctgtgtcctcctaagagggaaatgtggacacaggcacagaggtaagatgatgtaaagacacgcaggaaggag

SEQ ID NO: 913257 - DNA, 585 bp, Homo sapiens
ttacagttttgatttgcatttccttaatgattaatgatgttgaacatcttttcatgtgcttaccagccatttatacatcttctttacagaaatgtttattcaagtcctttgcccctttttcarttgggttgtttgtctttttgttgttgatttttagtcctctatatatactggatattaatcccttctcaaacatatgatttgcaaatattttctcccattctatgggttgcctttttactctgttgaaagtgtctttttgatgcacaaaagtttctcaccctcatggagtccagtttgcctattttcttcttctgttgttcatgccttttgtgccttatctaagaaatcctcaccaaatccaatgtcatgaagattttgccctgttttcttctaagacttttatagttttcaaagacatttaggtctttgatccaatttgagttaatttttgtatatggtgttagaaaaggtccaactctattcttctgtttgtggagatccagttttcccagcaccatttgttgaaaaaccgttctttccctgttgtcttgttgatctgtccatgtgggcccatacagaatt

SEQ ID NO: 913258 - DNA, 600 bp, Homo sapiens
gtgacaatttccacccagaagaaacgggtgacaattttgagatcctgattcaataggttccccacagatcagtttctcctcrgagaacagaacctcctgaatcttaagaatattaatatctccagggctgaatgtcccagcactactgataaagaacagcctcttccaggaaaaggagcagttttttatctttgctaataaccagccagtctcataaaaactgggagggaaaaaaaatccttaaaaatatttacttaaaaaacaatcaatagacacactaaaaagctcatgcatactgatttctttgatgtgtttttaattgcttaagggtctttgtagaaaaatgagcaaagagcattatttatacatttacatatttagaagagagcaggttaaaaactccaacttcaccagcagcagcaaagaacctttgttgagcaatactgtccccttgtgtccaatcttcacttaatgctttcctaagttaagtacagctgcttgatgggacattctgcagtagtaaacgacttctacattttgctgccctttaagacttgcattcctgcaggaaacatgcatatgcaataccaattctaagta

SEQ ID NO: 913259 - DNA, 651 bp, Homo sapiens
cattttgttcttatatcaaaaggacacagattataaagctgtaaattctccctaatttaatctacatgatcaatgtattctcaatgaaatactgagtaattttgtgaaatttgaccaaacgatacaaaattcacatagagaaataaatatgaaagaatacaaagaaatatgaacaaaaatgatgagaagggactactttgatcagatactgagatagaaaactacagtcactaaaatagcctgatactaatgctttgacagaacaatattctggaataaagagttcagaaacagaaacacaaacaaatacatatggtaacctagtctaagataaaggtagagaaagtggacttcagtaaatgatgagaggtaggctagaatctacctggaaatcaaaacaaaagcagattcttattgcatttcttacactaaaatgacggttagatgggttcaaaatgtaaatgtttaaaaaattattaaaagaaaacacagagtgtggaaaaacataaagcctagaaccataaaggaaacaactgataaaaataaytgcataaaaatataaaacttccttataattaaaaaaataataaagttcaaaggcatcttacaaactggaaaaaagattttcaatacatatgacaaagacctaat

SEQ ID NO: 913260 - DNA, 632 bp, Homo sapiens
tggagaatttttttaaatacattcaagtcagtgttaattttattactgaaaactgagtaaattataaagtgctttttctcaagaaaactacaaacagttttagaaatatatataggatatttcagggttagaagtcaaatttgtgtgttagggtacaagcttaagaactctggatgttgctgctctaacaatgcatttgtgatggtgccatgtgatactaagaagtcagtagaatcccaccagtcctactgcctcagatgagtcttgtttcagtcatgggtttacaaagtcattgagtgcttgaggacttgttttcctggaagtgattccctacttgggtatggcaagaacacatcagtagtgtaaaactgtacatctgtagtagcactccatgatcatttccctggatgaccactttaaattataactcacagatatgtgtgtattctaagatggtatatgtggtgaatagaaacctggatacaaacataacagttctgactcaacacaatctctagtttctacatttyaaggattaatcatattctaattagacttttttttaatttttaagctaccttatttacagattctgcacaatatttcatcatacaaaactgttttcctaaatt

SEQ ID NO: 913261 - DNA, 586 bp, Homo sapiens
cctttggacccgaggatttataccaagcaggtttctgggttctcaggcctttggccttggactgatagttacaccattggcatatctggttctgaggctcttggtcttggactgagccacactcctggcatcccagcgtctccagcttgcatggcctgtcacggtatttcccaacctccgtaatcacgctagccaattcttctaagaaatttcttctcatctatctgtctgtctatctatctatctgtctacctaccgacttacctacctacctgcctatctatcttttgattaatctacctatcaatctttctatctatccataacctgttgattcgatctctctagagaaccctgactaatacacctggagtgcagaatctgctggagaaactgccattccgttattgactggctggtcaggccatacagcctggtggtctagatgtgtttggaggtagggcttcygtagcacagatagtgcctgttcatggctctgtcccaggtaaggcagagctagcttgtgctgagggcttctgctttgcagctggcctggggtggctaggatctggggacacaggctgcc

SEQ ID NO: 913262 - DNA, 586 bp, Homo sapiens
ctgaaatgccttgttttgggaacacaaaagtatttggggctgctgctggaatgggcaggagaccatttatraagatgttgctacctcattttcatagtaaaacttccttttgggaaacttcaactgctcagagaagaaaaggatgtttcctataccgaggactggctacataatttgtagggctcagtgcaaaatgaaaatggcagactctttatttaagagttgttgaagccaggcacggtggcttgcatctgtaatcccagctactcaagaggctgaggcaggaggatcttggaatgtctaagcattgaggagttggatctgaaaagcagtgaatacagcaagaaaggacaagccaatctgtaagaaccttgggtccatgaagatatggaatagatacttaaagatactaatgtgacttgtgcctatggtgaaagtagtgtcacaaggaattaaatgttgtttaagacatactgtaaaatgatcaaactacactacaggtgccttgccaacacccagatgttattactccagaactttggatctctactatatgccaattttggtgaacacccagatgttatta

SEQ ID NO: 913263 - DNA, 586 bp, Homo sapiens
ctgaaatgccttgttttgggaacacaaaagtatttggggctgctgctggaatgggcaggagaccatttatgaagatgttgctacctcattttcatagtaaaacttccttttggraaacttcaactgctcagagaagaaaaggatgtttcctataccgaggactggctacataatttgtagggctcagtgcaaaatgaaaatggcagactctttatttaagagttgttgaagccaggcacggtggcttgcatctgtaatcccagctactcaagaggctgaggcaggaggatcttggaatgtctaagcattgaggagttggatctgaaaagcagtgaatacagcaagaaaggacaagccaatctgtaagaaccttgggtccatgaagatatggaatagatacttaaagatactaatgtgacttgtgcctatggtgaaagtagtgtcacaaggaattaaatgttgtttaagacatactgtaaaatgatcaaactacactacaggtgccttgccaacacccagatgttattactccagaactttggatctctactatatgccaattttggtgaacacccagatgttatta

SEQ ID NO: 913264 - DNA, 490 bp, Homo sapiens
ctggtccaaggttttcagcacccgccttctcccagttctgctgagcttgaggctgtggaggtggctggctggtgggggacggaacagggycaccagcttctccaggggaaaggctatcctcttagtgcgcattgcagatgtgaaaaagaaatgccatcttcccaaataaaattaaatacaacccagaggccccaggactgaccctggaaggagaattaagctttctttccttttccagaggactccgtcttcccttgaggtctctgtctggaacccagctgcccgtgtgggcctttgggtacatcgttccctctctgccatctgtagaaaaaaatcatcctttcctgcaatctctgctgctttggcaggaaattcatgtgcaaaagacatctaaaatggctggatggcatcacaaggggaatcaacccagaaggaacaggatcctaaacatttgcatctcaagagagggctggcagcggaggctcgcagg

SEQ ID NO: 913265 - DNA, 606 bp, Homo sapiens
gttctgtactgcgctaggcaggcatcctagggtcaaaattgcctcagtatgtagaatactggggtatttgacacatttattttttaataatttggtttttggagccattgttttgtacctgaactgaactctgctgtatgataatgactaagatagcagctaaaatataatttttacttggattccacaggaagccttttttgtgtaacttactagctcatctactgagcaaataaacgctgggatttactgctccttcatggaaagtattttgttaggctcccagcattctaatataaataaaactcggtgattaagcttcatgcctgctcagcagcccatgagttggagggcacaggatataaatagctcatggcctttcaacatggggtttgaaccctaattaagcttctgcccattgaatcagattattttaattatcctgagtttgggatgagagaggattttgtagataatataataggttacagaacatgtcatgcgtactgtgatcatggtattaatctgctttcatctgtgccattggtttccatatcttgcagttgtggaggtmcagctttacataacgaatttactagttgtctc

SEQ ID NO: 913266 - DNA, 591 bp, Homo sapiens
aggcttcctctggtgttaagccccccagtgaccagctcttggaaggccatagaccactcatggcatctgcctagctatctattttcatagccatatgtaggattattgtctagtgagrcgcatttagcaaatattgtaacgtgttatataaccatggtgacctccacaaactatgtaacctctctgtgtctcagttacaaaagaaacttttcctatgttggctggaagggttaaattaaataatgcatataaatggcttataaaattatatggtcaaaggaattacattctaatttttgaaattttttcaaaggaaattttcagttttaatgcccaatctactgggtgaaacaaaagagattccaggtataccttcccctttcccaaaaaaagataatcaaaagcaaaacatagtagcttatcccttgtcctgatacaagcaagctaataaaatcttgtgtactttagggcaggtagtgccacctcacatacatggtttaactgaagtgtttcactgaagttagctgatcaagagccactttgcacttgaccaatctttaagtgctgctatgcctggaccaaatgtgactt

SEQ ID NO: 913267 - DNA, 563 bp, Homo sapiens
ttagtgaccgctgggtatttatttattcagaagtggtttcaggtgccractcagtgctgggcatcatgccaggcatggcaatgaaaaaataagcggggtgatgtggcctggcctctccctctctcaagaggcttaaagtccagaaggtgggagacaaggcttgagtaaacaagcacacatattcatgcatccttacaacaagtacatccttccaggaggggtttaaagaattaggctgcatgtccatatctgtggatagaacctgcatagcctcccggctcggggccacatcacatccagtggttggcagcaggctagagtctgcaggaagattcaagctcagggcagcagggaaggaggtgaggagtcaaagacaggagcccctgggttcacccatcgggccagggatgctgaggctccccatgtagacacccagagtgtatagttggcattgggctgggaagcagtgaaggtagaagaagggagcctcgccatgaaggccaggctgtgcagtctccgttccaaggaggatgaccaccttcttcatctgtgctggattaaaa

SEQ ID NO: 913268 - DNA, 563 bp, Homo sapiens
ttagtgaccgctgggtatttatttattcagaagtggtttcaggtgccgactcagtgctgggcatcatgccaggcatggcaatgaaaaaataagcggggtgatgtggcctggcctctccctctctcaagaggcttaaagtccagaaggtgggagacaaggcttgagtaaacaagcacacatattcatgcatccttacaacaagtacatccttccaggaggggtttaaagaattaggctgcatgtccatatctgtggatagaacctgcatagcctcccggctcggggccacatcacatccagtggttggcagcaggctagagtctgcaggaagattcaagctcagggcagcagggaaggaggtgaggagtcaaagacaggagcccctgggttcacccatcgggccagggatgctgaggctccccatgtagacacccagagtgtatagttggcattgggctgggaagcagtgaaggtagaagaagggagcctcgccatsaaggccaggctgtgcagtctccgttccaaggaggatgaccaccttcttcatctgtgctggattaaaa

SEQ ID NO: 913269 - DNA, 493 bp, Homo sapiens
ttggcattcatgtggcgagcagtaggacctagactgaacccctagtgttttggcaacactaccaatactactgttaccactgctgctaccactattactattggcggtactactactaccactattaccactactgctactatcactaatactaccaccactactatgctactactattaccaatactgctaccacccctactatcatcactactaccactaatactaccaccaccactactaccactaccagtacttctactgccactacttttactattattgctataccattattaccaccaccattactactgcaacaattaccaccaccaccactactgccactagttctaccactactctaagagcacccggagcattactccttgtcaacttacacttttgagagtaagcttgtagtttaggaggctgtgytgcacacagtacctcattaaggatgtttggattctgctggctattgctgaaaaaa

SEQ ID NO: 913270 - DNA, 605 bp, Homo sapiens
caagatgctgaggagtgagaccaaatgttttcaaggagcacagttgcttaggagacattgtgataatactggaagagaaatctagaatcctgaaaggacaaaagaactggcctaggcctggacagggaagttgccctggccctggagaaatctgatctgcagaactgcacaaatgcctctatccctctaagggagatctcacaccctggcaaggtaattgctgtgaggcaccatttgcacaggctccccagggggccggtgggaccctcttcgagggtcttctcatccttatacactgcttcccctctctaaactctcccaacccctgccgcaatccctatacacaccttcccccaactctcaggacggcaccatcatgtcatgcatcgctgtcatcattatccatttttattaatgacacataggttttatagctcagattttctatttttaggcagaaaaaaaggttgggaactacaggcacacaggattacttcaaacttccaaaataggcaaaagaggytatttgcaatctagacttcatcagtttttctgtgcaaatatatttttttcaataaaatgacctgcacacttggacatgatgt

SEQ ID NO: 913271 - DNA, 578 bp, Homo sapiens
tttaactatagtattaggagtaaaatatctgtggaaattactgtacagaaatcaattgtaaatcatggcaatttagaattactgtaacaaaagtccatwggacaaagaagatgagagataagggatagagggatgcctatacaggaatcaaatagattctttaatggtgataaatcaattaatcaagatataaatactggaaaaaccaataaaaatataaccaagttaatttggggagtggcatacttagaatactttataatttcatctctggccatagtgggaagttgacactgtatttggaaaaagaagaaggctggctgcgcatggtagctcacacctgtaacctcagcacttcggaaagccaaggcgggaggattgcttgagcctaggagttcgagaccagcctgggcagtatggtgaaactccatctctaccaaaatatacaaagttagtcaggtgtggtggcacatgcctgtggtcccagctactcaggaggctgaagcgggaggattgcttgagcccgggagtttgaggctgtagtgagccacagttgcaccacggcaccccagcctggg

SEQ ID NO: 913272 - DNA, 580 bp, Homo sapiens
gacctagctctgccaacaccttaattttagaccactgagagcatttaacgcyctggacttctgacatccacaatagtatgacaataactttgtcttaagccacttaggtgtgtgctaatttgttaaagcagcagcagcaggaaatgaatatggcagaaaagaatagaaaaatgaccacaggaagataaggaggcagtagggagcagatgggatttttaacccacgtctttcctcttggaactccttcctgcaagttcagataagaaaatttcatgcagggaatataggagatcccagccataccacccacaaacaggaacccaagagtacttctattagagcctggtacagaggctctcatgatgtggcaccaagaccagtagcagaagtgtcacctgagaatgggttagcaaatcaaattcttggacccatcttctggcagctggaataaaaatcttagagccatggctaacactctggtttgacaagtcctccaagtaagcctgatgtgatgcatgcctgagaaccgctggcttaatgtagctcttggtttagactgagcaaggcatccaaaatgtta

SEQ ID NO: 913273 - DNA, 590 bp, Homo sapiens
tgggtactgagcttaatacctgggtgataaaataatctgtacaacaaaccccagtgatatgtgtttacctatggaagaaacctgcatgtgtacccctgaacctaaaagtttttttttttttttwaaaagaaagaaaatgactttgttagatggactcctgaaggaatgaatgaacaaatggatgaacggtcaaaataatcaagtaaataaagtaatgttttaggctctgtggtgatcgtgagtgctgtctgtcacatgtttccgctcatctaccttctgagcacctgggaaacttgttctgcctggtcccttgtggttggatggggccatatgactggctttagccaatgagctgtgagtagaagtgccatgtgtatcttccaaccaatgagctgtcagcagaagtgccatatgtgtcttctgacccaggaaatgtgagcagaagtaccatgtggtaccatgtgtgtcttccagccaatgagctgtgagcagaagtactacatgagcttccagcaaataagctgtgagcataagcaccatgtgtagccttcagtgaatgagttgtgagcagaagtgccatgtgtggcttc

SEQ ID NO: 913274 - DNA, 676 bp, Homo sapiens
ccagatggcttcactgttgcctcctttcatccccgtcactaatctgtgaaaaggcagccctcacattaagacactttcctgaagtggcagcgacagctcagtgagggctgctgtgctgcactgggtcggggctgacgttcccaacctcactgctaatgagaagacttgaaagattactgacatgttcatgttcatggaggtggccggaagtaattaagcactcttcaataaagggctaccttggcaagttcaagatttgaatgggaaaagggtgatggctgggctgggtgcacatgttacctgcatctccaagaccctgtccttcttggcgtctttccctgcttatcagaccagttctgggcactgataacaccacagagcatttgctcaatctctatcacctgatatcctgaaaagggagtggaggcctttttgcagacttctgggctcccacagcccttgtgctgcagcatgctgcctgccttctcttctgtcatcaatgaaatatggtggagggagctatgctgctgatgcagcttggaggctgtamgggaccagagtcaaatgggccatcgagggctggctacacagttactgggctggccatgtgatagagagtgcagaccactaaaaggcacatagcagaagaatactgagtaacacagaaaaaaatcaa

SEQ ID NO: 913275 - DNA, 676 bp, Homo sapiens
ccagatggcttcactgttgcctcctttcatccccgtcactaatctgtgaaaaggcagccctcacattaagacactttcctgaagtggcagcgacagctcagtgagggctgctgtgctgcactgggtcggggctgacgttcccaacctcactgctaatgagaagacttgaaagattactgacatgttcatgttcatggaggtggccggaagtaattaagcactcttcaataaagggctaccttggcaagttcaagatttgaatgggaaaagggtgatggctgggctgggtgcacatgttacctgcatctccaagaccctgtccttcttggcgtctttccctgcttatcagaccagttctgggcactgataacaccacagagcatttgctcaatctctatcacctgatatcctgaaaagggagtggaggcctttttgcagacttctgggctcccacagcccttgtgctgcagcatgctgcctgccttctcttctgtcatcaatgaaatatggtggagggagctatgctgctgatgcagcttggaggctgtaagggaccagagtcaaatgggccatcgagggctggctacacagttactgggctggccatgtgatagagagtgcagaccactaaaaggcacatagcagaagaatactgartaacacagaaaaaaatcaa

SEQ ID NO: 913276 - DNA, 593 bp, Homo sapiens
ctgacctgcatctccggggagaaagtattgttcctagcagcattcagcagtaccatatacaaaaaggagaagcgatgaaaacctaaaagcaygtcttccaaaacttcttcctggagatcttcttctatgtctggcatcagctctcctgctctttccctcttgcatttcttcctgctgcaaacactggttgagaacctactacttccaaggcctagaaatgttattctcaaatgacaggaacacatgaaattgtttccaagctgaatgtccaactaagataacagttgcaaaatgatgccaaaccataaagtgaaatatgagctactcctgaaatacaataaaatggagctatgtgtatttatctgtgtaaaaagtaaagtagaggttcctcttcaaagactttcctccccatctaaataggaataaacagtaacttctcttagaagcgaaatttattcaaagacctgtgctaacattcttaaatgtctgctagccgcaatgaagaaatcaaggtactttatgttcttagctcccacaatttagcttaaatatctgccctggcatgcttatactggtccaaacaagcattaggt

SEQ ID NO: 913277 - DNA, 590 bp, Homo sapiens
tgggttttggagctgtgaaaggaaattaaattttgggaccccaaattcgtttagccaaagagaaaagtcaagctgggaactgggtcacgcaaatctgcytccaccttttggttcctaaacaagatggctacaagatgaaaagctacacgcttccctcatattttgcccacaaggaaattcctggtgagctgttaaagcttccccatggcaatgcaacttgatagcctatctttacaggtgcagtcgctctgcccaccagacacaaatgtataactgaacgttcccctctccattttgtctgtggtatgtaaaatgcacattccccacagttttcctctgccccttttgtttatgtgaaagctgtgtgcttctcaatatctcatcctttcccctttaaatttggagccctcaaaatcaccttcggagaaaggaatagacctgtctcctgggagcatcctcaactttggcaaataaatatcctaaaatgattgagacttgtctcattattttcctcgattgacagagctattttttttttttttaacataaagtcattccctgggcctcaaacagttcctggttgggggaag

SEQ ID NO: 913278 - DNA, 590 bp, Homo sapiens
tgggttttggagctgtgaaaggaaattaaattttgggaccccaaattcgtttagccaaagagaaaagtcaagctgggaactgggtcacgcaaatctgcctccaccttttggttcctaaacaagatggctacaagatgaaaagctacacgcttccctcatattttgcccacaaggaaattcctggtgagctgttaaagcttccccatggcaatgcaacttgatagcctatctttacaggtgcagtcgctctgcccaccagacacaaatgtataactgaacgttcccctctccattttgtctgtggtatgtaaaatgcacattccccacagttttcctctgccccttttgtttatgtgaaagctgtgtgcttctcaatatctcatcctttcccctttaaatttggagccctcaaaatcaccttcggagaaaggaatagacctgtctcctgggagcatcctcaactttggcaaataaatatyctaaaatgattgagacttgtctcattattttcctcgattgacagagctattttttttttttttaacataaagtcattccctgggcctcaaacagttcctggttgggggaag

SEQ ID NO: 913279 - DNA, 523 bp, Homo sapiens
tgccactgcgtgttttttcactgtaatgaaccatagtcctgagtctccctgagccctgtgagcccttctagtgagtcacggaacttaagaatggttattggccgggcgcggtggctcacgcctgtaatcccagcactttgggaggccgaggcgagcggatcacgaggtcaggagatcgagacaatcccggctaaaacggtgaaacaccgactctactaaaaatacaaaaaattagccgggcgtagtggcgggcgcctgtagtcccagctacttgggaggctgaggcaggagagtggcgtgaacccgggaggcggagcttgcagtgagccgagatcccgccactgcactccagcctgggcgacagagcaagactccgtctcaaaaaaaaaaaaaaaaagaatggttaygagacaccagaaatagactctaagacagccaggcagaagccaacacccagaacaaaggccaggcacagaaccagtcttttttttttttttttttttttaagacggagtcttgctca

SEQ ID NO: 913280 - DNA, 577 bp, Homo sapiens
gcaggctgttgtggaacagggctgtccccttggccttctgtgagtgcccactgcacctgttccccttgcctggaatgtcctctccgcactttcatttttctttaaccaatctaaaggacaacttgtcactttccagggcataaattccctgacctctgacaggccaggtcccctgaaattccccgtacagcccccactcctgttgttcatttccagcaggtctcacaattgtaagcaggtcattatttacatgattacttgaggtcttccccaagaccataggcccatgagcacagacacagctggcactactgctcaccgttccaccctgggcaccccatctgtgccgggtctggtccatggcaatgcccaatccatccactttgaatgaatcagtgaatgaatgctcacagacagatacacccccatcttatccagaagacagaaattgtccgctgccatgacctcgggtgtgaagaytgcagaaccatggttaggcacgctgccatagcattccctgagtatctcatgccacctgttctttgggccctaaggtgacttagagtgtggaatcagc

SEQ ID NO: 913281 - DNA, 583 bp, Homo sapiens
ttacacttactcagaatttagtgggggcataggaataagatgagaacaccaaggccctcttatggaagattaacctgaagtcagtgcagaaaaagtgactggaaatggagaaagaggatgaacacaaaatagtgagagtggtctctggttttctaaagcatgagactctgacatgctgaaaagatcaagtctagcttgggcaatgatttacttccttggttttctagtttttcagctaaaaaactgacacttaaaaatgtctacagtgaaatgctgttggacagaagggatacaattatatatttaaaatggacaaatgggtgcttaatatctttcatattcacatgttaataaaacatgtgaatgcacatgcatgcactcttccagaatcactctaccaactgttttccacctatgcacactaaaggaacttatcttctctgctgtcttcctgaatagcagttctcaaaccatggttccccataccaacarcatcagccttacctgagtgattactagaaatgcaatatctcagcccccaaactcagagtgacagagtaagaaaagtcacctgtgtgtttaa

SEQ ID NO: 913282 - DNA, 516 bp, Homo sapiens
gaacaagcaatggggaaaggattccctatttaataaatggtgctgggaaaactggctagccatatgcagaaaactgaaactggactccttccttaaaccttatataaaaattaactcaagatggattaaagacttacatgtaaaacctaaaaccataaaaaccctaaaagaaaacctaggcaatatcattcaggacattggcatgggcaaagacttcatgagtaaaacaccaaaagcaatggcaacaaaagccaaaattgacaaatggaatctaattaactaaagagcttcagctcagcaaaagaaactattatcagagtgaacaggcaacctacagaatgggagaaattttttgcaatctacccatccgacaaagggctaatatccaggatctacagggaayttaaacaaatttacaagaaaaaaacaaacaactccatcaaaaagtgggtcaagtatattagcagacacttctcaaaagaagatatttatgccgccaaaaaaaaaaaaaaatga

SEQ ID NO: 913283 - DNA, 595 bp, Homo sapiens
accatatgattccctgcaccacctcaggactttacagagtccctcactagcaaaaggacctttcaacaaaatgcagccccttgaccttggacttctcaacctccataactgtaagaaataaattacttttmtttataaattacccagtttcaggcattctgttataagcaatacgaactaagacagaaaattggtaccaggagtggggtgttgatgatagtgaacacctgaaaatgtggaagtggctttggaactgggtaatgggcagaggatggaagctgagggagcaggctagaaaaagcctggattctggtgagggcttagaaggcaagaaaactaagggaagtttgtaactccttaggaattggttaaatggtggtgaccagaatgctaatagagatatggccagtaaaggccattctgatgagatctcagatagaactgaaaaacaaggtattgaaattttgagtaaaggccattcttcctataaattggcaaataatttggttgaagcgtgtccctgcccaagggctttatggaaggccaaacttaagaatgatgaactaggatatctgacacaaggcatttcttcttt

SEQ ID NO: 913284 - DNA, 595 bp, Homo sapiens
accatatgattccctgcaccacctcaggactttacagagtccctcactagcaaaaggacctttcaacaaaatgcagccccttgaccttggacttctcaacctccataactgtaagaaataaattacttttctttataaattacccagtttcaggcattctgttataagcaatacgaactaagacagaaaattggtaccaggagtggggtgttgatgatagtgaacacctgaaaatgtggaagtggctttggaactgggtaatgggcagaggatggaagctgagggagcaggctagaaaaagcctggattctggtgagggcttagaaggcaagaaaactaagggaagtttgtaactccttaggaattggttaaatggtggtgaccagaatgctaatagagatatggccagtaaaggccattctgatgagatctcagatagaactgaaaaacaaggtattgaaattttgagtaaaggccattcttcctataaattggcaaataatttggttgaagcrtgtccctgcccaagggctttatggaaggccaaacttaagaatgatgaactaggatatctgacacaaggcatttcttcttt

SEQ ID NO: 913285 - DNA, 493 bp, Homo sapiens
tgtgaggagtagggggtgacaatacctatgccaccagctatggcttcgcccaagcacagctcctggcatggatctggcagtaaatacatggggttttcctccctagtccatgcatggacctcagtggcctttggtttgtcagtttttttatattccttcgagatgaagttcatccatttaaaaaaataaaatacaaataagtttgatttagcaaaaatctgtgggtgacatttgctaaagttggatttatgtctcatttaatatttattgggattaagtcactgctggcctcaccccaaaacccatagaaaaagagaagctcaggtctttctaagggaagtcacgtcttacacttccccttttcaggagaggcctagtgagaatgtggttttgctccaggggctggggctggggtgggagcctggargatcctttctaaaggctgataccccccagttattgggggcaagggggctgagaagcatttcttctt

SEQ ID NO: 913286 - DNA, 592 bp, Homo sapiens
ggcaggtggtggcagaacacaggcttgctgttccaaaatgatgcagttgccaccctgttgggaagcagcaacaattgcaggggcagaggctgctcaagagctgggggaacatggggttgggaagtggacagccaagaacctctcccaaaggagaggtggcaggtggcaggtagcaggatggtacagaagccaaggctccaagccctcttcatgctccattgtcccattggatttagaaaaggtaaaacagaggtgatatcattaaacatttcaagatggtgactacagagaattcaaccccaagtgcaggcccttctttgcctgggaccagatgggaccccgtgtgagtgcacctctccgtggttgtctattaatgcatctgccacagggtgaatgggtgaaggaccttgaatgggcctaacacatgcaccagtgtcttttcaaatgtatttacgtaatagacttcagtaagaaacatacttatttctcactaaactgtgagttccatgagaccagacactctttcctgttcaggaaggtatcctcayggcctggcccaagtacatgctcggtaagtatttgtgggctggaa

SEQ ID NO: 913287 - DNA, 593 bp, Homo sapiens
ccagctgccttctggcattcagaattgctaaatgtgtcacatttaagaaggtagtctacaacatcctgctggcattcagaattgctaaatgtgtcacatttaagaaggtggtctacaacatccaggaaggcagtaataccccattaaagttttagagctaagtacaattttgttttctttttcaatctgacttttgcatatataaaatgttaaatttttcaggtgagaaattactctgataatgcaattagtctgtaaggagtttaggtagttatcctaaggcaaggtaacagtaaggatacttcaaatacttgaaatatctgataaactatattaactcaatatctatcaaatatcacatactcatatgagcttgtatgtcttatttttaataagttaaagagactcaaataggaagcaaaaggtcaagttattatttggttttggacaatggcttcctgctccarttgaaataaaatgtaaagacctcgctatcatttttaaggtgtagtggtttcacccctccctgtctctcccacttcactgaccacttccttaactgtccactccgaaacaccccttcttcctgttct

SEQ ID NO: 913288 - DNA, 655 bp, Homo sapiens
attcaaaaaataagttacggttaattatacctacaacacctctatttaaattcagatttgctcagcagccctttgtctttattcatatgcataccaagtgtttaacataattatggttgggcatttgaactttgtttttctttaacataaagaaatgctactactaaacatatttgtaagcagaaaataattaaagaaagaaaattggagatataagacattttttaatttagaggactagcccatggagtctaacatctggcttaaaggatatccagatggaggtgagatcacatggagggaagagcatgctcaaagaatccaagaagctttctcagattcaaaggacatgattttccaaactgaaggggcccatcaaatatctagcacaacagaagaatatagacctacacctcagcacacttacgtgacactttaggatacagcagcaacccatcctgtaaactcttcgtgaaaaaaaagttacatttaatacaaaggattgagaatcagtatggcattggatttcttaaaartggtactagaagttagaaaacagatgaccaagtcattcaaaaccataggtaaaattatttccaacctagaatttcatgcccaggcaaactattagtaagtagaataaatatactttcat

SEQ ID NO: 913289 - DNA, 567 bp, Homo sapiens
atattggatgattccatacttacgaagttctaataaagatgaaagtaatgcatgatggcagaagatacagacctctgcccagacctgaagctatgaaacccagggacaacaagaacttaagtcctccctgagtgaagacagccagaatgtgcacctcctgcacatttgttacaaactgtgactcagtctcacctgtcctgcccgagaggactggtctatctccacctcaatggcctgctgagccctggtgctgatagctctgggtaggatactcaaaatgaaatttcttctctctcccttagtatcttttttgtttttgtttttgtttttgtttttaagaaatggggtcctactctgacacccaggctggaatgcagtggcatggtcatagctcactacagccttaatcttctgggctcaagcaatcgtctgcctctgcctctgcctcccaagtagcaaggatgacaggcatgcaccaccakgctcgactctcagtgtcttttaaagagatgaattgtgttcactgggagttgcttgaaattgtgttatgcagatgaaagagtttct

SEQ ID NO: 913290 - DNA, 680 bp, Homo sapiens
ctttattgtgcctaaatctgccagaagaatgttattttagaaaataaatgtccagatcatgagggtgtgataggattggagtgttcacacagagcataagactcattgaggtcatcttcacaattatgtaatgtttgcagttggttcttttaatatcaagaatgactacacagtcctccccaagttctggcaaggctaggatacgtgataaatttcacagtacacacacatggcatggtcacaagaacagataaaaattcaagaaggaagagatgagtctttggcatcactgcagtgggacattcagtggctcatgggggtctcaagtctctaacagagttgactgagcaggcccagtctcccataggtccccaagtgactccgttcccagacccctcatcttcccaggcaccagtctctaggaagaggcacatattggagatgcgcagagcgaagcacactctttcaggtcagcgattcccaacacaacaccctaggggtgagaaattaatccagacatgggaaattaatatgacaacttttatttactatcatttttacttatcgtacacacatgtaacatatttgacatgagtcatatttctgacacattttayagttacatgtataaaactatagaaatatgtgaaaatcaaaaatattttcacatattcaaaaat

SEQ ID NO: 913291 - DNA, 341 bp, Homo sapiens
ctgcaagccaggaggaaacaaggtggtgaagggtgaggagaagagcaaaggcatcttgaggaatgaggcttccattcaccttattaattcacgtgttttcattaggcatacatttggctatagtcctgggaatagattaggacaatacctaggaaagccaagacaggaaagtttgcagaaaacaccattcatgaagtgataaaacatcagcaagatgcaccagaagcccaaatcctggagtgtgcctttgagaagccrcccgctgtcttctggatcctaacctaatagtcattatcaaaatcacatgatcgtctattctccagagccaaaatcaaagaatt

SEQ ID NO: 913292 - DNA, 681 bp, Homo sapiens
cacagcaccttcccatgccacacctagcaggaagcaagcatgatcaaagtggttagaaccatgaactacaaaacagattacctgggtttggatttaaaatccaccactcactaattgtaaaaccttggacacatcaatggttaattgacctctctgtgccataattttctttctgtacaatggaaataatagcagtttctccatgtgccagatgctatgtgttgacattcagtggggtatctgccttcaaaatgctcccctaatccacagggtaaggcctggagactcacattccatctttctataccagtgggttccagggaagttctgccaatgagaagctgtcatgggctttctggagttggcctggagatcagtggaaggtagctgtttgagcatcagcaccagacagatgtggaaatttgcagcagtttccaagcaaccttctgagaattgtgcactttggagctccaagaatatgtgacctcccattatcctaagcaagccccaccaagccctaactgatacctggcttcatagagtggctgagaaaatcaagaaagtttgtacatagaacgtgctcagaacagctccaacaacattgtaagcattcartaaatgtcagctactatgttcattccgtattattcccaatactatgaattaatctatgcatatcag

SEQ ID NO: 913293 - DNA, 598 bp, Homo sapiens
gaaattaacaggagtagcatgacaaggactgctgagatgcacagaggtaaataagagcatcagggtttcctcatattagctaaagctttatgatccaaattctctaggaaytgggctccactttttgactcctttggttttttgtttggttggttggttggttttggagtttgtttgtttgtttccttgagatggagtttcgctcttgttgcctaggctggagtgcaatggcgtgatctcagctcactgcaacctccgctgtgctgtccagtggcctccgctcctcccctgccacctgcttccatgagctcataacattccaatggcaaatcagtgattccggaagaggaaaccaagcctcagtgcctgggaggcgcctttgtctatccaggagtggctcaactcaaattccttaagaaattgggtgtccatggagactaggttaactcctaattccaggtggcagtttctcaaggaagttactcagcctttctcatttcggggaattcacgtaacatgttgtgtctttggttttccttctgatgcgtgcagttctgaacagtgcgtccttgagggaattgtcatgcctagctcagac

SEQ ID NO: 913294 - DNA, 623 bp, Homo sapiens
agttgtgcaatgagtacagaattttagttttgcaagatgaaaaagttctggagatcagtaatgtgaatttatttaactctattggactttacacttcaagatggctaaggtggtaattttakgttgtgcattttttagccacattttttaaaaattgaaaacaaacccagagataaaagccttacctctgaagtcaggtgagctaaagatgaaggtaagattggcggtcagttcattggtttaagggagtcgttccaactagctggagagtggcttcttagtattcttgcacagcaggtccgagtggcatccagactcaaacgggccgtgctcaggcccaacgctggcatgattcttgagtcattaggaaggattccttactgtggagacccctgtcttctggtccctctggtttggggagactgcaggtgggggtgaactggaggaataaagccacattgtccacaggacatgtgtccctagaacttcccaggagcaaagacaatggtggagggagactcagggccaagcccaccagggtgacccacagggtggataatgtccctgggaaggcagggcaccttgggcttcttgagagagcagaggccggagcagagtagaac

SEQ ID NO: 913295 - DNA, 630 bp, Homo sapiens
tgctgagtcattcttagggtgggctaggagaaaatgtgttttggtctgaaggagggaggaagaagacaaaaacaagtaaattagaaaacgtggttgcaggattgaaatctgatcctgaaaaagagagaatagccatgagtataatgtttaaaaatacacacaaagaaatccactgtggtgggagtcacaagaagttcaatcattatctggtctcgtcatctcgagtgaagctgtccactcccaaagccgactgcttggtccatagctcttagtttttgcatctggaggcttttgtggttagtgttggtttgaggtcatttgagctgatccattggtctgggtttgttgcctgtttctactgactcttgagtacttgggtcaacaccttggatcttgactgccctggcatttgctaggaggacctgaaatggctccttccaaagaggtctgaaaagtttttgccttgaggtctcttccagcggacccacaccaggctggaggtcagaaaagtctggccggcatttcctctggctggcatttcctttgggcacgagacttggtgtgtgaggctaatccttgacaatgcttaactgygtacatgaaatggagcagagccaggccttgctggag

SEQ ID NO: 913296 - DNA, 550 bp, Homo sapiens
tctttttcccttttgtttttgagcctatttgtcctcagacttcttctgaaggtaaaggaaacaggcccccacccttgccactcccaggggtcaagaatgtcggcctcggtcygacccagactttctatggcattttccttcattgtttgggacagatgggcaagcggcaactccccgcccgcctggcctcccctcccagctggggctggggtgcatagctcaaaggctgcatgtggcaggctggccagcattccccaccatatgtccatggtgtctcctcattccatgactgaggagtccagctccattcaagccctagggaagaaacagcagtaagtttctctccctgttggaggaaactatttgtataagaataagaggttctttcccaaggcatctttccaaccctgcactttaagctttttttcttttctccaccaggtcaggagttaacttttaagtgagagggtttttttcccccttttagaaagcactttagtaggccagaaccctagctatcactgtttttctctgtaaagttttaattatg

SEQ ID NO: 913297 - DNA, 634 bp, Homo sapiens
cctccctcctctcatgctctgatttccagtttgacctctaactcccagcctgggggaccagagtgcttacgtgtgtgcataagtgtgtgcacgttgtatagtgcacacattgggtgtgttcatggattcgaatgtgttcggctgcaagcatttatatgtctgggttgattggttccatttctcactcagttttatccaaagcctcccagtttaaactacacaataggtccctgaccaccttgcctaaaagatgatgaaaccagttttttaaccctaaactcaacacttgcctccaaggcaaataaaaatcttggaatcgaaggcagccagtagtgagaacgttcttcaggggacagttctgggctatgctatctggaatagcagactcctggggcaagagggctggcccatctactggggaacgtttaacctgagacagtcacagcagagccccccaggaggggaatacagcccagacaggggaaatgcagaagaatgctaccagcacaacgcagactgggaaaagcaagttccagattacattctgaataattyccttttcatatcaccagaaattactaaattagaaaacacccatttcaggaatacatagagatatgactcaactctattt

SEQ ID NO: 913298 - DNA, 643 bp, Homo sapiens
ttgcattgctctgatgactaatgaagttgaatgccctttcacatgctgatttgccatccctgtgccttcttcaataaactgttcaaaacttatgcacatttttactgagttgttyaacatcttattactgggttttgagagttatttatattttctagatacagatcctttatcagatatatgatttgaaaaatgctttctcccaatcagtggcttgtcttttaattctcttcatagtgtcttacgcaaaccacataattttaattttgacaaaatctaatttatagaaattttctttgatggatcatgcttttgatattatgtctaagaaatatttgcctaagtcagtactacaaagatttcttcttatattcttggaaattttacagttgcagtttttacatttaagactatatttcacttgagttcatgtttgtgtagggtatgaaggatgaactgaagttcattttttggcatgtaagatatccagttgatttagcaccatttagtgaaaggttcctcatttcttcatggaattgccttgtgcccttgtcaaaaatcagctggcatgtatatatacatgtgggtctgtttctggactctgttgtttgcctttaatctctttgtctaaaggccagtatta

SEQ ID NO: 913299 - DNA, 529 bp, Homo sapiens
tttttctaatgggtacaggaagggactgggtttggggaggaagcccccagaggcgaagtgccactgtcactccactgtattgggcacaccctgtcacctgactcacmgtgaggctgagctggcccctgctgggttgagaccccccctccatgctgtccgctttgggaggaagtcgctctgcagccctggcctcggggtgggggttgtgctctacctcctggaagacacagcagtgacagagactgtttggaatcctgctgggaaaggagctttgtctcttctccccgtgtatgtgtcgctcatgcgccggtgttggtctggacagatggatgtttagtttacacacagcgttacttgattttggtgccgaaactgttccagcattggccgctgggagttcttgcagttgcccccagctccctttggccccattgacgtgggggtcgtatttttagctctttcccactgccgagcaccaacaggtaacccaggcgcatcttggacatctcctgccagtcctgctgtttct

SEQ ID NO: 913300 - DNA, 601 bp, Homo sapiens
tttttctaatgggtacaggaagggactgggtttggggaggaagcccccagaggcgaagtgccactgtcactccactgtattgggcacaccctgtcacctgactcaccgtgaggctgagctggcccctgctgggttgagaccccccctccatgctgtccgctttgggaggaagtcgctctgcagccctggcctcggggtgggggttgtgctctacctcctggaagacacagcagtgacagagactgtttggaatcctgctgggaaaggagctttgtctcttctccccgtgtatgtgtcgctcatgcgccggtgttggtctggacagatggatgtttagtttacacacagcgttacttgattttggtgccgaaactgttccagcattggccgctgggagttcttgcagttgcccccagctccctttggccccattgacgtgggggtcgtatttttagctctttcccactgccgagcaccaacaggtaacccaggcgcatcttggacatctcctgccagtcctgctgtttctctagggagccctggcccytgtattgcaggaggtgtgagaccctgagatctggggctcggtgcgcctgtccca

SEQ ID NO: 913301 - DNA, 601 bp, Homo sapiens
tttttctaatgggtacaggaagggactgggtttggggaggaagcccccagaggcgaagtgccactgtcactccactgtattgggcacaccctgtcacctgactcaccgtgaggctgagctggcccctgctgggttgagaccccccctccatgctgtccgctttgggaggaagtcgctctgcagccctggcctcggggtgggggttgtgctctacctcctggaagacacagcagtgacagagactgtttggaatcctgctgggaaaggagctttgtctcttctccccgtgtatgtgtcgctcatgcgccggtgttggtctggacagatggatgtttagtttacacacagcgttacttgattttggtgccgaaactgttccagcattggccgctgggagttcttgcagttgcccccagctccctttggccccattgacgtgggggtcgtatttttagctctttcccactgccgagcaccaacaggtaacccaggcgcatcttggacatctcctgccagtcctgctgtttctctagggagccctggcccckgtattgcaggaggtgtgagaccctgagatctggggctcggtgcgcctgtccca

SEQ ID NO: 913302 - DNA, 597 bp, Homo sapiens
ctagatcatatgctaatacttttcttaactttttgaggaatgactgtattgttttcatagcagctccgcattttacatttctaccagcaatgcacaagggttccagcttctccacatcctaaccaacacttattattattttgataatagctattctaatgggtatgaggtgacatctctttgtagttttgatttgcttttctctaatgattagtaatgttgaccattttttcttgtgcttattgcccagtagtatgtgttattgagagaaatgtctattcaggtcatttgccagatttttaattgggttgtttgggtttttgttattatacaagtgtagttgttaaaatagactatgttgggtaattccaacttcttgtctttgtagatatgtttttgttttctgtgatttctactctttcttcctcaatgggtcactaatttcttttaggctactagacatttgtatttgcagaatattttgaggaataatttgaaataatttgggatgattattgtttttagagaggttttcatcaggtactgctaaggttcttaaaggagcaarcttaatccagtgtagtcttaaggacaacc

SEQ ID NO: 913303 - DNA, 669 bp, Homo sapiens
aactctccacccaaaaacaacagactatacattcttctcatcaccacatagcacttacctaaaattgatcagacaattgaaagtaaaacactcctcagcaaatgcaaaacaactgaaatcataacaaatagtttctcagaccacagtgcaatcaaataagagctcaagattaagaagctcactcaaagtcacacaactatatggaaattgaacaacctgctcctaaatggctcttgggtaaataatgaaattaacgcagaaatcaagaagttctttgaaactagtgagaacaaaaagacaacattccaggatctctgggacccagctaaagcagtgttaagaaggtaatttatagcactaaatgcccatgtgaaaaagctagaaagatctcaaatcaacaacctaacattactactaaaagaactagagaaccaagagcaaacaaaccccaaggctagcagaagacaagaaataaccaagatcagagcagaactgaaggagatagagacacgaaaaacccttcaaaaattcaacaaatccaggagctttcttttttaaaaattaatagaccactagctagactaacaaagaagaaaagagagaagmatcaaatagacacaatcagaaatgataagggggatatcgccactgatcccacagaaatgcaaa

SEQ ID NO: 913304 - DNA, 571 bp, Homo sapiens
acacagcctgacaacagcttggtcttagcccagggaaagccatgtcagagttctcacatacagaaatgtaaagtaataaaatttgtgtttttaatcttccaaatttgtggaaatttcttatggaagaaatagaaaactaaaatgtagatcttatcactactaaatttaatactgatttgaaggatacaggcaagaactaagcagagataaaatagtcctctatggaggacactgcatctgtaaattttcgtttccaaaaagaatgttcttttttttttcagtgtttgaaagcacttggatatcaaattaacaggagatttttgaacaatgtacagtatatgtaaatagtatactcagagaaattttggttttggggctccccaatactataactcatttgttacacagtagaaatgtatatatttctaaaatttgatttaacttatatttaaaatttggatatgtagacctatatataataatttakcattttcataaagttctcaatcttttagaatgccatggatagaatttgcttcacaaataggttagaatattttttctttagctt

SEQ ID NO: 913305 - DNA, 597 bp, Homo sapiens
aaagaacttttatgtcaccctaatataagaatctgctcaaaatggattaaagtcttaaacaaaagtcattgaattatacttaaagtgtgattcttgtttacatacacagttgggtcttgcgtttttattcaatttaataaactccttttttaattagttttttgtaaatttcacatttactgtaattattgatgtggtgaattaaaatctacctacttgctaactgttttttattagtttcttattatctttcatttttcctctttttctgtagtggatataggtgaaaggagtccaggtggtttcctgctcctctcataggggctgatattctgcttcaccggtcttgcaccaggaaaaatgctttctcatgactcttcccagtattttttttgtgaactccaggtgttcttgcccgttaaaccttacaagaaagtgcaaacttgcccccagggcctccatacaatttctctcacttaatctatctaaatcatcttmttgttgtccagctaaaaccgccctaggtaattaagcgcttgcagtcctgttgctttggaggtgcttccctttctttaaattgtgggatagttgattgcc

SEQ ID NO: 913306 - DNA, 676 bp, Homo sapiens
ggtcaaagacctctttggaatgcctgttcsatcacattgagtatttagacctcattcttaaaataaatattatatttttatatcattcttttgaggaataatcacatatatatgtgtgtgtatatacatgtgcatgtatgtgtgtatatatatatgtgcatactatactgtgtcttgtgcatattaggcattcaataacttcttactattacaatgttcactctctctttcatttggaaagcagaatataagctaatgatattagtgaactactttttctaaggtctctgataaccaaataatgataaagtccttggttccattatggacacttgttacatccttagatttccatcattttgaaaagataattttagctggcaatagttctttggggttttcaaatacattgcattattagactatattgttaaaatctaacctttcaagagagtttaagaaaaagatatatttcctatctgtttaagaatttagttgaatttcagaaatactagggagagggaaaaaagagtaaagagaaatatttatgaaattaaatgcattttaatttttcagatattcatttgacacttttggaaatttactatttactaactcccgttccaccaaaaggaatttagaaagggctctccaataccaaagtaaaagtaactgg

SEQ ID NO: 913307 - DNA, 620 bp, Homo sapiens
taactgcctccatgattcagttgtctcccactgggtccctcccatgacacgtggggattgtgggagctacaattcaagatgagatttgggtggggacacagccaaaccatatcagtatgcaacttctaagaattaggacattcttctacataaccagaacaacattatcacacttcatatcatgttaacagtaatccatagtatcatctaatagatagttcatattgaaatttcactaatctttcttgtcaacagacttttaaagtggggtgaacagaattgacagtgcagataatgtgaggaaggatttgaggataatgaatactttctaattttgtagttataactgtgaagctaagtgaatgtggatgagattaacttaggaataaaaagggatcaggtactttgggatgaataaggtagagacatgtattctgtttcaaatgggggtctatgggatattcatatagtcacatgtaatgaacaattgagggttcaggtttagagctcaagaaagaagtcaagaccagacatagaagtgtgggagccatcaatacatagaagataaatgaaagatgggaatgggtaagcttacccagrgaaagggcaaggaatgagaa

SEQ ID NO: 913308 - DNA, 549 bp, Homo sapiens
cctcaaaatcattgatgttttaatcaattcttgttatggtcccactgtttcagtagaaaggacttctgctttaactatgagtagacagaaacccctagaagacttactatgtcatattatggcagcttcatcattccagttcctgagtggaaagcatgttcttccatcatttcaaaacaagacacaagggtgctgtgaaaatgtccttttccacctcagctagggcacattttccatgcactccacattttttgtcccttctgcctataaaaatgtttgtctccccattccagaaacagtcatttcttcattatacctcatccttaagtgatctatcatcttttggcttttgttcaccatcaaacttcattgatacatatgaattataatcagtgggggttcagattcatctccaatttaaaatgtaagccccttgatttttggcttacattcccaccactctactaacactgatcttggtargtccatcaataatatcctatttaccaaattaaataaattagttttcttcctattgtgctgtttcct

SEQ ID NO: 913309 - DNA, 668 bp, Homo sapiens
acaggagaaaggatatcagagattgatgactaccttgccgaaataaggcatgcagacaagattagaaaacaaaacaaaacaaagaatgaaaataaacgaacaaaacctccaagaaatatgggactatgtgaaaagaccaaagctatgattgattggtgtacctgaaagtggggggtagaatggaaccaagttggaaaacacacttcaggatattatccaggagaacgtccccaacctagccagacaggctgacattcaaattcaggaaattcagagaacaccactaagacactccataagaagatcagctccaagacacataatcgtcagattctccaaggtggaagtgaaggaaaaaattaagagcagccaggaagaaaggtcaggtcacctacaaagggtagcccatcagactaacagcagatctctcagcagaaacactacaagccagaaaagagtggggggcaattctcaacattcttaaagaaaagaattttcaacctagaatttaatatccagccaaactaagctgcataaatgaaggagaaataaartccttcaaggaaatgccaaggtattttgtcaccatcaggcctgccttgcaagagctcctgaaggaagcactaaatatggaaaggaaaaaccagtaccaaccactgcaaaaacat

SEQ ID NO: 913310 - DNA, 639 bp, Homo sapiens
gtctcactttctttgaatctccagaatctagctccatgagcaagatattatagggatttattaaaatttgctaaataatggaataaacatcttaatgtccaattggaatacttgattctttatagatatccactcaacatagttttttgtgtgtgtacctactcatgccaggcattatacgtacatgagacagacacagcctgctatccatggtacttttggcataaggagttataaaaagcattaaggaggtaatttgcagccaagtgtaatattagagtggtgagaaggctcaggctgttttgacagtctatagcagggggggaaagttacctcatgcagttagttacttagatactcctttaaccaaatacataggattaaattgctagacgttttcgtagactcagaaagccatatggtgcaagtgccttcactgcctacattataatgaagtcttctcttcaacatcagaatactatgttttatgttttttgtttgtttgtttgctttttgagatggagtctcactctgtcatccaggctagagtgcagtggcgtgaacttggctcactgcaacctctgcctgctgggttcaagcaactctytgcctcagcctccccagtagcttggattatag

SEQ ID NO: 913311 - DNA, 579 bp, Homo sapiens
actagatttttttttcagcttgtttccacatttttggaacagtggttgtatctatctgaaagttatacaaattaaaaaaacaagaatgcatataaaatacttagcaatgtgccaggcacttattaagtcactgaataaatgtttgttgtttattagattactatcaccaccattctcctattcttacttagtattaagactcactgtaaatactttagagtttagctcaggaaaattctttctagggacaaaattattttattaagtagtctcctggtattttgggctttattgctaaaattgaataatttaaactgttgcgaatagcacaaaaaagggagaagtcatatggaaagaagagaactaaggatggaagtaaaacacaatagttgcatatgaaatgttagggagagaagaagagcagagaggaagcaagcacttctcaaagtgaacatacaactaagaacaagaatcagaatcccccagatacagaaataaagtcaacgttcaatttcagtgttagccaggggctcttgttgttgkttacttgttttagggaaaaatacttcgagtctttct

SEQ ID NO: 913312 - DNA, 589 bp, Homo sapiens
ttaattgactttgcattgctggggaggcctcaggagacttacgatcatggtggaaggcraaggagaagcattcactttcctcacagggcagcaggagggaatgagtgcaagcaggggaaatgccaggcacttataaaaccatcagatctcatgagaactcactcgctatcttgagaccagcatagaggaactgcccccatgattcagtcccttcccacagggtccctcacactacatgggtggaattatgggaactacaattcaagatgagatttggggcagagccaaaccatatcatattaaattgtaaaaattcctgtgtatgaggaataaacagtctttagtgggctcagaccaggagtccaagggtcttgaggacctctgtgtgttggtcaattttcttctccaagttcttttcggcctgtttccgtagcctcatgagctgtttcttatggtagtggaatttggtcttctcatttctcttctcctccagggtagctgtcattgcctgatacttctagccaaccttgtgagccagatactcctggcattatatatatatatatataaaacatatatttctatacta

SEQ ID NO: 913313 - DNA, 600 bp, Homo sapiens
acaagaaagctgggagaagggaggtcccaaagtcaccttgtcattagttctatacaaggtgatcctgaaggtccagtataaatccaagcactaaattagacttcaaaagagattttagtgcctgttttccagggaccacgactgcaggccttgaatgacctaacatgtcacaggcttgtgtcactccattctggagaggggacactgttgcagtttgataactgatctaacagcaagtcagacatccctctgttgccctgggttcattatactctatcaccttaataaacaccctcatcctctgcttattcagccatagcctggttctctgacttgaattatttgggacagccaggtctctcgtgagtgacttgtcgagttatattacggtacgtgacctactttgtacaggtctcagactgcggtacaagcagtgcacaaaccacatcagtgtcctcggaatgtctcagtagagacagcatagactcagaatctctgaagaaatcttcagggtcagtcatgctaacctcttcctcttccgcaccayctatgagcttcactcagctgcagggtcattgaagagtggccaactggccgaca

SEQ ID NO: 913314 - DNA, 659 bp, Homo sapiens
caagaagtcctcactccaaaaatcttcattttgctcatctacaaagtagaactaacaataatgcctatcctccaagaataggtacgcaatgggaaagtgtttgtgaaaatatgagatgcaagataatgaggtggtgagtacaggctctagagccaggcttcctggagatgaacctcagtgccattgcttactagttgcgtgaccttaggcaagttacttaaattctctgagcctcagccacctaatctacaaatcaggtaagtaaatgtatcctcacaatgactgtgttagaatgattaattcagctgacaagctagattcatgataaacactatatgcatgtttaataactaagtaaagtctatgtagcacactcagctatagaattacaacctttacctgcccaggtaaaaatcttctttaaagaatcatatgctggagttacgtgcttcatatagccttttcttgttgttctattttgtatacatgtatgagcaatacaccaaaggtaccaatgaggccaaggatgtgaaactcatcatggaaataaatgtgactactaggtaacaacggaagacaatcgatttgctcttttttctttttctttctctctctctctytttttttatagactgttttaagcaggtctgctcaaaatc

SEQ ID NO: 913315 - DNA, 587 bp, Homo sapiens
aatgagccagaatggagattgcaccaaaggtcatagaaagtgctaaatatgcactttgggaggccaaggcaggtggatcatgaggtcaagagatcgagaccatcctggccaacatggtgaaaacccatctctactaaaaatacaaaaattagccgggtgtggtggcgcatgcctgtagccccagctactcaggaggctgaggcaggagaatcccttgaacccaggaggtggaggttgcagttagctgagatcttgccactgctttccagcctggtgacagagtaggaccccaactaaaaaataaataaataaataaataagctaaatatcagaacctgtgaaagcaagcaccaacctgtatacccatagggccataagtggttgcttaatccaaggggtcagaatctaggccaggctcagcaccactgggaactgggtaagggggacacagggcaatggctcctaatgacctggagtcatcatttgcctcttatctgtgaattaaggcaactgacawgcaaccccacttagggaaacagggtcctcagatatgtcaccttgagtcccactccacaggaatagaattc

SEQ ID NO: 913316 - DNA, 589 bp, Homo sapiens
aaaacatctacctgcgggtgctgaggaagacagcagggagcatcccagggagkcctcttcctaactgaggccaagtgatgagtatcctactctactttttagaacattagctgaatcagatacaaaacaaaacaaacaaaacatcctctccctcctaaaacaaaacaaaacaaaaacctaagcaaacaacaaaccaacaactagaaaaaagcttagcctgaaagaggataaggctgttgaatcttttggtaaatagtcatatctcaaatggagacatttaagtgcctgtgcttgtgtgagtgatgccagagagaataaaaactcattgttttcaggtcttaggatccttgggtaaaagagcttggcacacacagcccaaacctcttgcctgatatatttgctgctgaggaaactgaagctgagagagagaaaggtcctcacccacagtcgtagacccagtgagtggaagcaaggccagcccctgagtgcaggacagggggatcttacaacccacactgctttttctaggactcccgggtctgacccactatgaggtgaggctgcaaaacaactggatgtttttaatatc

SEQ ID NO: 913317 - DNA, 652 bp, Homo sapiens
tttgtagtacagctagtacttattattmagtatctgttatttatataagtttctcattcttctaacttctaaagttctggcttttcaacctagaggtgcatgtttggtaagaccaaagcgatgtagaaatggagggatttaaaattctttgttttaaacagatgagatggttgggtttggaagctttgaggaattctgacatagagagtgaaatagctctgatttaggaaatgctttgagagattacaatactgggttctatctatatgggaaaggaataatactgacaactagcataaaatggatggtagaattcacttagcataagtttttatgtcctaagagtttcagctccaatttatgcagaaacctcagtgtgagtcagttagagataggaagccaggacatggtaagaccgaaggtggatcatgagggactgttcaccagtcatccaaatggcaaatgttatgctcagccctgaccaaatggcatcaatagccaagtgttcctgatgtggaagtggcataggcagaagacagcatgtgagtcaaggggtggcccaagtgtagtctaggactccacccagtagtgctggttacagagagatcagtgttcattcctcaagaataggtactggcaaaagctaggcgaa

SEQ ID NO: 913318 - DNA, 695 bp, Homo sapiens
gataactctatggtgtctgtgcagtatgattaattgaatgcttcatatgtactgartcttttttcatgaactaggctgatttacaatgatacagttagcagttatttagggtgtcactggaaaattcttgtttatattactttttatttatacattatgtacaaaaaattgccttcttcatgcttgtatccatattatttacataattgaagaatgatgatgaactgctaatgtagacagagaatggagatgaaactaatttcttatataaccactgaagagaagagtggtcatggagagaagagtagaacaagaattataatcatgtttaatttttctttcacttggaaatgacttgagtgggttcaaccattactaagaaaaatataatttgatttgtgaaacaaagagattctaagaatctctttgtttcacaaatgtctctattctctagtatctaatattaaaatattattttatggggttggcaattaatattataaaatgaatgaattattaatagttaataacatttaataactctcaacaaagattcaaactacacaaaggttttaattttgtaacaaaatgtgcaattttttccacaaatggcaaaaaagaattgctcacaagaaactataccttgactgtagacttattaaaatctaggttattgagtattagttatctattgc

SEQ ID NO: 913319 - DNA, 664 bp, Homo sapiens
tcattgccttcatcttcatatggtattctccctatgtgtggatctgtctcaaaatttccaatttttataamgataacaatcatgttggattaaggcccatgttattgaactcattttaactttataacctttgtaaaaattctatttccaaataaagtcaaattcagaaatattgagggttaggatttcaacacataagcttgagagagacacaattcaatacataccaagtctcaaactggaaacattccaaatgtccaacgatattaaagtaataaataaattgtggtatattttacactggaataccaaacaatagttgaatagataaaatattactaaatgtaataactacatggcgcaagtattttaacaaacaaaagcagacatcaaaatatacatacttaataaatattgaatgatcagttaccaaagtattattgaagtggctacattatctggggtacataccctggggtttgttgtctcatgccaggaaaatttaccacatgggcatacacaaagagtttaggagtggaggtttaataggaagaagggaagagaaagagaaacagctttctctataaaggggcctctgagcagaaaggactggctagcggcaaatgtaccagactcctagagccattcccgttctttctgatac

SEQ ID NO: 913320 - DNA, 640 bp, Homo sapiens
attacaaagatgccttcccttgagctatatccccatttactatgatattccctgatctttgccaaacaagattacttccctgaactgtaaaacttcccacacattgcgtacacagagaggataagagaaatgatagtcacagacagaaaaagaggaaattatgatagaaaagttggagatcctgttgccgacacccaattgcggcagtcggagactgggatcaatccagaagcctttggataacactgaggggtagccctggccagaaatcctcagttgctccaggacttcttccagccccacatgatggctaagtccaccatgaagggaagctggttcaaacatggcaaatatgcccagcaactcatgggtattgggggattctccaatccatagcctccccatgttctccccagcaagcccgtctcccaaatcttgtaaggctggcaaccacgtgaatagtttttaaatgtccgagggggcccagtatttggtttgattttgttctaaaatggaggccaagagcctcagaatgaagggacagagttgaagtctgctcctctactcaccattttgataaatgttgtaccttggtatcctggatgatatccccartatgaagcggccatgttgtctgggg

SEQ ID NO: 913321 - DNA, 319 bp, Homo sapiens
aggttgagaagacattttgtaaatatttaaaaattagaaacaagggactggtgtgctaattccttttcttctctactttatgccttaataattcatgttcttgactctttaaattggtttgtcctcataagtttgttatgaggagaaaagaaggagatagttttgctgataaaaatgatagcacttcctttcaacttagttaagctgcattagccagagaggctaaggccrgaagtcctaaactgaatgaagaacaagtgagctcagaggaaaggcagcccactaagatattccctgtgtatagaatgctaactagagg

SEQ ID NO: 913322 - DNA, 481 bp, Homo sapiens
attttgcctcagcttcttccttttaggtcaatatatgcattacattctgacttcatgttwattcaataataaaactgttttctttctcttccattatgaagaggttttctgggtttacaggagattttctattaaactgttacactagatttccccaacaattctcagtcagtgtttagcaggtattaaatggcagttcaacaaattccaaccgtgttcctcaagagttagtttagcatctgaaaaatgggctataatacctgattttctttcagagtggccaaggattggtggagttatttggccatttgaccatgatgtgtggcctcaatgtgtgtagaaagtaatgatttggggggtatgagatagtgcagtgcttgtttcagaggtgagcttgcctgtggctgttggctataagcaacttttttcttctccagttaaagatacatgttttagtgttagagaagattaaagaataata

SEQ ID NO: 913323 - DNA, 655 bp, Homo sapiens
ataaaaatacaatgtaaataccttagttaataattatttcattactaaaaacttaaaatgatcatctgagcctttaatgagtcataaccattgtgctagtgaaagggcttgcctccacgtttgtggctactgactgcttaggatggtggttgctaaaggttgaagtggctgttgcaatttcttaaatacaacaactataaagtttgtcacattgatttactctttcctacacaaaaatttttctgtagcatgccatgctgtttgataacatttacccacagtagaacttcttccaaaattggaatcaatactctaaaaccctgctgctgctttataaactaagtttatgaaatattaaaaacctttgttatcattaaaataatgttcacagcgtgtttacctgaagtagattccttccaagaaactattttcttttctcatgcataagaagcagcctattagttgttcaagttttgtcatgagattgcagcaatttgatcacatctttaggctgcacttctaatttgagttctyttgctatttttcaccacatctgcagtgactccctccactgaagttcaaatccctcaaagttatccatgagggttggcatcaacttctttcaaactcctgttaatgttgacatttttatgtt

SEQ ID NO: 913324 - DNA, 616 bp, Homo sapiens
tatggaatatagcaaaagcagtactaagagggaagtttatacctattaatgcatacataaaaaaaagaaaaacttcagataaacaatctagcaatgcrcctcaaagaattaggaaagcaagagcaaaacaaacccaaaactagtagaagaaaataaataaagatcagagcagaaataaataatttttaaatgaagaaaacactgcaaaggatcaatgaaacaaaaagctgatctttgaaaagttaaagtaaattgacagactaagaaaaacagggagaagacccaaacaaacaaaatcagaggcgaaaaaggagacattacaactgatagtacagaatttcaaaggatcatgagtggctattttgagcaactatatgcaaataaattgaaaaagctagaagaaatggacacatatgtagatacacacaacctaccaggattgaaccataaagaaatctaaaacctgaacagacaaataacaagtaacgagatcaaagccataacaaaaagtatctcagtaaagaaaagcctgggacccaatgacttcacagctgaattctaccaaacatttaaagaaaaactaatatcaatcctaatctaagtattctgaaaaata

SEQ ID NO: 913325 - DNA, 605 bp, Homo sapiens
aataacaccatatcatttcacatgtagtgcaccatataatagagtaaccccagtgtcctcctcttgtccattataaggttgctgttatttattatggatatccttatactatcactacccaataccttttctcttatctttgggcttccctaagaacttgtttttaaatacagtttatactttgcagcatttcaactataagccactgttattgcaatagagctcttttggtgtggtgataaagtattggggaggaggagtgttttataatcttatgattaaatctcagtcctttaggcctatgccctggatgtgacttcatatgggcttcttagtgtttcctcttccccacttagatgagacatgctgaagggggctggaactggaaaacttccctccccctgaggttatatgctgctctggtaaagaatttccctctgctgtgttggtctttgttagggagaagcctctatctgtaggtgtattttcaatgcttactttccctacttcctgtcagaaacaagtgggtttttcttggcttttcactcaagtggtggggcccctggaggtaaaacccrtgaaagtatagggatcccctaagtctg

SEQ ID NO: 913326 - DNA, 578 bp, Homo sapiens
tctatcctacagccttgctgaacctatctattaattctaggaggtttcgtctagattccttgagattttctttctttttttycccccctttacattttctttttttttttattattatactttaagttttagggtacatgtacacaatgtgcaggttagttacatatgtatacatgtgccatgttggtgtgctgcacccattaactcgtcctttaacattaggtatgtctcctaatgctatccctccccctccccccaccccacaacagtccccggtgtgtgatgttccccttcctgtgtccaagtgttctcattgttcaattcccacctatgagtgagaacatgcggtgtttggttttttgtccttgtgatagtttgctgagaatgatggtttccagcttcatccatgtccctacaaaggacatgaactcatcatattttatggctgcatagtattccatggtgtatatgtgccacattttcttaacccagtctatcattgttggacatttggcttggttccaagtctttgctattgtaaatggtgccacaataaaaatacatgtgcatgtgtcttt

SEQ ID NO: 913327 - DNA, 633 bp, Homo sapiens
tgtgagaagagaaccaccatcctccagaccccagaatggtagatccaccaacagcttgcaccatgcacctggaaaggccacaggcagtcaatgccagcccatgaagaagccaggcaaggggctgtacctttcaaagccacaggtttggagctgctcaaggctgtgggagcccacctcttgcatcagcatgacctggatattagacagggagtaaaataaaacattttgaaactttaagatttaatgactgccctattggctttcatacttgcatgggacctatagccccttcattttggccaacttctcccatttggaatgggtctatttaatgagtgccagtacccccattgtatctaggaagtaactaacttgcttttgattttacaggctcataggtgaaagggacttgccttgtctcagatgagactttggacttggacttttgagttaatgctggaatgagttaagattttgtgggactgttaaaagtgcatgattgcattttgaaatgtgaggacatgagatttggkaggggccagggggagaatgatgtggtttggctgtgtccctacccaaagctcatcttgaattggagttcccataattcccacatgtcatgggagggaccca

SEQ ID NO: 913328 - DNA, 628 bp, Homo sapiens
gggtgttatcatggtatttgataaactgatgagtctatctgaagggttcrtcacgcttggaagctaacacttttcccataactttttattcttccattttggaacactctcatccctttcatcacttggctggtatcaagcagattgtcaaaattattgtttacaatattcatatcttcagagctgtctttatagatttttttcctaaaaggattttgaaatactatcagtgaatagagtaaaaaaaatcaaacaaccatctcccaaatttctaatactttagttctaattcaatcttcatctcaatcactacatatcgtcccccatgacttatttaaagaatgcaataaaagaaacataagcaaataaggtgaaaggattcatgtttaccatttgaatatttatcttttgaaaacagcagagttgtaacaatctctagtgaatttcttcagtcatgtcttgacaagcatttgttgcctgtgaccagaatcaatatggtttatagcataaactccttttttctctctctcttttttctaggattactatttaaagctaaataaacttaaagtaatcataaaaagctaaacatatattttaatgctagagctgcttggaatctattaaa

SEQ ID NO: 913329 - DNA, 604 bp, Homo sapiens
acaagcacatatcaggaggcaagaactcttaaataataaattagcctttcatttctagaatgcttccaagttgaaagttctcaagcccctargaattctctttagtactatctaagttaatgagtgttcattctagctgattgcaagttctgtcttctatggccttctctttccctagtatttctgattatccctggaaaattcttacatattccacaaattcatgctggcttcacttatcacctttcctacagacacaagctctggtcttctctttttgatgttgttttgtcttttccagtgccacttcactccagtgtgaactaacatttctttcttaatgtcctaaatattttctaactctaatctgtagaagctatcagatctcttctgtgaagtaatatagcattctggttaaatgtgtggacactgatactatgtcttaggttctaatccatttggccacttactagcagtaagaccctagggaagttactaacttgatgcctgaattgtatttttttttgtaaaacaaagataatactagtactgataccatagaccttcattaaagattaaatggactacttccaagtgagcatta

SEQ ID NO: 913330 - DNA, 627 bp, Homo sapiens
ggctatggcacttactggctaggtggactttaaacaagtaacttttctctcagtctcagtttcctcatctctcagacaagaataataatagtatctgattcacaaawatatcgtgaagactcaatgagattatgttatataaaatgcctagcatgacacttcacaccaattaggcactccaatgttagtttcctcttgccttgctcactaaagcatctaccttatttcacttaatgaatttagctacaggtttgaacattcccagtgtgtagttgactggatcctaagatactgtagcatgctctgtttcaaaatggctcagacctggatccttacttaacttcactaaaccagagctcagaaaactggccagccaaaccatattcagcctgaggcctgttttgatatggcctatgagctaaaaatggtgttcacctatgtaaaggattgcaaggagaagaaaaggaggatgaagaagaagtaaaagagacagtatgtggcctacaaagcctaaaaacatttacaatctgacccttgggaaaaaaagcttgtcaaactctgcagtagtccctagtgagtaggaaaagcaaatgcaattaatagtctgtgggaattccttttttgtaa

SEQ ID NO: 913331 - DNA, 627 bp, Homo sapiens
ggctatggcacttactggctaggtggactttaaacaagtaacttttctctcagtctcagtttcctcatctctcagacaagaataataatagtatctgattcacaaatwtatcgtgaagactcaatgagattatgttatataaaatgcctagcatgacacttcacaccaattaggcactccaatgttagtttcctcttgccttgctcactaaagcatctaccttatttcacttaatgaatttagctacaggtttgaacattcccagtgtgtagttgactggatcctaagatactgtagcatgctctgtttcaaaatggctcagacctggatccttacttaacttcactaaaccagagctcagaaaactggccagccaaaccatattcagcctgaggcctgttttgatatggcctatgagctaaaaatggtgttcacctatgtaaaggattgcaaggagaagaaaaggaggatgaagaagaagtaaaagagacagtatgtggcctacaaagcctaaaaacatttacaatctgacccttgggaaaaaaagcttgtcaaactctgcagtagtccctagtgagtaggaaaagcaaatgcaattaatagtctgtgggaattccttttttgtaa

SEQ ID NO: 913332 - DNA, 634 bp, Homo sapiens
ttaattcaaatatatagtaaaagagaaatacctaaacctggagaaagatattaatgtctaagtccaaggaggttttagaacaccaagcagatatarcccaaacaagactacctcaagtcatttaataatcaaactcccaaatatcaagtataaagaaaggatcctaaaagcaacaagagaaaagaaacaagtaacatacaatggagctccaataaggttggcaacagccttttcagtggaaaccttacagactaggagagtagaatgacatatttaaagtgctgaaggacgctgggtgtggtgactcaggcctgtaattccagcattttgggaggctgaggaaggtagaccacctgaggtcaggagttcaagaccagcctggtaaacatggcaaaaccccgtctccactgaaaaaaaaaaaaaaattagctagacatggtggcaggcacctgtaatcccagctactagggaggctgagacatgagaatcacttaaacccaggaagcagaggttgcagtgagctgagaccacaccactgcaccccagcctgggtgacagagcaagactccatctcattaaataaataaagagctgaagaaaaaaaactactctagaataatatatctggagaaaa

SEQ ID NO: 913333 - DNA, 634 bp, Homo sapiens
ttaattcaaatatatagtaaaagagaaatacctaaacctggagaaagatattaatgtctaagtccaaggaggttttagaacaccaagcagatataacccaaacaagactacctcaagtcatttaataatcaaactcccaaatatcaagtataaagaaaggatcctaaaagcaacaagagaaaagaaacaagtaacatacaatggagctccaataaggttggcaacagccttttcagtggaaaccttacagactaggagagtagaatgacatatttaaagtgctgaaggacgctgggtgtggtgactcaggcctgtaattccagcattttgggaggctgaggaaggtagaccacctgaggtcaggagttcaagaccagcctggtaaacatggcaaaaccccgtctccactgaaaaaaaaaaaaaaattagctagacatggtggcaggcacctgtaatcccagctactagggaggctgagacatgagaatcacttaaacccaggaagcagaggttgcagtgagctgagaccacaccactgcaccccagcctgggtgacagagcaagactccatctcattaaataaataaagagctgaaraaaaaaaactactctagaataatatatctggagaaaa

SEQ ID NO: 913334 - DNA, 669 bp, Homo sapiens
cctctcacctcagtttttgtattttttggtagagacagagttttgtcatgttgcccaggctggtctctaactcctgggctcaagtgatccactagcctcggcctcccagagtgctaggattacaggtgtgagccaccatgcctggtcacatcttcatttttctaagccatttcttcttctaaaaagatgggttacaaacagaacctgtttcataacgctgctgtaaggattaaataagaaaattatcttaaacagaattcctggcacatcctaagtgctcaataaatattagatactataattatctttcataaaatgctttactagtgtggacaatccttttacagatttaaacatgaaaagaccttgacatttttgctctcttaaacttttcataccaattacatcttcctcccctcttatgctcccctttccttcagataaactccatagaagtctttctctgggactattttaatcaccctcttttcctgtcatcttggcttctccctggaacatgacagatattcaatttgagctgggcatggtgccatgtgcctgtagtcccagctactcaggaggctgaggtggaagaatcacttgagtccaggagtttgaggctgtaatgagctacarttgcgtctatgaagctacttcactctggccaga

SEQ ID NO: 913335 - DNA, 645 bp, Homo sapiens
cagacattttatcaatattaattmtttcaattcatgaatgtaggatatctttccatttttttctgtccttttcaatttctctcatcagtgagagatcttttacttttttggttaaatgtattcctagggtgtgtgtgtgttgactgcaaattgtattgctttcctgatttctttttcagattgattgctgttagtgtatggcaacactatcgatttttgtatgttgattttgtgtcctgtaacttcactaaattcatttatcagttctaagggtttttggtggagcctaaaggtttttgtaaatataagattgtgtcatctgcaaacaaggataatccgactttctcctttccaatttggatgccctttatttatttctcttgccaaattactctggctaggacttctagtactatgttaaataaaagcagtgaaagtgggaatccttgtcttggtccagatcttagtggaagtgctttcagttttttgccattcagtgtattagccgtaggcttgtcctatatggtctttattgtgttgagatgttccttctatatgctgtttgttgacagcttttatcataaagcaatgttgcattttatttaaatttttagcatctaatgaaatgatcataaggttttttta

SEQ ID NO: 913336 - DNA, 613 bp, Homo sapiens
ggaaaccaatgtatacttgtgtgtgatgaatattggacagatcaataagcaaaaataatggggacattcaaaacttaggagagttcctcaggaatcttactctgaatgccaattacatagcatttgtcaattgtgactgttgatatgtggaaattttgagtgagtctcaagcttcactcagtaaactatgttgtgaaattaacatacattttatgaaggtctagaatattagtggctcttctattttcaatttaatgagcgaatataaaaatgattagatttataaatggtagataggacccaaatttagttcaccttatctccttcaaactctagttcaagtttgctgtttagtatttctttaagtacaaagattttcttttttttctttcttttttttttttcatttctgggggaacctatgaaaaacaaattgatgaatccttagggcatgccatggtgtcctggtccacttctgtgaaagccaatgtcttctttgggatatgttgcttacatccaataactaattaaaatcatcaatataaaatgaacttcrtgttttagtaattaattaggaaattatttcaagattgagctgttgataatagccatc

SEQ ID NO: 913337 - DNA, 598 bp, Homo sapiens
tctgccaaaccacacactcaaatatagtaatacatttaattcattttctctaatcttagaaaaactgctacatcacttagcctttgatatggcactaggcggttatttattctgtgttctaaaagagccattccactccttgtctctctatcaatctcttgtccgtttctctgttctaccatcaattacatcattcgcaaacacttcaacacttcatcagaaaacaaagaaaacagaaaaactccaagtcactcagttggagcttcacttattattttcttccacttacaaaacaaatttctatcacctattatccttttcatcttcccttgtttcattattggttaatatcttcatctttcctctaagttacacaacttcctgcatagactcttaaatttttctaacttaaacaagcaaaaatacatccaaccctatgtttctctttagtaaggacaccccagttgttatgttgcaaataatttacaggtacaactggaaatattggccctcatagtctaaggggyactctgatgggatttagaatagtttggatttcgtgggctagatgcctgtagcaatttatggttttatggga

SEQ ID NO: 913338 - DNA, 646 bp, Homo sapiens
ttaaggcatcaggttcccttytggcccaaggaatgtccagaaatgtcatctgggagcttgggcccacccagaaaagggggcctcatgactcttactagtgccctatcctgctgcagcgaaactggtatccaagatataagacaaagtgcaacactattctctctcctctcctcaagtgaaagaaaagggtctctttcggagccataagctgtgcagcctggggttagggaactggtgatggcagcactcccttagccaccatagctggtgtctcagtaggtcatgtgcctccccagtctgctgcctctgggccaagttcagcactaggactcaccaagcagtttcagtctttgtggcctagactccctttcaagtttatttagagcctcagagcactttagccgacggtggcgaggctagtgggagctcaggttctgaccactggggtcagtgattcccctctggctaaggctggtttaaatactccctctctgtgtgggcatgagtagaatttggttcagtatttctttctactatcatagagcagtactgagttcaatgtctcacaattgctgtgttctccctctccatagcaaacagaaatgtctctgcaccatactgtcactaccaggagttgggggaggaa

SEQ ID NO: 913339 - DNA, 601 bp, Homo sapiens
aacagtaatgaaagcagctagcttataataagcacttactatgtgctggcactatgctgaatgctacactttgaacactctgaaactgggttataaagttgcatgactccctgaagtaccaattgctaatgggtgatgaaactggaattctcatccacaccagtttaattttatctctcttcatcctcaaggcctgacacattgcttggaacaccgcaattactctgtaaatgtaccatgagagaatgaatatatgaatgactgaatgaatgaatggtggtgccccccagtggctaatgcaaacatttgaagaatgtagaatggaaaggtaaagaaggaagagagggagggatagaggaagaaatagaggaaaaatctgaatgaacattataagatttcaaaaagattggctaagaaatctcagatatgcaaagtatattttatttgcaggtgattttcaaacataaagacattttacatccattagagcatttcccacctttaactagtcctttargagatatacagttgtccctcagtgtccacaggggattggttcgaggaccaactccctcaatgccaaaatctgaggttgctcaag

SEQ ID NO: 913340 - DNA, 624 bp, Homo sapiens
agagggaaatagcttgaattggttactggcaatgtctacgacttgatggtatatttacaaaarcccccaaagcatcacctggttttatgagttgtatcctatcatctgatgccacagatagggtgtagtggcgtgaccaaatctgggccaatggtaagggagaaatattgcagggaaagattcaaaatgtcactatacaaaagacatgtaatatgcaagattgggatagaaggcaactacagcaactcagaggcaagaaactgtatcagttcattcattagcactccagaggacacattcatacaaagaagaacaaggaagttaatttcaacacaagacaaagggaaactttctaccactgaaaacagttcaaaagtagaaggtctaatcaggtcctttccaatgaatgtggtcagagacctctacccccagacatgttgagcatcctcctcagggctgaaccaaataactaggtgaggatgcaaaagctctgggggaaatctttttttaaatttttgttgccaatattctttttatttctttgggactttggaagttaggaaagaatttctggagcatttgacaaacattttatacggagatctgcaaacaaggaaatttcac

SEQ ID NO: 913341 - DNA, 632 bp, Homo sapiens
aagtaattccttaaaagatttcaatatggatgttttkgagaattgcaggtacagcccaagtttcataacagaaactagttcatgagttagagggaaaacaaaaggcagtccactggttctatatctattttataatactttagagaccagagaatattggaatcaggagatttataaaacactagccctccaggtttccagtgtttggttttccagatggtacattgcatattgtggttattcatacaatacagagaagattaatccaaagagcaaaacatgtaagtgtctttttaaatcattactttaatactctactctcctttctccacctccaaagatttggataaaatatttttccacattggcagtatttttctttggaatgcaaattcctagtgtggaccaatcctataattattcaggccagacatctctaaaatggtaaacataagctgaaggtttacctgtaaatttgtggtatgtattcaaactcactgatgattttagataaatataagtagagaacctaaatgaaaatatttacttaccttagggaaataaagcttggaaagctggtatcaactttccttctgtcatataaaccttgcttatccctacttctgaccatt

SEQ ID NO: 913342 - DNA, 566 bp, Homo sapiens
acatgcttggcagaatgatgatgtgttcaggacaacgttgaacgatattcaagtgtkgaacagagacaaactcaaacatgcactatacccttgcctatctcagtgggcccccctcaagtgtctactctagtatagaacacctactgggtgttcagagttaagcaatcttaactcctacttgcttatgctctgctccaggcctcaaaggcctcattttcaaccttgcctgctcatcatttcaccctctggcttgcttttctactttcatccggtgataggctaacttccagctcctggccatggcttagtttcctggatgctgcttttgtggtgttcctgcatcatggcaacccagatagatgactttgtgatgaccatgtcacccaatctagcccaggaagcacccacccttgggcagagtgcctccatgcagccctcacccaatcttagttcagcttcagtgtcacagccaaaacaaacaccacatagcataaacaaacaacagtaaggaaggttcccagtccctctcaggaaagaataatagggaagagggttaaaaacaatgc

SEQ ID NO: 913343 - DNA, 555 bp, Homo sapiens
ttttgattgttgctaccttggataattcacagatattctcagattaaaagttgtttgctcttgaatttactctgtatcttgcggacaatactaatgaaaatgtgattggaaagacccagagcatcaatgttatctcctgccaaggctgacaatcaactttgcccccagtggcatttatttttctacaggcaagttgggacccacatcttagactgccatccataggcagagataatttaaaactccatgttggatattttcatgtaagctctactattaacattacactctataacacaaaattggcttaggcaaacactttccattaaccaaacctaaacctttaatgctcccaattagctgaagagacttcttgagtcaccatttacttctctctcaagggtccctctattagttctatttctcaaatatttatagtgcagtcccccttttctatttcatttgtcattgaattcagaccctcattatctcttacattttttgttgacctaattgttmactcccaggtgtatcacattcgtgtgtctcattttg

SEQ ID NO: 913344 - DNA, 617 bp, Homo sapiens
caggttataggagaatctatgaatatttatgagaggagctaaacgcatgctcagtgagtaaacatatatgttaaatacattccatgttcactttggggtagagatttaacattaaaatgaagtaaaatttggctttttatgtcaagaggtgaaagacaggacacaaaggcatcccatgcacagcctctgtggactggtcagaaccaggctctggttggtggtcatctaccaggaaggaatgttttgtaaggctggtcagttgtaaaggcaagaccataataagagaggggaggtcagctacgatgtcaagcggtctgtcaaggttggtggggaaatcttccaaacattgtttctcaggaactggtttctgtttaattacaggaaagaaaatcttgcggcagttggcaaggtaggggagtgttgaggggtcactgacctcctgcctggccaaagctgtagaatctggttttaacattttctgggtctctttttgccacagggagtccatttcaagggcttgacccaatatataaagaactcttacaagtcattaataagtttaacaatgcaatttaaaaagaytgaaacagatacttgacagaagagaatatatacat

SEQ ID NO: 913345 - DNA, 633 bp, Homo sapiens
gtaaaagttctctgcaatgaaaactatgaaacattgatgcaagaaattgaagagggcacaaaaaaaattgaaaagatattccatgttcatggatcrgaagaatcaatattgttaaaatgtctatactacccaaagcaatccacagattcaatgcgatccctataaaaataccaatgacattttttatagaaatagaaaaaaacaatcctgaaatttatatggaaccacaaaagacccagaggagccaaagctatactaagtaaaaagaacaaaactggaggaatcatattatctgacttcaaattatactacggaataatagtaaccaaaacagaatggtactagcataaaaacagacacatacaccaagcggacagaatagagaacccagaaataaattcattcacctacagtaaactcattttttacaaaggcgccaagaacatgcactgaggaaaggacagtctcttcaataaatggtgctgggaaaactaaatatccatatgcagaagaataaaactagattatatctctctccatatacaaaaaatccaatcaaaatggattaaagacttaagtctaagacctcaaactacaaaactactataagaaaacattggggaaactctctgg

SEQ ID NO: 913346 - DNA, 670 bp, Homo sapiens
ggctatggcacttactggctaggtggactttaaacaaggaacttttctctcagtgctcagtttcctcatctctcagacaagaataataatagtatctgattcacaaawatatcgtgaagactcaatgagattatgttatataaaatgcctagcatgacacttcacaccaattaggcactccaatgttagtttcctcttgccttgctcactaaagcatctaccttatttcacttaatgaatttagctacaggtttgaacattcccagtgtgtagttgactggatcctaagatactgtagcatgctctgtttcaaaatggctcagacctggatccttacttaacttcactaaaccagagctcagaaaactggccagccaaaccatattcagcctgaggcctgttttgatatggcctatgagctaaaaatggtgttcacctatgtaaaggattgcaaggagaagaaaaggaggatgaagaagaagtaaaagagacagtatgtggcctacaaagcctaaaaacatttacaatctgacccttgggaaaaaaagcttgtcaaactctgcagtagtccctagtgagtaggaaaagcaaatgcaattaatagtctgtgggaattccttttttgtaatctgtccttcctttcttctcctttttcttgtaacagattctc

SEQ ID NO: 913347 - DNA, 670 bp, Homo sapiens
ggctatggcacttactggctaggtggactttaaacaaggaacttttctctcagtgctcagtttcctcatctctcagacaagaataataatagtatctgattcacaaatwtatcgtgaagactcaatgagattatgttatataaaatgcctagcatgacacttcacaccaattaggcactccaatgttagtttcctcttgccttgctcactaaagcatctaccttatttcacttaatgaatttagctacaggtttgaacattcccagtgtgtagttgactggatcctaagatactgtagcatgctctgtttcaaaatggctcagacctggatccttacttaacttcactaaaccagagctcagaaaactggccagccaaaccatattcagcctgaggcctgttttgatatggcctatgagctaaaaatggtgttcacctatgtaaaggattgcaaggagaagaaaaggaggatgaagaagaagtaaaagagacagtatgtggcctacaaagcctaaaaacatttacaatctgacccttgggaaaaaaagcttgtcaaactctgcagtagtccctagtgagtaggaaaagcaaatgcaattaatagtctgtgggaattccttttttgtaatctgtccttcctttcttctcctttttcttgtaacagattctc

SEQ ID NO: 913348 - DNA, 671 bp, Homo sapiens
ataataatgggagattttaacaccctgtcaatattataacaatgagacagaaaattaataaggatattcaggatttgaactaagctctggaccatgcagacctaatagacatctacagaactctccaccccaaatcaacagaatatacattcttctcagcatctcattgcacttattctaaaattgaccacataattggaagtaaaacactcctcagcaaatactaaagaatggaagtcataacaaacagtctctcagaccacagtgcaatcaaattagaactcaggattaagaaactcactcaaacctgaacaactacatggaaactgaacaacctgctcctgaatgactactgcgtacataatgaaattaaggcagaaataaagatgttctctgaaaccaatcagaacaaagacacaatgtaccagaatctctaggacacatttatagcagtgtgtagagggaaatttatagcactaaatgcccacaagagaaagcaggaaagatctaaaattgacaccctaacatcacaagtaaaagaactaaagaagcatgagcaaacaaattcaaaagctagcagaagacaagaaataactaagatcagagcagaactgaaagtgatagagacatgaaaaacctttcaaaamatcaatgaatcaaggagctggtgt

SEQ ID NO: 913349 - DNA, 654 bp, Homo sapiens
gaaatctctggtgccaagagaaacagagtaaaatgcacttaaggcatatagccaactccagccccagcagctgacttcccgccatccayacaggccacctctggcagaaggaccagcctgaacaaaatcccactactgagtctggttccccctagccctccagttctctcagcctcacacctcctttcccaaggagctcagaaatgctaaggactgccaggattcttcatgtacctgttcattgactccttgcactccctttaattgaacaccatcttagttatctatagcagcacaagtcaccacaagcttagcagctgagaacaacgcacatggtcaccacacagtttctgcacgttaggagtctggcccgggctcacctgcaccctctgctcagggtctcaccaggcagcagcccagcagtggccagggctgcagtctcatcagaggctggactgggaaaggatccacttccaagctccctcggggtgtcagcagaatgcatttcattgcatctgtaagactgaggggcctggcttcatgctatcagctggaggccactgtcaggccctagaggctgtctgcagtcccctgccaggcagccccctctctataggccttctcacctcgtggcaggttgcttccccaaatcca

SEQ ID NO: 913350 - DNA, 501 bp, Homo sapiens
ccaaaagaatattacatctaaactaatctgttttcatgcaaattcaggtttttatcatccaagaaccggggtggaaacagttcaatatggtcatggcaaaatcaagctcctgatgctcttttatctaggataggtcagtgtgggaggtaggattctggctctcaacattatatgcaggagacaaattatctttattgttttctggtctaaattcttgctcccgtaagttccatcccctcagcaacataccatttcccaaccagcacctcaaagcctgccaaaggggacaggtgtgttatcctttctgtgaagtatgcaacacaggcttccaagacttatcgcacatcttggtagattcctctccagatgtcacattggtctgttcccatgaaccactatgagtgtttatcctataccccttagctgtctgcagtgacrggaagagtccctttctttgatgcttagaatttcacttcatgaggactttggaaaggagagaat

SEQ ID NO: 913351 - DNA, 597 bp, Homo sapiens
gatgtgcgccctcaactaacagtgttgaagctttcttttgatagagcagttttgaaacactctttttgtaaaatctgcaagaggatatttggatagctttgaggatttctttggaaacgggattgtcttcatataaactctagacagaagcattctcagaagcttcattgggatgtttcaattgaagtcacagtgttgaacagtccctttcatagagcaggtttgaaacactctttttgtagtatctggatgtggacatttggagcgctttcaggcctatggtgaaaaaggaaatatcttcccctgaaaactagacagaagcattctcagaaacttatttgtgatgtgcgccctcaactaacagtgttgaacctttcttttgatagagcagttttgaaacactctttttgtaatatctgcaagaggatatttggatagctttgaggatttcgttggaaacgggattacatatawaaagcagacagcagcattcccagaatcttgtttgtgatgtttgcattcaagtcacagagttgaacattccctttcagagagcaggtttgaaacactctttttatagtatctggatgtggacat

SEQ ID NO: 913352 - DNA, 575 bp, Homo sapiens
gacatttggagcgctttcaggcctatggtgaaaaaggaaatatcttcccctgaaaactagacagaagcattctcagaaacttatttgtgatgtgcgccctcaaytaacagtgttgaacctttcttttgatagagcagttttgaaacactctttttgtaatatctgcaagaggatatttggatagctttgaggatttcgttggaaacgggattacatataaaaagcagacagcagcattcccagaatcttgtttgtgatgtttgcattcaagtcagagttgaacattccctttcagagagcaggtttgaaacactctttttatagtatctggatgtggacatttggagcgctttcaggcctatggtgaaaaaggaaatatcttctcctgaaaactagacagaagcattctcagaatcttatttgtgatgtgcgccctcaactaacagtgttgaagctttcttttgatagagcagttttgaaacactcttttcgtaaaatctgcaagaggatattttgatagctttgaggattcgtggaaacgggttgtcttcatataaaaagcagacagaagcatt

SEQ ID NO: 913353 - DNA, 556 bp, Homo sapiens
gaagcgtcattgggatgtttcaattgaagtcacagtgttgaacagtccctttcatagagcaggtttgaaacactctttttgtagtatctggatgtggacayttggagcgctttaagcctatggtttaaaaggaaatatcttcccctgaaaactagacagaagcattctcagaaacttatttgtgatgtgcgccctcaactaacagtgccccgcattctttgatagagcagttttgaaacactctttttgtggaatctgcaagtggatatttgtctagcttgaggatttcgtggaaacgggattacatataaaaagcagacagcagcattcccagtaacttctttgtgatgtttgcattcaagtcagagagttgaacattccctttcatagagcaggtttgaaacactctttttgaagtatctggatgtggacatttggagcgctttcaggcctatggtgaaaaaggaaatatcttcccctgaaaactagacagaagcattctcagaaacttatttgtgatgtgcgccctcaactaacagtgttgaacctttctttt

SEQ ID NO: 913354 - DNA, 613 bp, Homo sapiens
gcattcaagtcacagagttgaacattccctttcatagagcaggtttgaaacactctttttgtagtatctctatgtggacatttggagcgctttcaggcctatggtgaaaaaggaaatatcttcccctgaaaactagacagaagaattcttagaatcttatttgtgatgtgcgccctcaactaacagtgttgaagctttcttttgatagagcagttttgaaacactctttttgtaaaatctgcaagaggatatttggatagctttgaggatttcgttggaaacgggattgtcttcatataaactctagacagaagcattctcagaagcgtcattgggatgtttcaattgaagtcacagtgttgaacagtccctttcatagagcaggtttgaaacactctttttgtagtatctggatgtggacatttggagcgctttaagcctatggtttaaaaggaaatatcttcccctgaaaactagacagaagcattctcagaaacttatttgtgatgtgcgccctcaactaacagtgccccgcattctttgatagagcagttttgaaamactctttttgtggaatctgcaagtggatatttgtctagcttgaggatttcgt

SEQ ID NO: 913355 - DNA, 715 bp, Homo sapiens
tgggcatcctccagtgtggtcctgtcgagtcattcaggaaaccgttctgcgtggacgtggctctctgcccacctcctcatagatctctatctctaaagscttttaaagaatgggagaacaaagctgcatttccaacctgtttatggaaaacgccaaaaggcactacggaggacgtgggtaaaggcccatgggcttcccatcaagctccccagagtccctgaatcatgtggataatgaaggaatcttggcctctgccctctacggggccagaaaacacagcgccatgtaaacttttcagaattaaccggccaactgcgggactagagcaatcccctgcagacccttatccacactgacagttgatgttcccaagcagggcacaggggcttgctctaggctcatctgtccaatgtcaagggatgcattttagaaacagtcagtcgtgctgggaagagctggtttgttaatttccacctggaggtttgaaattggctgcagtacattgagatggagtcaataggacctttgacaaggatcgtggagaccttgaaccatgacctggcagccaaagccatcatcacaaaacaatgtctgaaagtggtgggaaaggggtgagatgtggacagtgaggttcttgggcgtctctggcaccaggtgtttttttcaaaccctttgcccttcatccattctttgcctgtagaccagctgccctcca

SEQ ID NO: 913356 - DNA, 659 bp, Homo sapiens
gttgcttttatcaaactcttttcattagcaccatctttacattaatttataaggaagaaacaaacaaacttctctttctaaaattgaccacttctcccttctgagccaaggatgctctgttagtcatcttaagcttcagaagtttttctaccctttaggactggcctttgagctttatatgtgtccatgtgtaatattctttctgtttagtcttcatatcaaggtgacaggttacagcatgaaggtcctggggtggatatatcctttttgagaatacatatcaacaaattcaaaagtctggagaagtaaaggtgattcagaaagtattttgaaatttgtgaaagttttccaaataatcttcatatttatttatcccatatcatatttccaaaagttgtaaaatgaattttactgttaaatattttgtccttcttttccaaaataatgataaatagctttctcatctctgtaaaagccatctattttggactcaaagcttccttggactcaaagtttcctttttatttattttttcagtggcaggacatgaaggggacagagcgaaaaccctcagcccacatttactactagtaagccatgaaataaacaagtcctgaccatccttaccacatrttttcttggaacaaaagggatgtggg

SEQ ID NO: 913357 - DNA, 615 bp, Homo sapiens
acacccagtaaatattacagaataaataaattaatgaagaggcaatttactccttcatcttagttcttccttgctgtccagacatagtcctgacttgcatgtgacatgggggaacaaactgttctatctgtaccaccagttaactaaggagtccttcaggctcagctatgaattccatcaggaaaattctgagctttttggagtaatggagggagaggtgatgggattctgttgtggaactgagagggtccagtggaagtgagtcagaatgttcagtgttctgcaacaaagacttcccttcactaccccttcaagcatcacacagactctccaggtctggggtggcttgtggtcccatgtggttattacatgcacctctacgtactgaatttgttgatccttgcagactagcagtgcaagagctgatctgaactcaggggccctggagaagcaaagtcactcctccccattctgaagcagctgtggttccttacatttggacacaggcytgagaccttggctacagtgagctagtgctggggaatctacttattgatcaccggagcagctgctaagcctggctttcaagaacatccctcagagggtgctttcact

SEQ ID NO: 913358 - DNA, 592 bp, Homo sapiens
ccttttatgcggacaggatgggaagttaagcgaaagttaacttctgttggattaagaccctgaagattgggctttaacacctgttgtgttacctgcactcaaacaaaccagggctcctcactcagccctcgggagccttggcattctcacttctaaagcaggaggagtcgtgataactgccttgaggaatttgagcaaagttaaatgacctgaactatttgggcgtgtcttgaccaatgtccgaccttgggaggtgctggatgaatttttatttctctactttaagtcagcctttctaccttgttgctcttctcagctgcctttctctgagcctccttcatcactctgttcatttctgtgagacaaagatcattacaactgccctaatatttcagtgcaagaagcgccgtgacctgacattgctctaccccgcctcctgccacgatcattcttttgtagcaatattccgccagcttcattttgtgcagtgagtggaacaagagtcagaacaccagggcggctgagcctgtcgatcaagcctccacctaacracagacatgcctgagtcccacagtcataattaggatgaagc

SEQ ID NO: 913359 - DNA, 556 bp, Homo sapiens
ctttgggaggctgaggtgggcagatcacctgaggtcaggaatttgagaccagcctgaccaacatggtgaaaccctgtctctactaaaaayacaaaaattagcagggcatggtggtgggtgtcggtaatcccagctacccaggaggctgaggcaggaggcaggagaatcgcttgaacccaggagggtgaggttgcagtgagctgagatcgcaccattgcacttcagcctgggcgacagatcgagaattcatctcaaaaaaaaaaaaaaaaaaaaaatctaccagctactgcttttaccaaggacctttcatcagaggtccaatgccaaggatttcagctcagatcctaagcaggaaattattctttccatcacacaaggtgttaagtttcttcctgttgctgtaagaaagaatgctgctggcaactgggaggatgcaggctgggctgcatgctcggccaatgaacttgggtttagacagatgaccagatagctctggcaccacagggctgtaatttagacctaggaaggcaggtcccagcattttgcaaagcacatt

SEQ ID NO: 913360 - DNA, 556 bp, Homo sapiens
ctttgggaggctgaggtgggcagatcacctgaggtcaggaatttgagaccagcctgaccaacatggtgaaaccctgtctctactaaaaacacaaaaattagcagggcatggtggtgggtgtcggtaatcccagctacccaggaggctgaggcaggaggcaggagaatcgcttgaacccaggagggtgaggttgcagtgagctgagatcgcaccattgcacttcagcctgggcgacagatcgagaattcatctcaaaaaaaaaaaaaaaaaaaaaatctaccagctactgcttttaccaaggacctttcatcagaggtccaatgccaaggatttcagctcagatcctaagcaggaaattattctttccatcacacaaggtgttaagtttcttcctgttgctgtaagaaagaatgctgctggcaactgggaggatgcaggctgggctgcatgctcggccaatgaacttgggtttagacagatgaccagatagctctggcaccacagggctgtamtttagacctaggaaggcaggtcccagcattttgcaaagcacatt

SEQ ID NO: 913361 - DNA, 631 bp, Homo sapiens
gaatgtcaatggtagtttaatgggaatagcattgaaaatataaatttctttggacagtatggccattttcacaatattaattattcctatccatgtgcatggaatgtttttctgtctgcttgtgtcctctcatttccttcagcagtggtttgtagttctccttgaagaggtccttcacttccctcgttagctgtatttttaggtattttattgtctttgtagcaattgtgaatgggagttcattcatgatttggctccctgcttagacaaggtgtataggaacacttgtgatttctgcatattgattttgtagagacattgctgacattgcttaagaagtttttgggctgagtcaatggggttttctagatattggatcatgtcatctgcaaagacaatttgacttcctctcttcctatttcaatacgctgtatttatttctcttgactgattgccctggccagaatttccaatactaatttgaataggggtggtgagagagggcatccttgtctagtgccagttttcaaggggaatgcttccagcttttgcctattcagtatgatattggctgcaggattgtcataaatggctttyattattttgaggtatgtttcaacaaaacataatt

SEQ ID NO: 913362 - DNA, 646 bp, Homo sapiens
ctttggctatgtccaaggcaagaagggaaatgaaccatcttctttcttaastagaaagtattgtcatgctaatttaaaaaaaaacatttttcatcactctcataaaaatttaaccttgcattataataatatttactgggaattagaattaacatggccgaatacattacaacaaagcattgcaaataatagttactataagagattctataaacatgagagagagaaacaaggcctgcaagaacaaggtttattattcggccatactcttctctcagtctagtaggccatgtccaattttctcagactaacattatggagagaccttatctccatacaaattttgagttccttagatgaaagctgtgaggcaacaagagatgtattataaaattaactgcatttgattttagaaataaaggaaggctttagagttagaaggaaacagaaagtctttccatagttgtaattaattatttaagattctgagtttttacttacaaaatctgtttgggtttgaagatgatgcttaatcaaaaattgcaccccattatttctaatccaaatgaaaaatatacattagaattagccaaagatcagcaatattacattaaagctagtttggagaatcttctttcaatctttc

SEQ ID NO: 913363 - DNA, 599 bp, Homo sapiens
accacagtgcaatcaaattagaactcaggattaagaaattcactcaaaaccacacaactgcatagaaactgaacaacctgctcctgaattactactcagtaaataawgaaattaaggcagaaataaataagttatttgaaaccaatgagaacaaggcacaacatacagaatctctgggacacagctaaagcagtgttaagggggaaattcattgtactaaatgcccacaagagaaagcaagaaagatctgagattgacaccctaacatcacaattaaaaagaactagagaagcaagaggaaacaaatttaaaatgtagcagaagacaagaaataactaagatcagagcagaattgaaggagacagagacaagaaaaagccttcaaaaatcaatgaatccaggagctggtttttaaaaaagattaacaaaacagaccactagccggactaataaagaaggaaagagagaagaatcaaataaacacaataaaaaatgataaaggggagatcaccactgattccacagaaatacaaactaccatcagagtatactacatacacatctatgcaaataaactagaaaatctagaagaaatggat

SEQ ID NO: 913364 - DNA, 651 bp, Homo sapiens
ttaatctggttgacatttcccttgctctgtcacttacgcctgtrccattatcattggcatttaggtccagccgtgaagaaatgagtaggcactgccaggcaagtctaagaaaacagaccacaaccacttgctttttgaaccttgtctttcccataaagaaatttacaaaaagaaaaagaggatcacaaaatataaaatactcccagaagtctagtccaaaaatgtctatcaaaattaaacttttttttcccttcagacttgtaagggcaaaagtaaagcagataatccatgtgagttctagatcataataaacaaaaattcaaatgggcaatttatttttctaagtgacaagtaagtatagatctactaaatataggatttgtggtcattgctatatgtaggtagggaccagatgcttggtcacaagggataccgaatgagagtgaaaagccacttctactattcagacactcaaaagcatgtggcatttgctgtttataaaatgtttttcccttgtgtgaaatatttctgaaccgtggtctccagggcacgcacgttgcgctgttttttcctggagtcgtgtttcgtttgcacaaactaacccacattttcttctgtgattcttcatatgactaatgaagcacagctctg

SEQ ID NO: 913365 - DNA, 563 bp, Homo sapiens
caaagttttaagtccactgttggggagggattggtgcagtagttcccaattatccatggttttctttcaagatttcagttaatcgaggtcaacttgagtacagtacaataaaatattytgagggagagacgacattcacataacatttattacagtatattgttataattcttctatttatttatttagagacagagtctcactctgtcacccaggctggagtgctgtggcatgatctcagctcactgcaacctctacctcccgggttcaagtgattctcctgcctcagcctccctagtagctcagactacaggcgtgagccaccacacctgactaatttttgtagttttggtagagacagggtttcaccatgttggccaagctggtcttgaactcttgacctcaggtgatccgcctacctctgcctcccaaaatgctgggattacaggcatgacctcccaaaatgctgggattacaggcatgagccactgcacccagccaataattgttctattttatttttagctattgttaatctcttactgtgtctgacttagaaatta

SEQ ID NO: 913366 - DNA, 605 bp, Homo sapiens
cctaattctgaaatggtatcgcctgctgtgattgctggcctgtggaggagagctaccactaagcttttcaataactactactccccactattagtacatttctcatttctctaataaaaagtatccatttttgtcagtttgtggatgttctggctttatataatattgtctagttttgcaaacccaactttttggtctgcttctttctttcttccccatctactataacaatttcagaatttataagtcacttaatgtggaccatctcttgctccaagtttcctatgggctatccttgcaaagtattagcactgtctcttgcagtctttgctgtaatatgcattacattccattcccttgatccagcaccctcagtatccagtttaattgtacatgtcttagttcatgacagtgaatttaagctagatcctgcagctccatataaggtataagcccttccccctttcccttagaaagccaacattttcttagctcagttttgttgtgaaatggttatagatctggtgrccaggagggcaggtggggacaaatcatgagaacaggtattttgtcttacaagccagaggactttccattgacttcaa

SEQ ID NO: 913367 - DNA, 627 bp, Homo sapiens
gtttactgttgccaggtcagaaagccctaacttcaccagagagccttgcccccaggactatccycaagttttgtggcccaggcatccacaaagttccacctgaggtcactctgctcttgctggtcctccctatctcattggattgcacagttatcctctaactctgtttcccattcttggctatatactgttaactatgtcctgaaaagtaaatctagttgaaaaaatgcatctcaactttttctttgtatagtggtggttaaaaaactataaaattggagaaaaaatgacaatacctatagtagaggaatatgaatcatcacaaagttgtattaacgattctaatcaaagccatccattttaataaatatattgtaattatgttcatctggtcttgttcctccaaaaagctcaaagcattttacaagtattgaatttctatctatatattgaaaaagaaacctcaaggataaatcgttggagaatgaaaaattacatactttttaaagacaccttgttatttggactatttcatttttatgccctctctggaaggtacaatatggaggatctttttttccatcatcttaatgtcagtattcatctggaagtgaggaaaccattttt

SEQ ID NO: 913368 - DNA, 567 bp, Homo sapiens
aacttctacctgaacttcagggttatgcctgaaaatcccagaaagtcctgttgccctttcataggaggagctgaacaaacagaactggctcttcagaaggcagagaaggcaaggccacatcccagtcactactgagtcctcaccccgtaagcctcacaggtgccttgaatcccagctctcattattatctgtgagaccttgagcaagttaattaacctttctgagctattccgtcttcatctgcaacataggaatagggaataattacagaattgctgtgagaattaaatgagataacatatgggccgggtgcggtggctcatgcctgtaatctcagcactttgggaggccgaggtgggcagatcacctgaggtcaggagttcaagactagcctgaccaacatggagaaaacccgtctctactaaaaatacaaaaaaattagccgggcgtggtggygcatgcctgtaatcccagctactcaggaggctgaggtaggagaatcacttcaacctgggaagtggaggttgcagtgagctgagatcgagccattgcactgcagcctgggca

SEQ ID NO: 913369 - DNA, 592 bp, Homo sapiens
ttatttgatgaatattatatattttcasgtgcagtggcttctatgttttgggttgatgctgaattagggagtgatatttaccttgatggtaagttaaaaaacagttttcttttatctttcttggtttttttttttgttttttttttttttttctgagacagagtctcactttgttgcccagactggagtgcatggagtgcagtggcatgatctcggctcactgcaatctttacctcctgggttcaagtgattctcctgcctcagcctcccgagtagctgggactacaggcgtgcaccatcgtacctggctaatttttggatttttagtagagacggggtttcgccatgttggcctgactggtcttgaacccctgacttcaggtgatccgccagcctcggcctcccaaagtgctgggattacaggcgtgagccaccacaccctgcctcttttgttttttagtaaaatctttatggttaagcttattgttgttcattcatattataactttaattccttgcattgttgttcttttcacactttagtttaatgatgaaatctttgttcatatagattaaaaaaccccaaacagtg

SEQ ID NO: 913370 - DNA, 578 bp, Homo sapiens
tgaactggcaagtaatcctccattgtctctaggtaagacatggtgttcagacatccatgatctcaagtgatgtcttttaatttgactttcaatcttgttttcaaaatcagaggaaaaatattttaaatatcaaatatcttctctgcatgagcagacagggtatttttaagagaaaaatgtgtgtgcaatgtgcacatattctgaaattaaaagcaagttaatagggggattctaaaatgaattaatttataggaagctgctgaaacactatttgaatcatttagattaaatgtgctttactagacagatccacttctactgtgttctattatcagcagtagattggccctgacagccctaataaattaaactgtccagctgctgctccttcatctatctgatgcagctggtgatggcaacaagaataaaagaagagaaaaggaaaaccytagaaatgaaggatcttcaacatgatgaagaataaagcaacgtatctgcagatttcgtgaattagtgatgcctcttcaccaagttgtacttattgtcgggaacatatgaattcaaccccctggtggaag

SEQ ID NO: 913371 - DNA, 612 bp, Homo sapiens
atcaaggtgtctgcagggccatgttttctctggaggctcagaggagaatctgttccttgcctctttcagccaccattcctaggcttttggaggcattactcccatctctgctcctgtggccacactgcctccttctcttctgtctccatctccctctttctcttacaagaatacttgtgatggtatttagggcctgttttagtctccttgggcttctacgacaaaatttcatagcctgggtaacttaaacagcagacattcatttctcatggttctggaggacggaaagtccaagctcagagcaccagcatggccaggctcctgcagagggccctgctcctggtttgcaggtggctgccttctttctgtgtcctcacatggcacacagagagtgctggtctcttcctcttcctataaggacacgaatcccatcatgggggcctcacccacatgacgtcagctggatctaattacctcccaaaggccccacctccaaataccactccactgagggtttcaacttcaacaaatgagctttggtgggacacaaacactcattctatagcagggcccatcagataatccgggakaatctcctcatctcaagatctt

SEQ ID NO: 913372 - DNA, 417 bp, Homo sapiens
ttcctccagcagggtaacttgtgttttctttttttaaaatttttctggggggttgtttttttaagttccaggatacatgtgcagggtgtgcaggtttgttacataggtaaacatgtgccatgtggtttgctgcatccatcaacctatcacctaggcattaaacccagcatgcagtagctatttttcctgatgttctccctcctgctgccatacacaataggccctggtgtgtgttgttcccctccctgtctccatgtgttctcatcattcagctctcacttataagtaagaaaatgtggtatttggttttctgttcctgagttagtttgctgaggatgatggttcccagttccatccatgtccctrcaaaggacatgatctcattcctttttatggctgcatagtattccatggtgc

SEQ ID NO: 913373 - DNA, 693 bp, Homo sapiens
catgtttaattacttctctttcttcctttcttgagcctcaggtatgtgaatrattttaacattccctcttaggtttggtcctcccattctttaagcaaatttgttcttctctgaaaatttcctaggctctctgtttgtctctttaagcctcagagcctcaaacactggagagaacttgctgcatgcgagcttattctaatacttaatattttctggggcctcagggtgagggttgcctcacagtccctgtgtatagaagttctaatctagagcatgcaatcttgtgcactaagtaaaagcagctatactaaaaaataaaaaaaaaaaattaaaaacaagccaacaaaaccccaaaccccacctagagttgttaaatacagaacttttcagcagccaagtgaccctgtcagcccttagctagaatttcatgcctcccaggaacagggtaattgaaaggaacaatgctgatggcttgggctagtcacagctggaaggttgctgcctttacactaagactctgttctgcctccttctgtggaaaatgaaagaggacttgttaatggagcaaaaccttgcaaagcatgtgtggtgctgtgggatttgtgatggaagtacaagtgggagaaggaatggacaaacagcagggtgacctgagtcaacatagcagacaccatgggcccccttgccatctag

SEQ ID NO: 913374 - DNA, 649 bp, Homo sapiens
ttgctgggggcctattcagtcgtttagacttctatttttggttcatagggtccaaaccctctccacaggatatgtcaattagccaagaacacaaacacacatgttgagccctggttctctttgtccttgagctaatgtggtggaccccaggagagttatttacctgggggaacatcagaaccaccagcagaattggtggagtcaaaatgctcatgtccaggttttactgctggagaattctgactcagaaggtctggaatttcttagtgctttttcttcatcgtagaaagccagttgtgggtatctcttttctactctggttcagtaatgttccattcttagcttcaaatattctatagcaggagtatttacaccacagaaattggcaaatgctaggaataagggacttgggatttttagagccaattattaagtatttaccaacttttcaccacagcttaggtcttattatgtggcagagaaattaaaataatgaactttaagcagtacttttcaatagattaagtgctcagcaaaagctagatgctgttattatggttactattttgcagatgcataggtaattttgatgtataccaacatttgagaatcattattttggyagaaaaggatctgttagtttttgtca

SEQ ID NO: 913375 - DNA, 684 bp, Homo sapiens
caactgtactcgaaaggatactaagttttctaccctgtaacaatttagtaaatagtctgagagaacttctttgaaattatgatgattagccaaacttggcrtctttttgtgcatcaaagaggctagtttcagtggaaggagaaattaagtagaactggaaagtctatgtttctttctgagacacacatagataaaattgagcaaagaaaaactaagggaaacctggggctaagatgagcaaattagacagcacaaaaatagaatgtaaaattagactccagtaattggggctgtgtctagttactcagaaggctgatcaaaagctttcttgtttccaccccctcttttcttatttgtggctcttatttttcttttttttttttctacacatatggtttacaaacaaagcacataaatattttctctgacctcttacttttctcttaactcttctagctcttagaacttgctttagataatcattcacctgttaacttttctcttgtattacttactgtttttccataagtatcagtttggtttgtctgatgttttaaccttcttggagacagaatgaagtcttaactttattctttctctccttaagatacaatatgttgatttgctcaacaaaagaatttcataaataaaacttcagaaaaaagcaactacagatgtgaaatc

SEQ ID NO: 913376 - DNA, 668 bp, Homo sapiens
aaagaaaggtcacttttttttctaaaaaacctggaattttcccagaaatataaataaacctgtacgtttggaaatggtataatgggaaaaatattaagtttttttatccagtcactatggagcacagcttttttcaaacagatagctaacaataggctatgaaattcttctttttgaaacataatcagaaaaccagagaccaacaaacattcagaaaatgatgcaaatacaagacagacactaaaacatatacacaaaaagtgaaaatatttgaagataacagagacagtgcaaagagttctaaacaaacaaaaacatatacaacctgagataataaacaatattgaacttgaatcattcaggagagactgggtcacactgcagtaagaaaaaaacaaaactgtagtggcttaaaaaatgaagatggatggcctgtaatcccagcactttgggaggccaaggcgggcagataatgaggtcaagagatcaagaccatcctggccaacatggtgaaaccccatctctactaaaaatacaaaaattagcagggtgtggtggcacacttatgtagtcccagctactcrggaggctgaggcaggagaatagcttgaacctgggaggcggaggttacagtgagttgagatcatgccactgcactccagcctggc

SEQ ID NO: 913377 - DNA, 610 bp, Homo sapiens
actatcagttatgccaaatgaataaattctggcgatcgaatgtacagcatgatacatttacattattaaccatagttaatatatagcttaaatttgctgaaaatatatcttaaatactctcaccacacaaacatacacacacacagacacacacacacacacaataactatctggggataaatgtgctaattagcttgattgcagtaattatttcaaatgtacatgcatatcaaattaccacattgtataccttaaatagatataattttaatttgtcaaccatacctcagtaaagctggaaaaatactctctttattctttcttgttttttttttttttttttttttgagaaggagtctcactctatcacccaggcgggagtgcagtggcacaatctctggctcactgcaagctccacctcccaggttcatgccattctcctgcctcagtagctgggactacaggcgcccgccaccacgcccrgctaattttttgtatttttagtagagatgggagtttcaccaagttagccaggatggtctcgatctcctgacctcgtgatccacctgcctcggcctcccaaagtgctgggattacaggtgtgagcca

SEQ ID NO: 913378 - DNA, 692 bp, Homo sapiens
taccagattgtacctcctgtaccttatgacattgytattgttcatttcatctctccacattctataattacccattttttgttactaaacagttatggatcaataagaataaaaaaagtttttaactttaatttattctttttcatttatttcttctttattgtgtatctgaatttctcacttgcatcattttctctccccttgaagaacttcctttagtatttcttgcaagacaggtcagctgacaatcacttaaattttgtttttctgagaaagttttctatttgctttctttgttaaaggaaatttcaatatatagaattgctttatccccctaaagtcatatgctgttgaatatattttcaaatacttatttgccatttttatatttcctttggtgacttatccatttatattgtttccccatttttaactgaattgtttgctttcttgtgaaatttgaagggtttcttgtgtattttgaataatagcctttattacagattagtggataaagaaaatgtggcatatacatacaatggaatattattcatccttagaaaaaaggaaatcctaaaatttgtgatagcattgatggactgagagaacatattgctaagtaaaataagtgagacacagaaagacaaatatactgcatcatctcacttatctgtgaaatctaaaaaatttaa

SEQ ID NO: 913379 - DNA, 522 bp, Homo sapiens
ctggaatcctatgtgagggccaatcattcagacactcgtgccagtgttctggaattctgcgtgagggacaaacattctgactcctgtagcagtgttctgtagtactgtgtgagggaaaaacattgagaccacagcaggagtgttctggaattccctgtgaggaacagacattcagaccctcttaggagggttctggaatccggtgtgatggacaaaaatctagaccctagcagcagtgttctgggatcctatgtgagggtcaaacattcagacccttgtagcagtgttctggaatcctatgtgagggagaaacactcagaacccagcagcagtgttctgaaaccctatgtgagagacaaacattctgacaacaggaggatagttctggaatcctaggtgagggacaaacactcagaaaacaacaggagtgttttggaatcctaaatgagggacartcattcagatcgtcatagcagtgttctggaattttgtgtgagggacaaacattcacaccccagcaga

SEQ ID NO: 913380 - DNA, 661 bp, Homo sapiens
aagaggtttctcagaattcttctgtctagttttyatgtgaagatatttcctcttccactacaggtctcaaagtgccccaaatgtccactttcagattctagaaaaagagagtttcaaaactgttgaatcagaagagaggtttaactctgtgagatgaatgcgcacatcacaaaagtagtttctcagattgcttctttctagattttatgtgaagatatttctttttctaccataggctgcaaagcgttccaaatgtccacttgcagattctacaaaacgagtgtttccaaactgctcaattaaaagaatgattcaactctgtgagatgaacacacacatcacaaagtttctgagcattcttctgtctagtttttatgtgaagttatttccttttccaccataggcctctatgcactccaaatgtccacttgcagattcttgaaaaagagagtttcaaaactgctcaatcaaaaaaaggtttaactctgtgagatgaatgcacacataacagaaatgtttctcagattgcttctgtctagattttatatgaagatatttacttttctaccataggccgcaaagcacacaaaatgtccactttcagatactccaaaaagagtgtttccaaacttctcaatgaaaagaaagtttcaactctgag

SEQ ID NO: 913381 - DNA, 661 bp, Homo sapiens
aagaggtttctcagaattcttctgtctagtttttatgtgaagatatttcctcttccactacaggtctcaaagtgccccaaatgtccactttcagattctagaaaaagagagtttcaaaactgttgaatcagaagagaggtttaactctgtgagatgaatgcgcacatcacaaaagtagtttctcagattgcttctttctagattttatgtgaagatatttctttttctaccataggctgcaaagcgttccaaatgtccacttgcagattctacaaaacgagtgtttccaaactgctcaattaaaagaatgattcaactctgtgagatgaacacacacatcacaaagtttctgagcattcttctgtctagtttttatgtgaagttatttccttttccaccataggcctctatgcactccaaatgtccacttgcagattcttgaaaaagagagtttcaaaactgctcaatcaaaaaaaggtttaactctgtgagatgaatgcacacataacagaaatgtttctcagattgcttctgtctagattttatatgaagatatttacttttctaccataggccgcaaagcacacawaatgtccactttcagatactccaaaaagagtgtttccaaacttctcaatgaaaagaaagtttcaactctgag

SEQ ID NO: 913382 - DNA, 635 bp, Homo sapiens
aataactggacaaaagcattctgagaaacttctttgtgatgtgtgtgttcatctctcagagttaaacatttcttttgattgagcagttttgaaactctctttttgaagaatcttcaagtggacatttggagggcttcactgcctgtggtagaaaaggaagtttcttcacataaaatctagacagcagctatctgagaaacttctttgtgatgcctgcattcatttcacagaattgaacatttcttttgactgagcagtttggaaacaccctttttttagaagctgcaattggacatttgaagagctttgcggcctatggtagaaaaggaaataccttcacataaaatctaggcagaatcagtctgagaaacatctttgttatgtctgcattcatctcagagagttaaacctttcttttgaatgagcagttttgaaactctctttttgtagaaactgcaagtggatatttgaagtgctttgaggcctatagtggaaaaggaaatatcttcacataaaaactagacagaagaattcygagaaacttcttggtgatgtgtgcattcatctcacagagttgaaactttcttttgattgagcagttaggaaacactctttttccagaatctgcaagggga

SEQ ID NO: 913383 - DNA, 635 bp, Homo sapiens
aataactggacaaaagcattctgagaaacttctttgtgatgtgtgtgttcatctctcagagttaaacatttcttttgattgagcagttttgaaactctctttttgaagaatcttcaagtggacatttggagggcttcactgcctgtggtagaaaaggaagtttcttcacataaaatctagacagcagctatctgagaaacttctttgtgatgcctgcattcatttcacagaattgaacatttcttttgactgagcagtttggaaacaccctttttttagaagctgcaattggacatttgaagagctttgcggcctatggtagaaaaggaaataccttcacataaaatctaggcagaatcagtctgagaaacatctttgttatgtctgcattcatctcagagagttaaacctttcttttgaatgagcagttttgaaactctctttttgtagaaactgcaagtggatatttgaagtgctttgaggcctatagtggaaaaggaaatatcttcacataaaaactagacagaagaattccgagaaacttcttkgtgatgtgtgcattcatctcacagagttgaaactttcttttgattgagcagttaggaaacactctttttccagaatctgcaagggga

SEQ ID NO: 913384 - DNA, 597 bp, Homo sapiens
ttggaaacgggaatatcttcacataaacattagacrgaagttttctccgaaacttctttgtctatgtacattcaactcacagagttgaacctttcttttgatagaacaggtttcaaacactctttttgtagtatctgcaagtgaacattctgagcgctttgaggcctatggtggaaaaggaaatatcttcacataaaaactagacagaagcattctcagaaacttctttgtgatggtgatgtatgcatccaactcacagagttgaacctttcttttgatagagcaggtttgaaacactgtttttgcagaatctgcattggacattcggatccctttgagacctatgttggaaaaggaagtatcttcacataagaactagacagaaccattttcagaaacttctttgtgatgtttgcattcaactcactgagttgaacctttcttttgatagagcaggtttgaaacactctttttgtagaatctgcaagtggacatttggagcgcttttgggcatatagtggaaaaggaaatatcttcacataaaaactagacagaagtattctcagaatcttctttgtgatgtgtgccttcaactca

SEQ ID NO: 913385 - DNA, 610 bp, Homo sapiens
tcttgtgctctggacatagccagaagtgctatcattaacaaaataataatgaaaagtagctctctagattccttctatctggtcagggcatctctgaaagaaaggcagcaggcccagttaggggcttatagayaaaattcccatctccctgggacaaagcacctgggggaagtggcagctgtgggtgcagcttcagcagactcaaattttcctgcctgctggctttgaagagagcagcaggtctcccagcacagtgcttgagctctgctaagggacagactgcctcctcaagtgggtctctgaaccctgtgcctcctgactgggaaacatttcccaaaaggggtcgacagacacctcatacaggagagctccagctggcatctggcaggtgcccctctgggacaaagcttccagaggaaggaacaggcagaaatctttgctgttctgcagcctccactggtgataccctggcaaacagggtctggagtggaccctagcaaactgcagcagacctgcagcagaggggcctgactactagaaggaaaactagcaaacagaaaggaatagcatcagcataaacaaaaagaatgttcacacaaaaaccccatct

SEQ ID NO: 913386 - DNA, 571 bp, Homo sapiens
ctggcaagttggataaaaagtcaagacccatcagtgtgctgtgttcaggagacacatctcgcatgcaaagacacacacaggctcaaaataaagggatggaggaatatttascaagcaaacagaaagcaaaaaaagcaggggttgcaatcccagttgctgataaaacagacattaaccaacaaacataaaaaaaaaaaaaagaagggcattatataatagtaaagggatcaatgcaacaagaagagctaactatcctaaatatatatgcacttaatacaagagcatccagattcacaaagcaagtccttagagacctacaaagagacttagactcccacacaataatagtgggagagtttaacaccccactgtcaatattagatcaatgagacagattattaacaaggatattcaggacttgaactcagctctggaccaagtggacctaatagacatctacagaactctccaccccaaatcaacagaatacacattcttctcagcaccacattgcacttattctaaaattgaccacgtaattggaagtaaaacactcctcagcaaatgcaaa

SEQ ID NO: 913387 - DNA, 643 bp, Homo sapiens
tatatgagaatgacctgaacaattgatctgctgtcaagcactccaaccaaggkgattagattttcataaatagctcaatttttgtcttcttaaaaaaatagttcattttacattattaaaagccacaggcaaagctggagtttgtctgagtttagggtacctggggaagattggaaggtccttatgcataggaaattagtttccaaagaggagttaaggaacaaatattttcagtttaattgtttatttcctagagccttacagattgtcatctaatttcaacaaactcataaatactattcagccatcgctattcatctattcactccaaatcatgaaactacagaaatggatatagaaataggttttgtaataaaatattcaggccctgtaagatttcaaatttcagataatattctcagattttaatgtaacttaaatatatcattacaaatatacctgtggcatattctggcatctacagtgcatttcaggattttaataaataggcaaatcttcaaagataaagtaagacatgaacaaaagtgggagataaacaatgatagtgagaattctatattatacttgaatgtcataagaaactgaaattcatgtcatttcatgtttccagcattcaaactga

SEQ ID NO: 913388 - DNA, 646 bp, Homo sapiens
accaataaaattgaaatgaagagcrtaagacacactatatggatcttttggatgctatacatattcctttatcccattgggtcacagaaagcctaccatatcctaataatcagaattctccctgactggatagtgacttctctactgactgctggtcttttgggacaagtagcttaaaatgaatgggcagggagcagtcttaatctgaggattagtgaatctcttaaaaagccacttgttagaataattttccttctaggaactaaaatttctaaacctagagcacaaaaattgcaagtttttgaaagtatgtattcactgggtcactgagggcaaatatcataagttggttttcacagaaataaactcagatttgcatgcatgaaatgtactggaaaatgctcttggcatcagtgactctgggaaactcaagaaaacagaattcagcagagggagaattagattgtgatacagtaactgctgagacttctaaagttgtatgaaataaaggtgcactatagtggactatgtcatgagttgcctatggttggcctgcagaacccaagtcctcagttttctatctaacagagaatactggcagctaacagctctcagttaattcctctccatgacctcagctaaagag

SEQ ID NO: 913389 - DNA, 449 bp, Homo sapiens
tagcttaactccaggaagttagtattggaagtcattgcacacccttgtcaaaaattacttgaccataaatatcgctgttartttgtcaacttttattaatatttcattaatttactttcctttccatatgcaagtactatgctttcttggttattgtagctctttataagttttgaaatacaatagcatgagtcatccaaactttcacttctttttcaataatgttttgtctattctgagccccataaattttcatatggatttgaggtttagcattgcaatcactgcagataaaaacagctgggatctgatacatattgtaataaatctatgaattaatttgaggtgaattaaaaacttcacaatattgtctccttatccaaaaacttaggatgtctctccatttatttacatcttttaaaagatgttaattttcttttgttaaatta

SEQ ID NO: 913390 - DNA, 683 bp, Homo sapiens
ggaagttcgagaccagcctggtaaacatagtgggatcttgtctctaaaatactactactamtaataatagatagtaaaagagatgattgtgccaaaggctgaaaggagcaatgaaggaaatcggtgcttactggtggctcgcccgtgtactcacccctttgaagttctgaagttaagaaataagagggaggggaaggatttgcaaagtaccctaacctaactgtgggcactcaaaccacggcctcatccttggagaactgaaacaccttcacacggggctagcatagatatccagagagaagctttaatagagaacaccgcgtacaacaccagcagacataaacaaagtcacaacccgaacgcggcgcggacaagaggcggaggtgacttagagccaaagggcaaagcggatttctccccactctgcccccctccattcccaaaattgtgtcgcgagtaaagtgctattccctggggctcaagaggggggaagggcaagagcgacaaggcaagtttctttcccattcacgaattgaaactgaagaattaattcgcctgaaagacataagcgctcaaacagcacacggaatacaaaaacagccgcagcgtgcaaaggtgactgggtggtccccttgcttccgtccgaggagactggaagggaacagccatggaacgtttctgca

SEQ ID NO: 913391 - DNA, 640 bp, Homo sapiens
aaataaaaatattagcctgggttgtagtgtgagtgaaaattggatgttattgaaaatgttgattagcaggctaggttttttggcagattaggtttagaaagtaattctaatgcacttatggtacaatcttttgttatggattgaagccaaaatctaaatggataactagacaattttcaaaaagaacatgagataagaaaatatcttttgttaattttcctattaaaagattccccctaaattaaggaccaatttggtaatatgagtgagaaaggagacaattttttccctttaagattaaagtcaaacaacaataacaatgataacaattaaagtcccatatcatgtattgagctcctggtccatgcaccaaatgtctcagacattgtgtgaagcatttgcctgcatcattgcatgtaatcctcacaacaatcctataaggcaagttctgttaccatctcaaccatctcaattttacatagtgcaaaattgggactcagaatagttaaatcacattctcatcaccacgaagttctcattgtcacgaataaatgaggaattcaatatattgagacacttgcgtcttgytcatgttttaagagtttagccaaaatttgtttcaaaacatctgagacttctc

SEQ ID NO: 913392 - DNA, 605 bp, Homo sapiens
tattttaaacaatgaaaaaataaaataaagataaacataaaacctaaaatgtgaaaagcytattcaagaaaactggtattattcctaaagattcagtaaaactcatataaataaaacgtaagtttaaaaagccaggaaaaggtcagggaagaaaggcaggatagaatagcaaaaataatagcaatcagtacgaagtctttaattttttattggtttgagaaagaaggtaaagatgtttccatcccaaacaatgttaaaaatgagtttttctttatatttgttcaaagttgttttttattttaccgaaaggtgaggagtgtaggcatttacaaatatttttctgatactttgcatagcagtgagaaagagtagagacggtagttttcctaactatttagccactacagagagtgaggccaccagaacaagcatcccacaatgcaacagaacatgcagagccatgctagcacaagcctggtcacaggatcatacagaacttccaaatcgccagcaaaaatgccaaagctaaattatgagctgcgagaacacactgaaatgcttatttgagagttgaattaaaaattcaaactaacttttggatacac

SEQ ID NO: 913393 - DNA, 517 bp, Homo sapiens
ttacatgtattgatttatatctcatgtctccctaaaatatataaagccaaactgtaccctgaccaccttgggcacatgttctcaggatctcctgagggctgtgtcatgagccatggtcactcatatttggctcagaataaatctcaaatattttacagagtttgactcttttgatcaacaccattgaatagaagcaataataagcagacacttacaaataaatgtggttgacaactattacaaatgtaaagtttaaatgtgaaacttttctcacagtactttgggaggcaaaggcgggtggattgcttgagcccaggaggagttcgagaccagcctgggcaaatgtgaaaccctgtctctaccaaaaaaaaaaaaaaaaaaaaaaagcaaaagttagcctggtgtggtggcttgcacctgtagtcctagctagctactcgggaggctgaggtgtgagaattgcatgggaggtgsaggttgcagtgagccaagatcacaccactgcacttcagcctga

SEQ ID NO: 913394 - DNA, 613 bp, Homo sapiens
caagttgacaaggatggaatgytatgcatatgaataaagtttttgttataacaccaaaagaataacttttgtttaaaaaattatataactgggtcagaataatgactacttattacaaatctgataacagttctaagacatactttaaaacaataacactaaaaggttttagtaagccttattcatactcaccaagcctgcccccactcctcaacctccacacattcaaaacaaaaacaaaaatactaatgggaaagttgatgaaagagaatgattagaactatgacccaccttacagagagtcttctaactgagaaaaagacagaattaaacattttaggtatcagtaccaaataatttttaaacttttacccatactttaaaacattatcctcataaatatgctgcttaaataaaaatgtaaaataatctagcatgtttaagcaacctatttttcatttgttttacacattattcctgattaataaaatatcattagtgctaaagcatccctacatttgaatttcattccattctttagcactaatataggaacattagtaagtctagtttctaagtaaacatcactgtcgtcatctaagtgttatttctc

SEQ ID NO: 913395 - DNA, 652 bp, Homo sapiens
catggtgcaagctgttggtagatctaccattctgsggtctggaggacggtggccctcttctcacagctccactagatagtgccccagtagagactctgtgtgggggctccaaccccacatttccctccacacagccctagcagaggttctccatgacagcctcacccctgcagcaaacttctacctggacgtccaggcatttccatatattctctgaaatctaggcagaggttcccaaacctcaattcttgacctctgtgcaccagaaggctcaacaccacatggaagctgccaaggctttgggctttcaccttctgaagccatggcctgagctgtgccttggctccttttagtcatggctggagtggcttggacacagggcaccaagtccctggactacacatagcgcagggaccctgggtctggcccacgaaaccaatttttccacctaaagctctgggctgtgatgggagggaccgccacaaaggtttctgacatgccctggagacattttccccattgtcttggggattaacattcggctcctcagtacttaatgcaagtttctgcagccatcttgaatttctcctcagaaaaaaatgtgattttcttttctattgcattgtcaggctgcaaattttccaaactttta

SEQ ID NO: 913396 - DNA, 633 bp, Homo sapiens
ctgatggttccccctgacagtcagaggtggtcactccctttgctctacttccacacgcagaaagcattccctatttgtctgtggcgagttccatatgtttcttgtggcatctgctakcatttccgcttaaaataaaaaagattgttttaatttccaaccatatctgttcccatttggggatgtaagccattttgcaatgctttgtccttgaagattgtgatttgttttggttccctgtgcaatatcttgtgtttttctttaatgccttttttgaagaaatatttgaaaacaatcaggggaggaggagcagctgcagctcaaacactgcggtagatgttagacaatgcaagtcgcttttattcttcacgttttgctttttgtcaaactttgcaataaggaaggaagggcagcttttgttccttagacaatcagaaggaaagaaaaaattgattattccttgcagattatgggtggtcagcaattatgtaaaaatgggacaaacattcagaagggcccaactactctatcagcgcagctgcacaatgacaaccatatgctctggcctgaggggttaactattgcattgaaactgattagagtagtttatcttcctgggaaacaactccatttaga

SEQ ID NO: 913397 - DNA, 646 bp, Homo sapiens
atgaactagacagcttatagacaacaggatttaatttctcacactcctagaggttggaaatttgagatcagggtatcagcatggttgagctctggtgatgactcttctgaatttcagactgcacacatcaaattttattctcatttggtagaaggagacagacatccctctggggtttcctgtataaagccagtaatctcaatcatgatggcctcaacctcaggagttaattacaacctatctccttatagcattacactgggggttacaattttaatacaaattattgtaactctcaagtttttttaaagctgtcattattcctcctactgggtttttcctatttgcttcctcagtctttccatttctttatgtctctttgtgtgaaactgtttgcctaattctgtctctcaattgtattcctcaaacagaggaagcaagctccaatgctatgagatgctctatgtacagacgcacataacaaagaacggagggagtgctcaggcagtagacagaagtaaagtcatgctctcagtctaccctgaaccctgccaattttcasaagcatgagcttaaaggttgatgcttttccggtccacattcagttgagaccacagccccaatctcataagagacctgaaggcag

SEQ ID NO: 913398 - DNA, 581 bp, Homo sapiens
atttatgtttctctctaagctggttattctagttagcagttcccataaccttttatcaagatacttagcttctttgcattgtgttagaacatrcttctttagctcagaggagtttattattacccaccttctgaagactacttctgtcaattcttcaatctcattctccatccagttttgtgtcattactggagaggtgttgtgatcatttggaggagaaaaggcattcttgtttctggaatttttggcatttttgtgctgttttttcctcatcttcatggatttatctactttcaatctttggggctgatgacatttggatggggttttttttgggggggtcctttctgttgatgttgatgttgttgctttctgcttgttagtttttcttctaacagcaaggttcttctgcaggtccagtgcagtttgctggagttccaatccagaccctgttcacctgggtgtcaccagtaaaggctgcagaacagcaaagattgctgccttctccttcttctggaaacttcatcccaggaggatacccgcccaatgccaactggagcccttttgtatgaggtgtctgt

SEQ ID NO: 913399 - DNA, 599 bp, Homo sapiens
aataaccagtactttggttttcattcccttactaagtactttaaggtcttatatgtcataattttattgcyaacatcaaatatttattttattttttagaaaaataactaaacatgggcaaaggagatcctaagaagccgagaggcaaaatgtcatcatatgcattttttgtgcaaacttgtcgggaggagcataagaagaagcacccagatgcttcagtcaacttctcagagttttctaagaagtgctcagagaggtggaaggtaagagggcttaaaacatgctaacaaggtaattaaaagacagtttccaattgaggatgcaaaaaaaagcctagttggcattctcgtagtgggacgctattacatagcaaaagacattggttttgaggataatttacttaaatgttacaacttaaacttacaaataattattttgtagaccatgtctgctaaagagaaaggaaaatttgaagatatggcaaaagcggacaaggcccgttatgaaagagaaatgaaaacctatatccctcccaaaggggagacaaaaaagaagttcaaggatcccaatgcacccaagaggcctccgtgagtatcttg

SEQ ID NO: 913400 - DNA, 682 bp, Homo sapiens
aacagaacagatgtgactttcaaggttggcgctttcctaaactctccaaaaaagccaaaaattcataggaatctcattaagtgtaaacacgcttgtcttaaataaactttcagctgttaccttgaaatttaagtagacctctgaattaagctagttaatgagggcttaattggggtaatttagattttaattttaattttaagattataagattgtaaagaggtatcagcttcatacttaattggatccttccaaatgcccattctgactgatgtctattatttgatcaatttgctttgaaaatctattgtgcctagagaaggatatttggttttgttattttgtgttgtttttcctctatatttttaattaccttgtttgttttatgctactaacatggtgctatatcattcctattagtgtttgcaagttgaagcacacgtgtgtcacaaatcctggcagtaaataattaaagtatttaaataaacttgtgtatatgctacagttctctggttgaacaaatttgtagagcaagatcttattttgatctataattatagctgccagtgactggcaagatccttactgagtcagattaatttacacattaagcagccatytgtagaaattttcatagtacctcgtttgcaatgctatgtatcacatgggaattctgaaacta

SEQ ID NO: 913401 - DNA, 647 bp, Homo sapiens
tctatgtatctatctagttcacatctctctgtctaaagtgtatatatgattttctttttttaagggaactattttttatgtgttattgttgtttttttcaatgtttagtttaagtttgggggcacatgtgaagccttgttacataaacacttcgtttgttgtacatattattatatcacacaggcattaagctcagtacccgatagttacttttctgctcctctccctactccaccctcccccatcaagtagaacctagtgtctgttgttttcttctttgtgtccatcatcatttcgctcccacttataagtgagaccatgtggtatatgattttttgttcctgtgttagtgtgctaaggatgatagcctccaacaccattcatgctcccacaaaagacatgatcttattctttcttatggctgcataatattccatgatgtatatataccacattttctgtatccagtctgtcatggatggccacttaggttgattcgtgtctttgctattgtgaacagtakctttacgtggaatgctttatattcctctgggtatatacccagtagtggattgctatgtagaatggtagttctgcttttaggtctttaaggaattgccaaactgctttccacaatgattgaacta

SEQ ID NO: 913402 - DNA, 648 bp, Homo sapiens
ttttaaaaacttttcactttgtcattgattttgagaaatttgattatgatgagctttgatgtacttttcttaatgtttgtttgtgaagtatgatggaggattgttgttgcacttcttgaatccattgggtatgtaattatcatcatatttaaaaatattttaggcattaatttttaagttttctgcttcaatgtttccttttttgcagagattcaagtaacacatgtgttagatcatttgaagatgctctaatggctcactgatgatgtgattgtttttctaaaaaaaaccttttctttttctgttttcagatagtttgttgctattttcatgtttactaatcttagtaatttattcttcaatttcatttttggtttatgaaatcaaattttttttaaatctcagatattgttgttttcatttcagtagattcactttggatcccttttacatttatttcccaacttaacagatttcagttgtaataattatttctattcctctgttcactaattctaaaaactatcaattctcggtgagttttgagtgattggtcttcacctcagaagtcttccaagctctatcttgatttcctcctctctgtcygacagcctgaaaactcattcaatgcagtaacatggaggaaat

SEQ ID NO: 913403 - DNA, 640 bp, Homo sapiens
gtttcaccttttaaaaacaacaagcaaataattatactctgctttataatgtggtggaatgtatacaaatactttcttccataatttttgagagcagtaactgtgtctcaccaatcttcatattctccactgcactgaccatagcattttgaatataatttggaatcaattaaatacatgaacaaacaagtaaaattttatggtgcagggaaagtattattattattttttaaaagggctctgagatataatctacttttctgggatagtaccaaataaaaatgaaatcaagaatttaaagcattctgaaaatactgagaaagaccattaaaaaaaagaaggctaagagtttgtttaaaaatatgagaaataaaaaaaagatccatataactgactatagcaaaagcatgtgttttctgaagtaagtaaggcagaaagtaaaatagacatccttttaatacctctcatatctatgcagagatggccaaggtctggtagtgattttcatgatgatgggtctrggaagcttattattttgtaaccagttttattacctgcccccagcaaaaggcatttgtttaccttctttcctcttttattcactttagacgtgaagagaagtatcactgcttcagtatta

SEQ ID NO: 913404 - DNA, 648 bp, Homo sapiens
ggtggggagatttttggttaaaaggcaaaaagtttcagttagacaagtggaataagttttgaaatctattgcacagcatggtgactattgttaacaataatgtatcatatattcaaaaattctaaaagagtggattttaaatttttatactacacacaagaaaaatatgtaaggttatagatatgttcattagacagatttaattattccataatgtgtgcatatatcaaaacattacagtttaccctacaaacaagaataatagaaagtattaatttataattgttttgtttaagagacaagatctcactctctcacccaggatggagagtggagagtagtggcaggatcatagctcactgtaacctcaaactcttgggctcaagcaatcctccaccctcagactgccaactacctatgttacaggtataatacctagtattacaggtacatgccaccacatctggctattatttttttagacacagagtcttgctatgttgtcctggctgctctcgaactcctgtacacaagaaattctcccttctcttcctcctaagtgctgagattacaggcatgagccactgcacccagcctgataatagtcttttaataaaggyaactcaagtatattgaaaaaaggacttt

SEQ ID NO: 913405 - DNA, 594 bp, Homo sapiens
tgaatccaaaagttgcttaaagttgcgtacaatattagcaagttagaaagttacaccaattttttgaaatattaayaaaatagaccactagctagattaataaagatgaaaagagagaagaatcaaatacaaacaataaatgataaataagatattaccactgaccccacagaaatacaaactaccatcagaaaatactataaacacctatatgcaaatgaactagaaaacctagaagaaatggatacatttttgaacatatacaccctaccaagactaaaacaggaagaagtccttgaatagatcaataactagttctgacattgaggcagtaattaatagcctaccaaccaacaaaagcccaggaccagatggattctaccagaggtacaaagaggagttggtaccattccttctgaaactattccaaacagttgaaaagcagggacttctctctaactcattttgtgaggccagtgtcaccctgataccaaaacctggcaaagacaaaacaaagaaagaaaacttcagaccaataaccctgatgaacattgatgagaaaatccttaataaaatactggcaaatcaaatcca

SEQ ID NO: 913406 - DNA, 594 bp, Homo sapiens
tgaatccaaaagttgcttaaagttgcgtacaatattagcaagttagaaagttacaccaattttttgaaatattaacaaaatagaccactagctagaytaataaagatgaaaagagagaagaatcaaatacaaacaataaatgataaataagatattaccactgaccccacagaaatacaaactaccatcagaaaatactataaacacctatatgcaaatgaactagaaaacctagaagaaatggatacatttttgaacatatacaccctaccaagactaaaacaggaagaagtccttgaatagatcaataactagttctgacattgaggcagtaattaatagcctaccaaccaacaaaagcccaggaccagatggattctaccagaggtacaaagaggagttggtaccattccttctgaaactattccaaacagttgaaaagcagggacttctctctaactcattttgtgaggccagtgtcaccctgataccaaaacctggcaaagacaaaacaaagaaagaaaacttcagaccaataaccctgatgaacattgatgagaaaatccttaataaaatactggcaaatcaaatcca

SEQ ID NO: 913407 - DNA, 629 bp, Homo sapiens
ccatcccaacagccccaaagtcttgacccayttcagtatcaactctaagccccaaatctcatctaaatatcatttagatcaggtacaggcatactcaaggtttcaccctgaggcaaaattcttctccagcatgaacctgtgaaactagacaagttatttgcttccaaaatacaccactggtgagacaggcataggataaacattcctattccaaaaaaatcagaaagaaggggtgatggatcctaagcaggtctgaaacgtataaaggcaaatcccattagattttaaggctcaagaataatcttcttcagcttcattctccatcttcccacctaacaggggtggcagccctgtcttctgagcccaccagtgtggtagcccacctccctcagccctaagaagtagcctaccttgactcctcaggcctgagccctctggtcctgtggtagcaatagtagcccctttgccttctcaatcatcttcagggtcattcttccctcttcttgaagaacacatgttcacagccagatagctctactgacccattttatagaatctcaagaaatccaacagacttccttcatttttatccctctgttcccttcggtaccagccagcagcatttccat

SEQ ID NO: 913408 - DNA, 701 bp, Homo sapiens
agtggtagctacaccttctcaatgaaggaaaaaacatgttgatttagtctggctcaagctacttacctcgtcaaggtccgrtacattgagtagagctggtctacatcttctacttgctccctttagtccataattctgtcttacctttggaatgccaacaatcttgtttctccagctctattttcttctccagtttcctaaatgtggatgttttcttgtttgtttgtgtttttaacttaaatttgtcactcctccactcccttaaatctttttctaactttccaatattgttctgcatatgtatgcccatggaagatactctggttctcccatagtttatactggaagaaagttgagccttttgctagatgtagttcttctctgttcttagagcatacagtagatcattgagtttctcttctctttcagcaatttaatttcacatttattccttcggcattgcctgaacttgctcgctgctttcactagaatggtaagtatattgtactatgctacaatatgccttttaataatgttttctcttttttaaaaagggtgacaaaatgaaagaatgctcagatatcagtatctccaatggaaaaaattagagttctttctgttttttcctgaatccttgttatggagttctttctagaattccatgtccaacatctatacatggatcagaaagtagcattaat

SEQ ID NO: 913409 - DNA, 701 bp, Homo sapiens
agtggtagctacaccttctcaatgaaggaaaaaacatgttgatttagtctggctcaagctacttacctcgtcaaggtccgatacattgagtagagctggtctacatcttctacttgcyccctttagtccataattctgtcttacctttggaatgccaacaatcttgtttctccagctctattttcttctccagtttcctaaatgtggatgttttcttgtttgtttgtgtttttaacttaaatttgtcactcctccactcccttaaatctttttctaactttccaatattgttctgcatatgtatgcccatggaagatactctggttctcccatagtttatactggaagaaagttgagccttttgctagatgtagttcttctctgttcttagagcatacagtagatcattgagtttctcttctctttcagcaatttaatttcacatttattccttcggcattgcctgaacttgctcgctgctttcactagaatggtaagtatattgtactatgctacaatatgccttttaataatgttttctcttttttaaaaagggtgacaaaatgaaagaatgctcagatatcagtatctccaatggaaaaaattagagttctttctgttttttcctgaatccttgttatggagttctttctagaattccatgtccaacatctatacatggatcagaaagtagcattaat

SEQ ID NO: 913410 - DNA, 638 bp, Homo sapiens
tgtcatggtagtgaataagtctcatragatttgatggttttataaggggtttccacttttgcatcttcctcattttctcttgctgccaccacgtaagaaatgccttttgcctcccgccatgattctgaggcctccccagccatgtggaactgtaagtccaattaaacctctttttcttcgcaatctcaggtatgtctttatcagcagcatgaaaatgaactaatacgtatgttgtcacaaacgacaggattttcttcctttttaagactgaagggtattccattatatataccacattttctttatccattcatccatcaatggacacttaggttgattgcgtatcttggctattgtaaataatgctgcaatgaacatgggagtgcagctatctctttgacatactgatttcattttctttggctataaactcagaattaagattgctggatcatatgaatttctatttttaattttttaaggaactgccattctgttttccatgatagccatactaatttacattctcaccaaaagtgtaaaagagttcccttttcaccacatccttgccaactcttccttttcctcacccccaacttttccctttttttataatagccactgtaacaggtgtgagg

SEQ ID NO: 913411 - DNA, 666 bp, Homo sapiens
gtcacaagaagcccaaaccacaagcagagaccacattccctcagaaaccacttcaaagccccaactgagctcccagccaacagagcrtatcaactgccagccaggtgagtgagccaccttaaacatctagcccaactgaactgtcagatgtttgcagttgcaatcaacaccagagagcgacagtatgggagctcctaaattataactgtccagctaagcccaggtaaccaaacaaccctgttttaaaacataaaatttggggtagtttgttaaacaacagtaattaaaacaactggcatattcttccttattcaagacaaaagaccataagatataattccatttatatgaaatgtctagagtagacaaatctacaaagacaaaaattagattagtagctatctaggttagaagatagtggtgggaagtgatagataatgggcatgggcatttttatgaggtgataaaaatgtgctaaaattgattgtcacaatacttgcagagaattgtgaatatactaaaaatcattcaattgtacactacaaatatgtaaattttgacatgtgaatgttaattatatttcaggacagccattacttaaaaaaaattagactgaaaaaaattaggacttctgctttcagctccaacacatgaacagcttggaag

SEQ ID NO: 913412 - DNA, 651 bp, Homo sapiens
tgtgtgtttgtcatagatggcttttattgcattaaggtatgttccttctatgctgattttgctgaggattttaattataaagtgatgctggattttgtcaaatgctttttctgcatctattgacatgatcatgtaatttttgtttttaatgctatttttgtggtgtatcacatttattgacttgcacatgttaaagcatccctggtatgaaacccacttgatcatggtagattatttttttgatatgctgttggatttggttagctagtattttgttaaggatttttgcatcacatttgtcaggggtattggtctgtagttttcttttttttgctatgtcctttcttggttttggtattagggtgatactggcttcacagaatgatttagggaggattctcttttcttctatcttgtggaatagcatcaataggattggtatcaatttttctttgaatgtctgatagaattcagctgtgaaatcatctggtcctggactttttttgttgttattggcaattgtcttataatcrtttcaatctctctgcttgttattggtctgttcagcatttctattttttcctggtttaatctaggaggtttgtatatttccaggaatttatgtatcttctctaggttttctagtttata

SEQ ID NO: 913413 - DNA, 571 bp, Homo sapiens
taattatccttgtattgtagttttatgtgattggcccttttatttctaaggaccatattcccagggatgggagtgctgaactgaaggttgtgtataattttatattaattgccactttgctatactgctcaaaatctcacagctagagctggactcagtgagcactctctgactccaaagctcattaaaccaaattgctgcccaaatcagaaccatagataaagcaaattatataaaatcactgtgctcatagtgagattcctgctacacttcacctagtggacagggtataaacatcagattattccctaataagaatcttcacctcacgaggatttgtctctgtgaatctttgaagttagataggccttggtttctgcaatcttggacaagctattttgtctttctgtgaatccattctctgatctgagaaatgggaataamaatagtgccaactttacacagttgcatctaaggtctattgcctctaaagcccagggcaaggtatctggaacaaattttcttaaaatacagaaaatagcaattcatttgaagttaccaggctcaggta

SEQ ID NO: 913414 - DNA, 648 bp, Homo sapiens
ccacagaggagggaggtgggacctaagagccaggactgttctcttatccactatcttatccacttgttagtgagtaaggagaacagtccttrtccactatccttgccttgcttagctgacaaggatgatgtgagggttaaatgagaagacaatgcttaaagtgctttaaaaactcaaaagttttgtaaagatataagttgttgcctttagcaaagatttttaagacctagtacaatcaagccaaactccttagagttggaattcatctgataatcagttttgcttaaggattttgtaggcattgctgagctctaccaaaagaaagggacaaagcatgattcctacattctgagagaaatgtagcatttggggaggcagaaggcggccttatggatttcaagcctgacaagtgggtcccaaaataatatcccctggccatgttaggatctatcatttcagaggctcaaccatattgtatgggacacccccaaaacattcatacagatatacatacacacacatacatgcatagatgtgattttgagaatggaaaattaagttatctaaaccaaaactttaagtaaaagcaatttaattttttaaaaaatctttaaaatatcaaacaggtcacatgataaaaatgaacta

SEQ ID NO: 913415 - DNA, 584 bp, Homo sapiens
tttgttctgtactaagaaaaattcttctgccttgagatgctgttaatctgtaaccctagccccaaccctgtgctcacagaaacatgtgctgtgtcgactcaaggtttaatggatttagggatatgcaggatgtgctttgttaaacaaatgcttgaaggcatcatgcttgttaaaagtcatcaccactccctactctcaaggacccagcgacacaaaacactgctgaaggccacagggacctctgcttaggaaagtcaagtattgtccaaggtatctccccatgtgatagtctgaaatatggcctcatgggaggggaaggacctgaccatccaccagtccgacacctgtaaacggtctgtgctgaggaggattagtaaaagaggaaggcctctttgcagttgagataagacaaagccatctgtctcctgctcgtccctgggcaatggaatgtctccttgtaaaacccgattgtatattccacctactgagataggagaaaactgccayagggctggaggtgagacatgctggaggcaatactgctctttaaggcattgaggtgtttatgtatatgcacatcgaaa

SEQ ID NO: 913416 - DNA, 510 bp, Homo sapiens
  misc_feature 143: n = A,T,C or G
tgggtggtaagataagagatcttcacatttccctttgttctttgcactcctgccattrccatgagaagaaggcaccctgtcaggccccgaccccaggaggatcagagacacttggagcagatgcagctcaaccaccacatttngagctggaacctcccaagcaacccatgctcatgagtgagaaatggtggcctatggtcgtaggcctctgaggtgtgggattacttgttacaaagctagagttaattaatagagatttctacctcacatccctacaaatcaaataacaaaggaaataaaatatgaaaagcagatttccaatttttagaagaaaacagaggacatattttatgacactaagcagagagaaaaattttatatgacacaaaacacagacaccgtaaaataaattactgataaattcattcagttgtattaaatgtagaagctttgatctgacaaaagaggcgatgaataaagttaaaagacaaagacagtgcatgatatgat

SEQ ID NO: 913417 - DNA, 636 bp, Homo sapiens
  misc_feature 149: n = A,T,C or G
tgagcctgggtggtaagataagagatcttcacatttccctttgttctttgcactcctgccattgccatgagaagaaggyaccctgtcaggccccgaccccaggaggatcagagacacttggagcagatgcagctcaaccaccacatttngagctggaacctcccaagcaacccatgctcatgagtgagaaatggtggcctatggtcgtaggcctctgaggtgtgggattacttgttacaaagctagagttaattaatagagatttctacctcacatccctacaaatcaaataacaaaggaaataaaatatgaaaagcagatttccaatttttagaagaaaacagaggacatattttatgacactaagcagagagaaaaattttatatgacacaaaacacagacaccgtaaaataaattactgataaattcattcagttgtattaaatgtagaagctttgatctgacaaaagaggcgatgaataaagttaaaagacaaagacagtgcatgatatgatttggctgtgtgtccccacctaaatctcatcttgaattgtcttcccataattctcctgtgtcctgggagggacctagtgggagataattggaatcatgggggccgttcccccatactgttc

SEQ ID NO: 913418 - DNA, 596 bp, Homo sapiens
atgtcaggcactatactgcccactccacatgtgttaactcatttcctcttcaagcatcacacagttgaggaaaccgaggcacagcaatggttttgtggctgcctgtggtatgtccacagtctttgctgcatggaaaatgacagtgcatctagcatgaggagcaagaagcccactgttctgtgctgagcagagccccttggaggacccttttctgttctcagagccctgcagagggaggaagggggagcttctgaccaggacagggtgttcttgaaaagaaccaccacagtgagttcctccttgaaaggactccaaaatgtccagtaaagactctgaatgttccaggatggtcccattagggaagagaggatgtggggagggctagctgccctcctcaaacactggggctccatttttgctactggtgccatccctgagtcttattactctctaaaaaccccacaccttgcccagcatataacasatatttgctacaagtttgttgagtgaatgaatgtgaaggacaagagtctgtgaggtctcaaggggtagtgttatagaatgtggggaagctacagggagagaaatcaactcag

SEQ ID NO: 913419 - DNA, 661 bp, Homo sapiens
ttctggtttcagatgcatccagcctatagagaacaaacattatcgtaagaacaatataacagcgggcttgccccagaattacttgccctgtatacttggctcatgacttctctatatccatttccccctttgttcttaacagaattctttattcaggacagtctaccctgtggcttaggggtgaccatgtttcagggttctggctagttaaatgtaagtagaagtctaatagataagactatagggaaaactgtttctaagaaggtggagactcacatatcatatggattttgcctttgctcttcaccccttttccctgccttgaacatggatgcagttcccggagctatgattactctcaaacccataggaaaaaaagccaaatagtaagaaaggcagaaaaggaagactggagtgaggactgaccttgagtaattaaaccaactctgagctgcccacctccaaacttgttgtaagaggagaaggagaagcccctgccagggtatacctctttcatgcaagtttctgctcttctttcaccacaaaggccctttcgagactttctatggctgtctctgctactttggttgtccctcttttcatttctyttcttccttaagtagttttgcttttagttggaagagattgggaggcagacact

SEQ ID NO: 913420 - DNA, 670 bp, Homo sapiens
ctcaaatataaaattttctttttgattctcaggaagkcaatgtacttctatagaagggtgcaaccttacagatggagcaatggtgagcacacacttggacaagggaggggaaagagttcttatccctgactcatgtggaccctgctgctgtatccttcccttattggctagggttagaccacacaggctaaactaattccaattggctaatttaaagagagtgatggggtgagtggtttggcgggaaaaatggctatgacagagcaggtaattggaatgagtcagggtggagtaagtaatcgaaaaaggttgctttatgaggaagttaagtttaaaagtagaaggcaaagaattgaacatactggcatattgattatttgaaaagaaatttagaacttatatctaacagtgagactcctgtctctacaaaaaaaaattataaaattagccagatgtggcatgtgcctgtggtcccagctattctggaggctaaactgggaggattgcttgagccctcccacctcaggagttcaaggctgaaatgggctatgatcatgccactgcactcagacctcggcaacagagtgagactcgtatcagaaagagaagataagagaagaaaagaaaaggaaagaaaagaagaaaagaaaagcttataatcctggctggg

SEQ ID NO: 913421 - DNA, 587 bp, Homo sapiens
tacagagtggagctgtaaaactttattcactcccagcagttatcacctgtgcagccaaaaccaaaaaggagtgaaaatgcaagtgatgtcatgctcatattcaatgttcatgttatcctgctcaaygtcacaaatgccagtggaggcccatagatcagggatgtctgtgtgtgcgtttgtgtgtgtgcatgagtgtgtgtgtttattcctgttttctctccaattatgtcttcatttatttgtttttgtgatttcatgtttaattttgaagcatccctaccctactccataccttgtctccagtatttttttagttgggtatacttttcataaagtgaaattcactaatcttttgtgtacagtttgatgaagtgacacatgcattactgtaacccacgaccacaggatgatatagatcattccttccatcccagaagacccttcatgcaccttcccagtcaacactccctacttcaagacagccactgttctggtttctttcatcaaagataagttttcccagttgtagaccttcaaataaatgaaatcatacagaaggtattcttttgtgtctggcttctttcatt

SEQ ID NO: 913422 - DNA, 571 bp, Homo sapiens
ctcccactactctcagctcaggttgaattggaggagaagctgaagccaatattgcagtatctggaggagtggaggtaagaagagggggacagtggccttcttccatcttccaagactagtcttggtgatgctatgataacaagtatttattcatccattcatctattcactcaattgtcattgcctgcctactctatattagggaatggattcaagtcacgtgaatgtttaggtagcacaaccttattaacctatatattgggtctgctgtaaaccacaatatacaggaactttatgaaaaattggtagccattttctcggtttccctataggaggtgtggatactgtttgaggggaaggggtatcacggatgcttggagcagaggtgtgcacacagtagcccgtatccaagagcatttttacgaagcttctctaattactgtctatgtgtttggattctgagtcataaaagacaagtcaacaaattaaaacatgtatatcaatccaacwcaaataatgatctaccgaattaaggcaggcactgctcctgttttaggcgtgaatgcagtcc

SEQ ID NO: 913423 - DNA, 624 bp, Homo sapiens
gtcagagtggaagatttgttctgatgtgactacgttgtcacagaagggaagagaagtgaaaaggagagggaaaaggcgctaatatttgttgaaaatatctgggtgccagatattttcaggtagaactccattctacagaggaagaaactatggtaccagaaggtgaaggaatctgtctgaggtcacacatctagtaagcagtgtgccagcatccaaactctattctttctgcctgatttctggaatcatcttgtgcctctatttccaaggactttctagtcccaccagaagtaaataatcaagactggcaaacaataattgcattaatccagactcttatctgtaaatgacaagagctcaacttcttgttgaggttcaggaaaaaatgaagaggtcaaagggagagcttatggtagatatgtcagaattgaccaatataatgaaggaaatcttgagcactcaggcataagaaaggcaggaatccacctggccctcaggaacgatgcctgctaagaccctctgcccttcttgtctaactctctgcccatggactctttcttgytccatgtggtgggagcttggttgccctcagttctggagccttatgcttcacagctacagaga

SEQ ID NO: 913424 - DNA, 621 bp, Homo sapiens
caggcacattgtaaagaagaattaaatagtctcaaatacaggatttgcatttcaaaacctaaaasgtgcaaggtattggaatcccatttcagctatacaagttcaggataggtagattcatttaatataaaacaacttttgttagcattcagattgtttctccttaactctattatcatcatttgtctagctcttcactactgttgaaaatcttgctgatattcctatctccaaagcaatggactatctgctgataaagtgtttattttgtgtactgcaggcattttggaaatagctcttggatcaaactaaatgagttccagtataaataaagaacctaagacattgcaggtggcactcagcaagatattggtgtgacagctagagatgcggtgtgaccctctgcaaatgatgttttgtattgagtgcagggtctaataaaatgagttccatcatggaacttttgtgctcattgaaatctgttttaaacctaaatatgaggtttcactgctgctttagtgacaggaaaaaaaaaaagataaaaaaagaactgtaactaggatggtagcttgagtcacattcaggccttaaaataactgttaagtatgtactttctattgt

SEQ ID NO: 913425 - DNA, 408 bp, Homo sapiens
taggaaatgtaacactatccccaagggtaaggctatgaatggtgctgagggagaatatgtccctaggaacttcttaatacttagaacaaccttgtcagaaagtcatttgactaatgaatccctcagaaaaagtctcttagagtgatgaaaacgttgtgtgaaatcacacagccagcaaatagctgagctaatatttgaaatcaaggaaatctacttcaatgtttactttcttttaataggtaattcttatatctgtcctgtacctactatgtgggatgtattctatgccctgggggcaggaacagcagtgaaaaaacacaaacactgccctcatggagatccagttctagaatataggataaaaggacatatatttagtmagcacactttgtattatctcattaagtc

SEQ ID NO: 913426 - DNA, 630 bp, Homo sapiens
tttttcagacaagcaaatgctgagggaatttttcaccaccacacctgtcttgcaagaggtccagaaggaagcactaaatatgaaggaaggaaaaacagttaccagccactaccaaaacacactgaagtacacagaccagtgacactatgtagcaaccacataaaaaagcctgcaaaataaccagctagcatcatgatgacaggatcaaattcacaatactaaccttaaaagtaaatggactaaacaccccaattaaaagacacagaatggcaagctggataaagagccaagggctattggaatgctgtctttaagaggcccatctcacatgcaaaaattcacataggctcaaaataaagggatggagggaaatttaccaagcaaatagaaaacagagaaaagcaggggtcataatcccagttttggacaaaacagattttaaaccaacaaagataaaaaaaaaatgacaaagaagggcattacataatggtaaagggttcaattcaacaagaagagttaactatcctaattatgtaggcayccaatataggagcacccattttcataaagcaagtgcttagagatctacaaagagacttagactcccacacaataacagtgggagacttt

SEQ ID NO: 913427 - DNA, 580 bp, Homo sapiens
aacaagatttttatttttaatttatccttggctgctatcattaaaagaatgcaggtttatgttctaaacaagtacaaagcttattctcttatctggaattattcattattctcctggcatttatcattcatcataatgcaagcaatttccaacaattactcctgctgggtgtagcccacacataactttccaatgtcagagaaatattttcaaactattttatgatcctactctgcttttctgacacacccttagataggtaatactgccttcacagagaacagtacatacactaggcatagatctcctttcattttaggaaatgccattctagtcacactctgtcatccattcactctagagatatttattgacaatctaaaatgtgccaggccttctactaggtaaacaggagagaataaagggacatggatcctatttcatgaaatttacagtctgctgaaaaaaaaaaagaaagcatgtaaaaccacatacacatgcacacactcacacacacacacacasagtatcttaaatttgagaaaacgaacaaagtatactgtgagaataacaagagaaa

SEQ ID NO: 913428 - DNA, 599 bp, Homo sapiens
tgggagaattgaccagtgataccatccggtcctgggtttttgttkttgggaggtttttggttatgaattcactcttttattatatattcacattgtttagatatatttgagacacttttggtagtttgtgtgtttctaggaatttgtcatttcatctaagttttctaatttgttggtgtataattgttcattgttcataatattctttgtttttgtgaggtcagagataatgacctcacttttattcctaaatttaatgattatattcttctctcttcttaaaatctgggtcagtctaattaaaggtttgtcagttttgttgatctttttgataaactaacattaataagtttttaaattgaaaaataaaaattatatatatattcattgtggataatatgttttaaaatatgtgtacattaggaaatagttcaatcaagctaattcacgtgtgtattgcctcacatacttaccatttttgtgagattgctggattatatggttgttcttaattttttggagaacctccatattgttttctaaaatggctatactaatttacattcccactaacagtatgcaagggttcccctcctcca

SEQ ID NO: 913429 - DNA, 658 bp, Homo sapiens
ccattcacctatttgttcatcattattttaatactacaatgtcttgatttttgaactcttgtaaatggcattgatttttaaattgctcttttcaattgtctggtgctagtatacagaaaaacagttgactttttgtattttgacctcatatccttaccttgctaaatttatttattagttctagaagttttctttagattctttttgattttttacactgataattatttaatttgcaaataaatatcagttttatttctctatttctaatcttgatgcctttccctttgctatccctgatgaacatagatgcaaaaattcccaacaagatattagcaaactgaattcaacagcacattaaaaagatcattcactctaatcaggtaatattcatcctgtgggtgcaaggatagtctaaaatgcaaatcaataaatgtgatataccacattaacagaaagacaaaaactatgtgataattttaatagatgcagaaaaagcatttgacaaaatccaacatctcttcatgataaaaactctcaacaaatgtgttgtaggtatgtatctcaacacaataaaggctatatatgacagacctacagctaacatcatactgagtgaggaaaagytgaaaatttgtcctgtaagaccacctcactt

SEQ ID NO: 913430 - DNA, 524 bp, Homo sapiens
aaaaatggagttgaaatttgcaakgctcacaagtgtattctaaacacactttggggaagacaatttgtctttgtgcaggctggttgtcttcagataaaatccaggtcactgaagctatgaggaaagtatatttcaggtaaatcagcatgtatccgatgcatacagcagacatgtttaactcctgagctctgctttagtatctcttagaatgtaaactcctgaggagtcaaatttatatatatcttaaagaggccctttaaaagaggcttgttgctctctcctcttagatgggagattgtctttggagtataagcaaaagaaaatatggagatgcaataaaaccatggtaagggacagttacacattcctaggctctatctacatgtacacatttttattgcctgttaaagaaaaatggttttggaaattattttaagaatgtttgtgtagcaagggttgtgtccttctaaaattctttgactacaagtgactgtaatcttttcatttaattacctgatctatag

SEQ ID NO: 913431 - DNA, 626 bp, Homo sapiens
gccaggtaaaggattcttggttgacagcatttttccttctgcactctatcatcccactctcttatggcctgcaaggtttctgctaagaaatmtttttttcattaattaattgatttgttaatatagccattcatcaaattattaacaagaaactcctatgaactgagattacagtgcctaacatgtagtagatgcttaatcaatggtggatattattattaataaatcttttgattgctgtattgagactccctcatttgtaaaatgtttcttggccgggcatggtggcttatgcctgtaatcccagcactttgggagtctgaggcaggcagatcacaaggtcaggagatcgagaccatcttggctaacacggtaaaaccctgtctctactaaaaatacaaaaaattagccgggcatggtggtgggtgcctgtagtctcagctactcgggaggctgaggcaggagaatggcgtgaacctgggaggtggagcttgcagtaagctgagatagcgccactgcactccgtcctgggcaacagtgagacgtgagactctgtctcaaaaaaaaaaaaaaaaaaaaaaaaaagtttcttagttctcgctgctcccagaattttctttttttgc

SEQ ID NO: 913432 - DNA, 598 bp, Homo sapiens
tggtactgtgaatagaaatctctctctgggttctttacgattttgccaacaatgagagaccaattctattagaaaaagataggaagatatggggagctctcataccaataaaagtttatcccaagttccacagattcagaagagcaattatttgagcaattttgtttttcagaggcctcaagcatatgacagaaaacaataagtaacataaatgatttatggtacagttattgttttcttaaaattgtatttcctacaaaagcttgtgatctgaaatgtagggctcatataaatggtaaagtgaagtgattcttaaagcatctccaggtattcctccaaaaattattccttggtcagaaaagtatgggacattccatttaaataaaaccactgtttcttttttctttttttgtggttcttgtgagagcctttataaagccccatgacccaccaagaaaggaataaggaagtagcatttacatcttgaaattagtttaataaatattaaatattttaatgaaattgttagagatagagtgtgatcaacattttaaaaaatttttaagcaaacactsacttgacactttttttaagatca

SEQ ID NO: 913433 - DNA, 603 bp, Homo sapiens
ccagagataccccaaaatgtgtaagcaactttgsaactgggtaacaggcagggattggaacagtttggagggctcagaagaagaaaggagaatgtgggaatgcttggagcttcctagagacttgttgaatggctttgcccaaaatgctgatagtgatatagacaatgaagtccaggctgagggggtcttagatggaaatgaggaacttgctgggaactggagcaaaggtgactttaagacagagtttcgctcttgttgcccaggctggagggcaatggtgtgatcttggctcaccgcaacctccgcctcccgggttcaagcaattctcctgccccagcctcccgagtagccgggattacagacatgcaccaccacgcccagctaatttttgtatttttagtagagactgggtttctccatgttagtcaggctgatcttgaattcccaacctcaggtgatccacctgcctcggcctcccaaagtgctgagatttcaggcgtgagccactgcacccagccggtttttttgttttttttttaaatagagacctggtctcactatgttgctcaagctggcctcaaactcacagcctcaagtgattct

SEQ ID NO: 913434 - DNA, 641 bp, Homo sapiens
ctttcctaatcagaaaatcacatacaacaaacatattcataggaaagggttgttgccaaagaaagatgaggatagacaggggaartggctgcagtgaatgagttgaagtttcctgtgccgcacatcaagatcccagggtattaaaagaacttgcagatgtggtcacagaaccagtgtcagcgatcctggaggaatcatagaaagcaggcgtggttccagaagattgcaaacttacaaatgttgtccagatttccaaaagaaggggactggcgaatttcaaagattcaatcccaaggcgcataacatcaatctctgtgtgatttcaaaaatagattattaaacagatggctctgagttcttagcaaaggaaatcgtgggctcactaaaaacacaccatgccaagccaacctcatttcttttttgattggactaagaaattcacaggagagaggggctgttgcttcagctaggtacctgatagtctttactgacatctgctaatgccagagctttcttcattggtggaatcaggccaactaggagagacaagagtagacacacccttcaagatggaagaggcacttgggaaattgatcacatggctgaagtgggaggggaagggagaggcaggtcatggttca

SEQ ID NO: 913435 - DNA, 684 bp, Homo sapiens
tctctctccctcacctgccgccgtgtaagacatgcctttgcttctctctcaccatccaccatgattttaagtttcctgaggcctccscagccgtgtggaactgtgagtcaattacacctatttcttttataaattacccagtctcgggtgtgtctttatagcagagtgagaactgattaatacatgtgataaacataaaagtataggtatctttttgatataattatttatttatttattgagacagagtcttgctctgtcacccagcctggagtgcagtggtgtgatctcggctcactgcaacctccgcctctcaggttcaagcaaatctcctgcctcagcctcctgagtagcttggattacaggtgtgccaccatgcctggctaatttttgtatttttagtagagaaagggtttcaccatgttagccagaatagtcttgacctcctgacctcagatgatccacccagtttggcctcccaaagtgctggaattacaggcatgagccatcgtgcctagctgatataatgatttattttccctggggtaaatatccagtattgcaattgctagattgaatgctagttccatttttagtttcttgagaaatctccatggtattttccacagaggttttactaatttacactcccaccaacagtgtataagtatttccttttctcca

SEQ ID NO: 913436 - DNA, 582 bp, Homo sapiens
cctgcagatggtatgtgtgtaaaaaagaaaaaaatgatctggagcatgtagtggaaacattttaaatttcagtaaagaagatgccattttgtttataacaatgckatataaaattttcttgaaatataattggtgatgacactggcattttcctttgttgtcataatcaggaacaaggggacaagaaattacagtgcgtggatcagaaaccagtcactgcttcactggcctttcaccagacactgattatggtgtcactgtttttgtgcagacaccaaatctcgagggaccaggagtctctgttaaagaacataccagtaagtttttgaggaatctggaaagctttcataaggctttagaatagaatgctctaggtaaggaagacttaagtgaatcctgtgcaggtacctctccgtaggggtagcaataatgatgggatgatggcagattcctgaatgtggagtctaaagctggttcaggacctttttctgtagcaatttgcaagttgtccctgttattgagttggtgctactttgaggaagggctaaaggagggagagatggctctcgctgagaaggtgaa

SEQ ID NO: 913437 - DNA, 609 bp, Homo sapiens
atatacaggtatctgtacatgtgtatctrtgaaaatggccatcagtcttctcagccccctcacttggttagaagtggaaataactgctgtggcttgcagcaaaaaatgaagaataaaataaaattgtggcacaaagttctgcagatggcatagtgggtagcctttttgagtacttcataataaatcttcttcactccaatttacgaatatatttcctctaaaaggaaatggttgatcagaaagttcttagactgactaaaggaggattaattatttagaaatacaatatttacgataaaaaatgaaaaagaacatcctatatagtagttggagaaacttgggtggaagaaattttattcaaattgtccaagcaatattatagggaatttttttcttaagtggcccttagaagtgatattggtgttacatcagataggcttaggatctgttttttgttaatcaggcctagatcttccggaaaacaatctgaaatcttatccctaaaagtttctggaaaaagtttttttttggggaagtggaatatttccaacaaatgtaaaaagaataatttaaacttctatggtaaagtcaatgtactaataaaaagtg

SEQ ID NO: 913438 - DNA, 632 bp, Homo sapiens
tgaagataagatggttgtaggtgtgtggtgttatttctgggctctgtattctgttccattagtccaggtaactgtttttgtacagtaccatgctgttttggttactgtagccttgtagtagagtttgaagtcgkgtacagtgattcctccagctttgttctttatgcttaggatttccttggctacttgagccatttttttgatccatatgaattttaaaatagtttttctttgttctgtgaagaatatcattggtagtttggtagcaatggcattgaatctataaattgcttttggcaatatggccattttaacaatattgattcttcctgcccatgatcatggaatgtttttccatttgggtcatctctgatttctttgaacaatgttttgtaattctcattgaaaagatctttcacctccctggattagttgtattcctaagtattttattctttttgtggctattgtgagtgggattgcatttgcttttttttttttttccttttttttttttttcttttttgagacatggtttcactctgtcacccaggctgcagtgcagtggtgtgatcatggtttactgcagcctcaacctcctgggctcaagcaattctcccatttcagcctct

SEQ ID NO: 913439 - DNA, 631 bp, Homo sapiens
aaatcatagtcacaagtaagctgttttcatgtggagcaggccgctggagccataaaccagtaggtgcacttaaatggtgattttgatgaagtgcctggaagctgagtgtgaactagtgcagttgagaaacttctaaaagccttagccttaggagatgcactcacccttttataaatgttacctctagaaactagggtttcatgataaagggtgaaaaaaaaattcccctcatgaatctggcatggtagagggtagaaaagaaatcccctcataaagagtaatctttatgaaatacacacatagcattctccataacgaaggcctaatttcaggagaaagtaatttaccaagtcttatctcacctatggcagcaggtcatttctcccagtctagtgctccctagtcttccaggcttgtggactgtggggtgggaggcgggaaggaacctaagatatacttgtgaaggtcacaacccagagacataaacacagtagaagaccgagatttaatcataagatgttaaacactcctccctcccacacacaacttgytttcagatgaaaaatcttcaataaacagactctgaaactccaagtcaaaagggaagacaaaaacaacaatacaataggaa

SEQ ID NO: 913440 - DNA, 621 bp, Homo sapiens
gctgttcaccaatatccgctgttctgcagcctctgctgctgatacccaggcaaacagcgtcaggagtggacctccagcaaactccaacagacctgcagctgagggtcctgactgttagaaggaaaattaacaaagaggaaggacatccacaacaaaaacccaactgtacatcaccatcatcaaagaccaaaggtagataaaaccacaaagatggggaaaaagcagagcagaaaaactggaaactctaaaaatcagagtgcctctcctcctccaaaggaacgcagctcctcaccagccatagaacaaagctggacggagaatgactttgacgagttgagagaagaaggcttcagacgatcaaactactccaagctaaaggaggaagttcgaacccatggcaaagatgttaaaaaccttgaaaaaaaattagacaaatggctaactagaataaccaatgcagagaagtccttaaaggacctgatggagctgaaaaccaaggcacaagaactacatrgcaaatgcacacgcctcagtagtggattcaatcaactggaagaaaggatatcagcgatggaatatcaaattaatgaaatgaagcgagaagagaagtttagagaaaaa

SEQ ID NO: 913441 - DNA, 621 bp, Homo sapiens
gctgttcaccaatatccgctgttctgcagcctctgctgctgatacccaggcaaacagcgtcaggagtggacctccagcaaactccaacagacctgcagctgagggtcctgactgttagaaggaaaattaacaaagaggaaggacatccacaacaaaaacccaactgtacatcaccatcatcaaagaccaaaggtagataaaaccacaaagatggggaaaaagcagagcagaaaaactggaaactctaaaaatcagagtgcctctcctcctccaaaggaacgcagctcctcaccagccatagaacaaagctggacggagaatgactttgacgagttgagagaagaaggcttcagacgatcaaactactccaagctaaaggaggaagttcgaacccatggcaaagatgttaaaaaccttgaaaaaaaattagacaaatggctaactagaataaccaatgcagagaagtccttaaaggacctgatggagctgaaaaccaaggcacaagaactacatagcaaatgcacacgcctcagtagtggattcartcaactggaagaaaggatatcagcgatggaatatcaaattaatgaaatgaagcgagaagagaagtttagagaaaaa

SEQ ID NO: 913442 - DNA, 629 bp, Homo sapiens
ccacccttaggacctcatgtagcttttttttttttttaatttgatttaagttctgagatacgtgtgcagraattataggtttattacatggtaaaagtatgtcatggtggtttgctgcacctatcaacccatcacctaggtattaagccccacatgcattagctctttaccttgatgttctccctccccttgctcagacctcatgtaattgtaatgatctctcaaaatctccatctgcaagtcccatggcattggatattattgcctcaacatatacattttggaaggacacaaatagccagttcattatacctgctcagtcaccttctgattattatttaggttgaacccttgtccagatgagaaggaatcacaaatacaggctttgatttgagactgtaatgtattaggagttcagaacagtggaggacaaggcaggaaaagcccacagcctcaatatacagaagtaggacaggacattatggagaattcaaaataacaagccaagcaggccacccagttgagtcatcaatctgagttggatggtctgagaaagtaagcccaggcaggagagaggttataggggcagaactgtgaagagtaaaagtatccagaagaaggatggtacc

SEQ ID NO: 913443 - DNA, 673 bp, Homo sapiens
ctttgccctcttagaatttatactcttgaacaagaaatatratagatatgtggatatgaagataatttcaggtggtgggaacaattctgaagccaattctgtgacatgacacagggacctggggaagaaagagctgctttagtttgggtaatcaaggataatgttgggaggtggtgtttgagttgaaacctggtgggtttgaaggaagccatacaagtatctggtagggagaagcgtttggaggagagaattccagccagcactaaggaccaaagccaaacaaaggccatagacaatatcaaatttatgacagaggcatacaaagaaagccaggagagtaggtaaagaaaagcgtaattggtcaggtcagagaaactggaagaaactagatgtgtgacatttggactatggtttggaatgtggacttgagtcagtgtactgggaaagcatcagaagatttttagcaagagagtgagtgagacagtacttacatattctaaagagacccctggtatttgaagtagaattgattctagagtaacaagaatggaaggagtaaaatcagtgaggaaaataataattaactaggactgagattaagatgttttggattagggcagttagactagatcagaaattctccatctttcttgcacaatggattagttgtcag

SEQ ID NO: 913444 - DNA, 484 bp, Homo sapiens
caacatggtagaaccccatctctactaaaaatacacaaattagctgggcatggtggcaggtgcctgtaatcccagctactcgggaggctgaggcgggagaactgcttgaacccaggaaggggaagttgcagcagtgaaccaagatcgcagcagggcactccaggccgagtgacaagagtgaaactccatttcaaaaaaaaaaaaaaaaaaaaagaaccagccaagtcgctactgcttagaaatttctcccaccagatatcctagatcatcaatctcaagttcaaagtttgacagatccctagggcagaggcaaaatgcagccaagttctttgctaaagcataacaaagtgacctttgcttcagttcccagtaagttcctcatttctatckgagacctcctcagcctggacttcatcatccatatcactgtcagcattttgctcacaaccatttaaccagtctctaaaaagttccaaactttccc

SEQ ID NO: 913445 - DNA, 619 bp, Homo sapiens
ttggttgactcttatattacttaaaagtatgctatctaatctctaaatattttggaactttccaactgtttttctgttatcaatttctagtttaaatccattgtggtctgagagcagacattatatgatttctattattttaaattggttaagatttttatgtcactcagaatatgctctatcttggtgaatgttccacaggagtttgagaagaatgtgtattctcctgttgctgaatcaaatagtctacagatgtccattatatcaagttacttaatagtgttgagttcaactagatccttactaattttctgcctgcttgatttgtacatttctgatagatgggtgagagtactgcaaaagtacaacaaaataggatatccaagaactgtgagacaactacaaaaggtgaaacatacatatagtggaaattccaaaaagaaaagtcctatatagaacaagatagctagagtaggttcgagttggatattcctcttctcccaaatcagttaggctctgttaaaatctcagttgattattttggtyacagtttctcctgaaggcagacctggttaagaagaacagaatactttgacatatttaaaagttgtttcctttc

SEQ ID NO: 913446 - DNA, 544 bp, Homo sapiens
accatgctggacataggaaccggcaaaggtttcatgacaacgatgtaaaaagcaatagcaacaaaagcaaacatggacaaatgggatctgattaaacttaaaagcttctgcacagcaaaaaataaataaataaaaataaaaataaaaactatcaacagagtaaacagacaacctacagaaggggagaaaatttttgtaaactacacatctgataaaggtctaacatccagcatctacaaagtacttaaacaaatttacaagaaaaaaaaaaacattaaaaagttggcaaatgacatgaacagaaacttttcaaaagaagacatacatgcagccaacaaacatatgataaaaaggtcaatatcacaaatcattagagaaatgcaaaccaaaaccaaaatgagatgccatctcacacaagtcagaatgactattattaaaaagtaaaaaaaataaatgaataacaaatgctgatgaggttgtrgtgaaaaggcaagcttacacagtgttggtgggagtgtaaatcaatcattgcgtaaagcagtgc

SEQ ID NO: 913447 - DNA, 633 bp, Homo sapiens
tctaaatacctaggaatatagataacaagggatgtgaaggaactcttcaaggagaactacaaaccactgctcaaggaaataagaggacacaaacaaatggaaaaaccttccatgctaatggataggaagaatcaatattgtggaaatggccatactgtccaaagtaatttatagattcaatgctattcccatcaaactaccattaacattcttcacagaattagaaaaaatattttaaattttatatgaaatcaaagaagaccctgtatagccaagacaatctgaagcaaaaaaaaaaaaaaaaaaaaaaaaaacgaaactggaggcatcacgctaccagacttcaaactatagtgcaaggttacagtaacaaaaacagcatagtactggtatcaaaacagacatagagaccaagggaacagaacagagatctcagagataacacctcacatctacaaccatctgatcttcaacaaacctgacaaaaacaagcaatggggaaaggatgtcctattcagtaaatkgtgctgggaaaactggctagccatatgcagaaaactgaaaccggaccacttccttacaccttatacaaaaactaactcaagatgcattacagacttaaatgtaaagccc

SEQ ID NO: 913448 - DNA, 633 bp, Homo sapiens
tctaaatacctaggaatatagataacaagggatgtgaaggaactcttcaaggagaactacaaaccactgctcaaggaaataagaggacacaaacaaatggaaaaaccttccatgctaatggataggaagaatcaatattgtggaaatggccatactgtccaaagtaatttatagattcaatgctattcccatcaaactaccattaacattcttcacagaattagaaaaaatattttaaattttatatgaaatcaaagaagaccctgtatagccaagacaatctgaagcaaaaaaaaaaaaaaaaaaaaaaaaaacgaaactggaggcatcacgctaccagacttcaaactatagtgcaaggttacagtaacaaaaacagcatagtactggtatcaaaacagacatagagaccaagggaacagaacagagatctcagagataacacctcacatctacaaccatctgatcttcaacaaacctgacaaaaacaagcaatggggaaaggatgtcctattcagtaaattgtgctgggaaaactggctagccatatgcagaaaactgaaacyggaccacttccttacaccttatacaaaaactaactcaagatgcattacagacttaaatgtaaagccc

SEQ ID NO: 913449 - DNA, 639 bp, Homo sapiens
ccccccaaatgtattgttttgaatatttaagtgttaccactggggcaatattctgaaacaaaataaacaaggcccagccacctctatttatacacttaacaatttcttgatcttcaataacattttctcagaaattttcctctcccagttatgacaaattttaaaaacctagaaagacctcaaaaatgatatcttttgaataatagtatatatatcactgtttaacaagtagcaaaataatgtaaaataaagttaggataattctggattccccatcaaggattatgcagcaaaacagttaccaaaatggcagatgaattgatccaaattagctacattgaaaaaatattttttctgtttcttatttttttcctaatgcaaaaaaatgcattgctacagattgaatgtttatgtctccccaatattcatatgttgaagtcctaatccccaaattgatggacttaaaggtgaggacttggggaagtaattagggttagattaggtcatgagagtgggtcccttatgatgggattaatgtccttataaaaagaggaagaaatgagacatcaatctrtcgtgcccatgttaggatacagcaagaaggcagccttctgcaaaccaggaagaaggccctcacta

SEQ ID NO: 913450 - DNA, 627 bp, Homo sapiens
tgatatgtttgaagtgcaactttgtgctttttgataactaataaataggatwttggaactttcttattttgcagcccagtctacagaagacatgtgaaagatatttatagctttcataactgtgatcctactccttcctaattgccaagtagtcctccccacccccatccccctttttttttttctgtgaatcatctaggacttagagtcattgcaactggctagagagggactttaatcatcctgaagattcccagatagcttgggagacaataatatcatgtaaaagatagctgctttcttccctttggtttggggacttggttaaagaaatgttagtagatggacaatatttagattttatattctgtgccagtagtgctaagaaaagattactggcttcaagagtgagcagttctaggagagcgagaaaccacagctaggagctccaccagcccttgaagatgcagagacatttatccagtccagagggatggggagataacacactgagtatggaatagtggttaagagccctggtttcacagttaggctaattcagttcaaattgtacctctattactcattaaggggtgacattagggaaatcacatgatgtttgagcct

SEQ ID NO: 913451 - DNA, 611 bp, Homo sapiens
tggctacccacctaattagactggtaggcattattactcccattctgcagatraagaaatggattcagagagattcagcaacttgcttgaggtcacagagccgataagtagcccagtcataatttgagtacctctctgcttgacccaaaagcttgtactcataccactgcactgtgctatttttaaaaactttgtttatttttctaagttagagacaaggtgtcactctattgcccaggctggtctcgagctcctgacctcaagcagtcctccggccccgacctcccaaagtgctgggattcagatatgaactattgttcttggcctgaacattttttttttttgtggtaaaatatacatgacataacatttaccattttagccgtttttaagtccacagttcagtggtgttaagcacatttacatggttgtacagccatcagctatctattttctaagcacttaaagtcagcaggggcattcaagccttttggtagtgggccacaagatcattaattaagattgttaacctatgtgtgtgggccaatgcatttttattcagtaacaatggcttggtgaacaattatttggatgaaactcaaatgcataac

SEQ ID NO: 913452 - DNA, 655 bp, Homo sapiens
ttgctgtgtagtctatgttacaaaacagaaggtagggcatcttgaaacagaaattttgcattactaaccagctcccagaggggtcaactctgaggctgctggtagagaactatactttgagcagcaggaggtgaagaacctaggggcagataccataactcattttctaaagatattctaaaatgtaaactcacataccgataacatgattcctgcccatctatcattcatctatgtatgtatgtatgtatgtatgtatgtatgtatgtatctatctatctatctatctatcatctgtccatcggtccatctgtcatctatcatcatgaaggcagagagaccacaaatccaggggattccaaattgactgtgtattagaatcacttggtcttgtcttaaaaataaagattctaggccaggcgtggtggctcacacctgtaatcccaacactttgggaggccgagccaggcggatcacctgaggtcaggagttagagaccagcctgaccaacatggagaaaccccatctctactaaaaatacaaaattagccaggtgtggtagcacatgcctgtaatcccagctactcgggaggctgaggcaggagaatctcttgaatgcaggaggcagaggttgyggtgagccgagatcacgcca

SEQ ID NO: 913453 - DNA, 611 bp, Homo sapiens
ctcgtgcatgtaatcccagcactttgggaggccaaggcggacggatgacctgaggtcaggagtttgagaccagcctggccaacatggggaaaccccgtctctactaaaaatacaaaaaaaaataaccaggygtggtggtgggcgcctgtaatcccagctacttgggaggctgaggcaggaggcttgctggaactcgggaggcggaggttgcagtgagccaagattgcaccattgcactccagcctgggcaacaagagcaaaactccatcacacacacacaaaaaaggtacccatcctcatgtatattcaaaagggcatcaggaggaaggctcctgccatcagccactgcactgatgagaagggcatccccgctatgctacacccacctggacgaggagccaggcttcatgccacccactgggaacaaagatttctcctatctggtggaggaattctcattcaccaaggacttcctccgggggactgtgcttgtgttcttccaggttccttgttactttgcaggacagtttgagatttaatctatttgtatgatacaatggcggggagctggagggcttcccttcctctccatgtggtatggtggtctcatt

SEQ ID NO: 913454 - DNA, 611 bp, Homo sapiens
ctcgtgcatgtaatcccagcactttgggaggccaaggcggacggatgacctgaggtcaggagtttgagaccagcctggccaacatggggaaaccccgtctctactaaaaatacaaaaaaaaataaccaggcgtggtggtgggcgcctgtaatcccagctacttgggaggctgaggcaggaggcttgctggaactcgggaggcggaggttgcagtgagccaagattgcaccattgcactccagcctgggcaacaagagcaaaactccatcacacacacacaaaaaaggtacccatcctcatgtatattcaaaagggcatcaggaggaaggctcctgccatcagccactgcactgatgagaagggcatccccgctatgctacacccacctggacgaggagccaggcttcatgccacccactgggaacaaagatttctcctatctggtggaggaattctcattcaccaaggacttcctcckggggactgtgcttgtgttcttccaggttccttgttactttgcaggacagtttgagatttaatctatttgtatgatacaatggcggggagctggagggcttcccttcctctccatgtggtatggtggtctcatt

SEQ ID NO: 913455 - DNA, 613 bp, Homo sapiens
ggtgggactgtaaactagttcaaccattgtggaagtcagtgtggcgattcctcaaggatctagaactagaaataccatttggcccagccaacccattactggacatataccccaaggattataaatcatgctgctataaaggcacatgcacacgtatgtttactgtggcactattcacaatagcaaagaccaagccaaatgtccatccatgatagactggattaagaaaatgtggcacatatacaccatggaatactatgcagccataaaaaatgatgagttcatgtcttttatagggacatggatgaagctggaaaccatcattctcagcaaactattgcaaggacagaaaaccaaacaccatgtgttctcactcataggtgggaactgaacaatgagaacacttggacacaggaaggggaacatcacacaccagggcctgttgtggggtggggggctgggggagggatagcattaggagatayacctaatgtaagtgatgagttaatgggtgcagcacaccaacatggcacatgtatacatacgtaacaaacctgcacgttgtgcacatgtaccctagaacttaaagtataaaaaaaaaaaaaaagggcta

SEQ ID NO: 913456 - DNA, 618 bp, Homo sapiens
tccactggaggcaaaatcccagcggagggcctggttggccctctttacagcaaatgcccaccatttgaatgtggctaaggctgkggaaaaaaggctctgctaggaagggcccactggtttctgaacagggagcaaagggaactttgatttacatccccaccaagcctttacccagtgaagaataggaattcccaaaatggaactcaggatgcttacagagaaggagatatggtaagggagcaggcaaaacaagatgctgtccacaaaaccgctctatcagggcagtggatggagctgtggactcctcagaggatgtctacaccatggtcaaccctgggccctttaagctggcaatggcggcgaccttgtcttgtactcagcaggactctctcgcctcctcttcctcaagcccattccctctgtttgctgtgggaaaggtgaatgggcgctcagattcatccaggtttcagagctggagagggctggagagatttctagccggagccctgtcagggaggaaattgtggattgaagaggacgtggacaccatgagaagggtcaatgaggaatgaaatgctttgcctcagcattggaagatcactcagggacaggcaccgt

SEQ ID NO: 913457 - DNA, 618 bp, Homo sapiens
tccactggaggcaaaatcccagcggagggcctggttggccctctttacagcaaatgcccaccatttgaatgtggctaaggctgtgraaaaaaggctctgctaggaagggcccactggtttctgaacagggagcaaagggaactttgatttacatccccaccaagcctttacccagtgaagaataggaattcccaaaatggaactcaggatgcttacagagaaggagatatggtaagggagcaggcaaaacaagatgctgtccacaaaaccgctctatcagggcagtggatggagctgtggactcctcagaggatgtctacaccatggtcaaccctgggccctttaagctggcaatggcggcgaccttgtcttgtactcagcaggactctctcgcctcctcttcctcaagcccattccctctgtttgctgtgggaaaggtgaatgggcgctcagattcatccaggtttcagagctggagagggctggagagatttctagccggagccctgtcagggaggaaattgtggattgaagaggacgtggacaccatgagaagggtcaatgaggaatgaaatgctttgcctcagcattggaagatcactcagggacaggcaccgt

SEQ ID NO: 913458 - DNA, 609 bp, Homo sapiens
aaagaagttcataaacccaggagcttataaatgactaaagttttaatgacttaaactaaaaggatctgaacatttatggatatgagtttttttttttttttaacataaactcccaccctctcagtgagagaaaaggtagggaggcgtcataagatatactgggctcccttaatccagatcaattgaattagactctacgggtggctcagacagagtagtttttaaagcttctcactaattcttgtgtgcagctgtcattgagaaacagtgctctaggtattagtctccataggtttctgcagtcaagttacgtttttcccttgctggacaaatttatgtaggccttagaattatatagtaaaactgcttatgtcaactgacagtgtttcaacagtgaaaactctgaaaatagcaaaaactttgagaaactggaccaaggtattattagagatcaaagtattattattggtacttccttgttcaaaatattagttgggtccctgtgactaattttggctgctacgctgtaggcagargtgtccaatgtcacttttgagttcaaacacttaaaagtcagtgtccagccctcgagtgcactcttccctaaca

SEQ ID NO: 913459 - DNA, 628 bp, Homo sapiens
caagtaggttttatcagaagtgatcctaaggaacaagaaatgtaaaggagactgggaagagccaaagaggagagaggagaaagccaatctaaatgtaattgctgtgactcagtctctctagagatccccacaaagccttcgattgtccccctgcactctatggtgtttgtatatgccatatccattaacctgtctcccacaggcctcccacacagtgacatagctcttgacatacctgatgaagctgaaacaagacccttattaagctacacctctttgcagtcaatggctgggggcaaataaataaataaataaatgagtagagagatgacgtatggtgcctaatggacatcttaagaaaataagtagtattatcaccccctttttaacaattactgaatcattcatcagagacacacagtaacttgacaaaagttacaagtttgcaagtagtgagctcgattccaagactgaacctgatcttaataaagttaattcatttactatccactccatcctggggctcagtttcctcacctgcaaaaatgaatttcaactcaatgttctcataaaaatatttatttatgttggtaaaatrctgataacacagacaaggctaaaatctttt

SEQ ID NO: 913460 - DNA, 638 bp, Homo sapiens
aaaaataccatttgttagactgaggaagttatcgtctataattagtttactgaatttaaacaaaaatwcatgaaaggatgttggattttatcaaatgacttttctgcatcagtagagactatcatgtgtttctgtcctttattctaagatatagtatattatattaattgattttcagctgttaaaacaactttccatttctgggatcatttccactttgtcttgatgtatagtcatttttatatgtgactggatttgctttggtaatactctgttcagggttttcacatctatctacttaaatgatattggtctgtagatttaaaatatatatacttgtatatctatgtctggctttggtattagggaaatactgaccttacagaataagttggaaaatgctcctttctcttttattttttggaagagttttgaagaatacttcttatttaaatagttgatatatttttaaatagttgatatattctgatagttgatagcatcaattgtttgaaaccatctggacctgggctttactttgtgtggtattttaatattattaagacattccttttattgttataggccaatttatattttctcctccttcttgaaacagaagtagtagtttgtgttaa

SEQ ID NO: 913461 - DNA, 619 bp, Homo sapiens
ttttattgttataggccaatttatattttctcctccttcttgaaacagaagtagtagtttgtgttaattttgtagttagtgtcatcctaggaattcgtccattttatctaagttacrtaatttttttcaacatacagttgtttatattctcttgcaatccatgttatttctgtaaggttggtagtaatatcactctttcatatgtcattctagtaatttgaatcatctcttttattcttggtcagttgtactaaaggtttgccaattttgttaacaattttaaaggactgacttttggtttggttaattttttctgtcacttttatattatccatttgagaaatttctcctgttttatttattatttcctgtttctccttacattagatttagtttgctcttcttttttcagtgtcttagggtggcaggtcaggttttttatttgggaaccatttttctttttgaatattgatgtttacagctttaaaattccctctaaaccctgctttagctgtgttactatatgttttagtaatgttgtatttttgctttcatttatctcaaaaccttttctaatttcccttttgatttcggagtgtatagtttaatttccacatat

SEQ ID NO: 913462 - DNA, 595 bp, Homo sapiens
ggtagacaagctagaaatatgtctcctgctgaatgaggtaggtctaggaaattttttattaatgtggtggtagccattaaaaattaccatttcmacttctgtgatcatcattttagcaagatagtctagtagagaaaatgcaatttaattatttatggaggatgcttgtattttaaaagatctatttcacgggagctccaagtttcattccattttcaatactgactgtgcaaaatattgagaatgtgtaaatgaaatccacatttcagtttaattagggcagatactataataaagtcttgttttttcagttgttttggaaagtctggtgttttcattctgagcataaagatagccagtgtttttcaccagtttcttattgttacaggcagattcccaacctttggagatcaaaatagaatactcaggatttgtcatagttatcagacttcctcaaaacttcctaattaatagggacatctcatttttcttttctattattttctaaagcttatactatagtctacacttggaaatagtgctttcataggtaccataatctcttgcagcagtattaaaaattcagtaagagaac

SEQ ID NO: 913463 - DNA, 646 bp, Homo sapiens
tcccttcttacacgttacctgtttgctttactgagtttactctttttccaccctttactactttgaaatttatttttattatatctgttattttagtgcttgcccataaattttgacaatgcatgtttatcttaataaactctaagattaatcagtatttcaatttttcttcccaagctatatgatgttataaaagatttaaaatatatatgtattgtttttaaatacatcagttccaaggcatttttaaaatctccaataacaatttttttttcatgtcaactctcatttagattcatcagcatgctttactgatttctttgctcatcatcttttgggatcctactttttccttaagtttcacgtttgattgtattgaggaatatcctttacactgggctgagtttgcaactagtaaacactcttagtctttacatctctaacactgtcctgctttcaacctcattttcaatggtttgtttacttggaaatggaattttgatatggttattttatcctaagcactgaagataataatttttggcagtagaatctgggtgggtgtgcttctagagcctattttagccactgaaaatctgctatttgcctgacttytatgcttctgtaaataatgtcttttctcttt

SEQ ID NO: 913464 - DNA, 251 bp, Homo sapiens
tctaagcaatgaataaggcattctgaattataacaaagaagatgaagaaatcaaagtgaaactttgtgccagaatgaagcttttacatgctctartataaatgctacatcttatacttagagtatattccttattatgtaatatgtttgtttatatttgtgttcacataactgttggtgtagcggaggtatttgacctgaggtttgcagtgtgaacatacagtgctaacaacaacaaaaattattctgcca

SEQ ID NO: 913465 - DNA, 578 bp, Homo sapiens
tggatttctgggtgccgatgaaaaacttcttggtattttctttttaatggtaatggaaaacccaatctacgttatgtttgatgatgggattacaaaaaatttcctagaaaggrgctagaatggggctatctgatatcaactgaaaaccagagtcagggattatggaccgtttttgcctgcgagtgtattcattgccatgtttaaatactgtttttcttgaagatttagcatggccaaaccagtttttcaagtaagcagattatatatgtgtgtgcatgtgtgtactaacctgccaccaaggatcctgagtacacttctggattaatttttctctaataccacttttcttgtatgtttctcttcttcaaaactttagaacagtttctcatgagccactgacttctgtctctcagggtgtccagatatttgctctctctgtctgtttcctaacaactcctatcagactctctgttctaccaagtaagcttcttcgttgtcattgtacatatcatgcttacttctctccctaccagaaatctaacacctattacatttgcttggttaatgaatgaataaac

SEQ ID NO: 913466 - DNA, 260 bp, Homo sapiens
tttttgctgtatatattttgaaggtacattattagatgcatagagtttcttttttttaattttttttgaggcagcgtctcactctgttgcccaggctggcgtgatcttgactcactgcaacctctgcctcccggctttaagcaattctcytgcctcagtctccagagtagctgagattacaggtgtgtgccaccacgctcagctaatttttgtatttttagtagagacaaggtttcgccatgttgaccaggctggtcttg

SEQ ID NO: 913467 - DNA, 584 bp, Homo sapiens
gtttttcttttctactgcattgtcagcctccaaattttctgaacttttatgctgtttcccttttaaaatggaatgcttttaataacaccccagtcactttttgaatgctttgctgcttaraattttttttctgccagataccctaaatcatctctctcaagttcaaagttccacaaatctttagggcaggggcaaaacaaaatgccattagtctctttgctaaaacataacaacagtcacctttaccccagttcccaaaaacttcctcatttccatttgagaccacctcagcctggacctcattgttcatatcactatcttcattttggacaaagccattcaacaagtctctaggaagttccaaattttcccacattttcttgtgttcttctgagccttccaaattgttccaacctctgcctgttaccgagttccaaagtcaattccacattttcaggtatcttttcagcaacatgctgctgtactggtatcaatttactgtattcgtccattttcaggctgttgataaagacatacccaagactgggaagaaaaagaggtttaattggacttacagttccaca

SEQ ID NO: 913468 - DNA, 622 bp, Homo sapiens
actcttgatgatgtattatactaatattgcagtttaccacatgagcagtactctgatgatgcattacagcaatatatcatcaaagcagttctgtttgttttctttctcactaatctaagtcaagcccaaaattccgttaaaaaagtaaatctttggctttcaacctgtttgctgggggggaaaaggcctttgagaaaaagtatgaaacttgtagttactataaaaatgcaaatgactgcaaaaatttaatcattattttgctttagtgttaaaatttgcattctgaaagcttgacttaaaaataataatacagatatgcaacggaattttgctttacatcagcagaacaaaattttgtattcagtgtatctacaaataagttccaaatatggacagaaaatactaaataaggctaagggcagagataatgctttattatgtagttaagtgactgataaattaaatgaaactaaattatttgtattgtctgtcttcatttaagaaaacaaacgtccaccattatacaataaggaattagcatgtgaaacttctccattttctccagtaaccaggaaactttgctatgaaygattatgtgattacaaaaaatagaaaatgtaac

SEQ ID NO: 913469 - DNA, 627 bp, Homo sapiens
gaccctcctttattcaaaggcttgccttgctattagaataaaatgcaaactgctgggcctatttggccctccataatctagaccctgctgytttttcagcttcattccttattatcacctcactatcctgttctccttcccctcatcttggaccctacactcctagtcactctgaatgacatacattttttttttgcaagtgccaggctttgcttgtgaatctccctctgggtggaatactatgtctctattctacctgaagaatatactgccatcttgcaaggtagttcaaatatcacctctcctatgaaacctttttctgacagagacacacacccacataagaattgtcttctcattcctcacagtatcccaacacatttccaccattgagcctcaatactgtgcaccactctgaggtgtatgttgttctgcttcttgtttcaggactgaggtaccaagtctcagccaaatccctcagggaaattgccctcatccagaaagaacctcttttccccagggcagctcaaattccctaattagtcagtgaagaggatagggtacaaaggatcccttgctccaaagtgagacaacaaccactttcctatcccagacccagagctccca

SEQ ID NO: 913470 - DNA, 590 bp, Homo sapiens
tactgtacctatgtgcaggtatctttcggttcccaacaatcaggataacatcacaaagttgctgctgcttcaaataactttccatctttctgaaggtttgctcagcatgatgaacagcttgatagaattcttcagagctactggagtccaaatcactttgaggtgtcattgaatggccggttgatgacagcctataaaccacacacacacacacacacacacaaaataataaagggatttataaagagccaattatctagaataacatacaggtttttatcattttcttaagaaaactaatatatctgtgtttatttttatattttaatacaacttcaataaataaaagtcgaataatctattgtgggataagtgatttgctctagggaataataaataaatggaaaagttctttaaaagaggtttaaaaatatgttgtctgtattgattaggacmttaagttagtaaacctgaaatctcacagaaatagtaaattatttacatgcctattctaaaattaattagcaatgaaatgttaatttcgttcatttgatattgaggaagatagcttaattatactattctaaata

SEQ ID NO: 913471 - DNA, 590 bp, Homo sapiens
tactgtacctatgtgcaggtatctttcggttcccaacaatcaggataacatcacaaagttgctgctgcttcaaataactttccatctttctgaaggtttgctcagcatgatgaacagcttgatagaattcttcagagctactggagtccaaatcactttgaggtgtcattgaatggccggttgatgacagcctataaaccacacacacacacacacacacacaaaataataaagggatttataaagagccaattatctagaataacatacaggtttttatcattttcttaagaaaactaatatatctgtgtttatttttatattttaatacaacttcaataaataaaagtcgaataatctattgtgggataagtgatttgctctagggaataataaataaatggaaaagttctttaaaagaggtttaaaaatatgttgtctgtattgattaggaccttaagttagtaaacctgaaatmtcacagaaatagtaaattatttacatgcctattctaaaattaattagcaatgaaatgttaatttcgttcatttgatattgaggaagatagcttaattatactattctaaata

SEQ ID NO: 913472 - DNA, 625 bp, Homo sapiens
cttgtccagaggtctaataggaagttaaggatagggttctgagatttcaaccttgccccattactggacaagcaggtcacaacagcctgaagcaatcctcaggtcccacctaccaaaacaagctactcagrtatttggctttctgttctatacttggccctgtctcatatttaggtttaggttataatttctggcaaaaagtaaaaaataaaaataaaaaaggtcacatatatttatttcagttctgactattccattattctaattaggctgatggagaataaatagaatatactcatttatcttatggcccagctgtgtcctttcatgtctccacatcagaagccacttcttcacataactcacttgcttgcttgtatcatgatgtaaattaaagaacatatatgtaaaattattactggtctttttcatttggcctaactttattagattaggcagctgttttttctttggaaaacaatttacaatattgtattattataattctctgactcaaatatagataaaatttgtttgtttttggctctttctattcatttgaaagagttttttttaaagagttctggaaacagcttatcacctttcctagaatgccagttcacta

SEQ ID NO: 913473 - DNA, 564 bp, Homo sapiens
ataatttctcaaagaacaaatggagaaactagacttcatataattccctgcaagactgagctaagatcatgccactgcactccagcctgagtgacagaatgagaccctgcctctagttaaaagaaagaaaaaaaaaaagccactgtaagatatattattaaaggaataaaaagatgaaccataaaccaggaaaaaagtttgcaaatcatatctgataaaatattatatacggaatatataaagaattttcgaactaaatttttaaaaaactgggcaaatgatttatacagacatcccacaaaagaaaatatatgaacaaaaaatgctcaatattatcagtgcttcagaaaatgcacattacaaacacaatgacatgccacaacacctctattagaactgcttgtggaaatgtgaaatggtacaactactttagaaaacaattctgcagttttatytctcctatgattcagccattctgctcctagatgtttgctcaagagtaaaggaagaatatgctgatacaaagtctgtacatgaatgtttgcagaaaatttattttgcaat

SEQ ID NO: 913474 - DNA, 521 bp, Homo sapiens
ggtgttcaggcaaatggtgtataattgaccatttatattggaaaagtatattactatatttctttatatgtgtgtgtatttttacttcccagatcaacacttgaaaaaagatccagaggcagtatgtcaatgtaataacttacagggtttttacgacattttcttgaaacatatttattcagtctaaattcaaacccttgataataatacacttcataataatttagacagattttttttcagatcatctctcaattatttccccaaaaaagaaaaaaaaagaattttcacaagatatatgtagaataatatttttatttattgctagctttggaggttaagtattataaccattgtttttctcaaagagttttaatattttattttctaaaacttggactatatccaatgaaagaatccatttgttaaagccagaagkcacaaatggaatattagccagtgtcaagcttcaatgcacacaaattaagctacctcatgcatgctgtatttctcggccagac

SEQ ID NO: 913475 - DNA, 634 bp, Homo sapiens
ctagcaactgattagattgtgcccaccagattgagggtgggcctgcctgtcccagtccactgactcaaatgttaatctcctttggcaacaccctcacagacacacccaggatcagtactttgcatcctycaatccaatcaagttgacactcagtgttaaccatcacagcaggaatgggatacttacctgaaaaaggcaagaatgcaaatcatggaaatttagtttcccagcttagactgtcaatgtatgcttttattctgggaatggatgcacaaaacctggtgatagaagattgatacatttcagaaaatgttctacgtgacacttgacaactttaagaattttttatgtacttgtctgagcatctgatgttgaacagctccaattggacaataactggtttgtttttcttctcttttccttccgcttggcttccatgtcattccagcagaagcccaattgcttctttgctcaaataggattgtacctttttataccaacttggagaagagaatgtgaataagtgagtaactgagtatgtgtgtgagcttgggtgcataccccagatatacaagtgcatttaagaagagctggaatagacaagataatcctgatatttatttagtcaaaaatg

SEQ ID NO: 913476 - DNA, 634 bp, Homo sapiens
tctatgtctttccgagttttataataaactgtaatttgattagttctctcagccaagtgttcccttcatccagttttctgcttcctgtggtactgctccatgccctctttaggtctagatttttctctttaaccttcagaggccagacttcctcttctctttgccgagcttagcttcaccaaggcttttattcactttgaaagtttcaaaaaaatccttgaaaatatttgtgatatttttatcaagcttttgccttccaacaccttgttctagttgtttgattttgttttatttgttttcttttgtgttctacattttgcacttcctagttttcccaaaacaacaagtacacttcctaccagcatttcactggctattttattcatttttgaaaagattctagttggaaactttatgcagttccttcttcagaggggtgtttcttttgtatcttgatcttcactcctcaaaaaagtctttgctactttttttgttcatatttgacaatctttattgattttaaggtagtcttaaagtttgataaaactgttgtgctgtcgttckttttttttgtctctttctagaagaaacaccctctggaagaaaatggctgatgaacaatttcttgataagg

SEQ ID NO: 913477 - DNA, 667 bp, Homo sapiens
ctctactaaaaatacaaggcacgtgcctgtgttcccagctactcaggaggctgagacaggagaattgcttgtttaacccgggaggcagaagttggcggtgagccaagatcacaccactgtactccagcctgggcaacagagcaagactctgtctcataaaaaataaaaaataaaaagttaagtgagtcaactcacagtatcctgcacaattttaatatgcaaagagtttttatgaaccagtaattatgaaccaattatcaaataataattcatagaaaaagaaattaaaaagtatatactatgaaagaatattcaggctgtgtgtggtgactcatgtctgtaatattagaactttgggaggttgaggcagaaggatgcttaagtccagaaatttgagaccaacctgggcagcatagtgagaccctgtctctacaaaaaaatttgaaaaactagccaggcatggtggtgtgtgcctgttgtcccagctactctggaagtagcaggaccgcttgagtccaggagttggaggccacagtgggcttatggcrccacttcactctggcctgagcaacagagcgggactctgtctgtattaaaagaaaaaagaagaagaaaaaagaatatcatctttactagcaatcaggcaataactgcatagtttttagaa

SEQ ID NO: 913478 - DNA, 663 bp, Homo sapiens
aacagaagcttcccaacttttgtaaatattctgartcaaacttaaatttcagcagtagatgacagcacaatgacctaaatttaacagcctagttcaagacccaatgagttcaggaggaaatggtctgaaaaagggagagtcagactgggtccaggtagtctgggtgacttgaaacatgtctcacctcccgcaggatgtcttctctctccacttcatccccaagtgcctatggtcttttctctcttggagtttaaccactctgtcaattgtcctcacaagatcttgaggtttggtagcagtggatagctacaatggatgaaattatttcactgggaactaatgaaatgtaaactttggtctctaaatttctatttgcatttataaaattgtgcttaaattgcacagtctgtttgggcaaggtggctcatgcctgtaaacccggcacttgggaggccaaggtgagaggattgcttgagcccaggagtttgagaacagcctgggctctatagtgagaccttgttaccacataaaaattaaaacattagctgagcgtgatggcatgcacctgtagtcccagcaacttgggaggctgaggtgaaaggatccgttgagcctcgaagacagaggctgcagcgagctgagatcatgccactgcattccagc

SEQ ID NO: 913479 - DNA, 593 bp, Homo sapiens
cacaattccatgaatatatacagtttgttcrtcaatttaaaactttgtttgacgtatagagcatttaagatacaatgaatctcaaatcacagcgatgctcaaattctgccataatattaggttctaggcagcccatgcccctgaaggttgggcattgtttttttcctggggttaggtctgcccagcttctaggctaaaatgttcagtcagctgtcctgtttgaggacctggtatagaccccctgctctgttctgaccctgtcttcatgctagactctcagagtccaagctctcttgtcttgaagcaattgattattcccagcatttgcctttacagcccctatcagtcctctgactgacagggttcacaaaggtgaacaaaatacaagatccctaaactcacagagcttataggatagactggagacagaagtaatagaatattcataatactaaatgtacatttgttaccgttatgagtgtgttaaaggagagaagcacagcattaacggatttcacataggctggggggtcagggaagactcacaatcgatctggatgcaggtttagctttaaacatgtcagttgggtgca

SEQ ID NO: 913480 - DNA, 593 bp, Homo sapiens
cacaattccatgaatatatacagtttgttcgtcaatttaaaactttgtttgaygtatagagcatttaagatacaatgaatctcaaatcacagcgatgctcaaattctgccataatattaggttctaggcagcccatgcccctgaaggttgggcattgtttttttcctggggttaggtctgcccagcttctaggctaaaatgttcagtcagctgtcctgtttgaggacctggtatagaccccctgctctgttctgaccctgtcttcatgctagactctcagagtccaagctctcttgtcttgaagcaattgattattcccagcatttgcctttacagcccctatcagtcctctgactgacagggttcacaaaggtgaacaaaatacaagatccctaaactcacagagcttataggatagactggagacagaagtaatagaatattcataatactaaatgtacatttgttaccgttatgagtgtgttaaaggagagaagcacagcattaacggatttcacataggctggggggtcagggaagactcacaatcgatctggatgcaggtttagctttaaacatgtcagttgggtgca

SEQ ID NO: 913481 - DNA, 629 bp, Homo sapiens
ttatgtataaatatttaaagaaataaagcatacttcacaaaagatgagtatgtagactataataaatgactatttttaatacaaacaatgaaaacttctagaaatgaaagtataattgtagaaatttcttaaattaatggacaagttaacagtggtttaggtgattagagaactgattaactggaagcagaacaggataaaatgcctagaattcaggaaagggcaagtggaggaaaagagaggagaggagaagagaagagataaaaatatgaaaaagaagtttataatttagaagatagtatgagaagagctaatatatgtataattggagccctagaagaaaggactaaagaaaatgaaggagggacaaatttaatgagataatggctgagaacttttagaattgatgaaatacatgagtccacatgctgaggaagcatattgtataccatttagggtttttttttttaaaaagcaactcatgattagatacatcagaataaagcrattcatgactagacactgcataataccaaagataaagatatatttaaagcattgataatgaaaagagagattacatagaaataaatgaaataaggcagattatgtattttttccagtttttt

SEQ ID NO: 913482 - DNA, 589 bp, Homo sapiens
gtttgcccataatgcatcatggagaagaactcctcacattttatcctcctggggggtccttgaacctcctctatctagttgactaaatctcttcctagatttggaaagtttttgtctattactttattaaataggttttgtaacgttttagtactgtctttgccctgaggggatactgataattcaaatattcacttgctttatgttgtcccaaatgtcacaaaagttttgatcatctttttatccttttttctttatttttttctgactgaactatttcaaaatacctgtgttcatgtttggagattctctgcttgatgtagtccattgttgaagctttcaaatgtattttgtatttccttcaatgaaatcttcagttccagaatttctatttggttcatttttaaaatatatatctctttggtaaatttctcatttatatcctgaattgcttttttttaaatttctttgcattatttttcagaattctttcatgtctcactgagaatttttaaaatcaatattcttwaagttcttgtaacattttaatgcaacataagttttggagagtacattatgtgtgtgattt

SEQ ID NO: 913483 - DNA, 677 bp, Homo sapiens
tagaatggtgagcctggttgttacagcaggcttgcctaaagaatttacaactgagctgagagttaaggcatgagaaggcatttaatagatgaaggaggaaggggcaagtgtcttccaagcagatggaagaaagtacgtgcagagcttgtggtgggagaaataatatggagaaacccaacacaaataataatatagtgaagcatagagattgaggggaagaagagtatgaaatgaaggtagagatataggcaggggccagagcatatagggccttattgaccatgccaggtatttttggtctttatcctaaaaatgagagagccaggaaaatgttttaaatattatgtgtgtgtgtgtgtgtgttgtgggggtgggcaaaggggaaatgttttgaccttgccatatttgttatacaaaattttctctctacctgtggcatgaagaacacattgttaagggtgccaaataagatacagaagactactttagaggctgcagcaaaagtgtgagaagaaaaaggtggtagcttggtggcaatgaagacggggaggagcgtatagaattcaagagattttcagaaggtaactgaagagatagaaatagatatatttacccaagaaggagtacagactaagaatcaaaraagggctaagtttgagccttgagggaacttaaac

SEQ ID NO: 913484 - DNA, 641 bp, Homo sapiens
actatttttaaaatgggcaaaagttatgaacagacacttctcaaaagaaaacatacaagtagccaacaaacatatgaaaaaatgctcaagatcactaattattatagaaatgcaaatcaaggctgggcgtggtggctcacgcctgtaatcccagctctttgggaagccgaggtgggcggatcacgagatcaggaaattgagaccatcctggctaacacggtgaaaccccatctctgctaaaaatacaaaagttagccagttgtggtggcgggcgcctgtggtcccagctactcaggaggctgaagcagaagaatggcgtgaacccgggaggcggagcttgcagtgagccaaaattgcaccattgtactccagcctgggcaacagagcgagactccatctcaaaaaaacaaacaaacaaaaaaggaaatggcaatcaaaaccacaatgagacaccatctcataccagtcagaatggctattatcaaaaagtcaaaaaataacagatgctgatgagattgctgagaaaaaaaaatgcttctatattgttggtgggaatgtaaattagttcagccattgtggaaagyagtctggtaatttctcaaaaaacttaaaagagagctatcatttgacccagcaattcc

SEQ ID NO: 913485 - DNA, 641 bp, Homo sapiens
actatttttaaaatgggcaaaagttatgaacagacacttctcaaaagaaaacatacaagtagccaacaaacatatgaaaaaatgctcaagatcactaattattatagaaatgcaaatcaaggctgggcgtggtggctcacgcctgtaatcccagctctttgggaagccgaggtgggcggatcacgagatcaggaaattgagaccatcctggctaacacggtgaaaccccatctctgctaaaaatacaaaagttagccagttgtggtggcgggcgcctgtggtcccagctactcaggaggctgaagcagaagaatggcgtgaacccgggaggcggagcttgcagtgagccaaaattgcaccattgtactccagcctgggcaacagagcgagactccatctcaaaaaaacaaacaaacaaaaaaggaaatggcaatcaaaaccacaatgagacaccatctcataccagtcagaatggctattatcaaaaagtcaaaaaataacagatgctgatgagattgctgagaaaaaaaaatgcttctatattgttggtgggaatgtaaattagttcagccattgtggaaagcaktctggtaatttctcaaaaaacttaaaagagagctatcatttgacccagcaattcc

SEQ ID NO: 913486 - DNA, 621 bp, Homo sapiens
ggaattttgtcaccactaggcctgctttacaagagctcctgaaggaagcactaaatacggaaaggaacaactggtaccagccactgcaaaaacacaccaaaatataaagaccaatgatrctatgaagaaactgcatcaactaatgtgcaaaataagcactagcatcatgatgacaggatccaattcacatataatattaaccttaaatgtaaacgggctaaatgccccaattaaaagacacagactgacaaattggataaagattcaagacccatcagtgtgctgtattcaggagacccatcacacgtgcaaagacacatataaactcaaaataaaaggacagaggaaggaatatttaccaagcaaatgaaaggaaaaaagaagtggaggttgtgatcctagtctctgataaaacagaatttaaactaacaaagatcaacaaaaacaaagaagggcattacataatggtaaagggatcaatgcaacaagaagatctaactatcctaaatacatatgcatgcaatataggagcacccaaattcataaaacaagttcctagagacctgcaaagagacttagcctcccacacaataatagtgggagactttaacaccccactgt

SEQ ID NO: 913487 - DNA, 584 bp, Homo sapiens
gagcacccaaattcataaaacaagttcctagagacctgcaaagagacttagcctcccacacaataatartgggagactttaacaccccactgtcaatattagacagatcaatgagccaaaaaattaacaaggatattcaggacttgagctcagttctggaccaagtggacctaatagatatctacagaactctccaccccaaatcaacagaatatacattcttggcagcaccacatcacacttatcctaaaattgaccacataattgaaagtaaaacagtcctcagcaaaatgcaaaagccagaaatcataacaaacagtctctcagaccacagtgcaatcaaattagaactcaggattaagaaactcactcaaactgcacatctacatggaaactcaacaacctgctcctgaatgtctactgggtaaataatgaaactgaggcagaaataaagaagttcttagaaacaaatgagaacaaagacaaaatgtaccagaatctctgggacacagctaaagcagtgttaagaggaaaatttatagcactaaatgcccacatgagaaagcaggaaagatctaaaatcg

SEQ ID NO: 913488 - DNA, 597 bp, Homo sapiens
atttcctggatttctgagttagttaactgtaattcytatcacttcaatatgataacctgtatcaagaccaatgaggcgtagtcgcaatgagcagacttgcagaggagaaaatggcacagacaaactaccctgagagctggatgagaacagaagaaaaaacactccccctgcttttgtgaagagggtagaaatagctttgactggttaagaatttgttttacttttaacagtgtacaattcagtcattattttctgcagtcttagagcctagcattgaatagacattaaatgattaattcattttaatttttagttactggtagaattgttcatttaagttatgtcactatattaagaactgtatcaggaataaattttctatgttcatataaccatagctactttagccagactggtttttggcatctcatatctctcattgtcaactgaaaatacacatctcataattgaagagacacactagctaacatccccagtaaaggtaaatcacttgcaaacattaatagtttctcttcatgcttttattataaggaataatgacttgagaggtgaatacttcagatcaattaagaatag

SEQ ID NO: 913489 - DNA, 640 bp, Homo sapiens
agtcaggaaacgacagatgctggagaggatgtgcagaaataggaacgcttttacactgtcggtgggagtttaaattagttcaaccattgtggaagacagtgtggtgattcctcaaggatctaaaactagaaatatcatttgacccagcaatcccattactgggtatatatccaaaaaattataaatcatgctactataaagacacatgcacacatgtttattgcggcactattcacaatagcaaagacttggagccaacccaaatgtccatcaataacaaactggataaagataatatggcacgtatacatcatgtaataccatgcatccataaagaaggatgagttcatgtcctttataggaacacggatgaagctggaaaccatcattctcagcaaaataacacaggacagaaaaccaaacacagcatgttctcattcataagtggaagttgaacaatgagaatacatggacacagggagggaaatatcacacactggggcctgttgcggggtgtrggttgggtgaggggtagcattaggagaaatacctaatgtaaatgatgagttgatgggtgcagcaaaccaacattgcacatgtgcacctatgtaacaaacctgcacgttgtacacatgtaccc

SEQ ID NO: 913490 - DNA, 640 bp, Homo sapiens
agtcaggaaacgacagatgctggagaggatgtgcagaaataggaacgcttttacactgtcggtgggagtttaaattagttcaaccattgtggaagacagtgtggtgattcctcaaggatctaaaactagaaatatcatttgacccagcaatcccattactgggtatatatccaaaaaattataaatcatgctactataaagacacatgcacacatgtttattgcggcactattcacaatagcaaagacttggagccaacccaaatgtccatcaataacaaactggataaagataatatggcacgtatacatcatgtaataccatgcatccataaagaaggatgagttcatgtcctttataggaacacggatgaagctggaaaccatcattctcagcaaaataacacaggacagaaaaccaaacacagcatgttctcattcataagtggaagttgaacaatgagaatacatggacacagggagggaaatatcacacactggggcctgttgcggggtgtgggttgggtgaggggtagcattaggagaaatacctaatgtaaatgatragttgatgggtgcagcaaaccaacattgcacatgtgcacctatgtaacaaacctgcacgttgtacacatgtaccc

SEQ ID NO: 913491 - DNA, 640 bp, Homo sapiens
agtcaggaaacgacagatgctggagaggatgtgcagaaataggaacgcttttacactgtcggtgggagtttaaattagttcaaccattgtggaagacagtgtggtgattcctcaaggatctaaaactagaaatatcatttgacccagcaatcccattactgggtatatatccaaaaaattataaatcatgctactataaagacacatgcacacatgtttattgcggcactattcacaatagcaaagacttggagccaacccaaatgtccatcaataacaaactggataaagataatatggcacgtatacatcatgtaataccatgcatccataaagaaggatgagttcatgtcctttataggaacacggatgaagctggaaaccatcattctcagcaaaataacacaggacagaaaaccaaacacagcatgttctcattcataagtggaagttgaacaatgagaatacatggacacagggagggaaatatcacacactggggcctgttgcggggtgtgggttgggtgaggggtagcattaggagaaatacctaatgtaaatgatgagttgatgggtgcagcaaaccaacattgcacatgtrcacctatgtaacaaacctgcacgttgtacacatgtaccc

SEQ ID NO: 913492 - DNA, 564 bp, Homo sapiens
ctgcccaaagtaatttatagattcaatgctattcacatcaagctaccactgatgttcttcacagaacaagaaaaaactattttaaattacatatggaaacaaaaaagagcccatatagccaagacaacctaaamaaaaagaacaaagctgtagacatcacactacctgactttaaactatactacaaggctacagtaaccaaaacagcatggcactaataccaaaacacatatatagaccaatggaacagaacagagagctcaaaaataatgccacacatctacaactatctgatcttcaataaatgtgacaaaaacaaacaatgggaagagtatttcctatttaataaatggtgtttggaaaactggttagccatacacagaaaactgaaaccggactccttccttacaccttacacaaaaattaactcaagttatattaaagacttaaatataagacctaaaaccataaaatccctagaagaaaacctaggccataccattcaggacatagacatgggcaaagacttcatgactaaaacatcaaaaacaattttgacaaaag

SEQ ID NO: 913493 - DNA, 577 bp, Homo sapiens
ttaaaaactcaggaaacaacagatgctggagaggatgtggagaaatagaaacacttttacactattggtgggagtgtaaattagttcaaccattgtggaagacagtgtggcaattcctcaaggatctagaaccagaaatactatttgatccagcaatgccattactgggtataaacccaaaggattatatatcattctactataaagacacatgcacacatatgtttattgcagcactattcacaatagcaaagacttggaaccaacccaaatgtctattaatgatagactggataaagaaaatgtggcaagtatctaccatggaatactatgcagccataaaaaaggatgagttcatgtcctttgccgggacttggatgaagctggaaaccatcattcttagcaaattaacacagtaacagaaaaccaaacactgcatgttctcactcataagtgggarttgaacaatgagaatatatgggcacagggaggggaacatcacacactggggcctgtctgagggtggagagcaaggggagggatagcattaggagaaatacttaatgtagatgatggg

SEQ ID NO: 913494 - DNA, 577 bp, Homo sapiens
ttaaaaactcaggaaacaacagatgctggagaggatgtggagaaatagaaacacttttacactattggtgggagtgtaaattagttcaaccattgtggaagacagtgtggcaattcctcaaggatctagaaccagaaatactatttgatccagcaatgccattactgggtataaacccaaaggattatatatcattctactataaagacacatgcacacatatgtttattgcagcactattcacaatagcaaagacttggaaccaacccaaatgtctattaatgatagactggataaagaaaatgtggcaagtatctaccatggaatactatgcagccataaaaaaggatgagttcatgtcctttgccgggacttggatgaagctggaaaccatcattcttagcaaattaacacagtaacagaaaaccaaacactgcatgttctcactcataagtgggagttgaacaatgagaatatatgggcacagggaggggaacrtcacacactggggcctgtctgagggtggagagcaaggggagggatagcattaggagaaatacttaatgtagatgatggg

SEQ ID NO: 913495 - DNA, 551 bp, Homo sapiens
ccaaatgtccatcaataatagactggattaagaaaatgtggcacatatacaccatggaatactatgcagccataacaaaggatgagaatgagttcatgtcctttgtagggatatggatgaagctggaaaccaccattctcagcaaactatcgcaaggacagaaaaccaaacaccatatgttctcactcataggtgggaattgaacaatgagaacacttggacacagggtggggaacatcacacaccggggcctgtcatgaggttgggggaggggggagagatagcattaggagatatatctaatgtaaatgatgagttaatgggtacaggaaaccaacatggcacatgtatacatatgtaacaaatctgcacattgtgcacatgtaccctataacttaaagtataataaaaataaataaataaacaaataaataaaaataaaaaggtaaaaagaaaaaaaaaaaaggggagtttccytgcacaagctctcttctcttgtcctctgccatgtgagacatgcctttcaccttccactgtgattgtgaggcctc

SEQ ID NO: 913496 - DNA, 633 bp, Homo sapiens
attttaagatgagacctgaagatgagtagacatcaaactgataaaatttcagtggggaggatttacagctcttcaaacattgtgaaatctttacatctcctgagttcaccacattgccttgcactacataggcactcaataatgagaataaataaatctaaaacttaacttaatttattaattgaaatagttttctgtttcctggggttaggcatggggtcaggtgggtgccaaggaagtggtgtcaggggagggaagaatttcctacagcatcctctgcaaatatcactggctgtcttcagagtcctccctcactattgcctaattttccctcagcaggtatccagagctgcctcttcagtcaaactgagtcctttggcacaaacttcctcaatttcctatgtccactctgcaaacttcctttctctgccctcagcctcctctgatcttatcactaatcctggaagacaaggcatctcttctccccagactgattttcccacctatgcacttgatccaatcctcttggcccttttcaggactgtgttcaaactgttgaatctaaagaaatcctctcttttgcttwtgtccttggtggaatttggctctgttggccatgttttattccagcct

SEQ ID NO: 913497 - DNA, 610 bp, Homo sapiens
atattatcttcaatataaactataatawtctggtctgaacactcttcctatcttatctgtatatactcaaagggagcaatttctcatgtttagcaaattgttcttcaggtaatttgttctttaggttttttgtacaaaagtacaaaatagttatcacagcaaactttccagtgttttttattttgaagctatatattttggagggaacttggttttctttttatttttattttttgccatgtcaggcttgagcaggatagcaaatatataaattgagctctctaattataatctcaatatatgaattcttgctaattaaaatactttgcaccagcaaaaacaatttccacatatgtgtttaggtggtagttaagtaactccatataaaaataagtgcactttcccctcctttcttcagtgactagaaaacttccatacttttaaaataatcaaataataatttagagagcaacagctctcaactctttgctggtgcttatcacactgcctttcttcactccattcttagctctgctaattccttcttgtctgtaatgataataagggaatgtgggtgggtcagcacttctgtgtaggtcccctttccaaa

SEQ ID NO: 913498 - DNA, 322 bp, Homo sapiens
ctatgtgtcaaattattctaatctcttaaaaagtttaagagctaaaatacaacacaatgactacaggaatgcctttgtccttttctgggtgggtacacctaaggcaayttctttttctcttctttgttctcttcttctttcttattcttaaatcatcttcaatattggacagatgacagcactgtgcctgcctcaagatgtttctgactttttctttttctttttttctttttttttttgagatggagtcttgctctgtcacccaggctagagtgcagtggcacaatcttggctcactacaacttccgcctcctgggttcca

SEQ ID NO: 913499 - DNA, 359 bp, Homo sapiens
gaagacaagactccagaacttcatagccaatatcttcacatttctgaagttctgtcatatgaaaaagcaaytggacttattctgtggactcccactgagtaggatgcagaataaggggtagaagttacaggagtacgataaagtgtgataaaactgactttctgaaacataagttgttatatgttctctttatggttttattttaggaatgtatgtaaaaaagtctcctattgtctaagataacttcaagcttcctgttatatttacagcaaccctaacaaccagctcaatatggtaagatcaaacgggaaatgccatgtctcaataatttgaattctagaaacttagattctagtctt

SEQ ID NO: 913500 - DNA, 579 bp, Homo sapiens
ctgagaagaatgtatattctcttgatttggggtggagagttctgtagatgtctattaggtccasttggtgcagaactgagctcaattcctggatatccttgttaactttctgtctcgttaatctgtctaatgttgatggtggggtgttaaagtctcccattattattgtgtgggagtttaagtctctttgtaggtctctaaagacttgctttatgaatctgggtgctcctgtattgggtgcatacatatttagaatagttagctcttgtcgttgaattgatccctttaccattatgtaatggccttctttgtctcttttgatctttgttggcttaaagtctgttctatcagagactaggatggcaacccctgcttttttgtttgtttgttttccatttgcttggtagatcttcctccatccctttattttgagcctatgtgtgtctctgcacatgagatgggtcccctgaatacagcacactgatggttcttcactctttatccaatttaccagtctgtgtcttttaattggcgcatttagcccatttacatttaaagttaatactgttatgtgtgaat

SEQ ID NO: 913501 - DNA, 646 bp, Homo sapiens
tcttggcttgacttttgttggtgtataggaatgctagtaatttttgcacattgattttgtatcccaggattttcctgaagttgcttatcagcttaataagcttttgggttgagactatggggttttctaraaatatgatcatgtcatctgcaaacagggataattgacttcttctcttactatctgaaagttctttatttctttatcttgcctgattgccctggccagaacttccaatactatatttaataggagtagtgagagagggcaaccttgtcttgtgccagtttccaagggaatgcttccagcttttgcccattaagtatgatattagctgtgggcttatcatatatggtgcttattcttttgaggtatgtttcttcaatacctagtttattgagagtttttaacatgaatgaatggtgaattttattgaaagccttttctgtatcttttgagataatcatatggttttggcctttagttctgtttatgtgatgaataacatttattggtttgtgtaggttgaaccaaccttgtatcccggggatgaagtctacttgaccgtggtggatacgccttttgatctgctgctcaattcggtttgccagtattttgttgaggatttttgcatcaacattcatca

SEQ ID NO: 913502 - DNA, 651 bp, Homo sapiens
aggcagaagaatcgcttgaacccaagaagtggagcttgcagtgagccgagatcgtgccactgcactccaktctgggcgacagagcgagactccatctcaaaaaaaaaaaagtactaatttcactatgtttcatttccttatacatttataaccaacagtaagagatttttaatgttttggccaaaatttttaaatgacacagaacagtcgatgtttcacatggattatttaggtcactttacagatctttagcttacatagtgatttgtatggccctgcactgctgtgcaaagagaggactgtctgtgttcttaaccagtaagaaggagggcaagaaagaggttctcagccagatattgcgtatgtaataaaatgatgggagagggaatagcactttagatatgaaatgtaccctgtggggaagctatttgaacaacaacaacaaaatagcttaatttaacctgatggagtacactcagccaccttctagatgtccctgcttattcttcaaatcttctcttttgtggccccaaagaatgattcactctctggagtgaaaaataaccgttgctttctttgcctggaactttaaactgacttgtgctgtatcatccaaacctgttcaattctctcttttctattactcagtga

SEQ ID NO: 913503 - DNA, 654 bp, Homo sapiens
tttcattttaactgtggaccaaaaaccctgaccaaaaagartgctgggatatgtgtgctgtcattttattcaccacaatgttaaatagaactgtgacatgctagactgattctggataaattgtcttttactggcttgataaaaggatgctctgaaggaaaaattgtgagacaaggaataactttcagaaaagtctgaataaagaagtttctctaattcttaatagagtcagtataattccaagggctaaacaaatgctacttttatgcaaatttattgcttcaaatgttattgtaataatgtggcacatcaattgatattttgaggatctggaaactttttttaatttgaaaaatgtatagctatatccttggtcatcccttatgcctcaaaatggtaaacattcatgggttccctggtaagtctctagtagtctgcattttattttctctgataatcataaccatggacttggtaagtgtcaggtgctatgcaaagctttttacctctattattgaaagacacattttattttcttagttgtatgttgagaaatttgagattcaggaagtctagggagcttgtcaaaagtcacaattagtactaaagctgggattcagttatgcctgaccaaaagtgttctgtcctttttaa

SEQ ID NO: 913504 - DNA, 620 bp, Homo sapiens; identical to SEQ ID NO: 912651

SEQ ID NO: 913505 - DNA, 665 bp, Homo sapiens
tgctactttgtttgggattttaaacttactctaaaatagtcagtgggcacastgatttttttttcatttctgaattatccaatctgtcacgtggtaggatttttctaattgatatatatggaacagcttagggactcttgaaacagtgtttctaaggattctacctccgaatattaacatagataaattatatcgtggctttaagagaggtacctgtaatcttctgtgactcatattattgctctggaatttatctctactaagatattaaagtacgacaaaaggtaaaagagtttaaatgttgcttaatcatctattagctatataaggctagagaattgagttaacctaagtctcagtttccttatatgtaaagtgggtataattttttctgcctcatttggttcctattaggattacgttaattaatgtaatgtaatgtagatgtagtgtgatgtagatgtaatgtaatgcagatgtagatgtaatgtaatgtagaatgccatatacaaaattcatacccaaatattgtagatgggattacattcataccttaaatatcttttgctgctttacctcccctgccaatttagtcattataggaagatttagtgtcagtaaatttgtattacatctgaaaactaaacagaaattcttcatgaaga

SEQ ID NO: 913506 - DNA, 609 bp, Homo sapiens
tacatgttcctggagtgaaagactcaaaatagtaaagatcttcattttatccatattgatttatattattaatgaacaaattttattaaaaatcccattaagatatttttgtagatacagagaaactgattctaagatgtgaccctaatctaaacagaaaattaattttgttatatatacaccttatacatgtaccccaaagataattgtatacaatattttaaataattatgtgcatgaaacggagttcacaaccaaccaaaagcaaaggtgtcactgtctcagatgcccatgtggacaatctgtggttgcttgacaattaccatcattcctgactctgaatttatatgctacagataagcaatcattttattacatttattcacacataagtacttaacagtaaaaaagataacatgccattaatactatgaacaaatcgtgtgttcaggataactaagcaacaaagtagcatcacccaccagaatacctgtatccratgttaaacaacagcaacaccaaacaatggctgcagtcttcacctacaatgctgtacagatgagtgtacattgtattctatatttttagtcgcaaagtaacatcagaagc

SEQ ID NO: 913507 - DNA, 606 bp, Homo sapiens
gtggagacttggacctgcactgtcacttagagagggtgtcacttaaacagatctgtctagayctgcactttctgtagcagagaaagtatagtgccttatcctctagccagtaatatgttcacggttgggtcccttagaatcctccctggttttgatatgcctgtgctgagagatagatagaatttctctattggagctaccaagttgagagtaggatggtaattcgaaagagtagagaattaggctattagacaaaatatggatatggagagagaaagagagccagccaagcagctagccctaccagcatcatatgactttgtgtattcagccccacctggagttctaacccagaatgtcttggttatatgaaccaataaattactgatttatttatttgctagaggtaatatagaagaaggttttcatcactgaaaactaaaagcagtctgactgacagccttgtttcatactatccctgtctacttttaaagctgttcatttgctccatgctaacagctaatcttctctttacatttaatgcgtgcggatctcctgaatgtctattttcacatggtggttattttgcccagtccttttgcctgc

SEQ ID NO: 913508 - DNA, 418 bp, Homo sapiens
tgaggcttccccagccaaatggaactgtgagtcaattaaacttctttyttttaaaaattacccagtcttgggtatctctttatagcagcatgcaaatgaactaatacagtaaattggtaccgggagtggggtgccgctgtaaagataaccgaaaatgtggaaggaactttggaaatgggtaacaggcagaggttggaacagttaggaggactcagaagaagataggaaaatgtgagaaagtctggaacctcctagagacttgttgaatggcttagaccaaaatgctgatagtaatatgggacaatgaagtccaagctgaggtggtctcagatggagatgaggaatgtgttgggaactgaagtaaaggtcactgtttctatgctttagcaaagagactggtgacattttgcccctgccc

SEQ ID NO: 913509 - DNA, 635 bp, Homo sapiens
aaagatggagagacaacttccattgaaaatctgggagggggttgtaagatcaaatgcaatgaaacagttctacaaygctgtaagtaaatctgagggactagttacccagtatatgttataagggaataaatgggttagggaaagggtggtgggcgttccaggaaaccagcactagtgggccattccaggagaaagagaagtatctggacattgatattcactgacctctgtgatcaagagggcttcagtgctgtcttgccgtgtccccagcacaaacagcccatgtgactctgagctaggtggggcttgcattctcatgtttggatgacccacatatgtgcacacagtgggagtcttatatgacttttcccctccatatgtgaaaaccctctctgctccatagaggatgtcctttacaagatgttccttggcttttcttgtggtagtctgggtggaagtggtgagtgggaatggaggtaaggagggagacaggtgagggaactccctagcaagccagcttagtgttcacgtgtggttacagaacatgtcctagatcagattgagaaattcctgtctagagtcagctcctgcctggctgtgtgacctcaaacaagtttcttcccttctctgtgggc

SEQ ID NO: 913510 - DNA, 566 bp, Homo sapiens
tgtttaagttccttacagatgctagatattagcatccttgccttgtgctggtttccaaggggaatgtttccaacttttgctcatttagtatggtgttggctgtgggtttgtcatagatggctcttattattttgaggtatgttccttcgatatctaatttgtttagaatttttaacatgaaggggtgtcgaattttatcaaaaggctcttctgcatcaaaagtcttttctgcatctattgagacaatcatgtggtttttgtctcgagttctgtttatgtgatgagtcacatttattgatttgcatatgttgaaccaaccttgcatcccagggataaagcctacttgatagtggtggataagccttttggtatactgttggatttgatttttcagtattttgttgaggatttttgcatcaatgttcatctaagcatactggcttaaagttttctttttttttgttgtgactctcccaggttttagtatcaggatgatgytggcctcacagaatgagttggggtagagtccctccttgtcaactttttggaatagtttcagcaggaat

SEQ ID NO: 913511 - DNA, 595 bp, Homo sapiens
tgtctggagcacccagcacagcccctggtgcmttgcaaatgtgtttcgcatgagtgatgctaaacacaaggtaaaacagaacaattttggataaaaatcagaactgggcccctaagtggaacagagaagatgttatcaggcatctgtgaggaatggattgttccagttgaacactggatttgaaggcaagagagagatgctctgatgttcctgtgtgatgaggacacatttccttttaggctccagagacaaatcttttaggttagaggcagggcagttcagtggaaagagctctggattctacatgggtgacccaatgctgatgctctctaatggatgaccttgagctagtcatttaacttctctgcaccttagttttatcacctataaaatgagaatagtaatgtctgctctgctttttcatagagttattatagagatcggagaaagagagagaggaagggagagaaataagattaatgtgaaagggctttaagaagctgtaaagtggtgcagatataaaatacgcccgaaactaaacacaaagagtaattaattctgggccattctctcaggaccattggatatttccaat

SEQ ID NO: 913512 - DNA, 633 bp, Homo sapiens
gagctcttgtctatttcctttctgtttctcattcgttccagataagggtcttctgggtgagttgggggtctcacgactagtactwacgtggcttgtgatccctgtgagccacaactattaccacgggacattcatgaggtcacatgttgcccccaagccagggcttttttccttctgcattacttgaacaaagtgctctgcacacactgccctagggaggaagcctactcctgaaggatactggcagtggttccttggaagaacccgcttttaagatgccacattgaataaggactggtctttgtgtgagagtgctggttccgcctctggagggttgacagagcggtggatgggagcaggcatttgtcttcatgtggagactgatatagggcatgtccaggtgacatcatctagtgggaaaagctagtcggttacttgagttagccaggtcacaccagcatacattcattcattcattcattcattcattcattcattcaacacagtggctctccactgaagctgtacccatggagcacctggggagctttataaataaatagggatgcccagactctgccccagtcagaatcttctggaggtggggcccaggcttgtgtatttctaaatacc

SEQ ID NO: 913513 - DNA, 610 bp, Homo sapiens
gaaccacatgctgctgatagggtatctccagggatctcaatagtacagttctatgtttgactcttcgtagaaactgaaaacaagcatcatgctttattacaaagaagctctttcacttactgtttattaaattgcatggaattggactcaatttggttttttttcttagtctttctgttccttccttcccctttctgggcctcggtttcctgaagaagactgttctaggtagtttttatttcagctctaaaatttcatgatttagtaattatatgtttaattaactaatttatttttattttatttattgagacagggtctcactctgttgcccaggctgaagtgcagtggtgtgatctctgctcactgcatcctccacctcctgggcttaagcaatcctcccacctcagcctccccagtaacttggactacaggcatgcaccaccactcctggctaatttttgtatttttagtagagatggggtttcgccatgttggccaggctggtctcaaactcctggcctcaagtgatccatccaccttggcctcccaaagtgctgggattacaggcgtgagccayatgtttaatttacaaaccaaagagaaagta

SEQ ID NO: 913514 - DNA, 665 bp, Homo sapiens
ttatgagtttaaattttccctggggtgcttctcaattggttaatattatcacacctatatttgacttatctgacttacttattttcacttagtttgaaaataaattgacttakctgtactaactagtcccttagaaactttttcttttttgagggggtggggtgtggaaaggggggctgcctagattctggaaatatctttatctccttctgataagcctttatgctgggagcagtggacttcaagataaacaaactaaaaaaggcccccccgagaatcttaatttgttcaaattaaaatgaatgtaggaagataataaagctgttttttaaaagctagtctcaactttagcataggagtttaaccattccattgggaaaattacatcaccgttacatttaggattaatgaaaaaatagtaattattcaagttgtaagattttttctttttttggcttctaccattgtgaatacaatatgaattcaatagtgcaaattcttgaactgcaactgagattagataatctcacaggtgtactgaataggaaagaaggttgacaaagcgatcactttgttctaatgactttatgctaaagtaaacatatcgcatcaaaaccagtattataattgaaagtcttgtttgcatttgcagaccagagttcttt

SEQ ID NO: 913515 - DNA, 595 bp, Homo sapiens
aaaattaagagaggtagaaggcttatgatggcagagaaatcttgatccatgattctgggaaagctgttcatgtctaggatgccatctgcttctggaaagaaacttcyctggttagctttaccttaaggtcttaaatggctgtacagttctaagagtctggagggccccttttgagttgcaaggttatggacccttgcaatgtgtgtggcaaggacagtctttttttgatgtcatttccggaaggctcagtttatgggttctagaacatgaaaagtttgattgtcctcagtcactggatcatggaaaccttgttttacttggtgaaaatatattccgacataatgcattaaagcattgcagcatttagtcatatcagagtttaggagtggaagatacatgaggttctattattagtgtcataagccttcaagtgactatttcataagggaccaacttagttttccagtggaagtggatctgattgtattcagttagctttatcaaatgctattgtaactataacatcttatttagatgctttacaacttgtccagtgaaacaagtgcttctgttgctggaggtctctccaggaaca

SEQ ID NO: 913516 - DNA, 575 bp, Homo sapiens
ctgcctcagcctgccgtgtagctgggactacaggcgcccaccaccatgcccagctaattttttgtatttttagtacagacaaggtttcaccgtgttagtcaggatggtctcgatctcctgaccttgtgatctgccttcctgaacctcccaaagtgctgggattacaggcgtgagccaccacactcagtcaataacattattatttatggaccaacaaacagcataagcaacagggtatcagttgtccttgccctggattcccacgggaaggacatggatggactcagatggatgaatgcacatgcattacgggataggagccctgagctcagggaatgcaaatcccttgtaaagatccctaactatgcctagtctttgttccagaaggagataccaacatgcttgaaaagatggtcaaaacaaagggcagtctgtgtctgctcgtaaagtgtgcagaaatgtgagggactcrtgaaaacatgtcacacaatactttcctcttatagtagacaagtgagtctgtatgcacatggggtactggatgaaatactttatcaaaactggtcagaaattca

SEQ ID NO: 913517 - DNA, 653 bp, Homo sapiens
ttaaggggtacatgtgaaggtttgttatgtaggaaaatagattgtttcatcacccggatactgagcctagtacccaatagttatttttcctgatcctgtctctcctcccaccgttcatcctcaagtaggcctcagtgtgtgttgttcccctctttgtgtccatgtgttctcatcatttagctcccaattatgtggtatttggttttgaacatgtggtatttggttttctgttcctgcattagtttaagcatcatggcctccagctccatccatgttcctgcaaaagacatgatctcattcttttttatgactacatagtattccatggtgtatatgtaccacattttctctatccagtctaacattgatggccacttagattgactccaaatctttgcgattgtgaattgtgttgctctgaatatatgcatgcatgtgtctttatgatagaatgacatatattcttttgggtatatacccaataatgagattgttgggtgaaatggtagttctatttttagttctgtggggaatcatcacactgcttyccacaatggttgaactaatttgaactcccaccaacagtgcataagcgtttttttttcccactgcaacctcactagcatctgtaattttttgacatttaattatag

SEQ ID NO: 913518 - DNA, 579 bp, Homo sapiens
tagtttcaaaaaacttcttgatttctgccttaatttcattatttacctgaaactcattctggagcaggttgtttaagttccatgtaattgtatggtgttgagcaattttcttagacttgaattctgtttttactgcactgtggtgtgagagtgtggttggtataatttcagttctttttgcatttgctgagtattgttttatgtccaatgtgtggttgatttcagagtatgtgccatgtggcaatgagaagaatgtatattttattgttttggggtggagtgttctgtagatgtctatcaggtccattggtccagtgttgagttcaggtcctgaatatctttgttaattttctgcctcaatgatctgtctaatatggtcagtagggtgttgaagtctcccactaatattgtatgacagtctaagtctctgaaggtctccaagaacttgctttatggatctggstgctcctgtgttgggagcatatatatttaggatagtaatgtcttgttgaattgagccttttaccattacgtaatgcccttctttgtctttcttaatctttgttggtttaaagttgc

SEQ ID NO: 913519 - DNA, 588 bp, Homo sapiens
aaatggataaaatagtaatatctaaacctcttcattggtttctataaaggtgaattaatattctaaagtgcacagatcaatgtctagcacatagtagccaagacaggtttgttaaatacataaaaccaagcaggaggaagcctgtccctaccatcctcctagtgctggtacatttttctcacctttcttaatcttgggggagaattgattttctcattctgtcttatttaacatttgagctcaatgtctaacctataactttatatatgatttatttccgtatacttctcattttatttttaaaaaaccctatgatttgatttcaaaagaagtaaaaacaaattaaatcttgttgacctaaaacttgcttctgcaacatccccactgggaatgataatataaatgcttgtgccttgagatgagaatgtcattgtttgttccttactgttgtatagmctgaagattaaataagtaaaataaaagtggaattaagaaatatatcttgtctactagtcaaagcagttcagaaactgtatttcactgttacatctagatagttgaattgtgtgcctttaagctatgaaattt

SEQ ID NO: 913520 - DNA, 661 bp, Homo sapiens
ctcttaagtgtttggaacagaggactgaggcccaggagctgaggtttctcatctcagcatctctccaagtggccacccctttttcttagtgtctctgcaaagaggcttttctgattactcctttgtatgagtctccatcatgatggctcctaaagggcagccttggttccaggagtctttttccagggcctacttcagcatctcccattgaataacccatttgtggtgtctcaggtcaattcctggaaaggcaatgtgagaggccaaggctacaaggtgcctcaattcctcctggtcagggtccactttggttcttcggtacaggaatgggggcttcatgtttaaaaaaagaaaaccaggacacaggcctgaattgtctaacgtcaatcaataggaaatcgggaagaaatgagcttggtcagacagctgggtaggtagggactggaactcattctcatcttatatttaaggaaagagaaaagcagagttcagtagcttgctgaagtcacggagaaaaaatggatttgggatgtgatgggagtctagtttctgtgtgaccttcagtgagttaattaatagtctgacatctttgtaaaccaaaaataaaattcttagcctccaacygactaaaatggacccctctgttagccaagggggccca

SEQ ID NO: 913521 - DNA, 669 bp, Homo sapiens
tgatatgctgtcgtccattttccaaagtatgacactttatsagaagtcgtagtgcacagatttccaagggtattttatctctaaatcattttgggggcttagtgacagagctggtgcaaagctgtatggagttggttttacttggacaagcactgccagattcagcactttgtcaaatttcagaaaaagacaaatataactccaagagaattagcctgtagtaatattgttattaatgtggtgattccatggggaaacagactccaaacaaccccaataggctgcttcttacttactgatgcagttaatacatattttatcttttgtatatttgtttatacctgctcataataatgttctgggtgtgtaccttctgctccccttatatttgaggacaaacaaacagctttttatgacctttataagtccttaaacaccaggtgtggtattatgcatagactgtgtggatagttcatcctgactcctgcatgactgtagtgagtgactttgatgattgctttccagtctcaggcctagcactaacttttctcctgcgttctcaactacccttctgaatatctcccgtaaaacgtatcacaggcaccccaaacacatgtagcaagctcctcacccactgtccctgctcagattgctcttcctctgtgattt

SEQ ID NO: 913522 - DNA, 623 bp, Homo sapiens
gcaatggtatttcatcagtgctctgaaaggacttgtctccttttccttayagtttaagagttccatttaagggaagaaagatgtgcagggcttcataactttcccacagtggctgctgttctcctccaggctggcaccatgaggggcacattctcaggcctctcctgtatcatttctgtgaacgcctggtgaggtttgtgagaaaaaaaaaaaaaaaaaaaggcctacaagtggatgcaatttccctttatatctcataggctccacattttctcaccagcccacacttggcctttaccaattcttttaacaatttcaactaattcttattttttaatttttttttgtaaagatagggtcttgctttgttagccaggctggaatgcagtggtgtgatcttagctcactgcagccttgaactcctaggtttgaacaatcctcctgccccagcctcccaagtagctgggcctacagtgttgtgccaccatgcacagctaattttttgacattttgtaaagacagcgtccaaatatgttacccacactggtattggactcctggcttcaaaccatcctcctgccttggcctcccaaagtgaaaaaactacaggtctgtgccaccac

SEQ ID NO: 913523 - DNA, 627 bp, Homo sapiens
caaagcaaatataaaacaataagtagatgatgccagcattgtgtgaacggtagatagtataaaatattcattgttattaccaagggtactgcatattcaatgtgtaatttccactatgttcaggctgtagccaataaaaatgagaaaagagtcaagaggacacacaaacaaacttggggctaatgttattaatttcaatggagataaatagtcacatagccatatataactgcaagaaaaacttgaaagaaaatgaagtctagccatgttatctagaagtgagagagaggatgtgttgatggatagcagataatctcagccacagacaactatttgtactgacaaggaaaatatttagttagatagtcattaatttaattttcattcctgaaatcatttatttaattatataatcttacatgattttccactatgttccaggtacctcaaaaactttattagtagaataaatatttgaaggctttttccaagtctctttttaaaaggaaytgaaatttcaaataactatattctctccctttcccacaccgatctctaacatatatatatatattttgttgtatatatatataaatatatatatgtatatatactcaactgtttttc

SEQ ID NO: 913524 - DNA, 593 bp, Homo sapiens
gccatgcagaactgtgagtcaattaaacttctctcctttataaattacccagtctccagtagttctttatagctgtgtaaaaacaaactaatacagaaaattggtgctgggagtggggcactgcgatagagatacctaaaaatgtggaaaagactggaactgggtaaagggcagaggctggaatagttgggagggctcagaagaagaaagaaaggtgtggaaaatttggaacttcctggggactggttgaatggttttgaccaaaatgctgatagtgatatggacaatgaaggtggtctcagatgtagatgaggaacttactgggaattggaaaaaaggtcactcttgctatgctttagcaaagaaactggcagcattttgcccctgccctagagatctgtggaacttcaaacttgagagagatgacttagggtatctggtggaagaaatttctaagcagcaaagtattcaagatataacctggctttttctgaaagcacacagtcgtatgtgttcacaaagagattatttgaaattgggacttawgtttaaaagggaagcagaccataaaatttggaaaatttgcagcctga

SEQ ID NO: 913525 - DNA, 643 bp, Homo sapiens
tttcactaaagaatgccataaacatcaaactaaagtatacacgtaagcacaaaatagctctggaaaccagactgcttaagttcaaatccaagctctcttaataactgtgtaaccttgagcaaattatttaacatctctttgactcagtgcctctccttcaagtagggatatcaatagtttctattttattgttatagagtaaataaataaagcagaacagcacttagcatgtagaaagagctatgtaagagctgtgtgtgtattttttatataaccaaatctaactttaactggtttcagccataaatcatccaaatcattcaaaagatgtcttataacctttacccttatgggttctttaggtaatacaatttgtatgaattatatatcatatgtattgcataatctctgatgactcttgaccattttctttcatttaactgaaagttcacagcacaaataatgtaacttcctggtctatctcctgggagtcatctttgtaggtgtcatttggtcacaaacttaagatgtatggtatgtttatacaattgctataatttgtgtttcttttgaagtcagcattggagctagcaggagacagaccctaccacaaakgcagctgcaaccacattctctccaggag

SEQ ID NO: 913526 - DNA, 473 bp, Homo sapiens; identical to SEQ ID NO: 912214

SEQ ID NO: 913527 - DNA, 619 bp, Homo sapiens
caagctattctaaatgttttactgtctccaactgtacgaaggagtcaggcttgtttagcatgtgttgctttccagataattttataatgactgttccttagcacttagttatcttccatgtgctagcaaattaatattaatgtttacactaagttctcctgattccctcctctccccgctccccacccccccccaccaaaaacgtgcaggtaagagggaatgtacagacatgatggaagaatctgcacatttactcttatataaatctttttccccataattataggaggtccagtgcttatatacacttgtctctagagtaacattcttttgtttaagtctctaaacaagattagaaaagtggaaaggaaatcacatatctcttttgtagccataaatgaaacactggaactaagccataaaaaataccaaggcaatttttttattttgttttgttttgctttgttttgttttgctttgttttgtttgtatctgggacttaatccattttctcctccatcacaacctctatacttattctgtcccacattcttccctccctcagcaagtatgtatrtgtgtatatatatatatatatatatttttttttttaaatcat

SEQ ID NO: 913528 - DNA, 607 bp, Homo sapiens
tttgaatgtcttcttttgagcaatttctattcagatcctatcccattttttaarttggcttttgttttgctattgcttgagcttcttatatacgttggatattaaccccatatcagatgtacattttgaaaatattttctcccatcctgtaggttgtctcttacctctgttgattgtctcctttgctgtgtagaaatttttcagtttgatgcaatccctttgcctatctgtttttttgtttttgtttttgttttttggctgtgcttttagagtaatatccccaaatcccttacccagactaatgaattaaggcaatttctcatgacttcttttagtagttttatacttttaggtcttatatttaagttcttaaaccattttgagttgatttttgtatgtggtatcagatatggtccaatattttttctttcccagcatgacttattgaaaagactgttccctttccattgtgtattcttggcacctttgtcaaagataaattaacagtacatatgtaggtttatttccaggctttctactctgttccgttagtccatgtgtctgtttttatgccaataccatgctgtttttactaccatagctttgt

SEQ ID NO: 913529 - DNA, 579 bp, Homo sapiens
ggagctccattgtatgttatttcttacttttcacttgatgcttttaggatcctttctttgtccctagcctttggaagtttgattattaaatgtcttgaggtagtctacttcgggttaaatttgcttagtgttccacaacccttttgtacttgaatattgatatctctctatagatttgagaagccctttaaaaaaacttctgctgggtgcagtggctcacacctgtaatctcagcactttgggatgttgaggcgggtggatcacctgaggtcaggagtttgagaccagcctggccaacatggtgaaaccttgtgtctactaaaaatacaaacattagctgggcatggtcgtgggtgcctgtaatcccagctactcagaaggctgaggcaggagaatcgaacccaggaggcacaggttgcagtgagccaagattgtgccaacacactctagcctgtgcgacagagcaakactcaaacaaaataaaaagatctacccctacctcattatctacctcctcttagtttgctcttttgaggttttttcttataagtgtattcattgtattttttttcttttatc

SEQ ID NO: 913530 - DNA, 616 bp, Homo sapiens
attagatattgttacctctgtttgtacagatgaaaaaattgaagctaaaagaacctagtaaattagtccatgatcacacagatagtaagatcagaagctggacttcaaatttgtatctgawtggatacaaaattaaagcccacaccacgtactgctgattatagttatttttgtttgaatctcatcactacacaattataagcttcttaaagacatgatggtataacacttacgttcatgtccccattgaacctaattcagacccacacggcagaacttttttaaaaattgattgaacccacttaggcttcagatatcttaaatgtaaatggaaatattaaactacaaaatttcaaattccctttcagtttcaaaactgtcttctgtggggatgatgtcaccaagatagcagaataggaggtaacctgctcatattcccccacaacaacaattctgcacctatccacagtaaaaagtctctctgtttgagccttggaattcagataggagtctgtgaaagcctagcagagcccatgacctatgagggtcattttgagagtgcagaccaatacccagctgacagatctgctctgccaaacttgcttctgggttcaag

SEQ ID NO: 913531 - DNA, 652 bp, Homo sapiens
tctagtctgcccccttggctcatctttaattagaggtaccttgagaaggacagmtgtaagcctcttgataaaatggaatcagatgctcagatcaggcctacaactgcaagattttcccaaaactaagttaattgatgtcctagaaatatttctacaagtgcctgtgaggcagtttgaggaatgaaggctggaggaaggagatttagtgcagttgctttcccctgatgacaacaacgtgatttcctccctgcaatattcctttaatgtgccctgtgtttttcggtgggatcccctctgttctggggcaagggagtgaagcctggcctactccagaagaaagtctccacagacttcatttgagaatcactgggcatttaattgaacaccaaggttttccagttgttgatattctttgcaatagagaactacaagtagaccccctctacaataatgtaatacaagtactttaggtacttgagtgcctccagagaccttaaaattgttttaacccagagccccatccaagcactccatttttctgctgaggaatctctgccaaaaccaaacgttcttgtcaagttttggaacccattagccttagtccatccatctttcttcgtgcaacataacagacagttgttctaaatcaccc

SEQ ID NO: 913532 - DNA, 652 bp, Homo sapiens
tctagtctgcccccttggctcatctttaattagaggtaccttgagaaggacagctgtaagcctcttgataaaatggaatcagatgctcagatcaggcctacaactgcaagattttcccaaaactaagttaattgatgtcctagaaatatttctacaagtgcctgtgaggcagtttgaggaatgaaggctggaggaaggagatttagtgcagttgctttcccctgatgacaacaacgtgatttcctccctgcaatattcctttaatgtgccctgtgtttttcggtgggatcccctctgttctggggcaagggagtgaagcctggcctactccagaagaaagtctccacagacttcatttgagaatcactgggcatttaattgaacaccaaggttttccagttgttgatattctttgcaatagagaactacaagtagaccccctctacaataatgtaatacaagtactttaggtacttgagtgcctccagagaccttaaaattgttttaacccagagccccatccaagcactccatttttctgctgaggaatctctgccaaaaccaaacgttcttgtcaagttttggaacccattagccttagtccatccatctttcttcgtgcaacrtaacagacagttgttctaaatcaccc

SEQ ID NO: 913533 - DNA, 624 bp, Homo sapiens
accatacactcagtgccatactgtaaaatataacctactcacaagtataaaatccatcaaattcatttcacaattcatgcccttatgcaggatakgtatgctagcaggtgcaaaatcttggagaatatattagaattctgcctactgtattgtgtttgtgaagcacttagaaaatttaccactcacttaagtacttaatggctgttggatattgttattttataccttaggaactaatatatagcattcttcaaaaagtagaatcattaatatttagaattgatagtatatggtaaaattaaaacctgcacacatattttaattttctaaggaaaaagtttgaatgaagactaaaacaattaagcttcagcaaagcataagtaagatattgtctgaaaggctactttatataacagaatctagagctgtttgggttctctcaaccatgtgcatcttctgccgtcttctggtcctttggagcatggcaggcgaattattttctttaacaagggagaaaactaaaaacaggccatttttctgtatggatatcacagactctttgttgatcttaatttttgagtattcagttcaaaattttcagcattaattgccacatgcatttta

SEQ ID NO: 913534 - DNA, 551 bp, Homo sapiens
ctacagcttcatctggggctcaaaggggcccagatgcaacttgagctgccactttggatgatgcaagccataagtcttggtggcttccacatggtgtgaggcctgcaggcacacaaaatgcaagactgaatgaagcttggcagcctctgcctagatttcagaggatgtatgagaaagcctgggtttccatgcaaaaatctgctgcaggaataagccctcacagaaaacctctactagggcagagcagagaggaaatgtggggttggaggccccatacagagtgcccagtggagaactgcctaatggagctatgagaaggggaccactgtcctacagatggaagaatggtagattcactggcagcttgcagcctgtgcctggaaaagccacagacactcaacaacctgtgagagcagccactgggactgaaacctacaaagccayaagagtggagctgcccaaggccttgggaggccacctcttgcaccagtgtgccctggatatggaaaatagagtcaaaggagattgttttggagttttaagatttaagg

SEQ ID NO: 913535 - DNA, 620 bp, Homo sapiens
catctgttcatgaggggggatccactcccatgtcccaaaaacctctgattagaccccacatccaacactaggatcaaattgcaacatgagattttgagggaacaaatatgcacgctatagcggagagttttaaaccacagagtagtattggtatttttttttttttttttttttttttttttgagacagaatctctctgtcgcccaggctggagtgcagtggcacaatctcggctcactgcaggctccgccccgcggggttcacgccattctcttgcctcagcctccagagtagctgggactacaggcacccgccacctcgcctggctaattctttgtatttttttttagtagagacggggtttcaccgtgttagccaggatggtcttgatctcctgacctcgtgatccgcccgcctcggcctcccaaagtgctgggattacaggagtgagccaccgcacccggccgtattggtattatttatattatattygaaacaatcactctagttaaaatgcagaacatagattgtagaggcgcaaaaagagaaataggaagtccaattagtgggttttgagttcattccagcaagagaaagcgatggtagcagtgaagacagac

SEQ ID NO: 913536 - DNA, 576 bp, Homo sapiens
aaatcaataaatgtaatccattacataaacagraccaatgacaaaaaccacgattatctcaatagatgcaaaaaaggccttcaataaaattcaacagcccttcatgataaaaactctcaataaactaggtattgatagaacacacattattggggaaaccagcccctgatatttcaacataggttttctattttccctaagtgtcagtcggtctgagaaataaagggaaagagtacaaaagagagaaatttaaaagctgggtgtctgggggagacatcacatattggcaggttctgtgatgccccctaagccacaaaaccagcaagtttttattagtgattttcaaaggggagggagtgtacgaatagggtgtgggtcacagagatcacatgcttcacaaggcaataaaatatcacaaggcaaatgggggcagagtgagatcacaggacaggggtgaaattaaaattgctattgaagtttcatgtcccactgggcatgcactgtcattgataacatcttatcaggagacagggtttgagagcagatgaccggtctgactaaaatttactcgtcagg

SEQ ID NO: 913537 - DNA, 690 bp, Homo sapiens
catctccacctgcatgtccaatgcayatctcaagtgcaacttgctcaaaaccaaactcctgatcttctcccctaacttgttccacttacagtgttctccaccttaggatgcagctgccatccttctagaatctcaggccaaatattttgaaatcatgttgattcttttctttctcttgaatcttcatttcatccatcagaaaattctggatactttagcttcaagatatgcccagtattccatcacttctgaccccaccaccttcaccctcatctcaactgtcacagtctctcacctggatcgtgtagtggtctcctaactggcccccctgcctccacgtggctctctgctgtctagccccaaacttgttgggtgtgatcctattttatgccctcttcttggggcacttcgccctctgacacctgtaggctgtccaaatggccatggaacttttcatatctttgttcagatcaccttctccgtgaggacttcctcaaccactctctttattgttgcaacctccctggggcatcctaatccccctaattggctgtatttcttctttttcacagcacatgctaccttctaaattctgacataagttacatatttatcatgtttactgttcactgtttgtttcccctgctagaatgttggctccttgagggcacaattttttttatttgcctt

SEQ ID NO: 913538 - DNA, 611 bp, Homo sapiens
actgaatagaccccccatacctttcagccaagacgattccaaaaaaaacaaaaaacaaaaaccctgaaaaactaggttagggcataattggaagcagggrtcagatatgctttattgtacttctctcccttgggaattcaggcacaactaacaggcattaatattaaaacagatatcttaagagtgacaaaactgactctttgtacaaataaaaaccatcagaaaatgacagcagggcttgaaataaataaaaatattttaccatttcttttatgttttttgaaatggccctgcaaagctgttccttgtgagggaaatttacattatgtagagaatgccttccctttccaggtgttttgctggtcctgatgagataagctgagagtctgtcaccttttaaaggtcggaacaggaacatttgccatctattgcctctaagaggggccacctacgagacttcctcaatataataagaacttggggggccacaacttcttttcttaaaaagtatctactcctttctattgttttcaggttttcagataataatttaattctttcaaccaattgtcaatcagaaaatctttgactccacctatggcctgtaagcc

SEQ ID NO: 913539 - DNA, 579 bp, Homo sapiens
tcctaggaatctaatgcaggaactcaggaaaggtggtaatatagtttaactctttgtcccctctaaatcacatgttgaaattagatccccagtgttggaggtgggccctggtggccttccttgtgtcttggtgccatccttgtggtagtgagtgagttcttgctctgttagttcctgtgagaactgaatgtgaaaaacaagctgacagctccctcacttctctcttgctccctctcttgccatgtgatgtctgctgcatttcaccttctgccataagtgaaagctttctgaggccctcaccagaagcacatgctgatgccatgcttcttgcacagcctgaagaagcatgaatcaaataaacctcttctcttcataaactacccagcctcaggtattcatttatagccacacagatggacaaagacggtggcaccaaaggattacakgttaactctttcaggggttcctggagagtcagggctgggcccttggccagcaagtcacatgaggcacaagctctggagtgggacaatttgggttcaatcccagatccaccatatttactggctgagtgatctt

SEQ ID NO: 913540 - DNA, 569 bp, Homo sapiens
ctacaaatctttagacacaggcacgattaagccaagttttttgccgctttatagcaaggatgacctttcctctaatttccaataccttactcctcatttccatctaagacttcaacagcattacytttaccgtctatatttctacaagtattctgttcatgaccaggtaagtaatttctaaggatacttaagttctttctacagctccccacttcttctgaagaagggtcctcaccagaattgcccttaatgcgctgtttaatgcaatatagggttttttttctagtattcacttcaaaactgttcatacacctattcattacctggttccaaaaccactgtcatatttttaggtatttgttatagcaataccaataccaattcagtaccaatttctgtctcagaccatttctgctactatagcaaaattatttagacgacatagtttatttcttacatctgtagaggctgggaagtccatgacaaagacccctgcaggtttgatgtctgatgagggcttggtctttgtttctaagatggtgccttgaacactgtgtcctcacatggca

SEQ ID NO: 913541 - DNA, 569 bp, Homo sapiens
ctacaaatctttagacacaggcacgattaagccaagttttttgccgctttatagcaaggatgacctttcctctaatttccaataccttactcctcatttccatctaagacttcaacagcattacctttaccrtctatatttctacaagtattctgttcatgaccaggtaagtaatttctaaggatacttaagttctttctacagctccccacttcttctgaagaagggtcctcaccagaattgcccttaatgcgctgtttaatgcaatatagggttttttttctagtattcacttcaaaactgttcatacacctattcattacctggttccaaaaccactgtcatatttttaggtatttgttatagcaataccaataccaattcagtaccaatttctgtctcagaccatttctgctactatagcaaaattatttagacgacatagtttatttcttacatctgtagaggctgggaagtccatgacaaagacccctgcaggtttgatgtctgatgagggcttggtctttgtttctaagatggtgccttgaacactgtgtcctcacatggca

SEQ ID NO: 913542 - DNA, 574 bp, Homo sapiens
catggcaatgcacagagaagatgtgatattggagcccccacacagtccccactgaggcacttcctagtgagggtgggagaggagggccaccatactccagaccccagaatggtaartacaccagcaggttgaaccctgcacttagaggagccatagacactaaatgcctgcccatgatagcagctgtggggactgaaccttatgaagtcacaggagcagaacaacccaagacttttggaggccaccccttgcatcaatgtgccctggatgacagacatggagtcaaaggaattgttctggagctgtgaggtttaatgattgaactgctggttttcagacttgcatagggcttgttgcacccttcttttggccatttttcccctttggaatgggagtatttacacaatggctatacacccattgtatcttgggagtaacaaactgtttttgattttataggttcataggtggcggggactagccttatctcagatgagattttggactgaggaattttgagttagtgttggaatgagttaagactttgggggactgttgagaagggatgatttta

SEQ ID NO: 913543 - DNA, 534 bp, Homo sapiens
tactttttgagcatcaaagtgatacatgaattgccattagggagagcagcatattctcccaggactcaaatcttccctgataccttagaaagtgrcattcatttctacaggtcatgagagtagcttttacctcataacattttatggggtcagtgcatctgaataacacaagactaagaggaagaaaatggaatgcaaaatgttatcagtgccatccatgttcaacacagtgattacagatacaaaaggggagtgggtgggagccatagaaagggcagtccacagggacagaaggcctatggtgaaaaactactgcctctttgggactaaatatcactatgtggtgcagcattttgtgagaaaagctaatttgagcagcatttttttatcctgaaattttgctatggttttttttttttttttttgtcttattctctttctttccaaaaatacattttggtcagtcttttgaaaataatctaagtttgcaacgaatgtaatgttatttcattgaaagaaagtatctctattccc

SEQ ID NO: 913544 - DNA, 664 bp, Homo sapiens
atttctttttggttcagtcttgggagggttatgtgcccagaaatttattcatttcttctagattatctagtttatgtgcatagaggtgttcataatattctctgatggttgtttgtatttctgttttctcagtggcaatatcccccttgttgtttctgattttgtgtatttgtatcttctctcttttcttctttattactctagctagtgatctatctattttattaactttttcaaaaaagcagctcctggattcactgacacatatcaatactaaccttaaatataaatgggctaaatgtcccaattaaaagacacagagtggaagctaaataaagaactgagacccatttgtatgctgtattcaacagatccatctcacatgcagtgacacatataggctcaaaataaaaggatggagaaaaatctggcaagcaaatagaaaacagcaaaaagcaggggttgcaattctggtttctgacaaaacagaatttaaaacaacaaaaacaaaaacaagacaaagaagagcattacataatgttaaaggagtcaattcagcaagaagayctaactattctaaatatatatgcaaccaacacaggagtgcccagattcataaagcaaattcttaaataccctcaaagagacttagactcccacacaa

SEQ ID NO: 913545 - DNA, 648 bp, Homo sapiens
tcaccctatccttaggaatgggcttatgggaagatattcttttctactctcagcctgatatggccctttcttttctcattcagggaattggcctttctctgtcagggattgattctcaacagcactaaagagctttaacgccagactgaatgggtggtcttcatggaatgacagcccacttctgaaattctaggcaagtcaacactggcttagggctgattctactacataaggataactagaatctgtattgcccaggagtagcctatagattttccttttttcattacaatagtctgttaaattagtatcaagattttatgaaaaccagtttttgcagagcgcctattcagtgtccagcattggaggagaaggcaagacttaaaaagaaacaggccgggcatggtggctcacacctgtaatcccagcactttgggaggccgaggcaggtggatcacctgaggccaggagttcatgaccagcctagccaacatggtgaaaccccgtctctactaaaaatgcaaaaattaactgggtgtggtggcaggcgcctgtaatcccagctacttgggaggctgaggcaggagaatcacytgaacccagaaggcggaggttgcactgagctaagaccatgccactgcactccag

SEQ ID NO: 913546 - DNA, 646 bp, Homo sapiens
tccttctgctattgatttccagcttcattccattgtggccagaaaacactttgtatgacatcattcttcttaaacttgttaagacttkttttgtgacctaacatgtgatctacaatggaggaagattggtatgcacttgagaagaatgtgtattctgctgctgttgggtgaaatgttctgtatatgtctgttaggtccatttggcttatggtgttattcaacttctctttttccctattgatttggatgttctgtccactgttgaaaatatggtgttaatgtcccctactattattttattgctttctatttttcccttcagatgtgtccatttttaagtatatatttaggtgctttgatgttgggtacataatacgtttgtaattgtgttttcctgatggactgacctttaatcattataaaattccttgtctctgtgacactttttgacaaagtctattctctccaatataatgtagatgcttcggctctcattttgttaccatttgtataaaatatctttttctatcccttcacttgcagtctatatgtgttcttaaatctaaagtgaatttcttatagacagtagttgagtcttattttctttcaaccacttgatatctttttattggggagtttaatccat

SEQ ID NO: 913547 - DNA, 668 bp, Homo sapiens
ttttgcttctgaaaaagacatccttttttatgctgtgattttatgatgttgtgtctatgtttaatttttttggaagttgactagcgtaatataatatttcttttaaaaaatcactcatgtcatgtggaatcaagagaaaaggaaatggaaaatattggaaaggagagggatggaaactgtttcttgccgtaggcatcttttagcttgttattcaatttctgttcattgagtaactaagaaaaataaacacttttatgtttcacttggccttataggtggtctcttataatacagaagtgccattgctggtgcattttctgcttcttatttcataaaaaagttacatgtgggctttagattgcagaggatttgggcaccacttttcttcatgcacttcattttcttattgttgatttcagatggttgcactgtagaactcccagagtcctaattaattccgagtcttggacttctcctgtttctccatgaagatacttttaaattcctgttttactgctgtaaaaagtacagtggcaaaatgctcaccccattctaatgagacactctaaagcaccttcacaccttttctctaacacrcatccaaagctgagaagctctcctctaaacactgcatcattttgacccagttaatttctagatttttctta

SEQ ID NO: 913548 - DNA, 582 bp, Homo sapiens
ttcaccttctcagcgagagccatctctccctcctttagcccttcctcaaagtagcaccaactcaataacagggacaacttgcaaattgctacagaaaaaggtcctgaaccagctttagactccacattcaggaatctgccatcatcccatcattattgctacccctacggagaggtacctgcacaggattcacttaagtcttccttacctagagcattctattctaaagccttatgaaagctttccagattcctcaaaaacttactggtatgttctttaacagagactcctggtccctcgagatttggtgtctgcacaaaaacagtgacaccataatcagtgtctggtgaaaggccagtgaagcagtgactggtttctgatccacgcactgtaatttcttgtccccttgttcctgattatgacaacaaaggaaaatgccagtgtcatcaccaattatatttcaagaaaattttatatmgcattgttataaacaaaatggcatcttctttactgaaatttaaaatgtttccactacatgctccagatcatttttttcttttttacacacataccatctgcagg

SEQ ID NO: 913549 - DNA, 609 bp, Homo sapiens
agcatttagaactcaaagataccagcttttaatccatattactattattgatttgaatatttataatatatgttccattttagtacatatggtagattatgtatgctaatattttcatattttaaatgctgaatttagcaatacagatgattttgtaagtgacaaataaaaattgtatgtattttcagtgtacagcatattttatatatatatccattgaaaaatgattaaatcaagcctgataacatatctgtcacctcacatattgtttgtggtgaaagtatttaagatctactatatcagcaattttctagtatcaatacattattattaactatgttttactatgttgtacaataaagctctggaacttgtttatcctgtctaactgaaactttgcaccctttgaccaacatctccccatccctgcacctgcccccacagcccctgtcaaccaccattctatgctctgtttctgcaaatttgactgttttagattccacatataaatgaggtcacaatatttgtttttctatgctgggcttacttcacttagcacactrcacttcagttttattaggatttccttctttttataagactgaatag

SEQ ID NO: 913550 - DNA, 627 bp, Homo sapiens
aagtcaaagaaacataaacaaaacccacacagtctgaagaaacaaagccagsttcaaaaccagacttagacatgatacagatgttgagattaggaaagcaattaaacataactatggttatacatatatacattataatttgccaatattcaataaaaataaaaaagctctaataaaaataagaaaggagacaatatgcaagaacagattagtaccataaacagagagacagaaactctaataatgaatcaagaggaaatacaagaaattattttaaattctgtgcaataaatgaggaatgcctttgatgggctaatcagtagactaaaaaccgctgaagagtcagtgagtctgaaaatacagcaataggaacttcccaaactgaaatgcaaaatacaaaaataaaaaatactgaatagttaagaactgttagcaaatttcaaaaggtataacatatgcgtaatgggaataccagagagaaaagaaagaaagatagaatagggaagaagaaatatttgaagaagtaatggcagagaattttccaaaatgaatgacagacttcaaaccacagattcaaatagccagagaacaccaagaataaattaaaacaaaaaatccatgcacagg

SEQ ID NO: 913551 - DNA, 601 bp, Homo sapiens
tgtatactatttacttactcacctctgttctcacctatgtctaagaatctttctgtctcttccttacatgaggatagcatgtgtaagaaaatcttgggtttggtggagaggtagatattcttgctagagaagagaagaatgtgttctaataatcttgtagaacatattttctttgcagtagaaagataaccaacaatttttctaggttgtattaactatagatcttgcctgttcaattccagaaataggcagtatacaattggcaaaagatctccttgttgtctttcaagatagaaactatgcagcaggaaccatcaatgtgtctgtcagttcagttccatagacctagttaacaagtggacatcccgactgcagtaggactgttgctcttaattacagtagtgttgcaaattttcttctatttttccccctgtgtttttaggggtgttttatttagaattttagagactttatatcaatgactgttaacctggtactatttttcaatacacaatcttaaccatctttgaattctggttgtckagtggagtacctgaaacgtcagccctaacctccaaacttgcagaggatgacaatgccc

SEQ ID NO: 913552 - DNA, 601 bp, Homo sapiens
tgtatactatttacttactcacctctgttctcacctatgtctaagaatctttctgtctcttccttacatgaggatagcatgtgtaagaaaatcttgggtttggtggagaggtagatattcttgctagagaagagaagaatgtgttctaataatcttgtagaacatattttctttgcagtagaaagataaccaacaatttttctaggttgtattaactatagatcttgcctgttcaattccagaaataggcagtatacaattggcaaaagatctccttgttgtctttcaagatagaaactatgcagcaggaaccatcaatgtgtctgtcagttcagttccatagacctagttaacaagtggacatcccgactgcagtaggactgttgctcttaattacagtagtgttgcaaattttcttctatttttccccctgtgtttttaggggtgttttatttagaattttagagactttatatcaatgactgttaacctggtactatttttcaatacacaatcttaaccatctttgaattctggttgtcgagtggagtacctgaaacktcagccctaacctccaaacttgcagaggatgacaatgccc

SEQ ID NO: 913553 - DNA, 599 bp, Homo sapiens
gttcatgtgtctttatagtagaatgatttataatcctttgggtatatacccagtaatggacttgcygggtcaaatggtatttctgcttctagatccttgaggaatcgccacactgtcttccacaatggttgaactaatttacactcccaccaaccgtgtaaaggtgtttctatttctccacatcatctccagcatctgttgtttcctgactttttaataattgctattctaactggcatgagatggtatctcattgtggttttgatttgcatttctctaatgaccagtgatgatgaacttttttttacatgtttgttggccacataaatgccgtcttttgagaagtgtctgttcatatccttcacccactctttgattttttttttttttttgtaaatttaagtttcttgtagattctggatattagccctttgtcagatggatagattgcaaaaattttctcccattatgtaggtttcctgtttattctgatgctagtttcttttgctgtgcgaaagttgtttagtttaattagatcccctcttcaattttgacttctgttgacattgcttttgacgtcttagtcgtgaagtttttgc

SEQ ID NO: 913554 - DNA, 592 bp, Homo sapiens
tgaaaccccatctctattaaaaatacaaaaattagccgggcatgatggcacatgcctrtagtctcagctacttgggaggctgaggcaggaggatcgcttgaacccaggaggcggaggttatagtgagccaagattacatcactgcattccagcctgagcaacaaagtgagactccatctcaattaaaaagaagaaaaaaggattatccggacttattttgtttgatttaattctgcgcatttgatatattttggtgaacatatgtgcacattactattgggtgcatacttggggtggaattctgagtcagagtagccatatgttcagctttagtagactctgtgacaaacagctttctaaagtggttataccaatttacacataccgccagcagtgattgagagttccagttggttcacatgctcaacaacttttggtgtgtcagctttttaattttagccaaactagtgggtgtgtagtggttggtgtcttgttttagtttaaatttgcatttccctgatgactaatgaagttggacatgttttcatatcttcattggccattttgatacccttttttgtgaattgcccat

SEQ ID NO: 913555 - DNA, 633 bp, Homo sapiens
taactttttaaaaaattcttttgtagagataggatcttgccatgttgcccaggctggtctcgaactcctgggctcaagtgatcttcccacattagcctcccaaagtgctgggaatacagtcataagccaacttgcctggcctaatatctttcttaagataagaccagtctggatcagagatgaaaaaagcaataaacatttatcaatatatgctgtgtcactgtgctggccactagatatgcaaacataaataaaactcaatgcctgctctcaaggacattatagtgggagagaacgatataaacacataagtgcgttactgagcctttaagtccctcagaagttagtggaagagaaaaaaaggttcaatacaggtaagtatacgttttacatcaggtgttcatgtacagggatttcaagccacaaaaaaggagcaatcaattctggggaaacccagaagagaaagcctagagagaagaggtagcatgtgaattccccagacaatgaargggcctggagtcaagggaagagggaggagatatttagggacaggaaaaagtagatgtacaaaggccaaagagtgtgaatgggcagaggaggatgtaagggagaggacttggttttctgctttgt

SEQ ID NO: 913556 - DNA, 659 bp, Homo sapiens
gaagcccaaaccacaagcagagaccacattccctcagaaaccacttcaaagccccaactgagctcccagccaacagagcrtatcaactgccagccaggtgagtgagccaccttaaacatctagcccaactgaactgtcagatgtttgcagttgcaatcaacaccagagagcgacagtatgggagctcctaaattataactgtccagctaagcccaggtaaccaaacaaccctgttttaaaacataaaatttggggtagtttgttaaacaacagtaattaaaacaactggcatattcttccttattcaagacaaaagaccataagatataattccatttatatgaaatgtctagagtagacaaatctacaaagacaaaaattagattagtagctatctaggttagaagatagtggtgggaagtgatagataatgggcatgggcatttttatgaggtgataaaaatgtgctaaaattgattgtcacaatacttgcagagaattgtgaatatactaaaaatcattcaattgtacactacaaatatgtaaattttgacatgtgaatgttaattatatttcaggacagccattacttaaaaaaaattagactgaaaaaaattaggacttctgctttcagctccaacacatgaacagcttggaag

SEQ ID NO: 913557 - DNA, 677 bp, Homo sapiens
caaaatgtgatgcatgacccaaagctaatcagaaacacttaaccctttgaaaggaggyagcaattacttgcttatttctttttctttcctctttttaagatagaaaatacatttcttacttcatctacaatttttaagacaccttgtttctgttttgatgtacaattattttccttgctggataagttgaagcgtaatcattcatcgtggctccctcttaaagtgtagagtgtttgctttaaaagcatctcatttctcagagagacaatgcaggaacagtgactaattttgttacccattttttaatgtttttgtcctgtgtagatatttacttcatcaaacagttcttttattattagtgtccctggcccaatgataatggcttgggatattcatgtttccacaaatcaagacaagcttaaagccctcaatcatatttcctgtagaatgagatttaatttcatgtcagtttccttttctgatgaccagtgaggaagatgctctgggaaacagaatgctagtgacaggttcactttaatggagcgaaaacctgagcaatgtagaggagatggtggcattcctgggccaccacactcctcttcacccaagagaagtcaagtcataagggcttatgtttctttctagttcttacaaaaatagtactcttagattgtggt

SEQ ID NO: 913558 - DNA, 491 bp, Homo sapiens
ggaactctatttttaaaacctaatcacaaaacattatcacatttaaaaattaacaatcatttctcagtagcaacaaatccaacagtgttcaaatcctcctggttgccttatatgtttttattttacagtttgaatcaggatctaagtatggaccataaatttcagttgtttctacatctcttaagtcttttccactctatatatgaccactcctttctttctttcattttttcttttattattgtagttgttactgaagaaaatgggttgtttatctgggttttgcagattgcacccccatggtatgattaacatattcatttattctctatgtatttcctataatttaataattagatctagagtagtgaagagtagtgatctgtttcagatttaacattttaagctagaaaacttcttaggtcatctcatgtaactagcatcaagaggtacrtaagaatggtttgtctctatttatgttaccagctatg

SEQ ID NO: 913559 - DNA, 707 bp, Homo sapiens
agtggtagctacaccttctcaatgaaggaaaaaacatgttgatttagtctggctcaagctacttacctcgtcaaggtccgrtacattgagtagagctggtctacatcttctacttgctccctttagtccataattctgtcttacctttggaatgccaacaatcttgtttctccagctctattttcttctccagtttcctaaatgtggatgttttcttgtttgtttgtgtttttaacttaaatttgtcactcctccactcccttaaatctttttctaactttccaatattgttctgcatatgtatgcccatggaagatactctggttctcccatagtttatactggaagaaagttgagccttttgctagatgtagttcttctctgttcttagagcatacagtagatcattgagtttctcttctctttcagcaatttaatttcacatttattccttcggcattgcctgaacttgctcgctgctttcactagaatggtaagtatattgtactatgctacaatatgccttttaataatgttttctcttttttaaaaagggtgacaaaatgaaagaatgctcagatatcagtatctccaatggaaaaaattagagttctttctgttttttcctgaatccttgttatggagttctttctagaattccatgtccaacatctatacatggatcagaaagtagcattaatgaatta

SEQ ID NO: 913560 - DNA, 707 bp, Homo sapiens
agtggtagctacaccttctcaatgaaggaaaaaacatgttgatttagtctggctcaagctacttacctcgtcaaggtccgatacattgagtagagctggtctacatcttctacttgcyccctttagtccataattctgtcttacctttggaatgccaacaatcttgtttctccagctctattttcttctccagtttcctaaatgtggatgttttcttgtttgtttgtgtttttaacttaaatttgtcactcctccactcccttaaatctttttctaactttccaatattgttctgcatatgtatgcccatggaagatactctggttctcccatagtttatactggaagaaagttgagccttttgctagatgtagttcttctctgttcttagagcatacagtagatcattgagtttctcttctctttcagcaatttaatttcacatttattccttcggcattgcctgaacttgctcgctgctttcactagaatggtaagtatattgtactatgctacaatatgccttttaataatgttttctcttttttaaaaagggtgacaaaatgaaagaatgctcagatatcagtatctccaatggaaaaaattagagttctttctgttttttcctgaatccttgttatggagttctttctagaattccatgtccaacatctatacatggatcagaaagtagcattaatgaatta

SEQ ID NO: 913561 - DNA, 627 bp, Homo sapiens
ttaaattttacttaacacattggtaaaaatttgagtgaacactcaatgtcactgatccaacattgctatgtatttggggaaacaagcactcttttactgggtgatgaaagtgaaasagcaatgcaattgggatgggggaaagaattgacaaaatccattaatatattaaaatccctaaaaacaagaatactttttgatcaaagaatttcatttctaggagttatcctaagaaaataatcaagcaggagtgcctgaatttacctttaatcatctcaggcttgtttataatagctataaatcaaacaatggaagtgttattcaacagtggaacttctaaggaaattgtgagacacacccaataaagcactctggaataattaaaaatgaaggcatacgaagaggcaaagcaacatagctaaatagaagcctccacctatcatctttctcacaggaataccaacttcaacaactatctacacaaaattgcacattcataagaaccaaaaatcagatgagcaatcatagcacttggttttaacctcatagcaccgaaagcagcaggaaagagggtagtttggctttagttgccaaagctacccttccctctctcctgttagtggccacatg

SEQ ID NO: 913562 - DNA, 635 bp, Homo sapiens
cagccttggtccctggtaattagaatgagcagatactcctcattacctgctttgatatgtagggtgagagagaaataaacttttgttgtattaagttcctgggatttaaagttatttgttactacagcataacctagcttattttgactgatacagttggttcacaactgaggttactacccttgagggcatttggaaatagaaggaagcatttttggttatcacaacagagcatccagcagccaggatactaagtctttggtaatgctacaacagttctactcaataaagatttctttgcctgaaatgccaatagtacccctcatgaaacactcaagtaaatggcttgacaagaacagccaaatcacctttctgagtgcccattattgaacccttgcccaaattggatgtttctggcatcttttattgtcttctgttttaaataattcaggtaattttaaatgtttgtatataatttattattttctaaatatcacatcaatgagtgaactgttagagtttattcatttttgcattctcatactgtttagcacggtaccttacatctaagtggtactcagtaaatatctgtgaatttcattagaatraagtataatcttgggcccctgtctgaa

SEQ ID NO: 913563 - DNA, 598 bp, Homo sapiens
ccacatccagatactacaaaaagagtgtttcaaacctgctctmtgaaagggaatgttcaactctgtgacttgaatgcaaacatcacaaagaagtttctgggaatgctgctgtctgctttttatatgtaatcccgtttccaacgaaatcctcaaagctagacaaatatccatccacttgcagattccacaaaaagagtgtttcaaaactgctctatcaaaagaatgcttcaacactgttagttgaaggcgcacatcacaaataagtttctgagaatgcttctgtctagttttcaggggaagatatttccttttaaaccataggcctgaaagcgctccaaatgtccacatccagatactacaaaaagagtgtttcaaacctgctctatgaaagggactgttcaacactgtgacttcaattgaaacatcccaatgacgcttctgagaatgcttctgtgtagagtttatatgaagacaatcccgtttccaacgaaatcctcaaagctatccaaatatcctcttgcagattttacaaaaagagtgtttcaaaactgctctatcaaaagaaagcttcaacactgttagttgagggcgcacatca

SEQ ID NO: 913564 - DNA, 612 bp, Homo sapiens
caaagtttcacagatctctaggkcaaggtcgccctgcagccatgttctttgctacagcaaaacaaaagtaaccttggctcctgttcccagtaatttcctcattttcatctgagaccttgtaagcctggccttcactgtccatccttctgccagacttttaatcacaactattcaacaagtgcctacgatggtccaaaatttctttcatcttcctgtcttctttcaagctctccaaactctccaacctctggctgttacccacttctgaatctgctttacattttcagctatctttgttgcagcctgacaatgtataagaaaaagaagtccattttcagggggaaacttcaagacggcttcagatatttgcattaaaaagaagtccagtgctaatagccaagacgatggggaaatgtcactgaagatatttcatagctccacttcgcagtattttattttctgtatgatcataatgaaaaggggtttaattggctcatggttctgcaggctgtaaagaaagcatagtggcttctgcttctgcttctgggaggactcaggaagcctcccaatcacaccagtaggaaaacagcaatgaaatgtttcatacggcag

SEQ ID NO: 913565 - DNA, 587 bp, Homo sapiens
taaaatttaaaaattatttcatattgattatagcattgttaaagccaaaaagcccacagtgcttaatttttttaactgattgccttaaaaatggttgaccttatctggtgaacaattttggttatgacttggggcctatgttttttaaaaaaccttagcactggaagcttggtagtatcttcatgaccagctgagatcattttttgagaagctcttaccattaagaaaatttcagcctctcattattaggagattgaacgtatcatcaaaggtttaaaccctttctaaaactgtgagaattgttgaagaattttgttattgaaatataatttaatttattttaaaataaagttgaagaatgctaatgagatcatttcagtgaaaactgaagtaattttccaaattaatgtatgccaaaaattaagtattttctataaaccctgtcctccctagatgttcctttgctcagtgaattttartgatactcttaaacatatatattttctccttactcttggcaaatagataattacctagaggaaaatcttcctccttgatgtgcctctattaacattccattaaaattt

SEQ ID NO: 913566 - DNA, 617 bp, Homo sapiens
ccacgttggcaccctacattcttcttttcaacctcatcttccagtaagtcttgttgtttttctcctgaatgtctcttttctctatcttcttcttttcacgttgtcaactgtccaaatcctcttaattaatctccccgtcccgcacccatcctccgcactgctaccagagtgatgcttgtaatcaaggaataataattatcattacagctaacattttatctgggcttactaggtgccaggcgccatgctaataactttgcctctatccttttatttactttgataacatcacatcctgctctgcagtttttaatgattccttttaccagaagaataaaattgtaattctttaatacagtatcatgatctggcccactccttactgtgattcatctgctgccactgtcaccctttcacttggcatctgcttgatcaggcgctactcacagctcccttcacacgctctcattttctgtgtttttagacttgctggctcttgtcctctacctgcacacccccctaccccaacttttaaccttttttacargatcactttcttagatgagacagtttcaccactgaacaccttggagaatagtaagatctatattctggaa

SEQ ID NO: 913567 - DNA, 565 bp, Homo sapiens
aatattacagaatcttattagtaagaaagtttcatcaaagagtatgcagtcaaaaacgtaaaaagaatgcatagtggtaagtgagagagttaattaatttaaaatattatgctatttttcttcattttgtgatgtttataatattggcgaatttttttagttgttaattcttgggatttattttttctttagaaataaattatcagctttttgctcaatttataaaattatagaagcctcatgcctcaactaaactccaattactctgctccctaagtccctgcctcatcaatagacagaaatgactctgccacttcctgtctcctgttcaaggtgatatgagctttgcctcctaggtacgaggaacaatggaggaattgctttaataataggtaagaattatgaacatgcatttctttttcttcaacagagttaaataatggctcactctggatttccagatkcagttaagatgaaataataatgttgagccagtcttgccctgctttaaattaatcactccaggaagagacattaaacctttcagaccaccagtgtgcataaa

SEQ ID NO: 913568 - DNA, 617 bp, Homo sapiens
atgtcaaaagaatgcttttattgatcaaccaatccttgtctgcaagttgagttacrgataatgtcagtcactgctgttctattgccagacttcatgcctacctggctctatgaaacgtcggagaaagcaactcattcctctttacacaaatgatagaccgaatataggaaatgcaaagcctaacaagaatgggtggcagcactgggaatagcatattgtgtaatcttgtctagtagcctgtaggggaaatgaaaatgcatcatgacttgcagccacttacaagacaaagagcaattgttatacttaaaaaaaaaaagactcatatgtttcctccaaccccgcacaaaaatctaagacaaataatttttattttgtattaatgtacttaatcttactttgcatgattacacccttattgtctttccatcattgaagagcaaagatcacttaaaatctgaacaccatatatgttattttttcttcgttttattttaacatggttatacacaatatatcatgatttccaaagagttaatacatcacttaaattcagttaattaaaaattatgtgcccatgttttttgtaattgtgtatctactgtattatataatattct

SEQ ID NO: 913569 - DNA, 687 bp, Homo sapiens
atggaaaagtatgataataattctaatttttagctttaaacatgagamcttttcttctttctacgatatgcaataaaatttctaatagttgaatgaaagataaaaacaagaggtaaaataatcatatctatacacaatatttcatttatattataatagcagatatatcttaatatgctttcataggtttattttgcattgtgaaaggaaaataaaatcttgggaccacagacacactacattttgccaaagggaaaagttcagcttggaaacagtcacgcaaaaacagcgtttcttttattcccaagcagatagctgtaatttcacatgcttactttatcttatgtaaaatgtagttttattgagtgcaagagacatgcgtaattgaccctccactcctttcttttcatgtgtaaaatgtagattcactgggtgctaatcagagcttcacaagaaagtaacaacttgccccattgcctaccaacttaccgccccccaatttttcttccccttccacttgctcttcaatttttaattattaaatttcccaaaacattctttgcaacaagcacaagacatagatcctagtaacttgtgttttcccccaaccaggtgtatcctcaaccttggcaaaataaacctctaaattgattgagatcttccccagtcactttttagtttacagat

SEQ ID NO: 913570 - DNA, 577 bp, Homo sapiens
atgcaggaagtcaccctaagtacagcatcctttgcaactgcttgggttgcacaacttgatgtcmtaaacacatttataaatattcctgaaaatgttcttaatagagaagtgattaaaatcataataaaatgaaatgctgatagtgaaaaaatatatatgtaattgtctttgtttcctctaatttgattacaatttgggtagaaacatgtttgtagttagataatagtgaagagacaccacaggctcttaaactatagtttacattttgctagagcttaggaaaatgatttgagtcatttatatcttatacttaggaaataggtcaaaggaagaaaagcaatttgaaacttttgtttctacctcactccctgcctattttattatgaaaaaaatcatgaaatgcctctacgaagcctctgttaattgtgaccaaaattcaagcatatgaagaacattaccggaaagaaaatacaacccattataacctctttgttacgtgaatgctgcatatactctgtgatttgcatacaagttattcatggacagaaattaggttttattttgatttagtaatgtg

SEQ ID NO: 913571 - DNA, 577 bp, Homo sapiens
atgcaggaagtcaccctaagtacagcatcctttgcaactgcttgggttgcacaacttgatgtcctaaacacatttataaatattcctgaaaatgttcttaatagagaagtgatyaaaatcataataaaatgaaatgctgatagtgaaaaaatatatatgtaattgtctttgtttcctctaatttgattacaatttgggtagaaacatgtttgtagttagataatagtgaagagacaccacaggctcttaaactatagtttacattttgctagagcttaggaaaatgatttgagtcatttatatcttatacttaggaaataggtcaaaggaagaaaagcaatttgaaacttttgtttctacctcactccctgcctattttattatgaaaaaaatcatgaaatgcctctacgaagcctctgttaattgtgaccaaaattcaagcatatgaagaacattaccggaaagaaaatacaacccattataacctctttgttacgtgaatgctgcatatactctgtgatttgcatacaagttattcatggacagaaattaggttttattttgatttagtaatgtg

SEQ ID NO: 913572 - DNA, 572 bp, Homo sapiens
cctccaatctcctccagggggatgggaggcactgtagcctgaacagggccaatagatgtggatttttttaggggtggaggaaaggaggrcaatggcttttctattgggggaggaaaaagctccggtctgtcctcatcatcactagaaagtgtcctccttatgccctacggaagggaatgaagtagggagaggagcccctccctgttgttctggttcctgtttttctttaaatctcctgaattcccttcaggtggagctaatgggcagtctgactcaccgcaatctggcatataaagagggtacaatgcagagcgtaccagggcccaggtggtcaaaatgataaccttagtaaaatggccctgcctaaatcctgttttcaggcagtgatccacctcctcccataactctaagtctaatgttccttgatcagggaaccaagagcattcctgctgaataaaaagcataagctgatgcaaatcttcagactctaaggtgcagtggatagccttaagtaattgttgcaccattttaaaaaatactttctgctctttggtcaattcctgacccatgat

SEQ ID NO: 913573 - DNA, 659 bp, Homo sapiens
ttgtttcattatagcatacatatatatgaagggtaagccagaaaaggcttatcaagtttaactccaaggtttttggccttgtgagaaacaaagaatgagtaatttttttaacttttattttaggttcagyaatacatgtgctggtttgtcatatatgtaaattacatgtcacagggatttggtgtacagattattttgccacacaggtaataagtgtagcacccaataggtagttttctgatcctccctctcctcccatcctccaccctccaggaggccccagtttctgttgttccctctttgtgtctatatgtactcactatttagctcccatttataagtgagaacatgcagtatttgatttttaatcttgcattagttgtcttaagataatggcctcctgctccatccatgttgctgcaaaggacataatcttatttattttatggctgtgtagtatgccatggtgtatatgtgccatattttcctcatccattctaccattgatgggcaattaggctgattccatgtctgtgctattgtgattagtgctgtggtggtcatatgcgtgcatgtgtctttatgatgaaacaatgtatattcttttggttatatacccagtaatgtgattgctgggtcaaatggtaattctgtttaag

SEQ ID NO: 913574 - DNA, 611 bp, Homo sapiens
atgtggaaagtttttatctattattttgttatatatgtttaactatttcaatatctctttaccttctgggatatcaataatttgtatatttggtcacttcatggtgttccatataccatgaaggctttgtttagctttttttaattctttttttttcctttatattttcatggctgggttatttcaaaagttgaacctgaactgtcttcaggttcagaggttcttttgtctgcttgaactaatctattgttgaagctttcaaatgtgttatgttgttcattcaatgaattgttcagttgcagaatttctgtttgattcttttatgacatctatgtctttggtaaacttctcattcatatcctgaattgtttttcagatttctttgtattgtttttcagaattatcttgtatctcactatccttctttagaatctaatttggattctttttctggaatttcattaattgctttttgattgagatctgtttctggagaattattgtgttccttttttaaaaaatttatttacrttttttttcttaaagaccagtatgatagtatatcttcctttaaaagtgtcattttcctggctttttcatgtttcctgtgt

SEQ ID NO: 913575 - DNA, 533 bp, Homo sapiens
ttttattgaaaccttttctgtgtctgttgagataatcacgtggttttggtcttcagttctctttatatgatgaatctcctttattgatttgtgtatgttgaaccaaccttgcatcccggggatgaggcctrcttgatcattgtggattagctttttgatgtgctgctgggattcagtttgtgagtattttgttgaggatttttacatgaatgttcagcaaggatgttggcctgaagttttctttttttgttgtatctctgccaagttttggtatcaggatgatgctggcctcacacaatgagttggtgaggagtccttcctcctcagttttttggagtggtctctgtaggaatgctaccagtacttctttgaacatctggtagaattcgactgaacccatcaggtcccaagacttttcttggttgttgggctatttattactgattcaaattcagagctcgttattggtctgttcatggaatcagtttctttctggttcagtcttggaagggtgtatgtgtccaggaatttat

SEQ ID NO: 913576 - DNA, 617 bp, Homo sapiens
cagttcttatatttctagaaatatagttcctttagaaagatatttattactaggtaataaaacaaaacaaatatctcaagctgattggcatggaaatatcttaaatgagcctctttctttaaaatgtagctgatggaatagattccatgattaattcatctctgtttccccatgtttagtccagtacatgacatataagcctcaaaaatatttataaatgtggaaaaagaattgtatccatggtgagagtctctagaatcatgaatatctcattttggaaatttgaataatttactgtgtttgtgagtgacatggcctcctaaagcatgtcttgagtttgctcctaatgtggaagcatacggaaaagactgcagagccatctggcagaaataggagacactggaaatataatggaaaactttagggaagtctaaaacaggaaatttatcaatcaggtgataatctcaataagcaaacaagcaaaatgcaaaagcccacatatatttaggggatggtgttgttttaaatgttatcttagtgtcycattggtctgaggtttttcctcttggtggcttgtctttccatgatagcaataacttttaacatttgaggtaaga

SEQ ID NO: 913577 - DNA, 361 bp, Homo sapiens
ttataagattgccatatttgatactaatttaagcttctgtcattgcccttttttcaatccagtctccacacagctaccacagtgtgcaagtagaagtctcagccatatcaccacactcctgctttaatgtccctactccattgcttcttttctccttcagaagagtttaagcttaatgaagctgggcaactttacatatttttccacgagctggagatcacttggtgtaaggtaaaaatgatcagtaaatattttcaaataacagaatccatgaataatagttttgtttctttgagagcacattracttttaaaaatcaagaaaatagattggtcaagagaattctgcttgttttgatttt

SEQ ID NO: 913578 - DNA, 499 bp, Homo sapiens
attttctaaacttcgggtaatatctgtgacttagtaaatgttctttaaaaggtgggataatatttttattttgtttaattatatgtgtttttaaactaattttataggaaaaataatttctttccttccctgttataccaaatacagcctttagctcaagacacaagtaattccaggaaaactggaatgtaagttcaatatgttgcactaagtacatttgaaagtgcatgcatttttattttaattcatcattctcagtcaactatcgcaaggacaaaaaaccaaacaccgcatgttctcacttataggtgggaattgaacaatgagaacacatgaacacaggaaggggaacatcacactctgggggctgttgtggggtggggagagcggggagggatagcattaggagatatgcctaaggctaaatgtygagttaatgggtgcagcacaccagcatggcacaagtatacatatgtaatgtatacatatgttaatgcac

SEQ ID NO: 913579 - DNA, 593 bp, Homo sapiens
ttatgtaaagatatacccaatagctacttaaaatagaaatattctatttcattattagaaattattattttaaaaggttgttaaaacatcaaaaatatgcttatttctagtaaccagagaayacagcagggttatgaaactttggattcctgtttgatttggcaggtaactagattaacaaaaatacaaggttttgagtttcaaaacagaatagcatatttaaaaaatacttggtgggtgtctggcaattgagagaccttagtagcacaatcattggtcttcacaatcactgccaggtactctttcaaactagcttgaataactgcaaaacacattatcaacccagcttctttttgctggacctgggcatatataaactgattagatttaaaaatagaaaaaatagagttttttcagttgtgtttgaagaggtgaacccttggactcaaaatctctcaaaagtcctgtctttcgcttcagaatctgcattaatttgcacaggaatatacttctgtgttttaataaacacatgcaatttttctgttttcatcttgcaagtaatgacagctttgttctcaaaccaattttgtttt

SEQ ID NO: 913580 - DNA, 639 bp, Homo sapiens
aaatcctactaaatgtttactcagttcattatttttaggaaaaaaaaactatgtatatagtccattaacttgacacatacaaaagaattacatggcttaaagcataaaaactattgtttttaaccacaaccttttcacaaattaagcatcagacactgcttttacaataagtccacataaaagagctaaaatcaaatattttaaatttttatcccatacctattaaaaccataaagtaggcttgttttatttacaaagtattaaaattatttaaagaaaggtaatatatatatagacaaagggcttttattgtgggggaagaggtggaaaatgaaaaagaaactattaacccaacaaatcaaaacttaaaagactacacacacacacaaagatgtgcacaaacacaccttttttcaaggcccccttataggataaaaacaagataaatgacacaaagacaatctacatcatgtatttagatttattttagttatgtgtggtctatacaagtatcaagttagtctcccatttgaattgtacctacattgctcagcaaagtcatttcaaagctctacaggagcctcaattatgaaaagttaaaacaattaagttaaaycagtttgagagaaaactgaatca

SEQ ID NO: 913581 - DNA, 681 bp, Homo sapiens
gcaactatttacattgtattaggtattataagtaatcacgagatttaaagtatgcaagaggatgtgcacaggtaatatgccatgattttatttttcctccacctcttccccctccctgcatcatkttatataagagacttgagcatctgtggattttgttatctgcagggagtcctgaaaccatggatactgagggaaaactatatgatttcccccaagaaggcagtgacatgcacctgtaactctttttcccctagacatatctgtgacatgcttaactacttttatttttccgatgtcaccttaatcagagaaaacttcccagaccaccctatgtaaaataaagcacctctgctgctgctttattctccttaacactactttttttctatagcacctgtcaccagttgacaggttaagtttaacaacttctctcctgtagaatatgaggtgctttaaaatacatgtatgactgaacctcacccacacctactgaagctcttcatttcggttctgaatgcctattttggggaaacatttctgggattatgacagacatttcaatgacaacctgctctaggaggtttcctgcattgtcattgttaagtccatctatttattccttcttttaaaccagaatttctggcctgtaattttactgagaaatagaaatactatctt

SEQ ID NO: 913582 - DNA, 636 bp, Homo sapiens
actatagcaatggaacatcatggaagcttttagtagcaaagtgaaatacagtggatataataacaccatyggttttaggtcaatttataccaatatatataatcataaatatgaagactcttttttacatgctaatctattttggaagccttttatcattcagcagcaaacatactttaattgggtaggctgtatgtaaatttatttcaagataggagtgactgtgagaagacattagcaatacaaagtctcagtaagagagatagataaatggcactctaggaaagagtgaaaaataacagatttaatttgaggtaaggcactctagaaaccgctaaagacagtaaagtgatactgactgatggggatgactggctgaaatggaggaaaattaacagcccataatcaatatgtggataaatgcctcccgtttaagacagaaaaacagatgttgcatcagaaagtccatgatactatgtgcatataagatatggaatgaaatccaagactataatatgaagtaaccaatttcttttctcagaacactgaagatttgctttagaagagggttatgttattttgtgactatttaaatctctttttaaccttttaattatgcttattatacattatgga

SEQ ID NO: 913583 - DNA, 649 bp, Homo sapiens
ttgttaccgataatgaacctccattaaaacatcgttatccaaagaccacagttcacattagggttcgctcttggtgttatacactttatggatgtatattacagagtagtttcaccaccccaaaatcctctatgccccacctaatccacactgcaacccctggcaaccactgatcgttaaatatctccataattttggcttttccagaaaatcatatagttgataatacagtatatatctttttcagatggcctttttttcacttacgaatacacatttaagtttctccttgtcttttcatagcttgacagatcatttctttttagcagtgagtattccattgtctggatataccacagtttatccattcacctagtgaaagacaacttgattgcttccaaattttggcaattatgaataatgctgttataaacatctgtgtgcaggttttctttgaacatgttttcaactcatttgcataaatactatggagattgttgcatcatatggtaagagtatgtgtagttttgtaagaaactgcaagstttcttcctaagtagctctaccattttatatgtctactagtaatgaagcagaattcctcttgtcccatatcctagctagcatttggttttgtcagtgttctggg

SEQ ID NO: 913584 - DNA, 632 bp, Homo sapiens
ggcataggcatatttagcagctggcagaacccccacattggctccctgattggtagggtgagggctattatggtgggaaagaacaaatggaaaccattagagctgcctctacctagaaaaatagtaaatgaaaaacaatatcgcatcgctggagggattgtggagattagtgccaccataaagacttgaaagatgcaggggtggtgactgccaccacatacccattaaactttcctatttgacctgtgcagaagacagatggatcttgaagaatgacagatctgtaccagatctggtttcattgcttgagaaaattaacacatcacctggtacctggtatgcagccattgatttggcaaattcctttttcttcatttctgttcataaggcccaccagaagcaatttgccttcagctggcaaggccagcaatatacctttactgtcctacctcaggggtatattaacttatgatttgtgccataatcttgttccaagaggccttgatccctttttgcttcaacaaggtatcacactggtccattacattgatcacattatgctgattggatccagtgaggaagaagtaacaaacacacyggacttattggtgagacatttgcatgtcagagaa

SEQ ID NO: 913585 - DNA, 688 bp, Homo sapiens
agtccagctttcccaaactgcagtactgatcctaccatggccatggaaccacaaccatccctggctccctattacctctcaaagaagatagcctggcacagcctggccccatgactcaccttccgtctggtctgctggatcatttgccgctgcctgcatttctgtccaggcttttctgccatcttggcctgctctgtgaaatcctgcaccatagctctgcattcagcattccaagtctttctcgaatgccacctcttctgggaggtctggcccgagcctggcaggcagatgagcttgcttctcagagttctcgtggcctgtaagacttcccttgtggcgttcctctatgcccagctgttctgtaagtgtctatcctctgcttggtcctggggttggttgcttccaggaacaccctcaagattgactatcagaaaagtctaactcaacccttactcactgtgtcccataccgcatgctctgagaaaccttcccctagtgacccaccctcctcttgtggggctggatggtgagctgtcttcagtctctgggtccccagaactttgcttatgtctgtcttcaagctctgatcttccatctccccacaagctgtaataggggcacacaggtggtgtctgtcygagcagatgggtgtagctcatctagatgcagtgcttggtactgggatggt

SEQ ID NO: 913586 - DNA, 617 bp, Homo sapiens
ataatttcactgctgcactacagcctgggcaaaagattaggcccttgtctccataaaataaaaaatagtaataatatgcccaaatccaaaaaactacaattgaatttactgaggacctggaaaatcaaatgttttaagtaagttatttctgttaactttatctcaataaacatgctaaacacttaaaatacagactatataattttaaaaattatgtattaaattgctcaaccacttcttggttgtttttagacaaagtctcactctgtcacccaagctgaagtgcagtggcacaatcgtggcttactgcagcccctacctcccaggctcaggtgatcctcccacctcagcctcctaagtagctgggactacaggtgtgtgccaccatgcccagctaattttttgtacaatcagggttttaccaagttgcataggctgaactcctggactcaagcaacctactcatcttggcctcccaaaatgctgggatcacaggcatgagccacaacacccgccatgctcaaccacatcctaacacagagatattctaggcaaaatagtaatgaaaaatgttaatacrtaacactgaaaacaagaatggtaaattcctagatgcc

SEQ ID NO: 913587 - DNA, 612 bp, Homo sapiens
gtgggcgcctgtagtcccagctactcgggaggctgaggcggaagaacggcgtgaacccggaaggcagagattgcagtgagcagagattgcgccactgcactccagcctgggtgacagagtgagactccawctccaaaaaaaaaaaggaaagaaagaaaacatggagttgttcctttggccacatacatgtgactctacaaaaaattgtgatactgtagacatcaagggaatacgcactgttaaaaaatgggaatgccccaaaaatgttaccatggcaaaaccagaaagtctacagtgtcccccagtacgctgttagcattgttgtaaacaaacaagttaaggaccagagaattaatgtgcatattgagcatattaggcaccagaaatgcatgaaggaaaatgattagaaaaagaaggaaggcaaagaataagatacctgtgtttaacgaagcgccagcctgctccacccagggaagcacactttgtgagagccagtggaatggggtctgggctgctggaacctattccctatgcttcatgtcataataggtattaaataaaaaaggcttctggactgcaaaagaagataaaaaaataaaacatttattgacc

SEQ ID NO: 913588 - DNA, 677 bp, Homo sapiens
aaaccaaacagcacatgctctcactcataagtgggagttgaacaatgagaacacatggacacaggaaggggaacatcacacaccagggcctgtcagggggtgggggccaggggagggatagcattaggagaaataatgatgacaggttgataggtgcagcaaaccaccatagcccgtgtatacctatgtaacaaacctgcatgttctacacatgtatcccagaacttaaagtaaaataaaaaaatacattccataaataaaaattattttgtcaggggatgtataataaaaatttaaataatgtctcaaactaatttttaagtatttttttgaattgccacaagaataatgttagttcctttattgtgctgggtaaataaagagactgtcaggctatggaagccaccacccttcagcaccagcaaggagacaaggcctctgcggcacctatgattagagctctgtgctggggattcaacttctaaagccttgcagtccgtgttgggggtccctgagcaaggacagatgggcagtcctttgagcacttcaggtggaaaagctctgctcaagtagtgayggtgctgaggaactgagccagggagagcccttcccagaaaactaaactggagaccagaaggataacaaaggtcagttagaattgggggaatgacccaaag

SEQ ID NO: 913589 - DNA, 677 bp, Homo sapiens
aaaccaaacagcacatgctctcactcataagtgggagttgaacaatgagaacacatggacacaggaaggggaacatcacacaccagggcctgtcagggggtgggggccaggggagggatagcattaggagaaataatgatgacaggttgataggtgcagcaaaccaccatagcccgtgtatacctatgtaacaaacctgcatgttctacacatgtatcccagaacttaaagtaaaataaaaaaatacattccataaataaaaattattttgtcaggggatgtataataaaaatttaaataatgtctcaaactaatttttaagtatttttttgaattgccacaagaataatgttagttcctttattgtgctgggtaaataaagagactgtcaggctatggaagccaccacccttcagcaccagcaaggagacaaggcctctgcggcacctatgattagagctctgtgctggggattcaacttctaaagccttgcagtccgtgttgggggtccctgagcaaggacagatgggcagtcctttgagcacttcaggtggaaaagctctgctcaagtagtgatgstgctgaggaactgagccagggagagcccttcccagaaaactaaactggagaccagaaggataacaaaggtcagttagaattgggggaatgacccaaag

SEQ ID NO: 913590 - DNA, 534 bp, Homo sapiens
agtgatgccatgcagtgtctgcctggctcttggcacacaatctctggaagatttatgttaagatattttctttcagaatccagctgccattctgtgagaagctcaaggcaaaggaaggccatatgtaggttctctggttaacagctttagctgaggcagacatgtgagtgaatgatgaaacctctagatgatggtgtcatttgaagcaaaaaaaattttaattgtgaagttcaatttatctatattttcttttgttaacttgtgcttttggtgtcatatccaagaaaccattgcctaaagcaaaatcacaaaaatttacttctctatttttttataaagggttttatagttttaactcttaatatttaggtctgcagtccactttgagttgcctgtagtgtgagatgagagttcatgtttattcttttacatctgtatattcagttcccagcactagtttttgaaaatactattttctccccactgaattttcttagtgctcttgtagaaaamattgcttggccataaatgtaa

SEQ ID NO: 913591 - DNA, 642 bp, Homo sapiens
tggaactgattaacagacagaggttggaacagtttggagagctcagaaagacaggaaaatgtggaaaagttkggaaatccctagagacttgttgaatggcttttaccaaaatgctgatagtgatatggatgataaggtccaggctgaggtggtctcagatggagatgaggatcttttgggaactggaataaaggtgattcttgctatgttttagcaaaggtactggtggcattttgcccctgccctagagatctgtggaactttgaacttgagagagatgatttagggtatctggtggaagaaatttttaagtggaaaagtgttcaaaaggaagcagagcataaaagtttttaaaaattgcagcctgatgatgagacagaaaaaaataaaaacctcaaaaaaaaaaacattttctggggagaatcccaaacaagctgtagaaatttgcataaataacaaggagccaaatgcgacttatcaaaacaatggggaaaatgtctccagggcatgccaaataacatcatggaagcccttcccatcataggtccaaaggcctagaagagaaaaatggtttcctggggtgggtccaggacccccctactgtgtacagccttgggacttggtgccctgcatcctagctgc

SEQ ID NO: 913592 - DNA, 642 bp, Homo sapiens
tggaactgattaacagacagaggttggaacagtttggagagctcagaaagacaggaaaatgtggaaaagtttggaaatccctagagacttgttgaatggcttttaccaaaatgctgatagtgatatggatgataaggtccaggctgaggtggtctcagatggagatgaggatcttttgggaactggaataaaggtgattcttgctatgttttagcaaaggtactggtggcattttgcccctgccctagagatctgtggaactttgaacttgagagagatgatttagggtatctggtggaagaaatttttaagtggaaaagtgttcaaaaggaagcagagcataaaagtttttaaaaattgcagcctgatgatgagacagaaaaaaataaaaacctcaaaaaaaaaaacattttctggggagaatcccaaacaagctgtagaaatttgcataaataacaaggagccaaatgcgacttatcaaaacaatggggaaaatgtctccagggcatgccaaataacatcatggaagcccttcccatcataggtccaaaggcctagaagagaaaaatggtttcctggggtgggtccaggacccccctrctgtgtacagccttgggacttggtgccctgcatcctagctgc

SEQ ID NO: 913593 - DNA, 633 bp, Homo sapiens
cccgactcacccttaccagtctctgttatcyctctttccactctccacctcaatatgatcaaagttagctcccagatgtgatatttgtcttattgtccctgggttatttcacttaagataatgacctccagttccatccatgatgctacaaatgagaagatttcattctttttatagccaaatagtattctattgtgtatatgtaccacattttctttatccatttattcattagtggacatttaggttgattccatgtctttgctcttgtgaatagtgctgcaatccctttgatatattaatttcttttcctttgggtaaatacccagtagtgggattgctggatcaaaatagtaattctatttttcatttttcgagaagccttcataatgttttccatagtggctgttttagtttacattcccagcaacaatgtatacaagttcccctttttccacattctctccgatgtctgttattttttgtctttttaatagtagctattaagaatggggtaagatgacatctcatgatggttttgattcgcatttcttctgatgattagtgatgttgagcatttttcatatatctgttgtccatttgtatatcttcttctgagaaatatctattcat

SEQ ID NO: 913594 - DNA, 608 bp, Homo sapiens
gataataatcaagacagagaaaagcaggcagagagaaagagaagagataaaaagccagaaagaaaagaaaattcaaagaaaagagggagaaaaagatggagaaagacatagacattaaaaagagggagtgagagagaggggggagggagggagggagagagagagagagaaaacaagggtgagggagagagatcacaatataaaataaagaaaagtagaatcatttagatttttgggaaagatggtaagtgctactgtgaagggtcaaggaaaataatactgtgtcaaagttgacatcagattaaattagaaaacttgggatgaaatcatggtaaaattaaacctaatggaatagaaagaggagaagagagggaggcaccagacagatggtgatgagggcagagggcaatgaggaattgagggaaaaaaagctaacaaaggcatggacatgaacttaaaactggagaagagaagctcctgaagtctctggaaatgcttgggtctgagacccgagaagcagtgtaaagagaaagtaaagtcaaatacacaccmtggaaggtcttggggcttggacgatgtgtttagctgcatcatggggtaaggagaaa

SEQ ID NO: 913595 - DNA, 608 bp, Homo sapiens
gataataatcaagacagagaaaagcaggcagagagaaagagaagagataaaaagccagaaagaaaagaaaattcaaagaaaagagggagaaaaagatggagaaagacatagacattaaaaagagggagtgagagagaggggggagggagggagggagagagagagagagaaaacaagggtgagggagagagatcacaatataaaataaagaaaagtagaatcatttagatttttgggaaagatggtaagtgctactgtgaagggtcaaggaaaataatactgtgtcaaagttgacatcagattaaattagaaaacttgggatgaaatcatggtaaaattaaacctaatggaatagaaagaggagaagagagggaggcaccagacagatggtgatgagggcagagggcaatgaggaattgagggaaaaaaagctaacaaaggcatggacatgaacttaaaactggagaagagaagctcctgaagtctctggaaatgcttgggtctgagacccgagaagcagtgtaaagagaaagtaaagtcaaatacacaccatggaaggtcttkgggcttggacgatgtgtttagctgcatcatggggtaaggagaaa

SEQ ID NO: 913596 - DNA, 585 bp, Homo sapiens
catctacaagttctctaagcayaagacttgcataaaatgtctttctgtatggttttaatttgtatttccctgatgattagtgatattggtctttttcttttttaaaaattaaattaaaatttatttttgggctgggtgtgatggctcatacctgtaatcctagcactttgggaggctgaggctggagaattgcttgaggccacgagctcaacattgatctggccaacatagtgagactccatctctaaaaaaagaaaaaaaatcagttttgatatattataattacacataattatgggatacaaaataaagttatgatgtatgtatacaatgtggaatgattcactcaaggtaattaacatattcatcaccttaaatacatattgtttatttctcctaactgcaactttctacactttgaccaacatcttctcattcctcctacccctctgccagcttctggtaccaccattccattttttgcttccatgagctctattgttttagattctatgtgtaagtgagaacatgtgggatttgtctttctatgcctggcttatttcacttaggataataccctccagg

SEQ ID NO: 913597 - DNA, 695 bp, Homo sapiens
tcctgctagaaagtaaattctctaagggcaagtgccttttatttcacttccatacatctgtctatagtattattcttggcataaaagatccatgcagtaaatattagttgaataaaagaataattgagaggaatatggttaaatggataataacctcagtttagtatctgtggccaccatgagaatatcttcaaatatttgagaggccctagcaaccgtgctctgaagctcatccctgcattcttgcctgggccagccttccatgggctgctcccagccagtgaccatgcatggcagggctgctaaggctggatcattcatgagagccgagaggctcctcgtctgaacctccgttaagcttagtggcagtctgggatgtttccttttccatctccttcacatggggttagatttgcagcatgtctcatggctctccaagcacatgctacctttcacacatttaattctgtcttgttgtctgcttcttggaggaatttggctaatagtaattatattaaaattatttattgaaaaaaaaatatttgctgaggatctactatgtcagatattttgctagtagcctgaaattcatcttgaataaaatgcaatcactagacwaaagaagctagttggaaataaagactggtcaccagatataatacaaaggtacaattgctagactcaggaaagtcagt

SEQ ID NO: 913598 - DNA, 695 bp, Homo sapiens
tcctgctagaaagtaaattctctaagggcaagtgccttttatttcacttccatacatctgtctatagtattattcttggcataaaagatccatgcagtaaatattagttgaataaaagaataattgagaggaatatggttaaatggataataacctcagtttagtatctgtggccaccatgagaatatcttcaaatatttgagaggccctagcaaccgtgctctgaagctcatccctgcattcttgcctgggccagccttccatgggctgctcccagccagtgaccatgcatggcagggctgctaaggctggatcattcatgagagccgagaggctcctcgtctgaacctccgttaagcttagtggcagtctgggatgtttccttttccatctccttcacatggggttagatttgcagcatgtctcatggctctccaagcacatgctacctttcacacatttaattctgtcttgttgtctgcttcttggaggaatttggctaatagtaattatattaaaattatttattgaaaaaaaaatatttgctgaggatctactatgtcagatattttgctagtagcctgaaattcatcttgaataaaatgcaatcactagacamaagaagctagttggaaataaagactggtcaccagatataatacaaaggtacaattgctagactcaggaaagtcagt

SEQ ID NO: 913599 - DNA, 580 bp, Homo sapiens
tttgggttaatgctgacatgagttaagactttggggactgttgtgaaggcatgattggtttgaaatgtgaggacatgagatttagaggagccgggrtggaatgatatggttcagctctgtgtccccaccaaaatctcatcttgaattgtattcccatgattcccactgggagggacctggtggaagataatttgagtcacgggggcgggtttcccccatactgttctcattgtagtgaaaaagtctcacgagatcttatggttttattaggggcttctccttttgcattttcctcattttctcttgccgccatcatgtaagaagtgctttcacctctgccataattttgagggctcccagccatgtggaactgtaaatccaattaaatttctttttcttcccaatctcgggtatgtctttatcagcagcatggaaatggactaatacacaagaaatttctttatgggaaaattatgagggaagtatatagctttttttaatctttgtagctatcttatttaggaataaaatgggaggtgggcttgttccatgcttgactttcatttggcttcctgatttt

SEQ ID NO: 913600 - DNA, 591 bp, Homo sapiens
aaatccattcattttttttctgttacttattcaattaaataaattatctgctacgagttatgcagcatatatgttatagaggtctatgtttattatttcctccagatctttaaaacagatgatagaaaatgcattgcagctcaatccttatgaatgagtctctaccaccaccaattttggagagaaattcaaattggatgcataagccacactaaaatggacataaacaattgaaatttcttgtcccaaagactcctcaaagttaaccatcatgggatctggctagatcagatgacaccactgcacttgcctattttgggttagatacctcagggttactctagtcctaggtgccattgctgtaatctaataataaacattgtgataccaatggagctttatagtcttcaaaacacttttagatgtatcaactcactttataacactatgaagtgaaagtaagtgattgagagaaaaaaaacttagataaagggccatatttttacaagaaaacaggccaagaaagaataagtgttttgctcaaaaccyagttaatatggcctagacacaaatcctagtcaaatgctgata

SEQ ID NO: 913601 - DNA, 614 bp, Homo sapiens
tctcactcttaaccatattttatgcagcatctcttattacttagatctgaacgaagtgtttgagctcttatgcactggactaaggaaygtactaaaagatatctcaagcaaaaattgcataagacaaaggtttcttaaatcatctttctagtcaacggaaaactcaagaacgaaattcacagggactatgtacaggctgtggtggggctggtatgagcaaaaagacttgaagaagctcttctcacttttattttctgaaatatgatcttcactggtaatcttagctcagagaacctgctgtatttagactaggtgacctataaacgtaacctgagaggtatttttaagtatataaaatatatatgtgtattgtgctgtctttctacacactaattcagactttctattttaaaaatataaaataatctgatactctgctccattttgggaatataaataaagccttgagaattgagaagaaaaggtacaccatgtactgcaaggcatgtgttttactaaccactgaaatgacacatggtgtatacttaaggtttagacttcaaattttattttttggtgtatgctgtgaatgaagaaatatactagttcttcag

SEQ ID NO: 913602 - DNA, 614 bp, Homo sapiens
tctcactcttaaccatattttatgcagcatctcttattacttagatctgaacgaagtgtttgagctcttatgcactggactaaggaatgtactaaaagatatctcaagcaaaaattgcataagacaaaggtttcttaaatcatctttctagtcaacggaaaactcaagaacgaaattcacagggactatgtacaggctgtggtggggctggtatgagcaaaaagacttgaagaagctcttctcacttttattttctgaaatatgatcttcactggtaatcttagctcagagaacctgctgtatttagactaggtgacctataaacgtaacctgagaggtatttttaagtatataaaatatatatgtgtattgtgctgtctttctacacactaattcagactttctattttaaaaatataaaataatctgatactctgctccattttgggaatataaataaagccttgagaattgagaagaaaaggtacaccatgtactgcaaggcatgtgttttactaaccactgaaatgacacrtggtgtatacttaaggtttagacttcaaattttattttttggtgtatgctgtgaatgaagaaatatactagttcttcag

SEQ ID NO: 913603 - DNA, 623 bp, Homo sapiens
atcaataaatgaaaacattgataagtagatcttatcaaaattaaaaatgttttctctgccaaagctcatgttgaaaggatraaaagtcaagatacaaattctgagaaaatattcacacaccctctatctgacaaagaactggtgttagaatatataaagaactttagatactcagcaatttaaaactttccatctagaaaatgagggaaagacatgaacatatattttaccaaagaggatacacaaatagaaaataaacacatatagatgcattcaacttcattaggcatcagggacatgaaaactaaaatcacaatgaaatattgctatatatctatcagaatgactaaaataagaaaaaaatgtgacaacaccaaatactggcaaggatatgaagatattggatcactcatgcactgctgatgtgaatttaaaataatatagccacccttgtctacggccataccaccctgaatgcacccaatctcatctaaaataatatagccactctggaaacttctgaaatttaacatgcaattcccttgcaaccccgaaattgcactcttgcacatttaaaccagagaataacaactgatgttcacacaaaaacctgtatatgaatg

SEQ ID NO: 913604 - DNA, 692 bp, Homo sapiens
tttctcccaacaatataaaatcaagaaaaacataatagagtttttgatttctccccttgaatttgtgtgagcttttgacttctctgattaataaaatatgggagaattattacatgactctcaaggttagatcacaaatgccatgctgcagtactatctttgggaactaagcagtatactacccagttcattggaacactatcttctggaactaactaggaaccactgttcttaagaggccatgtggtgatactctggtctaaagttccagctgagtctagccttccagacatcccagccaaggcactagacatatgagtgaggccatccttggtgctctaaaccagaccatctgccaggtgaataccactgagagagcacaatgctacttggagaaaagtcacacagctgagccctgctcaaatacttaactgcaaaatcatgagatataataagatagtttttgtttgaagctactaagttttgagatagtttttttcagcaataaattagacaaaatccttaaaactctgtgcaccagtatgagaatgtataaaatagaatgaagaatagtagctgtcttgcccccttcatatagttaaaagtgggaggagtaaataaaagaatgaatttaacaacatattgtatactacsaagtgctatctagataatgttattatggtaattgtaaa

SEQ ID NO: 913605 - DNA, 638 bp, Homo sapiens
tttaagttccttaaagatgctggatattagacctttgtcagaggcatagtttgcaaatatttcccccattctatacgttgtctgtttactctgttaatagtttattttgctgtgcagaaactcttaagtttaattagatcttatttgtcaatttttgcttttgccgcgattgctttggtgcctttgtcatgaaatctttgcctgttcctatgtccaggatggtagtgcctaggttgtctttcagggtttttatagtttggggttttagatttaaatctttaatccatcttaagttgatttctgtatatggtgtaaggaagaggtccagcttcattcttctgcatatggctagccagttatcccagcacaatttattgaatagggagtcatttccttattgctagtttttgtcagttttgttgaagatcagatggtcgtagatgtgcagccttatttcttggttctctattctgttcccttagtctatgtgcctgtgtttataccagtacaatgctattttggttttctgtagccttgtagtatagtttgaagttgggtaacrtgatgcctccagctttgttctttttgcttaggattaccttggctattcagtcacttttcgggttccatatgaattt

SEQ ID NO: 913606 - DNA, 658 bp, Homo sapiens
acatgccctgacctttatacttagcctcagtcaggcaggcattgtgaacccgggtggcagtggcccagctttcactaatgatccttcccctcctgcaggtgcaacactggacctagtacgtattcctggtcctatggtggttgttcttctgttgttcttatcttcttccctgaattgctgcggatttccagtgacctgaggctggtttttgttgcctttccccctgaaatttaagattttatcactgaatggtattgcctaggttttcttctagggtttttgtggttttaggtcttacgtttaagtctttaatccatcttgagttaatttttatataacgtgtaaggaaggggtccagtttcagttttctgcatatggctagccagtttccacagcaccatttattaaatagggaatctttccccattgcttgtttttgaaaggtttgtcaaagatcagatggttgtagatgtgtggtgttacttctgaggcctctgttctgttccattagtttatatatctgtttttgtaccagtaccatgctgatttggttactgtaaccttkcagtatagtttgaagtcaactagcataatagtttcttctgcttatgcatcttttatctaccagtttgccacaaggctggcctagaggatggca

SEQ ID NO: 913607 - DNA, 659 bp, Homo sapiens
gaaaatatcagctgtcaggcagaaccagtagctggcattgttgatgtatttattatgcggtcacctcaaattgaatacaagaaaataaatctcaaaatgacagactcatatttaccattagtgcaatgtggaaggcagaaagtgttaagatactaatgcatcaacatatgcattcagagctgattcactaacatgtgatactatctgaagtttccatgactttgaggcagatgtttctgaacactcatttatttagacatcaagtataatgaaatgaaaatatagaaacatttactcaaatgcatcaatctgcaaacatgcaagtggtaaagagacatttaaataaatctacccaaatttatttccctaaatgagtattatcatgagattatggaatttaagattttagtctaagtcaatttaggaatcatgctttaaagctcatcttattactctacaatcacatgtattttcctaattaaaacttctttatttagcaatttggtaactcttcttatcactaaacaggttctaacctgtatttaagtgtttccaacaaataaaaaattttcttccagataatgaatatayagcacttgaatttcacaaaaatgaatattcaggctttcagaataattttaaaagtgaaaatccacata

SEQ ID NO: 913608 - DNA, 599 bp, Homo sapiens
ggcgacagagcaagactccgtctcaaaaaaaaaaaaaaaaaaaaccacactggaggaatcacaaggggtgtccccatattctgggtctccccatatcctgggttcctagaaattcaggcaggaggtcaatgggaccttatctttgaactgcaagcagggatctcacgtgtgtaatttcaagggaggcaagtggtcagcacctctggggagtgaataggaagcatcaaaagttacaaattggcactatttatcactgctcaaaattaagcagaaaagatttcaatgaaaagaattcagaacaaacttggataaaatgcagcagtaaaaatgtcataattctacacatcttctaaaaaccctgcagtacaaatttttccaatctttagcatgcttggaaaatatctaaattacctagagccctatgaaagtgcagggctggcttgttcaagttgaaaatgagtataacaagaatgttcacattttgtgagaaagtaaaaattcaactmaactggacacaaaaagatccttgcttcaaagtcacctataaataatgaacaattgaaaatgcctaaatgtcaagcgatagtttaaatggttaa

SEQ ID NO: 913609 - DNA, 549 bp, Homo sapiens
agggagaaaccaggggtaaggaatttgagcttgaggcagaggcaatgtgaaattattatcaattcttttttttttttttttttttgaggagtctcactgtatcacccaggctggagtacagtggcatgatcttggctctgcctcccaagttcaagcaattctcctgtcttagcctcctgagtagctgggactacaggcacaggccaccatgcctggctacttttgtttttttttttgagacggagtcttgctctgtcacccaggctggagtgcagcggcgcaatctcggctcactgcaagctccgtcttccgggttcacgccattctcctgcctcagcctcccaagtagctgggaatacaggcacccgccaccacgcccggctaatttttttgtattttttttagtagatacggggtttcaccatgttagccaggatggtcttgatctcctgacctcatgatccgcccgcctccgcctcccaaagtgctgggattacaggtgtcagccaccgcgcccagccaccyagctactttttgtatttttagtag

SEQ ID NO: 913610 - DNA, 525 bp, Homo sapiens
ctgcttttactgacttcatcactgtgttcagtgagttccaggacgtgagtttgaataaatggaaaaatgggaacctgaaaccctcagcaaagtctgctgtgagcatgtgtctctgatctttcaagtactgctttggccactcttaagcttcgtgaaccttattttcctcatacataaatgggaggagagtagtaatgacatctactatttattaatcacctgctgagcatcagaggctgtgatgagtgccttacaggtctcattttttcctcactggagccctataagataagtactgttttccccattttatagacaaagagactgaggttcagagaggcccagaaatcttaggcagccagtaaatgccagaaacagaagttgaagccaagtctgtttgatgccagagcctgggcccatcaccaccccctggactctgtgccctccgggagctgttgcaaagatgagagttatttttctgtgtggtgcctggcacacagtgccrgtgtgcaaaatcaccaacgc

SEQ ID NO: 913611 - DNA, 661 bp, Homo sapiens
gctaaatgaagtaagccagacacaaaaggacaaatactatacaattccacttatatgagatccctagagtagtcraattcacagatatttcagatgctttttacattattctttaaacactacattattcatctataatgagctactcccttttatgcatctttttttctcctgcagtttcttctaccctttccacttgtatcgtggtcaaatattctgtttaaagtgaattttaatctgctttatgaaaccatttctactgatctcagatcattgcttcctctcccgtacttctaggatcctttatccataaagtcaccatgtcattgatcacatcctgatatatttagatgggaagccatgtgcttctcacactgagtatgacttcatttaagacaggtcaagtaacatcctgatctttatattctagatcacagaaaatccctggcacactgtaggtgctcaataaatattggagaaataaataaaataatgacttagattataagcagtctcaaacccagatatatgtcatcatttggagaatttcagaaacctatctgtggcaaactctcattcattattaatggagtgtaaattatatcatggaatagaacttggcaatatgcaccaagtcttaaaactcattctttgagcaaac

SEQ ID NO: 913612 - DNA, 593 bp, Homo sapiens
tctggttcactttgctttgctttgctagttggctaagatgaaaacttgcaatctgcatttaaacaaacctctaatgtttgmaaacttttagaatggatggattacatgatcaacttcctgtttttctgttatgtggtcccctgaagattgatcaagcccccaaactttatttcacaatgctgttattttagtaatcatggatgacaggacctccttctacttttacacaatgccactttatacacatgccctaaaccaaatatacacaggatattccaataaaatgttaagcttttggtggaggcggagcaaggtggctgaatagaagctttcactgatcgtcctccctgcaggaacaccaaatttaacaactacctacacacaaaaaaaacccttcataaaaaaacaaaaattatgtgtgcaataactgtacctggttttaactttatattgctgaaagatgctgtgaagaaggtaggaaagacagtcttgaattactatcaccagccctcctccatcttctggcaacagcctcatggcatggagagagaacccatgcacttgaggaacggagagcacagtgattgtaggga

SEQ ID NO: 913613 - DNA, 634 bp, Homo sapiens
gcctagggtacaagtactaggtcctactattacaagcccactaccatttctgtcattacacaagtgctttgaagtttaaagcatagttttkcttcacatcttcaatccaccaagaaattgtatgtaacaggatagatatgctagcctcattgtgctgccaggaaattatctgtgctagaaggcgtctgttgctgaaatcacccctcctgaaaagcctcggggcatctaccatgcctacaggccccttctgagggcagccatgttcaaaggactctgggctgtggataacatgaccctgtgacctggtctctgccatattacagtggttaaaggcaagggatttgaagttaaacagagctaagtttgagtcccagctctgccagtatttagcttctctgagtctttgtttccgtatctttaaaacagggataagaataataactgcttcccagggctgagatgagcagtaatctgaattctagacattgagttaaatgacagataccgttcttggtagagtttttggtttttgtcattgttctaatgcacatacacaacagtggcctctgaggtaagcctgacatgagattgcagtggcactctctcctacctgaagacccatcagtgcaaccac

SEQ ID NO: 913614 - DNA, 230 bp, Homo sapiens
ttccaggttggagatacaaatttgagagttatcaagatayagattggatgatctcacccaagatatagactggataagctcacccaaggattgagtgtagataaaaaagtctagagtggaagttagagttgcttgcgttaccacataaaaatagaagacactcggttgaatttgaacttcagataaacaataaatttttttagaatgagtatgttccatgcaatatttgg

SEQ ID NO: 913615 - DNA, 664 bp, Homo sapiens
aagcataactcatgatcccttcctctttccttcaagttgtttaagttctatttsggccaggcacagtggctcattcctataatcccagtcactaaggaggtaaaggcaggaggattgcttcttgaggccaggagttcgaaactgcagtgagctataatcacaccactgcactccagcctgggcaacagagtgagaccccatctcaaaaacaaaatagtttggtttgggaaataagcccaaggtcatctcaataccactgttcctccctatttcctttttgcaaaatccctttagggtgagtggattgcttccttaaaaagactttcctatcacctcaataatataatatactacagttagctttattatttggaattattgctattatcaatacctggaaaatatgtttgattgatagtctaattgctgatctgtctctaattttgctacagtcataaaaagctaagaacaaaacaataggtggcaggcacttgcacattctaaaatgaagtattgggctatttgtgcatgacttgcagaggagatgggggaaaagaaaggttgtcatggcctgagcccaatactcacaagtgtaaggcagtgtcaattaagagtaaactatcaaagaaagagatggggagagtcattggtttgctgtggattt

SEQ ID NO: 913616 - DNA, 717 bp, Homo sapiens
cccttaattttactactattgctttagaaactttatttggattcctgttcatctagttcatttactattggggcttccctgaatacctgctggtgaaattgagaagttscctttttaatgcttaaattttggaagaaaatctatggtccagtaagatacacagtgaagtgataagttgcagtggcctgctccataatttattaatattcggcttagttgcttcagcaaataactatacatttactttatactgacataaagacaacacattatggatccagaatttcatagtttgctatgttctggggaaatatgccttgaaggcttcttaagtcaaagttaaaatataattgatagaactcagcagtttcaatcaaagaatgagtgttgtgatatggattgcaaatcagaaaagtaaaggtgagtaaaatttgctctgaatgtataagttttccaattgttatctcttaatcctccaataggtgtggagtccagagtcacacagggaaatggagtgcaagatggggttcacagatacagttcttttgattccttctcaaatgctaaaggccctagatttgatgttgcagttaaggactaaagaaaaggcagatgaggtggcatatcatctcctctgcattttatattactagtgtctcatgcctgtactctcagcactttgggaggccaacgtgggaggactgcttgagcccagga

SEQ ID NO: 913617 - DNA, 590 bp, Homo sapiens
aattgaggaggttgaggcacaaggaggcttttaaaggcaaaaggaggagtccatgtcagttattttgcaacaaagagaacaatggttagaagggtttattgcaggagttgactgtcagctcatgagtggagactgtatcaggcacaggttcttatacttatggttaaatgtccttgtgactcatgtagcaagttgcagtttggaaaatcttttacaaaagtttttgttacaggcttatgtgcataagaaccttcagagagtctttacaatagttcttatcacaggcatgtttgcatgagggttttccctttctaatctcctgactttattttgagtttaacacaagtgactccatgtttgtatggataactttcacatcggtgtggattagtattttaatgatgcttttaagtgcattcttctagtgacaaattatattgatcattttctcatatgcttattagccattcatrtattttctttcatgaaatgcctgctcaaatctcttggccatttttattggattatttatcatatgtcctcacaaagacttcaacatgaatgctttagctattttatttataattcca

SEQ ID NO: 913618 - DNA, 639 bp, Homo sapiens
agtggtgtgtagttctccctgaagaggtccttcactttgcttgttagctgcattcctaggtattttattcttttttgtagcaattgtgaatgagagttcattcatgatttggttctctgcttgcctgttgttggtgtataggaatgctagagaatttgcacattgattttgtatcctgagattttgctgaagatgcttatcagcttaagcttttgtgctgagttgatgaagttttccacatataggatcatgtcatctacagagacaatttaacttcctctcttcctgtttaagtaccttttacttctttctcttgcctgattgacttggccagaacttccaatactgtgttgaataggagtaatgagagaggacatccttgtcttgtgccagtttacaaaaaggaatgcttctagtttttgcccattcagtgtgatattggctgtcagtttttcatacatgagatatttcccttcaatacctagtttattgaaatattttaacatgaaaggatattgaattttatcaaaggccttttctgcrtctattgagataatcacatggtttttgtctttagttctctttatgtgatgactgacatttattgatttgcatttgttgaaccaaccttgcatcctg

SEQ ID NO: 913619 - DNA, 645 bp, Homo sapiens
ttcccttttaaaactgaatacttgtcacagcactcaagtcacctcttgaatgctttgctgcttagaaatttctttggccacattccctaartcatctctcaagttcaaagttccacaaatctttagggcaggggaaaaatgctgcctgtctctttgctaaaacataacaagagtcacttttgctccggttcccaacaagttcctcatctccatctgagatcacctcagcctggaccttattgtccatattgctatcagcattttgggcaaagccattcaacaagtctctaggaagttccaaactttcccacattttcccgtcttcttctgaaccctccaaactgttccaacctctgcctgttacccagttccatagtcacttccacattttcaggtatcttttcagcagcaccccactagtaccacttttctgtattagtctattttcatgctgctgataaagacatacctgagactgggaaatttacaagagaaagaggtttaatttgacttacagaagactcacaatcatggtggaagccaaggaagaacaaatcacaccttacatggaatgaagcaggataagagagaatgaggaagacgcaaaagtggaaacccctgaaaaaaacatcagatttcatgaga

SEQ ID NO: 913620 - DNA, 518 bp, Homo sapiens
aagccttgataaagtaatgatggtattgtctaagtgtgcttatagcaataaggggaaaaagaacttcatttgaactgcaggaattttcctacagacaattctcattaacatttaaattggaaggtcattctaacatctaggccagttctatgctcaaggaaccatggtgaaattcttaagtctgatctttagttcttctattaatgtatatgcactactctgtctttctgctctctctgtctctcttgctttctctctctccttcaatcagatgcttttcatatttcttagcatatgctcttgaaaaaaagtggccttttaatttttttaactaatttaacacagcatttttcaccaaactaattcataaatcaaagattagtccagagttgccaccttgcaaattttctggaattatgccactaatagtgatacttgataaccaatcccattcccatcatctatgtgctggttatagacaawacacagccccattttttttcattaaagacacttgt

SEQ ID NO: 913621 - DNA, 649 bp, Homo sapiens
ctctggtgccaagagaaacagagtaaaatgcacttaaggcatatagccaactccagccccagcagctgacttcccgccatccayacaggccacctctggcagaaggaccagcctgaacaaaatcccactactgagtctggttccccctagccctccagttctctcagcctcacacctcctttcccaaggagctcagaaatgctaaggactgccaggattcttcatgtacctgttcattgactccttgcactccctttaattgaacaccatcttagttatctatagcagcacaagtcaccacaagcttagcagctgagaacaacgcacatggtcaccacacagtttctgcacgttaggagtctggcccgggctcacctgcaccctctgctcagggtctcaccaggcagcagcccagcagtggccagggctgcagtctcatcagaggctggactgggaaaggatccacttccaagctccctcggggtgtcagcagaatgcatttcattgcatctgtaagactgaggggcctggcttcatgctatcagctggaggccactgtcaggccctagaggctgtctgcagtcccctgccaggcagccccctctctataggccttctcacctcgtggcaggttgcttccccaaatcca

SEQ ID NO: 913622 - DNA, 655 bp, Homo sapiens
ggagaccaggaaagccggtggtgtgatcagtccatgtccaaagktctggcaaacaggggagctgacagtggaattctcaggtcaaagccaaaggtaggagaacctgggggctgctggcatcagtcctggaatccaaaggcctgagaaccagaagacctaccatccgaggggaggagacagatgtctgcactcaaacagaaagagaattcgcccttcctcagccttattattctacctgggccctccatgaatgggatgatgcccacccgtgttggtgggggtggatcttctttactcagtctgctggttcccatgctaatctctccagaagcgccctcgcagacacacccagagatgatgctcttccagctacctgggcatcccttagccccgtcaaattgacacttgaaattaactaccacagcagcaacaacaataatgaagcaaaactgagtgcggtgagtcagtctacgcgtgagcacatgtatacatagggaccatgagcaccctaaatttggccaggctcaggactcctcatttgtccccctctctctggcttattcgagacaaggaaggacttccttctccccaggcctgtcctaacctagctgaacaccctgcagcaatcaagaaaaaagaatgcctccaaattgaa

SEQ ID NO: 913623 - DNA, 306 bp, Homo sapiens
caaagtggatggtgacataatccttcatctttatgacaaaggaggaattgagcaaacaatttgtatrttggatagtgtgtttgcatttgttttactggattctgccaataagaaagtgtccctggacagagatacataaagagtcagacctttgtttaaagcagtgacagaagatggatttttggctgtgtgttcagaagctaaaggtaatagtaaatttatgtatagattttcattattgtcttggtcatgtgttttcttttaaattatatctgaaaatctcttagcaatctagaattttacaag

SEQ ID NO: 913624 - DNA, 306 bp, Homo sapiens
caaagtggatggtgacataatccttcatctttatgacaaaggaggaattgagcaaacaatttgtatattggatrgtgtgtttgcatttgttttactggattctgccaataagaaagtgtccctggacagagatacataaagagtcagacctttgtttaaagcagtgacagaagatggatttttggctgtgtgttcagaagctaaaggtaatagtaaatttatgtatagattttcattattgtcttggtcatgtgttttcttttaaattatatctgaaaatctcttagcaatctagaattttacaag

SEQ ID NO: 913625 - DNA, 593 bp, Homo sapiens
atcttcctctgtaaatattcctctggaaagccaaacttcactgagttccatgcacttggaagatcatttggaagagagaagggcctggaggttattccatatcttgttattgttatttctcctcactgtttactgtatctcctcttattataacatttatttactaacttctgcaaaatgaaaccagtaataatggctgggtttctggtaattcagtagtggagaaaatcaggataaagtacaaaataatgatacattaagtttttctttattttgatgtacttttcttgggttaacaaccacaaacattatttgttttgaagaaaattaaggaataaagggaataattcaataatatcaaaatagtatagcaatttgaaatttgagaaagcatgattttctccccattcatcttagggtgatgaaatgaagaaattgggaatacagcctattcctatgatggacaragacaagaaggatgaagtcccccaaggccaggtatgaattattaaagtaaattgtaattgctaaagccaaatagtttaaggtgggcataaaatcatacataaatggaaagcatgtcatcatatatt

SEQ ID NO: 913626 - DNA, 593 bp, Homo sapiens
atcttcctctgtaaatattcctctggaaagccaaacttcactgagttccatgcacttggaagatcatttggaagagagaagggcctggaggttattccatatcttgttattgttatttctcctcactgtttactgtatctcctcttattataacatttatttactaacttctgcaaaatgaaaccagtaataatggctgggtttctggtaattcagtagtggagaaaatcaggataaagtacaaaataatgatacattaagtttttctttattttgatgtacttttcttgggttaacaaccacaaacattatttgttttgaagaaaattaaggaataaagggaataattcaataatatcaaaatagtatagcaatttgaaatttgagaaagcatgattttctccccattcatcttagggtgatgaaatgaagaaattgggaatacagcctattcctatgatggacagaracaagaaggatgaagtcccccaaggccaggtatgaattattaaagtaaattgtaattgctaaagccaaatagtttaaggtgggcataaaatcatacataaatggaaagcatgtcatcatatatt

SEQ ID NO: 913627 - DNA, 618 bp, Homo sapiens
tcatgatagtaaatgtgttctcgtgaggtctgatggtaggtaaaaagtgtgtggcacttccygccttgcactccctcttctgccaccatgggaagaagttccttgcttcccgtttcccttccgctgtgattataagtttcctgaggcctcacagtcatgcttcctgttaagcctgtggaactgtgagtcaattaaaccaaacaccgcatgttctcactcataggtgggaactgaacaatgaggacacatggacacagggtggggaacatcacacactggggcctgttgtggggtggggggagcggggagggatagcattaggagatatacctaatgttaaatgacgagttgatgggtgcagcacaccaacatggcacatgtatacatatgtaactaacctgcacgttgtgcacatgtaccctacaacttaaagtataataataaaaaaaattaaacctcttttattcataaatgacccagtctgaggtagttctttctagcagtgtgagaacagactaatacacaaaccatttactaaactgacaaaaaagaaatatatatgtttaataatctaaaaacaaataatagatataatgaaaattagaaattatgagggat

SEQ ID NO: 913628 - DNA, 642 bp, Homo sapiens
  misc_feature 458: n = A,T,C or G
gaaagagataacactaaaggcatcataggtttaactgaaatacgttatatgaagttttacaaaaaggtcaacagaaagctcatttgtgaaaacatactctcatgggagcttctttaacattagttcagaggttaatatatttcctggaggtgttttcctagaattgattgcactattgcatggcaataacatttaattgttaaggaaacattatatataggttcaaattatcccttaatgttgatttctccccttttcatggatttgatactaagaaacaaaatgctttgagattttggtaactattttgattttgataaaacatgttaaaatagaaggacatgatatttttctatagtttccatcacgaagagtacatcagaaacttctccataagaaaagaaaactgactctctcttgaactagtgttacaaaatacactaatgtcttcttaattntatttattaggagaaaaatcagaatattaaatttgcaaacttttgaacagcagtaatagctccttaracactcagtatctttcttccagatctttcaagcacatttaatttctttcccatggtatttgtttgctttgtgttttttcaataatttgtttgctaaagaacaataacaacaacaaag

SEQ ID NO: 913629 - DNA, 604 bp, Homo sapiens
aagcattcagcttcctcttattaatcccataaaatcctataccatttgcgagatttgctttatgcatattagcaatacagtacaaatatagtgtgtttgatttgcactgtagttgtattgtattgccactctgtataaaaatccaatcatcagctagatacctacctaacaaaaaagttgctcctagaaggaaggaagcaaagctaatgtttagtggatatgactgagtggcttttataagcagtcatttgataaataaacgtttctaggttatgatgacttttagtctcctatactgcttcagacttcagggactcagataatgaatgctgagataatgtggatgttttatcattctgtagcatggtgatcagggattccagaaacataaaggtaaagttctaaccttataaagaaacgacatggtcagtgaaagagcactgggctggaaattacaagtcccaggtcccaatgcagaatctgccactaagtaagctgtgagggcttaggcaagccatttcacttttctctggctcattttatttgyatgaaaagaaagaaaaaggaattcattgtgattctgaaccttttcactccccaagga

SEQ ID NO: 913630 - DNA, 580 bp, Homo sapiens
tattactgattaggaatacttatttttrtatgatttcacccactcatttaattttgtctacatacataatttcctttgtgacaataggatagtatagtggtttgaggctccctaaaacagaattttagatggagatttatgtgtaggtaatttatagacagagcgctctctggtgaaacttgtgaagacaaagcaagagaaaaagccaaggaaatgcgtagttttacctaaagttaaaatcagcctgatttcacagggaattcaagagtattagttacatcacagagttgtccttcattgagataagatattttgccacctattatcaatcgctcattgtctgtggatagctgaagataataggagacataaaaccgtcttggcatttctctcttcccagggcaattctccagagaaagatgcagtgggggatgttagcagccaaccctttgggaacctggggcatgtgtaaacaggtctgctaaaataattggagcacattacccatttttccactacacatggagtccagcattttatttcatgtttctttaatctagtggagtctttatttctggga

SEQ ID NO: 913631 - DNA, 678 bp, Homo sapiens
tacttttagttaatctaatatctatagaaacaatgctaatgactggcttgctgttaataaatacgtgggtaaatctctgttcagggctctgctctgaaggctgtaagacccgccccccccccccgwtttcccacttcacacctctatatttctgtgtgtgtgtctttaattcctctagtgctgctgggttagggtctctccaaccgacctggtctcagcaagtggtgcccattcatgggggctcaaatacaggtcaaaggatcgctggagcaacgattggagaatgtggaactagctggaggacacccgagtactcttaaagcaatccccgtggtgagtaagaaggggagctcggaagcatcagggtagcaataggacaagtgtgggctgtggttcgttctaccttggaactttttcacactgatgatgaggaggaaggagagtataacaaagtaacagtagaggttacagaccaggtttatttgtcacctaaagctaaagcagaaaaggagggagaggttcatccctatccttctgcacaccctcattactattttgaagaaaacgaccctccagatctttcttttctggaggacactgggtgaaaagtagttgccctggtgactgttcgagcagcgccttgagcgactgctcttagttctattcaggcaggaatac

SEQ ID NO: 913632 - DNA, 620 bp, Homo sapiens
tctcattgtggttttgatttgcattcctctgatgaccagtgatgatgagcattttttcatgtgtgttttggctgcataaatgtcttcttttgagaagtgyctgttcatatccttcgcccactttgtgatggggttgtttttttcctataaatttttttgagttctttgtagattctggatattagccctttgtcagataagcagattgcaaaaattttctcccattctgtaggttgcctgttcactctgatggtagtttcttgaagacagtgtggcgattcctcaaggatatagaagtagaaataccatttgacccagacattccattactgggtatatacccaaaggattgtaaatcatgctgttataaagacacatgcacacgtttgtttattgcagcactattcacaatagcaaagacatggaaacaacccaaatgtccatcaatgatagactggattaagaaaatgtggcaaatatacaccatggaatactatgcagccataaaaaatgatgagttcatgtcctctgtaaggacatggatgaagctggaaaccatcattctcagcaaactatcacaaggacaaaaaccaaacaccacatgttctcactcataggtg

SEQ ID NO: 913633 - DNA, 616 bp, Homo sapiens
gataggtcatatttagcatatctattcagaatcgacagctcaartaataaaatacttgcagaaagtttacattctatgtaacatatttgcataatctgttttatgatacaaaggctttcagatacttgtaatttagattttcaattgaaaataattttatttttattgttcaatatttattaacaagcttcaatttattatggaagagggaattcatccaaaaatgacagaggactatccagacattattccattgcaggttatgatttagtccgccctggcttaaagtctaaatttcaaatgcagtaggggatgcctagtttgccacctcatagttttacctgggaaatttactgtctgaagacatttaaaagtttattagaaattatttaaaaattaattacagtatagattaaatataattagtttcattacattgtacattggtggacaattataaattatatacttgctgaattagggttttctagagggacagaactgataggatcaatatatacatgaaggggagtttattaagtagtagtaattcacacaatcaccaggtcccacaatagcccatctgcaagctgaggagcaagaaaaccagcctgag

SEQ ID NO: 913634 - DNA, 567 bp, Homo sapiens
tttaaaaacatttgaaaatcaagacagaagaaagtcatgaatggggagtggggggaatagagattagcctcagacttttcatagcagttttttatgacagtacatattggcaaaatgtctaaaaatttggaaatgaatgtatgatgaataatttcatgtcaataaagttgtcctttagttataaacatagaaagcagacaaattaacactttcaagacctgaaggaatacagtacccattaacttctgttgaaattaaatataaagtttattactaagtaagaaacttcagcaaaccaaaaaataactcaaaagacttagaaatggaaaaggatggctgggtgcggtggctaacgcctataatcccagcacttcgggaggccaaagggggcagatcatctgaggtcaggagtttgagacaagcctggctaacatggtgaaaccctgtttctactaaaaaaaaaaatacaaaaaattasctgggagtggtggcgtgtgcctgtaatcccggctacttgggaggctgaggcaggagaatcgcttgaacccaggaagtggaggttgcagt

SEQ ID NO: 913635 - DNA, 606 bp, Homo sapiens
cccaaagttcatgctcctgccatgacagtgatggtggacaggagggaagaaaatgacaaggaggaaaggaggtgtcttttgctcttaaaaatgagaagggtcataaacaatccatcggctgcaaaccacgagttgcccccaaagcaaagcaggttagtggctgctgccgcctcatcatagcttcagaacccacagagcctggaggactgtcaaacattatctaatatcccattctacagaagagaaaactgaggttgaggcaggaacgcagacaggaatcaaggttttggggttgggatttgcaatccattactttgcctcctgcatccactgcttttccctgggcattctcttcttccggtttcttggaagttaaaattgcgagagaagcaacacagagtggttttcccagggcctcgacctcggtaagggaagacgtggaattccgagtgtggagacccagacagcctccgaamcccccacgcaaccctgggcgttcagcagctgccaatgcccgcctgacaagtttctggggcatctctgcacacggagaggtgtgtctcctgcagctccaaaaacagattttgccatctcatccccatattt

SEQ ID NO: 913636 - DNA, 635 bp, Homo sapiens
ctggcattcctccaaaactgtctggttatttctcccactgtatcatcttggatgcttttggctctaaataacagaaaccctgactcaaactggattaaacaagaaagaacgtcattatagcacaaaatgaaaagtctagcattaggtttggttaattcaggggctcagcaatgtcagctgggacatgggttatttccatctcttcactatgaaatccacactgttgacttcattccaaagctgacttttctgcatagccagaagttggctgtaaatagtacagtaatacccccctatccaaaagggaattgttccaagacctctagtggatgcctaaaactgctgatagtaccaaatgctatatatactatctttgttcctatccatatatactatgataaagtttaatttataaattaggtaccataaagattaacaaccgtaagtaaaatatgggttagttgaacacaagcactataatactacaacagtcaatctggtagccgagaggactaaatgactaatgtgtggtagcatgtacaatatggatatggtgcacaatttaaaayttgtgaattgtttatttctcaaaatttccatggaatagtttcagactgtggttgaccataggtaac

SEQ ID NO: 913637 - DNA, 618 bp, Homo sapiens
catgggagcaaggccagctaccagatcttggggcttctcctttagcaaaggggaaaatccccggccctgcaggcatttcaagctcagggattggtggaggcagatctgtcaggagccccggtaacactacaaaccaggagggaagctgacaggaggacaagcaatgctggcattttcctcccttggaaatcccagggactctaacaccagagatctgaggctgatctgatgctccagcaactatataacctccaccctgcctgaacagcctcctacaaataggaaactataagatttgcattatctcagaataaccatttgtaggactagagtccgtccatcagcagtaactgttcttactcaaccttgataaaagctttgccagatgagttgggctctgtttaagtttactaggcctgccataacaaggtaatacaaattgggtggcttaaatgtagtatcacagttctggagactagtagtctgagatcaaggtgttcacaggaccatgttttctgaaactctgggtagaatccatccttgcctgttcctcgttyctaatggtggccatcaatttttggcattcacaagcttgtagctgtgctatgccaatctctg

SEQ ID NO: 913638 - DNA, 664 bp, Homo sapiens
taaatttaaaacctgctgcttgattagagtattgaaaaatatttaaacgtatttggaacaatttgggtatgtgaatttcctctttcaactataaatcttacaaaatctaaacacagatcgagtattccgaattaaaatttaacattcaaattaaaatgtgctacatgtaacaaatacatacaagatttcaaaaaatatactataaaaaagagaatgtaaataaagtcattgataatttttatgttaataactttcatgttgaaatatgttgatatattgggtaaagtagaatacaatataaaactaatttgtcctgtttcttttgacttttctgatgtgatgattagaacatttaaagttacataagtggtttgcattatatttccagtggacagtgctaagcagaggatagcaaataatcatttggattgagtcttctcaccagactggctagtgattttggccttgcacagacatttcattaattaaccgagcacctatcctgagctagggataaagtagcagttgaatcagaaataarcacataagcaaacattgtaaataagacaatttctgataattatcataagcagaaggaaggaaataaagtaataaaagagagaataattacccagaaatggagctggtttctttacatgggagg

SEQ ID NO: 913639 - DNA, 603 bp, Homo sapiens
ttaccttgtcacccaggttggagtgcagtggtgcaatcccagttcactgcaacctctgcctcacagattcaagcaattctcctgcctcagcctccctcctgagtagctgggacaccaggagcatgsctccatgcacagctaatttttataattacatgtagagagggggtttcaccattttgaccaggctggtctcgaactcctgacctcaggtgatccacccacctcagcctcctaaagtgctaagatttcaggtatgagccaccatgcccagcccatgtttgccctcttgcttctcctgaaatagccaagctcttcctcatctgaaggcttctgctcttgctctttaatctgctacaaaaatctctttccttgcttcttgctctttgcctggtgtcttcctttacctctttcttatcccagattaagtctcgccaccttttgaaggccttttctggccaccctgtctaaagtggtcttcctgtcccaccatttttctccattgtcccatcctattcagttcattgaaaatattacgattgctgattcttggtgtatttacttaacaatatgtgttttcttgcctgtcttttctactagatt

SEQ ID NO: 913640 - DNA, 603 bp, Homo sapiens
ttaccttgtcacccaggttggagtgcagtggtgcaatcccagttcactgcaacctctgcctcacagattcaagcaattctcctgcctcagcctccctcctgagtagctgggacaccaggagcatgcctccatgcmcagctaatttttataattacatgtagagagggggtttcaccattttgaccaggctggtctcgaactcctgacctcaggtgatccacccacctcagcctcctaaagtgctaagatttcaggtatgagccaccatgcccagcccatgtttgccctcttgcttctcctgaaatagccaagctcttcctcatctgaaggcttctgctcttgctctttaatctgctacaaaaatctctttccttgcttcttgctctttgcctggtgtcttcctttacctctttcttatcccagattaagtctcgccaccttttgaaggccttttctggccaccctgtctaaagtggtcttcctgtcccaccatttttctccattgtcccatcctattcagttcattgaaaatattacgattgctgattcttggtgtatttacttaacaatatgtgttttcttgcctgtcttttctactagatt

SEQ ID NO: 913641 - DNA, 535 bp, Homo sapiens
ctcagcatttgacttccatggctcctgtaagagaagagaacatgaagaacaaaacaggaggtttttatgggaggcatgtcaatttgaccagatactttgcccagaaccttgtcacatggcctctgcctaaatgacaatgaggctagtggctgggtgtggtggctcatgcttgtaatctcagcactttgggaggctgagccaggagggtctcttgagcctaggaattcaagatcagcctgggcaacatagggagacttcgtcgctacaaaaaaaaataaattaaaaattagctgggcatagtggcacatgcctgtagtctcagctagttgggaggctgaagtgggaagatcacttgagctgggaggttgaggctgcagtgagccgagatcacgccactgcactctagcctgaatgacaaagtgagaccctatctcaaagaaaaaacaaaaaatgagtctggktaacgtagcctgtgagaccagaaagaagcatcaggattggcgagtattaataccatctctaccataaacatttt

SEQ ID NO: 913642 - DNA, 668 bp, Homo sapiens
caacctcagcagtgactgacttactggtaagaacaaatctgtatccctaaaaagagatggggggaaatcctatttaaggattagcatttccttctaaatgcttaacaatgrttccagagaaattcagtcaaatgatgcctgctcccgaatgatgctgaataacagctgtactgggcttatggcttgctttctttggttgtggaaaaatatatttcatcctcttctttgctgttgttgatatggttcatattactcaaagatgtctaattctcatgtcttaaattgagactgttggcactttctgctgactcattgtgtcttaatcttccaaggtggtccatttttacttaaagaaaaaggttattttcctccaaagtggcaggttctacaaaatgaccatctggtcccagcttccccatcacttcctttattcaaatgacactagtcacagatcttgaacttgagagatgactttccatgcctgtaaccttgaatcagtggtttctgtcctttactgataacagcaagtaaaaaaatgaaagtctcttaggtgcccccctgaggccagagttcagccctacactcctgcctcattcctttttcagagaattttctcagttgagctctgaaaatcctgcaagttggacagagttccctttccatgaaga

SEQ ID NO: 913643 - DNA, 587 bp, Homo sapiens
tgaggaggttgaggcacaaggaggcttttaaaggcaaaaggaggagtccatgtcagttattttgcaacaaagagaacaatggttagaagggtttattgcaggagttgactgtcagctcatgagtggagactgtatcaggcacaggttcttatacttatggttaaatgtccttgtgactcatgtagcaagttgcagtttggaaaatcttttacaaaagtttttgttacaggcttatgtgcataagaaccttcagagagtctttacaatagttcttatcacaggcatgtttgcatgagggttttccctttctaatctcctgactttattttgagtttaacacaagtgactccatgtttgtatggataactttcacatcggtgtggattagtattttaatgatgcttttaagtgcattcttctagtgacaaattatattgatcattttctcatatgcttattagccattcatrtattttctttcatgaaatgcctgctcaaatctcttggccatttttattggattatttatcatatgtcctcacaaagacttcaacatgaatgctttagctattttatttataattcca

SEQ ID NO: 913644 - DNA, 638 bp, Homo sapiens
agtggtgtgtagttctccctgaagaggtccttcactttgcttgttagctgcattcctaggtattttattcttttttgtagcaattgtgaatgagagttcattcatgatttggttctctgcttgcctgttgttggtgtataggaatgctagagaatttgcacattgattttgtatcctgagattttgctgaagatgcttatcagcttaagcttttgtgctgagttgatgaagttttccacatataggatcatgtcatctacagagacaatttaacttcctctcttcctgtttaagtaccttttacttctttctcttgcctgattgacttggccagaacttccaatactgtgttgaataggagtaatgagagaggacatccttgtcttgtgccagtttacaaaaaggaatgcttctagtttttgcccattcagtgtgatattggctgtcagtttttcatacatgagatatttcccttcaatacctagtttattgaaatattttaacatgaaaggatattgaattttatcaaaggccttttctgcrtctattgagataatcacatggtttttgtctttagttctctttatgtgatgactgacatttattgatttgcatttgttgaaccaaccttgcatcct

SEQ ID NO: 913645 - DNA, 593 bp, Homo sapiens
tctgaataaaaaataaactaataaaagtaaagtatttttaaccacaagtgtcacatataattttatattttgttgctctttacaattctaaaaaaatggctaatttctctgcattgttaaattatctgccattcctaagaagtttccattctttatttaatttcttatatttcatttaatatgtttacaaattaaacagataaatgagtatagtcttatgtgtgtggttatatttttctagttaatttcattgggagactatcttatttgcctcagaatcagtacatctttatgtctttgatattatgtctgacatatttttcttcagtctacacttaaaaattttccaggaaatatatgatttttattcacaaatatttaagtgatattaaaatatgactcaaatgataataaacgaacaaggtgagagcaaacataaattgccgagagattgacttttcacatgaagaagattaaagaaagtatcaatttatacctctaagtaaaagttcactttatcttgacrttatactaactatagtagtagtttatgataactactaaatttactagtatttgaaagtgtactgttt

SEQ ID NO: 913646 - DNA, 611 bp, Homo sapiens
gcttctgctcaccctctgtgggctgtacacactgtctaaccaatcccagtgaaatgagccaggtacctcagttggaaatgcagaaatcacctaccttctgcattggtctccctgggaactacagactggagctgttcctattccaccatcttgcttgggagtcccacaaattcttattaatagaaatatttaaaatatgctataagataatgttagaaaatatcaaactgattaaatatttgattttttaaaaattatttcaaggaagcttttttcagtgacaaaatggttgtaaaacaatgtgactgaaggaagtattcataaaaaaagttaaaattgacacatagtcttcttgtcattagcagtccgagaccaaatacattacgagtgacttcatgagggcaaatgtacccagaaatctctagtgtattttcctttgtttttctttaaaatgattacatgaaaaaagcaatttgtttacattctggtgtgtctgaaagccctttttttccattgaaacacacacaatctgtctcacacaaataaagctgtttcacataactgaataaattkaagaaaccaaaatccatgatctcctgtctgcttgaagc

SEQ ID NO: 913647 - DNA, 632 bp, Homo sapiens
gggaaaggtgacctgaattatccaggtgtcactgatctaatcacccaatctaatctaatctaatcagcctctaaaagcagataattttgggaaggcgaggctggtggatcatgaggtcaggagttcaagaccagcctggccaagatggtgaaaccccatctctaataaaaatacaaaaattagcccggtgcagtggcaggtgcctgtaatcccagccactcaggaggctgaggcaggagaattgcttgaacccggggggtggaggttgcagtgagccaagatcacgccactgcccagcctgggcaacagagtgagactccatctcaaaaaaagaaaaaaaaaaaaacaaaaaacaagcagagtattgtctacagctagttgaagaacaagatggcataaagaggcagcaaaagggaagttggagagattcaaagtctgagagggaatccacttgctgttgctggagaccatgggtgagaagggccgttactaagagtgtcrcaggcacctcaaagcatgagaagaaatacccctaacctctaggagggaagattaaccctcacatctgagaggcagcaaagaaatgaaaacctcagttacagaaactgaattcttccaaacaaccagagtga

SEQ ID NO: 913648 - DNA, 648 bp, Homo sapiens
gattctggatgtgctcattgctactggtgtggcactkctttcaggggctctcagttaaaaatgcaaacaagcaaatatgtgtgcctaataaaccatgtatatacacatattcataaatatttctatatgcaacaagatgtaactatattcaggtaaaatgaggtcttaccaatatctacaaccctattccattatcaaatagtatttccgaagttacttaggtcagcacctcttcccccagccacctcatctcagtgagataaattcatatgtttatttggactgcatttagcttgttttgtgacattctgcatggcctcctgggatctcaatatcacttgaataattttatttgtaatcactaaggtttacattttgtgcattaaaattctacagattttaacaaatgcatactcttatgtatccaaaatttcagcatcatacacagaagtttcatcactctaaaatactccctgtgttgcagttattaagcctctgctttcttcccctacatccctggcaagcactgatctttttaatatatctatagatttgcctttttcacaatgtcatgtaattggaattataccacatgcagtgttttcagactggctaatttcaattaacagtatgaatttcatattcatc

SEQ ID NO: 913649 - DNA, 581 bp, Homo sapiens
cacttcccaaattaaagactgtttagtctcttttgttcatttttgtgcaaaataatgtatctctttccctgcctcaagttttattgctaaagagcccttctgtcggccgggcgcggtggctcacacctgtaatcccagcactttgggaggccgaggcaggcggatcacaaggtcaggagattgagaccatcctaaccaacatggtgaaaccctgtctctactaaaaatacaaaaaattagccaagcgtggtggatggtgcctgtagtcccagttactcgggaggctgaggcaggagaatggcgtgaatccgggaggcgaagcttgcagtgagccgagatcacgccactgcactccatcctgggtgacagagcaagactccatctcaaaaaagaacccttctgtcatctgcctgtgctgtgtacaaggccaaggggtggcagggagctttctgtctcacagacaatggacatatgtttaacaaaaaagagacagatgctcagtcagaaagctataaagataattatgtcctccaggycagggtcacagagctgctgcaagtgattcacaggtcacttgggaa

SEQ ID NO: 913650 - DNA, 581 bp, Homo sapiens
cggtggctcacgcctgtaatcccagcaccttgggaggccgaggtgtgtggatcacctgaggtcaggagttcgagaccagcttggccgacatggtaaaacctcgtctctactaaaaatgcaaaaaacatagccgggcatggtggcaggcgcctgtaatcccagctactcaataggctgagtcatgagaatcgcttgaaccgtggaggaggagtttacagtgagccaagattgtaccattgctctccagtctgggctacaagagctaaactccatgtcaaaaaacaaaacaaaacaaaacaaaaaaacaaaaaggtaatagaagggaaatcatactctattactctataagagatatcattaaaaagataaaagcccctgcatataacttcatatttatagatcaaatactgaattagcttcttcagaattcaaaaagaagtctctaatgttttctatcaacatttctattcaactagagtaactaaactgtataacagaaaaaaaaagaaatagaagtacaaaattggaaccctgaaaataaagctgtcattatttctaartgacataattgcatacgtaga

SEQ ID NO: 913651 - DNA, 643 bp, Homo sapiens
ttttggtgagataatgccctttctacacacctagtcatctacagtgtctaccttattttctctcttaaattgacaatctggctgacagagtcttgccttcatcctttcacctcaaggatgaaacctccaagtgggaaactttttacaaggctgcacaaactgtctatgtacttctggccaccaaataaattcgctcaggttccaggtcaaccttgacagtgtgcaaaccattatagtaggtggtttgcagtatacaaatgtgaagcagaagcaggctttttctgcacaggtcaaaatataattcttgttgaaaggtgtgttaaagttcatctcagtctccacagacttaggtaatgtgaattggcatatcctgatatatgaagagatggcaagtaccctaagcatgtgtattcttatgaacttcagttttacctttatgaatttgtcctgagaaaagaatgagggatatgtacataaatttaactacaaaactactcattgaagcatgataactatttcaactgaccaacatatatgattgggtaataacagctgacattttttttccatgtgtcagaaaatgcatytcattactcactctgcagaggcacagaacatgtcaggaccttgcccaggatcaaat

SEQ ID NO: 913652 - DNA, 643 bp, Homo sapiens
ttttggtgagataatgccctttctacacacctagtcatctacagtgtctaccttattttctctcttaaattgacaatctggctgacagagtcttgccttcatcctttcacctcaaggatgaaacctccaagtgggaaactttttacaaggctgcacaaactgtctatgtacttctggccaccaaataaattcgctcaggttccaggtcaaccttgacagtgtgcaaaccattatagtaggtggtttgcagtatacaaatgtgaagcagaagcaggctttttctgcacaggtcaaaatataattcttgttgaaaggtgtgttaaagttcatctcagtctccacagacttaggtaatgtgaattggcatatcctgatatatgaagagatggcaagtaccctaagcatgtgtattcttatgaacttcagttttacctttatgaatttgtcctgagaaaagaatgagggatatgtacataaatttaactacaaaactactcattgaagcatgataactatttcaactgaccaacatatatgattgggtaataacagctgacattttttttccatgtgtcagaaaatgcatttcattaytcactctgcagaggcacagaacatgtcaggaccttgcccaggatcaaat

SEQ ID NO: 913653 - DNA, 671 bp, Homo sapiens
catcatagtagtgtacaattaaatgtttagcaaatttgtggaaytggctaaccatcaccacaaaccagtttcaaaacattttaatcacctccataaagtacactgagacaatttgcaatcaaccctagcttacactctcggctccaaaaaaatactttctatattaataaatttgtcttttccagacatttaatataaacaaaacagaaatatttttgtgtgtagttttttttatttatgttgtggcacatatggttttctgtttctttttattgttgaatggtatttcattatatgactataacgcatgttatccattcaccatttgattggcatttggattgttttgactttttagctgtaacaaataatactgtgaacacttacacaagtctctgtgtagacatacactttcatttctcttgtatagatgtgtagaagtgatattattgggttgtatggttatattatgttgaactttttaagaaaatgctaagatgtttttcaaagtggttgtaccattttatattaccaccaacatcaaggctttagttcttctacacttcgccacacttggtgtggtctttggattataactccttgagtgggtgtgcaatggtatctaatcttgattttaattttcatttccttaactaataaatatttcaact

SEQ ID NO: 913654 - DNA, 639 bp, Homo sapiens
taatgtgatgactgcaaaagttggtgagctatatatatgtatttgtgtgtgtgtgtgtgtgtgtcatacatacagaataccgtcatgcactgcataataacatttcaatcaactatgtaccacatatactataatgatctcataagattataatggagctaaaaactttctatcaccttgtgacaaaatcattgccatcttaacataatagcccaattcattaatcctgtgttcgtggtgatgctgatgcaaacaaacctaatgtgctgcaagtcacttaaaaagtaaatataaattaaaaaatagaaaaatatcttagaaaaaatatttacaaatacttagatatacttagaaaatattttatacagttgtacaatgtatatacataatttattatatgttaaatatgtaaaccagtaaatgcgttctaagctaagtgttataactagagtcaaagtgttttttaatcaaaaatttataaatagttatagtaagttaagtttatcactgaggaaagaaaaatattttaaaaacatatagtgtagcctatgtttgcagtgtttataaagyctacagcagtgtaatgtcctggttccacacattcattcaccactcactcactcaatcacccagagcaaa

SEQ ID NO: 913655 - DNA, 685 bp, Homo sapiens
attatgtccattcttgcaagagtgaggtggtatctcattgtcgttttgatttgcatttccctgataattagtgatgttgagcattttttcatacgcttattggccatttttgtatcttcttttgaaaattgtctattcatgtccttaacccactctttgattcaattgtttttttcttgctgaattgtttgagttatttgtagatcctgaatattagtcatttgttggatgtatagattgtgaagattttcttccactctgtgtgttgtctgtttactctgctgattgtttcttttgctatgcagaagctttttagtttaattaagtcccatctatttatctttgtttttgttgcacttgcttttgggttcttggtcatgaagtctttgcctaagccaacgtctagaagggttttccaatgttattttctagaatctttatgatttcaggtcttagattaagtctttgatctattttgagttgatttttgtatagggtgagagatgaggatccagtttcattcttctacatgtggcttaccagttatcccagcaccatttgtttactagggtgtcctttcccactttatgtttttgtttgctttgttgaaaatcagttggctgtaagtgtttggctttrtctgtgggttctcttttctgttccataggtgtatgtgcctattttt

SEQ ID NO: 913656 - DNA, 635 bp, Homo sapiens
aatactgaagactatagtagaaataaattgtcctcatttgaaaaaatatgaggaggtagattgaaattcaattgaaaaattcacacttagatgttcctagcaatgttagataatttcaagtattataaaagaaacaggtcaataagcagctcaagcagatttttttaaactaatttgcaaatgcagaaaatttatatgctataaatgaatgtaaatttacacacaaaactttctataactcattatcttgatataaagtctattgtcactaatggttaaaaaataggtgtgttgaaatgagctaattttagatttgtctgatgttcctttgggttatatttttaggcatctttctgtcaggtgctcttctccattctcaaggattctcttttccctcctttttccccagatgacatacacacaaagaaagtatccatgtcctcatgataagacagaggtcagagagtggcctctgagctgcatagatcctcatgtgctaccctggaaagtaaattccttatttcacccagttattggacatgccacacctgtgtttacaaagttactgctgtcttcattggttttggggagatattgtgcagaaawaccccactgaagtctctgactttggtata

SEQ ID NO: 913657 - DNA, 640 bp, Homo sapiens
tcaaacttactttagagcagaggccccttaagttcaggagacagatttacctttcttataggcttaatagaattaagcaaatcagcacttcctgctaaaggcgggctgcacaaccaccatgctaccagtatcattaaggaaccacatgtgtttaaaataaaattgtttcgaacagtgggtctcaaatacctgctattctggcatactttttgacttttagattgctgtcaagctgtgatgactttaaccttattctttgaaacattctcctttcccctttctttctctattcatttctcaaattaaatttcttctaatgaaaagagaaatagaatatactcaaaatatacttgagggtcaagttggtgtcatttttttccttttcttataagacatttgcactccatttcaaccagtggtcccattattcctcctgtttccaaacaaggaacactggcctcctcacttttctcagatcatgtcagttgccagtctctaggctttgtcatatttttctaagatctgactcttaaatttcctgcttgctcatcattcccatgctatctgtccagtctgagccttaataacctyttctctgtgagaatgaacccaaattttcacctttaccaccctggtgtta

SEQ ID NO: 913658 - DNA, 768 bp, Homo sapiens
tttcatgctgctatgaagaaatacccaagagtgggtaatttataaagaaaagaggtttaattgattcaatgttccacatgactggggaggcctcaggaaacatacaatcatggtggaaggcacctcttcacagggcagcaggagaaagaatgggagctgagcaaagggggaaaagccccttctaaaaccatcacccccatgattcaattacctcccaccaggtccctcccataacatgtggggattatgggaactacaattcaagatgagatttgggtggggacacagccaaaccatatcaagagatgaaggctaagcttgggggaagttgaagcaactgcctaaatttacttattcatggcagtttttattcaattcttgtctgttcatttctagtaaaatgtcagttccattacagaattataaagctaatcataaatcataagttaaacatgatttatgtaagactcaattacattttatgtttgatgataattaagaggtgacgacataatttttgaattatagtaactaacattcataggttactaagttagggctaagaatattttcatatactacctcattaaatccttatagtaattctctaagtcggatactttgtttttttctgttttttgtttgttcgtttgtttttgagatggagtttcactcttgtcacmcaggctggagtgcaatggcaccatcttggatcactgcaacctccacctcctgggttcaagcaattctcctgcctcagcctcccaa

SEQ ID NO: 913659 - DNA, 617 bp, Homo sapiens
aaaaaagtacacactcctgatcrttgtaaatactgcaggcacactgaagtaggcagaataaaaatgttaatttcacctttttctctaaaccaattctattcccctccccccaaagctgctgttcttaatttggtgcttacacttccagatcatgctacatatttacatacacatgtgtacacactggatagaatatgtataggcagaaatgcatgtataagtagtaaacgacaatccaatatcacttaaattattatgtgcatgtgggagatttttaggttttttttttttttttcacttattatttttgagacagggtcttgctctgtcacccaggctggtgtgcagtggcatgatctcagctcactgcagccttgacctcttggactcaagtgatccccccacctcagcgcccccatgtagctgggactacaggtgcacaccaccagtccaggctagtttttttttttggtatttgtcatagaggtggggttttgccatattgcccaggctggcttcaaactcctgagctcaagcaatccacccaccttggcttcccaaagtgctggaattacaggcatgagtcattgcacccaacccagcatgagttttttaaa

SEQ ID NO: 913660 - DNA, 312 bp, Homo sapiens
caggattcatctttctaaaatacttccttctgtgagttacttcttcccccactgaccattaggagctctccctccttgccatctaaagtcctggtctcacctgtcctttctcttgggccttctttttcaccatgtccttctaaagccctcttattagtggtgatcctagaggcatttccattcattgtccctcaaaataaagtggagacccacckgcttttcctcctttctcctccttggctgaaatctctttccccttctacatctctggcctacttcatagggccaactgagtccaaaaataactgaagc

SEQ ID NO: 913661 - DNA, 593 bp, Homo sapiens
gaacaagttggattgctccgaatttcagtgcctatcgggcagccagtgaacatttgtccatctttaaggcattaaactgagaagaaccactgaggaaagcatgccacagtctttcccaaaatccctgtgtcttaaggaacaaccaagaagttaactggtcagggaaaagatttcttttggaacacaggtaagcaaaaccaagacgccatcggagacacccttgcctgcaacggttgtggtataaagcaaggtaagtagcgtgatattcactgctttttgtcccacagaagccatcgctgtgtgcggaaatccatgacctggccatgacttctacaacccggaggacttgcctggcattaccgaaaagcacaggggaaagattctgtggcaggtgccgcatttcatccagctcactccgtgctagttcctaagacatcttaattcttacacatatgcataatcgtgatattttgccatgaataacaatatatttcacaattatcaaccattttaatttttagctttctaacctcggactactataataaawagaaataataaatccaaaagtagtagtggaaaaaataagtatc

SEQ ID NO: 913662 - DNA, 632 bp, Homo sapiens
acgtaactactaaattcatgaattctaagactgacaatttttcacatttatcacttctgaaatcagaaagcatcttacaatgaatgatgtcctaaatatcacwaaactgatgagtgatatttttctttcttcctgatacataaaatagcagggacttttgcaatggataatgtcttctactcaagaaaatagggtattatcccaaaggattataaatcgttctactataaagacacatgcacacatatgtttactgcagcattatttacaataggaaagacttggaaccaacccaaatgcccatcagtgatagactggataaagaaaatgtggcacatatacaccatggaatactaaacagccataaaaaagaatgagttcaggtcctttgcagggacatggatgaagctggaaaccatcattctcaccaaactaacaccggaacaggaagccaaacaccgcatgttctcactcataagtaggagctgaacaatgagaacaaatggacaccagaaggggaacatcacacactgaggcctgtcgtgggggacaaggggagggagagcattaggacaaatatctaatgcatgcggggcttaaaatctagatgacggtgcagcaaacaaccatgg

SEQ ID NO: 913663 - DNA, 598 bp, Homo sapiens
cacactcccggagttgttcatgaaaattaagaactatccaaactattgaacctctattagctgtctgtttccccccacaacctccactccttgtgcaaatcatattcaacccattcgtgataatgttctcactggcacgcctggaaactattaaaaacagatgtccagaccacactgcagacatctgggatggagcaactctggtggggtcataaacatgtctctgtgcgtggaggataagcccccttcaggtgtctgtttagggtcttcttataataccaaatatgtaacttccaaacgagaaactagaggcagcttgcatttgcatttactttggcattttttttcttatttttaagtttgctttcacggattctgaaacgtaaactcttatcttgagctgctgaggccttcataaagattacagtgagaccacacatttatacattgaaactggagattcgacttgtgtatgttacccaccctggaaacaccagwtcctactttgtttcatctaataaatgctctattattagagaaagaaagaggggaagaaagggataactatatttaaaccaagttttatttgctttcactg

SEQ ID NO: 913664 - DNA, 594 bp, Homo sapiens
ctgatatttcattatttaactgcttaaattgttattgttttccgacaaaatgatctgactcctatagaaacaaaatgcaaagatagtttttcagtgggagaaaaggaatccaatagaaaattagtaaaaactgcagcaatacaactctctctaatatataaaaatattccagaagcttaaatgagaaagtaagaatggaaaactggaagtaagaatgtgaaagtttataaggctgctgcttttgtaaggaagaaaagagagggatagggtgggtaaatttgagagctctgactgaggcaaaatactcttagttcccaaactcagctgcacattataccacttggggtctttattacaaattcaggtttctgactgagaacagtggttcacacctgtagtcccagcactttgagaggccaaggcaggcagatcatttgaggtcaggagtttaagatgagcctggccaacatggygaaaccctgtctctactaaaaatacaaaaattagccaagcgtggtggtgagcacctgttatcccagctacttgggaggctgaggcaggagaatcactcgaacccaggaggcggaggttgta

SEQ ID NO: 913665 - DNA, 631 bp, Homo sapiens
ctgtgcttcccactaaactgtgtcctgagggaagggactgtcttacatatttttgtctcctcaggacctagtatgatgtctggtgcacttaaatccttaataaacattttcaatgactttgagtgctttatgttctgcctctttccccgaaggatttgagggtctactttttgggcagacaccatgccggacattttcacaaatgctatctcatttaattctctgaaccaccatgaggtataaggattagctctctattttgcagcgaatgaagcataaactcagagatttaagtaatttgaaagttaagacatcagcaaacagcggagctaacccttggctgtggatactttcgttgctatgccatattgcacagagggggcacaagagagctgtgttctcccccctgcactaaggcgcccccgccccgatttcactcactgtctgctacaaaattggttcgtgcatactactgacagtctgtgcctttctggcccaccacctcagaatgggcaatggccattgctacatcgcccttccctgacttaccyttcccagaacaccttcttccccactagccccgaggcttaaggcttttattaacttcactaaaaaactctgccaatgtctt

SEQ ID NO: 913666 - DNA, 510 bp, Homo sapiens
tatcaaaaaccactgagtgggtggcagaaataagtctctgcctggagatgragtagagctctcttaaatggctgctacttatgataccaatgataacttgtaataatgcataacaaagagcaccctgaattcatttaaccaatttcaataagattgaaacacttttcacacattttcatttactttttttttttttttttgagacagagtttcactcttgtcacccaggctggagtgcaatggcgcggcctcggctcactgcaacctctgcctcccgggttcaagtgattctcctacctcagcctcctgagttgctgggattacaggcatgtgccaccacacccagctaattttgtatttttagtagagacggggtttcaccacattggcaagactggtcttgaactcctgacctcaggtgatccacccgcctcagcctcccaaattgctaggattacaggcctgagcctccatgcccggcctcatttacttttacagcatgctggaaaa

SEQ ID NO: 913667 - DNA, 585 bp, Homo sapiens
tctttttcccccttcaggtctacyccctacctttctctgccctgctctgtcccctgggaggagaacctagataaactgcatccttccttggcttcattgccttctggcttccagttgcgttcagccaatagtgagctctagcagggcactggtgggagcaagccaggaattaagctgagtatttattcctctgtctgcctccttgcttgaccataggttagctgtgctcctccgcagaaggccttccctcatgtgcggggccactttcttacagttctggcttttctctgcggcttccagtaatgtttccttcctctttcctgcttctccttcctgcttcagtgatggtaactcttcctgctgttgctggcagaatgttttcattgtctcttgttggtgtcacttactctgtccacacctttgtggacacattaaatgccactcatcgatcccatttgaatgtactactttcttcaaaccccgactggaagaaaccttaaatgtcttttaattacacagtaagtatagactcccaagctcaagttgaacaccaagtttcaagctactcatttatttcatccttac

SEQ ID NO: 913668 - DNA, 615 bp, Homo sapiens
ctcctgacctcgtgatctgctcgcctcatcctcccaaagcgctgggattacaggcgtgagccaccgtgcccggccacaaagaagctattatttctattctgatcatattgttaccttgtgtttagatatgccctcatccatttttgtggttataccagaatatctgagacaggtggtttataatgaacagacatttattggctcacagttctggaggctggaaggtccaagatcaaggtgcctgcatgtgtgaggatcttcctcctacatcatcacatggcagaaagtgagagcgcaagagagagacagaaaagggggctgaaggcacccgcttataacaaactcactcccaagacaatggtttaatccatttatagagtggagcctttgggatttaatcacccctcaaaggtcctacctcttaatactatacaatgacaatgaaatttatttttatttttatttatttattttttgagatggagtctggctctgtcgcccaggctggagtgcagtggtggatctyggctcgctgcaacctctgcctcccaggtttaagcatttctcttgcctcagcctcctgagcagctgggactatagatttcaccatgttgg

SEQ ID NO: 913669 - DNA, 612 bp, Homo sapiens
cagtgctgcaataaacatacatgtgcatgtgtctttatagcagaatgatttataatcctttgggtatatacccagtagtgggattgctgggwcaaatggtatttctggttctagatccttaaggaataaccacactgtcttccacaatggcggaaataatttacactgccaccaacagtgtaaaagcgttcccatttctccacatcttctccagcatctgttgtttcctgactttttaatgctcgccgttctaactggcatgagatggtatctcattgtggttttgatttgcatttctctaatgaccagtgatgatgagcattttttcatatgtttgatggctgcataaatgtcttcttttgagaagtgtctgttcatatccttcacccactttttgatggggttgtttgtttgtttcttgtaaatttatctggatattagctctttgtcagatggatagatggcaaaaattttctcccattctgtaggttgcctgttcactctgatgatagtttcttttgctgacaacacaaatttttttgaaagaatatctagtttattttatatcatcctctaaaaatgtcagcttttatgtgttttacaattcctata

SEQ ID NO: 913670 - DNA, 691 bp, Homo sapiens
tctggtaatttaatctctacaatgaaaagaaactatttgactctttgcttctttgattgagttatagcctctatttagatttaaggttttagggtgtatgtatgtagaggaaatactgtttcaaaaaaaatggaatctcaatctaaacacttttacatttactcaaaatggatcatggacttaaatgtaaaactatgaaactttttgaaaaaaggagaaaaatcttcaggatctagggctaagcaaagagatcttagacttgacaacaaaagcacaatccataaaaggaaaagtagataaatcgggtctcattaaaactgaaagcttgttatctgtggaacatatgtgaaaaagatgaaaagacaggttgcagaccaagagaaaatacttgcaaatcacatatccatcaaaggactagtatttagaatatataaagaactctcaaaactcaacattaaaaaaaatccagttagaaagtgggcaaaacacataaacagctatttcaccaaagagactatacagttagaaaataagcacataaaaagaagttcaacctcattgracatcacgataatgcaaatgaaaccacaatgaattatcaatacacagctattggaatggctaagataaaaaacagtgacaaaaccaaacctagcagggatgcagaaaaaaaatggagcttttacattcc

SEQ ID NO: 913671 - DNA, 691 bp, Homo sapiens
tctggtaatttaatctctacaatgaaaagaaactatttgactctttgcttctttgattgagttatagcctctatttagatttaaggttttagggtgtatgtatgtagaggaaatactgtttcaaaaaaaatggaatctcaatctaaacacttttacatttactcaaaatggatcatggacttaaatgtaaaactatgaaactttttgaaaaaaggagaaaaatcttcaggatctagggctaagcaaagagatcttagacttgacaacaaaagcacaatccataaaaggaaaagtagataaatcgggtctcattaaaactgaaagcttgttatctgtggaacatatgtgaaaaagatgaaaagacaggttgcagaccaagagaaaatacttgcaaatcacatatccatcaaaggactagtatttagaatatataaagaactctcaaaactcaacattaaaaaaaatccagttagaaagtgggcaaaacacataaacagctatttcaccaaagagactatacagttagaaaataagcacataaaaagaagttcaacctcattggacatcacgataatgcaaatgaaaccacaatgaattatcaatacacagctattggaatggctaagataaaaaayagtgacaaaaccaaacctagcagggatgcagaaaaaaaatggagcttttacattcc

SEQ ID NO: 913672 - DNA, 564 bp, Homo sapiens
cttttactgggaaacagtattcgagaataaatttggatgctagagatctcattacaattgggtcaaccattgctctaaatcttttcatagagctaaaaattatgggttttttaaaaagagaaaaatacattatgagctcatactgatatttcaaattaaaatttaggattatagactatttatttaaactcattgatcttacaactgtatctcctttcaattatgccaaaaatcttggatctctacaacactaacaaggattcatttttttatactgtattatacacataacaatctcagtataattctcatactcctgccaacacattactgaaaatagtttatgatttattgctgttcttttttcctcagggtaactgtattagtccattttcacactgttatgaagatactacctgagactggataawttacaaacaaaggaggtttaattgattcacagttctgcatggctcaggaggcctcaggaaacttacagtcatggcagaagaggaagcaggcaccttcttcacatggccacaggagagcaaatgagagggggga

SEQ ID NO: 913673 - DNA, 563 bp, Homo sapiens
aataataaacatgtattattacttgagtatacttatgcatcctgtcagggctgaattgtgtaggtwgttctgcttatcttgactgaactctttcacacatttgggatttgctgcctgtagagtagtctggtagatttggctccatcacgtggactcttctccctgtcgtctctcatcctccgtcagacaaattaggagtcgctcacataggaatggcagggttccagagaggaaacagaacatgcagagtttcttgaggctgaggttcagaatgagcataccattatttctgccacattctcttggtcaaagcagtttgtctcagtttaaattcacagagtagggaaaaagcctaccctttgataagaagagctgcaaagtcccattgcaaaggttatgaatacagggaagggtaaaaaaatggactcattttgtctcaagtctatcaaagactaccatccctggtctcagttatacatgtctctcctaaaggaaaaaatatgcccaatccaaacccagaaattgaatccagttctaacatcatgttaattccagggtctcct

SEQ ID NO: 913674 - DNA, 627 bp, Homo sapiens
aaagaggaagaaggaggaagagaagaaagaagaaggaggaagagaagaaagaagaaggaggaagagaagaaagaagaaggaggaggaggaggaggagaagaggaaggaaggaaggaaggaagggagggagggagggagggagggagggaaagagaaagaaaaagaaagcaagagagagagagaaagaaagaaaaagaaaggaaggaaggaagggaaagagaaagaaaaagaaagaaagaaagagagagaaagaaagaaagaaagaaaaagaaagaaaggaaggaagaaagaaagaaagaaaggaaagaaagaaagaaaaagagaaggaagaggagaaggagagaaggaaggaaggagggagggagaaagaaagagagagaaaaaataggaaggaaggaaagagagagaggagtattttgacacctactgtcacttctgggctgaggttttaaccgagactaggtgccatgtattcacttactcattaaatgttctttgaacaccaaatcaacatgaagccagaattatgttagactgagtrtggggtgaggtgtctgatggatattttacagggcatcatttcagccttttggagttcattttattgtaacataaaactacttggta

SEQ ID NO: 913675 - DNA, 606 bp, Homo sapiens
cttttctttgtttgaaatggggagtctaagtatatctgccaaaccaagacaggtaggaagtagcagtggatcattggtgatatctatgcaaagtttcccagtcctgcaagacaggactcagaacttccttctccagttctctgatccagggtaaaatgtcacagtctcattgggcctctgtccatgttacccaaagtaggaagagagagccttcaggtgaacaaaggcaaagggacaaaccaacaaggcagtgtaaagacacaaagggcgcttgcctcactcagtgggcccccttcactgtgaaaggatagcactgaatttctgaatgacatctgcatcagatggaatcctgtcctgtggccttgctgtgctacggtaaactcaatgcagaggtacaagagttttcttaaaggtaaacgagtcaacccagcctgaaggagagtctgaatttcagtagatgggaaagttgtaggtcagtcttgagaagcagtagccaaaaaagggcttttcacaggaagtcatcaagaggttgaaagtgagcaaagtcaacatgaatgaggttgcagagtacaagtaatayagggcaagagatcgaggtatgtggga

SEQ ID NO: 913676 - DNA, 588 bp, Homo sapiens
tttggaattttgaaaatagctcaaagaccccgttatgaccttgacagaggccaggttggaaatttctgaatccaatgattctttagctcccctctaagtctgacagtctaagattccataataaggaaggtacagctattgccaaaacgtataatgcatcacagtgtcagactttgggattatctgcagctgggggttttccacaccactgctccccttcattagtggggataattgagagttgactgcagtcgttactgctgttgtgatgggtatttgaagctaaattcgggcaagtaggagatgtgtgaatatttatctcagctgcagaaacttaatgcagtgtggcattaattaccctgtctgagcctgctgtcttcttctgtttttaggtgtcattttcagttggataaattagtttccaaaattagaatagagcaaattgtagggtgagatcaaggcagcctgacttcttggggcatccaaaaagaagaatgrgctgagaacatctatccaggaaacattaatatgcgtgcttgaagcccagcacaggcaaaaggaaatatttttccccagtagttgtactta

SEQ ID NO: 913677 - DNA, 566 bp, Homo sapiens
caaagttacacagtggtagttgatagagcctggtccttatgcttttttcwgtttataaaagtattatatatttattgtagaaaatttataaaatgtagaaaagtcataaagaaaaaaactgcaaattatgtgaaatctcaccacttagatataaacccaatcaagatttttttgtgtatatatcaccattcttgtttacataaaaataattttttcaaagttgaaattaaactatacacgctgctttgtaacctattttttacttatccacatttttccactaattattcttctacaacaatattttcaatcaacataaagcattctagcataggagtataccataatttagtaaaaaccatattgttagccatgcaggttttatctgtatctttgagcacagctttgaacactactgtcattatttccttcattgaaattctaggattactaggtcaacatgtgtggatatttttaaggctcttgggctttttttgatcaaattatattctaaaaagttgtactgctagatgtatgatgccgtctgttttaccacatatttgcca

SEQ ID NO: 913678 - DNA, 636 bp, Homo sapiens
aatgggattgccttcctgatatggctcttggcttggctgttgttggtgtgtaggaatgcttgtgatttttgtgcattaattttgtattccaaaactttgcagaagakgtttatcagctgaaggaacttttggggcaagactatgaggttttctagatatagaatcatgtcatctgcaaacagtgatagtttcacttcctctcttcccatctgggtgcccagtatttctttctcttgcctaattgctctggccgggtattccagtaccatgttgaataggagtggtgagagggggcatccttgacttgtgctggttttcaaggggaatgctgtcagcttttgccctttcagtatgatattggctgtgggtttgtcatatatggatcttattattttgagctgtgttccttcaatacctagtttattgagagttttaaacataaagggaagtagaattttatcaaagacttttctgcatctattgagataatcatgtggtttttatctttagttctgtttatgtgatgaatcacatttattgatttacatatgttgaaacaaccttgcacaacagggataaagcatacttggtcatggtgaattaacttcttgatgcacttctgaatttggtttgcca

SEQ ID NO: 913679 - DNA, 576 bp, Homo sapiens
tgtaaagatgaatattctgaagccccaaaggacttcatcatcattaaggatacataagtatttttaaatttttcattagtctactttattggctaaaccagtagatattaagacagaaatttcttttgtgaaatagagaagtgtcatggttttagagttttgtagtctttaaatgtaggttctttataagtgataaagaaatctgtgccgagaaaatatgatcacctgggcaagtgtctgtgtggctagaggagacaatgtgctgtgtgtctgctttcttttagcacatcataggacactggtaacttaaaaaattacagttgatttttttttacacttggttttaaagagacgtaacaagttatccttcaattttaacattggggtaatggaattaataatacaatcttataattatataatgctttacagttaaaagtgctttcatgcatattatttcaacttaaaaaaaatttcccctgtgtgtgactggaggttgcactgtgcagacaactaccactttctgagattcaaaagaataaraggaagggctgcattgggtattttgaaagacaa

SEQ ID NO: 913680 - DNA, 601 bp, Homo sapiens
tctggcagctgcagagtggtgtggagagcaattctgtatgctggaaagagggagagcacagcaattgtgagtaattgaactcagcactgtcctgctagagcagaaaggaaaaccaaaccaaattcagcttacacacacccatggagggagcttttaaaccagccctagccagaggggaattgccaatttccacagtcagaacttgagtttccacaaccctcaccaccatgggctagagtgctctggagccccaaataaactttgagagatagtctaggccacaaggactgcaactcataggtgagtccctagtgctgacctgggcccagtggaatgaggggacacattacctactgagataccagctggggcagctaagggagtactggcatcaccttcccctgaccctgtactataaaatttgtataggtgtcttatagtcttatatgtataggaagttttaaatctgtacctgtgttgagtgtatttactgactataagacttttaaaggtttaaaaataagtgcctatgttatattaatgcaacgtgcagttgagcagataaaggttcaaattctarttttgcaatttcctacttttg

SEQ ID NO: 913681 - DNA, 634 bp, Homo sapiens
attcttggtttcatcattcaataataatgtaatgttggaaaaaattgyttaattttctagtagcaaacaaagctaattccacttctcttatttactctgagaatcatgagataatatatgtaaagtgtctaggacagtgccagggaataaagagatatataactaaatgtgaaagaggaaactgtcacagtatagagcagcctaaggacatatgacaactcagtgtaatgtagtatcctgggtgatatcctgtaacagatgaagaacattaggtaaaaacaaagaaaatttgaataaagtatgagatctggttaacaatcatgtatgaatattgattgttgcactcattgtgataaatatactgtactaatgtaaaataataataataagggaaactgtatatggagtatgtgggaactctgtgtactaacttcatgattttttgtacgtctaaatctatcctatttaaaaaatatatatattaaaaggaaggtaatcattttctccctaaactcagtgatcctgtcccctctgtcaaattttctctttacttactcctgccatcgggatgatgatgtttagctccaacagcattcaaataaagactagatgagaagacaagatgtgatacata

SEQ ID NO: 913682 - DNA, 593 bp, Homo sapiens
caactctctagcattcagtaagcattttaattaattttaacatttttattattttgtttttatgttaaatttcttcaytgacttttaaaattacatctgtctacctttgtgatttaagtaaatatacaacatttccttttcttggtatcttaaacttcctctttgactacttttaaaattctacttgatgcatttaactttttttaaatgtcatttataaattaacttggaaaaaagactgaagtaggcgtgatttataatttgaccttccttactaataaatgtgttcactttatattttcttcaacacttgggaaataaagcagtatctcctctaagttaaatttctaccagaactagaagatttatttgatgactaataaataaaatacattatattattatattatgtaacatatcataatttcttatttatattaattataaaatatttatacgtgagtatataatatagagccaggcacagtagtggatacctatagtcctggctacgtggggaggctgaggtgggaggcttgtttgagtccaggaatttgaggctatagtgtgcaatgattgcacctatgaagagc

SEQ ID NO: 913683 - DNA, 633 bp, Homo sapiens
aaaatgcaacatacaaagtgactaaaaagaaaaaagagctagcatatttgtgaagaaatctaatatgtattagactctccataaaataaaagacattgaaacttcttattgtgtaaatgtcaaggttctgargtaaacattaatttttctgtgagtcttacaggttagaaaattaatatacttttcattttctcatatcaactaaacatcaaagttgaatttggattcaaactgccatttagcaactggttgagaaaaaatgatttttttcgaagttaaaaatgaaggaagattctttgtagagctaactgaatggaaatggcaccataaatttgattccagctctcttgaaaagaaattccacatttatgtgcttctgtaattagttccaatcagcacactataaatatgtaaggattttacccatctattacttgcatctttggtttaaagctcttcagttgaaatggcaaacacaaattctgagcaggtaatacatcaatgtggatttgtctaagacttaaaagctacagacaattcttcctttgttcttgagttttagtcttatttatccttctattgaatacagtaatcatttctgtctaaaataagagatagtaaaagagatgatat

SEQ ID NO: 913684 - DNA, 670 bp, Homo sapiens
ccctgatcttaccctggttttcacaaaatttataaattatgtctctaaaacagccaggctggagtatttatagcctgaggaagctagccacagcatagttctaaaaaaaaaaaatccgcagtttgcatcagtaaatgctgaaaaaatgtaaaggctcatctgttgctagagggggaaaaaaaggaagagaaagaaaagggcagagaacttctcagaatgagatgttcgatttattcaagcttgtaaatatagaaatccagactgctggtgaaactcgaaatagtaattttgctcccatctcgcaaggatggaagaaagcatttagatccacactctacctatgcggaaaaatcgtgagaccgtgtgcttctagcaggtacctggaattggtgcttgcatttggagatgctgtggccaacttctcattataccgtggtcaatcaaacactctttgtccccgatgttcaagagtttggctctatgggtaaatctgcaccattaaagccaaagttcataaagcaactatggaaagcttctatcttagtgctcccaactgaaaaagagtgactgatggcttaagtatttttataactaaaggaaaagtgattagtggattgagtcagagtcacataaaaraaaatttgagctctgtaccgcttgcttgtgattt

SEQ ID NO: 913685 - DNA, 303 bp, Homo sapiens
tgcatttacattctcttagtacattaattttcaaatacataaaatatatatttttcctatatatttgaaatggttgtttagaaaggcttatttttcttaaaataaagaaatttatgttttgaattctgcttgactttttctttctctcattattcccctttcctatctaaaaatttggatatttcatctaattgattgtctgtagcccccagtcaaaaactaggttttggagcctgttctgcgaagatatggggatatctatacacctattcrtgagtacaagctactttttcccagtttctt

SEQ ID NO: 913686 - DNA, 625 bp, Homo sapiens
atgattcatgttgtcaatcttagtctgataaacaacaktatcaatttctttgaatcaaccaatgttctgaatcatagaacaggtgaaataaagaatcccatcccagcttcgtggtaagatccatgatggtcacagaaaagctagcagtgatctgccgaataggtgtggctgtgtgctccttctactgcctgcttcctggtcaccctccatgctaatactgatggactgtccactctttggtggtcactctgctgcaaataagtgttccagaagaaacaacagagaaatgagatatgtccctggctctttaggattgaaactgttgaaataactgctaatcctgaaacgaaagtagttggaatgtgctctttcctttactttcttttctaataattacatgaatctttgctgtacatataaatgggggcaccaaaactttttgaatgtacccaagattacacagcagaggaagccatgtggctaggattcagatactggaaggctctgttcactttctactgtgtctctactgttaggtatgaggaacacctcattttttcccatttaatagtgaaaccaggtctaaaggcaaagctggtcagagatatacacagaaagtagcata

SEQ ID NO: 913687 - DNA, 627 bp, Homo sapiens
tgatagataatctaagtggatgcttatatttttaattcttgtaatcatatgtgtggcaattttccttgatatgatcctctgccaaacttgrtttcatttcgttttgttctttgattttttccagtctgatatgtgtaagaggtgccttggtgtggtttaagttatatgtcttactctgattgctaataaagttgagtgccattatgtatgtgtgttggttttctggatgtttgtatgttttctaagtgcttgttaaaaatcattgccaaattttgtgggatttttttattgatttgcagtggatatttatatactctggctataaattttttgtcaatttcatgtgttgaaaatatctgctctcagattttgacttttattttcacttgttgaattatatttttatgaatagttcgtcatttccatgtaatctagtttaccaatatctttatgtttttagtcctttgaggttcttaaattcctacctattctgagtaaatattcttatattacacatctttataatttttttcacacttatttaatctaccatgatgttgatgatactgaggataattgtgatgatttagttcggggcacaatttgcatttttcaatctaatttatt

SEQ ID NO: 913688 - DNA, 606 bp, Homo sapiens
ggtggttttgtttttatttgtgagaagctagatagggaaaatcattggtaaattttaaaaagaaaggctctgaaaatgttttgaggctaaattttctcttaaataatagtaaaaatgtagaatttataataggagtcagtaaactttctttaaagggccagatagtaaataaattttgctttatgaaccatgtggtttctgttgcacttactctgctgctgcagcatgaaagcaactatcaacaatatttaaacaaatggatgtagctgtgttactatcacaaaaacaggcagccttctggattcggcctgtggactggccatagttggccatctcctaatttagaatgtggattccttaaatttttttctttattcctttttcaaactgacattaaaacacactgacattaaaacacactgatatgtgttttagctacttttatataatttttctcaatgatcatcataatagtttatgaaacaagtggagaaaatactttaaaaaaatttaacattatcaaaaattccaaatgtatacaaatacaaattctcacatatctgtcrtcatactaaacagttatcagtcttttccatattttattta

SEQ ID NO: 913689 - DNA, 654 bp, Homo sapiens
ggcctacattgaatatataaagctcatgcaacaaactatctgaaaaagatggaaaaggctacatactgtatgattttgtttatatgaaaygtccagaataggtaaatccatacaggtagaaagttcattagtggttgtcaggagatggaggaggggggaaaggagtgactatctagaatattatcaccatctagaatataatacattactcaaattgatgggaagtatgcttattttaccacagaatttaattccattagctgtggactaaacccacataccaaaacatctggataacttacctaacatctatgttccttaatttctttgcatgtaaaatgaggataataagagtactcagataattggcttaatgttaaaactgatttagttcctttgtataaagtattgagaatgttgtctatgtttggtaagtactaactgttaaaagttattattagtaaggttagtatcattttcaccgccactgttgccattactaaacaatataacattcatttagcttggagattgtttaaagaaaaatactttctaaagttacaccacctcatttcccattagaaaatattcaagcttaataataatatgcaaataacagatgtcttgaaagagagaatggggacaaattagtca

SEQ ID NO: 913690 - DNA, 674 bp, Homo sapiens
aaataaatgataaaaaagtaaggcattcgaagataaataaaaactcatggaattttttgctagtagaccatccctataaaaaatactaagagagtccttcaggctaaaattaaagagaactagacaaagacacaaatttacatttaaaaaacgaatacctaaataaagataacttcacagagaaatgtagaaaacagtataaaagtatgtttgtaacacttttcttctattttatttataagaaaactgcatacagcaataattgcttatctctgttgattgctttatattgtgtaaatatgaataagtggggtgtattccagaaatacaagactagtgcaatatttaaaaatcaatcattgtaatataacacattaataaaataaaaataagatcacctcaatagacacagcaaaaaatttaacaaaatcaaatacactttcatgatttaaaaataccctcaagcaaatgtgaatagaagataactttaaaaatctgtatacagcatctatgaaaagctcacagctgaaatcataattagtgaaagaaaagcttaatgctcttatattwtgataagatatgagacaagaatgttcattcctgctgcttatattgaatattttaatggcagttctaggtagtaaagctaggttagaaaggaaaagtcatccagt

SEQ ID NO: 913691 - DNA, 648 bp, Homo sapiens
tggccgtactactattacactactgttaytgctgtttcttatagcattggcttttcttcctccaggcctttgctcacgctgtttccacaactgaaatgtctcttcagtacacatattaaatgtctcaatagtgttgcctagagaaaagcacacagactttgtgattagagaggactgaatttgaatcctggctctggaactttccagagtgcgatgcctttcaactccctgaatgtcagtttcctcatctgcaatatgggcctactgattattatctcatggagaagattatgatgattgatacgaagtgtaagtacaatgtctggttctcaaagctggagactactattactattgtcacctagcagccaagtgccaacttggatggcattcactccagggaatttggaagttttccaaatttccttcatgatatgaatcctggggtgcttgttaaacatgcagctttcccagctccttccctagcccctttcttagagattgaatgtgtgttattgttgatgaatttgtattaacaaggctctcaagtgattctcatcatcagtgaagctggggaaactgaccctgttttccctagctggaagcagctgcctctttctcctttgatgtagctgagcactttttgta

SEQ ID NO: 913692 - DNA, 533 bp, Homo sapiens
ctttacctgtaatacagctgacattttagcttccatttgtctcctgcatctgtttctcacttggatcagccctgataggggaaagargtcagtcaccttacagggctgggtgagaaaatgtgcgtgaagacacagcaatcagtgggggctgaatagatgcacatactcagaaagtcaatggggacttttcctaagagaagtgatcatcaagtcatgtttcttaggcaaaaggcaacacaaattggcagatatagatctgggtgtactggggaatcacacggaaactgggaatcatagcaacagaaagctaagatgacttccctaaaaccccaccatatcatcttattagcaaaaacaatcttacttgctactgcttttactttttacattgagctttggggtcggacaaatttggattttaatccttaagatccgtgtatctcagtttctccacctgttgaatggggataataatggctccctcagagttattggaaggatcagatgggtaaatgcatttgtcagcagcatag

SEQ ID NO: 913693 - DNA, 680 bp, Homo sapiens
ataacaattatagctaatcttgttatgtcttccttctctccaacaaaaacctaaaattcgcttgtaaaaatatgtgtgtgtgtgtttaaggacttgtctgtgggcrtgactaagttcattcaatgctagttgtgcttgtccttcagtgtgctacactgtcacttattaccagaaatgtagatttgagggctttaaaatgtagattttaaaggaagctttaagatcatctagttcaactccatagaaagaaattgattaacagtaaagccaagattcttgctcaacgtcacagtgaattctgggtgtacctgtaaaagaagccatctatcttgacaaccagtccagggttttctctatagctggaatttattctctatatgagttttaaagacagaataatctagatggctgtattagtttcctagggctgccgtaacaaatcactacaaactggtgctttaaaaaaatggaaatttattgtctcacagttttggaggccagaagttcaacaactggcagggctgtactccctcaggggctctttgcctctcccagcttctggtggctgcccttattcctgggcttatggctatatcactgcctccatcttcacattaccttctcctttatatacctgtattctctgctttgtatcatttataaggatgcttgtcattgga

SEQ ID NO: 913694 - DNA, 392 bp, Homo sapiens
taccttgtattgttaagctctgtttggttcatttcacttcttgttgtttgcctctgacactaaactttctttatgttgtggcataactttgaggtgcaaagctggggagtgtgtacagtgcattgcaggatggcgagtgcagaacttctcactggggtttctccaggtctattagtgatcatgttctcatcatctgttttttctgacatagcccctaacatggattaagttctttttttgtttgtttattttgttttgttttgttttgagacagagtctcacactgtcacccaggctggagtgcagtggcatgatctcggctcactgcaacctctgcctcccggattcaagcaattctcygcctcagcctcccaagtagctgggattacagg

SEQ ID NO: 913695 - DNA, 636 bp, Homo sapiens
ctccacaatccccaaggccacctggccatagcattcatatttatttcagccatggccctgtcatgttgattacatagttaaaaccaagattgttttgcataggttttctggggcagctcagctgcttagctactcacaagcactaatgacctggaatcagagtgacaggatagtctcaggccccattcctctactgtgagctcctgccaatgtctttttttcttcaaaagagcaactagaaaataggaaatttgtcttaatgttgtcttttgtgtacattttgtctttaataataaaatgtgtatactgctcgagggcttactctgtgctagaagccctgtgtacatgatcttcaattcttacaaccctgctagatattttggtttccattttgaaggtgagaaaaccaaggctccaagagtttaaggaatttcccaaggccacaaagctaaagctgctaaagccaagatttgattccagtctgcctgatgacatgagttgggcttgtcctccctgaaaacacttcccacagtctccwttcgcagcttccatgagagcagtgggtgtatcttgtccagtgttagtgaccagcatgatagaaggaagcacagagagtaggggttcaggctaagaatg

SEQ ID NO: 913696 - DNA, 700 bp, Homo sapiens
gacatggttttttgtcccaccayttgcaatggcagattctaccttctaatgggttagtctacctgttaagatactgacttctgatacaacatggatgaacctcataaacatatcctatgttgtattaactagggttctccagaaaaacgacaaaaaatagaatatatacgaacagataattgagagaggatttattaggtgaagtggctcacatgattttggaggcagagaagtcccatgatgtgccatttgcaagctgaagaaccaaagaagatggtagggtggctgagtccacttttcaagtcaaccaggggagctgatggtgtgattctcagtttgagaccaaaagctggtggggaagggtagtggctagtgcgagtcccagagtcaaaaggccagagaacctgaagttctaatgtccatgtgatatagtttggccatgtccccacccaaatctcatcttgagttgtaactcccataattcccacatgtcatgggaggaacccagtgggaggtaattgaatcatgaaggcaggtgtttcccgtgctgttctcgtgatagtgaataagtctcacgagatctgatggttttaaaaatgggagtttccctgtatagtctctctctctctctttgcctgcctccatccatgtaagatgtgacttgctcctccttgccttctgccatgattgtgagccctac

SEQ ID NO: 913697 - DNA, 473 bp, Homo sapiens
cctttagactctagctgaaatgtagttgcttatttattgttttggtcctttttatgaggtgacaagcattaggcacctttagtcagccatcttgctgacattactcatcatcttcatttttgactgggtttagtgcccagttcactaagaccttatcatctctgccatctgttgggcacagctcttagtaatgaatacctacctgcagatccttacatgggttttgtttgtttgtttgtttgtttttgcttgctcaagcttcatagggcaaagtatagagcaaaacggagcagaagctaagagtgcaggcaggaaataagaagtaaaataattggacagattttctggttggctcaaattttttttttgagatcaattccaaaattatttgcttaatggtttaggtattgcaggacaatatttgtttagacgtaacattgtagtarattgaatcaatacaaaatcactcttaa

SEQ ID NO: 913698 - DNA, 611 bp, Homo sapiens
acctgacagactgaaaagtaagatatatttattaatattattaaatgtttcaggaaaggtmgttttgcatgagtgtttaaaagcttgggttctcttttcagactatctgaatttgaattcagggaccagaacaaatagttttggtagattaattacagtgaatatagatgagatcatgtctctctctctcccctcattttcccttcattattcccacttctccctgtttctttataaggaacactatgaagaaacactctaccgtgcgtcacagtggagttggtgcggcattccagtaaacataaggccacccaacttctaattacagctctgcatcccaatccattgcataattctgcttcagtacaataagggggttgggctaggccactaaatatttgttttctttcagactacatgggcataaatttaacatggtttttctttgttcattcggaacctgtgctacccactcagctacctacttaaacaggctctggaaatattactcacctgcatccccacagaatcctcacatttttgtctgggaatgaatggcaaagaaaacacattatttttgtaatttgtgggcgaacccggctcttctagtt

SEQ ID NO: 913699 - DNA, 611 bp, Homo sapiens
acctgacagactgaaaagtaagatatatttattaatattattaaatgtttcaggaaaggtcgttttgcatgagtgtttaaaagcttgggttctcttttcagactatctgaatttgaattcagggaccagaacaaatagttttggtagattaattacagtgaatatagatgagatcatgtctctctctctcccctcattttcccttcattattcccacttctccctgtttctttataaggaacactatgaagaaacactctaccgtgcgtcacagtggagttggtgcggcattccagtaaacataaggccacccaacttctaattacagctctgcatcccaatccattgcataattctgcttcagtacaataagggggttgggctaggccactaaatatttgttttctttcagactacatgggcataaatttaacatggtttttctttgttcattcggaacctgtgctacccactcagctacctacttaaacaggctctggaaatattactcacctgcatccccacagaaycctcacatttttgtctgggaatgaatggcaaagaaaacacattatttttgtaatttgtgggcgaacccggctcttctagtt

SEQ ID NO: 913700 - DNA, 653 bp, Homo sapiens
actatctcactctctgcttcccagggccacagccttcctcaagagggaccctcagaagtctctcagctccttgtccctgtcacctcctggcctcttacctttcatcacatctccagtttcaraagggctgtcgcctctactctcagattccagctccacctcctctgggtcacattccctcttttcttttttcttttctttttttttgacagagtcttgctctgtcgcccaggctggagtagagtggcacgatcttggctcactgcaacctctgcctccagggttcagttcaagcaattctcgtacctcagcctcccaagtagctgagataataggcgtgcatcaccaagcctggctaatttctctacttttagtagagacagggtttcaccatgttgaccagattggtttcgaactcctggcttcaagtgatccacccacctcggcctcccaaagtgctaagattacaggcataagccactgcacccggccacattctctcttttccttagatgcagataagtcaagagaacaggggtctgcagccagagtttctgtgtttaaactccagatcctccactcattagctgtgtgaccccaggcaagtgaattaccgctctgtgactcagtttcctcacctgtaaaatgcggct

SEQ ID NO: 913701 - DNA, 641 bp, Homo sapiens
gactcctcaaggatctagaactagaaataccatttgacccacccatctcattactgggtatatacccaaaggattataaatcatgctgctataaagacacatgcacacgtatgtttactgcagcactattcacaatagcaaagacttggaaccaacccaaatgtccatcaatgatagactggattaagaaaatgtggcacatatacaccatggaatactatgcagccataaaaaatgatgagttcatgtcctttgtagggacatggatgaagctggaaaccatcattctcagcaaactattgcaacgacagaaagccaaacaccacatgttctcactcataggtgggaattgaacaatgagaacacttggacacgggaaggggaacatcacacgccggggcctgttgtggggtggggggatgggggagggatagcattaggagatatacctaatgtaaatgacgagttaatgggtgcagcacaacaacgtggtacatgtatacatatgtaccaaacctgcaygttatgcacatgtaccctagaacttaaagtgtaaaacaaacaaacaaataataaataaaaagaaacccaactcattgactgcagcccagcaatagattatttcctattgtagctcctct

SEQ ID NO: 913702 - DNA, 563 bp, Homo sapiens
ccgggaaggtgcatgcttgccgggtaagatggaggatgctccaaatgcttcmacagtaaacagaggtcaggtagccaagaagaataaccaaaataaggagtcagtgatgctcttaagcttaccctcaagggctcagtttccttagctaagaaagaagtatttcataagatttccatgagaatcaaataagatcatatatgtagaaatactttgcaattttaagtataaatgtaaaatgttatttttgagacccataaaactttgcaactgaactcttttgaactaaagccttaatgggacaagcaagagttaagcaacagggggagaaggcccagtgaacaaacaggaggagattccaggagacagaaaaaggtctggataccaggttgtggtacaaccagttgtagatcaaaaagagggaaagaatggttaagtagctcccctaaggacattgtttatatagctgtttccatacctttaaaatataatgattagtaccttagcaaaagaattatagtcaatacatttatatatcttgtgcaggcctattacaaataagttag

SEQ ID NO: 913703 - DNA, 613 bp, Homo sapiens
ttaataatagccatcctgactggtgtgagatgttatctcattgtgattttatttgcatttccctgatgattagtaatgatgagcattttttcatatttgttggctacttgtacrtcttcttttgagaagtgtctgtacatgtcttttgcccacttcttaatggggttattttgttttttgcttgctgaattaagttccttatagattctggatattaaacctttgtcagaggcattgtttgtgaatattttctcctatcctgtaggttgtttatttagtctattgatagtttcttttgctgtgcagaagctttttagttcgattaagtcccatttatcaatttttgtttttgttgcaattgcttttgagaacttagtcacaaattctttctcaaggccaatgtccagaatgatgtttcctaggttttcttctaggattcttatagtttgaggtcttacatttaaatcgataattcatcttgagttaagttttgtatatggcaaatggggtccagtttcatttttccacatatggctagacaactaccacagcaccatttattgaatagggagtcctttccccattgcttagttttgttggctttcttgaagat

SEQ ID NO: 913704 - DNA, 613 bp, Homo sapiens
ttaataatagccatcctgactggtgtgagatgttatctcattgtgattttatttgcatttccctgatgattagtaatgatgagcattttttcatatttgttggctacttgtacatcttcttttgagaagtgtctgtacatgtcttttgcccacttcttaatggggttattttgttttttgcttgctgaattaagttccttatagattctggatattaaacctttgtcagaggcattgtttgtgaatattttctcctatcctgtaggttgtttatttagtctattgatagtttcttttgctgtgcagaagctttttagttcgattaagtcccatttatcaatttttgtttttgttgcaattgcttttgagaacttagtcacaaattctttctcaaggccaatgtccagaatgatgtttcctaggttttcttctaggattcttatagtttgaggtcttacatttaaatcgataattcatcttgagttaagttttgtatatggcaaatggggtccagtttcatttttccacatatggctagacaactaccacagcaccatttattgaatagggagtcctwtccccattgcttagttttgttggctttcttgaagat

SEQ ID NO: 913705 - DNA, 599 bp, Homo sapiens
tatgatttagggcacttgaccattggaaaaccaaagtaaatattttggggataggtttacttagcttttgtatgtttcataaataatattktgataaatgccattcaaacttttatattctggtaaaataaaatatgttaaacagagtcttatcctaaaagctcttataaataatatttatcttaatgctatagtgatgtatataagtagttccatgaaactggcctagatgttattttataaatacctattaaaaactaatgactatcatgaaatattagtacaatatctagatacttttgagtgatcaagtctttttcatatatttgagaagaaactaaactttaaaacctacctctggagaaatattttgttctactgaaaattatagaaaggtaatataatagccctcaattataacagctattactaatagctatgtactttgtgctaaggtgctttagtaagcaatttgcacccatcatttttaattttcctgtaacattgattcttggtggaaaatagaatttcactcaaatggttctactaaacagactttattgatggggacagggttaaggaaaccaacaaatgatact

SEQ ID NO: 913706 - DNA, 683 bp, Homo sapiens
tgtgttaacaagacagggattaaaactcaaatcctgccatgacggtggggttttgggaaatagccttggctcttcttmgatgagacccaatgcaagtgcaacagccttaaaagtaaggccgtactttaggattaagagttatatcctaagaataagataaaaatgaaaagaggccaattcaaacaaattcttgataaaattaatatattcaataagtaccctattttcctgtcataaaaaaagttctttttggtggaagatgtcctcagaaaaatcctctacaattcttcattcacaatattcagcaactaaacaaaaatgtaaacatatgctaagaacaggattaagtgaatgaagatgaagagaaaaaaatagatttaaaggcagagccagaggtgatatattattgacatatcaccagattttaaaataattgcaattagtattttttagaaaatagcaaagctgaaaaatacgacacagaaaattctcgatatttttgtctgttttgctcaaattgttatttggaatatttaggaatgtaaaaggacagtctagaattgaaaaatacagtctcctacatttagaactcattgtgaaatgggaaagctcccttatcccccttgcagggtgtgacagggggagtggctcgcttcttcagtgccctgctactcaaacctcta

SEQ ID NO: 913707 - DNA, 589 bp, Homo sapiens
agaactctacattgcccgaaggaaaacttggattgtaatagcagggaaaaagacacaatttatgtttatttttagtgtttcaattaggctctagagaatcacaaaggcctggagagcaacagcgttgactggaagagaatgggaaaaaggaggagggattgctacccttcctagggtgttcatgtaggacacaggcaatgggtgaggaagtggggaataagacagacatccaactagctcctgctaatatggcacagaatgaaacacgttgagaaaaatgacagtaacatgctgtcaaaatatggaggcaaaggagattaactctgcctggtgacaccttaaagaatctccgaggaagttagcactggagttggcagtcagtgcatgtgatttcccatagatagagaatgcgggaaaaagcattctggacacaccttatttaggcagtatcatattagatgtaggcagtttttattaagctgaacaaagcaggttcaagaagaaaaaattgttgtattgctagaactttttasttcaattctctaccactttgaaagatataagaaatacataatgaaattactatgat

SEQ ID NO: 913708 - DNA, 473 bp, Homo sapiens
ttcaagaaggttgatttatttcaataattacagcataccattcaggacactagggaaaagtctttgtrtttgtgtgtgtttgtgtgcacatgtgtttcattaaatattggaggagaaatttaaactttctctctacctagtgtcaactatagtaaattcttgaattttgtactttatggatgttattttaataattttcattagtaaagataatagggaggatatttctagcagcaaaatggaaacagaaaaaaaaaagtttgaagcatttactaaagaaagaaaaagaaaaatttaagattattaagtattttacataacaccaataggcattaaccaaagagttatcgaaggtgaaaataagatttcatgtgataacatttttcatgaagatatattttttaaaattacaggttaattagtgataagtaatcatctgcaatactaattttgagatcctgtcataatcatat

SEQ ID NO: 913709 - DNA, 661 bp, Homo sapiens
tctgaaagtggcagtcacaattaagctcagaaacaatcataaaataaacgagattattggtatgctaaggcaatgtttgaaatagatgatagatctgccaatgttttcatagtactaaatggcaaataaaattttatgatgacagaggcaaaggataaaaatgtgactttataattgtaggccattttatattggtgatgaactaatgaagacatggacgtggatatttcttactctgtttattcactcactgtaaagttattgggaatatgatgtgccaaggaatgtgctagacaatgaggatatggaaaaaataagtcattgtgggaaaatgtggtcttgggaattagaaaaagtcagtgagaaaatcttggtcccataactagtaactgtgtctaagacattaagaaaattaactgatgtctcagaaaataatttttgtcatctgaaaagggagagtattacctaccttgaaagctcattgtgaaaattaaatgaaatactatacataagtattttgtacttggttggtgtgcastatttaatgcatgcctgctatagttttaattagaccaaagaatcacagttcagtgagagaatgcgatacacctatctcttgcagggttctttgattgcaggcaacagaaactcagaggatcaa

SEQ ID NO: 913710 - DNA, 551 bp, Homo sapiens
ttgaatgagctcctgcaaagttctgccccagaaartgagatagtcattgctaagatgatgttttgagttgtaccttagatataattcagatagtggtattggctactctagataaaagttctttcatgacccttgagactatagtaagagcaccttctctgccccattatggtaccactgaccttattgcattatcgttgcttgcttgactgtttctcacttctcactcatctgagaactccttcaggatggggttccagtcctactcacccttttctttccaacatctagtgccgtgctttgccgggtgtaggcattgtagataaaagcttagaatctgaagccagattgtcagggtttaaggttttgctttgtcactaaccatttggcttcagccacatttatattctctaagtttccttttctagaagaggagaattacagaatctagctctttggattttgtgagaattaaatgaacaagtttatataaaaaataagaatagggtctgtttcagagtaagctaacaatgtgctatttgtaattacag

SEQ ID NO: 913711 - DNA, 598 bp, Homo sapiens
acttcaagaatatgcaatacatttaaaaaacaacaaaatctcaycaaatctactgacttcagccaaaagacactttttcagttagccctattatttatgtattttttcctttctcagctctaacatatttttttaaacacatgtcgacttctacagggattataaaatccttggacaactatatgatttgggagcaaagtttccatgtgtaaggattgcgtgatgtataaggaatgtgtcacatcaggttgagttttaaaatgaacgtactccattcttaggttttatctctacagatggataggggcccagaggcccctggaagcattttggtaccattgcattacttacggttaagaggcaggctcgcattggttgtgcctagcttgttggcagccacacaggtataattgccgaagtgctcctgtgtcacgttggtaacagtgagaatggatcttgtgctaaaattttgaataataattccttgttggccattgaagagcctagaagacaaaataagctctaggtaaatatgtattgtgaataccagtttcatttttttatcttagctggggttgtcatggcaacccatagacaa

SEQ ID NO: 913712 - DNA, 631 bp, Homo sapiens
acctcacaatcatgccggagggtgaatgaggagcaaagtcatgtcttacacggcagcaggcaagagagcttgtgcaggggaactatcatttataaaaacatcagatctcatgagattyattcactataacaagaacagcatgggaaagactcagcccatgattcaattgattcaattacctaccactcagtccctctcacgacatgtggaaattatgggagctacaattcaaaatgagtttttggtaggggcacagccaaaccatatcattccaaccctggcccctcccaagtctcgtcctcacaattaaaaataaatcataccttcccaacagtcacccaaagtcttaattcatttcagcattaactcaaaagtccacagtccaaagtctcatctgagagaaagcaacttccttccaagtttttgtacaatcgaaagcaagttagctacttcctggggtacaggctttgggtaaatatagccatcccaaatgtaagaaattggccaaaacgaaggggttacaagcctcatgcaagtctgaaatccagtggggcagtcaaattttaaaaagtgatccaaagtgatctgctttaactccatgtctcacatccaggtcacactgatgcaagag

SEQ ID NO: 913713 - DNA, 590 bp, Homo sapiens
gcaaaagaaggaagagtatatctcttaattcagactgataacaataagctgactataagctgactatactgtcataatttttttgaaaaacaggactatttatgagatcttaaatggctaagtctgtttagcagagaaaactgacatttttaaaagtcaaaatgagctttaaagtaaaacgtgcaacctttgggacacacttcaggttacttagcaattagagaagttatgaaactatcagtgctcgtttcatgcacttcaaggattcatctctaccttcaattctccactgtttaatatttctctaaggaactagaaaacccaaatgctaatgcttcttttgcattatcttatagtttgtttattcactgtgttctctgaactgagtcaattacttatgctacattccacaggagaaatgaaggaattcagaaagcaaaagccaatctgttctgaggcccaattccaggcaagtgtttatgccaaggagaagcagatgtttacacgtaatcataccaaaagggccccaagggtgggaagcaactacagcaagtcaacaaacaygttgtgaacagaatcctccactattt

SEQ ID NO: 913714 - DNA, 609 bp, Homo sapiens
attcaaccccttatccttcaccttagaaggaatatattgacaggccccacaccacaggagccctagaaattttactcaggtagaaggcccctgaattttggtcagatttatttcccatcctctargatgcaaatgtctcaccaataagtccagtatgtttggtacttcttgctcactggatccaatcagcatcatgtcatcagtgtaatggatcagtgtaataccttatggaagtgaaaagagatcaagatctctctgaacaagattatgacacaaagctggagagttgatatatccctgaggcaggacagcaaaggtatgttgctgacattgtcagttgaaggcaaattgcttctggtaggccttatggacaggaatggagaaaaagacatttgccaagtcaatggctgcataccaggtaccagatgtgttaatttgctcaagcaatgaaacctcatctggtacagcagctgcatttggagtcatcacttggttaatcttatgattacccactgtcactcaccaagatccttctgtcttctgcacaggccaaatgggagagttgaagggggatgtgatgggaatcaccacccctgcatctttccagtc

SEQ ID NO: 913715 - DNA, 613 bp, Homo sapiens
taaaataatactataattgatatattataccaaaatcaattacaatctcccataggatcagaaaccatgaaaaattatgtatttcaacaatgggaacatttttaaactgaagaaaataattttaataaaaccttattaataattttaataaaaatacacctagctcaaaacctttccctagtaacactttagtatgtgtactgaactgttcatcttaagataatggtaagaaatttttatatgctgtgtttcagtcacaaaaagaggaaatgcataaattcatacaattcatttttctactaaacttaaacttttagttccaaaatggaaaaatagctaatttactgaaaatctgttataaatactatttgataattatttaaaactaaaacttctaactctatatttaccttcactaggatattctatgctttctacgtcattgcttatgagtctcatgttttgataagacaaaattgtgtaagttaaaagattatctttgtatcatggaaagataatggtatctaaatttggaaagatatattttaactgaaaaatgtgctcaaccagaattaacaaaatayatgaaatccaggtctaccatttactaact

SEQ ID NO: 913716 - DNA, 595 bp, Homo sapiens
gaaggaagaacaaaacttgtatgatcatttcagttgatgctgaaaaagcatttgataaagttcatcatctcatctcttcatgatagaaatcgtcaaaaagttggtatagaagaaatataactcaacatagtaaaagtcatatatgacaggcccacagctagtattacactgaataggggaaaaatcagagcctttcctcttagatctggaacatgacaagaatgcccattttcaccactgttgtttaacatagtactgaaagtcttagctagagtgactagacaagagaaaaaagtgaggggcatccaaattggaaatgaagaatgcaacttatgtttctttgcagataatatgatcttacatttgaagaaaactaaagaaaacaccacaaaactactcaaactgataaacaaattcagtcaagttgcaggatacaaaatcaacacaggaaaatcagtagcatttctatataaaaactgtgaacaatctgaaaaagaaataatgaaaataccctcatttacaatagccacaaataaaatgaaataactaggaataaaccawaaaagtgaaagatctctataatgacaactataaa

SEQ ID NO: 913717 - DNA, 672 bp, Homo sapiens
tgggactgtaaactagttcaaccattgtggaagacagtgtggcgattcctcaaggatctagaactagaaataccatttgacccagcaatcccatattactgggtatatacccaaaggaatataaatcatgcwgctataaagacacatgcacacgtatatttattgtggcactattcacaatagcaaagacttggaaccgacccaaatatctatcaatgatagactgggattaagaaaatgtggcacatatacaccatggaatactatgcagccataaaaaaggatgagttcatgtccttctcaggggcatggatgaagctggaaaccatcattctcagcaaactatcacaaggacaaaaaaccaaacaccacatgttctcactcacaggtgggaattgaacaatgagaacagttggacacaggggagggaacatcacacaccggggcctgtcatggggtggggggaggggcaagggatagcattaggagatatacctaatataaatgacaagttaatgggtgcagcacaccaacatggcacatgtatacatatgtaacaatcctgcacattgtgcatatgtaccctagaacttaaagtataataataattaaaaaaaagaagacatcaaagaggtgacagcctagatttgacatttttaaatccctctggct

SEQ ID NO: 913718 - DNA, 626 bp, Homo sapiens
aactttgccaggcacaaaagtctaaaattaatcgctagtggtacagcccagtggttaggatcatggatccaaaccagattatctggactcaaatcctgtgttggaacaggaattaaaagaaattaaagactgtgtaagcaaaaactcagttgtatgtaagaaaacccaattcccctgaggaagagaaagagctgaagtcctttaaaaattgactgcctgtttttctgtggctagtgagccttatctctcctttccccaggcattgtgaagactgtttctctagctgtgtagctgcgaggtcactaaacagataaactcaagtcataaaacatgctgttccttgaaaagtaagaaataatgtaatgcatgtcttaatttaaataactgtctttatttctcacttctgtaatacacttccccctgcacaaatctccccccaccccacaaaatgcttaaaaggtagcttgattctttgttcagggctcagtcctttggatgttcattggactcggtcygtgcacctaaataattaaataattcctcctcaacccctcggtctctctggttccttaattatcccgctgcagtgtcacttctgtggattctcattgtcaggtttcttatct

SEQ ID NO: 913719 - DNA, 696 bp, Homo sapiens
ggtgtatatgcttgggaaaaaaatgtaatccttcctgttgtttcagacaattattttcattgtctctggaatctgcctttatttactgatggtatataggaacagagattagtacctcttttcctcaggctttgatacatatcaattataatgcaaaaatgaggactaagttctttttttttttttttctcaaataactcaattctctgtcccaggctcatgattttgcatacttcttggttttaatcctgtcacagaagcttaacgtttctggttaggagatgtttctattgtcactgtcagcagatggggagtgtactggggataagtggggctccagctttttttcacctaaggaaagagttgcatcttcttagggtttctgaaagataagacactgatcaagtaaaatatcaatgaaagtctctgatttgagtaaacagagactgattagattatgagcaaacttcctagtgaggtttacatcttggtcaaatggagatgagcttaagatgtcttatagccccttttaatctgctcaagtattagaaatgaatgttgtttgccactttaagcaattgctaaatgtctagaatttccraaatttaatgttcagggattttcagaggtaaaggaatctaggactctctttcttctaagttttgactttaataggaggaggaagaaagtaagcag

SEQ ID NO: 913720 - DNA, 632 bp, Homo sapiens
aacagaaaataacaaatgtttgtgagaatgtggaaaarttggtacccttgtgcattgttggtaggaattttaaatggtgccggcactatgggaaacagtaagaaggttcctcaaaaactcaaaaatataattaccatatgatcctgcaattctacttctgagtatgtatccaaaataattgaaagcaggatctctgagagatatttgcaaacccatgttcatagtggcactatatacaataccaaggggtgttaagtaacccaaacacccatcaacaaatgaaacaataagcaaaatgtggtatatagaaacaataaaatattattcagacttaaaaaagaaggaaatcccatcatatgccacaacatagttgaacattgaggacattatgctatgtgaaataagacactcacaaaaagccaaataccatatgattctatttatttgtggtacctaaagtagataaattaatggaaacagaaagtagtagaatggttattaccagcggcaaggagaaaggggaaaaagagagttgttgttgaatgggtatagagtttcaaatctgcaagatgaaaatgttctgaagatctgtttcacaacaatgtgaatataattaacgcacttacaaggga

SEQ ID NO: 913721 - DNA, 637 bp, Homo sapiens
agtcactgagatttggagattgctcgctataacaacataacctrgcttatcctgactattataattatcttacagttatttacatgttacagatggagagaacgtttataatgattcaagtttctagatcaaagcaaaataagttatttggccttaacaactggaataaattaccacattttcaatatgattgattatatgaaggcctaccattaatgtgtaccaaaacccaaattaacaaccaaacaatgaattcagtaaatatatcactcacttatttaccatttataaaggaactatgacgacagtatacttaacagatggtgtttggaataggttggcatgagttgtatatactgtttgtggcattggattttggaaatcagatatcagttcttccatttaatatttatgtgaccttaatactttagattttaagacatacttaaaatctctgaatctcagtttcttcatttgtaaaatagagataataatacaaactttattaggctaattgtaaggattaaatgatccaaagagtgctgatcagagtctctagcacaaggaaactttcaatagactgatcattgatggaaattataatggtgggaatgccaccaaatagaaccttggtatt

SEQ ID NO: 913722 - DNA, 629 bp, Homo sapiens
ttctaggattactacagcatcccatttcccacacccactactccgctgactgggagggatggtagcctggccagcaacccttattctggtaggattgggatgggactaaataaataaaaagggagatagtgttgggattgatggcagacacctgattggtagcaagaagggatgtgataaatcaggattggtagattcaaaatcctgctaaagttgggcatgtcatggcttttcctattcatcccactttgtgttgtctccctgtgatttctagatgatatcttagccaggcatggtagcacacacttgtagtctcagctacttgggaggccaaggtgggagaattgcttgagcccaggagttcaagaccagcctgggcaacatagcaagaccccatctccaaaaaaagtgatatcttgacttagtttcaagccatttgctagctttttccaggaaatacagtggttgaggtggtcttctctgctcatctctgcccctttatgctactactcacagtggcaatctcactgccttgccactccttcttttacctgacctatcattgtcctcattgacttaccgttttccctgatccatcrttgtccttcaagtccagcatggggtattcc

SEQ ID NO: 913723 - DNA, 603 bp, Homo sapiens
ctaaggaagaatccatatctaattcatctttaaaatggcatctctaagcacagcgtttggcccttagcgtgcaatcagtaaagcattttgaatgaatgaatgaatggagtgacaaatggtgctttaaggcaactatttgcagaatattgccatagatgttatcaaacggaaacaaaagagacaaaccccacagttccctccccacactctccagtggcgcttcaggttggggtgcagtggagcaatcatctctcaatgcagccttgaactcctgggcttaagcaactgtcccacctcagcctccttagtagctgggactacaggtacatgcaacaatgcctggctaacttttaaattttttgtagagatgaggtattcctatgttgcccaggttggtcttgaacacctgaactcaagcaatcctcctgtcttggcctcctaaagtgttgggattgcaggtgtgagccaccatgctgagcctttttttaaatgtgaagtktctgacatagaaaataggttgggttctattttcagttggaaccaatggtctagcaaatgatgagctaaactatgggatacataggacatttggagtgtatttat

SEQ ID NO: 913724 - DNA, 579 bp, Homo sapiens
ttgtaaacattattgatacttaacagtgatacaatattaacaacattgctaattacaaccttaggctgcttattcagaaaaggccaaagaatcaattggaaaactgaaaaaattgattagtaatgtgactaaatacaagataaaacttttacattcatatatactattaattactagaggttaataattcttaatatctacacgaaaatccaaaatactttgaattaattatacaaagaaatgtgtgtaagtggtttgaagaaaactacagaatttatagaatttatactgataattagaaatacttacataaattgtctttatactctctcttccaattgcctcaaaaatcattacacattaagaatgcgcttacccattttgtaatacactctcttcattaccttcttaccagtctattaatgaataacatattataggcaactwaattactagtttattttagtaaaaatgtctttctttacttaggaatcccaaaatcatatactgaaatatttggttacaggattgtctcattataagaagttggagaatacaattggatcatttgtctctatg

SEQ ID NO: 913725 - DNA, 690 bp, Homo sapiens
gtctcttgtatatattctttggtgaggtgtctgttaaggtctttggcccagttttaaaccagacttttttgttgttgacttttaagagttatttatatatttatacattttacctttttattaaataaggtaatggaggtaaaaggagtatgtaatttgcagaatgctatatgaatgtaagaagttaaatggaaaattaaattaacacagaaggcaattaagaggttattacattcttcataaaagagttcttagcattgtaagacatgatttattataagattcttataaatggtgatcacctagataggtctgggaaaatgattatattttccatgtttaatttgttctttttgaagagaaactttataacataaaattatgcagaaacttatttttaactaatcaaacatggctaagatattcttcctcacatgatctgaatagaattgttgctatatgttttaaaatgttgtatagtaaaactacttttataatctattaacttgaattttctgactaaggacactggttcgttctaaagatattagtacatatwttataaatgatggccttgtttttacacaatctgtttaattaggtcacagtttcaatgtcaagaagtttgatcgtttttccccctgatattttaatgatctacccttacataatgaaccagactgaattttc

SEQ ID NO: 913726 - DNA, 567 bp, Homo sapiens
cttgaaggggccaagatatttttctttcacaggttgatatcaggagcctgtctcaatatatacctggattttctaattttgcctttagctaccattttttgaagtttataccatttgaagtctttgcttgtatttttattatttgttgttcttatttttaaacttattttctattatgtaagtattgaggaaaacattatctttaaaaaaactttaaaaaaaatttcaacttttattttagatttagagagtgcatgtgcaggttggttacctggttatattgcataatgctgaggctggggaatgaatgatcccatcatccagggagtaagcataatattaatagtttttcaacccataccctcctttctctctctcctctctagaagtcctcagtttctactgttgccatctttatgtttagtgcctggtcactcatgaaatgggaagaaaggtggtagacagtgtaatagttaaagaaagaagwaagaaatacaaaaagtggctcaacaatcaaagacaggtttattttgtagaataaacctgagaggggattctggctgattt

SEQ ID NO: 913727 - DNA, 627 bp, Homo sapiens
acctcacaatcatgccggagggtgaatgaggagcaaagtcatgtcttacacggcagcaggcaagagagcttgtgcaggggaactatcatttataaaaacatcagatctcatgagattyattcactataacaagaacagcatgggaaagactcagcccatgattcaattgattcaattacctaccactcagtccctctcacgacatgtggaaattatgggagctacaattcaaaatgagtttttggtaggggcacagccaaaccatatcattccaaccctggcccctcccaagtctcgtcctcacaattaaaaataaatcataccttcccaacagtcacccaaagtcttaattcatttcagcattaactcaaaagtccacagtccaaagtctcatctgagagaaagcaacttccttccaagtttttgtacaatcgaaagcaagttagctacttcctggggtacaggctttgggtaaatatagccatcccaaatgtaagaaattggccaaaacgaaggggttacaagcctcatgcaagtctgaaatccagtggggcagtcaaattttaaaaagtgatccaaagtgatctgctttaactccatgtctcacatccaggtcacactgatgca

SEQ ID NO: 913728 - DNA, 621 bp, Homo sapiens
cttttttgggcattcttcctttcctgtttccctccccattcctctcttagtgtttcctggattcacctcctatatgaactacttgtcctgacctcgcatcctcatctcagggcctgtttccatgagaaatcaatctaagataaatggaaacctgggtgttgaaggaccttgagccagggttggcaaactatggtctgtgggccaaatttggcctgctacttgtttttatggagtaaagttttattggaacatagctacactcatttacttattattgctcatagctgcttttgcacaacaatggcagagttgagttgctgggtcagagactagatgttctacaaagatgaatatatttactatctgagccgtcaaaaagtgtgctgaccctcggtcttgaagagcaaaataacatgatttgatttactttattaaagcatcacttcagctaccatgtggagcatggatttgggtttagagggcttaagatgacagatgggagattagttgggcggccatcccagatgtctaggagagacstaaagtaaacagattcatgtattttgaagttagaaaccacaggagttgttgacggactagattggaagaagggggtagtta

SEQ ID NO: 913729 - DNA, 587 bp, Homo sapiens
aaaacttctatgctcctgatctttttcttcttttctgttgtgccagaggcatgaactttatgcccccagcaccagttaagaagatgatttattaaacagacttaaatgaaagatggcttggtgtggatacacttagattcacagaccgtgccttggggcagttttagtgccaactttctaactaattcagaaatgaaaaacttctcattatttcaggataaatgtctaaacctaccagctcttgtctgaatgacataaaagtatcagcactaaaaatggagattttgttgttcacatgtcatctagactctcaaccctacaatgtttaacatatgagccagttacaaattaccaactaatggtatcttttgggcacttccaggtaaagcctcccagtgtccattgtatcaaactctttccctttcatacagggttacctgtacagtagtatcactcagaagttatgctggaggaattgctttcaattttttcattaggttcataaaatctactcagaaaatagatttaaaacacaaatgttaaaatccatgcaaaamcacaaatattttgatttgatttatgcaaag

SEQ ID NO: 913730 - DNA, 677 bp, Homo sapiens
catggtaacttttaaagatatgcaataagygaagatgtgtccctatcaattccatcttatataagtttatgtaaaggctctgaacataatgtctaaagcacacattgatttgaatacacaaacagatacacacacacacacacacacacacacacacagtttgttgaaagatcttaagaggatacccaataaggtctgacttgaaagaggaacaacccacagaatcataataacatattaatactgggaaatacagataagaaatcttccataatcataaaaatcccagcatctcaaagagggaagggcccttagatgtctctggaccaagttccaatctaaaataggacatctcaccaccacattctgtacaggttggcttccatactccagttgaacatcttcagtgagtcaaagctcatgcacctacaattccattgtttattccaaatttaacttccacctatactctcattctgttttatagatgccaaatccatgtttgattctatttttcatattaatcctgaaatactagacaccaaatatcatctcttcctacttagtaatttcctcctttataagaccaagaagcacagggtaagcatacctatgcctgtctattatcttggcccatcctacacattctgattatttactatactaatttgttgatg

SEQ ID NO: 913731 - DNA, 617 bp, Homo sapiens
ttggttctccagaccataaaccattgcctggttaaggtaggcatttgagaagctgcgtgaactcttttgggccatgagggtcccatttagtaaattactacttcagtgcactgaataatacccttgwggcatggtagtggattccaaaagagcttaatttacgcactgggagaatctgttgctcattaggaaatgagaactatgcctgctcacatatctgcgtagagcaaaaagtaccatactcatctaaaaggagagtatgaaatgtgccctggagattcaagtgtcaaattatcattcaatagtagagccacgtgacctggtctatatggtgtgacttgagatttttcccctttacaatttgagttgcttctttatcttatacgtgttttctatgtcactgtcattgcagttttgcaagaattctaggtttgtccttcccagaaggttttaaagtggcatatgaattttccgagatgctaacatgatcatccaccatgcctatatccatctgtacaagtcagttaataaaatccagttgtttagaggtgaattttctcaacccatttgtgtgtcctatgagctaatactaggtattactgagatttttacttttc

SEQ ID NO: 913732 - DNA, 589 bp, Homo sapiens
tatggcagggatatgagaacaaaccctctagctcttatggactccttctaggcttattcttggaaatgtctctctctgccccttattaagtagagatgcagtcttccgtcccaaataacaggattggagtaatacatttctaaggtttactcttatgatctagtttgagagttcatctaacccctagattgagaactaagaaactcccccccaaaaaaatagtctggcatctgagagttcatttgagtttctgaaagtgtgcctattgcccagagcccctaagtgtatctatagaatatcaatatagccattaaacccaagagctaaaagtgccacatagcaacatggaagaggagtcctcctagaaaatataaactaggtcttctttaaataactccctgaattttgcaaataaggctttctgaactccagaactttttgtcagtggctatctcaatttttctttcttttccttcaggmatatcaacacattgagagagtgttacggtcaacatttctgttaaccaagccagaagctgcaattcagaaaaacatacctaactaaaagatactgcatttttacataatt

SEQ ID NO: 913733 - DNA, 657 bp, Homo sapiens
ttagcactttatgaaaagtgtacagaaaattaccatgcttatcaaggcaaatcaagccataattctgcctttttttttctacacctgcagctatgaatattttttggtgggtacattgagacgtgctcaagaatatacatattggactgcatatcatgcaatttattctgatcttactgacagtttgcaaacaaaaactcaaaacaagatgcaactgtgtgcagctcctgaactgtaggttctgattttggcatccatgaatgcacgaggaaagggggtgcagctgaagaggtgtgcttttgctcatcttacagtgaaatataatctgggcatttgtttgatggatttcatgaaatatggaggaaatctgaaccaagggtttcacctgattgcttttatttgccccacctcggtaataataataagtgaaaatcagctggagttgatgactgtggagccataagttaaccatattgaaggagaatcattaagaatgaggaaaggagaaagtgggcaatgatggtgatcttccttttttgagaagawgatacccacctctcgccagtcaccccctgccatggcaatctttcaaagaaaagcaaatattgtaggccaaaataaaaagaggaagaacatggactacattgggctccttgt

SEQ ID NO: 913734 - DNA, 473 bp, Homo sapiens
agaaaataatcagggaaaataaactactayttatacacccaagacctgctatttctctggtattctgctccttcctttttccctctctccctccttcctcgcttcctcgcttcctctctttctttcttagacagagtctagctctgtcacccagggtggagtgcagtggtgcgatctcggctcaccgcaacctctacctcctgtgttcaagcaattcttctgcctcagcctcctgagtagctgggactacaggcgcctgccaccaggcttggctaatttttgtatttttagtagagacagggtttcaccatattggccaggctggtctcgaactcctggcctcaagtgatctgcctgcctcagtctcccaaagtgctgggattacaggtgtgagccaccacgccaagcatattccacatcttaattggcattaccaccatctatctatcgaggaacccaagcttgaaacacag

SEQ ID NO: 913735 - DNA, 668 bp, Homo sapiens
ctttaccatttcctcctcactcaagtccctggtaaccataattctactctttttctatgagtttgactgttttcaatttctcataacacatggcatcatgtagtatttgtccttctgtgtctggtttatttcacttggcataatgtcctccaggttcattcatgttgttgcaaatggcaggatttccttcatttttgaggttgaataatattcttgtgtgtgtgtgtgtgtgcgtgcacacgcctgtgtgtgtgtgtgtgtgtgtatatatatatatatacacgcatatatttcaattaaactttacacctgtgtaaaaaatgtcttatattaaaaagaacccctcagggaacttctggtcatgatgggataacaagaaccatattcactcaccttccttaagcagctataaaactggacaaagtagatgaaacagtaggtttcaagcattagacaagtggtacggggcagttatccctgagatgaagaaaacaaatgaggtgaccctacaattctaacagttcattacctagaaggaatttctagaatgcagcacagggaagggaaacccacacagagacggacaggctgagtttaaaaagcagagttggcagtttagacagaccaaggtggctagartttgcagggcaaaatacgagagaggtgag

SEQ ID NO: 913736 - DNA, 548 bp, Homo sapiens
gctgaagtgctgtctagtattcttaagtgcaggaaggytgtgatatgccttacaaagaaaatatgtgtgtcaaataagctttgttcaggcatgagttacagtgttgttggctatgagttcaatgttaatgagtcaacaatatataagaaataacatgtctttaagcataaatatgcataaaacaagattatgtactgatctgttgataaaaagattaccagagacttgcaggaaccttatctttattttccctaggaacaatggtttagtatttgctaattcaggtttgtggagactttatagaacataactactgtgcataataataatttagggtacttacaatgaacaattagaaatttcaatgaaatcaacaccatttgtaatagtattaaaaactgtgtaatatttaggaatacatttagtaaaatatgtactagtcctgtactcttaaaactacaaaacattgttgtgagaaattaaagaaaatctaaacagttggagagatataccatgctcatgaattggatgactcaatactgttaaga

SEQ ID NO: 913737 - DNA, 615 bp, Homo sapiens
taatgtgaatgacagtagtagtgatctttcaggcactggtctgaattacttgcgtgtattagcaccctgaatccctatggcagtgctgccggtgagggctccttatcatcactgtctcacaaccgatgaaaataaggcacaggaagcccaaacaggaagaaaacagctatgccacagtgtggagagaaaaaacagggtggaaaatacagaaaagaagcgtgagatatatgggaaatagtcaacatgcctaatatttgtgtaactgaagtctgcaaaggaaaagaaagagagagagagagaatgagggagaagcagaatttgaagttagatcagctacagttatcaaaaaatgtagaaagaaccaagcaacagattcaataattactatgagcccagcaaaatatacctacaaagaagagtatactgaggtacattacagtaaaatagctgaaagaacaattccaaagagagaaacttaaaagaagctagaaatagaagatgcactcccttcaaaggagcggcgctacgatttaaaggagacatctcaayggaaaggatggaagctagaaaatggtggaatgctatcttcaacatactcaaagaaataaccaaagt

SEQ ID NO: 913738 - DNA, 619 bp, Homo sapiens
cagtaattgataaagtataagacaaacatcaaataaggtgaacaaatacaaaaatactttctttaaaattattagtgaaatcccctttttatggctgcatagtattccatggtgtatatatgccacattatctttatccagtctatcattgatggacatttgggttggttccaagtctttgctgttgtgaatagtgccgcaataaacatataagtgcctgtgtctttatagtagacacaggcacttatatgttttataatcctttgggtatatgcccagaaatgggattgctgggtcaaatggtatttctggttctagatccttgaggaatctccacacagtcttccacagtggttgaactaatttacactcctaccaactgtgtaaaaatgttcctatttctccacatcctctccagcatctgttgtttactaactttttaatggtcgcaattctaattggcgtgaaatggtatctcattgtggttttgatttgcatgtmtctaatgaccagtgatgatgagctttttttcatgtttgttggatgcacacatgtcttcttttgagaagtgtctgttcatatcctttgccctctttttgatggagttgtttttttcttc

SEQ ID NO: 913739 - DNA, 681 bp, Homo sapiens
atcaaactaccattgacattgtttattgaattagaaaaaaactactttaaatttcaaatggaatcaaagaagactccgtatagccaagacaatcctaagcaaaagaacaaagctggaggcatcacactacctgacttcaaactgtgctacagggctacagtaaccaaaacaacgtggtagtgatatcaaaacagacaacccaaacatcatggtactggtaccaaaacagatacatagaccaacgtaacagaaaagagacctcagaaataacacaacacatctacaatcatctgatcttcaacaaatctgacataaacaggcaatggggaaaggatctcctagtcaataaatggtgctaggaaaactggctagccatatgcagaaaattaatactggaacccttccttacaccttatacaaaaattaactcaagatggattaaagacttaaatgtaaaacccaaaaccatacaaaccctagaagaaaacctaggcaataccattcaggatatagacgcgggcaaagacttaatgacaaaaatgccaaaagaaattgcaacaaaagccaaaattgacaaatgggatctaattaaactaaagagcttctgcatagcaaaagaaactatcattagagtgaacaggcaaaawacagtatgggagaaaatttttgcaatctacgcat

SEQ ID NO: 913740 - DNA, 388 bp, Homo sapiens
caggggcaaaatgccaccagtctcttggctaaagcatagtaagaatgatctttcctccagttcccagtaagtttctcatctccatctgagaccacckcagcctggatttcgttgttcatctcataccagcattttggtcaaaaccattcaagtctctaggaaattctaaactttctcacatcttcctgtcttcttctgagccatccaaactgttccaacctctgcctgttatccagttccaaagctgcttccacattttcaggttatttttatagcagtgtcccactcccagtaccaatttcctgtattagttcattttcacactgctgtaaagaactacctgagactggacaatttataaaggagaaaggtttaattgacacagttc

SEQ ID NO: 913741 - DNA, 600 bp, Homo sapiens
ctacttccataagccaataagtggattatttataaatgaaaatattctcaaaatattgtcatactaagctatcatgcatagagccgtggaattttagcacttgtagtaatctatgatttattttgcaacagttagctaatgtcacataaatgctgtgtgacaaacaaccttaaaatctcagcagcatataataagcatgcgtttaactcatgaaaatgtccatcagctgggggtaggctagctaatctagtttgcacttgtctagtttgaatggggcttattcatttgtctgtggccaactagagatcaactgccctaggttaagtacagctgcttgtgactgctccacaggtctccattccccttctgcagccagcaaaggaacccagggatgtcttctcaatgccacagtagagatgaatgaaagcaatcactttctgtctgctgacatcacatctaccaacatctcattggtcaaacaagtccactgttcaaaccaagagtcaagatgraaaggaaggagggcttccctaccctcagtaagcaggccccgcaaaatcacatagcaaaagacctggttacagggaaggatgactaatt

SEQ ID NO: 913742 - DNA, 645 bp, Homo sapiens
tggagggagcacggctctgccaacaccttgatttcaatccagtgatyttgatttcagacctctggcccccagaactatgagagggtaaacctggtggtaatctcttacaggggccacgggaaactaatacatttgcatacattgtaatttaacattataagtgtcatgtttaaaattatatttttaatgatcctttccaggatcaattaattagactttataggaaagtcttatcaatagatctggcttcacatctcacttttcttcatacaaactctaccacccaggacatagtacttttctgctctgattttctctctttgaaagtgtaaattggatacgacaattcctgccctgtctgcctcaaaatgatctcagtaaaggaggctgaggtcatcttggaagttttccttgaggacgcaacacacttgagcttggctataaaatacaggcgggcagaaaagggagcgtgttttttacgtctctagctcattctcctcattatttccatttttgcaggatacttagtctcatcttcatagtacataaactttgtgattgatatttggttgtttatgtactatctgttccctttgagaaaacaagtaccttgaaagcaactaaccatctgtttcattccccaat

SEQ ID NO: 913743 - DNA, 612 bp, Homo sapiens
gaactggagcaaaggtgactcttgtcatgttttagcaaagagactggcagcatttttcccctgccctagagatttgaacttgagagaggtaacttagggtatctggtggaagaaatttctaagcagcaaagcattccaaaggtgacgtgggtgctattaaaagcattctgttttaaaagggaaacagagcataaaagttcagaaaatttgcaggctgacgatgcagtagaaaacaaaaactcattttttgaggagaaattcaagccagctgaagaaatttgcataagtagcaaggagcctaatgttaatccccaagacaatggggaaaatatctccaggccgtgtcagagaacttcatggcagtcccttccatcacaggcccagaggcccaggaggaaaaagtggttttgtgggtgaggcccagggtccccttcctatgttcagcctagggacttggtcccctgttgtagccacttcagctgtggctgaaaggggccaatgtagagcttggtctgtagcttcagagggtggaagccccgggctttggcagcttccacatggtgttgagcttgcgtrtgcacagaagtcaagaatggaggttttggaacctct

SEQ ID NO: 913744 - DNA, 602 bp, Homo sapiens
tcctagtgtaccaaatggtaccatttccccgccaataaataagaaaacaaagataacagctgttgcttccttatatcaacatgctattggtcaatgaaaaaattatctttcttgcaggtgaaaatcacattatgacaagtgatcactttttcattctttcatagaagagtatccacgatgtactctctatcaaaatattcttctagattttagaagagatttcagggattgacggtgatgtgatttttatctaaatattcttttaggttttagaagagatttatctggtcagaggttaatggagagaggcatagtttgctagtggcaggtaagcataaaacttcatacttatgtgggaatttagaactacaaatcaaataaacgtggaaagaatgaagctcctttgacagaagagagagagaagagaaagataggtaaattttgtgatttttcttatttctacttaatcatactgcttggcagaaattctcaattttgtgaaaaaattggtaagtggccaaggtatagagtagttcaccaatgtakctatgtaacaaaactgaatgtgtaccccttaaatttatacaaataaaaactagagt

SEQ ID NO: 913745 - DNA, 560 bp, Homo sapiens
gattggatgaaagaataatgggaaactttaatattcagctacatgtttgtatatttataaactttatatttgtgggcataaattcmgactctctaccattttacactccttaaaactactaatactgtgacaggtatttggtaattaattttactcttttagatgtgttgtagcccatgttaaaaactaactgtttgagtcaatgttttctgagggaaccataattcaaacttcatgttgggtcttgccactaaatgtagtgaacagttcaggattttttgactgtccagcctctgaaccttcttaggtttccactatgtatcttggtgagagacagagcctgcatccttctagagatttggaaagcccagttcatttagattcagtctcatgcttgccatcatctagcccagagacttgagatgtaggcttagctaaccagaccaagattctactggcatttgaactttgaagcagcaacatacagtgaaatgcattcatttgtacagaaaccacaccagaagtttgtacagaagtttcccagtgtggatggtggcagc

SEQ ID NO: 913746 - DNA, 664 bp, Homo sapiens
caccttgcttaaagttttctcatgccaaataacctagtttatcactcttaaattcctcctttcccaaagcagaagggacacggacacaattcagccaagttatttaccacattttgtaacaagagtggactttcctccagttcccaataagataatcttcatttccctatgaagacctaatcagaatggcctttattgtccatatttttaccaacattctgttcaagaccatttagatgttctctaagactgagactgtctctgtagctcttctgttcttctgaggtcttgcaagaatcacccttaattttctgtcatagcaatatagcaggttttcagcattcatttcagaaccattccagcctctacccatgacccagtttcaaatatgttcccacattttcaggtatttgttacagcaacacccaactcctagtatcagtttcttagtccatttgcactactgtaacaaaataccagagactaggaatttatacaaaataaacttttattgttctagagatgaagttcaagatgaaggaactgatcaattaagtgtctgataaggacctggtcttcatttttaacatggtgccttattggtgaatcctctggaggagattaacamtttgtctttacatggcaagaggaatagaagggcaat

SEQ ID NO: 913747 - DNA, 618 bp, Homo sapiens
actgtccttattccagctgttgaggatttgaagtgagaacgggccaattttagcatgtgttggaaccatccatttgtctatttgacaaagatcttagaatcttccagttgaaaaggtctttggagaccatctacttcaactcccttaatttacagttgaagggatccgtggagaaagttactccccaactactatgttaataagtacaacattgttactcagttcattgccaggcaaacctttgttaggaatttaacagttccacaaatagccaacaaatagttggcaaactttatattcttatttgtaggcagctcatcatattcaggaaataattttccccaggagtgctctgactttaacacatggaacttgttttcactgagagaacaactgaaattctttcagaagagatgttttagaatctctgttataataaaacacagtataatgttacatgcactagaatgtagtgaggtccaactttcattttgattscattatttatttgaacgctcccttcctcctcttctcttgttttgtttctttgtctccatgtttccaaaaggagttcttatcttggacaacctatttcatctttaaaatagaagtaatatt

SEQ ID NO: 913748 - DNA, 603 bp, Homo sapiens
ggtgcaaatgaacaccaatatgtactgatagcccccgtctcagggtcattcagtgaagtccatwagcagtttttcacagggcatggctcctttttcctgaactcccatgggccgagtaggatcttgtcgtggattgttctgagtgtaagttaaacacagtttacaaatggcccgagtaatagcaatgagccatggcagataaaaatgatgccttaataatgtctttatttttttttttaatctgagttcggtggtggaattgttttacaaatctgggggtcaccatttcaggtatggctagcctcccattgaagaatttgtattatcctctttcaatgtagttcttattttcctggggaagccaagctctgttatttggagtgaagattgggatctccaggaggggaatctccgggaggagaggcatagctaaggcgtcttctttaggtggagttgtcattgcagccttctttgcctctttgccttcgtatcttttttagcccttagtgttcttgctttttgctgcctcttgcaggacttcactaccgtcacttttggggcccatacagcgtttaagagctgtaggatttcttccttgtactt

SEQ ID NO: 913749 - DNA, 603 bp, Homo sapiens
ggtgcaaatgaacaccaatatgtactgatagcccccgtctcagggtcattcagtgaagtccattagcagwttttcacagggcatggctcctttttcctgaactcccatgggccgagtaggatcttgtcgtggattgttctgagtgtaagttaaacacagtttacaaatggcccgagtaatagcaatgagccatggcagataaaaatgatgccttaataatgtctttatttttttttttaatctgagttcggtggtggaattgttttacaaatctgggggtcaccatttcaggtatggctagcctcccattgaagaatttgtattatcctctttcaatgtagttcttattttcctggggaagccaagctctgttatttggagtgaagattgggatctccaggaggggaatctccgggaggagaggcatagctaaggcgtcttctttaggtggagttgtcattgcagccttctttgcctctttgccttcgtatcttttttagcccttagtgttcttgctttttgctgcctcttgcaggacttcactaccgtcacttttggggcccatacagcgtttaagagctgtaggatttcttccttgtactt

SEQ ID NO: 913750 - DNA, 603 bp, Homo sapiens
aataaataacttaacaatgcctcttaaacaattaggaaaccaagagtaaaccaaaaccaaaattagtagaacaaagaaataataaagatcaaagcagarggaaatgaaattgaaagttaaaaaaaaaaagatcgttttaaaagagttggtgtttttatttttagttttataattttatttcattttattattattatactttaagttttaggctacatgtgtacaatgtgcaagttagttacatatgcatacatgtgccatgttggtgtgctgcacccattaactcgtcatttagcattaggtatatctcctaatgctatccctcccctctccccccaccccacaacagttcccagagtgtgatgttccccttcctgtgtccatgtgttctcattgttcaattcccatctatgagtgagaatatgcggtgtttggttttttgttcttgcgatagtttactgagaatgatgatttccaatttcatccatgtccctacaaaggacatgaacccatcattttttatggctgcatagtgttccatggtgtatatgtgccacattttcttaatccagtctatcattgctggacatttgggttggctcc

SEQ ID NO: 913751 - DNA, 595 bp, Homo sapiens
catatgttgaaccagccttgcattccaaggatgaagccaaattgatcgtggcggataagcttttggatgtgctgctggattcagtttgccagtattttattgaggatatttgcatcaattttcattagggatattggtctaaaattctttttttgttgtgtctctgccagactttggtatcaggatgatgctggcctcataaaaagacggggattccctctttttctattgattggaattgtttcacaaggaaaggtactaaatcctttttgtacctctggtacaatttagctgtgaatccgtctggtcctgcactttttttggttggtaggctattaattattgcctcaatttcagagcctgttattagcctattcagggattcaacttcttcctggtttagtcatgggagggtgtatgtgtccaggaatttatccatttcttctagattttctagtttatttgcatagaggagtttatattattctctgatgatagtttgtattttctgtgggatcggtggtgatatctcctttatcatttttattgtgtytatttgattcttctctcttttcttctttattagtcttgctag

SEQ ID NO: 913752 - DNA, 611 bp, Homo sapiens
tggagcctgtatggatccaaacctgaggtccactacccaccttcttctagaaaatagacatatgccctacctcatcaagtaattgtgagtttttaatattttaatgtktaaaatattaatactgataacagtgctggcaaaggactctcaaagtgtctgttatgataatgatgatgatttttacttcagaaatagctaatttttaattttttttgagacagtctcactctgtcgcccaggctggagtgcactggtgcaatctcaactcactgcaacctctgcctcctgggttcaaacaattctcatgcctcagcctccctagcagctgggattacaagcacgtgccaccacgcccagctagtttttgtatttttagtagaggtggggtttcatcatgttggccaggctggtctcggactcctgacctcaggtggcccgcccaccttagcctcccaaagtgctgggattacaggtgtgagccactacgtccagcctactattcatttttattccatctcaaagattataaagaggtctagcttcataatcattcattataattatggtcagaactccacaatttacacagctatttcatacatattagaaac

SEQ ID NO: 913753 - DNA, 622 bp, Homo sapiens
ggccttcggcagcaatagcagcattattcacaataaccaaaaggtgggacagcccaaatgaccatcaacagataaatgaatgacaaaatgtgatttatacatacaatgatatatccagtcatcaaaaagtataaagttctgacacatagtataccatggatgacccttgaaaacatgctaactgaaataagccagccaaaaaacgacaaatactgtatggttccacttgtatgaggtacctaaagtagtcaaattcatggaaacagaaagtagaatagtggttctcaggggctgggggaaggaggaatagggagttattggttaatgtggttttctctttgggaagatgagaaagttctcaagatgaatggtggtgatgggcacaacaatgtgaatgtgattaatgccgctgaactgtacacttaaaaaatggttaaaatggtaaatttatatatagttttaaatttcagcttttatttttgatacaggggatacacatgcaggattgttagataggtcataagtgtagtacccaataggtagtttttcaacccatgcmccccaccctccctctcttctctagtattccatggtgtttattattcccatgtttatgaccata

SEQ ID NO: 913754 - DNA, 599 bp, Homo sapiens
tgctgaagttgcttatcagcttaaggagattttgggctgagacaacgkggttttctagatatacaatcatgtcgtctgcaaacagggacaatttgacttcctcttttcctaattgaataccctttatttccttctcctgcctaattgcccccaaggatgaactggtaccattccttctgaaactattccaatcaatagaaaaagagggaatcctccctaactcattttatgaggccagcatcatcctgattccaaagccgggcagagacacaaacaaaaaagagaattttagaccaatatccttgatgaacattgatgcaaaagtcctcaataaaatactggcaaaccaaatccagcagcacatgaaaaggcttatccaccatgatcaagtgggcttcatccctgggatgcaaggctggttcaatatatgcaaatccataaatgtaatccagcatataaacagaaccaaagacaaaaaccacatgattatctcaatagatgcagaaaaggcctttgacaaaattcaacaatgcttcatgctaaaaactctcaataaattaggtattgatgggatgtatctcaataagagctatctatga

SEQ ID NO: 913755 - DNA, 539 bp, Homo sapiens
tgattctcagcttggtgttggttgttgttgaatagaagtggtgaaagtgggcatcttgtctcattccagttctcagagggaatgcttttaactttcccctttcagtatgatgtgggctgtgggtttgtcatacatggcttttattattttgaggtatgtttcatctatgcctagtttgttgaggattttttatcataacaggatgctggattttatctaatgatttttctgcatctattgagatgatcatatggtttttaattccatttatttgataaatgacatttattgatgtgcatatgttgaacctttcatctctggaatgaaactggcatgatcatgatgaattatttttttgataggttgtggaatttagttttctggtattttgcttaggatttctgcatctaacgttcatcagatatattggtctgtagttttggagtgakactggcattgtagtatgagctagggagcattctctctcaatctgatggaataatttcagtagaatttgtatcaattctctgaatgtctga

SEQ ID NO: 913756 - DNA, 692 bp, Homo sapiens
agtatgtatctttttgttcctcttcatgttgtaatgtgttggttactattaatgtcctctcttctttctttcattgtttttataagcaattattttgaataataaaatcaagaataattacaaatgtataatgctttttacattttacaaagtgttttctggaacactaaaaatattcctaaagataaactgaaattttaaaaagatcattagtcttttgacctaacttaatcaagccacatttagagtacaaagaacattattgggaagagacacatgaaaatttataagaactccctctgaatttagtaatttacagtgacacataagatctcacttgaggaaggcacaagattgaacaagtaccaggtactgaataacaagccattgaacaaaccagcaggaaagaacaaatggatacttcattcctcagctgttgaacaaatatttattaacttccaatattatgcatatgccacaaagtgatgttccatgccttgcagccctgggagacttattaaatttggataagacattaatcctgctctcatggaattcattgctatttcaaacaaatgagagtamatgtgataaaagttatactgtgggtgtgtaaagtatatacgatgggcaaagaagggagcctctgaacctgactagggcagttttttaaaaccttcagaaaggaagta

SEQ ID NO: 913757 - DNA, 611 bp, Homo sapiens
tcctgaaatggaaagataaattaatacatcacaagctttagggcctgcaggtcagtccccaaagcgtgctcattatttgccwttacccagagctgagggagaaagtcactcctattttctactatgtaagaggagttcagttaaataaattcacttgctttccactatacaaagaattttaacaattgataggaaattgtgaggaaaaaaacctaattattcttggtacaaactgaaatgtgatatcactgcttgcacaagctagcccaataaaatgccatatgcattgcatgatgtgtgcctaacccaacaaatataattctctctctctcttcatatatatacatgatgcaaactaacatctgtaattttggtggaagaagtaacttaatcacctaagtgatactttgtaaggaagagaactacctccttagggatatatatgcctatccctccctatgaagatgatatcttcatctgggagaattcaatgagattataaacaatcagcttgattctcccctttgcattcaagagagcaaagaatgctcttgagagtcaaaggtctccctttctttttctaaacagcatgtagaattccaagttgttca

SEQ ID NO: 913758 - DNA, 645 bp, Homo sapiens
cagtggtcctgggattcgaacccagccttggtggctccccatacagtcgttccttatgaccaccccacatcgcttcctcactgcttggcactagccttatgattggttgtgtgttccaggtgggagttaaccagaatgaaaaatttctaacagctcgggttatcatttatttatttactgaaaggcatcatggaattgtgggaagtcaggcacacctgagctcaaatcccaggtttgaatggtctttgaaatcagtcacacctgagctcagatcctagcgttgtcatttatgaactatcagcccttgggaaggttgcttttccttcctgacccttggtttccttttccgtacaaaggaatgttaacatgttttttggatatcactgtaaggcttaaatgagttaacgaatacacatctcatattacaaatgcctagtacatagtagattctcactaaatgacaactgtttttattattggcagttcctacaattttgcctgaactccttgcatccaggagagaaaccatgtggaacatgtcagtacagaataccaacagacacatgtttagtgctatcaaytctcacatcatcatgcatcttccctaacatgtcttttttccttttttttccacttccatataga

SEQ ID NO: 913759 - DNA, 486 bp, Homo sapiens
cacagggagcctccagggaagacctcagggctcagagggtggggtgacttgttcagagtcagcaaaatcatttgtacttgcactcctctctctgcatccacaggmattgctcaaggtgctcttttctcctaagcccagctctaaagcagtgctctaggaagtccctgcctacctctaggggctggcaggtaagatgaaattgatttgcattttgagacttgacaaggtcaagtagctggttaatggaagagctggttttcaaactgggaacttcttccacttggccaccctacttctcttgtgtgtatttaagctcatgtctgtaatcccagcattttgggaaggtgaggcaggtggatcacttgagcccaggagtttgagaccagcttggcaagcaagaccccatctttactaaaaaaaaaaaaaaaaaaaaaaaaaaatacaaaaattatctggtcatggtggtgcatgcctgtagtcccagct

SEQ ID NO: 913760 - DNA, 486 bp, Homo sapiens
cacagggagcctccagggaagacctcagggctcagagggtggggtgacttgttcagagtcagcaaaatcatttgtacttgcactcctctctctgcatccacaggcattgctcaaggtgctcttttctcctaagcccagctctaaagcagtgctctaggaagtccctgcctacctctaggggctggcaggtaagatgaaattgatttgcattttgagacttgacaaggtcaagtagctggttaatggaagagctggttttcaaactgggaacttcttccacttggccaccctacttctcttgtgtgtatttaagctcatgtctgtaatcccagcattttgggaaggtgaggcaggtggatcacttgagcccaggagtttgagaccagcttggcaagcaagaccccatctttactwaaaaaaaaaaaaaaaaaaaaaaaaaatacaaaaattatctggtcatggtggtgcatgcctgtagtcccagct

SEQ ID NO: 913761 - DNA, 584 bp, Homo sapiens
aaccagtttattagagtgaaggccttctttgttgccccgaggctttgtgcccattggactggaaattagatgagctgggggtaagtattctttgtatgcatgagagagttggtgactgggaagacactgagggccagacctcactagccagtggaccaatgatttcaacctagcaacatcacttattactaagggaaggggcagttgaaaagtggtaagcaaggtaagtcatcactagcagctagccacggttgtgtagctgttcctgttcctccgaatgggcaccttggctgtgtttcttttgtgccctctcaaacttggctccatattggaatcactgggagcattgacaacaacaacaaaaacagatgcctgggcccctgcagagcttctggtttaattggaatgggtgcagcctgggtgtgggcgctgcagatcttcaggtgatggtacagtgtagcckcagtggaacaccactggcctgcctgagacctgaggtgcttgggcattacctgcaggctttataaaaaagttaaatggtgttagaatatttcaggggaggttctgattagatctaagaataa

SEQ ID NO: 913762 - DNA, 668 bp, Homo sapiens
agctactctgatcacatcataattatctggtgctctgtcctctcattactatattctactaagatcttaggaaagaaatgcatcattagtaattagagaggaaactgaractcagagagttcagtcattcttttcaagtcatacaagtggaaatatggtaagctgtgatttatatccaggcctttttaacatacaaaacctaatgtgttaacatttccgatcaattttcctttcctttttttttttttttttttttgagacggagtcttgctctgtcacccaggttggagtacagtggcgtgacctcggctcactgcaagttccgcctcctgggttcatgccattctcctgtctcagcctcccgagtagctgggactacaggtgctcatcaccaagcctggataacttttttgtgtttttagaagagacgaggtttcaccgtgttagccaggtcttgatctcccgaccttgttatccgcccacctcggcctcccaaagtgctgggattacaggcgtgagccaccgcgcctggcccaattttcctttctataaggatagtcattgccttaaagtttgaattcctggaaaggagtacttgtgtctcattcactctggaatcccctgtcccaggcacaatgtctggccaaaattgctgctaattaaacatt

SEQ ID NO: 913763 - DNA, 593 bp, Homo sapiens
attgtaataatttttcttgagctggtaattttgtaatgataggctaatttgtcaaaatgctagtcatgtttatgttatttgaaaataaagcaggattattgctttagccacaccccgtacttacaggaaaagatgtacttaaatttttaatgtcctcattgccaaatacttgatatcagataaacttagtcatggcctcagcaaactgggttaatctaggctacaaaggcagtaatattgtgtttcattaatatctagaattgtaataaatcaaatgaatattctgagcatgtgcaggaccctacaatgcctatgagtgagggatagctcacagtgtccttcctggacagagtgaggtcacagtgaggagtgcagcaagaccaatctatgaggaccctcccactaccccctgccaaccccacttagcctggcttgagtctctcagaattattagttgtccaacaactccacagttaagcattttrcaacctcaggtagctgagctcatcacaggactaaataacaagtagtatttagaagacactaaatgtatgttcagttggatttaatgaagttaagtggaagagaaacta

SEQ ID NO: 913764 - DNA, 624 bp, Homo sapiens
gtaacagagaggatgcatggagtagaatgttgaaactcacccggagcacacactaaaaagagagttgcccatgtagatagcagctctgttacagatcaccatcttccacttggagcatccaacctartgagtttgcctagatgctcatactggaagccactgtgtgttttctttgtccctggcatcaatggaagacatctttcctaatagactaccccatagatttcttgcttggtgtaaatctcagtagtcctgggggctgaccctaggagcctcagaactaaatcctggaaatcctacacagtctgtttttaagccaggctgtccaaatatacccccatatcactgtttttatgtaacatggcatcaaactgtcaaaatcttaactctggttgtatagattcccctgccttattccagaaaggattatgagtcaataatagatttagtgtaccaagataaaaacaggtgagtaaagaaatggaggtcagaggaaaataactttataaaaaatccaatgaagcccagggtaaggttagcacatcaagtgtgcatgatatggttccagaagtgtggctatgagctccttagcctccaaagcacaggcataaataagattcgtgg

SEQ ID NO: 913765 - DNA, 610 bp, Homo sapiens
ctaccatataccagacactgaactgagtgcttcatacattaattataataacaatcaagatgtattgaccctacaatatgtgccaagtactgggtaatagtcttttacaatctactccaaggacacacagctgaaaaacaaaacaagaacaaaaccccggtccaactgacctcaaaggccatgagttaccctttttatgcctttctccttgagtgggaggtgaggtcacaccatgaggtccttctacatcttgatgggaccatattgtccaaccactataagtgacattaatgattatgtactttttttactaaattgagatctattgtggtgtttatgctcttgaaaaagaacatttcaaagaatcaaactactccttaactttaaaaaaaaaaaaaaaaaaaaaaaaaaaaaagtagagaatcgcagttgttacggaacatggactcaccccggggagctgggaatagctcataacaaactgcatcatagcacaccactaattaagaatgcttaaatggcagctagtgcctcagagggccgccacaggctagaaccatgccgttccattaagcctggaaataagyactttgtcattaacctgacgtat

SEQ ID NO: 913766 - DNA, 610 bp, Homo sapiens; identical to SEQ ID NO: 904519

SEQ ID NO: 913767 - DNA, 593 bp, Homo sapiens
cagactccatcagatcccagagtctttggatcacattgagtatggtctagtacttgaattcttcgtgtcttgcattgtatcttacattagttttctattgccacaataatgctgtctaacaaactgccccagtgctcagaggcttaaaccaatacccatttatttagcttgctgtgggtcagttattgagactgaactcaactgggagagtttcctataatggctggactatttcacattcatggggaggttggcttgctgttggctgatctaggaagcctttactggatggcttggatgactggaataaatgagatgactcagtcctttaccaagggtccagcaggctaggccaggcatattctcatggcacagcagcggggcatgacaaacaagctcaactgtgcaaggaatggaaacataccagcttttcaagtttctgcttctaaacatgtttgctaacatgtcatagcaaagcaaattacatagccaagtctagaatcagaaygggcagaacaagaaaattataggataaaggacataattcagtgaaactattaactggagccatgagctcaatcaatctactactg

SEQ ID NO: 913768 - DNA, 707 bp, Homo sapiens
gcattgaagtggcttgagtcagacataggtaggtcctactgtgagcaaacactccaatagggaaagataaaagtggctggatttagtggcatggaggttatgggaagccatgcagggcctgatccagagtggtaagcactaaagccagatcagaggaaaggagtgagaaagaggaggtgtataaatcgtaatcaaaacatatgattttaaaagaaacatccaatatagccaaatatcaaacatgatttatgacattgttaagtttaaagctttgtgtagaccattttgataattatacaaaaagcagttcaaaaatgtatactctgtcttagttttatatttctagggatatttgtagacaagacgtgttaaaaactcccatctatattatatagtaatataatatatattaacatatatatataatttctaaaaccaaatgattagaattttgaatatccacaaatgaggaattaattaaagttctgatggcttcatagagatctttgagaggatattatgaagactaatagcaaaaagggaaagcttatgttataatattatatcaaaagtatatcagagaattatatactattctgtttttcaggatgcttttaagccacaagaaacagaaaactcaattcaaacrggcttaaagttgattcatttatagaaagtttgggtctttgttgctctagaagctgtaa

SEQ ID NO: 913769 - DNA, 606 bp, Homo sapiens
atgtcaaagagttaacctatggcgggaattctgctgatgctgaaaaactcctattaaagcgaagttttaaaaattgtattataaaaaagctcaaagattaaaagcgaaaagcaacggtgtagtttgttcccatgtatcactactgagcttaaatgtcaccaacattctttccttcctgtttcatctatgtgactacttactcccaaccccactcctaaaataaattttaaagtggtctttaggtaagatttgcctaggctgtaatgctgtacaattttggcaaatggacatactctgtaacccacatccctaatgtggtatacaaacttgttatctcccaaagaagttattttttttccttctgagacaataacttctcattgctaggaaactattttctggttttttcaccttagattagttttgtgtgctctaaaatttcctatgaaagagatcatgtgcattagtttgcacctggcttctttcaccatatctgtgagctgcattcatgtagctgtgagtatctgtagttctttccattttattkctgggtgttattccagggtatggataacttgtttatccattcacctgttaatggacagc

SEQ ID NO: 913770 - DNA, 622 bp, Homo sapiens
aaccaatgcctaacaagttccagactaccccttatcttcccattttcttctgaaccctcctgacacttccaaactgtgctaattatccagttctaaagccactaccacattttcagacatttttagcaatgtcccactcctggtaacaattttccatattagtccattgtgcgttgctataaagtacccgaggccagataaaatatgccgaaagttgttttgacttaccattttgcagactgtacaaaaatcatggcaccagcatttagttttggtgagggctcaggaagcatttactcgtggtagaaggtgacagaggaggaaacatatcaaataacaagagatgaagagggaaaaaaagaaaatgtcaggctcctttttaaaccagatttcatgtgaactaatgcagtgaacactcattaccatggggagggcacccagccattcatgagggatgcccccagggcacaaacacctcccaccaggacccacttccatcattggggaattacwttttaacatgagattaggaggggacaaatatccaaattgtatcaccatcaaactgtctaaattatacatttcaaaatttctctagattcttctgaatctaagtacatga

SEQ ID NO: 913771 - DNA, 357 bp, Homo sapiens
aacaaatttttattatctgactaaaatgyatcaactacaatattgtaatctgaagataaaaatatgaataagaaagtttcccaccttcataaactaatggtgatacaggtttagaatcatcagaatgcaatatgataaagtgctaactgatgaagaagcactaaggagaaagaaagagatgatatttgaacgaaccaagaaaagcctcccagaagtgttgggtcataaaaattgggtaggtgctcatcagatgaaaaggaagaggatgggccttctaagtggcaggagataaatgatagggcaggcaggtcaaaagaagagtcaaggaaaaataggatgttgccagacactaaaggg

SEQ ID NO: 913772 - DNA, 352 bp, Homo sapiens
tagtgtctggcaacatcctatttttccttgactcttcttttgacctgcctgccctatcatttatctcctgccacttagaaggcccatcctcttccttttcatctgatgagcacctacccaatttttatgacccaacacttctgggaggcttttcttggttcgttcaaatatcatctctttctttctccttagtgcttcttcatcagttagcactttatcatattgcattctgatgattctaaacctgtatcaccattagtttatgaaggtgggaaactttcttattcatatttttatcttcagattacaatattgtagttgatrcattttagtcagataataaaaatttgtt

SEQ ID NO: 913773 - DNA, 635 bp, Homo sapiens
agcatttacttctgtcttttgacttcatgggaatttacttggctgacttattgaaggtatctgcttttcaagagtcaattgtgtgaaaggactctttgtgaatgacacgtaatttaaaaaacttctcccttgtcrtaacagaaacaaaagatcaagcagaggagtgcatgtgtaggcaaattatgaaagaagttatagtaaagcaattcttttgaaattataatatttcaggacaccaattatgcatgtcatgtttcaatagaagacattcataaattttaaaatattagctttattaattattacacattgtactcataaatcatgatatcactttattctccataaatatatatagctataatccatcaacttacaattaaataaatatgtaaataaaaaataaaaatactggcttttaaaatataatggtttttaaatattttagtcatagtcctaggcattttttctgtaagctgcccacagctcaaaggataaaatttttatgcagaagactaataaaagatattatcctcaggaaacaaagaatgactcaaaatttaagaaaaatctttatgtacccatccaccctaatgtctacatgaggacccagcaggtcaaacaaaaaggcatgg

SEQ ID NO: 913774 - DNA, 543 bp, Homo sapiens
aacacttctagaccttttaagtgaacagagttaaggatgagctcatactgatatctctaattycaatcaagcaccataggattcttcctcttctcccatgccaatgatgtaccttctcccaccgtgagaaccctggcttgcaacaacattaatgtaatataatcactcatttccccaatcctataagcatacacaaaatagtttcagcgttgctatactgacaccactactaacaacaaatctaataagaatctttcaatatttatttatttttatctttaaattgagagtatatgattaaaaattacctgattaatttttgtttatttctgggttggttatgttatcactttgacatataattaatgtgtctccatttgtattcaattttaggggtttcctcaaacttactgatttgatttcactttttgaatatggaaaatgcaaacatgacttcaagtcacaactatacatataggtatattctggtctctgaaaatgctttagttttttcatatctattatgtcctctttattccaaag

SEQ ID NO: 913775 - DNA, 623 bp, Homo sapiens
ttactacgcagtggaggaagaagagttgttggaaattatttgagaggyagtataatcatttgtgaggcagttttctgcattcaccatttctcacagactaagttactcataagcaaacgtgcaattcacattacactgaaattcttccctaatacatcatttgcattggaataaagtacggttttcaaacaacctgatatagcagaactgactgtataaattatgtgagcacagtgcaagtaattctttgtttgtttgtttgtttttttgagacagagtctcactctatctcccaggctggagtgtagtggtgcgatcccggctcactgcaacctcgatctcccaggctcaagcgattcccctgcctcagcctcctgagtagctgggattacaggcatgagccaccacgcccggctaatttttgtatttttagtagagacggggtttcaccctgttggccaggctggtctcgaactacggacctcaggtgatctgcccccctcagcctctcaaagtgctgggattatagcatgagccactgagcccagacacaagtagttctttctgataaacactttaacactgaatgcaaaaaaaaaaaaaaaattgtgtgtgtacttttt

SEQ ID NO: 913776 - DNA, 199 bp, Homo sapiens
ttttctaaaatttgtatccaaaggtatgtttacaatttacacttctttgaattacatatttaatattttctattataaatattttataaggagtacactaaaattttgtaagttataaatgtatggcatagatatatttttattatatgacttctgtcaaaatcggtaaatattttacrtaatactactactcctagtc

SEQ ID NO: 913777 - DNA, 693 bp, Homo sapiens
gtttattcaactggccaacagatatttctggtgtgttttctatgtgctgagtagtcttctaagyagtgtggatatggcaatgaacaggacagtaaaacttccctggcctcaaggagctgacattttcatgtgaaagatattaaagatttttaaaataccagacaaactaatgtgcaataaaatcaggtagcataaataaataaatgcaataaagtgggttagatgatagggtatgacgagaggttatttgaaataatggctaaatgaagacagggagcagaacaggcacacaagtgtctgggggcaaaggattctaagtagactgaacagccagtgcaaggtccagaggcggaatatagtttggcattttccagaaggggctgtgtattttggtagagtacatgaagtgaaatatggtaagagataaggatagagaactagtcaagggccaaatcatgtgaagtgttatagattctgaatatctgaagataatctctacttccgaaccctgtattagaatgctttgaagacatttaatattttaatatttactctttcctttttttgagacgctcagttgcccaggctcaagtgcagtggcgcaatcatagctctctgcagccttgatttcccaggctcaagtgaccctcccatcttagcctgccaaatagctgggactacaggcacatgcca

SEQ ID NO: 913778 - DNA, 657 bp, Homo sapiens
gtttttctaatgttatcttctagaatttttatggtttcaggtcttagatttacgtctttgatccatcttgagttgattttttgtatatggtgagagataagaatctagtttcctttctctacatgtgggttgccaattacaccagtgaaaacttaattttaagtcgtttctactctgtaatctttattactatgtatgaggggtgatcattctttggtcagtggtcagtgttaggagagaggttcctaaccctattcatgatgccaagtgtttgtgtttggggaaggaaggccagtgggattacatttgaggaggagctgcattcaagactttcagtgattgtttactgaacacctactgtaccagtcttctgctaccaatagtccccaaaactcagtgacttaacaacagccatttatcatggctcctgaatctgcatgctggggtggctgatctaggttggcctgtctgggcagctcttctccatgagtttcttgtcttcctgggatcagcaacctgacatgggcatgttcttctcagggcaataacagacgtgcaagagagcaagtgcctttcataccttttgtagcattatgtctggctgagatctatacacyaaaacaagttacgtggccatcctcaaagtggaagggtggg

SEQ ID NO: 913779 - DNA, 620 bp, Homo sapiens
ttacaaaagagaaaaccaagatctagaaacaataagcaacttatccaaagtcagaastatttagtaacagaaataaagataaaatataggcttccaaatagtcttctttagttctaatttaaagaccaacctattttatcgtatgtgtacctaaaagtttattaaaaagcacagcaagctaaaaagtaattttacaaacagtagggacatgtaaaacaaaaatatttttcaaggaaacaaaacaaaaccctttagaataatattttaggttggtcagaaatgcaactatttcaacccagtgcatttaattacagataattttataattaaaacttatctttactctgaataaataatggccaaattttgctaatatggattaaggcccaggcaattggacttgtatttaaagaaatgtccagatttgtcattaattaagttgaaattattacagccacttttttcctttaatttagtaatgattaagaatggcatgttgctcagagctaagcaacaaagaacaggtatgctgtcttatgattagagagcaagactaggagccagaacttgtgagccttattagagaattttgtaaagcactttgaagatgaaaagaacta

SEQ ID NO: 913780 - DNA, 659 bp, Homo sapiens
ctactgtattcttctttttctttattgttttagctattctggttatccttgcaattccrtatggattttagaatcaacttgacaatttttacaaagaattcgtctgagatccttatggagattgtgttgaatctgtagattactttggaggatattgccatcttaatattaagtcttctaattcatgaacatgagatgtttgtccagttattcaagtcttctttaatttctttcaacgatgtttttcagttttcagatgttttattcatgttgtgtcatgcgttagaatttcatattactatattctgagaacttttttaggacttgaaacattatatagatttgaagacctctctctatatatcaccatattctagaatttggtatttatgcatcttaaacgtatttttaaaatttaccctcccattaacagccttcttactgatcttttatgtcctcatcaatgcttacatttgctagatttttgcatttttggcaatctgataggtggtatttcacatttttgtggagttcctaggaaaagctgataatatagaaatgtgagatgtaaagattgaaaaggaagaaataaaagaggaattgcttggaaatgatatggttgtcttatctagaagaggaaagagattctacaggcaaat

SEQ ID NO: 913781 - DNA, 559 bp, Homo sapiens
tatatgtgtatatatatgtatacatayaggacccattaaccatccccgcccttcccgcccccaactggttcagtctttagcaagaagctctcaagttttcctttgttgacaaccaaattcatgacttcaggcaattgtgagcagaaagtagaaacaacttggcaatgttaaggttgaatagctgttaattttttacagtaataaataatacagtgatagagaagtagaaaattctctatttaagtacacaaatacacaactcttttgtaaggatcaaatcaatgtttccactcagggtaagaatatattatggactaacaaattttcatggccatccaacgcatcttgtaatgtgtgcaatctatataatatgtatttatattaataatgttttccctgcacaaaattaacctagagaaagcagagcttcttcttttatttgacaattatgaaattcatgcaacaagttgagctaattaagagcaatgaaaccaggaagtctgattatttttatcatctctttctataaaagacaaaatgtttatgattttcttttttc

SEQ ID NO: 913782 - DNA, 673 bp, Homo sapiens
ttaataccttgtggaattgctgtcaagtcaaggtttaaagaaactttagtaaygttcaaagaggcatctatatgacagtgaagttcttctacatggaaagggtatatggagataatatagccaatgtggaaactaacgttaattagggaattgggtaagggtaaacttggctcctgggatatggaacaaacttctgtcttcagttaacaccatacaattttaccaacagagctgagttctttgtaactatgtataaatgcacctcatgctatatcctcctgatccccagagcatgagtaactgctagagaactggagggtaatttgcaaggtctctaagcctgttattgattttcactggttaaaacccataagtgggctgttcacacatcctgagaatatggattctttcatccctagggccaccagctggctagaatctccaagagacttcaggcctcatgctgatcatcatgctgcttctctctgttctctattaatgcttaggagggatgggtgggggcattgaaggcagttgagcttcctgcctccatccaagtgctgaaaagaaaaggactacatatcagggttcatgtttcagcatgaagatgttgtgtgaactgattccacgtatacatcccttcaacttctctttgtccaggtcagtgatgctg

SEQ ID NO: 913783 - DNA, 673 bp, Homo sapiens
ttaataccttgtggaattgctgtcaagtcaaggtttaaagaaactttagtaacgttcaaagaggcatctatatgacagtgaagttcttctacatggaaagggtatatggagataatatagccaatgtggaaactaacgttaattagggaattgggtaagggtaaacttggctcctgggatatggaacaaacttctgtcttcagttaacaccatacaattttaccaacagagctgagttctttgtaactatgtataaatgcacctcatgctatatcctcctgatccccagagcatgagtaactgctagagaactggagggtaatttgcaaggtctctaagcctgttattgattttcactggttaaaacccataagtgggctgttcacacatcctgagaatatggattctttcatccctagggccaccagctggctagaatctccaagagacttcaggcctcatgctgatcatcatgctgcttctctctgttctctattaatgcttaggagggatgggtgggggcattgaaggcagttgagcttcctgcctccatccaagtgctgaaaagaaaaggactacatatmagggttcatgtttcagcatgaagatgttgtgtgaactgattccacgtatacatcccttcaacttctctttgtccaggtcagtgatgctg

SEQ ID NO: 913784 - DNA, 684 bp, Homo sapiens
tcatcccttgatatcataaaatagcagtggtattcatcataattcaagctttacctaaaggaatttttatgtgggggctaggaaaaaaaaactcatgaatttttagtttattttctcaggatgtgatttaactcttctattgctttatatttagagtattccttatgggttaccagaagaacatatgcttccttgttaatgcaagtcaacagaggcttcttttgaagttacccatcatgcataatgctaaaaaccctaatctgaagtgtcaattttacatgatgctattggttcgttttattatgcaatgaaaccaaataaaaggaattacttgcaaagtcatagaaaacagtttctttaaaaaaacatgttgttattggcaaaagcactgtaatttttagaaagaattcattttttaaatgagaaaacacaaagttcttttaaaaatctccatagttttaaactttgtagataatttcagtccactttgcctatggtataccgtaatttgtgttgagttgaatgcctaacagttactctcagtaaaaagaattttgctgtatgatatcctgatatcgtctatggttttctctttttgcaggttttgttcacaactaatcaaattccctttttttttgatcgtttaaaaataacaacaamaaaaaaaaacccacttgatattcc

SEQ ID NO: 913785 - DNA, 634 bp, Homo sapiens
gagtcaggctaaaattaaaaagaagaaacaaagacaaaaacacagatagtcttagaagagaaagcttgtgctggattaagtgcagttcagagtcaggatggcaggcagatgtcagtgaccatggacaaggtgtgtctggaattcagtgggaggtcagagagggattatggctgagatgcaggcttcacagtggcccttctcaaccatgatcccagagcagtaagcgtggatactcagcagcccttacatggattgcggtgttctttttttattttttgagacagactcttactctgttgcccaggctggagtgcagtggcatgatcttggctcactgcaacctctgcctcccaggttcaagcgattcttctgcctcagcttcccaagtagctgggactacaggcgcacgtcagcacacctggctaatttttgtatttttagtagagacgctgtttcaccatgttggccaggctggtctcgaactcctgacctcaggtgatccacccgccttggcctcccaaagtgctgggattacaggcgtgagccacygttcccagccggattgtggtgttctaacttggcataagcggtcaattgacacagtggaaagaacacaggacaggcagtcactaac

SEQ ID NO: 913786 - DNA, 586 bp, Homo sapiens
ttgcatttctgtggaatccgttgtaatgttacctttgtcrtttctgattctgcttatttggatcatctctcttttttttctttgttagtctagctatcagtctatcagtcttgtttttcctttcaagtaacaaactttgggttttgttgattctttgtatggattttggggcctcaattttgttcagttccactctgattttagttgtttcttttcttttgctagctttagggttagtttgttcttgtttttctagttcttctaagtgtgatgttagaggaacatcattaatttgagatcattctaagtttttgagttaggcatttagtactattaattttccttttaatactgcttttgttatatcccagagattttgatatattttgtgtcttttcacttatatcaaatacttttttatttctgccttgatttcattgtttacccaaaagttattcaggagaaagttgtttaatttctatgtaattgtgtagtttggagagatcttcttcatattgatttctatttttatttcattgtagcctgagagtatggttagtttaattttgatttttctgaatttatt

SEQ ID NO: 913787 - DNA, 578 bp, Homo sapiens
ggagtcattatgctgtctctagtctctaattcaccagacaaacacttaagcaagaacatcgaatttttgttgtaaagccccactaaatgtttagctgcagcgtgtgaatcctcagaaacagmccaggaatttaggaactgggaacaaagggacatatctttcgctatgataagggaagaacaaggaggcctttgggaaaacaagaaaaatcccattatgggattcaatgagagaagagaaaattgtttcctcttaataaatatgactttatttcattccagccacctattaatccaaattaaaaaaaaatgttcttggcactggtgattcctgtctgagcccattgctgttctgatttcccactgagatctacaagtgatcaagagatcaataattccaaatggtgtttttacaggagcatttccttccagagtatgaaaatgctctttcatgaagacagatggacgcagtctgcaggaccctgcttgctcgagagaaaccgtctttgaaaacttttgacaaccagcggggtagcacgtctgtttctgtttaaatgagctcattacagttaatatttt

SEQ ID NO: 913788 - DNA, 634 bp, Homo sapiens
acaaagtacataaaggaaaaagcagacaaaaaaccaacatcaacaaaccacaaaacatccactaaacaaatagatgtaatgtarttttggggttacttttgatttttttttttaattggtaaagttctttttgtgatagtttttccttggggttgggatgaaatagagaaaccaggtttcagcttatgtttgagaacttttctttatagataatttcccaattgttcaaaagcaaaaacaaggtcatgctaatgttaggagtttagagtttaagtaagctcaagtatcaaactttgttctgttccataaggcccaagaggaaaatgttctgaattattaaagttgttttccttcacagttagagcaacagtacacagaactcccatttttctctgccttatttttacaaagcacatcaatgagaatgactcctctcttctcttatcagcattctccatcattttgtttaggatcttttgagtttgagggcatggtgaaaaccagttcagttttgatgaacaaaagttaggaggtttactctaaaagttaggagtcttgacacagatgggggctgctgttgtggtcattatatacaacctaatggaactatgttctcatacccagccacactttt

SEQ ID NO: 913789 - DNA, 606 bp, Homo sapiens
atattgacttaatattgttaagacatgatatggtttggctgtgtccccacccaaatctcatttgggtttgaattggaagaagaaataattagcaaacttgaaaatagattgatgaagattatgcaatctaaagtagagagaaaaaaagatgcataaaaatgaacagagcttcacagaaatatgagacgtcaagtgcaccaacatacacataatgagagtaccagaaggaaaggagagagtgaaagaagcagaaaaaatatttataaaaatgatagcagaaaatttccaaatttattaaaaaacaatctacacattcaggaaactcaataaacgtcacataaaataaatacacatgttgtgggagggacctggtaggagttaattaaatcatgggagcaggtcttttcaatgctattcttataatagtgaataagtctcacagaatctgatggttttaaaaaggggagtttccctgcacaagctctctttcggcctgctgccatccatataagacgtgactttgctcctcctagccttctgccatgattgtgagacttccycagccatgattgtgagacttccccatgccttttgccaggattatga

SEQ ID NO: 913790 - DNA, 584 bp, Homo sapiens
ttaatcataaaggaataatgaactttatcaaaagacttctgcatctattgaaatgatcatatcattttttaaaattatgaggtgtgttacatttatgaatttgcatatggygaaccatccctgcattccttggaaaaaatccacttgattgtggtatattatctttttgatatgctgctgattttttttttttttttttttggctagtattttgttgagaattcttgcatttatattcctcagggatattggcctgtaatattctttttttattgtttccttgctagtctttggtatcagggtgatgctggcttcatagaatgagttaggaagaattagattcctttatttttggaacagtctcaataggattggtatcagtccttccttgtacatctggtagaatttcgctgtcaatcagtctggatttgaacttttgttggggatagactttttttattactgattcaatcttactagtcaccattgatctgttcaagatttttatttctttcttgttcagtcttgggaggtgtatatttacaggaatttattttctctaggttttctagtttatgtgcata

SEQ ID NO: 913791 - DNA, 638 bp, Homo sapiens
actagtcaccattgatctgttcaagatttttatttctttcttgttcagtcttgggaggtgtatatttacaggaatttattttctctaggttttctagtttatgtgcatagaggtgctcataggacttgctggtgatcttttgtgtttctgtgatatcagttataatgtcacccttattatttctgatcatgcttatttgaatcttttttctagctggtggtctatcaattttgtttatcttttcagaaaccaactttttacttcattgatccttttattgtttctttggtctcaatttcttttatttctgctctgatccttgctatttcttttcttctgctgcccttgggtgtggtttgttgtttttcttgttccttgaggagcaacataaggttgttaatttgtaatctttgtatatttttgatgtacacttttaatgctgtaaacttccctttagcattgcttttgttgtatcccagaagttttggtatttagtgtcttattttcatttgtttccaaaattttttaaattgaagctttaatttcattattgacccagtggtcattcaggagcaggttgtttaatttccmtttatttgtataggttttagggttcctctaggtattgatgtctagtt

SEQ ID NO: 913792 - DNA, 665 bp, Homo sapiens
tttaaattgaagctttaatttcattattgacccagtggtcattcaggagcaggttgtttaatttccctttatttgtataggttttagggttcctctaggtattgatgtctagttataatccactgtrgtctgagaagatacttgatatgattttgattttttaaaatttattgagacttgctttgtggcctagcatatggtctctttttgagaatgtcctatgtgtacaagagaagagaatgtatgctctgccattgttgaataaatgttctgttaatgtcttttggggccatttggtttagagttcaatttaaatccagaatttttttgttgatttcctgctctgtcagtgtggtgtattgttttgttgtctaacttttttcttaggtctaatcatatttattttatgaagctgggtgctccagtattgggtacatatatgtttcgaattttatttaacatggttgacttaaagtctgtttcatctgatgtaagtataactattcccacttgattttggttttcatttgaatggaaaaatccttttccaccttttaacattgagactctatatgtttttaccacttgggctggtttcttgtataaatcacatgattggattttgtttttttaatccattccttcagtctgtatcttttaagtgg

SEQ ID NO: 913793 - DNA, 654 bp, Homo sapiens
aaaccataaaaggcagaaatacagtggaagacagtaaaaaagattaaaggcaacaaatagaaaacaataaacatggtagacattattccagttatatcaacagtaactttaaatatcagtagtctaaagataccaattaaaagagactgttagagtggatttaaaaaaaataaataaatgaaacaagactaggccaggcacggtggctcacgcctgtaatcccaacaatttgggaggccaaggcaggtggatcatgaggtcaggaattcaagaccagcctggccaacatagtgaaaccctgtctctactaaaaatacaaaaattagccaggcatggtggtgcacacctgcagtcccagctactggggaggctaaggcaggagaatcatttgaacttgggaggcagaggttgtggttagccaagatcacgccactgcactccagcctgggcaacagagtgagactccatctcaaaaaaaaaaaaacaaaaaacaaaaaacaagacccaactataagtcgttgacaagaaactcacttttaatataaagacatatatarattaaaaagatggaggaagatatgttatactaacactaatcaaaacaaacctggagtagataacattaatttcagacaaagacgtctcagagcaaag

SEQ ID NO: 913794 - DNA, 669 bp, Homo sapiens
tctgttagtgcacttttctctaatggagattacagtttgatgcatataaaactatacaaattttaataaaattatatcagcctggactgaaaaaaaaaactaaggaaagagatagctcaaaatgaaaagatgcctcaagaccgccaaacttctatggggaggaagtaagccagaaaagaaactcatttcttttgggtcatttctcttggaaaaagaaggatatctcagagaacagagcctaaagcacagagggcagaggtaagaggcacagagaatcagttccagggagtagaactgagccatcatcagtaaactagctacatgtaccttactggatttcaaaattgctatggaccagtaacttctgtgtaccacccattttcaacctttttgagtaggaatgtctattgcaggtttcctatgcttgccttatcgttgtatattgggtgtgtgtaggccagaaaacacacctctttagttcacacatcttcagataaagaggcgttgcacccaagagaccccttctgcacctggattgatttggatgatgagattctgtacatgatatcataatgagacaagacctyggatgctttggaggggataattatatttttcatgtagtaaggacatggcccattagagaccagagagtgctctggtggccct

SEQ ID NO: 913795 - DNA, 600 bp, Homo sapiens
atatcctttccaccactctacactcccttaccagaaggaaaaagccagtagccaaacttcaggcctagaatctgatgatggggcctaatgctcagtcagaggttgtataaggattagcttgagttgcttagtccacaaagactccaaggctgcacagtgcaagagagaagaggccaggcagccccctgtgctctgagaatgtcacatgcctgcaaggaagcaaagaggcctccaccatctcttgttcccgtctgccaaagagggcacaccccgggaagaggctctggctcacaccactgggggccacaggtggaaaatgctgcctggggaccccatactattcactttgaacccttcacaagagaacgagggctaatcccatggtgcctcacaaccccgtttacctcagtcaccaccaaaaatcatgtcttctctgtattacgctgactcaatctcccagcctctttgttctcaaacccctgggatgtgaaatctactatcagcacgtttctcggatccccagtggctcttacaacagaaatctggctacccctggaagcctcttgaatggaaagyatttaattgttcacacctcacatg

SEQ ID NO: 913796 - DNA, 655 bp, Homo sapiens
tacttcacagtccataatcagtgacatgggaggtggaaaagtcttaaaatccctcaagaggaaaaactgtggccaacacaattcatagttaaaagatcaacctgatattgctcacaaagttctaagtattcttttagatgtttatgtgaatgcattaataatattctattatttgcctttgtccagttcagatagttttcttgctcttatcagcattgataagatgaagtaaatcagatgtgagagaaagcacgggaacccatcatctgtgcctcagccaccgattgttctcctctggctgtgctcatcttgccagtctgctggctcacaaaggccccagctttgatgtcagtctgactgtttgacaaagccagttgcagatgctcttcatggagacagcagattacagacaataccatgctaaagaaatgctatcgtctagccatgtatacactgaaagttatctcagtgtatacatgggatatgcttctttcaagaagtcacagaaatgaggcaactgtggaatgaatgacaggcatctatttatccaagttacaaaatctccctgagaaagacgaaatttatcagcaacagctaagtaacaattgtrtatgatgtgaaagtcttattgattcatttttttaggtgtagctgg

SEQ ID NO: 913797 - DNA, 613 bp, Homo sapiens
gtgagtcatgtgaatacactggaaaaaattaaataccccaattttttgacaccaaatattgatatcaatgaataaaatataaactcaaaatacatcaccacaatgagtacacctatracaaactggttaatgactgtcattaattcaaagtactcaacataggatagtgcactagaaagcttgaaatgccttgaaaacaaacagatcatatgtgccaaaaacttaatagaggtttccaaatttgagaacagtcctaacaatttacatgacattgtcaactatgagttgtgaaagctataagaaatgtttctaaattatcaaaaataaaaaacaaactgtaatccatcatggtagaagaaagactaaattatctttctattctctctatggaattgtattcctaaaacattatcatatgaagatgaaactaaagaatttgctttcagaaatggaagggaaaaaatatcaaagaagtctgaaagtaggaaattcgattaaatattaggctaaataaaatgtattcatttacttttaaaataaaaaatattctattacttttcaggatgttgttttttgtgctgtttgtcattaagtatctgtcatttcttgtcag

SEQ ID NO: 913798 - DNA, 627 bp, Homo sapiens
tgtgggaaacaacaaggaaataaattatacatgggtttttgaacttacagaattgatggagattgtcttcattgcatctcaggactctgtgtcatacttagaatcacagtttgcctctgccaatagaaaaaatttgccggaaaatatattagatgtccttctgaaagacgttaaccccttttccccttgcctccgcctattaagattaattaaatcggattacgcatttgaagaatttagaacaatgctagcacatgataggagctcagtaaattatgttgccattgttgtttttataagacagaaatactcatgcatcaaactgctggtgtcttaaggatgaaatcagtacagaaaaaactccagcccaatcccacagttacccttgtcctcagctcataggagcaggtcagcagcccactccataagcagtaggttgtcaggaagcataaaggcctggacatggagcaaaggagcaaaaagaaaagatacattttctcaaatccacagacactgaaagcctatataaatttcattatgagatttgccattgctacagactcacrtactattttcagctttattttgccttttctttaaaaaaaaaaaaaaaaagtcagcttgccg

SEQ ID NO: 913799 - DNA, 658 bp, Homo sapiens
aacctgagctataccttggcccccctttatttgtatttttatatttttttgagatggagtcttgctctgtcaccaggctggagtgcaatggcatgatcttagctcaccccaacctctacctcctgagttcaagcgactctcctgcctcagcctcccgagtagctgggattacaggcacatgccatcatgcctggctaatttttgtatttttagtagagacgaggtttcaccatgttggccagcctggtctcgaactcctgacctcaggtgatccacctgccttggcctcccaaagtgctgggattacaggtgtgagccactgcacccagtctactttgaccgcttttagccatggctagagtggctgggacgtaaggcaccaagtcactagactgcacatagcaggggggccctgggccagcccatgaaaccattttttcctcctagacctctgggcttgtgatgggaggggctgctgcaaatgtctctgacatgccctggagacattttcccctttgtcttggtgattaatatttggctttttgttacttatgcaaatttcygcagctggcttgaatttctccttagaaaatgttttttttgtttttctaccacatattcaggctgcacattttccaaacttttatgctgttttcct

SEQ ID NO: 913800 - DNA, 587 bp, Homo sapiens
gttggtaactttaagctatttatttatgagatacagggtttcactctcatcgcctggtctggagtgcagtggcatgctcttggttcactacaacctccatctccctgactcaagcaatcctcctgcctcagcctcccaagtaactgggactacaggtgtgtaccatcacacccagctaatttgtgtatttttagaacagtctgggtttcaccatgttggccaggctggtcttgaactcctgacctcaggtgatccgcccacttcggcctcccaaagtgctgggattaaaggtgtgagccactgcgctcggtcactttaagttatttaaatcagcttaaggatattgcttgacataatctcttattatttttaatctattttatcctttttctctttcactatatttgctttattttagtttttcattttagcaatttatctcatttttaaatcttttgttttaatggaaagttggtgtaaagaaaacaatctccaaataaagttcatatgtccttcttcccagtcctccacagtcctccacagttagctccaccaakaccttctcccagtctcacaataaatcttcc

SEQ ID NO: 913801 - DNA, 656 bp, Homo sapiens
gcatttccaactgaggtaccgggttcatctcactggggagtgtcggaaagtggttgcaggacagtgggtgcagtgcagcaagcgtgagctgaagcacagcgaggcatcrcctcacctgggaagtgcaaggggtcagggaattccctttcacagccaagcaaagctgtgacagatggcacctggaaaatcgggtcactcccaccctaatactgcacttttccaatggtcttagcaaacggcacaccaggagataatatcccatgcctggcttggagggttccacacccacagagcctcactcattgctagcacagcagtctgagatcaaactgcaaggtggcagcaaggctaggggaggaaagcccacaattgcccaggcttgagtaggtaaaaaaagcggcctggaagctcgaactgggtggagcccaccacagctccaggaggcctgcctgcctctgtagactcaacctctgggggcagggcatagccaaacaaaaggcagcagaaacctctgcagacttaaatgtccctgtctgacagctttgaagagagtagtggttctcccagcacggagtttgagatgtgagaacagacagactgcctcctcaagtgggtcactgacccccgagtaacctatctgggaggcaccccccagt

SEQ ID NO: 913802 - DNA, 563 bp, Homo sapiens
cacccacagagcctcactcattgctagcacagcagtctgagatcaaactgcaaggtrgcagcaaggctaggggaggaaagcccacaattgcccaggcttgagtaggtaaaaaaagcggcctggaagctcgaactgggtggagcccaccacagctccaggaggcctgcctgcctctgtagactcaacctctgggggcagggcatagccaaacaaaaggcagcagaaacctctgcagacttaaatgtccctgtctgacagctttgaagagagtagtggttctcccagcacggagtttgagatgtgagaacagacagactgcctcctcaagtgggtcactgacccccgagtaacctatctgggaggcaccccccagtaggggcagactgacacatcacatggccaggtacccctctgagacgaaacctccagaggaacgatcagacagcaacatttgctcttcagcaatattcactgttctgcaccccccgctgctgatacccaggcaaacagcgtttggaatggacctccagcaaatgccaacagacctgcagctgagggtcctg

SEQ ID NO: 913803 - DNA, 655 bp, Homo sapiens
tttggctaatagggatgatagtwaatccaaataagagagatgaatagaatgatttctgcttccaagtttattatacaaataatacattattattttatttcaaggtgatttcttgtcatgagtagttaaaatgcacaaatatttttacagatcatctgttacggtaaagaacgattttgcacatggttgcattaaggaaaacccattttagttcctttcgacttcatcctaagatcacaaatgttggcactcttaaccgaacaaaggatagacttccttaagcatgtttcatgataatagctttcattttattttggttggctagatgtatattgcctctccaagacctcaattatataacctgggatttccacattgtttttgacagaaaagtagaacaaaaataagttatgcagacaaaatttgaaacacatgatatggaattgaaaggacttagtgatgaaaaagttgtctgacttcgtggtaatcaaatcttgaaatagatttctccttaaacaagcaaacagttcaaagtatttatctatgcatcactgttttttcaagctcaaacagattatagtgctccatctctcaactatagtatatttacagccggacttggaaactgatgcagtaaacatcaaactcgtactgc

SEQ ID NO: 913804 - DNA, 639 bp, Homo sapiens
caacagagcaagaccctgtctcaaaccaaaaaaaagaataattggcataaattaagaatatataccagctgcaagagcagcaaagraggttggaaaattgctaaaactgaaaagagaaatggagcccttgggatggattttcaaaagaggatgtgggagttctaacaggaagggcagacatcattccaccatgaagcaagcaaactctctgccaagtccccttcctttttgtgctctagcctataaagcagagtttctcaaccaggctcagtccttcagaaaaaactgcaagcataggagtccacacatatatgtgcatctggcacttgagcaataccttccaatggtggttcagagaggagcctctaaacccacgctccttgagtccttttcttatgacctgggtgatttggggcaagttatttaatctttatgaaactcaatttctttatctgtaaaactaagataataagtttccaactcaataggttatggagaagattgaataaaagactctgtgtaaatgtgcttttagaataaatgtctggcacacaggaagctgaaaaaacaaaaacgatatgacttccattattatctagctcttttactatacttagcttttctttttcatttcttctc

SEQ ID NO: 913805 - DNA, 563 bp, Homo sapiens
tcatgactttacagaacaaagaacacatggctatagctgtttcacgttcactttttgactctagtaagttgtttaaaacttttggatccttgcttttgtccctgtgtatgggaagcagtaaaatcctcctaatcaccaggcaagtatctttcaaaaggatttcccacaacaggtaattaactgagaggcagcgagagaagatcttggatattggacttgtcttacttagtccattccggctgctataacaaatgaccgtggactcatggcttacacacaacagaaatttatttctcatggttctggtggctgggaatcccagatcacagcactcagatatgtggtgtctagtgatgggctgcatcctgtttcatggatgttcatctctttgctttgtcctcacatagtggaaggggtgaagagcttctctggggtcccttttataagggtgcacatcccatttatgatggctycaccctcatgacccaatgacctccaaagaccccacgtccaaatagcatcacattgggggttaggttctaacataggagttttggggggac

SEQ ID NO: 913806 - DNA, 566 bp, Homo sapiens
cccagtgcacagttaccctggtaaaaggccggaggtctccttggggaaggatggaataaagactaacagcataaattgtcatcaatgtattggggtccttcctcaaggggacctggcgtttccttcattgaaggggttctgggtctgcaaacaggctgaagtctggaaattgattgtggggccatgattctctgtttttataattcaaattagtcttttgtccattcaacctagaagttttctgctcatataaattaagtagaaatgcagtaagcttcctatcaatttcacttctaggaacaccataattaattagccaatgccagagctatacacaagtcagactatactgattgccactttgcctctactgtccattactgtaactatgcccaccttgcctttgatggttgagtgccgccacttggcccctgccacctcargatccaattattcccattgtatttaaattttgtagttgagtgactgtggttcccactgttagatctgacatacatagaagaacaattacagggctcttcaaagatgcaggtgctgccctcaca

SEQ ID NO: 913807 - DNA, 588 bp, Homo sapiens
accttggaaaccatataaagatttgcatgtcattactagaaatgggtagaggaccctgtaccacatcagtttcatggcagatccttaggataatgttagaaagaaactcaagtagataygtttctcagtactgaagcttagaattccttatttgtggtatctcccttgtctggtacccagttgtagtattaatgggcatcaatatctgccaaaagggtgtgccttactcagaggtgtttactggaatcctgtgcttcccaccaaccatactccatgctcttctcctttgtctataaccctagctttagttatcgtctaccctggtagtctcagctcaaattatgatatgatttcttttcaggaatcttgatttctagcttgtgaggtctctcttacttcagcatcctccaacatcaccccaataaacctaccttcaattaacatacaactaactaaaacagagtgttttgtccttgccattcccagttccaagcagactgctcttcataagtttctctgataaaaaaattttgccactgccaaagagaagaaatctgctatatttgtagtgcgggtgaaaggaatggg

SEQ ID NO: 913808 - DNA, 626 bp, Homo sapiens
tgggggcatttagcccatttacatttaaggttaatattrttatgtgtgaattggatcctgtcattataatgctagctagttattttgcccattagttgatgcagtttcttcatagtgcccatggtctttacaatttggcatgtttttgcagtggctggcacttgtttttcctttgcttatgtagtgcttccttcaggaaggcaggcctggcagtggcaaaatctctcagcatgtgcttgttggtaaaggattttatttctccttcgtttatgaagcttagtttggttggatatgaaattctgggatgaaaattatttaagaatgttgcatattggcccccactttcttctggcttgtagggtttctgcatagagatccgctgttagtctgatgggcttccctttgtgggtaacctgatctttctctctggctgccttaacattttttccttcatctcaaccttggtgaatctgatgattatgtgtcttggggctactcttcttgaggagcatctctgtgatgttctctgtatttcctgaatttgaatgttggcttgtcttgctatgttgtggaagttttcctggataatatcctgaagagtgttttacaacttggttccattctcc

SEQ ID NO: 913809 - DNA, 668 bp, Homo sapiens
tttccttatgcaactaagcttagaagaactgggttaawcattaaacatttctttacaaagaggttcctcagagccattaaaatgtgttggttgttctaagtctccacaggaggactagaaaaatcaggcttctccagacatatttgattgcagatccttctgttcatagaacaacttttgacactttccaaaatgccagtgttctactgagtgtgatttaggaaacatagttccaaataaatgccttcagatttgctgagggaaattctaccaggcttctccaagagaacaatctcactcgtctactagtgggcatgatgggagtgggcaggaaaaaaagtgccagaagcttcagaattagactagatcaataaatccaaagaagggtcaggtcaatcaggctcaaaaaccgatgaccatttgagaaactgaatcaccagagccaacaaagggtgatcaggaaataatgccaagtcaaaacaagtagggaatccaaaatccagggcagtcgtgggtagcagagcttaacaagagcaggccccaggatgcatcaggaatgtttctggagccaacacaagccagctttatgtaattgttttaattcagttttacagtcaagcttggtggaagcacaagtgactcaactaaaaggaacatctgagattgag

SEQ ID NO: 913810 - DNA, 588 bp, Homo sapiens
gcatcatttaattatctagacagctgacttacatcaagtccaaactgcttgaacatgggtccctgctatgttatcatttataaaaatcaaatcctactgcctttgggtataattgtaccttattagataactttgatagggaaaaacatatttcatttccaaaatatgttttatggtgtctactttcagctaacttaggtgcataaataataggctattctttaactgattccattcacaaccccaaacattctttggacactgtgaatggtggtgaaataaacttggaatagtctgtggtacatagaacaagctggaacctttctcttcagtgcatatgccaagaaataattcattttgggtcattagattagagagacaaaattaaaaacagattatttaactgccagcatagtgtcccaaagaaactgagccctttctcttttctcaaataactgttgtatttatcaactgcatcttctagctaaacagcaatcttctttacgtaagcaaccttctccattctgggatgtcgtttacagtcatacrccatttaacagtagggatacattcgcagaaatgtgtcat

SEQ ID NO: 913811 - DNA, 665 bp, Homo sapiens
tatcactgccacaaccctgaccttttcagacaaaaatggcaacttgcaataatcatgatctataatgatatgaaggcttctcagtttctatatacttgagtagcagcatttataccttaaactttctttgtcagtgtgggctgctataacaaaataccatagattaggtggcctaaataagaaacatttatttctcacagttctggtggctggagatccaaaatcgaggtgccagcagggtcaggttctgggagggtcttctttctgctttgcagacagtcatagtcttgctgcatcttcagcaagaagagataatctagagagagataatctctttggtgtctccttttagaagggcaataatcccattcatgatggttcaaatcttcatgagctaatcatcccccaaaggccccacttccaaattctattgcgttgggaattagaacatcaatgtacaaatttttgagggacacaagcattcaatccatagcataaaccctctgtgaaaaccagactagctgcttggcatctttgcctctgactacactgaactcgctacctggagtgccttcatttgttctctggcwatgtgaatattcctcagacctaaggcccaatttgagccacttctctgcaatgcgatgcatagatttccttatttt

SEQ ID NO: 913812 - DNA, 646 bp, Homo sapiens
tgtctcagctcactgttaatagtgctgctcatttatgctgtgttttctttacacttttctttcttcagactaaacaaagtataaattaggcagcaaggagtacgcagtcttacatttatccacctaagggggctcagacagaaacagatgagtttaagcagaggcaaaactgaaaatcaagttgagttccatcttgaattgtcacatggaaaaaaatgacatttggtgagatctcaaaagattatgaaaattaagagatagcaatacaagtcatgtgtgtttcaattgtggatttcactgagttgactttaagcaggaatgctacacaagtcctcgttctgcaaacaatttgcaagagaaagagaagaaacagagaagatactctctccttaaagagactaaaattatactcttttgtgccttctataacttcctgtatctcttttttcttgaccaacttccacaaagcgctgtcatgaaacaatagccaaacagaagtctaaaaactcttgataggcaccatgctgtccaagggatcaataatattgaacttaactcccaggatctggcatattaagaaacaasaaatgtgttattttataaatattctgatgccatctttaaaaatatataactcacttaattt

SEQ ID NO: 913813 - DNA, 646 bp, Homo sapiens
tgtctcagctcactgttaatagtgctgctcatttatgctgtgttttctttacacttttctttcttcagactaaacaaagtataaattaggcagcaaggagtacgcagtcttacatttatccacctaagggggctcagacagaaacagatgagtttaagcagaggcaaaactgaaaatcaagttgagttccatcttgaattgtcacatggaaaaaaatgacatttggtgagatctcaaaagattatgaaaattaagagatagcaatacaagtcatgtgtgtttcaattgtggatttcactgagttgactttaagcaggaatgctacacaagtcctcgttctgcaaacaatttgcaagagaaagagaagaaacagagaagatactctctccttaaagagactaaaattatactcttttgtgccttctataacttcctgtatctcttttttcttgaccaacttccacaaagcgctgtcatgaaacaatagccaaacagaagtctaaaaactcttgataggcaccatgctgtccaagggatcaataatattgaacttaactcccaggatctggcatattaagaaacaagaaatrtgttattttataaatattctgatgccatctttaaaaatatataactcacttaattt

SEQ ID NO: 913814 - DNA, 563 bp, Homo sapiens
agtgatttgtcaaaatgcttttcttgcctcctttacctgataaggggcacctatcattgggctctgcatgtcagctggtgagaacacacaaagatggggaacactgagaaggttagaagttgactctactgcagaagtgaccagagtccttcccaaatggcccctctcccaaaggattcacaccagcctaccaacttactactgtccatcaaatatagcaggtaagcgtctgtcattggaatcctcattttatttctttctcctcactggaattgctcccctttaacatccagttgttgcacacaactttccccatcctttggctcagggatgttcagaggcttattttaaaacatgcagttattaagtgatgataggtttgggatttgaacacacatttgactgactggcaccaatggctattcatatccatttaactttctgtcctagtaagaggggaggttgggattttaacctaaacrgtccaagggtagcattcatgcccttaatcactttaccactgtgaccttttaaaaaaactcactcaagttgttggtaacact

SEQ ID NO: 913815 - DNA, 541 bp, Homo sapiens
gtgggccgggcgcggtggctcacgcrtgtaatcccagcactttgggaggccggggcgggcagatcacaaggtcaggagatcgagaccatcctggctaacacggtgaaaccacatctctactaataatacaaaaaattagccaggcgtggtggcgggcacctgtagtcccagctacttgggaggctgagcaggagaatggcgtgaacccgggaggcggagcttgcagtgagccgagatcccgccactgcactccaacctgggtgacagagcaagactctgtctcaaaaatataaataaataaaaataaaaaataaagatgaggaggtgaggggacctccgtgtgaatgtggatttgaattgtgtctatagcagaaattttaccatagactaaactttcaaacaacagaagctaaaagagctttcaagtcaactaaaatatgacatttcgatgaatgtcagtggtttcaaaccgcattgctgactataaatatcaaagtaatgaggcatgtggggaaagtctcttatatccatatcatttatg

SEQ ID NO: 913816 - DNA, 626 bp, Homo sapiens
acgggctgcaattcagctgatactagagactgtgattccaaaatttaatttcataagttgtaatcagcracaaaaacattacaatagaatatgagagacattaaaaggcaatttcgtcattgttgactacttattaatttacaacttagttgattaaaattaaaacaatcttagccgggtatggtgctgtgtgcctgtagtcccagctactcgggaggctgaggcatgagaatcccttgaacccaggatgtggaggttgcagtgagccaagattgcaccactgcattccagcctgggcgacaaactgggactctgtatcagaaaaaaaaaaaaaaattaaattaaaacaattggtatgctttctggtgactggtagtaaaatgattgttttacaaatttcaaataaatgtattcaaatacaaataaatgaaatgtaaaatggtaaagctgttttggaaaacagtctggtagttcttcaaaaagttaaacatagtcatgagtcagcaattccactcctaggtatatatacaagagaagtgaaaacatatgcccacacaaaaacttgtacatggatgtttataggagcatgactcatgataataaaaaaatggtaacagcccatacat

SEQ ID NO: 913817 - DNA, 676 bp, Homo sapiens
aaatgacgagttgatgggtgcagcacaccagcatggcacatgtatacatatgtaactaacctgcacattgtgcacatgtaccctaaaacttacagtataataataataataataataaaaagaattwaaaaaaaaacaaaaaaacctgggcccagagacacattcactacaaagctgatgaagtttatgttctagagactgctggcatgcaccgcttcctgggtcctagcaaagtgttcatagtttgcgtaacattttaattttttttaaaatacaagggatctgccccctgcctggagtcaccttttaccttaacatacacacttcagaggccagatgggatttctccactgctgtggctcactgcatgttccggggggcagacatagcatttagagggaactgaatgaggtattgcaggtggctgaagcttacttttgtgtaactctcctctttgtcctcctcctccaagcccctggagctatgctgtccagtacagttagccacgtgtggctatggaactcttaaaatatagctagtccaaactgaaatttcaaagacttactatgaaaaagggaatgtaaaatatctcattaatacttttttctattgattacatgttgaactgataatgtttttaacatattgggttaatagatcaaaattatttcaccta

SEQ ID NO: 913818 - DNA, 580 bp, Homo sapiens
tttttaaaataaagtaataactgttttcttttccagctgtgtgactggctacgtgttaatgaaagctattttaagccatcccctacgtgtagctccattggacttcacaagacatctttaaatgcttatgtaaagagcattgttcaagagtatgttaagtcatctgcttgggaaagtaagtctgcaatcatttttatggattgatataaccaaaatattttcaaagaacttttaactagtttttcagactgagagttaggctttacgaaatatatgatgatttattgatgccaaacttgtatttcagtaaaataatgtgaaaaaaaagtaaagatactgtctcctaacttgtattaatactttatctgttctgagacttgagattctaaattattttatgtttaaggaaactaataagttgccagagttaagaagtggatgcaaagtcatttatttattctgcaattactgggtccttgtgaactagatactgcagatatggttttggagcctctgtagtggaaatatmtgcattggaaatacgtgtttatctttttcatttttaaagcacgtttagtat

SEQ ID NO: 913819 - DNA, 473 bp, Homo sapiens
tttacatcatttattttattcagctttaattgtaggtagaatatggcttatcatcattctacaacacatttttggtaggtgaatgctatgaattaaatactcagtgaattttagagctgtaaagtccttagacagcaaatcctccacattttatagatgaggagcctaaggtccaaacgtatcaattgacttacctaggatcaaaaagctagtaactggtggagactgggcttagattcagacctcattagctttaataccttcctactatttcgtactaatttttttagcaaggtgaataaacccctgtgatgcttaactttatgtgtcaacttgactgggccactggatgcccagatatttggtcacaaattgctctggatgattttacgaagrtgtttttggatgagattaacgtttatattggtagattttaacattaatttagattaacattttaatcagtagagtaa

SEQ ID NO: 913820 - DNA, 667 bp, Homo sapiens
aggcttgggaaagatatttaaacmagctctgtagtaattgcagggacctaagcaaaggcatcaccttaaggaaagatgcctatagtttcaggagaagggctagatatctctaggcttggtagtgatttggacctaagaaagaatccataaagggccacttagggcatttcaatgctctgcaagacagaccttgtggggcttaacagccagtagaacccagccgaggactgataaataaaggctggcagctgggggcttagcaaacaaaaatcatggaaattgaaactactctctgaaaacgtgaaattacttgtgaccctgcaggctaacatctgtaactttagttggtacaggttgcttccacatgcatgctttctctgcttatttcacaagattatgttaaaccctctacatcttcaatgtattttcctaaagttccttttcatcttcttatgctgggtatgcctcaaatatattgttccctttagtatgtctctcagctgaaggcttttagacagccacaaaaacagtgagtgtagacttctccattcattactgcattttcaaaacttttatcctttttttttctacaaaagattccatttcactggagcacacgatattagactataccaccttctatcttacatgctatcccagcttcttg

SEQ ID NO: 913821 - DNA, 580 bp, Homo sapiens
aaaaaatagcacctaatttttctaagatattagttacatactatgagtaccaataggcatagctatctggttaaaacctagagaagcctttgataattttacatatgaatgaaatatgcattaaataagaagataaataaatttcatgaagccagcatacatttcattctctttaaatatttctttctgagttcaatcttccatcatttcatattgtctatttctttgctacttttgttgtgatttttcctcttagttcggaatgtattatcctgtgtaatgttttcagccctttcaataatacaatataatcttcaactgattttgttgtcatgttattactgcattgccaatctccaactgtgagcaaccacactgactgctttccctgaattgctgagtgtttcacaaaatcatgctagtacgatagtacattcaccaaatatttaatttgcctttcatttattatatgacaggcattatgttacacaatggagactctamaatgtaagcagatgagcgaatggaactttattccaagaatgactgcattagggttcatattcatgagcttgataga

SEQ ID NO: 913822 - DNA, 664 bp, Homo sapiens
ctcggagctgctctatggagttgccattcctttattcctttactttatcaacttgctttcactttactctatggacttgctctgaatcctttcttgtgcgagatccaagaaccctctcctggggtctggatcaggactcctttcctgtaacactttgagaaaaatctaaagagctaaaacacttctatttctcatttttacaagtcaggtcagataaaccatagagaaggtttctttgaatattattaagacttcgctttggctcatttggaagactagagttttgaaacaaccttcacaaaaattgtatcaatgaaaaaattatgacactgaaagagatctgacctaactcacctcacatcttgcctttcctttaattattcctgggcttttgggcagagctaacttgagagacatttaggctatagtttaaatgatgataggcctccctgcaaactcaacagcttttataaaactaatgggaaaccatcaggctgggggatggggagcgggaagaggagactgagtcctgccaaggcttagacataaacaattatcagccattattccagaggttataagataggcaactttcccaattattcctgctgatagcatcactattggtgactggcayttggagatatattttcaggtttttttg

SEQ ID NO: 913823 - DNA, 767 bp, Homo sapiens
tgtctttaggtattagtctatgaaccatataggattaccatggacagatctaaattacagatttctagctattactgtcataccacaaattttgatttctgcaatattttatgtatgtaatataatggaatgcttaatatagtatttttttcaaaaaaatatccttaagagatgttgtgagtccaaggtgatcagtatcaattaaattaaccatatattaaagagtatactctgcagtataagagtaaggattttataaatagatcatcttgggtttaaatctggtgttcatcaatgacaactgtgtaaattaactagtttcttaggtagttacctaacagatgtaaacaaatgctaataagaatgccaagtatccactattctcaaaatttttacttacatacacacatacataaacttagggcccagtaaatacttagacacttggacaacagtaaaacgtttatgtgaaaagaattatggcaagggaggtctttaaggcaagggaggtctaatttttcaacattatactattttcccacaacagaaagttattgaaaaatcaagaggcagaagcaattacagaggggataacactgattgatgataataataaactaatatcctgccacatttttataataatagcaaagtaatttagtagagwtttaaggaaaatttggggaacttttttttgtgtgtgtgagacagggtctcactctgtcactcaggctagggtgcagcctcaacctctcagactcaagcaa

SEQ ID NO: 913824 - DNA, 572 bp, Homo sapiens
ctttattgaaggatttgtacccctaggaggactatgtcttcctcatctttgtcttcagaggataaatacaagrcctgacacataacaagcatgaggtaagttatatttacttgaaaaagttaaaagaaaaccacataaaataacaacaatagccaatatttattgtatacttgctgggggtcaggcaccattctaaatgttttaaattctttttcctctttgatccttacgacatctccatcaggcaggttttgtgtttatcccattttacagatgagtaagctaagcagcagagaggtcacacagctagtaagtgactgagccagcatgcgaacccagagggtggaagtgggaatttttcagggcacataaactggttaatttctgtgaggggcaaagggagaaagctcagtccttgaaacacacaagacaccaaatggacactgaggtcctggtaaagcttcggccacccaggtgactttggttctcccctaccctgcctctccatcctgggctgactcaagcttacagaccctgcctaccctgagtttccaaagaaaactcccaaaccc

SEQ ID NO: 913825 - DNA, 683 bp, Homo sapiens
taccatcatgtaatgcccttctttgtcttttttgatctttgttggttaaaagtctgttttttcagagactaggattgccacttctgcttttttctgctttccatttgcttgktaaatattcctccatcccttattttgagcctatgtttgtctttgcatataagattggtctcctgaatacagcacaccaatgggtcttgactgtttatccaatttgccagtctttctcttttaattgggtcatttagtccatttacatttaagattaatactgttatgtatgaatctgattctgccatcatgatgatagctggttattttgcacactagttgacgtagtttcttcatagtgtcatcagtctttttttttttttttttttttgagagggagttttgctcttgttgcacaggcttgagtgcaatggcacaatctcagctcactacaacctctgcctctcaggttcaagcaattctcctgcctcggcctcccaagtagctgggattacagttgcctgcctccatgcccagataacttttgcatttttagtagagacggggtttcaccatgttgtccaggcttgtcttgatggtcgttatgttttggtgtgtttttgcagtggctggtaccagtttttcctttccatatttagtgcttccttcaggagctcttgtaagtcaggcct

SEQ ID NO: 913826 - DNA, 679 bp, Homo sapiens
attatttaatgtctgttaggttgtactttgaaaaatggtttgatttttgcttattgacataatgtatcatacatcaaatgtggtcagctaaaatgtctttctgaatatcatctttcagctaatccacttttatcatcatgttagtccaataaattatgcactcacgatttctagtgcattgattccaagtacttcatatagtccttcaagaatattgagagttatgtttctggcaggcaataaaagtgaccacttgtggagggctgattgcagatcccccaaggtgccaggcagtgatttgggcctgttttattcactgatgtatctcaagtacctagaacagtaactagctcatacaatctcacataaatacttggtgaatgaatgaaagaatttctccttcataatacttaaatgacctgagtacaggtgggaaaaaagtagtaatccatgcattgcatattttttacactatttggagtcattaggttgttctctacttttcctctcgccacaagcagttttatgctgtatttccagggaaacatcagtagagttagctctttcaaaaaacttgtcckcacacagacagtgttcatgcttcaagatttaaaaagcatacagtgcaaaccaacagaatacaccgacagtagtttccctacaatgccttttccatcat

SEQ ID NO: 913827 - DNA, 650 bp, Homo sapiens
gaacacagttgtcccaagtaatttcttctttgtwtttggtgatcttaagaggaaatattagtgtcctttttcttaagccactggtctaaaatatctgtcaagcataagatttaaatccctgacaaacaacttctaagattttagaaaaagttttgagtaccttgtgattccaactcttatctctgcttttgagcctctatttctaccccctcgtcatagtccttacccacctgtaactttaagacatcaaagttcattttaaaaaagaaaaaaataataagtttcatagaaagaaaacctctcatatatattgggagggctaagacaaatatgtttctcttttcatgcatttttctggttgaactgaattctttcacctcctcttagaaaagtcttcgactgtgccagctagaagtacggcagaatgggtaaagtccagccttgctaagacaatttttttggtctgtggtacctacagaggaggttcttacttataatgtgaagtacatggcataaactggtggagaagagcttccttttgttaaatcgttcatttattccactggcctaatgaaagttatatgaaccacaatgagtcacaacaattaccagtttaattcattttttaccctgtatttatttaaaaggtt

SEQ ID NO: 913828 - DNA, 638 bp, Homo sapiens
aaatttaaattagatttaaatttattttcacttgctactttgaaaattggctcaaatgtctttttgcatccagcattgtaatgataaaatctaatatcaatctgattcttcctcttttgcaggtaattattttccttctttgaaggctttgaagatattgttcttaccctttaatatttcacaagaacttatctatggttgttttcatctggatcaattttcagtagtctttacagaaggagcagggttgaaaaaaataaaaacatttcagtagtccctttcaatctgaagactcatgtcttttgatattcttggaaatattcttctatcattacttttattattattttttcaatactttctgttctgtcctggaactctagttagatggttgcaagaccttctggaattctccctcaagccttagtttttattttgtgtttaccacccattcattccattgcactgcatttagggcaaggtaatcagtttgatctttcagctttgtgaacatgctcttcagtcatgtccattctatcactcagccctggtactgagtttcattttaatagtgagtggtatttttatatttctaagatctcaaaytgttttcatagttgtatttttatagttacgat

SEQ ID NO: 913829 - DNA, 684 bp, Homo sapiens
tacctgcccaccaaggttttgttagttgtggttgtgacattttgccacagagtcagttaatagggcacctccagttccctgtcrtgtggcaggtgccagatccttgcttagtaagccacgctcaggtgttattgccttacactctgacaatactcagggaataatggttgatatagtttggttgtatccccacccaaatcttgaactgtagctcccataattcccatgtgtcatggaagacctggtgggaggtaattgaatcatgagggtgggttttttcctgtgctgttttcatgacagtgaatgagtctcatgagatatgatggtcttataaaggggagttcccctgcacatgttctctctcttgcctgccgccatgtaagacgtgcctttcttctctttcaccttctgtcatcattgtgaggcttccccagccatggaactgtgaattcattaaaccactttttctttaaaaattacctagtcttggatatgtctttattagcagcatgagaacagactaatggtttagtttaccactggcagaaggagaaggttgctgtggtctgtgacaggaggaggtccagggtggcagatccaacacttcgtcaggttgcctgccatggccatagcttgaaagagcccaccaaagcattacaattccaggcttctgctgccacatcc

SEQ ID NO: 913830 - DNA, 635 bp, Homo sapiens
gcgcctgcgcaggggaagttgtgtgcccgagttgcttacytgtgttttattgatcttctagactgctcttgttagaagagaagtgatttctttgaactgcttggggttagaaagagagcaatttctgagctgttttttgttagaaggaaaattttttgccgtggactatttttaccctatctacctaaatgatttctttcttatctcctataacagcaggaggatgggagggacgagaggattggagggggccagaggacacggtgggactctatgttgaggcttgagtctctgctcagttaggtgaggttggacagaggtttgcatcaatgccttgagccggcgagtctctccccagtgctgagggctttgtgtgtgtggtgcactcctgcccctgccgcactcaggcgggcagctgatgtcaccactgcagctccacttcctgcccgcacagaacctccaggtcagccaaagatcagagatgtggccttctcaggtgcttcctgggcacgtgccagcccctatgcacatctcattccccaaatctttctctcaatttctcccactagcctcttgtttgccctacatgcaaacggtgaggttgtatagttggaatgattgcttttagccaatgc

SEQ ID NO: 913831 - DNA, 550 bp, Homo sapiens
aggttagacatttgtgagagtcctgagaagcasgtaagcccctaagtgtgccaagcctccttctagaacccctagcagataatttattggtgatgagctctgactgcattgtctctgcagatgtgggtgctgctgaccagctcgggccagtctagatatggttatataaatgaggtcagccagaatgagaacctctgcagaatgagaatctctgccttaaggatgtcccaagtattgatgatgtttactgatttttctgtcatttcaacatcaggcttgttcctgtttgcatggtgggtaaccccagcatcacctttgactcaactcaatcccaaagcccttcctcatccctcaagtcttctttatctgcaaatgtgctatctaagaccaagcccaagtaactggcagcaggctgggagaataatatagtcagaaggtgagaggttctggaaaaacaccaaacaaggcaggtcctacttggcttcatctgtagctctgcgtagacagctcctaagacaagtgacctgacagtctttgggtggaaaagagg

SEQ ID NO: 913832 - DNA, 658 bp, Homo sapiens
ccccactccaccttgaaatgctacccccatcagttcccagggtctgaaattcctttaaggagagactgattctttttcttccatagtcagagatatagttgaccatataaagtaaaggaggaagggaaggagatgtgagcagtacgcatcttgtgctggagcagaaatgctggctggggaccctggagtctgcgctcatggtttctgagctgagcacactctccccacagtctcagtccacctgctcttgtgtctgatccctggagagtctctcatcccttcacgcaatagaacctagattctgaagactaaggtgagaaggagctgtgagttggaggggtgagtaataaggaggaaatcccctaagcccaactggagagaaatccaggagtctatagcgttctcggctggaaaccccaaacattgctggttcactgttctctggtttcctggtcattcagcattttcccagcacttgccaggaacacgaagacaagtagaactgtggctcccaccttccagggattctgtagggatgcctrtggtgcccgactcacagcccctggatccactgctctcagccacagctgctgggacagtggcaggtgagcctgacagcaccccatcttgcctgcctagttcatgccccagggctgtc

SEQ ID NO: 913833 - DNA, 705 bp, Homo sapiens
atacatacctagcatacattaaaatgaattgatttgatcctatgtagagagtaatcaaatgatgaagatttggtgctttctggtcctccccaccccccagattttgtgtttgatgaaattactcacactaaatttcaagatagctatttctgagagtgattacagtgtcaccttgaagtgtttacagtcccagtgactagaagacaaagaagggacaaaggcagttgatacatgcccatttagctactatagaacatcaaccttagtttcccagagaagagtttaactctttagaatattgtgggacaccctaggattgcagagaatggggacctattgtgtaccttgtgttgaaggcagaatacccctaagcacagtagagttagtggccactgcatcccagaatattttgtcctgtttctttgataaacagcttaggatcatagtaagcatgactcttatcagagaggctctaagctggatattaggagaaagacattctgtatgtgctttacatttttaggttgttgctgtcattgtttgttttgttttgttttgtttgttttttgagacagcctcgctctgtttcctaggctggagctcagargtgcgatcgctgcttgctgcagcctctgccttccaagttcaagtgattctcctgcttcagcctcccaagtagctgggattacaggcaagcaccaccac

SEQ ID NO: 913834 - DNA, 617 bp, Homo sapiens
gaagttgaagcccaatccaaaaaagccactaaaataatccaagagttgaaagctgacatagccattttaagaaagaaccaaatggaacttctagaattaaaaaattcactacatgaatttcataatacggtagaaagcattaataacagaatagatcaagctggggaaataatctcagaactcaaagaccagtcctttaaatcaacccagtcaggcaaaaataaagtaaaaagaatttttaaaaatgaacaaaatatcagagaaatacggattatgtaaagagaccaaaccaacaactctttggcattcctgagagagaaggcaagagagtaaacaacttgaaaatcatctgcgtggatatagtctatgagaatttcttcacctcactagaaagtcaacatgcaaattcaagaaattcagaaaacttttgagagaaccccatatacaagatgactatgcacaaggcacatagtaatcagattcatcaaggtcaacacaaaagcaaaaatattaaaggcagttagagaaaagggttaggtcactacaaagaaagtcccaccaggctaacagcatatctctcagcaraaaccttacaagccagaaaagttagaaagcta

SEQ ID NO: 913835 - DNA, 565 bp, Homo sapiens
ttttttctctttcttagcacaacggtatgttcacagacctttgtgtttcttagaacaactttaaaagtaaaagtgcagtaacttttaagagattatcctgaaggggagctgatgtcaatgcagggttaaggaagagtaaagttgagagagagtttagcatgaacacagctaccaattagactatttttccctgattctggaaacataacccacaaagtgtactttataatggcactaccttagagggtaatgaggtgtgacaacggggtgatgctagtgtaggcatgatagtctgtagagtaaattggtctttttttcccctaggaaatctccctttgtatagaacctgtgtctcatttatgtttgaattctcaatacttactgaggtccctagagaactgaatatctttggattgtaggggtcaataaacctgagaaattattttggagccagagwgttgaggatcctcactactaaggcaaagaatttagctctttttcaattgtcttctgcatttaagtttatttgcatttggctagtcattgacatgattttagctgtttt

SEQ ID NO: 913836 - DNA, 591 bp, Homo sapiens
gccctctgcctttttgcatgaggtggctcccctctgccagtgaaggcaaagggccagtgtgacagccttttgtatccacactcatggctcctgaackcttgtccagtgtccaggaaaaatgaggttgcataaatgaattgaaggatggtaaaagcaggggattttattgccagtgaaagtggctctcagcaggaaggggagctgaaaaggggatggggcaggtaggtaatcttcccctaaagtctggccatctatggccaggttcctctccaaagttatgctatcaagctgtccctctgaagtcaagctgcttctctccaaaattcagctgtagaccctgaagtccagctgcttcttctctctgctggctgagtctgagctctttataggtgcaagatggggtggagtgggccatggatggtttagaaaaagacaacatttgaggggaaaacagggatagaagttctcacattggcccactggctgcaggattttctgcttgagggtggagtttgttgggaacctgcccttttctgcctagaatttctctgccccctgtcactatcaatatcacaaaataggatcacaagt

SEQ ID NO: 913837 - DNA, 619 bp, Homo sapiens
cccagctgtctggtgagctaatatcctgcaatgaaaacagctaaaggtcagcattgaatcttagtcctgagactgtgatgatgctttcactttaaaggtctgggtttacctggaaagcgaaagcaaattcctcagtaaaaggaaacgtggcacgactatgcttctattttataagagaatcttcaaatggaacccaacagctagtctcccagatccacattctacttaaggctctcacatttcaattgttgctgtcactcatactgatccctagttgaacactgtgccctttaattttggccaaagtgtgagcacaaactcatttctttgtttcccccttagcacaattaagacctttcacaaatgttttcttttttttataccaagtaaaacaaacaaacaaataaataaaaggaacacaaaatatataaatatatgaaaactctctggaatataaactatcattttctgattttgtatatggtggtgtgcacccagggcttatagaccttgtcctagtttatgctctatctgagtggttttacttaaccctaaatggctgggacaaatttacagcctwgtacctgtgttcttacttccaaagttctggctcagcttc

SEQ ID NO: 913838 - DNA, 594 bp, Homo sapiens
cggcgggcagcatggcctgcaggtgccagagacaccrgccaccaatacccacagctccctgccccctcccgtgggtctgcctggcatctcagaagggacccgtggaaccttctggctagaaagcaaaccagctcctttcttctagcttccaaacattcgtttaaagaagttggacatactcatgaatttatttcagaaaatttagataagcacaaaaaggaatacatagaacttacctataataccaccactcagaggtaaggatagtgcatatcacggcaactataccagttacttccacatactatacaatactagaaataaaaattacctcctggaatgcacacacacacacacacacacacacacacacactcatttatatgacaaagttgggatcatacaattcatgttattgtttagcttgcttctttcatgtaacagtccagcggaggataatttacatccatggtcctctgtggcatttctaatgccgctttattgtgcccctgaacaccttgggtatccatcaaagcccttctcacagtgcagcagagtttttcacaagtgcatatttgcccccaggctgtgagt

SEQ ID NO: 913839 - DNA, 652 bp, Homo sapiens
caaatactagtctcattcattcattcattctatttttttgtaccccttaaccatccctacctcctcctcactttaccaytacccttcccagcctctggtaaccatcttcctactctctatctccatgggttcaattgttttgctttttagatcccacaaatcagtgagaacatataatgtttatctttctgtgcctggcttatttcacgaaacataatgacatccagttacatccgttttgttgcaaatgactgaatcacattatttttatggctgaatagtaattcattgtgtttatgtaccacatttctttatctgttcatctgttgatggacacgtaggttgcttccaaatcttggctattgtgaacagagctacaacaaacatgggagtgcagatatttcaatatattgatttcctttcttttgggtatatacccaacagtgggattgctgaatcgtatggtagctaaatttttacttttacgaggaacctccaaagtgttctccatagtggttgtactaatttacattcccacaaacagtataagagggttcccttttctccatatccttgccagcatttcttactacctgtcttttggatataagccattttaactggggtaagatgatatctcattttagttttg

SEQ ID NO: 913840 - DNA, 567 bp, Homo sapiens
caccatcaagaaagcacattagctcaccagcaatggatccaaaccaagaagaaatccctgatttacctgaaaaagaattcagaaggttagttattaagctaatcatggaggcaacaaagaaaggcaaggyccagtgtaaggaaatccaaaaaatgatacaagaagtgaagggagaaatatttaatgaaatagataatggacaaacttatagaaatgcaaaatgctctggaaagtctcagcaatagcatcgaacaagcagaagagaaaacttcagagctcaaagacaaggtttttgaattaacccaatctgacaaagaaaaaagaataagaaaatatgaaccaagcctccaagaaatctgggattaggttaaacaaccaaacttaagaataatcaacattcctgaggaagagaagaaacctaaaagtttggaaaatatgtttgggggagtaattgaggaaaactttcccagccttgctagagaactagatatccaaatacaagaagctgaaagaactcctgggaaattcatcgcaaaaaggtaatcacctaggcacattgtcatcagg

SEQ ID NO: 913841 - DNA, 591 bp, Homo sapiens
gtgcatcaatagctctcaaatcatgcagcaatcaccattttcytgacttcctaggaatcacaaatactggtgaattccatgggccaaccgactcttctatatgtcctgcttccaattgcccttttactaattgatggagttgaatcagtttcccctgtgataggggccactgatccacccatacaggtttgtcagtcagccactctagtggaggagaaatatcaatgacctccccttcagaagtcctgatgtcctaacccttttctatctgtgtgtccagttattgatattagatcagggtttccctgtagggattttcctaaggcttttccattctgatatcccattttctttaacatttaaatcctggattatcaatagtttcatttgtaagtctcatatcccatgctgtaagtaaatctcgaccccatagattaacagctatattcgtaacataaggttgaaaagtatataactgtccatctggtccgagacaggatagaactctgttgaacactttgagctgctcctattctcactagggatgtagaagttagttttaagggccaagatagggcccaattattttta

SEQ ID NO: 913842 - DNA, 609 bp, Homo sapiens
tgctttgtctgtccataaatatttttctaccatgtggctgtgctggagtctcactgagcctactgtggatccacagtctgcctgatttgcaaattattcattgctcacttaaactctgttaaatttaattttatttctctaaagttttttttcttttaaaagttttccaattttttctatgatgaaaaatatataatgtgttgttcggctttttttttttttttttttttttgagacggagtttcactcttgttgcccaagctggagtgcaatagtaggatcttggttcactgcaacctcagcctcccgggttcaagtaattctcctgcctcagcctcccgagtagctgagttacaggcacttgccactaagcctggctgattttttgtatttttagtagaaacgagctttcaccatgttagccaggctggtctcaaactcctaacctcaggtgatccacccacctcagccacccaaagtgccgggattayaggtgtgagccactgtgcccagcccaaattttttctatgatgaaaaatatataatgtgttgctgggctttgattttttttttttttggaggtggagctttgctcttgccacccatgtt

SEQ ID NO: 913843 - DNA, 628 bp, Homo sapiens
tcgggcttccctcttctctggtcaccctgtcttccaacccactggcccagggctgcctctcaccttggggagccccacacaacagccgccaggcctaatagagaaagaacactgcttgaaccagggtggtgaagctaaaagggatggatggctggagggtgcacctgaggcccttctgggtggtcagaaagcccaggaccctctgaagggaccctgggggaggcagggagagcaggcagctggatgccactggccatagacttataagtctaagaggggagcctcagctggttggggggctgcaggttgcataggtgaggctgggcgcttcctgctgggaaaagcagaagagggagagtccatggcagggaaggcgggtgggctcactgggtggagctcagctgggccagcaggtactgtggtccccttggctgaacagcataggcaacccctaagagcaacaggccaaggtgcatgaggccgctggctggtggtagtgcttcagcgggggccagggaccctggcttcagccacatgctagcagctatgatggtacctgggagagagggaagggggctgtgtgtccctscctggcctgtgaggtgtgttgtgggatgactgtgtgcat

SEQ ID NO: 913844 - DNA, 568 bp, Homo sapiens
ttagtctgatgggtttccctttgtgggtaacccgacctatctctctggctgcccttaacrttttttcgttcattccaactttggtgaatctgacaattatgtgtcttggggttgctcttctcaaggagtatctttgtggtgttctctgtatttcctgaatttgaatgttggtctgccttgctatgttgtgggagttctcctggataatatcctgaaaagtgttttccaacttggttccattctcctcttcactttaggtacaccaatcaaatgtagatttggtctttcacatagtcccatatttcttggaggctttgttcatttctttttactcctttttctctaaccttgttttcttgctttatttcattaatttgatcttcaatctctgataccctttcttccacttcatcgaatcagctattgaagcttgtgcatgcatcacgtagttcttgtgccatggttttcagctccatcaggtcatttaaggtcttctctacactgtttattctagttagccatttgtctaatcttttttcaaggtttttagcttcttgcaatgggttcg

SEQ ID NO: 913845 - DNA, 559 bp, Homo sapiens
ggtggtgcacacctgtagtcccagctactctggaagctgaggtgagaggatggcttcagcccaaaaggtggaggctgcagtgagccgggatcacgccactgcactgcagcgtgggtgacagaggagtgagattctgtctcaaacaaaacaaaacaaaaactggagatagacccatccaacgagaaacctcctagatagtaggaaaccagaaagaattctgagacagtggttagagcacctgcttagacatttatttactattatgattctaagcaagtcaactgaacatgtcggtaaatactgaaatacttctactgacattactatatgaaactttgttttttgttcttttgttgtttgctacataaaactttgataaactttgtttaactttatctggccatcctccatctccctccaggtgaagcttctgttttttaggaaaccactcccccaactcttggtcaaatttcatgtgaagatgaccccamccacccctggatgtagcagtggtcagatgatccagtattggaaaatccacatattcaatagatcccca

SEQ ID NO: 913846 - DNA, 559 bp, Homo sapiens
ggtggtgcacacctgtagtcccagctactctggaagctgaggtgagaggatggcttcagcccaaaaggtggaggctgcagtgagccgggatcacgccactgcactgcagcgtgggtgacagaggagtgagattctgtctcaaacaaaacaaaacaaaaactggagatagacccatccaacgagaaacctcctagatagtaggaaaccagaaagaattctgagacagtggttagagcacctgcttagacatttatttactattatgattctaagcaagtcaactgaacatgtcggtaaatactgaaatacttctactgacattactatatgaaactttgttttttgttcttttgttgtttgctacataaaactttgataaactttgtttaactttatctggccatcctccatctccctccaggtgaagcttctgttttttaggaaaccactcccccaactcttggtcaaatttcatgtgaagatgaccccaaccacccctggmtgtagcagtggtcagatgatccagtattggaaaatccacatattcaatagatcccca

SEQ ID NO: 913847 - DNA, 583 bp, Homo sapiens
tgacattgtgtccttctcggcacattatatcaggaggtacatggtgttgcagagcaggggtcagcatatttttctgtaaaagaccagatagtaactatttcagagttgggacaacacatgccatctctgtggcatatttttctttgtgtttgtcccggtgcatttataacgttttaaaagtgtaaaatgtattcttagttcctggtacacagaagtggactgaaggctggatttggcccataggccaaaggaccccagctgtagaggaaaccttggaaaacataagctgtaagggcatgcctctgcttcaactcctcttcccccacatttgtttttttacttcatttagtaaaagcttgagtcctgtattagttctctgcagaaacagaaccatggaatgaaaagcatgtgcgtgtgtgtgtgtgtgtgtgtctgtgtgtacagagagagagagacaaagaragagtgagagagatctactttgaggaattggctcacttgattatggaggctggcaagtctaaaatctgtaaggtgggctattaggctggaaacccagggaagaactgatgttgcagttgaa

SEQ ID NO: 913848 - DNA, 669 bp, Homo sapiens
tccagctttgttctttttgctcaagattgtcttggctataaaagttcttttattgttccatatgaattttaaaatagtttcttctaattctgtgaagaatctcaatgataatttaatgggaaaagcattgaatctataaattactttgggcagtatggccattttcacaatattgattcttcctacccaggagcatggaatgtttttccatttgtttgtgtcctctctaattttcttgagcagtggtttgtagttctcccttgaagaagtccttcacttccctcgttagctgtattcctaattattttattctctttgtaacaattgtgaatgggagttcattcatgatttggctctctgccagtctgttattggtgtataggaatgcttgtgacttttgcacattgattttgtatactgagactttgctgaagttgcttatcagcttaaggagttttgggcctgaagtgatggggttttctagatataggatcatgtcatctgcaaacaaagacaatttgacttcctcacttcctatttgaatacactttatttcttcctcttgcctgctttccctggccagaamttctagtactatgttgaataggagtagtgagagagggcacccctgtcttgtgcaggttttcaagcggaatgcttccagctttt

SEQ ID NO: 913849 - DNA, 616 bp, Homo sapiens
tgccagctacaatgggggaggcgtggatggggctgtgttccccttgcagccagtgggaaccagaaatggggggagctttgtgcctgaccaggttggcagggatagagccctgtgcttctaggcatagatgcagctacccaaccatggctccagacccgggtatcactgagctctcaggagcccggaaagcccctctgcccctgcaggcccagaagcacctgctcccattcttctccactcctgacggccactctgattttggagcaaagttgaagctgagcccaggcactgtcacgactcggccaggtgtgtgcacactcaaggtggcactcacatgccagcctcttgccaccttggccccctctggactttgggtaccaataagtgcaggagggaggctgggggagctgaaggcagctcagcgcaggcctgcaggcatccctcagcatgaacagcctgggtgctgtggacagcatgttgatggcagaggcagagattcctgggcagaaaggggtggatccctggtgaaatcccaccttctggccagggacggcctgaatcttgggctgccagttgcagrtggagtgtgggcctggagtgagaacctacggtgctt

SEQ ID NO: 913850 - DNA, 633 bp, Homo sapiens
aaatacatatttccagttgcttytatgctaactttataaataatgtttgaaaaaattctatacatttttatgcatagaattctatgcatttttataaataacattaaaataatcggttgaaaataatatgtgaaggaagatcgggaaatgaatattgtcaggagctcatatttgggtgaatgatttcctctctataaaagcatgaaattgcccttatccctgttactgaacagctttcatgagggtaataaaatcttccaagtccattctacctggattgctgcttgtcttcaatatgttacactaaacatctataatgatttgattagaaaaaaagacttatatggtaatatattttattttggtaattttatggattaacacattgaactaaatctacatctgacttcctactacctactagatttcaagttccttaaaaatatgattttttttcgtatttttgtttcatttcaccaactaggttcttgttacatagaacatactcagataaaagtttactgacctaaactataattctgtggtgagaaaataactttatattaaaaatgaatcaattttcttttaaactactttgatgctttaatacttcattaggaggctgatttatag

SEQ ID NO: 913851 - DNA, 596 bp, Homo sapiens
gtgatctgggtactgttaaaagcattccattttaaaaggggaacagagcataaaagttcagaaaatttgtagcctgatgatgcagtagaaaagaaaaacccatttttctggggagaaattcaagccggctgtagaaatttgcgtaagtagtaaggagcctaatgttaatccccaagaccatggggaaatgtctccaggccatgtcagagagcttcacagcagcctctcccatcacaggccaggaggcccaggaggaaaaattggtttcgtggaccaggcccagggtccctgtgctatgggcatcctaggaacttgatgccctgtgtcccagctgctccaaccatgtctgaaaggggccaatgtacagcttgggctgtggcttcaaagggtggaagccccaagccttgggagcttccatgtggtgttgagcctgcaggtgcacagaaaccaagaattgaggtttgggaacctctgcctagatttcagaagatgtatggaaatgcctggttgcccaagaaaaagtttgctgcaggtagggaamcctcatggataacatcttctagtccagtgcaaaagggaaatgtggggtcaaagcc

SEQ ID NO: 913852 - DNA, 635 bp, Homo sapiens
tgaaacagatgaggaaccagccctgcccccttgacctgtggtaagagtggcagctctgatgctctccaaattgcctttgggattattcttcccttttcttgaaagataaagcatgttcacagccaaatggccycatcatcctatcctgacaatgtacgaagcccaatatcctgtttttttttttttttgctttttaataattttttctaattttgttactttaatttccccatagcaccttggcgatggcccaacatccttctttcagtcactcctgtttatttctgccccctttagtcccagctggcaacatttctcttggtataatcccatccccattcccggcttctgttgaaatagctgatcaaatccttcattcacatccatactatctccttatcaaatagtgttcagccacacccttagtgttcttttcagaataatctttctcattctttgcaatatggatagcctaagaatttgccaaatcttcaagttctggttcctttttgcataggaattccttcttaaattcatttctcttttctccattttactagaagcagtcaggaagaaccaaggtactccttcaatactttgcttagacatttcctcagctaaatatcaacttcact

SEQ ID NO: 913853 - DNA, 646 bp, Homo sapiens
ctaccctagaattgtacatctgataaaaatattcttcaaacgtgaaggacaaattaagactttttcagacaaaagctgagggatttcgtcaacaccagacctgtcctacgagaaatgctacaggatgtacttcaatcacaaaggatgtcaatgagctataagacatcatttaaagatacaaaactcactagcaatacacaaaaacatagaatattataaatattgtaactgtggtgtataaactactcaagtagactaaaagattaaccaatcaaaaataataactttcaagacatacacaatacaataagatataaacagaaacaagaagttaaagggtagggaaacaaagttaaactagagtttttattagttttcctttttgcttattagtttgtttatgcgagcagtgttaaattgtcatcagcctaaaataatgggttataagatagtagtcacaagcctcatggtaacctcaaccaaaaaaatacaacagatacacaaaaaataaaaagcaagaaactaaattacatcaacaaagaaagtcactttcactaaaaggaagacaggaaggaaagagagaagaccacaaaacaaccagaaaacatacarcaaaatggcaggagtaattccttacttatcaata

SEQ ID NO: 913854 - DNA, 657 bp, Homo sapiens
tcttaataaagcctgaaatgcggtcctccgaggagagaaaggtcttgttattagacggaaaattagtaatggttgataataatagtaaatgactactttatgtcccctaaaatgttttcctcactgttatgggatgaattgtattcccccaaaattcatattaaatctctaagccccagtacctcagaatgtgactatatttggaaatagggtgtataaagtgtaattaagttaaaacgaggctgattagagtgggccctaatccaatctaaggacagctgtccttataagaaaagaaaatttgaatacacaaagacatgcaggggttttcttacacagatgaaaagtcatgtgaagacacagtgaaaaggcagccacctgcaagcaaagaaaagagaattaaggagaaaccaaacccagtgacaccttgatcttggattttcagcctccagaactgtgagaaaataaaattatttaagccatgatatttaattatggcagccctaagaaactaatacactaatacataaaaataccaaaatctctattagttatcaaaatactgcccaaaacactgccktcttcaaagtaggcaactcacatatcatccacttactgcagcacttccaagttaaggaactctatttgatggatatt

SEQ ID NO: 913855 - DNA, 589 bp, Homo sapiens
ctcatcaaggcagctcaagaaccttcagtgsctccaggtacctatggaatagttcacactcctccacacatcctccaaaggcctccaaaatctggcctctggaaagtccttctacctcatctctccccctccacctgttccaatcacattcctgttcctgtcccactgaacttctctaatttcctcaagttcatcagcctcctcctggcttttgtagattctctttccactgtacttacatcctgaactcaggtctcagcttaaatgttgcttccttgaagccacttctaggagagtagatttagacacttctcctttctttttaagagatgggggttctccctgtaatcccagcactttgggaggctgaggcaggcagatcacgaggtcaggagatcgagaccatgctggctaacatggtgaaaccccgtctctactgaaaatacaaaaaattaaccaggcgttgtggtgggcgcctgtagtcccgctactgaggaggctgaggcatgagaatggtgtgaacccgggaggcggagcttgcagtgagccgagattgcaccactgcactccagcctgggcgacagggtga

SEQ ID NO: 913856 - DNA, 643 bp, Homo sapiens
aacactggtttctaaacccagctcatcaacaggactggaaggtttctggcaggaccatactggtttgctctgcacagtacatcctaatcccatgcccctgagactgtagtgacaragatttctaacattttcctatgcaatgggattgaattatcccagggataatggaaaggtatttttcatctttagggtgttaatgaatataaatgggatttacagcctatttctctgcttttttttccctctgggaagtgagatcatagaaaacttacagtagcaaaaggagagtgagagacccttcattcaaccctcccacccagaacacccccaagaatgagaaagacttcaagaaccccaatgccttcccctccttcccaaatggtcaaaaactcctccaagtaaaaagtaattgatcgatcatgttacaagtatttttagctacaaggaattgctaaccagcaaactttgagtgaaccaggacccagggaagtcaagatgtaaacctcttttctagatggaatactctctctgctcatggctttcttctgggaagtagggaaggtgttgtcttggtccatattagtccacatctcttagggaataattctgtcatctccccacctctaatgctctattctatgct

SEQ ID NO: 913857 - DNA, 599 bp, Homo sapiens
tgctctgtaatatagtctctatgtatggaagtcaggggagttggggcttccaaactttcctcgaggtctgaattgtgtatgatgtattccagtgggaccagaaggcctttggaacacattgaggaggaatccatgttcaagcacaaagtcacaaacaacgaggtcataatgcaagcaatcagagaattctaacagctccaagattctagcagaagcaaacgaagtgacagagtaacaagaacactgaacacagagatacatggaaagagacaattgaagaggacctactaagttcacactcacctctagtgttctggaaggctgtgcacatgtgctatactgcagtcacttaagagcaacaagagaggaaaaaagagagggtacctgtgagctactcattcatagccaaacacagggaggaactgtagactccatgagatataatgaaatattttttctttactatcaaccaattttttaaaataaaagcataaygcaataactttaaaatgatatcattgggactgtaacatatagaaatataatatattgaacatgatagccaaaaggaggaggagagtaatgagaacatggtgggg

SEQ ID NO: 913858 - DNA, 587 bp, Homo sapiens
gcctactttaccaaaaatctaagcttatagttttttwaaaaaaatacagtgaaatatattattgtaattttggaagaactaaacacttttatggtttaaaatcctattcagctttgattattatgattacattctcttccaccatcaattcttttgatatctcaattctgagggctatttgggtcatgtgttaatattcttatatgcctccatagctcttagcattggatacttataagttatataataaaagcttcttgattacatccaaaatattagtccacttgatgttgtggtgtaggatagagtgaaaataaaccatatctgtgagacatgaaaacaaagttcttgctccacgtcatctatccatggctgtctatgagatcttgagaaaattattttgtcttcccagtcaaagaaatgaatgagagagcagggggagatttcaaggtatcttttatctctaaaatgttatatttcttatccttcgataatatccagatttcttaaagaccttaaaaatgtagaaagttatttattgtcatgaaaacattactgacttctcttgagcttcacgtactattgca

SEQ ID NO: 913859 - DNA, 563 bp, Homo sapiens
agtcttcattgctttgtgagttgtwtttgggtaatctgagcagtttttgagttctccataatttactttgctgacataaataatatcttttcttggatgctgcttctaattttctgtgactgaggaaggccaataataattcttcaacgattaaaacagaaaggagacagtggaggaaacttagtctaatctccccagctttttaaaaagcatctggggactagcagtgcttgtgaatacctacaggtgtgtttgtttcctgttaggattcaggctctcaccacagatagggttggcagaaaactaaaccctagatgaataggattttggcatataacagtgaaattaatttcaggtaggaaatggatctaagtactctgcattctcacccaagagcatctaatattttaaatcaaaaccaaatccaaagtaaaaacaaaaacacaaaaagctaagaataattcagaggtgtgtgttttagaacatatcacattcatggaaacattgagtcacggtaaggccaacagataagaagacgattgccatcagaaggtttattactc

SEQ ID NO: 913860 - DNA, 592 bp, Homo sapiens
ccctgggatgtaaccatcattacgctctttgattctatgaatttgaytgttttagatgcctcatataaatggaatcatgcattatttctgtgactggcttatttcacttagcatgtcctcaaggtgcatctacgttgtcacatattacagaatttctgtcttttaaaaggctgactagtacttcattgtacgtatataccacattttctttatccacttctctgtcaatgaagatttacatttttcccatactttggctattgtgaatggtgctgcaatgaatatagaggtgttaatgtctcttcaagattttgatttcaattcttttggataaatacccagaagtggcattgctggatcatataattccttgggattttttttaatgtaaatagtcatattatctgcaaatagagaaacatttttacatcttgttttccattctttgtcttttatttcctttctttgccttattgcaatgactaagattttcagtacaatgttgaacagatgtggtaaaagcagacatctttcattttttttctcaatctcagagaaaaaacaattcagtgttttatttactctaggtttc

SEQ ID NO: 913861 - DNA, 548 bp, Homo sapiens
agagcaagaggaagagagagtcctagctccatggcagtgagagctgaaaccctttcttactattttgttctctccaggccaccatccaattggatggtsctgcccacatcgagagcagatcttcttcactcagtccacagactccatcactctcacagatacatccagaagtaattaatgcattaacagttctctaggtattccctaaaccagtcaagttgacccccaaaattaacgatcacacttccttttcctttccctcctctctcctcctacctttccctcgtctctccttctaccttttcccctcttcagtttctcttcaccaaatccctccagtctgcccagccacctatcctaaatcttcctggagcagtgaaacataagtgatgtcgatcaacaggaagacatatctgagtatactgaattgaagaagatgagtattaaagttaaacaatgtatataaatacattttatgctggtagatacattaccatatagagtcaattacaacctagtatttaattctctaatctttgctctgtcag

SEQ ID NO: 913862 - DNA, 606 bp, Homo sapiens
caagaccccatctcaacagatacatatatgtatttgtatgtgtgtggttattgaaaaaaacacttatgtatcctttggagacatattgaggcacaaagcactttgaaccctgtacactttgtctctctcctttacaattcccattacaggctgacccagggaaagctgaggggtggagagatctcataatgcggaacattcattggctgtattgcaactcttcctcatccccttcctataaagagctgaccattgtggaagcatgccaatgacctccagatctctgtggccaggatagtcatggatttagcagtgctgagctattttgatggtgtagttagcagtaggccaaaaccagacgacgtgagctcctgtggtttacagcaagagcctctgggaatctgttggaagaaagctgagtgttgggaagaaagctcaggcagggtttgcataatgttctctggaatgtgtctagacttgctggctcctttcttctagccctcctgggctcctagatcgattgtattcccattatctcaagtagcagaagatgttccatataaatgctaaaycatcacagctgtagatcatgtgcctatcattttg

SEQ ID NO: 913863 - DNA, 606 bp, Homo sapiens
ctgtggccaggatagtcatggatttagcagtgctgagctattttgatggtgtagttagcagtaggccaaaaccagacgacgtgagctcctgtggtttacagcaagagcctctgggaatctgttggaagaaagctgagtgttgggaagaaagctcaggcagggtttgcataatgttctctggaatgtgtctagacttgctggctcctttcttctagccctcctgggctcctagatcgattgtattcccattatctcaagtagcagaagatgttccatataaatgctaaaccatcacagctgtagatcatgtgcctatcattttgacccccacattctcaccacctgtttctctgttggattagcaataaatagtgtgggatcccagagttcggggccttcgcagcctccacaatcgcgatggcctcctggtcccactttacctctcaaactgtctttttctcaatcctttgattctgccrgactttgttacccccatgacctggtgttggatctgattaccccaacattcctggctgcccgatgtggggcaacaaagaccctggtgaaggaacactagagcgtgggaaagtggaggatgcatcgtca

SEQ ID NO: 913864 - DNA, 647 bp, Homo sapiens
tgcctcaaccttctaaacttttaaggaaataacatcttgttcacaaccaaatrgagtttctttgaggattacatgatgtaagacatgtaaaagaacttagaattataactgttacagattaagcaccccataaatattacacagtattgttttattaataaggctctaagttaaataattataacttagtttgagaagtcagtccatgtcagtgagcctatgttctcattttttttctggaataaaagtaataaataacaacaaaaacaaaaagaataacatcatcagtaacaaccaccatgaaactcaccaataatcactgctttctagtaattatctactctgtttagccactgttttataatttttctggacctcacagtagccctacagggtaaatgcctcttagacccattttacagatgagaaaatcaagattcataaaaggtaagccacttccccatagtcagacaggtaatccatggcagagccaaagatggttccaaggatgaaggcttcagatcccgatgtctacatacatgaatgatactcaaaagtaagagccaccttttttactgatgctctgtaaactcttttttcggcgaagtatccgtcacatcaatcatttatcgtttctttgtgttaca

SEQ ID NO: 913865 - DNA, 615 bp, Homo sapiens; identical to SEQ ID NO: 913357

SEQ ID NO: 913866 - DNA, 615 bp, Homo sapiens
ttatttcagtttcaaggatgggtactgggggaggctgggggtggacggggaacctgagggtgcagagtggggtttgtcatgcctgtcttcatctcagcggccccactctgagtggccctatctttgcccatcttgattcttctcagtctttcaagccaggctgaaccgagcctttcctgactcccccagttagaaggaatcagccctgtctctatgtttctgcagatttttgaaaaggaacaactgtccttgtacaaagcccaacagacctccttgccttttccaccagaccctcgggctctttatttactttgcctccttctgcccttagcggggtgtgtatgtggaggaaggcagcgttggggagtgggcaatgcaaggaatggagcatggagaaggggaaggaagctgtgcatggattgatggacacgcaaagaactaactaacacagggctattttacgcatatacacatcgtatcttactatacacagcctgtgtatgtgtacacagtggctattaggtattacacacacgtatgcatataaaacacatatagcatacagtgtytattgtaagatggagaacatagcaaagggtgctatacagcataaga

SEQ ID NO: 913867 - DNA, 679 bp, Homo sapiens
cttcctaaaataacactaktcttgtgtgattagagtcgtatgtgtccttattaccttatttaagattaattacctctttaaaggctctatttccaaagacagttacgttgggatttagggtttcaacatatgaattttggaggaacacaactgagttcatggcaatgtagtttggaaaactgagaataagagaaacacatcactataagatagtcatagtgacagcttctcactgaagtggccacctctgctattctagacagaactggcaaagcatgtaaataatggattgccagagtctgggaagtgttcaagtttgtaaaaaaccaagttttgtgaaggaaaatactagcttcactcaattaatggcatttttaaggtgatacaccatgtgttctttgtgtttctaaagcaaacaagtagaaggagaactgttacagattcagatattcagtttacatttggaagaagagtaaattcaagggcactgagcgtcaatacagcaataattgctccttcaatttagaataaaatattttcaaagcttctcaaaaacacaaatcactacatttttattgatattgcggtgaaaaaatctgagccagtatataaatcacttggaagatagagtaataatttatttttgaaataaatattattgtagcctccacagtatttc

SEQ ID NO: 913868 - DNA, 663 bp, Homo sapiens
ctgaagatattgccctgactatatccatccggttgttactcctacataaatgttaccctgctacatgagtgtcctgagactttgatgacatttaaatcagcagctgctccagcctcctaccttcaagccaactagcagttcatttcccaaaagagggcatgctttaagggctaatgtctcagccgacactgggctgctactacaaaatgcagagcagggaggcacgcggggccaggtgtccacaacaaatagaaggtgtcctgagcctcaaaaaccggccgtctccccatggaggtcagcacaggcttattcatcaactctgctcttgtaaacacaggcatcactgggtataaaacatgccatcaactgagtggggagcattttttctataacccctgttgccaggtcatataacctattgccaggttagatgaccatcacaaggatgatcagccaggacagaggggtgacctggtgacctgggtcatggtactctgcagggctccctagctgtctggccagtcattggcagctctgcagaacatcaagcaagttacagkgtggcactgaaagctgatgggtatcgagaaggtggtggccacttagaagccccactggggccttcaagaagctgatcacaaggtgcatgttcttagatggacc

SEQ ID NO: 913869 - DNA, 609 bp, Homo sapiens
gtgactgtgtgtgtgacagcggaagggaacgaggatggttgaaaaaggaggaactgagccttgaataggattcttccaggataaagaacaacagcacatygcaagctgaagcaatgctttcaatgggttacacttggcatgccaaacataaggttggtatgactggagcagagtaagaaaggggacaggagaaagacataagattagggaggtaccacaaagccagatagcagagaaccaagacaccagacggtgagaataattaagtgcgggtactataaattcagaacagacactggagctaccccatagataaaccttctaacagacctgcccttcagtcttcctctgtcttcagctatgtgggccagtttttctccttaatagggatctctgaaagtgtttcctgaggttttccaatcctcattttgtagatggagtctaaagcccaaagaatttgcccagactcacatagcatatggggggcttgacttaggacctaaaccatgctttatgcagactctttttgacactccacaccttatgttctcggcactcattttatgcatattttgaaattttagcataaggctcacactctctcaatga

SEQ ID NO: 913870 - DNA, 600 bp, Homo sapiens
ggcagacagccagctgggccaaggcaaggtgaagacattatggtaaatggtctggctcatttttctctcagtgcatcaaagcctaaaaccagaggtccagggaacccagggctgaaagctgcactagaaatagcagtgtctaattcagtagttccatgtgctgctggctaggcaggcactccacgtgctgagagtccctggaatggcaccagaagaaagctccaaggtaggctacatctggttgacacagcctggcacagttgaaggcggagcgagcagagggatgcttgtggaaatctgagctccttgctcctagcactctctccagcctgtgcctgaaatcccactattaaagaggcttcccctttccatgttcagatgagaaagcagaaggtctcagaaggttagtgacttaagttcactggtgaatttgtacctagctagaaccagtggatttccagtccatgcaatttctactatgccagttgcacttacatctcctttctcttgactaaattagcccatgaaccaaaactagattgagctctttgtttgctacagcgatgagtgcacartcagcagacagtaaacgttaaatga

SEQ ID NO: 913871 - DNA, 599 bp, Homo sapiens
aaggtctttttatttagtgcgacaacctgaaaccaaactgatgtatgtgcctgatgctgtgtttctgaggagatgctactacaacacaccagacttgtaactcatgctaaagttggactgcatatctagatctagatataatcttctagaaaaaggaacatcatatcacaaggggcattgttttatatggagcctgaaagaatcactagatactagattatacctttaacctcctcttgaggctattgataatagctccttaatgttgacactttttcaagtgacagatcagtgattccagctgcaccattgtgagtcttgaatccaatttgtgtcatttatttggctttctggaacatttgaattcaggtgacaatattacttctgtcacaaaacctacccaacaatggctgatagttgaccctccctccctctctagtatcttccctgtccataacaatttggtcattattcattaaatatagctttcccataaagaatmatatcttctcaactttttaggagtaattatcatgattaaagattgagagattaaatgtgtgtgtgtgtttgtgtgtgtgtacttttatttgtatttt

SEQ ID NO: 913872 - DNA, 581 bp, Homo sapiens
ttgatcagattctagtggagttcagagtcattgaaatgaaggccaatttttgttgtaaaatattatgtcttgtaaatttagaaagtgttcagatggggctaaataaaatttgatggttcaagcaacccaggaatgtatgtgctgtttatttatttattatttttgtgagtatatagttggtgtatacatttatggtgtacatgagatgttttggtataggcatgcaatggagaaaggtgtaatcatcccctccagcatttatcctttgagttacaacaaacaatccaattacactctttaaattattttaaaatgtacaattaagctattattgacaataatcacccaattgtgttatcaaatagcatgctttatatattatttctattttttttttttttttttttttttttacctattagctattcccacctcccctgtgagccctccaactacccttcccagcctytggaagctatcgttttactctctgtgtccatgagtttaattgttttgatttttaggtctcacaaataagtgataacatgtgatatttgtttttctgtgcttgacttatttca

SEQ ID NO: 913873 - DNA, 554 bp, Homo sapiens
ctccttgtatcttatgcaaatttctgcagccagcttgyattttttcccagaatatgggtttttgttttccatcacattgtcaggctgcaaattttccaatcttttatgctctgcttcccctttaaatataagttccaatttcagaacatatctctcaaagttccacagatctctaggacaggggcaaaatgcctccagtctctttgctaaaacatagcaagagtgacctttctattccagttcccaacaagtttcttatctccatctgagaccacctcagcctggacttcattcttcatatcactatcagcatgttggtcaaaaccattcaataatctctaggaagttccaaactttctcacatcttcctgtcttcctctgagccctccaaactgttccaacctctgcccgtttcccagttccaaagtcacttccacgttttgggtatatttatagcagcaccccactctactggtaccagtttactatattagtcctttcttgctgctataaagaactccctgagactgggcagtttataaagagatttaatt

SEQ ID NO: 913874 - DNA, 644 bp, Homo sapiens; identical to SEQ ID NO: 902688

SEQ ID NO: 913875 - DNA, 680 bp, Homo sapiens
ggtgaaaatggaaggtcagtgggaccatggtagagaaaacagattcaagcaacagaygccaaagagctctccaataacccaagcattggaatcactgaaaaatgtctcaaacagtgttatctgccatctgcccagaatgtttttacccccacaaatccataggacttaccctcccacttccttcagaccttgactaaatatgtccttcacagcaaagacttccctggtcatcctatctaaaatgtaaacactttcacacaaacacaaaaacactccctattctctttcccaactttcttttcttcttagttctcatcagtatctaacataccttatatttccctttatcctttgttcttgcccattaaaatgtaaattctatgacagagatttttgtctgttcattgctgtgtttccaacacctagaacagtgttagacatatattgttagttgatatttaataaatatttgttaaataaatgttgaagactttgtaagctaatcatggcaataacatcttaaaaattattagaattaccagaacacaatttatgcattttgacaaaaactctcccttttgaccaaaactttagtcagtctcttttgtgtcctctgaccatgcctgatcttgggctaccctctctgtccttgttgaattcagtttgagcaggaatactac

SEQ ID NO: 913876 - DNA, 610 bp, Homo sapiens
atttgtcatgtagttctcatgctgtggttttcagctccatgaggttctttaaggacttctctgcatyggttattctagttagccattcgtctaattttttttcaaggtttttaacttctttgtcattggtttgaacttcctcctttagctcagagtagtttggtcttctgaaaccttcttctctcaactcctcaaagtcattctccatccagctttgttccattgctgctgaggagctgcgttcctttgcaggaggagaggcactctgatttttagagtttctggtttttctgctctgttttttccccatctttgtggttttctctacctttggtctttgaagatggtgacgtacagatgggttgttggtgtggatgtcctttctgtttcttagatttccttctaacggtcaggaccttcagctgcaggtctgttggagtttgctggaagtccactccagaccctatttgcctcagtatcagcagcggtggctgcagtacagcagatattggtgaaccgcaaatgctgctgcctgatcattcctctggaagttttgtgtcagaggagtacccagtcgtgtgaagtgtcagtctgcccctactgggcagtg

SEQ ID NO: 913877 - DNA, 648 bp, Homo sapiens
gtcctaaagattgcaataattatgtcatttctatccatataagtatctatgccacagccatacctaaatacttcacaatgtggaattggacaagaatgcattaacaaaagtctgcctacaacagcagtcacacttctaccttccctgcagtgatgacattcctgaaaatagcctgtcaaaaagaagacaaagagttgggaaaattttatggcaaatttaactgagaaataactgttttctacatcaagagaattgcctgataaatgttttgcagaatttaaaagtcattccaaaattagtttcaaagaactggctgcaaatgacagtccccaaatgtgtttttcccttctttttctttttctccctgtcattgccgactcagagcattaagaaaatctaacgctgaaaggactactcctgtgagatgtgaaaataattatatgttctgcctgaactgataggcagagaaacattccatctcagattctgcaaagcatgtcaatttcaagtttgcgtgttttctgtttctactacctaccagttggagaggcagtgattggaaaacaaaagcattatctttacagcaaggaaacttgaaaattggatrgatggcattcttctccacttttcatgtattttacatgaaaa

SEQ ID NO: 913878 - DNA, 653 bp, Homo sapiens
aactacaataaaacatagtatgtaaacaaactgaagcctaacttagcagtaacaaacagccaggtttcagccaatcacagacagacaactgaacagcttctgccaatcacagtcagtcaactgaccaaactgtaatcaaataaggcaaatgcctagttgtagccaatcagatgatttatctcctttgtttctgtgcttggcctaaaaaagttcactgctcatgctgctgggcaaagctctctgaactacttgttctgattactgccctgttcatgaattgttctctgttaaatgtatctaaagtatttattttaatacctatatgaatgcatatatatatccaccaacagacatatgcaagaattttatagctgtataatttataaatgtccaaatattttcttaatccagtctatcattgttggacatttgggttggttccaagtctttgctattgtgaatagtgccacaataaacatacgtgtgcatgtgtctttatagcagcatgatttataatcctttgggtatataccaagtaatgggatggctgggtcaaatggtatttctggttctaggggagtggaaggatggcattaggagatatrtctaatgtaaatgatgagttaatgggtgcagtacaccaacatggcaca

SEQ ID NO: 913879 - DNA, 602 bp, Homo sapiens
ccacatgttctcactcataaatgagagttgaacaatgagaacrtatggacacagggaggggaatattacacaccagggcatgtggaagggtggggggctagagaagggatagcattaggagaaatgcctaacatagatgacaggttgatgggtgcagcatactaccatggcacatgtatacctatgcaacaaacctgcacattctgcacatgtatcccagaccttaaagcataatttaaaatatatatatatatatcttgtcatgctgttcttttaaggaaacagcctgaggcagtgggcatggaaggagattatacttgatggattttttaataaaaaatgataaatgaatataaaaataaagttaacagaattgacaaaactgcattttaaatagttttactagatatttatttggtatgtttactagatattctaggcatacaagaacttggttaagctctctaatagccccaattgagtaggcattattaatcctactttatatataaggcaaagtaactttttttaaaatatgccattaataagagataaaacagaggtttttaagcaactctgtcttactctaacacccatgctta

SEQ ID NO: 913880 - DNA, 625 bp, Homo sapiens
aaccaagatttctttttttttgctgttgctaacaaacaggtwtaaaaagaaatgaccattttaatgaaggtcagttggggacagcaagaattatggagataaatgggctatagataacaaaggaaaagaatcccaagtgaaaccaaactggacacacacttggctaactgttggaaaggaagggttagaaattttgacagatacctacaattattttatttagagtttataaataattatgcttaaggtacgataacttctatacagtttccatcccaatgtccagtttcaattatttcaactaaaactcttgtattgttcataaagtctagagtataggaggtccctttaggcatcaaagatgagaagccaagtcagaaaaattctaactgaccattatgctcaagattccagtgctgagcagggcagggaagataaacagagctgtttaagcaagattcctgtctagggttgttgccatgacacagtttggaagaagaaggtctatcaacaacttatttcccctgtgcttcaatgagttaaagcattttctcacaagaaataaatgtgtagtgtttaaggatccttgacagagctccttgtaaactgagctctcagaagttgt

SEQ ID NO: 913881 - DNA, 566 bp, Homo sapiens
tttcctgaaatttgaatttgactatgaagaaagtattgattgtggggagaaataatgttaattccctaaaacacagggtgagaactttttaatggagtacacattactcatcaaaatatagtcccaaactatattatcaaacatgtctaacccactttacacacatacacacacacacacacacacacacaccaccctacgatgcagttatatgaatctttattgtttactaaacataatacatttcctccttccccacttacgtgcctttgcacattgtattctttgtatcctcttcctagaatgctcttctttaaattgataaacttatccttcaaaatgcaacaaaaataccaccttttcaatgaagtccttcagaatccccccagtgtcccatagaaatttgcatatcctcttaattcaatgtcctgcaaccttctttgcacattagcacccytgggatttggcatgatcctatcagtaatgctgtctcagtggggttttatatgagaaggggctttctatgggtgaggcaacaatggttctctcttgtgaggttgaaattt

SEQ ID NO: 913882 - DNA, 608 bp, Homo sapiens
tcagaactgcaggaggaaaaaaagtatgcctgttctgctcttcttcatcttatgcacctggatcccccaggttgtttctgttggaaaccagttgtccatcctttcgtwtcctattcttcagtgagttctatcattacattttcaaaacagatcacaactctgtgtgcctctccttacactactggcagcatctgggtcctggttcaagcccctggactacgtgatcttcacctccccactcatccttaattcccccttgctcagctgtaatccagagaacctgcctgttttgttcattcaacacagcagtagtttgttgaatgattgaatgattgaataaatgtagaactgcctaatggtacaaagaaattgggaaaattcttttgattgggcattcgggaagactttggtaaagccattctcctggagaggtagaaggtgttagtagctgtgtctttaattctccgtgatgttagtgacagggattattctctgcggccagaggttactctcttgcctgtagacagaagagctgaaattaaactatttcttaagattttaagtttccatagagaaggggattttttttggatgatcaaaaatatcca

SEQ ID NO: 913883 - DNA, 623 bp, Homo sapiens
gaagtttgttattatcgatcgtctgaagccttcttctctcaactcacatcgatgcaaaaatcctcaataaaatactgtcaaaccaaatccagcagtacatcaaaaagcttatccaccatgatcaagttggcttcatccctgggatgcaaggctggttcaacatatgcaaatcaataaacgtaacccatcatatcaacagaaccaaactattgattatctcaatagatgcagaaaaggcctttgacaaaattaaacagtgcttcatgctgaaaactctcaataaactaggtattgatgggacatatctcaaaataataagagctatttatgacaaacccacagccaatatcatactgaatgggcaaaaactggaagcattccctttgaaaactggcacaagatagggatgccctctctcaccactcctattcaacatactgttggaacttccggccaaggcaatcagggaggagaaagaaataaagggtattcaattaggaaaagaggaagtcaaattgtccctgtttgcagatgacatgattgtatatttggaaaaccccatcrtctcagcccaaaatctccctaagctgataagcaacttcagcaaagtctcaggatacaaa

SEQ ID NO: 913884 - DNA, 620 bp, Homo sapiens
tattgtctgacaatagacattgcatgatttctattcccttaaatttgttaagctgtgctttatggcccagaatatggcttatcttcatgaatattccatgtgagctttagaataatgtgaaatctgctgtttttggatgaataggctatagatgtcaattatatctacttgactgatggtgctgatgatttcaaatctattcttactaattttcagcctgctggatctgtccatttctgatgaatattaaagtctttaactataactatggattcacttatttctccctgaagttctatcggtttctttcctcacatattttgatgctctgttgttagacacatacacaataaggattgttatgtcttttttgagtattgacccatttatcattatgtaatgcccctctttatccctaataaccttctttgctctgatgtttgttctgtggaaaattaatgtacccactaccactttcttttcattactgttagtaygatatatctttttcaatccctttcctttaacctactttgtgtctttatatttaaagtgtgtttcttgaagacaacataaagatgggtcttttttttaattcactctgataaactctgtctttt

SEQ ID NO: 913885 - DNA, 585 bp, Homo sapiens
aaaaaccgtagaggaaaacctaggcaataccattcaggacataarcatgggcaaagacttcctgactaaaacaccaaaaacaaaggcaacaaaagccaaaattgacaaatgggacctaattaaactaaagagcttctggacagaaaaagaaactatcagaatgaatgggcaacctacaaaatgggagaaaatttttgcaatctatccatctgacaaagggctaatatccagaatctacaaagaacttaaacaaatttacaagataaaacaaccccattgaaaagtgggcgaaggatgtgaacagacacttctcaaaagaggacaattatgcaaccaacaaacttatgaaaaaaaaagctcaacatcactagtcattagagaaatgcaaatcaaaaccacaatgagataccatctcatgccagttagagtggcgatcattaaagagtcaggaaactacaggtactgaagagggtgtggagaaataggaaggcttttacactgttggtgggagtgtaaattagttcaaccattgtggaagacagtgtggctattcctcaaggatctagaactagaaataccatttgg

SEQ ID NO: 913886 - DNA, 585 bp, Homo sapiens
aaaaaccgtagaggaaaacctaggcaataccattcaggacataagcatgggcaaagacttcctgactaaaacaccaaaaacaaaggcaacaaaagccaaaattgacaaatgggacctaattaaactaaagagcttctggacagaaaaagaaactatcagaatgaatgggcaacctacaaaatgggagaaaatttttgcaatctatccatctgacaaagggctaatatccagaatctacaaagaacttaaacaaatttacaagataaaacaaccccattgaaaagtgggcgaaggatgtgaacagacacttctcaaaagaggacaattatgcaaccaacaaacttatgaaaaaaaaagctcaacatcactagtcattagagaaatgcaaatcaaaaccacaatgagataccatctcatgccagttagagtggcgatcattaaagagtcaggaaacwacaggtactgaagagggtgtggagaaataggaaggcttttacactgttggtgggagtgtaaattagttcaaccattgtggaagacagtgtggctattcctcaaggatctagaactagaaataccatttgg

SEQ ID NO: 913887 - DNA, 585 bp, Homo sapiens
aaaaaccgtagaggaaaacctaggcaataccattcaggacataagcatgggcaaagacttcctgactaaaacaccaaaaacaaaggcaacaaaagccaaaattgacaaatgggacctaattaaactaaagagcttctggacagaaaaagaaactatcagaatgaatgggcaacctacaaaatgggagaaaatttttgcaatctatccatctgacaaagggctaatatccagaatctacaaagaacttaaacaaatttacaagataaaacaaccccattgaaaagtgggcgaaggatgtgaacagacacttctcaaaagaggacaattatgcaaccaacaaacttatgaaaaaaaaagctcaacatcactagtcattagagaaatgcaaatcaaaaccacaatgagataccatctcatgccagttagagtggcgatcattaaagagtcaggaaactacaggtactgragagggtgtggagaaataggaaggcttttacactgttggtgggagtgtaaattagttcaaccattgtggaagacagtgtggctattcctcaaggatctagaactagaaataccatttgg

SEQ ID NO: 913888 - DNA, 675 bp, Homo sapiens
ggcaggtgtgggatccagaccactagcatgagccgagtggacagaacgaacccagtgggctcgagcaaaacacaggtaaakgtgccaccagacagaggtttcaggcagaaaattgatgcctcaggattctgtaacacttgtgccctttgacctctcagagcagctggggatcgtggtaaattctctctcggatttcagagctccatggatttgtgttttgagctctgagtttctttgagcaaatttctgttccaaactgctatccagccatgactggctggatgttttagaagttatgacagaaacgggaccgggtccaggatcagatttgatccagtagttaactggcttgaatccagttccagttagaggcctcctacatctgaatgggtcagaaggaaagtggtagcaaatgataacattggagggttgtaaaatttggcttttcaaaattcacagggatttttgtgttctacccctttgtttcattttcctcgcatacttaggtaggaaaaaaaaatcattggctaagtcaatcaagggaacctgggagtaaagccaatatattaggtaaaaataggatccttaatttctggaaaactaagttccttctggctaattcattaggcctgggaagcagcaaagtcttacagaaatggcaaaatcttactaaag

SEQ ID NO: 913889 - DNA, 558 bp, Homo sapiens
tttggcttcagagattttttgatttaagaattgaggataagggatttggggcctgtattggtctgttttcacactgctataaagaactacctgaaactgggtawtttataaagaaaagaggtttaattgactcacagttccacatggctggggaggcctcgggaaacttacaatcatggcagaaggcgaaggagaagcaagcacttttttcacaaggcagcaggagagagagagaactgccacacacttttaaaccaacagatgtcatgagaactcactctctatcactagaatagcatggggaaaccatcccccatggtacaatcacctcccaccaggtccctctctcgacacatgggaattacaattcaagatgagatttgggtgaggacccagagccaaaccatatcagggtctgaatttattctgttaaatttgaacaggtagatctgacctagcaaaagaaagaattctcgctccttgatgctcaaggagtttgtctgctcatcctttcaagcttgtaaggaggttgcgagctcttcataaatttgcagatga

SEQ ID NO: 913890 - DNA, 693 bp, Homo sapiens
aaaaatgtctataaagagataaacaagtcataaagcaggtcatgaactgtcaaagtcgtgattctgatgctgccagaatggagctgtaggtcttgagttggctttgtgtagtgggtaggacttatctgagtggagaaatggcacagaggtaatggcaatggtgtgtttacaggaggagaaaaactcctttcactgtaaggcaaggtttaatgagaagaagatggagatgaaattggagtggtgtgctgggcatggactgtggatgagcccatcctatgagatatttgctctgagctgggagacatgaggacagcctgcatacacagtgacagtgagggtgggacagggctttcctgccaggtccctgctcctcgactagaagcactggccttcctcctccatccactcattcatctcctgcttgcctttctctgatgacgtggacttgccagatttggtgtttgtcccctctggacctagaattctcagatatcctactgacctggccatggagaccactagtgttcctctgggctatagcacagactctagccctcctgaaaaaggcctcaagggacagttgcccctggcagatactggccrataagcacaggaaaaaaatgctcaacgtcactagtcataaaggaaataccaatcaataccacaatgagtacaaccactatggagaacaat

SEQ ID NO: 913891 - DNA, 642 bp, Homo sapiens
agactaagcataactaaaagtacagctgaaacggtgaaatttgcaaccattcaaattagcttagacaacccgtgagtttgtaatatcttaatacggtgctataagaaatataagaaagcagggttttgacagataagctccttataaaaatgtaaataatatgagtttcttcattgtattgacacttgctgccaccgaaaacatcaactctgtaaacccaaaacttgataatcacaagaagagaaaaatcttaacaagttttttatttcatgcagaagttgttaggaccacttgtttgttttgttttgttttgttttgagatggagtcttgctctgtcgcccaggctggagtgcagcacgacctcagctcactgcaagctccgcctcccgggttcaagcgattcttgtgcctcagactcccaagtagctgggattataggtgcgcaccaccacgcccagctacttttttggtatttttagtagagacagggtttcaccatgctggccaggctggtctcaaactcctgacctcaggtgatccayctgcctcggcctcacaaagtgctggtattacaggtgtgagccactgcaccaggccttttttgaacttacatgaaaaatagtgtatccttttatttgttt

SEQ ID NO: 913892 - DNA, 619 bp, Homo sapiens
cactcctatactatatcattcaatatactattgaaagtcctggccagagcaatcaggcaagagaaagaaataaaaggcatccaactaggaaaagaagtcaaactctctctcttcactgacaacatgattctataatggaaagcccgaaagactctgccaaagggctaacagaactgataaatgattttagcaaggtttcaggagaaaaaagttaacgtagacaaatcaatagtatttctatacactaatagtgcccaggctgagagtcaaatcaagaacacaattccatttacaataaccacaaagaaaatgaaatactaaaaatatacctaacaaaggaggtgaaagatctctacaaaaactacaaaactctgctgaaataaatcagagataatacaaataaatggaaagccattccatgcctatggattggaagaatcaatatcattaaaatggccatactgcccaaagcaatttacaaattcaatgctatttctgtcaaactaccaatgttattctttgtagaattagagaaaaaatattctaaaatttatatgagaccaaaaaagasacaaaacagtcaaagcaatcctaagcaaaaagaacaaagatggaggta

SEQ ID NO: 913893 - DNA, 636 bp, Homo sapiens
acagaatgacaggaaaggttacatttttcattctaaatggagtgtttttctctgtcgtcttctgcatagaactcatgcattcttcttatggtcagataaatgaatgaaatgtatacattactccattcttttcaataaaactgtggaatggttgccatttcagcttactctgtatttcttagagttggggattggtgatattaaagttctcttgattgatctacaagataattcctctatcatattttttatattatgataggacacaacttattttagacacaaatgaatatttacgtcatgacaatttccctttgttttcttcccattttatatatacatgccatgtagatggtaagcaatagtaaaaattgttcttaaaaagtaataacaccttacacaagcagaataagtaagaaaaaggtaataaaatctacatgagaaacaggacacattttactttacttttttatccttctgaaaatatttatagtgattatcaaaggcatacaaagtattttactcctaccaaagtatttttacacacacctttaaactggaattgctcaatgtatgtaaaagaaaactgtcaattaacttatcaccaytcactttagtaagcataaacagtctaaa

SEQ ID NO: 913894 - DNA, 535 bp, Homo sapiens
tcataagtggtagttgaacaatgagaacacatggacaaagggaggggaacagcacacactggggcccgtgasggtgggaggaggggagggagagcatcgggacaaacagctgatgcatgcaggacttaaaacctagacgaagggttaataggtgcagcaaaccaccatggcatgtgtatacctgtgtaacaaacctgcacgttctgcacatgtatcccggaacttacagtaaaataagtatttttcaataagacagaaaagaaagaaataatacacagtggagggatgtcaaataatttaaatttcagagtttttataaaatcagatctcacagcacagggtctccattcttctaagacagtaatcagcttgataaaggtggaagccagcattccctcttcttgaaagcttcctttgttttggggggcaccacaccttctttgttttcttcttgattcactggtggttcttctcccatcattttgccaacttcttccacctttaaatgttgttactcctcaggactctgttctag

SEQ ID NO: 913895 - DNA, 643 bp, Homo sapiens
ctgcactccagcctgggatatagagtgagaccttgtctctaaatgaaatgaaatgaaatgaaatgaaatgaaatgaaatraaataaaataaaataaaataaaataagggaatctccagaatttcagtattttagcagcaaatatcaggagtattagccaaatcaatgaaaactaggataaataacatatgtttaaattttaagacaaagttttgattatgggaattaagaagtctgtgctactaacatatcctctgtgattataggaaggcacattaaggtacaaactcatatcaaaggaggaaatagacaagtatggaacagacataaagacagttacatagatgaaggaaatattgggatgttgatgtaggaaaagaacatggtccaggccttcttgatgtattttgcaaaggttcataacaagcatgctaagcctttctatcatttgtggttacttaataaatggtacatagttcattctatacatggttcagttcttctaaactaattttttgttctttatttaaaaacaaaattgtaagtttgaaaaaaaaaaagtacaagtcttccaggggtgcagaaatgggttgaggcaaatgatttttgtagctgagaatctggaccctcaagttggcaaacaa

SEQ ID NO: 913896 - DNA, 605 bp, Homo sapiens
aaattatttttattccagatgacatgatagaaaacacagaggaagccatttcttatatatagaaaaccattaaaaatttcatggaaagctattargtttaataaatgaaggtagcaaattgcaggatacaagaccaatttacaaaagcacttgtaattaagttcactagcaataaacaacccacaaataaaattaagaaaacaaaatcatttgcaatagcatcaaaaaaaaaagcctaggatacgtaggaataaatcaagatttgtatactgaaaagtacaaaaagtcattgttgaaagacattaaataaatgtcttttatttaaaaagtgaatggaaacacattctatgtttgtgaatgaaaagactttgtattgttaagatggtaaaagactccaagttgatctgtaaattcgatgcagtatttattaaaatgtcaattgccttttttaacagaaatgggaaaactgatccaaaacttcatatgagatagtaaacatacctgaatagtcaaaatgatcttgaaaaaaagaacaaagttgtaggactcacatttactgatttcaaacctgttaaaaagtgagattaatcaagccagtgtggtac

SEQ ID NO: 913897 - DNA, 654 bp, Homo sapiens
cagaaacgaggaccagcttggcctcattacagtcaagtgaaggtagaagtctaagctccctactcagcattttctgagggagggcgtggggctgatgtcttttttcatagtgtttgactggaatacggtggtagttgtctagaagtttcctgccttgcttgactgccgctctccaggtcctttggctagagaaaatgagcaggcttttcttggggcttttgtttgtctgcatctgttggtatttttggtttgctggcttctccagcacctaaactggtatatattaagcaaaaagaaaatccacataattaaccaactgttgtgttgttttttggatcccaagaaagtctaccttcttctttccacatttcagtcttcttatgcttgatttacaaataatgcccagggtttcaagctgtatcccgttggaataataggaagaagtgtgtttatacgatcttttcctggaaagagagagcatgcctggtaatttttgaatggatactagacaataagaatttagtgttctttrctgttgattttttatattccatcaactattactgggattgattctgggatgaaattaagtaactttgaactagttttattctttgtggtctagcttttaagctttgttaggactgtgccaga

SEQ ID NO: 913898 - DNA, 654 bp, Homo sapiens
cagaaacgaggaccagcttggcctcattacagtcaagtgaaggtagaagtctaagctccctactcagcattttctgagggagggcgtggggctgatgtcttttttcatagtgtttgactggaatacggtggtagttgtctagaagtttcctgccttgcttgactgccgctctccaggtcctttggctagagaaaatgagcaggcttttcttggggcttttgtttgtctgcatctgttggtatttttggtttgctggcttctccagcacctaaactggtatatattaagcaaaaagaaaatccacataattaaccaactgttgtgttgttttttggatcccaagaaagtctaccttcttctttccacatttcagtcttcttatgcttgatttacaaataatgcccagggtttcaagctgtatcccgttggaataataggaagaagtgtgtttatacgatcttttcctggaaagagagagcatgcctggtaatttttgaatggatactagacaataagaatttagtgttctttactgttgattttttatattccatcaactattactgggattgattctggratgaaattaagtaactttgaactagttttattctttgtggtctagcttttaagctttgttaggactgtgccaga

SEQ ID NO: 913899 - DNA, 537 bp, Homo sapiens
ttttaaagaagtcacccctgctctrcaacccctccacccctcccgactacagatgctacataatactcacgccaagaggtgatattgctaaattcctcttgtttaattagcctctcaattcagggcatacttatcggatacctacaaagcgctctgcaacttgcctgaaactgtgtgggtcagagtacatttaagaccatccagctggaagtgagaagacttgaaaaacattggcaaacaatgcatgtgaattcagagttggtttctaaattttgtaatgctgaagacaagtctttgactaggatgagcctgtgcactagagcaaaggtcaaaagaggttacagccagtcgaaactttgaaagggcccttcctggagtgcatctccttgtcccgcatgctttaagaatgtatggtatgctaaaacaaacatctgatgtaggctggtgaaatgcaaaccagtattctgtattcatgtgataggccaggcccagggcagtctcctaaaaggcagctttcttaaaatcacgggtaacttt

SEQ ID NO: 913900 - DNA, 666 bp, Homo sapiens
tcaagttttgctttagtcacaattgcttttggtgttttcatcatgaaatctttgcccgtgcctatgtcctgaatggtattgcctagattttcttctaaggtttttatagtkttgagttttacatttaagtctttaatccatcttgagttaatattgtatatggtgaaaggaaggggtccattttcgtttttctgcatatggctagccagcactcccagcaccatttattaaatagggaatcctttccccattgcttacttttgtaaagtttgttgaagatcagatggctggaggcatgtggtcttatttctgagtatatgattctgttccattggtctatgtgtctgttcttgtaccagtaccatgctgttttagttactgtagtcttgtagtatagtttgaagtcgggtagcttgatgcctacagctttgttctttttggttagaattgtcttggctattcaggatcttttttggttccattctgtgaagaatgtcaatggtagtttaatgggatagcattgaatctataaattactgtgggcagtatgaccatttccttttctttttttgactgagcacaggggactttattgatggtacatgacaaggtggggctccctaggcccctcccttttcaggagatctgcatggaaactctgaggag

SEQ ID NO: 913901 - DNA, 467 bp, Homo sapiens
tgatccagtttgagttaattttttgaagggtgtaaaatctgtgtctagattcattttgttgcatgtggatgtccagttgttccagcaccatttgttgaaaagactatctttgctccattgtattgccttttctcctttgtcaaagatcagatgattatatttagttggatctatttctaatgtctctattttgttatatttatctctttgtcaatctatttttctttttgcctatgccacatcgttttgattactgtagctttatattaagtcttgacgttgggtagtgtgagtcctccaactctgttcttcttccgggattttgattgatattgtattgactctatagatcaagtttggaagaattggcatcttgacaatattgagtattcctattcatgagcatgaactatctytccatttatttaattctgctttgatatcattcaaaagaatactgtagtttt

SEQ ID NO: 913902 - DNA, 637 bp, Homo sapiens
cttatgaggatggaggctgggggcaatggagagtgattatctttccctcatctcttgtatctaatccatcagtaaacctaagtgattctacctccaaaacatatctttattctaactacttctttccatctctactactttcttcctagtccaagctaatgctatcactcagctggaatattacagtgcctttctaactgtcttcttttcacttctacttctgtcccacccctcccagtttgttcttggtacaggggccaaagtcagattctttagaaaagatcatgtcactcaagctgaaaatccctcagggctttcatcttatttaactgagtctcatacaacctcctaaatctgatttaccaagctccatgtgacccaatctttgcctacctccacaccaacccatcctgctatgctctagataccctgccctttcttttcctctaacatgccacattctttctcagtctagggctttggaactagctattattactctgactagaatgctttttcctgtttttcctggactttttcttgtcacacaaatctccatttaaacattagccttttagaaggtggctgttaacattctagtaacaygaggcagacaagaaataaacattacttaaat

SEQ ID NO: 913903 - DNA, 597 bp, Homo sapiens
ttaccattggtgattgttcttgtcttcctcttggagagtaagagaaagagaatgcagtctgagaggttcttgttttcaccaaaaaaaaaaaaattctgaactttattgtggtgctggttgcacttatttgtaaatatattaaagaccactgaacctgaacttttttaatggatccattttatattatatgaaatatatctcaataaaactttttttttaaagaagatggatgtagatgtgtggcattatttctgaggcctctgttctgttccattggtctatatatccattttggtaccagtaccatgctgttttggttactgtagccttattgtatagtttgaagtcaggtagcgtgatgcctccagctttgttctttttgcttaggattgtcttggctatatgggctctgttttggttccatatgaaatttaaagtagtttttttctaattatgtgaagaaagccaatgrtagtttgatggggatagcattgaatctataaattactttgggcagtatggccgttttcaccatattgattttttctatccatgagcatagaatgttcttccattggtgtcctctcatttcattga

SEQ ID NO: 913904 - DNA, 664 bp, Homo sapiens
taatcaaaaaagttctctcaggaatagacrcaatagtgcgtatgatgcgattacaaacaccacatatgtcttttcttttttgatgggaatcatgcaaagtagaattaaactgaattcctatggttaaagggtacaaatctatagctgtcctacaaacagagagtatgtctatatatttattattatcaaaaacacaaaaaagtatcaatcggcccctctagaggaaaacagaattatctttatattcttccaataaaaaatagtattacaaaatgctgttatgtgaagaaatagcatgcagaaaagatgtatgatagacaagtggcaggctactaaataatgtagaaatcattatctttgaggatttctttgtgtttatggcatttgtcaccttttttaaaaaatgtatacgtggttgtggtttgtttccagataaatattcacttttatgtctaataacatattcataaaatttgattctttttcttacagaggcctccactcaaattgtataagctttagagtctacattgttctgccagttggcttcatatacagtaatgtaaattctaagttcgatgtaaattctagctccacatacacaaagcaggcaccaaatgggatggaacataaggggaggttctcagagttaggaagaacatat

SEQ ID NO: 913905 - DNA, 639 bp, Homo sapiens
tgattccaggcagtgggaaagcagggctgacaacttgatccaggctacctagytcccagctgcaaaagaaaagggctttatttcttcccctgcctattgagcctgcataccagattcacaccctccccaaagttctggccaggaagcttctcaactggttcaaattgttacaaagtttagctggagacttccttctccctgtgacattttgcccacacctctggccacccacccaaacgatctgtgcgatgccaggcaggaatggccccctcggagacccagcaagctcccaggccctttctgcctccttcatgtagccctatatttcactcagctctctaaattgactcagttccaggtaaggtcagagtcttctcccacaaactagaccttcagtttcccccatgcggatctgtttggggctggaggatctccctttgccacttccgcagtttggggactcacagtatttggggtgtctcctgagtcctgggggagcagtcctcttcctttagagggtctgtgggtcctctcaggattgaaggaggaaaaattcacaatgcaagcctctgcaccctgctctgtccatctgagttggaactttaatctagtcctgcctcccatctgccatgatgatcc

SEQ ID NO: 913906 - DNA, 629 bp, Homo sapiens
gattatttgtgcctaccaattgcaacattttattgggaattgttaatggataagcactgatgagtttcctagatgctatctataccatggtaccttctgtttaagtattttttatacatcttcctgttgcttatatccagatttaaggatatatcttaccaaattgatgacattgagtagcactcataccctcataaagaaattcatttatatgcaatgttctagtgtcagttaattcttcagatggctgatgcattccttatgatgaccttcgaaatcacaactgattggattagaagtgggcatttgactcaagccatttaatacataagaggcagtctatgcaccctaaagccgaggattctgaacaatattagtctgtttttacaaggcccaaatgatctttactcacataattttgaaattggaatataaaagaatgagattgaaataagaagcagaagcaaagagataatgagattagttgctgagatttaccaatatgaaaaagtgttggaataaaaatgttgattgagagacatgccaagtggtaactaaaagatctgtcaagttccaggcaaaatcawacttacatcaattcattatcatcatgtgataaaatctaaatt

SEQ ID NO: 913907 - DNA, 327 bp, Homo sapiens
ccacaatcatgcccttccaacagtccttcaatgtcttaactcattctagcattaactcaaaagtccagagtccaaagtctcatctgagacaagaaaagttccttccacctatgagcctgtaaaatcamaagcaaattagttaattcctagatacaatgggggtaaaggcattgggtaaagacacccatttcaaatgggagaaactagcaaaaacaaaggggctactggcctgatgcaaatctgaaatccaaggaggcagtacttaaatattaaagctccaaagcaatgtcctttgcctccatgtctcaccttcagttcatgctgata

SEQ ID NO: 913908 - DNA, 641 bp, Homo sapiens
agacagtcgggcataagaaccacagaaatacttcctttacttcccaaccacagggttttttcaactcctggagtaatcctggctttgattaaatccccccctatcacataactgtaacaaccagaaatcagtggaggtgtggggtttgtccatacacctcagggaatgtgcctgtgaggtttaaactgaggtgaccccggagttcaatggctgtggagtgtcagtttccctgtaccaggccttcccaaaccccagtttttgttgttttgaaacagagtttcactcttgttacccaagctggagtgcagtggtgtgatcttggctaactgcaacctctgcctcccgggttcaaacgattctcctgtctcagcctccccagtaactggaattacaggcacccaacactactcccagctaatttttttttctttttcttttactttttttttttttttaagtggtaaagacggggtttcaccatgttggccaggctggtctcgaactcctgacctcaggtgatccacycgcctcggcctcccaaaatggtgggattgcggccaagagccaccatgcctggccaaccccaggttttttatgctgcaagagatgactcagtgcttcaccacctctagctaaataaa

SEQ ID NO: 913909 - DNA, 597 bp, Homo sapiens
ccaggcatggtgttgcacatctgtagtctcagctactcagagactgaagtgggaggctcacttgagcycaggaggcagaggttgtagtgagccgagatagtgccactgtactgcagcctggatgacagagcaagaccctgtctcaaaaatatgtatatatattgctaccttctagagttccaaggtagaaataaggagagtgtgcttgaaatttgcattgctaacacatttcctaagatgtatcaaagaaaaaaaaagtgcagttaaaatgggagtcagtgagaggtttagcagttttcatttgataaatgaattaaagaattaattgaaaaggggcagcgttaggtggaattcaggtgaatgagttaaaactatcaagaaccatgaagagtctgagattttaccttacttgcaagctgacgagttagcctgcaaaagtcatgagatcctatagcagagataaagggtttaattactcaggacccagcaggccacatgaacatcatttttgctttagctacacttcccacccaagtgccatgggggtgatgcagaaggggccccgtgtatactgcacatgcagtaggtttgcatcac

SEQ ID NO: 913910 - DNA, 628 bp, Homo sapiens
cccacaaacagtctggctttttctctgctcagtatgacacatccacattgttatttgctctagtaaatgggctgctgtcagtaggaaatttcagtagaaaaaattggtttctcatgatatgtagaaagtcaattgtccaggatagtagcagaggtcagttacatgtagtcttattttctgacactcctcaacctaactggacctttcctccctcagtaaattactgtcaagcttacttcctacaccattaatttttgggttaatactatctagggagtcaatagggagcgaaaattaagttgttttacctgcactttttatatgttgaccatgtttctcctttttgccattgtcaaaactgcactacagccaatctcagatttttcttgctacttaagacatcagttaagtcaatagcagactttactgccctttccttcctgatgacaatgcaagagtgattgaatcacaagcccagactctccagtggcaaagggcagagwttattttaagctccaagcaggaacacaaaaacaagatgtttaaacaacttttttttttgcagtttctgattagggcatgaaagttcttgtgttcctggaccagactgatccacctcttatttgtt

SEQ ID NO: 913911 - DNA, 597 bp, Homo sapiens
atgttttctaatgatagaaactgaaagataacaagttacaggaatacatatctttttgaaaaacagctcatatcattttatatgctcgtcttgatagcattttgattgcaatttccattatcctgtttcactgtaaatattatttgtaactttgaaatatttatcaactttgccaagttcccaagttcctcaaagcaacaattaaattttatttttgaaatgtcataaattataaaaagaaattatttcataaagctcatgggatcactgaaatttgtttgaataagaggtctgcataaatttgacagaaagggtccatttatttttctatcaaaattgacctttaagtttattataaaagtagaatgatacatttaaaagagaaactataatgtcatgtatatgcaaaaaactaatttaaattaacaaaaattaaaagaactgcattttttaataatgcagctgaaaaacagcatttcctacacgaaactaaaggtttccaataaggacagmcaatggatccctctatgctatggtttaaatctttgtgttcctccaaaatttatgttgaaaataaatctccaatgcaataatgtt

SEQ ID NO: 913912 - DNA, 633 bp, Homo sapiens
aatattaggcaatatctggttgagcactgatttctaaggtggggtagaaatactaagagyagaaagatagaatgtaatgattcctgcaaaatcctctcatatggaataggcctcccagataagggctatacagtttcagtttctagagagagaaggctggcaggtaaagataggagagctctgaaaaaatgaaggagttgttattggtggtggtggtggtgttgaggggggtatggtaagacactcactggtgggtctgaaatcactgctgcaattgcttcctttgtcaggattaagccaaggcactgagcagggctgagcctgcaaactgaagtccctcagttctacgcctgagcaaggtaagaaactgggtataactgatgcagtagacttgtgtgtgaactactgtgttatagaggagagagtagcccctgacctgggggagtcaagaggtttttcagaagtggcattttacccagatcttcaaagaaagtccaagtttcacatatggaagtggggatagacgagcaaccatctaacaaatgtatattaagtgtcaactaaaaacaatatgctaggcatataaagatgaataaattagagatcttactttcaagcagcataaagtctagt

SEQ ID NO: 913913 - DNA, 565 bp, Homo sapiens
tgtgaatgatggctgctgggaagggcccctgcccgaaatatttccatcgctcatccactgccaatgtgcttggagtctgccattccagagccatgccttcaccaagttcctatttcaaaatgcaagcacctcaaggcggcctaagagattatgtcctttatttctgggggaagggaacttttattttgatggatgccaaaactggtttgcatttcctgagtttaaagtaattctcttgcaggtgagagtagcctgctcagtgccaactgggagagcagaaccttccttccattcagtagttgggagggaactggggaggctgctggaggatgcctgctgctttatggagcatcctcggctttggctccaggtagacgtgggcttgaatcctggcagccgggtgaccttttgggatacactctgacttcctccttcctggagccaagtctctcatttccctgggacttagcacacacaggctgctggaatggcttcttccgraagaggagggatccagccccactgagtgggtatgtttcccaggagaggcctggaggctgatgcc

SEQ ID NO: 913914 - DNA, 555 bp, Homo sapiens
acattttctttgacacattgctttatagtttggcttatatgtttgttaatttaaaaataaataaataagaaaataatctaaaacattttatgtatgatttagttatatattgkgtgcatgaatatgtgccaaatgttgcacaaattctgttctattaaatgtggcttctgatcaagagaactggccactgaaattcaaactacagcactgaggttccgtcagcgaactcatagatttcaattaattgatcaataaaaagatcccagttaaagaagcacaaacctattatataattggtctgtcaaataaaattggctcaagagatatagtttgattaagtgaattaattaaccaattggttaatccaactatatgtcagccccacatatctgggcatcatgaatcatcaaattcagattaaacaactaatttatgaataaataaaaatatgacacaaacataattatcaactctgccaattttctttaaggattgctagtttcttttacttcaatgggccatagtatactgtgtacaatgattactatttgaata

SEQ ID NO: 913915 - DNA, 645 bp, Homo sapiens
tatctgaaggttatgcacaagaggtgcaggagcttgagccatctctcattgtttctaatagrcttatgaaggttaaggagaataatggctaattcacagttggtgctagttagtgggggatgacagacttggtagtaagttgaatttaaggttctgtcaaggctatgggagagccacaccagggcatttacatttggaagaaagattccaaggtggttttgaaagatgaagattcattaatgtcccttcctctcccacatctcccaaaatgtaaagtgttcctttccaccttcacaaatcagtagccataatgttatatttctccccagtcatctcctgtttacatccacatcttacatatggaagagtcaggtgcaacaagcacaaaatcatttttataaaacttaaccagaactatatatttggattctctagtctcccttttggtcaggctgtcaccttgagagtgtatcgaccacatcagcctagggctaccattggggggaaaatgacatatcatgcccaggaatggtcgggcagaatcctgaatattcagtatagggccttataaccagccccactccttttgtcctgattattattcagaaagctgctgagaggaaatgatcccattctgaagaaagc

SEQ ID NO: 913916 - DNA, 649 bp, Homo sapiens
atcatcactggtcattagagaaacgcaaatcaaaaccacaatgagataacatctcacgccatttagaatagcgatcattaaaaagtcaggaaacaacagatgctggagaggatgtggagaaataggaacacttttacactgttggtgggagcataaattagttcaaccattgtggaagacagtgtggcaattcctcaaggatctagaaccagaaataccatttgacccagcaatcccgatactgggtatatgcccaaaggattatagttcattctactataaaaacacatgcacacatatgtttattgtggcactgttcacaatagcaaagacttggaaacaacccaaatgcccatcaatgatagactagataaagaaaatgtggcacatatacaccatggaatactatgcagccataaaaaaggataagttcatgtcctttgcaaggacatggatgaagctggaaaccatcattctcagcaaactaagacaggaaaagaaaaccaaacaccacatgttctcactcataagtgaacaaaaatgaaattgccaaagccataacaattcygtgtaaaatgtgtgaaagttgagcagtgtttttttttttttttcttggagctactgttgtatactttgcaaactttttttt

SEQ ID NO: 913917 - DNA, 623 bp, Homo sapiens
tgctcctccttgccccagccatgtggaactgtaagtccattaaacgtcttttttttttaataaattgctcagtctcaggtatgcctttattagcagtgtgaaaatgaattaacatagtaaattggtaccaggartggggtgctgcttaaaagatacctgaaaatgtggaagcaactctggaattgggtaataggcagaggttgaaacagttaggagggctcagaagaagacaagaaaatatgggaaagtttggaacttcctagaggcttattgaatggctttgacaaaaatgctgatagtgatatgaacaataagatccaggctgaagtggtttcagatggatatgagaaacttgttggaaactggagcaaaagtaactcttgttatgttttagcaaacagactggtggcattttgcccctgccctaaagatctgtgaaacttagattgatttagggtgtctggtggaagaaatttctaagcagcaaagcattcaagaggtgacttgagtgctgttaaaggcattcagtttcaaaagagaaacagagcatacaagtttggaaaatttgcagcctgacaatgcaataaaaaacaaaatcccattttctgagaatacaagctggc

SEQ ID NO: 913918 - DNA, 583 bp, Homo sapiens
ttatattaacaaattaataaaggacacaaactatatgatcatttcaattgatgccgagaatgcacttgaaaaagttcaacatcctttcataaagaccctcaaaaaagcagtataaaaggaacttacctcaatataatgaaaatcatatatgacagactcacagctaatattgtactgaatgaggaaaaactgaaagcccttcactgcagatctggaccatgacaaggatgcccacagtcacgactgttattcaatatagaatagcaatcagataagagaaagatatccagccaaactaagtttcataagtgaaggagaaataaaatcctttacagacaagcaaatgctgagagattttgtcaccaccaggactgccttaccagagctcctgaaggaagcactaaacatgggaaggaaaaactggtatcagccactgcaaaaaacatgccaaattgtaaagaccatcaagrctaggaagaaactgcatcaaataatgagcaaaataaccagctaacatcataatgacaggatcaaattcagagtggacaggcaacctgcagaatgggagaaaattttcacaatc

SEQ ID NO: 913919 - DNA, 659 bp, Homo sapiens
taggccctaaaaacagggagagatggattgctccatcctcgtacactgggactgtgcamtgataggagtcatagtttttgctctatgagctcaagatttcttagtttcttttattctcagtcaggacttaggaactagcaaatataaatcaatgttgctacagtagggaaatgaaaaatgacagaatggggttttacttttctacctttagagaagcataaccaaagcccagttaatttgtaatctgatgaaaggtgagtttttgtgaggagcttggaggtagaatgttgtgcaatctgatttgggattaaaacccagttgttgctcttctcactatttcctcacagaataccatgccctctgtcttagttcagaatgctacatggactatcatatacttggtgcattataaacaacagaaatctatttcttacagttatgaaggctggaagtctgggattagtaggccagtgtagtccggttctgttgagagcccttctctgggttgcagagggccgacttcctgatgcatcttcatgtgacaggaagagagctagggagctcatttttataacggcactaatcctattcatgaaaacactacccccattacctaatcttcttccaagggtcccacttcctaataccatcacattgag

SEQ ID NO: 913920 - DNA, 640 bp, Homo sapiens
ctcagtcacttttgagaaaaaaatgcacgtttatttttaaaggaaaaatgaaaaagagggatattggaatgtagggatggttatgttgagaaagtttgcccagattgacttgacatcttggaaaatattttagttcatttgaaaggaggaatccagtgcttccagccaggacaatgaaagagagttctaagaaatttaaatgcataaaaagaaaaaaaaaagtaagagggggcaaaagtagagagaaaacaacaaaggatggtaatattccaaaccctagagttgcaattgtctttaccattggctatcttaccacacctccctagtatacattcatacattcatcttcactcacctttggctctccagtgatttccaatggattgcggttagagtcttgacagatgtgtccagtggtcttcaatcaggatcacgatgagagacaagccaagaatcccatttgctcttgctctgtttggaatatctccacattagcccaactttccattactgctactgactttagacttctggatgacaaacgtaagaaagaaagtgattctgttatcaagcaaggaggatcctaaagagctccttgttatcatcaccaagwtctgaaattatgtgctgttccatttgt

SEQ ID NO: 913921 - DNA, 511 bp, Homo sapiens
aaacattcagaacccagctgcagtgttctggaatcctatgtgacagaaaaacattccgaccacagcagcagtgttctggaatcctatgtgcggtacaaactttcagaccacagcaggagagttctggaatcctatgtgagggacaaactttcagaccccaggaacagtgttctgaaatcctatgttaagggcaagcatttacatcccagtgtgaatgttctcgaatcctaggtaagggacaaacattcagaccacagcaggagtgttctcgaatcctatgtgagggacattcagaccctcttagcagtgttctggagccctatgtgatgaacaatctttcagaccacagcaggagtgttctggaatcctatgtgagggtcattcagaccacagcaggartgttctggaatcctatgtgagggtcaaacattcagaccccagcagtagtgttctggaatcctatgtgagggcaaacattcagacccacgtggctgtgttctagaatcctatg

SEQ ID NO: 913922 - DNA, 522 bp, Homo sapiens
atatggcttcatttgtagcacggttgttgcaccgaggcttgtgcatgccaggcaaggccaagctggctcaaagagcaaccagycacctctgcaagggtgtgccaggaacaggtgggccaatcaccaacctcacatgctgccagtcacagtacatcagttcttctgccctagagttagggccccagtgccatctgcttttcctcaggactctgctccatcagccatcaggtggcagctactcatgctgttggaacctggccatctgggcttccttgagtgggtgaggttgctggcttgtccacctgcttaaaggtactatggggatagaacacaaataataataatgcatttttcaaacaaattaattccttgattttcaaacaaattgaagacaaaggaaactcatgattcaaatgaatacatatggctcattttattcaatatttatgcttacagaatatatgtaaataagacattcccatgattaatattagtatttaagactgataaacttttgggtgg

SEQ ID NO: 913923 - DNA, 416 bp, Homo sapiens
caggcttctgactcaggctcggtctttgcaggcacacactaccactaaattcactcactgataaaaatattcattttgtgcccattatataccagaagagcttatagctccagggacagagcagtgagcaggacatggtccccgagacattggggagacagcaaatagaggtacagatgagttcccccaaatctaccacatgctgttccctgcagacagccgcccagacacagtattgtgtgttatacctggaggggccataacccagttgggcctggaaaagttctgcagataaagcagcacctccagggagacttgcaggacatttaggaagaaatgaagtggcaaaagacactgtcatttccatcwatttactccatggccaaaatcaaggtatagagaaaggtcatcattaa

SEQ ID NO: 913924 - DNA, 673 bp, Homo sapiens
ccagttaagccaaaacatctgctctgaggcatgactagatggtttggaccgcaagatcagttaaaatcacaagacagtcactcaccrgcacttgggccagccttgggtgcagtgtccctggttttctctgtagactgttcctccctgcaggcatcaccccaacattgggtgcagccccacttcccagtccagatatgcagggagcaggatttaaggaggcactcgttctcccctgcctcccctgtatgtgccccacccagagcatgggtgcctccttgaactgtgcaccctggtcccctcacttccctcaccttagtgccagttccatcctgactctaaggtcaactggaccttaggtgccctaagaactcagtcttattctctgaggcccagcaaagtggggttcaccatgtgtctggccgtgacttcatgcaacatctgtgataaccaggattatattttgctcctgtcatgattccaagcacccactttccctgggaccatcctattttcacacttaatcctcacagtagccatgtgaaacggctcttatccttgctattcagatgaagctcagagaggctgtggaagttgctccaagtctcatcgcttgtggtgatggggctggggtttaaatcgagcatgaagtccagcctcctcttgtttcccagtt

SEQ ID NO: 913925 - DNA, 607 bp, Homo sapiens
tttaattggcttatttgctttcttattgtggagttttaagagtttttatatattttggataagctgccttatcagatatgtcttttgcaaatattttatttcagtcagtggcttgtcttytaaatttcttgacagtgtctttcaaagaagagaaagttttaattttaatgaaatccagtttattctttctttcatggatcattcctttggcattgtatccaaaaagtaattgtcaaacccaaagcccaaagtcatctacattttcttctgttattttctatgaaattttttttttttttgacatagtctcactctgtcacccaggctggagtgcagtggcacgatctctgttcactgcaagctccgcctcccaggttcacaccattgtcctgcctcagtctcccaagtaggtgggacaacaggcgcccaccaccatgcctggctaactttttgtatttttagtagagacggggtttcactgtgttagccaggttggtctcaatctcctgacctcgtgatctgcccgcctcggcctcccaaagtgctgggattacaggcgtgagccaccatgcccggcttctatgaattttaaagttctgctttttac

SEQ ID NO: 913926 - DNA, 607 bp, Homo sapiens
tttaattggcttatttgctttcttattgtggagttttaagagtttttatatattttggataagctgccttatcagatatgtcttttgcaaatattttatttcagtcagtggcttgtcttctaaatttcttgacagtgtctttcaaagaagagaaagttttaattttaatgaaatccagtttattctttctttcatggatcattcctttggcattgtatccaaaaagtaattgtcaaacccaaagcccaaagtcatctacattttcttctgttattttctatgaaattttttttttttttgacatagtctcactctgtcacccaggctggagtgcagtggcacgatctctgttcactgcaagctccgcctcccaggttcacaccattgtcctgcctcagtctcccaagtaggtgggacaacaggcgcccaccaccatgcctggctaactttttgtatttttagtagagacggggtttcactgtgttagccaggttggtctcaatctcctgacctcgtgatctgcccgcctcggcctcccaaagtgctgggattacaggcgtgagccaccatgcccrgcttctatgaattttaaagttctgctttttac

SEQ ID NO: 913927 - DNA, 653 bp, Homo sapiens
agaacaaatctatttttctgaagaatgttacaaaggacaggatgtagtgtgatgttaggggacattgtccggaatgtcattggagtggagacctagttttggcactctagaygccaaccttttcacttccagagcgctgtcttttcctttcctttacgctctctagagtctgctcccaactttgaaaaactttactaatccatatcctttgttgttttttttctgcctcctaaagcttatgcccccaaatctgtctctttgggattctccactgtgttgtctacctctctctctctctctctctctgtctctctctctctttctctctctctcactaacctcatcagtatcctagaactaaatgtcccctttaggggcatgattctcacatcagtgtctctaaaccactactcagttctgagatccagaactacatttccaattgcctgatcaatagattcacctacaaagcgcataggtaaacgacactcaagattgatagctacctcctcaaagcagctcttcctgttaggttcctatttctgtgaatggcaccattttcctcctaattctctgctcccaaaatgtcagtcaggtatgtcactgatttctctatttcttctcatctccgatttctgttgtactggttttcc

SEQ ID NO: 913928 - DNA, 702 bp, Homo sapiens
tcaggatgctgccaaactcacgaatccttgttgactyaattaaactctttggaaattaatttggctataagttttccatttaacatggtaatgtaaactatgaaacaagctgattatgaaagaaggcctggtataaaagagtaaaccttttataaaaaagaacttgttatgttattgttgatttaatattgttaaaattttcagaaatattttacaataatcagtaagctattttgatttgtggtttcacagtttatggttacaatgaccttgttaacatatcattttctcaagtaacttatttcttgaaaaaaaattttaacttttgtaaggatgtaataatagcacatacaaaagtgcactgacacccaaaataaacttcaagacttaaacaattaatctaacaatttaggcttcattgtcttatttataagaaatacagtgtgaaaatctggaagatacaaatggcagaccaaaaacttgtgttaccgatcaaaatataatgtctattattataacataataatatatacatataatatatttatataataatgtaaataatatacattatttcctttaaaatcaatatataaccacaaatttttactgggccaaactgttggataaatgaattttcaaacattatctatcctcctcattcactttcattcagtagtgtgaaggtcctgagggttttaa

SEQ ID NO: 913929 - DNA, 646 bp, Homo sapiens
tgtattttggctaagttttaggaattagacaaaggcagtaactgtttatacctctagatgaaaaatgggcaatagacatcaatatggaaatcttcaataycaaaattacactttaaataacttaattaggaagaagtgtgtgaattatggtgttttaatattattcataatacttaatctaatgacttaagtatatatgaatatagttttggttaattatactatgatatttagggtataatgaggactaagttaagccactaatgacaaaattccacacagcaacaaaataactagaaacaataattaaacaacatcaaatttatatctcatgtagatctctagatctgcatgatcatcattgagatgatactctatggtatcaaagatccatactcaatttatcctatcgaatctctgtgcaaaatcttcccttctcaatgttgtctcctagtccaagacaaatttcccaactgcagataaaatatctgcacttaaccatcaagaataagaaagaaaagatgaaagtattctccctttgctctacttctttttttctatttttttttattttggaacaatcttacacctatagaaaattctaaaggtagtatagagtttccatacaacccacgctcagtttcct

SEQ ID NO: 913930 - DNA, 608 bp, Homo sapiens
gaaaagaggtttgactagaacccttgtaggaaaagaaagcgggaacataatctcaatatagaaataatctaaagcaaggawcttttgttttggcttgggcaatttgagaggatataatacatgctgggtcagggctatattcagaagtgaccattaataatgctgacgtgacccttgaaagccaactacacttctctagcaactgtattcccaacaagggatatggggagaaagtcattgcccccattttatgggtttaaaaactgacacctctagaaaggcagtagataagacagccacttggtgacagagccaccctgaagcctgtgagggtcactgcaaccccctcccctccaatccctccctgggtaggtcagctcacatttcagctccggcccatccacttccactttgtttcgaagtctcggctgcccgcttgggttcttggtggccccaaggaactcatagagcaagttcttctcggctggacatgtaggtttcttgggcggcagggtcagtgatgcggtgcccactgcgtcacagcaaccctcctcaccacaggcgtccttctggctctggggccactggctgagaaagaggctcccttg

SEQ ID NO: 913931 - DNA, 622 bp, Homo sapiens
ttaaggaagaatgaaacgagtactttgatgacactgttgaacygctgaatcaaaccagtcttgaagcttgcactacatgtgacccattcagatatacaagacagtaaatactcttacaagacaagtatatacaagacaatacaagtatatacaagacagtaaatactcttatttaaaatacataatacagaagggagataatgttcttaaatactagccatcaattaagaaaataaaacagtaaaacctaatgctaggtatactcaggaagacttttggagtacagggagagagaatcaggaaggcaaacagaaaaaaagattacaccccatccccaccagtagagactcaattattgcccaggaagcatcctgagggaagaccttaggatggatcctgggccctgtctgagtcaaggggcaactagccaagtgtgacagataagcaatgaccagaattttggcatggtactaacaggtcagtgcagaactccaagaagggccaaagttaagcttcctgccacctgggagggatggggacatcaaaatcagagtttaatatttcaaaaatgtgaaatgttctatttattgcatatctgagtttacagactaagattcaaatc

SEQ ID NO: 913932 - DNA, 622 bp, Homo sapiens
ttaaggaagaatgaaacgagtactttgatgacactgttgaactgctgaatcaaaccagtcttgaagcttgcactacatgtgacccattcagatatacaagacagtaaatrctcttacaagacaagtatatacaagacaatacaagtatatacaagacagtaaatactcttatttaaaatacataatacagaagggagataatgttcttaaatactagccatcaattaagaaaataaaacagtaaaacctaatgctaggtatactcaggaagacttttggagtacagggagagagaatcaggaaggcaaacagaaaaaaagattacaccccatccccaccagtagagactcaattattgcccaggaagcatcctgagggaagaccttaggatggatcctgggccctgtctgagtcaaggggcaactagccaagtgtgacagataagcaatgaccagaattttggcatggtactaacaggtcagtgcagaactccaagaagggccaaagttaagcttcctgccacctgggagggatggggacatcaaaatcagagtttaatatttcaaaaatgtgaaatgttctatttattgcatatctgagtttacagactaagattcaaatc

SEQ ID NO: 913933 - DNA, 632 bp, Homo sapiens
attctatataccaagatacatgtcttttataataggaaaagaaagctatttttaaaaaaatttataaatgcacgactatgaatgacccctttgaacagtgttttcagtggtcactcctctccccacaggtaaagtacccctgttatgttacacaaatactgatccaccttaggcatccatcaagacgccaaaagcaaaagatagccctcagttcccattttatataggccttctttgttagtcttcctctctctgctgtgatcaaccaaactagggaggaggctaagttagcctattctttcattgctcacaattactgttgtgagccaatcagtaaatcccaagggtgttctttgggggtgactgggacagccaagggctcacaagttttaaaagatgacaactgatgatagagatgaagagaaaaataaaatggacccatcacgctacaccagtgggaaaataaaagaatattctacatgggtggcatccactcagagcrgcaccaaggaggaaaagctgttcatggttcgagtacagatggaatgaatgaactctgaactacaaatgaggaagcctgaggcttcgattctgattctgcctctaatgaccttggagaagtcaataaactt

SEQ ID NO: 913934 - DNA, 628 bp, Homo sapiens
taatagccagcatccataaggaacttaaataaatttacaagaaaaaaccaaacaaccccattaaaaagtgggcaaaggacgtgaacacttttcaaaagaagacatacatgcagccaacaagcatatgaaaaacagctcaacatcactgatcattagagaaatgcaaatcaaaaccaccatgagataccatctcacaccagtcagaatggctattattaataagtcaaaaaataacagatgttggcgaggttgtggagaaaaaggaacacttatgcccctttggtaggagtgtaaatttgttcaaccattgtggaagacagtgtggcgattcttcaaagacctaaaaacagaactaccattccacccagtaatcccagtactgggtatatacccaaaggaatataaatctatcaaagacatgttctgtcaaagacacatgcatgcaaatggtcattgcagcactactcataacagcaaagacatggaattggaactcgaaagaggcagggctcccgcttktccctgtctcctgcctgcttcctggagggggaggcccaggtctgcagtggcaggttcggcagctgcagctgcacctgggagagcagatcctgactgttcccagctcccc

SEQ ID NO: 913935 - DNA, 667 bp, Homo sapiens
cacattaactagaaaatttaaaagaaatcgataaattcctggacacatacaccctcccaagactgaagcaggaagaaaatgaatccctgaacaaaacaataataaattctgaaattgaggcagtaataaaagcctaccaccaccaccaacaataaaaaaagcccaggacccagtggattcacagctgaattctaccatatgtacaaagaatagctggtaccattcctattgaaactattccaaaaaaaaactgaaaaggtggaactcctttttaactcattcagtgaggccagcatcatcttgataccaaaacctgacggagatacaacaaaaaaagaaaacatcaggccaatatccttgacaaatgttgatgcaaaaattctcaacaaaatactagcaaaccaaatccagcagtacatcaaaaagcttatccaccatgatcaagtagactttatccctgggatgcaaggttggttcaacaaacacaaatcaataaatgtgattcatcacagaaacagaactaaagacacaaactacatgattatctcaatagctgcagaaaagattttgatcaaattcaacatccattcatgttgaaatctcttgataatctaggtattgaagaaacatacctcaaaataatgagygccacatatgataaacccac

SEQ ID NO: 913936 - DNA, 619 bp, Homo sapiens
gacaaaaaaatactatttggattctcattctcttcctcactttcaggtctttccttgagagctctttgtcacacaaacttattaattcaggctttaaagacagactgtagaactaatatactatgctggtgataaacataaagactttgaaatacaaatagtaatcttttccatttcaagagtatgcttattactggtcaagatttggccaattcaatgtacttagtttaatgcttattttactgggaacttttgaaaacggtctaagaatgattatttgaaatttataaacattatttatatataaacattattcacatatattacatatgtatattcatttatataagaaatgtataaacattatttacatatataaacactatatatatgccatcatgctaccaagtcagtatcacagttggtctgcctgttaaatattctcattctcaatgcactttttaatgcatttttaataatcaatgatcacactaattattcatgtgtgatttatttgcttatttaactgctttgcttatttaatctccactaaagacaagaataaaacactgcctgtaaaaccctatccccatakggactgtcttatttacagggcctg

SEQ ID NO: 913937 - DNA, 625 bp, Homo sapiens
tttgcttattggtttaagctccttatagattctggatattagaccttatgttgggtacatagtttgcaaatattttctctcattctgtaagatgtctgtttacggtaatgatagtttcttttgctgtgcagaagctctatagtttacttaggttccacttgtcaattttcgtttttgttgcaattgcttttggggacctagccaaaaattctttgccaaggccagtgtcaagaagggtatttcctatttttttctaggatttttatagcttgaggttttacatttaaatatttgatccatcttgagttaattttcgtatatggttaaaggtaagggtccagtttcaatcttctgcatatggctagccagttatccagcaccatttattgaacagggagtcctttccccattgctcgcttttgttggccttgtcaaaaatcagatggttgtaagggtgtggctttatttctgagttttttgttctcttccagttgtctatgtgtctgtttgtgtamcggtaccatgctgttttggttactatagtcttatggtatggttcaaagtcagatagtgtgatgtctctggattttttgtttttgcttagaattgctttgactatttgggc

SEQ ID NO: 913938 - DNA, 587 bp, Homo sapiens
caaaattcattctataattcactctgaaattgacagcattgtcctagatggatggcatgcttggatgacagcacctaaatcttacctagagattcaaggtgagaaggtttttgaacccttaattcatgttcaccttgtaaagaaggatgatcatccttctactgtttatattaaaatgattagacttggtaatctttaaaaccacaacaaaagctggacttctttccaaagaaccagaacgctttacctctgactttgtcttctgctaattcccttcctggtcattctgctcaagccactctgacttccttgctaatcctcacacactgcaggcactctccccacttggggactctgccaaggcagatctctctacttttctcccaggtgttcctgtggctcaatcccacaccctcttctctgtctccttctcagtgaggcctactttggtcagcctatgtacaagcattctttttgcttyctatgatgctctacattttttcttttgtctatagcacttataactttataatctactagagaatttacttatttattatgtatattacttagtcactcctctaagt

SEQ ID NO: 913939 - DNA, 602 bp, Homo sapiens
aacttaagttggtcttcagcaccaccaagcaatccttttgtgttttagctccctcctttctccaatgcagaattcacatttgccattcttcaagcctttactctatcctttgtccctctgtgccctgcagatggcactgccttctacttcccagagaaaactgaaattggctcagttctgctccttacctgcaaactcagctacagctgcatccatccttactctccttggaggaaggtgcttccatctcctatcctacagtcatcatcacctggagctacaaccttttctttatggctcaatgcctgcttctatgcagtaagcccctgagatcccacaccttatttcttcaggcacaccatctactacatagcaaatatagtactgattttaactgcggcataaaaatggaggccccttgaatggtctctcccagatggaactgcatacataccagttcctgtgactccttcaagctcagtgctcctacgtgaattatcacctgatccagcctgcaaaagaaaaaacamtgctgcatcgcttagagtttagaggcatgcagaagggctgcactatcctggtttgtgctgattttagcagtt

SEQ ID NO: 913940 - DNA, 568 bp, Homo sapiens
cattctgacatatgctacaacatggatgagccttgaaaacattatgctaaatgaaggaagtcagatataaaaggacaaatattgtatgattccacttatatgaggtacctggagcagccaaattcatagaaacagaaagtggaatagtggctaccagaggctgggagaagggagggaggaggagtgcagagtttcagttgatgaaaaaattctggagacagtgatgatagctgcacaacaaggtagatgtatgcaatggcatcaaactgtgcacttaaaaagagttgaaattgtaaattttatgtatctcttaccacaataaaaaactgaggcagagatgataatgtaccagttccaaacctagaccacaagagatcttgggagcttttgcttgtgctgttgtgcctttgccattatattagaaagtcatgccgggactggcctgaygatcccaagaggaagatgagagaaatgtggagaacagtcaagtcactccagccaaacccagcttagatcagctgaactaagtaagatcagtaagaacaattgattgttgttttaagtcacc

SEQ ID NO: 913941 - DNA, 705 bp, Homo sapiens
gctggctggtagaaattaacatggtatatagcataactgttatcatttttatcttaattaattttatgagacatttaacatgttcacacatcargccaaacatctggggctatatggatggtggcatttatccaactgtttacacaccctgctttccaagtatcagccatgctcactgggtcccatccacttgcaagcttagtaaggcagaggccatacaacccccatctccaagctctgtgcttatgggtagaggagtgtccttatagtctgagacatcaacttgaattttcctcagagaggaatcagatgtaatgaaaagagcatccttttagaagtcagcaaaagaggcattagccctggttttaaaatggactgttctatgatattgagcaggttcttaaccccattggccttgcttcctcatctgggatattggtggtggcggcagccatagcaaaagtaataatttctgccctgcttagctctcagggctgcagaaagaataagataagactgtgtagcaaagctctagaaactgagtgtgtttcacaaattgttcatccaaaaatattaagtgtgtagatgttccaggcattgtgcttagctgtttatataatagtgaacaagataccccctttctcaccaaggaatctagtttgggtgataaaaaagcattttttaatattgtggacttaatgctgt

SEQ ID NO: 913942 - DNA, 567 bp, Homo sapiens
tgttcttgaactttatagaaatggaatcatatagcattttttttttgttttccatgtgactttyttcactcaacattatagctatcaaattttaacaggaatgtttaaaacaacaaataggtaatattttaattgataaggcacagatggataattaatgcctaactgcattgttaaatacacaatccaaaaaaagcactaccttgtggtagctattttctcatattttattttcctcctaatgtggcagcctcagggcggtgcttcagtgagcaaggggagcatctcatagccttttcttacttagccttggggattaggcagtgtcacatcagtcacattctatagttacaaggaagtaataaagttaccagattcaagggaaaggaattagactccacccttgaagggagtctcaagtttctagaacagaagctggcaaactctctgcaaaagatcaaagagtgcgtattttagactttgcaggccacatgcaatccctttcacatattatttttcaatagaatacaaaaatcttggttgtgggtagtaaaaaaaaaaagcaaa

SEQ ID NO: 913943 - DNA, 581 bp, Homo sapiens
ttctttttgaaatagagacatcagcataatgacgtctgcttcaagttttctcggttaggggggartttgagtttcaatctttttgacattctttacaaaatctcttgtgctcatcaaatagcagcatttgtaggatgtctagaatgtgtaaaatttgagcaatgataattagaatctgaaagggaaagtcacctttaaaaaaaacaaaaataatgagaaaacgttttcctttttcatggcccagacctgattctgtttatacattcattgtgagtatttattgttattgaactaaaaaagcttactgctgattgagtttttcctctcatcttattgattgtaaggaaaacttaaaatgactactaggctgccaaaaagtctttattgttaactataatttgttagcataataaactatgaatattgcaagctccaatttccaaaataagcataaaagatgactgaatacaaaaaggcaactaaatagaatgatacactgcactgataattggagaaaacactctgtttgaaatgtattcacttcagaatgagaataaaatcttacaaaagtagactgcttc

SEQ ID NO: 913944 - DNA, 607 bp, Homo sapiens
atgtaatgctttgcatttgtttgtgttgtctcttatttccttsagcagtggtttgtagttctcgaagagttccttcacatcccttgttagctgtattcctaggtatttcagtcacattttagtgattgtgaatgagagttcattaatgatttggctgtctgcttgcctattgttggtataaaggaatgtttttaatttttgcacattgtttttgttttctttaaatttattattcattttcaggaaggtttcttatagccttaaatataaaatatatctgagtttcaaggtgggagatggcattttccaatctatcgtttgttaactcagtctaaggtagtggttatcaaaggacacggatttttccccttggaattttggaaatatggggagacattttgtgttatcttggtgattggggggagttatattggcatgttgtgggttagaaccagggaaactagattttctacaaaactttgatatgtttcactaggtaattatttgactagaaaatacttagaattatttgatcctaaaactgaactccattttaaatataccacaaagtaattttgaatagtttttcgtatacactgttttcccc

SEQ ID NO: 913945 - DNA, 456 bp, Homo sapiens
gattcagacctaggcagtcccactccagagctgcatagctactactactattattactactacttggagcattacaaaggctctaggcaagttaatgcagtttaaaaaagggcatattctctacaatctctaccactctaaagccaattggcttcgcttcggccctggcaaaagtattatttgttgggactatttgttggaaagatagtgtaatttctggttgtcaaaaccacaaacacacatgaaaataagtatcatcaacgaaatcgtcagttcaagaaatttatattcaaaaattttcttaagaatacacatgattttacaagatcattcatcatagcaccaagcctaatattccttaatagaaaacagtcaaataacaaatactccagttaattcccacaggtataaattatkcaaatagccatttatatcttaatttacagtaatcaataa

SEQ ID NO: 913946 - DNA, 397 bp, Homo sapiens
gtcaaagccattcaacaagtctctaggaagctccaaattttctcacatcttcctgtcttcttccaaaccctccaaactgttccaatctttgcctgttacccagttccaaagttgcttccacattttcaagtatctttatagcagtaccccactcttggcagtaccaatttactgtattagtcaattttcatactgctataaaggactggctgaaactgagtaatttataaatgaaagaggtttaactgactcacagttcagcatggctggagagacctcaggaaacttaatcatagcagaaggagakggggaggcaggcaccttctttacaaggcagcaggaagaagtgccaagcaaagggggaatagctccttatgaaaccatcagatctcatgat

SEQ ID NO: 913947 - DNA, 602 bp, Homo sapiens; identical to SEQ ID NO: 913125

SEQ ID NO: 913948 - DNA, 588 bp, Homo sapiens
catgctctgtaatgagcatgagcatrttttactcaaaggagtatacatcctctcttctttctagaggatttgaaattgttcttatcaattggggctcagggattcttcctttaagtaccccctccgccatgcaaaaaaatggaagaatgtactacatcaatgctttaaactatttgcagagaagaaaagggtaggaaactcatggtcctgaggttgttgggaatcactctaactcacctgaatgacttttctattctttattgtttcctttgcccttccctaacttccactgtcttttcttctgtttccgtgtttgtagcatgaataaaaagcacgtatctttcttttttctcagtctggacatttctcaatttaatgttttgtatgttttgaatgatctagcttccctgaatgactgtaacccccacaaaggcagagaacacacaagcctatgtagcttatagcatgtggtagaaactcaatagatgtgttcaatgaattattgaggtaggcagttatcaagttgtaattacaaactatacctgggtaagagtttggttccctcttattacacatgtctgacattac

SEQ ID NO: 913949 - DNA, 628 bp, Homo sapiens
attccatgtatttttaatgttcttaagtgaggaatatgtataatcactgtacttttcattgcagtttgtacctttgaatagyagaagagaaactggactgaaaactaggaggttttcattagttatagtttcagataagtggcaaatcaatacatcgtattatggcaagatattttggaaatttgaataaaatatctattttgacactataattttttttttttttttttgagatggagtcttgctctgttgcccaggctggagtgcagtggcgcgatcttggctcactgcaagttccacctcccgggttcccaccattctcctgtctcagcctccgagtagctgggactacaggtgcccgccaccacgcctggctaatttttttatatttttaatggagacggagttttaccatgttagccaggatggtctcaatctcctgaccttgtgatctgcctaccttggcctcccaaagagctgggattacaggcgtgagccaccgcgcccagcctcgacactataaattttaaaaaaatgagtgggtctatttaatctgtgatgggcacacttactttttgcagatgaagcttcatttgagatcttgagatcactttcgggtatgcagagg

SEQ ID NO: 913950 - DNA, 640 bp, Homo sapiens
gagaagtctcagatgttttgaaacaaattttggctaaactcttaaaacatgarcaagacgcaagtgtctcaatatattgaattcctcatttattcgtgacaatgagaacttcgtggtgatgagaatgtgatttaactattctgagtcccaattttgcactatgtaaaattgagatggttgagatggtaacagaacttgccttataggattgttgtgaggattacatgcaatgatgcaggcaaatgcttcacacaatgtctgagacatttggtgcatggaccaggagctcaatacatgatatgggactttaattgttatcattgttattgttgtttgactttaatcttaaagggaaaaaattgtctcctttctcactcatattaccaaattggtccttaatttagggggaatcttttaataggaaaattaacaaaagatattttcttatctcatgttctttttgaaaattgtctagttatccatttagattttggcttcaatccataacaaaagattgtaccataagtgcattagaattactttctaaacctaatctgccaaaaaacctagcctgctaatcaacattttcaataacttccaattttcactcacactacaacccaggctaatatttttattt

SEQ ID NO: 913951 - DNA, 531 bp, Homo sapiens
ttacatttatggccaagcaatkttttctacaagagcactaagaaaattcagtggggagaaaatagtattttcaaaaactagtgctgggaactgaatatacagatgtaaaagaataaacatgaactctcatctcacactacaggcaactcaaagtggactgcagacctaaatattaagagttaaaactataaaaccctttataaaaaaatagagaagtaaatttttgtgattttgctttaggcaatggtttcttggatatgacaccaaaagcacaagttaacaaaagaaaatatagataaattgaacttcacaattaaaattttttttgcttcaaatgacaccatcatctagaggtttcatcattcactcacatgtctgcctcagctaaagctgttaaccagagaacctacatatggccttcctttgccttgagcttctcacagaatggcagctggattctgaaagaaaatatcttaacataaatcttccagagattgtgtgccaagagccaggcagacactgcatggcatc

SEQ ID NO: 913952 - DNA, 636 bp, Homo sapiens
attaatataaactggaaaactgtttaagctcctgatgacaaagccacatgtgagactaatttatgctgaatcactgggccaaggacccaggtatcagcattttttaaaactatagaggaataaccagggttgagaaccactgcacaaaatggtacatgcaacttttatttaagttattttttttaaataaataatggttgaatcgatattgatcttagtaccaagtcatggcaattttttcagacttagagaattcatcctggcattgagattattaaagaacctagaaatccaagtgtttttgtttatatttttcctgtaaatattagagtatgctagtgctcatccttatttgataattttggaaaatatattaaacatttgagattgaatatcaaaaatctctaaaagaattttagaaataccattcttctatgaaataagtaagctcaatcaagatacatattatagtgcccatttaagaaagtctaataataatgcttgcactgcttaaagattaggttgataaattaattattgttaatcctacttgcataatcaacggacacctagsgatggagtcttaagtatagacacagaagttgaatacttttaagaacttttaaatttacatcc

SEQ ID NO: 913953 - DNA, 638 bp, Homo sapiens
agtctgtgtcttttaattgaggcatttagcccatttatatttaagtttgtgtgtgaatttgatcctgccattattatattcactggttattttgccccttaattgatgcagtttcttcatagcacygatgttctttacaatttggcatgcttttgcagtggctggtactggtcgtttctttccatgttcagtgcttccttcaggagctcttgttaggcaggcctggtggtgacaaaatctctcagcatttgcttgtctgtaaaggagttcatctgtccttcacttatgaagcttagtttggctggatataaaatccagggttgaagattattttctttaagaatgttgaatattggcccacactctcttctggcttgtagggtttctgccaagtgccgctgtttttctgatgggcttccctttgcgcctttgtgggtaactcgacctttctgtctggatgcccttaacactttttccttcatttcaaccttggtgaacttgacaattatgtgtcttgggtttgctcttctcgaggagtatctttgtggtgttctctgtatttcctgaatttgaatgttggcttgccttgttagcttggggaagttctcctggataatatcctgaagaatgttttccaa

SEQ ID NO: 913954 - DNA, 667 bp, Homo sapiens
ggctgctcccaatttctgcctccactttaaaaacactttgcacttactagtgttattccaggagagccagttaatagtttaatgaaactagttagagtttaaaggcagcaaatgggataatttaaaataatcatcccatttttattgatggttctcaaatctctctccagatctgacattttgccctagctcagacttgcacctacactttctattcagactaacgtcctccatagttttaggacatcaccatcccaacttgggcactgacagcccacaggccacatcctcctcaagtagcaactcatgaacccagagaactgactgaaatagttcagtgtttcttgagctccccaaggccttcaggcttctgtgcagagtggaagtggtagtggtagtggcacaagtatgctaattgccacagtacactctccaaggtaagtgtaaccgggcccattctacagataaactaaaggttaggtaaattaaatctcctggcccatccacatctaatcatcatcagggccaggattcaagtccagttctaacaacaaaagccatgccaatggtaacagagtgygtgtgagctgctaagtacttctgtgtattaactcatgccattaaagtccgtagatgccatagggtgacccagagccacactgggtag

SEQ ID NO: 913955 - DNA, 608 bp, Homo sapiens
cataggattctttgagccatttgccctctcaaaatagacagtaagtagacaatgagtaggtcctcagaaaagccactcctagttttggtattttgtggattctttatttggatgacacacagggcatcagttcctattggccttttcttgaataacttgcttacaaaggagaaggaaatgctgcttaaaccacaattgccttccatggagagcagctcttcataaataagaaaccctttgaatctgctgcgtaccttgatgagtttggatatgcaaaatggacccagagcaagatgtggaaagaaaggcagggaagagttgaattgctccgcataactaaaaagaaaaattggaatttgtcaggagaacccaggaaggatgaggatgagaaaaaagagagaaggctggagagaagaaccagcaatttgaatgaggctgaggctctatgtggggtgcaatggccagtgaaaaatctcagggatgggaaggcagaacttggatgactattttcatatgtggctgtgtgctgttgcaataaraccgtctccatcctcctcttaagtctactctaaaatcttctctgcaaactttcatgaataagtggggat

SEQ ID NO: 913956 - DNA, 623 bp, Homo sapiens
ttctatgaagccagcatcaccctaatacmaaaaccaggaaaggacataaccaaaaaagaaaacaacagaccaatatccctgatgaacatagatactaaaatccttaacaaaatacttgctagccaaatccaacaacatatcaaaaagataattcactatgatgaagttggagaaatggaaactctaaaaattataatagtaacaaacatttgtttactatttttaagtgcatcatatcaattataagacaaacattagcaacccattaaaggattgttattttaaaatatactttagcaaaaaatttgaagcttacacagattagaaaatatgctcaatgtcccctagctagtgattagcaaacctggtacttggacccaaagtcctgagttcagggcccaactcttaaccaccctgctgtcaacatctgggctgggtgcaggggctcatgcctgtaatcccagcactttgggaggctcaggcgggcagatcacctgaggtcaggagttcaagagcagcctggccagcatggtgaaaccccgtctctactaaaaatacaaaaattagctggacgtggtggtgcacacctacaatctcagctactcaggaggctgaagcaggag

SEQ ID NO: 913957 - DNA, 637 bp, Homo sapiens
tcaaagaaccatctcctggttttgttgactttccctattgatttcctattttcaagttcattgatttctgctctaatttttattatgtcttttcttctkcttagtgtgaattaaatttgctctttctccagtttctatgctctgcctatttgcaataaatatttattatttatagtaaaataaaattttaccttaaagtaaaaagattagtggttgccattagaggttggagagaggagaaggatgaagagatggaggacttattttaatattgccttgcaaggcaggtctactgccaacaaattctctcaatttttatttgtttgaggaagtatttctcgcttcacttttcaaagataatttcacagagtagagaattctaaatagatagtttttttttttctctcaacactttaaatatttcactttactctcttcttcttttttctccactctcttcttgcttgcttttttcttgggagagattgatacaattcttatctttttcccctcagaggtaagactttctttttcctttcttttttcaagattttttctatatctttgattttatgaaatttgaatataatatgtctatgtgtagtttttaagggatttatcctacttggtagtctct

SEQ ID NO: 913958 - DNA, 637 bp, Homo sapiens
tcaaagaaccatctcctggttttgttgactttccctattgatttcctattttcaagttcattgatttctgctctaatttttattatgtcttttcttctgcttagtgtgaattaaatttgctctttctccagtttctatgctctgcctatttgcaataaatatttattatttatagtaaaataaaattttaccttaaagtaaaaagattagtggttgccattagaggttggagagaggagaaggatgaagagatggaggacttattttaatattgccttgcaaggcaggtctactgccaacaaattctctcaatttttatttgtttgaggaagtatttctcgcttcacttttcaaagataatttcacagagtagagaattctaaatagatagtttttttttttctctcaacactttaaatatttcactttactctcttcttcttttttctccactctcttcttgcttgcttttttcttgggagagattgatacaattcttatctttttcccctcagaggtaagactttctttttcctttcttttttcaagattttttctatatctttgattttatgaaatttgaatataatatgtctatgtgtartttttaagggatttatcctacttggtagtctct

SEQ ID NO: 913959 - DNA, 562 bp, Homo sapiens
gtggggtgaaaaacaaaccctttctgttcccaccacaccatcctcatctcaaccataggattctagggcatgcaatctacagtttgagactgaaggtaattgggaaaaaaaaaaaaaggagaggagaaaaaagggcaagggaaaaaaaacttcctgttgagcagcagttcctctggcctgcgcgtctctttctcctctttgcagtacaatgggttgtctgatgtgtccatgcttaaaagagggcaaatttggactaatttgagtcaaaagacagtttactttatttctataagaagggggatgataagcaagctggacatgtgtcatttttcaggatcgggaaaacgtaatgcgctgagggagaagcatatactctcctaagtgttctccaaactaggaacaatctttaatttttttgtaattgcattcgtcaacttactttatacattttaattttgtttagaatttgatttcatctgctacttgtttctttttttttttcaaaacagtctaaygcttccaattttctttctctttttaatctcaaattaaggccagaaag

SEQ ID NO: 913960 - DNA, 618 bp, Homo sapiens
caattaaatcttgataataaaaaatagaaaaaagtactactgtagcggtagtgctaataacttcaaaaaaagtgtattgaacttaagtactttgtattctacaatrgtgctgttcatcaacatttatatatcacagtttaaattaaattagattgactctcaattacctgtttctgagcaaactggctttgacaattcactattatatcaatctgcaaagtgatgtcataatttagattagattttttaatgagaatgatgctaggaattattcttcactttgcaattctaatttccattctatactggttaatttccttactagcattggttaagttatacagaacaaaatagaagaagaagtgaatcctagtgctgatgtctatacaattttatcacaaataaattagcattttcaacatagatgagtcatttgaacacacacacacacacacacacacacacaaaacagaaaactactggttaagtagatattaaagaggatgttttaacttatacatatgatttgaaaagtggctatcataaaaatgtgctgatggagttgcccttgtatatatatattttttaaattgacacagaacacttttcgttatttgt

SEQ ID NO: 913961 - DNA, 600 bp, Homo sapiens
aagttgaaagctttccctttgaatgctgaagcaaatgccatagtatgatggcattcctatcaaactatgacattctttacataattagaaaaaattattttaaaattcatatggaatcaaaaaagagctcgagtagccaaggtaatcataaacagaaagaataaagctggggataccatgttaattgacttcaaactatattacaaggctgtggtaaccaaaacaggatggtacttatacaaagacagacacatagaccaatggatcagaatagagagccaagaaataattctgcataggtacaactatctagtcttcaatgaagctgacaaaaacaagtagtgatgaaaggactccctattcaataaatggtgctgtaatacctggctagccatatgcagaagttgaaactggacccctttcttacaccatatacaaaagtcaactcaaaatggattaaagacttaaatgtamgacccaaaactataaaaaccctgaaggataacctagataccattctggatgtaggacctggcaaagatttcatgacgaatatgccaagagtaattgcaacaacaaagaaaattgacaaatggcgcc

SEQ ID NO: 913962 - DNA, 557 bp, Homo sapiens
cttgagctcaggagcctgagaccagcctgggcaacacrgtgaaaccccatctctaccaaaaatacaaaaaacttagtcagctgtgatggcaagctcctgtggtcccagctactcaggaggctgaggtgggaggatcgcttgagcctgggaggcagaggttgagtgaactgagattgtgccactacactccagcctgggaggcagagtgagaccctatctcgggggggaaaaaaaaaaaaaagtgcctctctgatccctgatggcagagagcataactgactagtggccccagctactgcactctgaaatccatcattttattcacactgagcccatgcttcccaagggctgtccttagtcaaggactaaacatggcagaaataccaaggcgggcctgttcctgggagatggaagactcctttgatgggtaacttttgctcaaggctacaccactggtgttaaacattcttagaagtgccctgcattctcaggctctttcactcaccttccctttcttgcttctctccctcacaaaggcaggtaggcattgtggtctc

SEQ ID NO: 913963 - DNA, 628 bp, Homo sapiens
ttttgggggtgagattctagattcctactccttctgcctctgtgctctcaccccccagaaacttcctttccttccttgaacttgcctctggtaatagcacccaggataccgcrtatgagaacaatgtatgtggccaacacgtgtagagcagctcacaggtaactgtgtgccaggcactgggctacgaacttctggatgtttttttcaggagttccacaacaattccttcacatgtattgttacacagacacgccaagacacacagaggaggcctgcggcttagggtgttgagaatttgcctccctccctcactgacagcttctgaatcctcttgggacccatcctcaggacaagagaaggccaattcttctccatccagattatacaaggtgggaaccaggaatctgcatttgtagcaagtcccctggccagtcattgttctctccctggggaaactgagtcttgaggcagggggtggtggtatggtttggctctgtgtccccacccaaatctcatcttgaattgtactcccataattcccatgtgttgtgggagggacccagtgggagataattgaatcatagtggcggtttctcccatactgttctcatggtagtgattaagtctc

SEQ ID NO: 913964 - DNA, 664 bp, Homo sapiens
attctagtttacaaactctaatttcctctctgtctaagtttctattaaatctttctgttgaattcctaatttcacttgttatatttttcagacctatacattccatttgatttttaatatagattattagtacctgctgaaattgtttttctctcttttcttgaatatagttattctaatgtccctgtttaataattctaatatctgaatcatctgtagctctgtttctgcttggcttcggtcactagttttttcttttttttaacatacttcatacattgtagttggacgctggaccttgtgtattgattccattaaaattatagagagtctgtatggtgttatcttctttctaagagggttaagacctcttttggcagcaaggagtacttgcagatcaccttaatcctgttgaagattgattttggagctgttttatttcattttgtctttacttctaggttatagaccttctgatgtctcagctgagagtctgggatgtttaccaaggccatttgacattggcaggccttaaattcctatctttgcctcctcagtaccacaatatttccagctgctagtttctgacagttttcgtgtacagcctagaaattggccaaagcctcaagtggcrtttgaacagatttccaggctgatttccctg

SEQ ID NO: 913965 - DNA, 579 bp, Homo sapiens
tagaaagacagctcatttccttaatctatcaagaaattttcaaaccaataagaaaaaagccaacaacttaaattgcaacatggataaaggaaaaatacttctatcgtataatcattttgtattttaaaattatatacatgtaaaacttttgaacaaaaaagtagaacatcattatcctgtgataaaccgcctctctatatatcttctcagatcttttttatgactttattttttcacaaaagatgaattatattttatgataatccattttgtcatctaacgtcataaatatctttggatgtcataaaattttcttctatgacataattgatgacaaaacaattttttatgttgtatatatttattcctagttttttattactgtgaatattctgtaagtaaaatctttgtgtatatccttattttttatcaaataaattccctgaaatagaattgctaaagttaaagggtatatgcattttaamctcttttactaatacttttggacattcctaggttgttctaatttacatattctcaaacagtatctgggagtggctgtttcgttgaattcttgtc

SEQ ID NO: 913966 - DNA, 604 bp, Homo sapiens
cccttctcctcaattttttgaaacagtttcactagaaatgatrccagctcttctttgtacatgtggtagaatttggctgtaaatccatctggtcctgggcttttttttagttggaaggctattactgattcaatttcaaaactccattattggtctgttcagggaatcaatttcttcctagctcagtcttgggacagtgtatatgtctaggaacttatccatcttttcaaggttttctagttttttttgcacagaggtgttcatagtagtctctagtggttgtttgtatttctgtggggtcaatggtaacatcccctttgttatttataattgtgtttatttggatcttctctctagtcttctttatttagctaacagcatatcttcttttttttttttttttttttttttcaaaaaaccaactcctggattcattgatctttgtgatggtttcttgtgtctttacctgcttcattcagttcagctctgattttggttatttcttgtcttttgctagctttggggttgatttgctcttgcttctctagttctttagttctgattttagcttgttaatttgaggtctttctaactttttgacgtt

SEQ ID NO: 913967 - DNA, 579 bp, Homo sapiens
cattgatttttgtattctgagatttgtggaagttctttttagcttaagaagttttcgggctgagatgacagggttttctagatataggatcatgttatctgcaaacaaagacaatttgacgtcttcttttcctatttgaatacatttctttctgttgcctggttgtgctggccagaacttccagtactatgttgaatacgagtggtgagagaagccatccttgtcttgtgctggttttcaaggggaatgcttccatcttttgcccattcaggatgatactggctgtacatttgttatatatattatattgaggtatgttccttcaacacctagtttactgagattttttacatgaagggatgttgaattttattgaaggccttttctgtgtccattttagataaacatgtggtttgtgtctttagttctgtttattttatgaatgccttttattgatttgcatatgctgaaccaaccttacatcctgtggatgaagccaatttgattgtggtgcgtaagctttttgatgtgctgctggactcagtttgccagtaytttattgaggatttttgcattgat

SEQ ID NO: 913968 - DNA, 485 bp, Homo sapiens
tcacattatcagcattcaaaagatatgttatcaacacttccttaatgctgttttactgatatgttgcaatgacttgaagtatcagaggaaagatatcatttttgtttgaaacgttaaatgatagattatctcaatggtacacacagctattcaatgaaactcttctgagtatttgttcaggtctattaagtatgtgaatagcctgagttgtgacagcaagcagcctcttacccttttagcagatgtaattaccacatggcaagggaagtgaccattaaataaacctaaaacattgctaaatagagtgttgccatgctgtcaagtactgaaattgtagtcccttatatacaggtgatcatatayactggttttcccaaagcaatccggtttatgcctgctgcattattattaacaataccgctctcaccctcaaaagtattctggtttgaaccataaattactgcatatggccatcttccttccag

SEQ ID NO: 913969 - DNA, 652 bp, Homo sapiens
aagatatcttttgttgttgttgttctcaaaagtctcaccaaatcccaggcagattaaatttttttctacttctgtgggcttttgaaatcttgtaaacatccgtactacagaactttcacacacaacatcataattattgttgctaggtctgccttcagcaatattttttaagctctttgagagattattttgtccctagggcttagcttggtacttgaagcatgtagacactcaaatatttgttgatataattaatgaataactaagggtaatataataatgtttgaggaacttacattgtttcacaaaatattagaaaactgctctgaatatctaattcagaggaaaaaaagaaaaaaaaatacttgttcatttacttttttttcaccactgaaataattcattctgaatcttattctatcagtagaggattgagttggcactgcttgctccagaaactttaagacttaataaaatttaatcagacatatttaaaatcaaatttcagcctgtccagctatcttagtatcttcaggcatgttacttaatctttgtctaccttatttcttagtttctgtaaaaaaaagaaacaaagaagrgataatagtcaattcattgtttgtgataggtatagtctataacattacagcag

SEQ ID NO: 913970 - DNA, 632 bp, Homo sapiens
gtgtgacagtcaaggtgggcatgagaagacaactttaagctatgttttagaagtgaaactgtaagtacaatgatgaattggattcaagaartgaggacatagatatgtcaagggtaacactgatttctggcttgagtaaagtcgatagaggtgctatttatggaaatgggaaagattacacagggaatgcatattttgatgaagagtgggtggaaatccagagttaagcttcggatacatcacatttgagatgcctgaagaaattcaatgaaaaagtccaagtagacagtttagtattaggtctggagttaagaagaaaatgtcttatccctattatggccatacttaagatactgtgtgaagtatgtctttcactacattgtaatctctttaaatgcaaggactctttctttctcaatttcggatcttccacagcattttatacaaggcagagaatggttaaagtgaagaataaaaaagagttggcatgaattgaatctgtgtacaaggagtgagttaactgcctccaacttaatcctaatgaaaggttactgatttttacagatggtcaaagtgaacagcaattaaatgacttgccaaagttcacaaagtaaatggaaaactagtcctgg

SEQ ID NO: 913971 - DNA, 578 bp, Homo sapiens
ggcctgatcttgtctgaaagtttttgaagtgaaacttatttataggatagaatataattgtatagtatataacatatatatagtatatatataattgtatagtataattgtaattgaatataattgtatagaaaagtatatttagactaataccaaagggaaaaaaattacaaaagaaactatactgtgttattcaatcatttatgtatccattcatctacccattaattcattatacaaataatcattgacctttaactatgtgccaagtagagctcaaggacctggagaagcaacttgaatgtaacacacaataaattcaatgtaaatataaatagacaggagatgcgattaaaaataattacaaattcttatatgttaaaggaaattagcagggtgccaacatacagaataatgtttggaaacgacttcagattaaaataaaataaaataaaaaacagtgaggyctctctatttcttcttagaaataacatttaatactgtgacctgaaagatgagatgaatgcatgagataaacatgtaaacggtagagagaatgactatgtcaggaaatgaca

SEQ ID NO: 913972 - DNA, 578 bp, Homo sapiens
ggcctgatcttgtctgaaagtttttgaagtgaaacttatttataggatagaatataattgtatagtatataacatatatatagtatatatataattgtatagtataattgtaattgaatataattgtatagaaaagtatatttagactaataccaaagggaaaaaaattacaaaagaaactatactgtgttattcaatcatttatgtatccattcatctacccattaattcattatacaaataatcattgacctttaactatgtgccaagtagagctcaaggacctggagaagcaacttgaatgtaacacacaataaattcaatgtaaatataaatagacaggagatgcgattaaaaataattacaaattcttatatgttaaaggaaattagcagggtgccaacatacagaataatgtttggaaacgacttcagattaaaataaaataaaataaaaaacagtgaggtctctctatttcttcttaraaataacatttaatactgtgacctgaaagatgagatgaatgcatgagataaacatgtaaacggtagagagaatgactatgtcaggaaatgaca

SEQ ID NO: 913973 - DNA, 591 bp, Homo sapiens
ttcagtgtattgcctaacatataaaaagccataaaacgcctttatgtactctgaagtagaaatgacatttcyatatcttacagatgttaagatgtagacttacacatgcagttgctcattgcagacaaaatgttaaataatggaagattgataaatgatagcacactgatatggtgtgatgattaatactgagtgtcaacttgattggattgaaggatgcaaagtaccattcctgggtgtgtctgtgagggtgttgccaaaggagattaacacttgagtcagttgactgggagaggtagacctaccctcaatctgggtaagcaccatctaatcagttgccagggtggctagaataaagcaggcaagagaagatggaagggcagacttgctgagccttccagccttcatctttctcctgtgctggatgcttcctactcttgaacatcggactccaagttcttcagcttttggactcagacttacaccagtgattttcgagggggctctcaggccttcggccacagactgaaggctgcactgttggcttccctacttttgaggttttgggacttggactggcttccttgctct

SEQ ID NO: 913974 - DNA, 592 bp, Homo sapiens
gaggtggtggtacacaatgaagggtggggccactggcctccatatacatgttcaaaatggcaatggctatgcagttggttgggggtacactcacattggcagcagtggcatggtggggtacattgatttgcatacgttgaaccaaccttgtaacccagagataaagcctacttgattgtggtggatggcctcagctggagaaggaagggaaggtcccctgcacctgcaagctggctaagcaatgtgcggaggggtttgggagggctatgacaagtgcatggcaaagtggcataggggatgcagtggtgggagggttcaggtggactggtgagagtcatcaagggccactctgctggagctctctgatggtcaggcatagtcaaccagtgaaaagactatgatgtggcttccaggaggcacccagttggtcatccaaggctgcattgcaagtgggttcagccaggccagggccytgggagattccaccagatggagtagggggtggcagagagggcacattgagatcaaattggcctgtcctgctctgtttaggtctgtcagttcccctaaggctaaagtctcctaggagagc

SEQ ID NO: 913975 - DNA, 604 bp, Homo sapiens
tgggaaaaaatatatgcaagccatacatgggataagggattcatagccaaaatctataaggtactcaaacatttcaataacaagaaaacaaataacctgattaaaaaatgggccaaggacttggatgtcaaaagaacacatacaaagggctagcagttacataaaaacatactcaacatcactaatcatcaggtaaatgtaaatcaaaaccacaatgaaatatgacctcacacctgttaaaatggctattgttaaaaaagacaaggaataacaagtgttggagaggttgtatagaaaagagaattcttgcacactgtttgtaggaatgtaaattagcacagcccattatgaaaaacactctggtgcttcctcaaaaaattaaagatagaacaatcacatgacatagcaatccaactagtgaatatatatgcaaaggaaatgaaatttgtatgttgaagagatctctggactcccatgttctttgcagcagcattcacaatmgccaagacagaaagtcgatataagtgtccaccaaaggatgagtaaataaagcaaatgtggtatatatacataatgaaatactattcagtcttaacaaagaaga

SEQ ID NO: 913976 - DNA, 650 bp, Homo sapiens
gaccattggggcccgtccgggctccgcagcccacagacgggtcagtgcctgccggggtctttcccgagccaggagccaggagcgccrtggtttccccatccctgggattcaaagggccctcggcggggttgtcagcttccgtcctcacacctgcaccctgcaccctgcactccgcaccctcaggccctcctcactgcgccagcgctttattcctccagggtgcctgcgaactggtgtcagaaagccttccttgcacccaggagggacacttcccacactcgccaagcacaatgtctccttttgggcacatggggctacggccgcgttctgagccagctgcgcagattcccgctcccagagcttgctcctgacgaagggcagcagggtgggatggaggcgaagtttctggtctgccccttcttctccattgtttgccccagagccttgagaattcttcccctgcaggtgccacgcgttggtcccctactcacccgcctccctccacacccagccatccccaacacaggcagacaatgggacctgagggctttgggtatggggcttggggtatgtaacattcagcacccgaaaaggggcaggtgtgtcttggatggagaacccggtggataatgccaagaagtcaggagctt

SEQ ID NO: 913977 - DNA, 563 bp, Homo sapiens
aacaaagtttctgaagtgaactgattgcaaatgtactagtttgaattagtgtttgcttcacttaaggcctgttatatgttctaagatcattacatgtgaataaagaattgattttaattcttatgtttgaaaagaaatgaaacaaattcaagtttggactgtcttcagatttttcagcttttggaaaacttaatttgttataaatgtaaataataaaaatgaaatctgaaagttaatactaaaggatggtgtaataaatgactctcttactgatcaaaggcttaaagcccaatctactgcagaaatgaaacaaaatatcattcattttaaagacacaataactatatagctatattataaagttctaaggtagcaaataagtttcttaagctaacacacacaataaccaatggtgtaaaactgaatgtcatatgatatagttcattrtcttactgtaagtcatgttacttgaatttttcttctttatattttcagtctaaaatgtataattactgtaacaaatcataacagttatgaaattcagcagtgcttctttggtgatt

SEQ ID NO: 913978 - DNA, 677 bp, Homo sapiens
cttataaaattattattgaaaaaagggtttgctcaacttccaaaatttaattgagaagaaagaattcttaaagcrcagacctagtgcttacaacaaactccaattctgctaagaaaatgtgtgagcatgcactttctcagtgtatgtttggaaactgtgtatgctttcattcaatttaaatttctttacccacacctttctcactcaggtgcttccaaatttatagagacaaaatattggggtgtttcttctaattggcgttgcaaaattattatataacatatggtatatttgtttcaattagttgatttttgtatcaaaaattattcaataattattttgattgcacatttttttagttattggctttttacaccagaacctcttcatcccaagcaatttatactgtttcatctcatggtcttctaaagtacatcaagccataattgtattttattttttaatttttctttcctccttttgttctaatttttctctttctttttttctcccttttctccctcatcctcaggctctcatcaagtcatcattttagaaaaacgcattaattatatgctttctgagaatttctaagttgacatcttctaggtgtgttataattttatataccacaaagaaagaaagaaaaggattctacccaataaactctggcatga

SEQ ID NO: 913979 - DNA, 686 bp, Homo sapiens
acagtaattaagacaatttggcagcgagagagacacaaatcarttggacagaatagaaattctttaaatagattcacaccaatttgcccacatgatttttgacaaaggcacaaaagcaattcaatgcatgcaggatacaagtttcaacaaatggtcctggagcagtcagatattcataaggaaaaacaatcaaacaaacaaaaaacccaactgaacctccacataaacctcacaccttatataaaaatcaactcaaaatgaattatcggctggaaacataaagctataaaacttttaagaaagaaatacaagagaaaatttctgggatctagcattcaacaaagtgttcttaaacttgacaccagactcaatacataaagggaaatgttgatgaagtctactttatcaaaatttaaaatgcttgtctgagaatgagcttgttaaaagaatgaaaaaacaaagtaaagactgggggaaaatatttgcaaaccacatatctgatgaagaataagtatttagaatatataacacagtctcaaaactcaacagttaaaacgatcccattaaaaatatggaccaaacacattgagagacatttccccaaactgaatatagagagagcaaataagcacatgaaaagatgttgaacattattatcattaggggaatgcaaataaaaaccacaa

SEQ ID NO: 913980 - DNA, 610 bp, Homo sapiens
taaagacatacttgacattgggtaatttataaagaaaaagaaattcgatgaactcacagttccacgtggmtggggaggcctcacaatcactgtggaaggcaaaaccatgtcttatatggcagcaggcaagagagaatgaaagccaagtgaaaggggaaaccccttataaaaccatcagatcttgtgagacttattcactaccataagaactaaatcattatcacaagaacaggatgagaaactggccccagcattcaattatctctacctggtccccgccacaacacatagggattatgggaactacaactcaaggtgagatttgtgtgggaacacagccaaatcatatcattccacccctggcccttcccaaatctcaggtcttcacaattcaaaacacaaccacgcctttcccatggtcccccaaagtcttaactcactccagcattaactcaaaagtccaagtctaaagtcccatctgagacaaagctagttacttccacctatcagcctgtaaaattgaaagcaagttagttacttcctagatacagtggggttacaggcattaggtaaatacacccattccaaatgtgaaaaattgtccaaaatg

SEQ ID NO: 913981 - DNA, 610 bp, Homo sapiens
taaagacatacttgacattgggtaatttataaagaaaaagaaattcgatgaactcacagttccacgtggatggggaggcctcacaatcactgtggaaggcaaaaccatgtcttayatggcagcaggcaagagagaatgaaagccaagtgaaaggggaaaccccttataaaaccatcagatcttgtgagacttattcactaccataagaactaaatcattatcacaagaacaggatgagaaactggccccagcattcaattatctctacctggtccccgccacaacacatagggattatgggaactacaactcaaggtgagatttgtgtgggaacacagccaaatcatatcattccacccctggcccttcccaaatctcaggtcttcacaattcaaaacacaaccacgcctttcccatggtcccccaaagtcttaactcactccagcattaactcaaaagtccaagtctaaagtcccatctgagacaaagctagttacttccacctatcagcctgtaaaattgaaagcaagttagttacttcctagatacagtggggttacaggcattaggtaaatacacccattccaaatgtgaaaaattgtccaaaatg

SEQ ID NO: 913982 - DNA, 610 bp, Homo sapiens
taaagacatacttgacattgggtaatttataaagaaaaagaaattcgatgaactcacagttccacgtggatggggaggcctcacaatcactgtggaaggcaaaaccatgtcttatatggcagcaggcaagagagaatgaaagccaagtgaaaggggaaaccccttataaaaccatcagatcttgtgagacttattcactaccataagaactaaatcattatcacaagaacaggatgagaaactggccccagcattcaattatctctacctggtccccgccacaacacatagggattatgggaactacaactcaaggtgagatttgtgtgggaacacagccaaatcatatcattccacccctggcccttcccaaatctcaggtcttcacaattcaaaacacaaccacgcctttcccatggtcccccaaagtcttaactcactccagcattaactcaaaagtccaagtctaaagtcccatctgagacaaagctagttacttccacctatcagcctgtaaaattgaaagcaagttagttacttcctagatacagtggggttacaggcattaggtaaatacaccsattccaaatgtgaaaaattgtccaaaatg

SEQ ID NO: 913983 - DNA, 317 bp, Homo sapiens
caggattcatctttctaaaatacttccttctgtgagttacttcttcccccactgaccattaggagctctccctccttgccatctaaagtcctggtctcacctgtcctttctcttgggccttctttttcaccatgtccttctaaagccctcttattagtggtgatcctagaggcatttccattcattgtccctcaaaataaagtggagacccacckgcttttcctcctttctcctccttggctgaaatctctttccccttctacatctctggcctacttcatagggccaactgagtccaaaaataactgaagcagtag

SEQ ID NO: 913984 - DNA, 592 bp, Homo sapiens
ggatttttactgttacaaaagggatccaagagagctctctcaccctcttttagccatgtggggacacagctagaatatggctggctatgaatcaggaagcaggtcctcatcacacactgaatcttcaggcacgttgatcttggactttccagcctccagaactgtgagaaataaatttctgttgtttaagccaccgaatccatgatattctatcatagcacctccaactgactaaaaaatacagtgtgtcttctttatttgtctggttttttcagtcagcattaatatttcaagatttatccatgccattgagtgaatcactagttcactccttttcattgctgagtagtattcctttatatgaatataccagtttgtttacccactcacatgttgatagacacacttgggttgtttccagttttggttattacaaataaagcttctataaacatttatgtayacacctttctatggacatatgctttcatttctcttaggtaaataggaatagctaaatcatatggtaaatgtttaatgttttcagaaacttgcaaactgttttccacattgatagtaccattttacattc

SEQ ID NO: 913985 - DNA, 650 bp, Homo sapiens
ggagtacagtggtgcaatctcggctcactkcaacctctgcctcccggattcaagtgattctcctgcctcagcctcttgagtagctgggattactggtgcttgcctccatgcctggctaatttttgtatttttagtagagatagcgttttccccatgttgatcaggctgatatagaactcctgacctcatgatgcgcccatctcagcatcccaaagtgctggtattagacgtgtcagcctccacgcccagcttaaagtattttttaaactggttcctcctataaactgaaacctaaagcaatattctcctttcaatttcactcttttccttatatgacttgtccaaaaccaaaagaaatatgatactcttctctctcctcatttatgatagtttactaatgctctatcagtatactaacactaatattagttaatactaatacttaacactatataacacattagtatgaaaactagtaacacattactcattgcactcacattactccttgcacacacattacctacactcactacatacacattatagaactatcaaaaaagggtcaatactcaaatggccaaaaacaaatgctaaaaatagtatagtttaccagagtgtcaattttaaaacctatacgtattttaaag

SEQ ID NO: 913986 - DNA, 672 bp, Homo sapiens
ggtcttgtggttatggaacttactaggatttattaatcttaaaaagtcagttcttttcttccagaaataagccttccaaaaggtcagcttggtttcaattaagagtgaatctttttttkcaggttaaattttgagtccaaatggctgcattgatgggatcccagggcagtcaatactgcagtaattagcagacaggaaggctctgtgttcaatagggttgaactgctttaatgagaggaaagttcctgctaatgaatgacatttactgctgcttttccatggagggggcagtgtgctctcctctccatcatcctgtcttgctcactctgtgccccttcttaccctctttctcttccattccggtttcctttctctggtggctcactcctcctttcctccctggggaaggagactggaaacctttctcttcagtgtcctttggagaccagtgtctgcatttcacaccctggggcattggcagggcttcagctttgggtgctgacctacttcttctgcaaattttctaggcatttggaatccctgccagcaatgtggaggagtacgtagtgagccagcgaaacccagaatgttagaaggaggcaggtgtctcccagagctaggtcagaagcactgacagggcattaaataacaatatcgcatagactgagaaag

SEQ ID NO: 913987 - DNA, 534 bp, Homo sapiens
gctgattcttccagcctttatctttctckcatactggatgcttcctgccctcaaacatcagactccaagttcttcagcttttggactcttggacttacaccagtggtttaccaggggctctcaggccttccatgacagactgaagactgcactgtcggcttccctaattttgaggttttcagactcggactggcttccttgctctttagcttgtagatggtgtattgtgggacttcacctcatgattgtgtcaggcagtactgcttaataaattcccctttatattagttctgtctttctagataaccctgactaatacatgaagtaaggaaggagtccagtttcaattctctgcagatgggtagcctgttatcccagcaccatttattgaataggaagtcctttcctcattgcttgtttttgtcagctttgtcaaagattagattattgtaggtatgcagccttacttctgggctttctattcagttccgtaggtccatgtgtctgttttggtaccactgctttgctgttttg

SEQ ID NO: 913988 - DNA, 477 bp, Homo sapiens
caaaaattttctcccattttgtaggttgcctgttcactctgatggtagtttcttttgctgtgcagaagctctttagtttaattagatcccatttgtcaattttggcttttgttgccattgcttttggtgttttagaaatgaagtccttgcccttgcctatgtcctgaatggtattgcctaggttttcttctagggtttttatggttttaggtctaacatgtaagtctttaatccatcttgaattaatttttgtataaggtgtaaggaaaggatccagtttcagctttctacctatggctagccagtttttccagcaccatttattaaatagggaatcatttccctattgcttgtttttgtcttgtttctcaaaaatcagatmgttgtagatatgcagcataatttctgagggctctgttctgttccattggtctatatcgctcttttgataccagtaccattctgttttggttactg

SEQ ID NO: 913989 - DNA, 655 bp, Homo sapiens
ttatttgaagatacatgtttttcaccaaaggcctcaatgcactatgaaatatcctttgcagattctacaaaaacagcatttccaaactgctggaacaaaagaaatgttgaattctgtgaggtgaatgcaaccatcacagagtactttctcagaaagcttctttctactttttatcttaaaatattttctttttcaccataggtctcaatgcattcccaaatatttcttcacagattctacagaaacagtgtttccaaactgctgaatgtaaagaaaggtttatctgtgcaagatgaatgcacacatccaaaagcagtttctcagatagattccttacagtttttatcctgggatattcactttttctccattgacctcaatgagatccaaaatgtccatttgcagaatggagaaaagcagtgtttccaaactgctgaaacaaaagaaatttttactctgtgagatgaatgcacacatcacaaagcagtttctcagaaagcttctttttagatttatgtgaagatatttacatttccaccagaggcctcaatgggctcccaaatatccctttgcagattctacaaaaacagtgtttccaaacttctgaaagaaaacataagktaaactctatgagatgaatgcccacatcacacag

SEQ ID NO: 913990 - DNA, 647 bp, Homo sapiens
aataaacagtgtttccaaagtgctgaatcaaaagaaaagtttatctctgtgagatgaattcacacatctcaaatgagtttctcagaaagcttctttctagtttttatctgaaratattttctttttcatcataggcctcaaagtgctctgaaacatcccatcacagattctacaaaaacggtgtttccaaactgctgaatgaaaagaaacgtttaactttgtgagatgaatgcacagcttgcaaagcagtttctcaaatcggattcttctagcttttatcttgtggtattcactttttcatcattggcctgaatgagctcccaactgtccatttgctgaatggacaataacagtgtttccaaactactgaatcaaaagaaagttttaactatgggagatgaatgcacacatcacaaagcagtctctcaaaagcttttttctactttttatttgaagatattttcttttctgccataggcctcattgcgctctaaaatatcccttcactggttgtacaaaaaaagtgtttccaaactactgaatgaaaagaaagctttaaatctgcctgataaatgcaaacgtcacaaaggagtttctaagaaagcttctttctagtttttatctgaaggtattttctttttcaccac

SEQ ID NO: 913991 - DNA, 678 bp, Homo sapiens
tgattcctgcttttgaatccatatgatgcttttagccctagaatgggttgcttgtgggtgtcttactaggtttatgtttcttgcaatggagaaatccctgaactaaaacactggggagcactggacagaaaagctaaggttgggaatgacatggccaaacaactgtcagcagactctggaagcattaagcagaacttgtctcccacctcagtggaaatggactcagcatcaactttggagcctgcaacaactgtctgctagggtccattctctcatgattgctaaaaccacaaaggacttgcaagataatccgggccaccatctttttaaattatcctatagtcaggaacttatttcctgctcagttctctgtcagtccatctggtattgtctaaggagaaattctcaaagtggtattaatatgcttccgacaatctctaaacattagctgatttttctttttaataaagaaagaacaaatcttgggcacagagccttggcagacaacaaaaatctagctataagttaatcatattttttattatgctcacttttacatttacagttacctctttttttgttttttttttttttgtttttgagatggagtttcgctcttattgtgcaggctagmgtgcaatggtgtggtcttggctcactgcaacctccacctcccag

SEQ ID NO: 913992 - DNA, 669 bp, Homo sapiens
tcataaactgctctttaccagttggacraccttgtgcaagtgactttacccttacaagattttatttttctgtaaaatggagataaatatcttttttttacaaaattgttctaaatatttaatgagattattaaataacacagttccaagaatatattaaagattaatgactactaaccaacatggaatcaatgttttcctcagctttacacattttaaacaggcttcttctacctttaggctcctgatccccctttacttacagcatttactgtagaaaacttgccaattgtatactctttttctgttcctttgaaatggctgtaaatagcctctttccagtttacaacccagaaaacgtctgtctcaaagggctgggaaccatctctttgaaatgtaaacatgaagaaaataacacttctatcctccatcctctataggagagtagtagcttaatttctgtgggtatgctgatttgctaacacagatggcctaatcacaaggaaaagcatttgcaaactcaggaacgactcaatatgctcaaaacatcccattgattaatcttcaccataacttctttttcactggatcaaccaagtgcctcaaaaccttctcaccttttgcttctacttagttgaacttagtctctctccctattgtagtagtctc

SEQ ID NO: 913993 - DNA, 595 bp, Homo sapiens
actagcaaaccttcagagaataagaggagactttcctttctctcctggaagtaacactgaagagcccgtttgtaaagttcacataatttgtattgttaccttttaaatggtttactgattattctaagaaaatcttttaatgtatctccatgacattttataatatagcacaaaaaagaaaaatgctaattgtatgtatgttataaagttttaccatcatttctaagttaaaaagtattaaattgagattgaaaccgcctacgcaaaattatgacagtgaagcagctccattatctggggtaaatacctggggatcatcatcttgtgctaagaaaatttaggacacggacacacacgaggagtttaggaatggaggtttaacaggcagaagaaagagaaaggagaacagctctctctctctctcggaggggcttcgggaagggaaagaccagctggcataggatgcgctagattttataggcaggcttgaggaggtggtgtctgacttacctagggccctcagattgatttgatcaggtgtgacttttacacagtgtgcaaggaaractggccaccccaccccaatctttttatg

SEQ ID NO: 913994 - DNA, 593 bp, Homo sapiens
aaaaacgaaagaaatccacacaaagtatggactttagttaacaataagatattaacactggctcgctaattgttaacaactgcacccactgatctatgacgctaacaataggggaagctgggtgtggggtacacagggaccctctgtatcagccttctgatttttctgtaaatgtaaaactattctaaagataaaaaggtttttaaaaagtcagtgaacattcgctctattccacttttcttccttaaaaaaactgccttgcctaattttacatcattttagagatcaaattgcaaaggcagtaaaacatatctgtgtatcttaatattcaatttaactgaattagtcatgattaagctaaaattgttcaacataagaaactaaaaattaatagttaaaaagcttgaaaatattttattgagtgattaaaatatcaaataatttatataggatgagagatgtattacattttataagtttatgtaggataaaagggctaaattatctaagacaattaagaaagactatttagatagcaatggctaaattaatgaaataatactgcaaayaggaaaaacatcactaaagcaatg

SEQ ID NO: 913995 - DNA, 590 bp, Homo sapiens
cccttaactcttagctgggagaacccccagtcaattggctccgcagatctctctgcttatctgtgagagtacttagctccttgcaaatatctacatttcctgttccttattcactgttatatccataaagccttacacagtgcctggcccatgtttcctgagttgaaccttgccttctcagtgctgttaaacaagcacatcacctctaaagtcaaaatcccaagagtccttcaggcctatttctgagtgggagagaggattatcagaatattagcctttggctggaggtggtggttcatgcctataatgccagcagaggcaggaggatcatttgagcccagccaaggcaacattagtgagaccccgtctcttaaaaaaaaaaaaaaaaaaaaaaaaaaaaagctcactcacatttcattccaaaagaaaaggagaaagccatccagattttaatctcataaagatatcagkggaacagaattagaagttatcaaatttgttatgagaaaataaaaatgtctgaatctccaaacactgatacatttagagttagtgaagcaaggctggtaaaagtgggtaagcaagtagaa

SEQ ID NO: 913996 - DNA, 590 bp, Homo sapiens
cccttaactcttagctgggagaacccccagtcaattggctccgcagatctctctgcttatctgtgagagtacttagctccttgcaaatatctacatttcctgttccttattcactgttatatccataaagccttacacagtgcctggcccatgtttcctgagttgaaccttgccttctcagtgctgttaaacaagcacatcacctctaaagtcaaaatcccaagagtccttcaggcctatttctgagtgggagagaggattatcagaatattagcctttggctggaggtggtggttcatgcctataatgccagcagaggcaggaggatcatttgagcccagccaaggcaacattagtgagaccccgtctcttaaaaaaaaaaaaaaaaaaaaaaaaaaaaagctcactcacatttcattccaaaagaaaaggagaaagccatccagattttaatctcataaagatatcagtggaacaraattagaagttatcaaatttgttatgagaaaataaaaatgtctgaatctccaaacactgatacatttagagttagtgaagcaaggctggtaaaagtgggtaagcaagtagaa

SEQ ID NO: 913997 - DNA, 667 bp, Homo sapiens
gttttggttactgtagccctgtattatagcttgaagtcagggggtatatacccaaaggattataaatcatgctgctataaagacacatgcacacgtacacataagtttattgcagcactattcacaatagcaaagacttggaaccaacccaaatgcccatcagtgatagactggattaagaaaacgtggcacatatacaccatggaatactatgcagccatgaaaaaggatgggttcatgtcctttgtggggtcatggatgaagctggaaaccatcattctcagcaaactatcacaaggacagaaaactaaacactgcacattctcactcataggtgggaattgaacaatgagaacgcttggacacaggaaggggaacatcacacaccggggcctgtcgtggggtgtggtgaagggggagggatagcattaggagaggtacctaatgtaaatcatgagttaatgggtgcagcacaccatcatggcacatgtatacatatgtaacaagcctgcgcattgtgcacatgtaccctagaacttaaagtgtattattaaaaaawttaaaaattaaaataaatattttttcccaaaaaagtcatccctaaacccaaaatgaaccaagtagttctctctgtgctcaaacagtatctttgcctacttttatctct

SEQ ID NO: 913998 - DNA, 591 bp, Homo sapiens
cggctaattttttgtgtttttagtagagacggggtttcaccctgttagccaggatggtctggacctcctgacctcatgatcagcctgcttcagctcccaaagtgctgggattacaggcgtgagccacgcatccggccgaccacatctgttttttttgtttttttttttttgacattttaataatggccattctgactggtatctctttgtggttttgatctgcacttctctgatgattagtgatgatcagtgtttttttcatatgttttttggccacttatatgtcttcttttgagatgtgtctgttcatgtcttttacctattttctaatggtgttatttgctttttgcttgttgatttaagttccttatagattctggatattagaccttttttgggttcatagtttgtaaatattttctccccattctgtgcattgtttgtttactcttttgctgtgcagaagctgtttagtttaattagktcccacttgtcattatttgtttttgttgcaatcgcttttggggacttggccataaattctttgtcaaggccaatgtcaagaaggatatttcctaggttttcttctac

SEQ ID NO: 913999 - DNA, 631 bp, Homo sapiens
gaaaatctaggcaataccagtcaggacagaggcatgtgcaaatattttataatgaaatcgccaaagcaattggaacaaaagtaaaagttgacaaatgggatctaattaaactaaagagcttctgcacagcaaaagaaactatcatcagagtgagtagacaacctacagaatgggagaaaattttcgcaatctctccatcagacagaggtctaatatattcagaatctacaaggaacttaagctattttcaataaaacccaacaaacacattacaagtgggcgcaggatgtgaacagacaccctctcaaaaaaagacatacatgtggtcaaatatgaaaaaagctcaaaattactggtcattagagaaatgcaaattaaaaccacaatgagataccatctcacgccagtcagaatggtgattattaaaaagtcaagaaacaacagatcactttgggaggccgaggcaggcagatcacgaggtcaggaggtcaagaccatcctggccaacatggtgaaaccccatctctactaaaaatacaaaaaattagctgggcrtggtggcgggtgcctgtagtcccagttactcgggaggggaggctggggcaggagaatggcgtgaacccaggaggca

SEQ ID NO: 914000 - DNA, 631 bp, Homo sapiens
gaaaatctaggcaataccagtcaggacagaggcatgtgcaaatattttataatgaaatcgccaaagcaattggaacaaaagtaaaagttgacaaatgggatctaattaaactaaagagcttctgcacagcaaaagaaactatcatcagagtgagtagacaacctacagaatgggagaaaattttcgcaatctctccatcagacagaggtctaatatattcagaatctacaaggaacttaagctattttcaataaaacccaacaaacacattacaagtgggcgcaggatgtgaacagacaccctctcaaaaaaagacatacatgtggtcaaatatgaaaaaagctcaaaattactggtcattagagaaatgcaaattaaaaccacaatgagataccatctcacgccagtcagaatggtgattattaaaaagtcaagaaacaacagatcactttgggaggccgaggcaggcagatcacgaggtcaggaggtcaagaccatcctggccaacatggtgaaaccccatctctactaaaaatacaaaaaattagctgggcgtggtggygggtgcctgtagtcccagttactcgggaggggaggctggggcaggagaatggcgtgaacccaggaggca

SEQ ID NO: 914001 - DNA, 543 bp, Homo sapiens
ggtgccccctatagcccagcaaagggctgacttctttttttttaaattaatttatttcttaaaaaaaatttttttttataytctaagttctagagtacatgtgcacaatgtgcaggtttgttacatatgtatacatgtgccatgttgatgtgctgcacccattaactcgtcatttacattagatatatctcctaatgctatcccttccccctgcccccaccccgagacaggccccagtgtgtgatgttccccttcctgtgtccaagtgttctcatttttcaattcccacctatgagtgagaacatgtggtgtttggttttctgtccttgcaatagtttgctgagaatgatggtttccagcttcatccatgtccctacaaaggacatgaactcatcattttttatggctgcatagtattccatggtgtatatgtgccacattttcttaatccagtctatcattgttggacatttgggttggttccaagtctttgctattgtgaatagtgccacaataaacatacgtgtgcatgtgtctttatag

SEQ ID NO: 914002 - DNA, 358 bp, Homo sapiens
cactcatggactctagcgcaggtttgggtacattcagggggcctagtaccacaggraactggagggtaaatcactgatgcaccacaatggcaggttaattcatcaaaacctggtggagcagcaggtaaaacaaaagaatcctttctgagtttgggatgtgcaagtacatactaacacacacaaacacacacatttttgcttgtatttttagaggagaatttatgggggtgctacttttttcaaaagaggtttttattttattaaacttttattttattaaagctaagctggtgaaaaaggcatgaacagatatgaagtttcatttattactatgaccctgacaacttcccaatacttt

SEQ ID NO: 914003 - DNA, 449 bp, Homo sapiens
cactaacctccactgtctgatgggtttctgtactcctaaatttggagtattgcaggggctattgcatgsttttactaggccttgggcttttaggtccttaaaaatcttttggagtcattgttggggctcgggtctaagggggtactgcttttgttagggaaaggaggcggaatcctttagtttaacttgaacaggatgggcattctttgctcgtccatattgtccttctgttgcccagacttcaggattaattccttcctcaagcaggggacagcaaatgtgtgttccttctcctatgttcaggggtataatggcccctgcttttgctagaatgtctctccctaacaagggagtggggctttcaggcataattagaaaagcatgtgaaaagagtaaagttccccagtcacaacttagtggctgggagaagtatctagtgactgcctgtc

SEQ ID NO: 914004 - DNA, 449 bp, Homo sapiens
cactaacctccactgtctgatgggtttctgtactcctaaatttggagtattgcaggggctattgcatgcttttactaggccttgggcttttaggtccttaaaaatcttttggagtcattgttggggctygggtctaagggggtactgcttttgttagggaaaggaggcggaatcctttagtttaacttgaacaggatgggcattctttgctcgtccatattgtccttctgttgcccagacttcaggattaattccttcctcaagcaggggacagcaaatgtgtgttccttctcctatgttcaggggtataatggcccctgcttttgctagaatgtctctccctaacaagggagtggggctttcaggcataattagaaaagcatgtgaaaagagtaaagttccccagtcacaacttagtggctgggagaagtatctagtgactgcctgtc

SEQ ID NO: 914005 - DNA, 656 bp, Homo sapiens
ttggtatgtttttgcagtggctgggaccagattttcctttccatatctagtgcttccttcaggagttcttgtaaggcaggcctggtggtgacaaaatctctcagcatttgcttgtctgtataggattttatttttccttcacttatgaagcttagtttggctggatatgatattctgtgttgaaaattcttttctttaagaatgttgaatattggcccccactcttttctggcttgaagagtttctgcagagagatctgctattagtctgatgggcttccctttgtgggtaacccaacctttctctctggctgacttaacatttttttcctcatttcaaccttggtgaatctgaccattatgtgtcttggggttgctcttctcaaggagtatctttgtggtgttctctgtatttcctgaatttaaatgtggcctgccttgctaggttggggaagttctcctggataatatcctgaagtgtgttttccaacttggttccattctccccatcactttcaggtacaccaatcaaacataggtttgttcttttcacacagtcccatatttcttggaagctgygtcattcttttttctctaatcttgtcttcacactttatttcattaagttgatcttcaatctctgatatcctttcttct

SEQ ID NO: 914006 - DNA, 623 bp, Homo sapiens; identical to SEQ ID NO: 903850

SEQ ID NO: 914007 - DNA, 626 bp, Homo sapiens
ttatggcttccattctgattcctcttccggccatatttattattgtttttccaataacaaatgaatacagtattgcaaacctcattggtagatcttcagaaaagctgtcatgtggtttgttgtgacatggatttcttctttagaccatgtgtgcagtataacctttgtgtatacaatcaacctataattcagtgagagaatagaactgtatccttacaaagcattttaaagggatttcagtgcttttagcaacccccattccactttaaaatcctcaggctgtgcttatggattccactgaggttttcttacttttgtttttgctttttttagacagtgtctaaactcaagtacagtggcataatctcacctcactgcaacctctgcctcctgggttcaagcaattctcctgcctcagcctctcaagtaactacgactacaggcatgcgccaccacgcctggctaattttggtatttttatagagacaaggtttcaccatgttggccagggtggtctcaaactcctgacctcaagtgatccacctgccttggcctcccaaagtgttaggagtacaggagtgagccacggtgccyggcccactgactttatctctaaaaactttcca

SEQ ID NO: 914008 - DNA, 659 bp, Homo sapiens
atttattcttatcatagcagtgccaaggcgggacttccaggtgtttcctgtgactgagatagggactgcctgctgcctattcccatcttacttccttttggtcctataaacaacttcatgcccttccaataaattattaatattatgattcctaggctgactagctagtagtaatttctgctgctggtgtatacagataatatgtcagctattatttcagctctgatggtgatgttaggtttgtgttcagaacagtatttgtgcaattatttgaatattttattctattttatcctcactattgtccaaaaatatgttagagaatgcaaacaggaaaatgcttatacgagtaataaaaaataaaactctcaaatgaagatagttgagataaaatgaaaatttggcatgtagacaagagagaatcattagactcaatagaattaagctaattgattgcaaattcatttatgagaaaaaagaagaaaaccaaagcacacctattaaatgcttaaaatatactaccaaagtttgtgtctctaaggagaaagaaaatagaacagatttttaaaaataaataatattttatctctttaggaacttcccyatatatttttaagtcaattttgttttctgttggcacatacatatttttaggcatt

SEQ ID NO: 914009 - DNA, 611 bp, Homo sapiens
tttttctaacaaatctgtccagcagttacaattgccaactctcaagccacacttcccggggtaagattctgctcccctacccacaagttggkcaatccctcatctagaaactgggagatagagctcacctcatcaaatcgtcatgagaattaaatgagttaatgcatttatattatatatacattcatttatagcacttagcccatcacacacaatgagcattacataagtgttagctgtgggcatctggggctcagaatctagttataatctactgtccacgtgtgtcaaccacaacagtttaggcaaaataatgaaagcaaagcaaagtaagtagggagtgtttgccctttcatttttaactctcctttgtttgtttgttttcgcagttctccttctaccctgctatcctagctcttgccaagagagctaacacaaactttttaacagattagcccttacaaagttatttgtattctgaagaagtctgagcagagaaatcaatccctaatccaagaaaatatgaagccaccgaatttcaagtactttgaggcaagtacttttaaagtcaatgtcagctaactttagtctgactctattgtcaaatttga

SEQ ID NO: 914010 - DNA, 669 bp, Homo sapiens
ctgaaggagaagaacatggtaccctgtggccttatgacagtggggctggactagttggctggataggraaggcttccttaaagcactgagcttcttcaggagtttggcagccactccacttaaaggtctgtccctagcaatctctcctttcatatcacagtttgtagatgcctgacctatgaaatcaagctctaagtctctatactagtgaaatgaataaccattaagttgtctctaattagagaaggggagagtgctgcaacgggcgcaaaacatctggaagatgatttgaaatgatgtaggtaagcaaaggtgggaggggaaaggagaaactgaaagggaaggagagtcccagcctctgtggagagaggcaagtagcagtggtgaatgcagacctcctaacaagcagcagctcatgcacaccgagcagaagcagaaggacgtgggcggagcatgctaggcactgtgggccacatcaagagttgtaaacagagattatacatgaaaaagtatgaaatgaaagaaaagcaaaagcatcaagaataaaacctagggagctgaagacagtgaggcaaaggttaaataaacacggtatgaatgaagaaatgccactgtgaggcccttcctccttttggttgtagcctattccttttccttaatgggttttag

SEQ ID NO: 914011 - DNA, 617 bp, Homo sapiens
tggcatactttttttcttgttattggtcatctgacgattccaagcttcagattcgcttcaatgacagcacatgcgtctgcagctacatgcatttgtgaacctgtaaattcttaactgtaggtgagaactacttccagacatactgtgttctgggtgggctacctctttttttctcatgtggatctactgtgaaatatgaatagtgatggatctgagcatagagttgaatgtctgtaggtgttttcatgtagaaagctgaaacaatttgctactgtttctgacatagaagccacgcagtttcttctctagtttcctacatctcaggttttcctctcactgcatgaggtattggaggagcaatgtgcaagaaatcagaagacctggtctctgatactttttctgccatttattagctatttcccactaaaaaagaaatcacttggcttattgcaacttcattctctctttgatgcaaagaagagagataatagtacccaactctctggttgctataaaaaccaaataagtcatgtggaagtaatytgaaaactataaaggacttttaatgatgctaaaattcaaatttattcttgttacaccctgggtagaacccttca

SEQ ID NO: 914012 - DNA, 637 bp, Homo sapiens
tcaaagcagggaacaaactctgctggttcctcagaaacacatggccaagatcctcagtagataatcagcattctgtctagaggcaattaaagatgatatagttggggctgtatttttatttatactgtgtaatgaggctccaaattaaaaaagttatatcctaatctccattaatgtaaggagttgcagtcttgtgagtgcagtggtccatattagatggcaaatttgtcatttttacactttcgttcagtgccaagattccgcatttcctgaggacaagtgctgatgcaaatagcaggagctctacccacctctcttttcgtcctactgtggaagtgggtttcatttgagcaataagacatgacagacagcgcatttgcgggcaattatgtcacaccttgggtggtatcagaaagcataaggtcaaaggatgggggctttaacttcctaagaaatgcaataatgaccctgaaatgcacagcttgggtaccttattacaattgtaggatggaatacattaaaatgaagaaaacaaggaacaaagatgaaagtgggacttggtcratgggggtatgaaatcaatgtcaggcaatcataagtctttgtatttgaatttctaaaagcatttccaaatggt

SEQ ID NO: 914013 - DNA, 654 bp, Homo sapiens
acggggtttcaccatgatggccaggatggtctccatctcctgacctcatgatccacctgccatggcctcccaaagtgctgggattacagacgtgagccactgcacccagtcatgagattcttaatgraacaaaagcagccatcacctctcattctcaggggaaggtcttcgctgttgcatttgtacttgttctcacctatcctgaaaccacccttccactctgataacatgactcaggtttattcagtaaaactgaagtgattacaaaaatgatcacagtataacagcatccggcttgattttgtgtgaataagctactatctgaaaataaaatgcccttcacttttccaggcactattaagtaaatttcctctttcagtgctctaatcagcaacctagaaaaacatattcatctcctatgggtaatgatttgctcccaccgaatagtttaattactccagctcaccaaaggttcaggtccactgtaattagaacaccataaacttcaactgggtataacaaggacagtcatttttatctttactctgccctatttttacaagtctggaaagtaagttttcaaaactctaagaaccagatattcagacaaaagaaaactgcttaatgtaatcagaaaagcctccttggagtaag

SEQ ID NO: 914014 - DNA, 698 bp, Homo sapiens
actaaatagcctaccttgcctaaaatggcttgttgctgcatatacatttttctcttcttacatgatttttaactttaatgaatcttacattttttatattgccttaaaaggacaagttagtaacaagctcaccacgctttcttctagtaaccatggttaaaaaccttcgggataagagcttttctcctcatcacaactaatatctaccccactgccacatctctacaaccagccccttggccactgttgacctcactttagcaaaaaatccaaatcatgcatacataatgtacttagtgtacctccatcactataaggctgaaacatgttgctcagtggttccttccaaagcattagttgtttcttcctttatgttacacaaaagtggaggttactaaatgctactgcaagttcagaaaatgtgcttgcccatgctattcacttaattaggtctgtcttctcctttcatctcaaatgtcctcatttgttatgatacatgcattcttttaataaatacgtctttggtgggcattttacgccaaacagtatgttaggtgctgggaatgcaagagggaataaagtacaccaggaccctgstcctcacaaagtattgtgtgccagggaacccagatgagtaagcaggaagttataactcagtgtaagacatattagaggaactacacacgagggaccccaaa

SEQ ID NO: 914015 - DNA, 577 bp, Homo sapiens
acacaggagattaacaacttatcatgttaccttatccaaactttcttaaagcgctagcaatatctgtacatataaaaaacttcatggaaatttaacatataaaaatagaggtgctcctattgaagtggaggtaggaccctcaacctggaccaattggctacttcattcctcctgtgtaaggcttgagtagtcatatagaatatccatacagctacctatttattctactctacttacatgttccacaggcatctcacattctacaagtgacttacatccccaaggatgtcttctgtttatctacaccttggttctgtgagtagcatggcgatccaccacaatatcgcttaaatcgtaatattggttgtcatttgtgacttttgcccaccttatgttctatagaaaatttgttatagaaatgccccatcaattatagattcttacagtttttccaatacagtcatgttatttacctcttgtgacatggctctgagtagggcttcatcatctcaaatctgggtacmagcaaagcctattcaatgatcttgctgtctccagttttgcctcagtgtatctt

SEQ ID NO: 914016 - DNA, 669 bp, Homo sapiens
atttgttaattcagtgtctgctgtaatgttatagactatacctatcacaaacaatgaattgactattatcycttctttgtttcttttttttacagaaactaagaaataaggtagacaaagattaagtaacatgcctgaagatactaagatagctggacaggctgaaatttgattttaaatatgtctgattaaattttattaagtcttaaagtttctggagcaagcagtgccaactcaatcctctactgatagaataagattcagaatgaattatttcagtggtgaaaaaaaagtaaatgaacaagtatttttttttctttttttcctctgaattagatattcagagcagttttctaatattttgtgaaacaatgtaagttcctcaaacattattatattacccttagttattcattaattatatcaacaaatatttgagtgtctacatgcttcaagtaccaagctaagccctagggacaaaataatctctcaaagagcttaaaaaatattgctgaaggcagacctagcaacaataattatgatgttgtgtgtgaaagttctgtagtacggatgtttacaagatttcaaaagcccacagaagtagaaaaaaatttaatctgcctgggatttggtgagacttttgagaacaacaacaacaaaagatatctt

SEQ ID NO: 914017 - DNA, 633 bp, Homo sapiens
tttggtggacaggtggtgtaggcaaagaaaaactgtcctttctgtccccttcaattagccttttcttgttattgtgcaacaaccaggtacttgattctctcatgtgattattttgttcttatgaaggtgcttttctaggcggagagttgttctccttgataattccattgggggacaattggaagcttctatttggccgttttgctccacctcctcagaaaatcctatcttctaaacacttttgttaatttagaactattaaaataaagttttattaaaaacaaacacaaaaagaacaggttcagtggaaaaaatcttgcacaagcattgaaaacttttgtttgcaaattattcaatattttgtaattgataatgcatctgtgtggtgtctagggtgagtcatagctttattttaataagtattttagtcagttttattatgcaatatttattttattatgtgctttattattttaaatagacaaataagcatttacaatgttaacattttaggtatatgtggtgtttgttaccatatggcattttaaagttgtttatattaagtttaatatttttwagaaaatagtcacatatgtgactattttttgtataagatacaacttcagacaatag

SEQ ID NO: 914018 - DNA, 633 bp, Homo sapiens
tttggtggacaggtggtgtaggcaaagaaaaactgtcctttctgtccccttcaattagccttttcttgttattgtgcaacaaccaggtacttgattctctcatgtgattattttgttcttatgaaggtgcttttctaggcggagagttgttctccttgataattccattgggggacaattggaagcttctatttggccgttttgctccacctcctcagaaaatcctatcttctaaacacttttgttaatttagaactattaaaataaagttttattaaaaacaaacacaaaaagaacaggttcagtggaaaaaatcttgcacaagcattgaaaacttttgtttgcaaattattcaatattttgtaattgataatgcatctgtgtggtgtctagggtgagtcatagctttattttaataagtattttagtcagttttattatgcaatatttattttattatgtgctttattattttaaatagacaaataagcatttacaatgttaacattttaggtatatgtggtgtttgttaccatatggcattttaaagttgtttatattaagtttaatattttttaraaaatagtcacatatgtgactattttttgtataagatacaacttcagacaatag

SEQ ID NO: 914019 - DNA, 408 bp, Homo sapiens
atgctgctagtctctttgttaagcatagcaagaattacctttattttagttcccaacaagttcctcatctccatctgagatcacctcagcctggactttattgtccatatcactatcagcattttggtcaaaatcattcaacaagtcactaagaagttccaaactttcccacgtctttctatttttttctgagccctccaaactgttccaacctctgcctattacccagttccaaagttgcttccacatttttgagtatctttatagcagcaccccaccctctgcagtaccaatttaccatattagtcacttttcacattrctatgaagaaatacccaagcctgggtaatttattaaggaaagatgtgcaattcactcacatctctgcactaccagggagatctcagg

SEQ ID NO: 914020 - DNA, 703 bp, Homo sapiens
gctcccccactgagcaccttgtgacccccygcccctgcctgccagagaacaaccccctttgcctataattttccactacctacccaaatcctataaaacggtctcacccctatctcccttcactgactcttttcggtctcagcacgcctgcacccaggtgattaaaaagctttattgctcacacaaagcctgtttggtggtctcttcacagggacgtgcatgacaattagacatacagagtaaatgacagatactggagattccaaaaggtaggagggtggaaaggggtgaagatcgaaaaattactatctggtagaatattcactaattgggcaaagggtgctctaaaacaccagacctcacaactacacaatatgtccatgtaacaaaactgcccttgtgaaaccacctttgcaaacattctatcagcgagaacattatggcagtggggaagatctgatctacccaaccccctgtctcgcgcgtttagctttcacgtgtgcctataattaattatgggcctaggccaagctagctttggaagacatttacgttatagttcaaatgataatagccttccccaaaactcaactgcctttgtaaagctaatgagagaccaccaggctagggggaactcaggagccagaattctgctagggtgtagactgctcacaagatatgcaacttccccgcttgcttaccc

SEQ ID NO: 914021 - DNA, 606 bp, Homo sapiens
ttgaaaccagcctggccaacatggtgaaacccgtctgtactaaaaatacaaaaattagctgggcgtggtggtgcacacctgtaatcccagctactccagaggctgaggcaggagaatcacttgaaacctggaggcagaggttgcagtaagccgtggaggttgcagtgagccacagagatcatgccactgcactccagcctggagcaacagagcgagactctgtctcaaaaaaaaaaaaaaaaaaaaaaaagcatatactctatggatacaccagtaagtgaaccgtgaacaacaattgaacttgataaatatgcaaaaaaaattttcaggtttttcccaaatctgagccctccaaattatcaaaatggatagctggaacagatattctgtcaaaatatgtgggagagattaaagagagaatatgtgggagagattaaaagagagaacatgtacttaaacagaattttaaacagtaaaaatactgtgatgctattactgttgattaagcacatattttttctgtttaaaatggtataatctatttagtgaacagtaataygatatttttcaattgtgacaggtttctacgtttgtaatttttataac

SEQ ID NO: 914022 - DNA, 682 bp, Homo sapiens
ccctttttccatgaaaatttaataccacaaatatactatgtatgtgtttatgtgctgcatrtatagctgtgtttgatacattaaaaaattagtttttttcatcttcccaagagtcaattcttgcccctttgaaggtgatataacttctgttaggaaggcgtgttttagacttagaggtaagccattcttgggaatctacctaccaggataaagttgtcatcattcagatacctttacattagaaatgggagatgatctcagatcaaatgtcccatcctcagggtgcccaaccttggcaggtaatggaaagagggtcctcttttttaacaaatattattatgttctttctcccatggaagtcaccaaattttatcattctctatatgtttatgtgattgtataatgcctatttttctcattagatagtattacaaggtttgggaacaagcctggtttgttcttcattttgtttcaatgcctaacagagcacttgtcacataccaatttgtcaataaggacttgccaaatgaacgaccaacaaacagtaaggaacaggatgacaatagaagaggattggatgtgtttcaatgtgtgcttagtcattcctggttagagatttctccaatattctggagaagatatattggttatatcaatttatttaaattaaattaaattattt

SEQ ID NO: 914023 - DNA, 574 bp, Homo sapiens
gagtacttgttgtttcaggaacaatgcaggatgccacggatactcatcaattttcttttctaaacaattttaatagtatcttaatttaaaacaaatacaaatgtttyggagtgaaattcaaatttgccttaatttttaagatgaagcatgatacttcaaagaaactttacatgtgcaatgggacagatacacatacacacacattcacacacacataccctgtacccccagaagtcactccctgccatttgttggaaaattttgagagatgcactctaaacagaagcagacattcagatacacagaaccaatgagctggaaaggatctgtggaaagtctccatccctgcaggcgaagcagtgtctaagccagacagactcaagccaaggccctcatgcacacatggctctttcatttacagtcatagaacttcaactactctctattgctggataaaaaatatcatattatataagatactagaaggtacctagggggctagtgacactctcagtttacctgagatgggtagtatttgtccttcaaggaaagtaggtctttcagctccatatag

SEQ ID NO: 914024 - DNA, 577 bp, Homo sapiens
ggaaatgtggggttgcagcccgacacagagtctctactggggcactaccttgtggagctgtgagaagagggccaccatcctccagcccccagaatggtagatcccccaacggcttgtactgtgcacctggaaaagctgcaggcactcaatgccagcccatgaaagcagctgggagtgaggctgtaccctgcaaagccacaggggtggagcttcccaaggccatgggagcccatcttttgcatcagcatgacctggatgtgagacagggagtcaaaggagattattttggaagcttaaggtttaatgactgccctttggatttcagagttgggtagggcctgtaggcccattgtttgggccaatttttcccatttggaatgggagaatttatccaatgcctgtactctcattgtatctagtaactaacttgcttttgatttttattctcataggcagaagggacttgccttgtatcagatgagacgytggactgtggacttttgagttaatgcctgaatgagttaagactttgggggactgtcgggaaggcatgattggttttgaaatatgaaaagac

SEQ ID NO: 914025 - DNA, 626 bp, Homo sapiens
cataaaagggattctcattgcccaggtcctcttggtgcacaaccaaaagactggcagctggtgtttatgttttccattcaaggctatgtggttagcagctttatagataaaggcagacctgatcataaacccgactgcatttgcacacaacggtagagttagcttatcctttcctgccttaaatcccagtgttcccttcccttccttattaataaatgtcctttgtggcattttttcccccagagcagggcatttctgtctgtgttaaaaactggctcaggaagatatccttttctctcaataattttcttaagggtgtctggaaagttgtctgttgcttcttggtcaacaggagctgcttctcttcttatcctgaatttttttttcaagccaaacctctttccaaccttatcaaaccatcttttgctggcattatattgtttagctttagatccttcacctttcttttgcttcaaactgttatataataacttcgctttttctggaatcacattagagtctataggtatgcctttcttacaggaaatcttatatgtacacaaaagttatttggcaaaatatgtgcwtgctgacgtagctgcaatgatggcttcaaacatttcctt

SEQ ID NO: 914026 - DNA, 621 bp, Homo sapiens
ttattgctttaactcaattgatatttgcatatacgtttgtgycagtaaatggacaaccaaaaaagcagaagtgataggaggtatgtaagatatttattgcaaataactgtcttacaaaattgtggggctggctagacaaatttgaaatctgtaggacaagctatcaaaaagggcatgctgaagctcatagcccaggctgaagccgctgtccacaggtggcatttcttctttttcaagaaaccctcatctctaattttaaggttcatcagccaattgattcaggctcatccggattatttaagacagtctgccttactaaatgtcaatttttatgaacattaatacaatttataaaataactttcacagcaatacctagatttatgcttgaaagactaactagaggctataccctagccaagttcacacatctaaaagaccatcacgatgccccattatcctgttagcagacaggagacgagaaagctgagttttgttagtcctgtatgcatctgagctcagacattcataaatcattcaactctaaggtaaaatgaaataaatagaattgtaaatagtgactctcaggagtcaccgttagtaaccaaagaaaaaattatga

SEQ ID NO: 914027 - DNA, 566 bp, Homo sapiens
acaggtcaaaatctgtaataatcgaaatccaaacaataaatgctgttcaaggtttgacttaccctcaaatatagaacctcaattcagcaataattttttttttcctttacatttctaatcagagtaactctttatggctgaacacctgaagacgttgtgtctgagatccttatgaaaagcttacaggcgaatgttgtggtttgtcaggtcaaaagcaatattttttgtttctttctcattgaaaaaagatttgcctttaacactattaaagtctgattgaaaaagtgtgtttttaagacgtgtctctacctttagagaattctagacactaatggctttgaagtaattcttacacactttagaataagtgacatccttaaaaaagtctgacttgttatttacacgtattcatattccccaagcttcctgtctagtttttcaacgctcacataggtctttaagaagaatgctttaaaaggagaaaaattgcagtgccagaaaatgtraaaatgacatgaagaggcacccatcccgccctcacatatgcacagccactggcgttaatg

SEQ ID NO: 914028 - DNA, 591 bp, Homo sapiens
ggattcaaaaattacatatgtttataccagaattttctttttggttttcttgagctatgtattattcaacaatgccacttctttcagggtttcttatgcattctcctcagtaatgtttaagagatttttaaacaagagccccattcaagttgtcatcattgaattttaatcccctcaagcaaatggtcacactaaaagggtgcagcagatgatgaagggtgccctgcagcaaattgcttcaggggcctgaccaaaaggattcagtcaagcttctaatctttctacacatcaacagcagaaatcgtcaggcaatcttgataatcaagtgttatctcaatacttgtttcaaacatttaaaggagaccttgatgggaacttaaaacataaccatggcttgtgctttgattgtatctactctttcattttaacaagaacacttaatagttgggggaactagagtccttaccccaggtattctcagcttcaatgtcagtsgctcagaggatgtctctgaagtgcaaacctctacttcattaaaatagtcttctaatctgaaatctatttttggtttccctgagtttattttaattt

SEQ ID NO: 914029 - DNA, 638 bp, Homo sapiens
aattttaggtagtactctattttctcccctgaaatmtgagttttctttttcttttagcctttcttacacctaatttctccagcatctcaatgatttcttatttattacatatgaatttctcccctctatcttcttttagaatactgagttcaatttttataaatattgacttccaattccccaaaggtaccatgaaaaaaatacatttagtagtctaatgatcaaatatttaattgatataacaatttacagggaatattaattatattagttaaaatgtgttcactgtgtgattcctattgataaataatcaaagaatatgagtgagaatcatccaagtaattacaatccagatgaaaactcttagttttcagttgaacataaaatcatttgattactcattttgtttatgtgaaagatctatggccatctattttgaagattgtaactttaattaaagaggcaaataattgacatagtatttctgaaagcttttaaagtttgttacttacaaaataatttaatttgcattcacatttaatttgtccccaaaaccaaacttttattactgttatactgacctcttctggatacttcctataatgtcagccatatactatgatagctcaagtttttta

SEQ ID NO: 914030 - DNA, 529 bp, Homo sapiens
ctgagcctcgctttatcacccaggctggagtgcagtggcacaatctcggttcactgcaacctccgcctcctgggttcaagcaattctcatgcctcagccttccgagtagctgggattacaggcgtgcaccactgcacccagataatttgtgtatttttagtagagatgggtttcatcatgttggccaggctggtctcgaactcctgacctcaagtgatccacccacctcggcttcccaaagtgctgggattataggcgtgagccactgcgcccagctgagaaagataagtttttaattttgacaaagaccaatgtatcattttttttcttttatggcttgtgctttagggttatatatttaaatctttgcctctaagattaaagctatatacatttccctctcaaytgtgtttcttcattatcatttagttcaaaatattttatcatttcccatttgatatcttctttgacccatggattatttagaattgtgctgcttaattttcaaacacttggagatgttaaaaga

SEQ ID NO: 914031 - DNA, 543 bp, Homo sapiens
tagactccttgtcctcaaaaatacagcatttgatgtttgcaatkagtaaggtaaaaacttgtaaagggcttctatggtgttttcttttcattttctagttttcctttttttaaagttcagagaatgtctgtgacaaaacatcattgtgtaataatttttggtttttcaggtgcttttttggatatttacattaatcaatttggggattctgtgacaaaatgtaatttgcaaagacttgacctaaattgattttctatgaagccaactttgaaacagaaatcaacatgcagaaattatatcgtggattgctttgaggatacacattgtatagattaaaagaatcaacattaggctgagggaggtgtttggtggcaattcagtcacagcaaaaagtgcagccaacccagcgagggaaactgtagctgtgataaaccaccagtgttgtcccaaatttggcaaagggggctggaccttaataagtctcatcaacagtcactggacatgagctgctcttgagaataagacatgacattgcatgaggtg

SEQ ID NO: 914032 - DNA, 742 bp, Homo sapiens
ttcctcagcatggattgcaaatcagagttgcatttacctctacgtgagaaaaacatagacagttggcaagagccatcttgttttastctaccaatttattgctgtttgatgccttttggtaactctggtatagatcagatcatctcaactcgtagtcctcaactagcctctattcaagtgagtaatctgcaaatgatgtttctgaaaaacctcaaaagtggagcctgaattgacagtgttgtctggggtcttagtggtttctaataatcctgtcaaatttccttgtaaaactaagagaactttattgattaggccactgctgtttgcaagaaggcaggaggatgggacaaaagaataaggcggggaagaagagaagggaatagaataaacaactgagttatggtgtttcttagccacaagtcatcggataaaaccccttgctaagaaaatatcttgctgtgcaggtagattgtcgcacctagcaatgcctccttccgtcccttggggagctggtgtgctgagtcagaggtttccaatagccccacataaggtcaatgcattaagtgcctctgttgcttgctagactcggttagaccctgctgtgttgcagctctccaaagtggcagcagagagagacggatctggacctgttcagatttcttgagaaaagttctgaggagggtataatatgggaagggctatggcatactttagataacccagatctgaaacagaaaacatc

SEQ ID NO: 914033 - DNA, 392 bp, Homo sapiens
acattcagttcttgtttacttatgcaaatttctgcagccagcgtgaatttctcctcagaaaatgggtttttctgttctttcacattatcaggctgcaaatttttcaaacatttttgctctctttcccttttaaaactgaatgcctttaacagcactcaagtcaacttttgaatattttgctgcatagaaatttctcccaccagatatgctaaatcatctctctcaatttcaaagttccacatatctctagggcaggggcaaaatgctgccaatctctttgctaaaacataacaagtgtcacatttgctccagttcccaamaagctccttatttccatctgggaccacctcagcctggactttattgttcatattactatcagcattttgggc

SEQ ID NO: 914034 - DNA, 587 bp, Homo sapiens
acacactcaaatatagtaatacatttaattcattttctctaatcttagaaaaactgctacatcacttagcctttgatatggcactaggcggttatttattctgtgttctaaaagagccattccactccttgtctctctatcaatctcttgtccgtttctctgttctaccatcaattacatcattcgcaaacacttcaacacttcatcagaaaacaaagaaaacagaaaaactccaagtcactcagttggagcttcacttattattttcttccacttacaaaacaaatttctatcacctattatccttttcatcttcccttgtttcattattggttaatatcttcatctttcctctaagttacacaacttcctgcatagactcttaaatttttctaacttaaacaagcaaaaatacatccaaccctatgtttctctttagtaaggacaccccagttgttatgttgcaaataatttacaggtacaactggaaatattggccctcatagtctaaggggyactctgatgggatttagaatagtttggatttcgtgggctagatgcctgtagcaatttatggttttatggga

SEQ ID NO: 914035 - DNA, 601 bp, Homo sapiens
  misc_feature 533, 563: n = A,T,C or G
accacctctcaagactgtcacactgacaattaaatttcaacttaagttttggcaaggactaacaacatccagaccatagtattccatgtgaatatgcttgttaaccatgaacctaagctatcatggttttttttaattgaatatttgtagcatgtaaacatgaggaaatcagagtctttttgtccatgtcaatttttcttacctaactccagtcagagatgccaaaatcactttcatcaagaaactcttagtgattaatcttatttatttagaaattaaccataagcagccagacgcggtgtctcaagcctgtaatccaagcactttgggaggccgaggagggcagattgcctgagatcaggagtttgagaccagcctggctaacatggtgaaaccctgtctctactaaaaatacaaaaattagccgggcctggtggtggcacacacttgtgggcccagctacttgggaggctcaggcaggagaatcccttgaacctgggagacagaagttgctgtgagccaagaaagagccnctgcatttcacaaaaaaaacagagcaagantcggtctccacyccccgccctccccccactaaaaaaaa

SEQ ID NO: 914036 - DNA, 591 bp, Homo sapiens
cagagagcttgcactctctcacatcatcacagaggtcatgtgaggacacagtgagaagacagccacatgcaacacaaagagacagccctcaccagaaaccaaattacatggacctcgattatgaacttctagccccagaactgtaaggaagtgaattttcatttaagtcacttagtttatggtatttttgttatggtagcttaagctgactaaaacagatagtcaagacaggattcctattcttaaatgcttagaatatattggcatgctgtgacacatacagaaagtatctagagagtaatatataagagttaacacacagatttgaattgagagagatagaaagaaaaaacagtggtatgaatgcatgaggctgaaaaaagcttattctgtctactgagctagaaggtttaaatgcttcaagataagtggaagattcgtgctggaattatttgcaattacwaatatcatgggaataatatagtttgaaatatattaatgtacttttcttatttatacttccttgtattaggctgtcccttgattcagccagatatatccattgcctcaggaaggatttaggcagaaatg

SEQ ID NO: 914037 - DNA, 636 bp, Homo sapiens
cacaccgtttcagggaagaacaaagyaagctcctttgcataaaggaagggacctaccattgtggaaaaagcattatgtgtcctaggtacatacattaacctgataacctcaataacttagtatagataccataaatactgatgtaatagaatataccagcctgacaaattaaagtgaccatgctattagaacaagtctgcctgttattattgtatttactattactaccattaggtgtgaccatagtggtagtagtagtatttgggcacatggtgtctcaggccctatagaacaggcacattatataaaatatttcttatcctcacaataaccctaatatatgttgttattctcatttgacagatgggatacagagtttaagcaacagtttgatatctttttaaaaagttcaacttgaggaattaagcttcacagacagaaaacaaagccaggaagaagtggagttgcaaaaattgaaatgaggctatctcccaagatggtgtagtgtgacacatctgtaaatcttaagtctataaaccaaggaatgcaagctttgaaattgtatttttttcaaaactgagctaaatttttattaaaatatggagaaatactatatttttctggtaccaaattcct

SEQ ID NO: 914038 - DNA, 634 bp, Homo sapiens
tggctattagcctttggctcctctttacttatgcaaatttctgcagctggcttgaatttctycccataaaatgggtttttcttttctaccacatggccagggtgtaaattttccaaacttttatgctctgcttcccttttaaatgtaagttccagtatcaaattatctctttgtgcatgcatatgagtgtatgctgttagatgcagccaggccacatcttgaatgctttgctgcttagaaatttcttttgccagataccctaaatcatgtctttcaagttcaaagttccacagatctctagcacaggggcacaatgccactagtccctttgctaaagcatagcaagaatgacctttacttcagttcccagtaagttcctcatctccatctgagaccagcttggctatctctgtccatattactatcagcaattttgtcaaaaccattcaacaagtttctaggaagtttcaaaccttccctcatcttcctgtcttcttctgagccctccaaactgctccaacctttgtccattactcagttccaaagcagcttccacattttcaggtttcattatagtaatgccccactatttggtacaaattttctgtattagtcccttctcacactgctataa

SEQ ID NO: 914039 - DNA, 528 bp, Homo sapiens
aatcaggtgtgggcagttcatatctgccagaggttctcattcatctttttttttcttttygtgggatggtttttttggtgagttgtttagtaccagtcttcccatttatgacctctaacaagaaacacagaaaagtattattgccaaagactaatactagttttcctaaagagaaagaaaaatgcattttactttcaactttttttttttttttttgagacagggtatcgttcatttgccaagggtggagtgcaatggtgtcatcttggctcactgcaacctccgcctcctgggctcaagtgatccttccacctcagcctccccagtagctaggactacaggcgcactcagccacacccagctaatttttgtattttttgtagacaggttctcactctgttgcccagggtggtctcaaactcctgagctcaggcaatcctcctgcttcggcctgccaaagtgctgggtttataggcacgaaccaccactcccggccacttttaacttcctgattataaaataggaaca

SEQ ID NO: 914040 - DNA, 528 bp, Homo sapiens
aatcaggtgtgggcagttcatatctgccagaggttctcattcatctttttttttcttttcgtgggatggtttttttggtgagttgtttagtacyagtcttcccatttatgacctctaacaagaaacacagaaaagtattattgccaaagactaatactagttttcctaaagagaaagaaaaatgcattttactttcaactttttttttttttttttgagacagggtatcgttcatttgccaagggtggagtgcaatggtgtcatcttggctcactgcaacctccgcctcctgggctcaagtgatccttccacctcagcctccccagtagctaggactacaggcgcactcagccacacccagctaatttttgtattttttgtagacaggttctcactctgttgcccagggtggtctcaaactcctgagctcaggcaatcctcctgcttcggcctgccaaagtgctgggtttataggcacgaaccaccactcccggccacttttaacttcctgattataaaataggaaca

SEQ ID NO: 914041 - DNA, 510 bp, Homo sapiens
accagctatatcgttagtgttggtgtattttacttgtggcccaagacaattcttcttccagagtggcccagggaagccaaaatattggacacccctggcttagagcaaacctctcattgatggcaggtcagtgttattcttaaaggacagcacatacacttttattactttttttaaatgctcacttccaacagtgactcattttgtgaccttgggttgcttgcctttcctctctgaaaaaggtggatagagattggtacaatgcctcatttgaaggctgggaactgtttcatttagagaggttttggcagggttttcaatgttcttgaagtacaatcttcttaatatctaggtggttgtaagtgattatgtaagtgataagtagaaatgaactgtgattgaccatgtgaatatatctccattgtaggtaggggtgtgtgtgtgtgygtgtgtgtgtgtgtgtgtgtgtatgtgcgccttttggtgctaaaggtgcatgcatattcttca

SEQ ID NO: 914042 - DNA, 650 bp, Homo sapiens
ctattgaataatctaaataaagctattaggccatcatttagttaacaagggtatmctctcactctcagttgtgaatgctttcccttgctcctgtctcatagctagaacttttaaataaggtctttgtttgatgtgggttgaaatggagcaagcttatctcacagagatataatgtgctaacccaatagtcttgacccaagataaatcactcatttaatgggctctgcttgaaatgcagagggttgaccgcaaaagaccactttttgtctctttgtcttaggtcaaagctgaaactgaatttgttggtcatatattcttattctaagatcatttgttcacctctgcacaccgcaatacagtccaatgtaattggtagtcctttgaaagagaagaaaagaaagaaagaaagaaaaaggccagtgtcatcacaggccactcctgaggttctctgacagaataagtgaggttatcatcaagttttctgcctagtgttagtgtcattagattttcattttatgacaatgcaactatttttaagataaaataatgaatactggggaatgcgttaagggatctgattgctgaaatattttttaagttcttaaatgaagagatataatatttttaaagcaacatattttactttaaaa

SEQ ID NO: 914043 - DNA, 646 bp, Homo sapiens
ctactgagtcatctacgttagaaacctagatagcaattttatrtgtccttgttccttttatcatctgaatagtggctacattctggggaaaaaaaaaaaagcaatatatgttttttattctttgttaccactgttactggcctacttcagatttgtgttatttcttttaacctccctcttgaaagtatttaagttttatttgcataccatagttaaatttgttgtactattataatcaacttatattcaaacttgtcatttacacatcaacggtctccattaaaactggtagatcactgagggtagggcttttgacattttcattttttagcctctattatctaagacaatatatgagctgaatgaaattattttcagactcttatcttcagcattagctactattatgaacctttgaatgcaatgtaaaacctagtttaaatttattcactgtgttctacaaaagcaatttaattaacaatgggtatggtcccaataagtaccatgaaattttaaaaaactctagataatcggtactacagtcactattgaagttttatatatatatataagatatatacatattatatacataagatatatacatattatatatataagatatatacattttatatatataaaa

SEQ ID NO: 914044 - DNA, 624 bp, Homo sapiens
gaggtgaagtgactgtggaggagaaagagttagagtaaatggcccaagctaggaattaagtggcagtcacagccagtcttgggaaaaaatatagcacccacaagcattaggatggggacttagtctatcagagggctgatgccaatgcataacacagacaaggaaacagaaggcaatctgtctcatctacagttgcatcagacacagagtcaatatgaaaggccaagggacaacattctttagtgggagcctgcaaacaaccgaagggtacacattgacctgacgccacttccccacctcatcatgctgcatgtagccatgaaactcatagtctccctgaacccaagcaaagaagaaagagcagaggaaaaaagccactgaaagtttaagtgtctgttctaaagagttggatttatccagaaagcaatgaattttaactggaagtcagtaagatacattcaagtggcatataagtattccttccttaagcagaaatgggtgctggcgagcaagcagtattcagttatgcagaaataaagttatatttctacccacctcagtcacagtgtayaaattttaaatccactctatatgtaagggccagtgatttatcagtgctgaatt

SEQ ID NO: 914045 - DNA, 639 bp, Homo sapiens
aatgataaaaatgtcattaacctgctgtcttaagatgttcacacaaatatggagagtaattctacaatataaaaatatttattttaatactgagtttcagttaagtcataaacagtgttaaaactcttgggaaggtgtaggggttttttgtttgtcatttttaaaattgaaactgtgtcatacagtgtttcacgtctctgaaattgggattataatagcactattttgatgtagctctaccgatactatgtggtaatgctattttgttttactaacaagctctggaatatttagcagtcattttcactggcacaagagccttttgtatgttattcaatttaaacttttaaaccaaaaattttatggtccagtgtctttggcaaaaagatgctggagggaatgtaacatacaattaatatgtggttatatatatatataaaaagacacaaattgccatgttatggttctgccttgaaacagcacaatgaagtgtatcagtatattctgtgattatgaaacttatatgttgtgttgttttgtgtcttctgttgcctgtcctttgggccagatgtggsccagttaaatgcagttatcatctcattaaatacagatgcagataaaatatctttagtgctgcaa

SEQ ID NO: 914046 - DNA, 689 bp, Homo sapiens
aaccattctgactagtgtgagatagtatctcattgtggttttgatttkcatttctctaatgaccagtgataatgaggtttttttcatatgtttgttggctgcataaatgtcttcttttgaaaagtgtctgttcatatccttatggggaaaggattccccgtttaataaatggtattgggaaaactggctagccatatgcagaaaactgaaactggaccccttccttataccttatacaaaaattaactcaagacagattaaagatttaaacataagacctaaaaccataaaaaccctagaagaaaacctaggcaataccattcaggacataagcataggcaaagacttcatgactaaaacacaaaagcaatggcaacaaaagccaaaattgacaaatgggatctaattaaactaaagagcttctgcacagcaaaagaaactatcatcagagtgaacaggcaacctacagaatgggagaaaaattttgtaatccatccatctgacaaagggtaatatccagaatctacaaggaacttaaataaattaacaagaaaaaaaaaacaggctttctttagcaatatacaattgctgctctgtatgctatgcacaaaacaagaccaaaggtgcttacccaggagaacttgcatgacagcgaaaacaaattttttggcaaaaaaagtatctttttt

SEQ ID NO: 914047 - DNA, 616 bp, Homo sapiens
ataatgattttcatacataaaattatgttttattcagttcttgaactagggtgatggattggagarcacagagaatcccatttccagaaaatcaaagttgatacaaggagacttagtaactgaagagagaaacagaaataggagtcaaatattatgtgcaggtttctggtttgggtagttgaatccatgtgattttttgtttttttttgtttgtttgtttgtttgttttgttttttgagacagagtctcgttctttcacccaggccggagtgcagtggtgctatcttggctcactgcaagctctgcctcccggattcacgccattctcctgcctcagcctcccgagtagctgggactacaggcgcccgccaccgtgcctggctaattttttgtatttttagcagagacagggtttcaccgtgttagccaggatagtcttgatctccagacctcgtgatccccccgcctcggcctcccaaagtgctgggattacaggcgtgagccaccgcgcccggcctgaatccatgtgatttttgtaagcaacgtaaggtggtagaagataagaaacacaggagttgaaaggttttgtttgggtgaagggtagtgtagaaaatga

SEQ ID NO: 914048 - DNA, 579 bp, Homo sapiens
tgggatgacagacgcatgccaccatgtccagctaatttttgtagttttagtagagayggggtttcaccacattggccagactggtctccaactcctgacctcgtgatttgcctgcctcagcctcccaaagtgctgggattacaggtgtgagccaccacgtccagccatctctttgatatactgatttcctttcttatggatatatgtagagcagtagaattgctggatcatatggtagtcctaaatcatggtttttgagtgtctagaagaaaagctagtattaaaataaaaatttaaagaactttaactggtcatcttttttttattcatcagttataattctattggttgcaaaaatagaagttgttattatgaagttaacttccttagctattcatgtgtcaaactgctaactaaaagctcttcggaatatttctgtcttctgcttttactctaaaacccactctcatatgtgtagttagacccatgtacaaacagaaagcacatcattgatacaggtttataccatattatgtccaaagtttgacacatttaagaattattaatttctattttaaa

SEQ ID NO: 914049 - DNA, 645 bp, Homo sapiens
tattaaaagcacaaattagaaaacataatatcaaaataaataaactttaccaaaattaagtagtttgtgttgtaatagacacaatccaaaaagtgaagggataacccacagaatgaaagaaaatatttgcaataactatgtttaataagaaaattgtagccagaatatacaaagtactcttacatctcaacaaaaaggcaaaaataaaaatagggaagttttgagctcccatatactactggtggaaatgtaaaatgatgcagccattttataaaatgttcagcaattctttattagtttaaaattaaaaggggaatgaggtgctaatgcatactagaatttgtatgaactttgaaaatgttctgataagggagaaaaccacacagtagaatataaattgcataattctgcttataaatttccaaactaggctattctacagtgacagaaaatagattaatggttatcaggcctggaaatgaagaggttttgaaaatgactgctcatagttttagacttctttttggagtgcttaaaattggatgatggtgacaactgcaaaactatgtgaatataatataagccactggaatatayatatatgtatatatatattattttattggaaatatatacatattttat

SEQ ID NO: 914050 - DNA, 625 bp, Homo sapiens
gacctgaacaggcctgttcttgcatttcaataaagaaatacctgagactggataatttttttttaaaattatactttaagttctagggtacatgtggacaatgtgcaggtttgttacataggtatacatgtgccatgttggtttgctgcacccatcaactcatcatttacattaggtatttctcctaatgctatcgcttcccctgccccctcctccatgataggcccccatgtgtgatgctcactgcactgtgtccaagtgttctcattgttcaattcccacctgtgagtgagaacatgcagtgtttggttttctgtccttgtgatagtttgctgagaatgatggtttccagcttcatccatgtccctgcaaaggacatgaactcagccgtttttatggctgcatagtattccatggtgtatatgtgccacattttcttaatcccgtctatcattgatggacatctgggttggttccaagcttttgctattgtgaatagtgccgcaataaacacacrtgtgcatgtgtctttatagtagcatgatttataatcctttgggtatatagccagtaatgggattgctgggtcaaatggtatttctagttctagatccttgaggaattg

SEQ ID NO: 914051 - DNA, 647 bp, Homo sapiens
tttgaagccaagttgaagcccttgtgttgccartgtggtctggacataatatgagacactctgcaggagtctgggtagaggataaagttggagaaaaagagaatcataatcattattacaatgttgcaggccatgtgagccacatctctgctcaggagcactctgtgtgtctgttttatcatgcaggcagtacagcaatgtgtcacagagcttaagccaccaaggacacttgagagattggatgcagcaattcacaacttgcgaacttttgagacaagcacactaatacctatgtccaaggtttacttccaagagagtctcattcattggtctggcatagaccgtgggcatccagagtttttaaaaaattactcaggttattctactgttcagtcaggcttaaaaaacactaactaatctgcgcctagagaagttaaattattttcccagagtcacagttatttaacaacatagttcttgaacccagcctcctcaggactcctgtcagttctgtttcttctctgttgtatacacctagcacaggctatattagatgttttgttgggaaatatatatgtgggtaattgaaaggaagctaattattattatgtttctagctattgataaggaaacatcaatttagaatt

SEQ ID NO: 914052 - DNA, 669 bp, Homo sapiens
tattttacccctttagggttggtgaatgactaaaagcctaggtgtattcccaattcttagctgtagccagatatactattatattggagatactgaaaatgtcccatgtttacatccatatcatgagaacaatctagtggagctaaaattgtccatcgtgctccttcatcatgttcctaggcaccccaaagtccagctccctttccccagtgtcctacaacccgttatggtgcagctcatataccgctggtttcacggtcaatattgtctgtgtgctcaccatgaaaaacgtgcttctctctgtactccaccccactgaacttctaagacacctcatgtggaagctaaacacatgtcaaacttcttcagctttttaagatgtggcaaaaataagaactcaaaatatctgttatttaaaataaattgtgactgctctctgttatatcttctcttgacagtactttttattaagcgctttctctactgtatttgctggtgcatctgtaatgctcaaggcactgtaggggtagcaagataaataaggtatagctgtatacttgaagagcttagtcttacaaayaagttaataacaactagtgttgattgagtgctattgtaaacaatttacaagaaataactgatttagttcttatgacaacccttaagggg

SEQ ID NO: 914053 - DNA, 594 bp, Homo sapiens
atgtggattttaggatggtaatttcatttctggaaaaaaaggcttttgggactcrgatagggattgcattgaatctgtagatcaattgatggagtactgccatcttaacaacactgagtcttccattccatgcatgtggatgcctttccatttacttagttattctataatttaactcaatgatgttttatagttttcagtgcactttttgtgtacctccttagttaaattcatcagtaaatattttattattcttgatgttgttataaacaaaactgtttcttaattcattttcagattgttcattgctagtatatagagagggaacttatatttgtatgtttctcttgtattctggaaccttgctgaattcatttatgagctcaaatagatgtttcatggatttttaaatatttataaatacaaggttgtgtcatctgtgattagagatagtgttgctttcctttgcaatttggatgtcttttattctttttcttgccttgttgtccagtacaatgttgaatagaagtcatgatattggacatccttctattgttcctgactttatggggaaagctttcagtctttcacctt

SEQ ID NO: 914054 - DNA, 636 bp, Homo sapiens
gcagcactaaagatattttatctgcatctgtatttaatgagatgataactgcatttaactggsccacatctggcccaaaggacaggcaacagaagacacaaaacaacacaacatataagtttcataatcacagaatatactgatacacttcattgtgctgtttcaaggcagaaccataacatggcaatttgtgtctttttatatatatatataaccacatattaattgtatgttacattccctccagcatctttttgccaaagacactggaccataaaatttttggtttaaaagtttaaattgaataacatacaaaaggctcttgtgccagtgaaaatgactgctaaatattccagagcttgttagtaaaacaaaatagcattaccacatagtatcggtagagctacatcaaaatagtgctattataatcccaatttcagagacgtgaaacactgtatgacacagtttcaattttaaaaatgacaaacaaaaaacccctacaccttcccaagagttttaacactgtttatgacttaactgaaactcagtattaaaataaatatttttatattgtagaattactctccatatttgtgtgaacatcttaagacagcaggttaatgacatttttatcat

SEQ ID NO: 914055 - DNA, 665 bp, Homo sapiens
tgctaaccctgaatctaaacatgagaaaatatcaggcaaacaccaaataatgggcattctacaaaataactggtcaaaatataaggaggcctgaagtcccagccagagcaatcaggcaagagaaagaaataaagggcacccaaattggaaaagaagaagttaaactacattgtttgccaatgatatgatcttatacctagaaaagcctcaagcctcctccaaaagactcctagctctgataaatgaattcagtaaagtctcaggttaaaaatccatgtacataaatcaatagcactgctatacaccaacaactgccaagctgagaatcaaatcaagaactcaattccttttacaataaatgcaaaaataaaataaaataaatatctagaaatatatttaaccaaggaggtgaaagatgtctacaaggagaactaccaaatgctgctgaaaaaaatcatagatgacacaaacaaatggcaatacattccctgctcatggattggaaaaaatcaatatcatgaaaatgaccatactacccaaaacaatctacagattcgatgtaattcctaccaaaatatcaakatagtttttcacagaattagaaaaaacaatcctaaaattcatatggaaccaaaaaagagcccaaataaccaaagcaatcctaa

SEQ ID NO: 914056 - DNA, 625 bp, Homo sapiens
gaaggggcattctggtttttgagtttctgtgtttttgcattgattgtttctcatctttatgggcctatctaccttagatttttgaggttgctgacctttgaatagggtttttgaggggtcttttttgttggtggtgttgttttctgtttgtttttcttttaacagtcaggccattctcctgtagcactgctgcagtttgctgggggtccactccagaccctagttgccttggtttttctgtacccagaggtatcaccagtgaaggctgtgaaacagcaaagatggcaggctgctccttcctctggaagctctgtcctaggagggcattgacctgttgctgttctgcacacacctgtaggaggtggctggagacccctgttgggagatctcacccagtcaggaggaatgggatcagggacccacccaaagaagcagtctggctgccctttggtagagcaggtatgctgcattaggggggtaccattcctcattcagatcatttgtatactacaaagccagcaggctggaacagctragtctaccaaactgcagagatggtggccgcctctccccctgggagctttgtagtagggagagatcagagctctctctgtagaacccttgc

SEQ ID NO: 914057 - DNA, 613 bp, Homo sapiens
ccaccacactcagctaatttattttttgtttttaattttttgtagagatggggtcttgttatggtgcccaggctggtctcgagctcctggccttaagcattcctcctgccttggcctcccagagtggcaggattacaggcatgagccactgtgcctggccttaacataattttgaaataaaaaacatataatccctgagaaaaccaaataaatctaagtgtgtattgagctggttagcataacccacagagaggaacagacaggaactcagccaactggctttaaaacacagggatttgattgtatatccctatcggcgtgtatcataaaggtacccaaagtgcagaaaacactgtaggctgtttttaaattatcattactggtgttggtattctgagattcttacgtgtattgtgagatagaataaacaacgaattatatttataggaggaaggaaacattgacatttgaacaataaarttaggaaaaattcttgcattcttgaatttgagttggacatacaatatgaactcaaagcattttagtattttttagaaacatggtctacctctgtccacagagaagggccagaaactatggccggcccagtaac

SEQ ID NO: 914058 - DNA, 675 bp, Homo sapiens
ctcttcctaatgatgctgagcaggactgacaagccatgttgtctccacaagggcagagcccagacgcctgagtcacccctgcctgatcaaccttacaggctgtacacacagtgacacaaccagggagaagtaggaaaatgggcagttccctttaccttaattccgtcatgtttttacagtatgttcttgctgatcaagccaattcaagcctgacaaaaaaggagaggacctgatcaagagtttgtctagattttgttcactcacggtcatcaaaaaggcctccttgggccagcactgcctccacattcacaggtccaggccatggccccgtgaggtggtggaaaactgggctcacagtcagcatgaaccccacaatcagcccagagtgcatgatgtgcctggaaatccattgaagaaaatccacttgttgaccccacaataactaatgaagctgaactgcagaaaggtaacatcagtgtctaaacccagaaacagattttcttagcctgccagcagaatggaaggaactgataggagaaatttggggaaataaagataaagatawcttctgagaggctggcagtctgagaggggccagaagtgtaagaaaagatataataaaagcctgggcacaacagatataaatgttgtaaaccagttagaaataataattct

SEQ ID NO: 914059 - DNA, 607 bp, Homo sapiens
agaaagacttcaaataaaatggctgataattttccaaaattgttgacagatattaaaccacagactcaaaaaactcaaarcaccacaacttggctaattattaaaaaaaaaaaatgcacccaccccagacatacaatgtaaaatctactgaaaaccaaagacattcagaaaatcttaaaaaaacagagaaaataaaatgaaatatagaaagaaaagttatagcaattttttcatcagaagccacagaagccagaagttaatgttacaaaaatcttttacatgctgaaagaaaaaatagtttactcagaattctgtacactgaaaataaaaagaaaacacaaacaacattttcagaaagaaaagtctatgaggattcattccctacatacctatactacaaaaaatgttaaataaattacttcaggatgaacatccccaatacacatagtcatcagatcctgcaaggtcaacataaaagaaaaaatattacaccaggcccagtggatcatgcctgtaatcccagcattttgggaggccaaggcaggcagattgcttgaggtcaggagtttgcaataagcctggccaacttggagaaaccccatctcta

SEQ ID NO: 914060 - DNA, 581 bp, Homo sapiens
tatatcttcctctctaatgcactgcatcttcctttcagcataaagcatactttttaaaaattactataagttctgggatacatgtgcagaacgtgcaggtttgttacataggtatacacmtgccatggtggtttgctgcacccatcaacctgtcatctacattaggtatttcccctaatgttatctttcccctaacccctcacccccaacaggccccagtgtgtgatgttcccctccctgtgtccatgtgttttcattgttcgactcccacttatgagtgagaacatgtggtgtttggttttctgttcctgtgttagtttgctgagaatgatagtttccagcttcatccacgtccctgcaaaggacatgaactcatccttttttatggctgcatagtattccatggtatatatgtgccacattttctttgtccagtctatcattgatgggcatttgggttggttccaagtctttgctattgtgaatagtgctgcaataaacatacatgtgcatgtgtctttatagtagaatgatttataatccttagggtgtatacccagtaatggaattgctgggtcaaa

SEQ ID NO: 914061 - DNA, 629 bp, Homo sapiens
aaacctgatagacacctacagaattctccaccccaaaacaacagagtatacatttttctcaccaccacgwggcacatactctaaaaatcaatcatataatcagaagtaaaacactcaacaaactcaaaacaagtgaaatcataacaaaaaatctcttggaccacagcacactgaaattagaaatcaagactaagaaattcactaaaaaccatacaattacatggaaattgaataacctgctcctggatgagtcttgggtaaataatgagagtaaggcagaaatcaagaagttctttgaaactgaagagaacaaagagacaacataccagaatctctggaacacagctagggcagtgtgaagagagaaatttctagtactaaatgcctacatcaaaaagctggaaagatctcagtttaacaacctaacatcacaactaaaagaactagagaaaggggccggacacggtggctcatgcctgtaatcccagcacttttggaggccgaggcaggcgaatcacaaggtcaggagttcgagaccagcctggccaacgtggtgaaaccccatttctactaaaaatacaaaaaattagctggacatagtggcaggcacctgtaatcccagctatttg

SEQ ID NO: 914062 - DNA, 658 bp, Homo sapiens
agctaattatgtagcagaacaaggccttacatatctgactctgcagtgtagactgaccccgtgctagtgatgtggtctatgcccatttgttcatacaagctagtggctgtcacagatgcatatacagattatgaagcaaggggatttgtgttatgatggaggtatgagaatgttgctccttggtgcaaagagtaaagcagcatctagtgtggaggcggtaagcaagaattcccaaggagaggagagcactgtctgaaaaatcataagagttggagtggccgccatggagaatgcacaggcacatagtgctgggatggaacagaagcaactaactggagctagagataggttaggaccaactgggaagagcatgccccctcccagccttctcccaccacatgcacacacacacccctacctctttgcccatttaaataattaattcataaagcaaacaagaaacattctatttctctccttgaaattatcctaggaatttctaggaacccataaacagtagcaaaaagattctttgattgagaccaataaaaatctaccttgtcttagtccccaaaccttgtttactttttattttcttttgaaatgggttctcaytctgtcacccaggctggagtgcactggcatgatcacacctcac

SEQ ID NO: 914063 - DNA, 591 bp, Homo sapiens
ccaaagactaaatacattgaccttggactcaattttgagctacacattcatttctctagaatgttggtaaaagttgcagaagtagagtcatctgtatatttctcttcaagtccttaaacttttagtaaaccattatttatggatctaacacacttgtaaacaatgccagcaacatattatttgtcctgcatgcttataaaattcttttttttttttttggtcatggttagatgattcccggtaactacattttaattctaattctgagaagtaagtaacaaaaaaactataatccttaaaaaaatcagttgaattaacaaaggcacttgcttcacacaagattaaattaggccatatgaaaagttactttgcataatctcttcatgactttgcatctagttatttccaagctaatatatctagcctctaattcaaaaagaattgtagacatgactttattatcttccttatggaaaatttcttgataaaaattaggttgcttcactattgatttgaatctaattttagcagtggttagaagttccaacacagctttctacaagkatttgagatttgacatccatcttagta

SEQ ID NO: 914064 - DNA, 680 bp, Homo sapiens
gaatatagtctggatattacatattaggaaattactgttagttttataagttataatagtggttttgtagttattcacaggaaatgtgtgctgaagtgttgagggataaatggttgtgatagctgcaactgattttcaaatgatttaccaaaaatattacccatacataatatacctattatatatgcatacatatgtatactcatattcatctagatagatacatatggcaaaatgtgtggtggttatattggtgtttcttacaatgtttttttctgtatgtttgtacatttttataataaaaagagaagtgggaaaaaatgtttttctttgatcttcttataagagaaagagggcaattactattataatcataaacattaggagaatgcttaccctgcgtaataaagaaattggcctgacccaaagagaggtctggtccttgtccctggcttctgggaggtaacctttaaactcttagaattttccaagtgaaagaaacgtcttgttattcatggtgggctagacaactcctggtagtttatgctaacaaggttacccatggtgtggcccttgagccatgtggtgttagcrtgacattggagagtgaggggagagactagaaactgagtttaaccacatgggcaaacaatcattcatgcctacataatgaagctcca

SEQ ID NO: 914065 - DNA, 657 bp, Homo sapiens
actcacacgtttcaagtgatgtaaaccttttcttatgctaaattcttcccttaaccaactcagttggctaaggacaaaagaaacctacccagcctccagttcctatcattagttcatggctattactagtggaatgggaagcatgggaaagcatggccttatcaaattataaggatgctggaagttgaggccttcatccaggggcaaaaggaaagctcatagtaggccattgcctctggagggaaagtggcactggtgcccaccaaaggtcagactggaccccaaagggggataccctggggcatcctccagacctcaacctttccaaaggggatgccctcagcagaggttctgtggtctcttactaagcccttcttagaattttctctcacagttgcaatactgtttggctccaatattgtttggaatctggagtttgctgttgagtgagaaagtcggatggagttgcatgtattcagacttttgtgctgctgttctcagcagggaacatggttaatgtgtgacgctctcctttggtgctgtttgrttccagtgttctttggagtctggggaggtttgtcctttaaaaataaaactgccatggaaactgctttatgaaattttgattcacagccttcattgcattatctattggga

SEQ ID NO: 914066 - DNA, 580 bp, Homo sapiens
tccctcagacatattattcacatatattaaatggtgattcttaatgcmtgttatgatgcaaattggttttgttcacctttaaattaaaatccttgtttccacatatgtgacaggacctgctttttggagttgtgttgcattgatattatgccacttccagcagcgtcatttaatagagcaatttttgtcaatagctccttttgatttccctctgagcataatatttctgttaacttagcggctgactttacaagcttccagataatgcagtgcctggtacttattgttgggggaagtgttgatttgaatgatgcctgaatgatcctgctctcccttccctacacttagtggaaaaataaacaactttgtcctctaaatcatgtttttggacttgttatgaaagaatataaaaacaattggtttagcaaaaaggacagtgtattaaaaaaagagatcaatgtatcaatgacatcagtacacaatttggtaaagcttaataacagagcacatattggggaataggagtaaatggatcatgaattcaataaaatcaattttttctcatgttaatggtattttt

SEQ ID NO: 914067 - DNA, 593 bp, Homo sapiens
cttaggtaaaactctttttttatcagaataagttatcgtaaaatgattgcatatgaatctctgtgtgctttcatggattttctcaaaaaaaaactatcaaactaaagcaactgtcagtacagtcttgtggttcttaggagagatcaaagagggttattataatgcataaatcatgtatgtttatagtatgtcatagacattcaaatggatgtaactacaatacatttagttccctaatctgctatatagtagacaaatggtttacatttgttgtagtttttacttttgattcgaaacactctaacttgggttttgctaagctgaacattgttttaaatctcaccagacaacttgattcatttcatagtaatgctctttgtataccatattttggcctacagcaaatctcactgaatacatgagcactgaagacgttgagacatactcagtcaattgatagaatggcctcagcttcatggtaattttagattcctacacatacatctcrtggcagaccatatatttatttattgaaaagatatatacccttttttaaaaagtaaaatatatcaataaagttaaagcagatgagg

SEQ ID NO: 914068 - DNA, 391 bp, Homo sapiens
ccttgaatgttgaaagattttttctactgctgttaacagccactagcctaattgatatgagtatgtcgtatatgtgtttgaccccccagcaatcctgtaagctgattatggggagggacaagcttgatctttgttatatcccatcatgtacaacacaatgtctgaacaaaatatgtgcccagaaaataactatttaattggaaatgactttgaatttgaagccctctgaccagcttaaacttggaggctagctgtgataaactccactgtgtctgcctccaggctacacctcttcttaagacattgcttcctargccatggatatctactcatagatttgaatgggtttcaacaggtcctaagctcagaactgatgctagcagctgaagct

SEQ ID NO: 914069 - DNA, 597 bp, Homo sapiens
gtcctctgccattctcaggacaagctcctcactttcctgtttgcacctgctaagtctcagtgccaggaacagtaacccatgcttattcagtcactgtgtaaaagcatataaggaaattcctggctgctgtcaactaatccattttcgccttcatcttccactcagcctggtgtaagcaaagactacaggaagagttctgaatgtcagagaaatagaatccaatggccctctcacctcagaacagctagtggggtttccagctcctcttcttccttacttactaactttcaaacctggaacctgtgaaacccagtgaaatctttctttacatacaattacagctaaaatccacaattgagtaatagtcagattatcctctcctaaaattgtcatgatacactattattgcatggatagagggatctctgccagagacccactgtgctcttatttcagaactagatagaaagtgaraggaacatcacacttaatcaaaatccttggatgagaacattgcagggttcaaaatcatggcactagaccatgtatcaagtctccagaagaaattaaaaagaactttttgtgcaggaaaatata

SEQ ID NO: 914070 - DNA, 634 bp, Homo sapiens
tactgagcactaagatgtctttagtccaggtcccagctctctcatttattctctatatccttgggcaatttactttacctgctctaactcaaggtaaaaagaaaacaaacaaacaaaaaatatgggaatcacaaccacaaagttataatgatagcctggttgccaagactggctctgaggggcagatcaggtctttcaaacccagaatccaaaagaagtagagagattaagcatgatacaggtgattgcccacaccaggaagatccaatcagatgggcaaaaaacaaacatgttccaggtaaggccagtcggtaaagtctatgcctgcatgacaatatgcagtactcactttcagttcagacttttgtggatttgaatcttaagtctgccaccttactacctgggtgaccttgggtaaatcacacaacctctctaagcctcacttctctgcagcctcgcattttttaaaggagggtaatagttttgctcatagaattgtttcctgttgtttgcaaaacaaacattatagtacttggtacagaattggtgcttaataaattatagttctcataactcaacttctaagcgtaaccagatgtgagtcaaagaatgytgctcactgccctgcactcac

SEQ ID NO: 914071 - DNA, 490 bp, Homo sapiens
tattttaacactgcagatgatttttcagtatggtctgaggtggtatagtcatacatgcacttgatcttgcttcttttctcatagctaaaataaactctagggttgggcattaaaaactatggttttaagcatttaaacagtaagaagtttctattctatttagaaataaattttacaaaataacaatgtaactggtatggttattcattattaactaagaacaaagccaattttatgtgtgtacctgagtaaatttgtaaagcaaactccttagcaaaatattgtcaagctccctatattcaaactaagtcaaaatgctaaaagtctctgtattttggagaccaacttaaatacgttcattttcacaaccagttcccaaaaacttgtcwtaattaaggattgaaaatgattgctactatgtgaacatatctaattactgggaatttactctgatcagctttggttcttaagttgctatgtctctagattt

SEQ ID NO: 914072 - DNA, 607 bp, Homo sapiens
cgatgttcatcaaggatattgacctgaagtttcctttttgttatgtctctttygggttttggtatcaggatgattctggcctcatagaatgagttagggaggagtccatcctcctcaattttttggaatagttttggcaggaatggtaccagctcttctttgtatatctgatagaattcagctgtgaacccatctggtactgggcttttttcagttggtaggctatttattactgaattaattccagagcttgttactggtctgttcagagattcgatttcttcccggttcagtcttgggagggtgtatgtctccaggaatttatccatttcttctagatttcctagcttatgtgtgtaggggtgttcataatattctctgatggttatttgtatttctgtggggtcagtggtgatatcctcctcatttctgattaggtttattttgatcttctctattctgtgttagtctagctagcagtttatctgttttattaattttttcaaaaaaccagctcctagattcactgatctttttgaagggttttttttttggtctcagtctccttcagctctgattttggttattgtcttctactagctttggg

SEQ ID NO: 914073 - DNA, 674 bp, Homo sapiens
tgattgataaaaaagtaaaacagtcttattgccatatgaaggaagttttagtggtctagatagaagatcaaaccagcgataactttcccttaagccaaagcctaatccagagccaggccctaactcttcaattctatgaagactgggaggagtgatgaagctaaagaaaaaaagtgtgaagctagcagaggttggttcatgaggtttaaagaaagaagccacctctacaacatgaaagagtaaggtgaagcagcgagtgttgacatagaagctgcaacaagttatccaggtgatgaagttaagatcattggtaaaggaggctacactaaataacagatttagttatttatgtagctaaggtgacaagacatccttctattggaagaagatgctcatctaggacttttgtaactagagaggagaagtcaatgcctggcttcaaagcttcaaaggacaggttgactctcttcttaggggctaatgcagctggtgactttaagttgaagccaatgctcattaaccattctgaaaatcctaggtccattaataattatgttcaaactactctgcctgtggtgtataaatggaacaataaggcctggatgatagcacatctgtttacartatggcttcctgaatatttttagaccaccattgagacctattgctcagaa

SEQ ID NO: 914074 - DNA, 649 bp, Homo sapiens
gagagacactgcactaaatcttatttgcctcattcacatatatagtgacagcactagcacttacttcatagaagtattggaagatgaaataagatagtgtattatttgtatagtattgcgtgaagtgcctagcacatactaccttttaaataaatggtagttattattgaggtgttactgctttattggtggtgttgatctggaaatgtatatgggaacttcaagagccttgaatgggcttcagttttgctcaattatctgcattgttttaaaggagtttcccacagatgttaactatcatcctggcttaggtggactgcaattgtgtttgcttcactacacatcttagcagccaaaagagtgtctctcttgttactacttaaattcttcttgtgccttaagaggtataggaggaggagaatccaatgtttctgaacagttttgttttatagccagatacaactgttacagtcaaagcgctacttgctccaatattagttatctatggctatgtaaaaaaactatcccaaacttagtacaaaacaaaacaaaaagccatttaaatcatgcagtttgaggggatcagttrttcaggagaagcctagctgggtagctctggcatgagatcctgcctgagatcgcagtccat

SEQ ID NO: 914075 - DNA, 643 bp, Homo sapiens
aaaaagaataaaactggatccatcatactaccagacttaaaaatatactacaaagttctattaactaaaacagcacagtactggcataaaaactgacacataccttcctctgcckctaggacttcaatcaagtgtttttagatcacttgatactgtcacacaggtcataaagtgctgtttatttgtaaattttctttcttttttcttcagtttgaatgctttctgtttaactcttttaaagttcactggtcctttcttcttcattttttaatctaacacaaattttatctatatatattgtattagttcattttcatgctgctgataaagacatacctgagactgggtaatttataaggaaaaagacttttaatggactcacagttccacatggctgaggaagcctcgcaatcatggcagaaggtgaaattcacatcttacattgcagcagacaggagaggagaatgagagccaagtgaaagggaattccctttataaagtcatcaggtcttgtgaggcttatttactaccacaagaatagtatgggggaaaccgccccctggattcaattatctcccactgggtccctcccatgacaggtgggaattatgggcgttacaattcaagatgagatttgggtggg

SEQ ID NO: 914076 - DNA, 565 bp, Homo sapiens
tgtttatgctgctctatttttcttattcagaatgctctttcacaaaatttccacagttgatgttctgctacacttcacttttcaccarctgcattaattattcttgaagtctatctagtttccattagttataacgaatttatctgtattctgtacttaaagcagtttgccttccagctacttccaccatagttgtaccctaattagtttgtgcatggcttattattttcttaggcaacaaactttatgagctcttacatctacatagttgtttgatcaattacagagttaatacatgatgtggctggcacagtggttcatgcctgtaatcccagcactttgggaagctgtgacaagaggattgcttgaggccaggagttccagaccagcctgggcaacaagcaagaccctatctctacaaaaaatttaaaagattaaccaggtgtggtggcacatgtgcctgtaatcattgctactcaggaggctgaagtgggaggatcacttgagcccaggagttggaggctgcagtgagctatgatatgtactccagccctattaacagagt

SEQ ID NO: 914077 - DNA, 544 bp, Homo sapiens
ataatccccatgtgtcatgggaggaaccaggaggagatcactgaatcacgtggtggttcccctttcctgttctagtgatagtgagttakttctcatgagttctgatggttttataagggacactcattcttctctctcctgccacaatgtgaagaaggacgtggttgcttcactttctgccatgattataagtttcctgaggcctccccagccatgctgaactgtgagtcaattaaagctcttccctttataaattactcagtcttaggtgtgtctttattagcagcatgagaaaggattaatacaatgccaaatctgaaatatgtcagtttctcccagaaaataagttgccacataaaaaggaatatttacattttaaaactctgttatgcttttttaaagttgctgaagtctggaaaactctgaaacctgttaataacagcagtggacaaaccaacttggattaatatctcaaatgattcctaattcaggcatatttcaaaggcccatacttttctctgatgctttaaaccaattatttcag

SEQ ID NO: 914078 - DNA, 613 bp, Homo sapiens
aagaaaagtcacaatgtggtgacagcttgcttcctattctcagagaaatgagaagcaaagtcagcctggagtagtgataagatatgtttgctgtttgtggagaagtgagaaagcgtatgcaattgaggataatccgtttattttaaaaaggtccccagtttgccatgattagacttaaagattttttaattttacagtgatgtaaaagcaatgtacattcagtagaaaccatactttgagaacctatataaccgttgtttttaacttcagtgtagtgttcaattaattacatgggatattcaacactttgatataaaataggccttgttttaggtgattttgcccaactgtagtaacacaggtgttctgagttaagctgatctataatgtacaatagactaggtatattaatgctattttgatttaagatatttttaatttaggatggttttgttgagatataactccattattaacccaaggagtatatttacttgtcacacatacatatttatacctacatgaaagtgtatatgcaaaactaaaagccaaagcgaatcacacatgtgtattccaaataytatcaattaactctgtattggtgcctatgttc

SEQ ID NO: 914079 - DNA, 634 bp, Homo sapiens
gctcaggataaaaaaattatatctagccataaaactacaggattctcatcttaaaaattgtgtcaaaataaataaatgaataaataaaatggggcatttaaaacagracataatggtcacacgcttttctctgcacattccaataagtaaataaagaaaaacatttattttttcttataaaccagaagatttataggctattgaaattaacataaaattgaaatctaaacctattttaaaggagagatgccaacaaagttaataattccctctttagaaccctgccccaaatgctgagtaattagagacacgagatacctgtaatgcacacacatgcagaaggtgtatctaatatggaagaactgatgaaaaggaaccagaaatgttgttgcccaggccttactctaggccactaactcttctcccttctagccaagggtgagagatgcattctatgggaagttgaaacaaaacaaattatagtcaccaatcctagctgagagcagcaataatcaccttattaaaggacagtcaattgaggatgaaaaccattgtcaactgcttcccctaagctctcaaaacaacaggcaggattttaccttccagactgaaaattggtatattgttcccttgg

SEQ ID NO: 914080 - DNA, 610 bp, Homo sapiens
caggtaaatctaaacaaagaccaattgtaatttgagagtacttattacctacagacctctactaaaggaacttctgaaagtacttcaggaagaaaagactgacttcagaataaaggtctgggatgcaaggagagaaatggcagacaaagaattgtggaaatgtgcaggtaaatctaaacaaagaccaattgtacagtataatttttaaaggcttaatcatagagtttgaaaagaagacaatacacaaagtatgtggttttttgtttgtttgatgtttgtttttgagacagagtctctcactctattgcccaggctggagtgcagtggtgcaatcctggctcactgcaacctctgcctactgggttcaggggatcctcctgcctcagccactcaagtagctgagattacaagtgtgtgccaccacgcctggctaatttttgtatttttagtagagacagggtttcatcatgttggccaggctggtctcgaactcctgacttcaaatgatccgcccaccttggcctcccaaagtgctgggattacatgcatgagccatcatgcccagccaaagacaatacacaaaagatgwgaatgaaaaagaatgaaatca

SEQ ID NO: 914081 - DNA, 602 bp, Homo sapiens
tgtctcatcacttttaataaatcttaataattttccatatttcctacaggccaattttaataaataaaatcctgaagaaaagtcaccaatgcacccttcctaacrgcattccttctcttcctctatataaacactaccctaaatttggtgtttatcatttttgtgcatgattttatacttttaccatatatgtacatgtgtccatgttggtacctgtggttcaggattaccttctttcatttcataatggactaaaatttctttatccattctccaacagtggatatgtaagaagtctccagttcccccattacagacaatgaagcaggcaataaatcttacctatatttccttgtacacgtatgctttagtttctccaggatatttatctgaatatgtgcacattcagaattatgcgaatgtgcttgttttaataggattcttctggaaatagaatccaaacagagattcgtgtgcagagtctatttgtgaattgataccaggaaacaccaataatggaattggaggagagacagggtagtggaggtagtgaataaaggatacatgatcaaacaagttactgggtaactggagtttaatcc

SEQ ID NO: 914082 - DNA, 602 bp, Homo sapiens
tgtctcatcacttttaataaatcttaataattttccatatttcctacaggccaattttaataaataaaatcctgaagaaaagtcaccaatgcacccttcctaacagcattccttctcttcctctatataaacactaccctaaatttggtgtttatcatttttgtgcatgattttatacttttaccatatatgtacatgtgtccatgttggtacctgtggttcaggattaccttctttcatttcataatggactaaaatttctttatccattctccaacagtggatatgtaagaagtctccagttcccccattacagacaatgaagcaggcaataaatcttacctatatttccttgtacacgtatgctttagtttctccaggatatttatctgaatatgtgcacattcagaattatgcgaatgtgcttgttttaataggattcttctggaaatagaatccaaacagagattcgtgtgcagagtctatttgtgarttgataccaggaaacaccaataatggaattggaggagagacagggtagtggaggtagtgaataaaggatacatgatcaaacaagttactgggtaactggagtttaatcc

SEQ ID NO: 914083 - DNA, 564 bp, Homo sapiens
tgcttatccatgtacaagatcatgccatctgtgaatagagataagagataattgattttttcttttctgatattgttgccatctcttatctttctttctttcttccccccgccccaaccccmaccccaccccctggctttttcacttatgccatagaagttcaatattgggcagaagtttcaaaacagacatccttgttggtccttgccttagttcaggttgctatgacagaacaccatagactggatagcttaaacagcaaacatttatttctcacaattctgagagcttggaagttcaaggtcagggtgctagcagatttggtatctgctgggagccttctttgtgttttgcagacagccatcttctcacggcttcatacagtggagagagagcagagagaaagccagctctttcatgcttcatcttataaagacactgatctaattgtgagggcccatctccaacaccattacattgggcattagggttttaatatataaattttggaatggaaaaaacactaatttcatagaagtccttacttaagttggaaagcattca

SEQ ID NO: 914084 - DNA, 580 bp, Homo sapiens
tttaaatgatcatttattttcatcaaagcctgttctatatatgccacttcattttctaacttttggtatgaaaaaatcagtttacttacartatgttaattgtattgtactactataaacaggaacataatttccaattcagttttaaataattttaccagtactactaacttttaaggaaattaattcagttggttactcagtgtttgttacagaaagagtccagaaaagtattcaccctaagagaatgtcaatcatataatgataatttgtgaaagctttgagaatcaatcatcagtaagttactatcagtttataaaatattatcacatttgtttaaatgtgactttagatacttttatgccaaaaataaactcacatgagcacatgacagtctgagctctataatcagtgtgcttctgctgtgcagaaatgttagaaacgtattgtctaaatatctttgataattaaaatgtttaatatttaatgaaatttgttgttacttgttttaaatcttttttcttttaataaagatttaaataagaaataactgcctgtcttttggtttctttaatctaga

SEQ ID NO: 914085 - DNA, 628 bp, Homo sapiens; identical to SEQ ID NO: 913910

SEQ ID NO: 914086 - DNA, 588 bp, Homo sapiens
acatccatacattcagagtaaaggcatggaggaaaatcttccaagcaaatggaaatcagataaaagccagayttgcaatcctaatttcagacaaaacagattttaaaccacaaagatcaaaaaagacaaaagaggtcatgacaataatggtaaagagtgcaattcaacaagaagacctaactatcctaaatatatatgtacccaaaacagaagcacccagattcataaaccaagttcttagagactcacgaagatacttagactcccacacaataatggtggagacatcaacaatccactgacagcattaggcagagacagaaaattagcaatgatactcaggacctgaactcaacattaaaccaaatggatctgatagatctctacagaattctccatcccaaaacaacagaatatacattcttctcatcgtcacctgacacatactgtaaaatagaccaaataatcagatataaaagaatccttagcaaataggaaaaaactgaaatcataccaaacacactttcaaaccataatgcaataaaattagaaatcaagactaaaaaaatttatcaaaaccacacaatt

SEQ ID NO: 914087 - DNA, 574 bp, Homo sapiens
tctgcaaatgatatcttccaatctgtagcttgtcttttcatcctgttaacagggaattttagagcacagaattttacattttgatgaagcctactatcttcttttttcttttggttcatgtgtttggcgtcatgtctctgaactctttgcctggacttagttcctgaagattgccttctattttttcttctaaaagttttgcagtttttattttatatttatatttgtaatctatttttaaataatgtttttacagtataactttcagtccaagttttgttttttgttgttgttgttgttttttgcttttatcttatatatgtaatagctccagcaccatttaaaacatttgtgttaaaagacacatactataaaatttaccatgtcaagcattttttaactgtgcagttcaggggcattaattacattcacactgttgtgcaaccagcaccaccatccacctccagaactttttcatctttccaaactgaagcttggtrcccattaaacaataattcccaatttcccatccccccattctttggtaaccacatttctactttctgttgctatg

SEQ ID NO: 914088 - DNA, 592 bp, Homo sapiens
actcaccccacccaacaacaggccctggtgtgtgatgttccccttcgtgtgtccatgggttctcattgttcaattcccacctatgagtgagaacatgcagtgtttggttttttgtccttgcaatagttcgctgagaatgatggtttccagcttcctccatgtccccacaaaggacatgaactcatcattttttatgactgcatagtattccatggtgtatatgtgccacgttttcttaatccagtctatcattgttggacatttgggttggttccaagcctttgctattgtgattagtgccacaataagcatacgtgtgcatgtgtctttatagcaccatgatttataatcctttgggtatatacccagtaatgggatgtctgggtcaactggtatttctagttctagatccctgaggaattgccacactgccttccacaatggttgaactagtttacacccctacactcccaccaacagtgtaaaagtgttcctatttctccacatcattgtctcttttaatctttgttgktttaaagtctgttttatcagagactaggattgcaacccctcccttttttttttgctttcc

SEQ ID NO: 914089 - DNA, 393 bp, Homo sapiens
ctttattttgagcctatctgcatctctgcacrtgagatgagccccctgaatacagcacactgattgttcttgactctttttccaatttgccagtctgtgtcttttaattggggcatttagccccaattaaattaaccttacttttaacgttaatattgttatgtgtgaatctgatcctgtcattatgatgttagctggttattttgtctgttagttgatgcagtttcttcctagcatcgatggtctttacaatttggcatgtttttgcagcggctggtatcggtcgttcctttccatgtttagtgcttccttcaggagctcttgtaaggcaggcctggtggtgacaaaatctctcagtatttgcttttctgtaaaggcttttatttctccttc

SEQ ID NO: 914090 - DNA, 393 bp, Homo sapiens
ctttattttgagcctatctgcatctctgcacgtgagatgagycccctgaatacagcacactgattgttcttgactctttttccaatttgccagtctgtgtcttttaattggggcatttagccccaattaaattaaccttacttttaacgttaatattgttatgtgtgaatctgatcctgtcattatgatgttagctggttattttgtctgttagttgatgcagtttcttcctagcatcgatggtctttacaatttggcatgtttttgcagcggctggtatcggtcgttcctttccatgtttagtgcttccttcaggagctcttgtaaggcaggcctggtggtgacaaaatctctcagtatttgcttttctgtaaaggcttttatttctccttc

SEQ ID NO: 914091 - DNA, 504 bp, Homo sapiens
agagaaacaaaggaaaagagacataattcaggaacaacagcctttatatcctcacatagaaacaaaacattgggtaatagagggaatgttttyctataagaaaaactggtaaagatgcaggaaaaataagatgaaaaaaatctgctaagcagctcaaggtctaagaagttttaaaatgtgcagatggcatcccagaaatgatgtctggggccatgacatccagggtccccacatttcctcctcattgagcctgacctgtactgccatctttctccccaggtttaaagaaagtttaacgaataggaaaaataaaagtattgattattttttaatttgtgcgttccctgtaggaagcctcgcagatttcacagtgtacattcaaaccctcaggtgaaaaatttatgactggagttcatttgggtggagacagtgtgcagtgtcattctgttcaaatgctgtatgtagcatttcatgccacgaagtgcagagatcaggagaagagag

SEQ ID NO: 914092 - DNA, 609 bp, Homo sapiens
caagagtagtggtttcttcaaaatccccaatctacatcttggaactctattctgtgcaaattcatttctcctcaaagatgaaaataaakaaacttatttaagacttaagggtaaggcaaacaaaaaatgcatagacaaaatttagaatacctaataatctgggatttaacctgaaagtctttaaaatgcactagcatttaatttgagagagagaaaaaaaagaagaccctactgctgtatatttctgttcaaaatttactgctgtttctctggaatagaaaagaagcagtttctgttgagttggcaaattaatgtgcttgaacagaataaagagagcaggccaaggaaatcacactgcttttaatactttctttgcaaagagcttttttggaccaagtccatgactgctacaagtaagtactcagttgcaagaagaatgtgagtagagatcaagtaggctggagctttttgttaattcactcttaatgttactaatgttaatttgaatctggagacttaagatcaaaccaagcggctaatattctgcaaggccccgttccctttcctagtgattcctgggggtagaaatcatttcttaaacctaatata

SEQ ID NO: 914093 - DNA, 613 bp, Homo sapiens
tatttagagcctcagttaacatcttcgttcgaatgaggtctaaatgttctatgtaatatttatgaattactgtatactgtaaaacacttttaattgttgtgccattagataatttcraaatatttaaactttagtgtcctctgaattgacgtctcttctgattatcttaaaaatttcaacttttgttgactcctgtatcaccaacaaaattttactgatttttcctttgtagtgtctctagcatctatcttctccattcccataacaaccagtctaaccaaagttttcttcattaacttgaaattcttccagttagtctccttgcttctagaagtcttgaagctgccagatcagattattaaaatttaattgattgcaatagcttcctgtgatgacaactcttacctccaaaggagattattcatgcagtaggatgtattttacttaaaaatagcaaagctggctctggcatatctctatattatttcctagcagacaactttttgcagcttgtaagaaacttagtggtgggggtggagaggaagtgagagcattccctcatcagcaaattatatttcagtgctgttacaactcagcataagcgtaagatttt

SEQ ID NO: 914094 - DNA, 367 bp, Homo sapiens
ccctgcaaaggatatgatcttgtttctttttattgctgcataatattccatggtgtttatgtaccatattttctttatctagtctctcattgatgggcatttcggttaatccatgtcatttctattgtaaacagtgcttcaaagaacatacgtgtatatgtgtctttattataggatgatttatattcctttgcatatatacccagtaataggattgctgggtcaaatgttatttctgattccaaacctttgaggaatcaccacactgtcttctataattgttgaactaatttacattccccccaacagtttaaaagcrttccttttcctctgcaaccttgccagcatctgttatttcttgacttct

SEQ ID NO: 914095 - DNA, 613 bp, Homo sapiens
atgcacatgtatgtttactgcggcactattcacaatagcaaagacttggaaccaacccaaatgtccaacaatgatagactggattaagaaaatgtggcacatgtacaccatggaatactatgcaaccataaaaaatggtgagttcatgtcctttgtagggacatggatgaagctggaaaccatcattctcagcaaactatcgcaaggacaaaaaatcaaacaccacatgttctcactcctaggtgggaattgaacagtgagaacacttggacacaggaaggggaacatcacacatggcgcctgttgtagggttgggggaggggggaggtatagcattaggagatatacctaatgtaaatgatgagttaatgggtgaagcacaccaacatggcacatatatacatatgtaacaaacctgcacgttgtgcacatgtaccctagaacttgaagtataataaaaaaatacatatttaaaaaatttcagttagaaaggaagaagacattcaagagatctattgtataacattcaggmtatagttaataacattgtattcctgaaaagtgctaagagagtggatgtcaagtgttcttatcacaaaaatggtaataacta

SEQ ID NO: 914096 - DNA, 582 bp, Homo sapiens
tttctttttgaaatagagacatcagcataatgacgtctgcttcaagttttctcggttaggggggartttgagtttcaatctttttgacattctttacaaaatctcttgtgctcatcaaatagcagcatttgtaggatgtctagaatgtgtaaaatttgagcaatgataattagaatctgaaagggaaagtcacctttaaaaaaaacaaaaataatgagaaaacgttttcctttttcatggcccagacctgattctgtttatacattcattgtgagtatttattgttattgaactaaaaaagcttactgctgattgagtttttcctctcatcttattgattgtaaggaaaacttaaaatgactactaggctgccaaaaagtctttattgttaactataatttgttagcataataaactatgaatattgcaagctccaatttccaaaataagcataaaagatgactgaatacaaaaaggcaactaaatagaatgatacactgcactgataattggagaaaacactctgtttgaaatgtattcacttcagaatgagaataaaatcttacaaaagtagactgcttc

SEQ ID NO: 914097 - DNA, 694 bp, Homo sapiens
ttctctagacatagatgaattaacatggcaaaatatttttaataggaattacaacttaagattgctccaggtgttctattctagtttattcatattttgtgttcagtctcctttcaatrctttcgaatttacttgcattatgacattagcagaaggaagaagaaattctctccatttcaccattgtatctttagcctctagaactgtgcttaaagcagagaaggcactgactgaaacattcagtttgacccagactagtctctccttttactgtatctctgctaaatgctatctgtactaatttatttgcttctctctacattacttcctcatgtctatcatcactttaaccacctgatggattcccattccatttttaatcctccattccagctgtagatctccgaagtaactccctgggtagagttaattgttcttctccacacacccagcatcttgtatattcttcaaactaatatttaagaaggttaattacataattccttgtcttcgtcatgactaaaatccagaatcttttggtgtgtgtgggggcaacatccaaattaggacactctcattcaagacaaaggctaaatagaaaacaacaacaacaacaacaaaaaaacaggaccagcatgaactgggacttcagatggctccatatgtaagcaaaggggcatattttaatctgtgt

SEQ ID NO: 914098 - DNA, 601 bp, Homo sapiens
ccattttccataatggctgttctaatttatatccytatcaacaatgttcaagtgtccccttttgccacatcttattgaatacttgttatctttcatcttttagataataaccattctaacaggcatgaggtagtatttcattgtggtttcaatttatgtttttctactgattagtgctcttgagtattcttttcatatactgttggccatttgtcttcttttaagaagagtctattcatgccctttactcatttttagagttggaatatttgttttcttgctactgagttgtttcagtttcttaaatattttagatattaatctcttaacagatgtatggtttccaaatattttctccaattctgcaggttgtttcttcactgtggtaattatttcctgggctacgcagaagatttttaatttgatgtaatctcatttgtcttttttttttttacttttttggcctatgcttttggttcacatccaaaaaaatcttttctcagaccaatgtcatgaacttcttcctcaatgttttcttcaactaattttacagtttcaggtcttacatttcagtgtttaatcttttcagtttatttaatta

SEQ ID NO: 914099 - DNA, 362 bp, Homo sapiens
aaagtattgggaagttgtcagggtcatagtaataaatgaaacttcatatctgttcatgcctttttcaccagcttagctttaataaaataaaagtttaataaaataaaaacctcttttgaaaaaagtagcacccccataaattctcctctaaaaatacaagcaaaaatgtgtgtgtttgtgtgtgttagtatgtacttgcacatcccaaactcagaaaggattcttttgttttacctgctgctccaccaggttttgatgaattaacctgccattgtggtgcatcagtgatttaccctccagttycctgtggtactaggccccctgaatgtacccaaacctgcgctagagtccatgagtgtgac

SEQ ID NO: 914100 - DNA, 637 bp, Homo sapiens
gcaatgtaaaaaatgttcagcacacttttataaaatagcttaatattgtagctgtacatctaaagggaaactgataagcacagatatcactatagttgtgaatcgaactgaataatgattagaagaacaaacattagagtgaataaactcagcagaaaggacatgttctttcatttctcttgtgtaactatctagatttggacaagctgagccatatggcaggtatatgtttactttttgaaaaatccccaaactgttttccaaaggaattgttccattgtacattaagatcaacaatttgtgagtgttccagttcctttacatccttgctagcacttggagcgttagtcattctaatcagtatgtactggtacctaattatgatttgaatttgcattgcctcataactaatgatgctgagctactttttctgagtttatttgctatcttcacattttctttggtgaaatatttcttaaaatcttttgcccattgtttttattgggatatctgttttcttatttttgagttttgagagttatttatatattcaggatgcaatttatatattcaagatgcaagttttytgatggacatatgatttgtaaatattttctcccagtgtatagcttgtctt

SEQ ID NO: 914101 - DNA, 554 bp, Homo sapiens
tcatgatctcctctttcattcctcttttacttgtgcggagggaggctaggactggaatcccccargggtaactcttctctcttttctctcttcttatgctatatagctctttctgtgaatggaacagggagcagaagatgaaggatatatcaccattgtagctggtgactactgtcaatcatcactctttctgtgacgaacactgacttgctgtgttagccttgctgagctggctttgaggagaggcaggtgtgtattttcagagggccctatgggggcctcctattccacagtttttggcatgagagatgtggttgcagcttcagctcttccaactgtttacagaattacctagtgttgccttagtcagcagccagccttcctgggtggcaagtctgctcaagtcttaagactgtgttgttgtagttatttgtgattcgcttcaggatatgcgcctggtagttgttgtcactttatgtccagtatttggccctagcagtcaattctgggcttctgaaagaaactccacttaaaaataacattgtatgagtcac

SEQ ID NO: 914102 - DNA, 683 bp, Homo sapiens
tcagtcagaagagatgactttaaagagtcaaacccctaaggaaggtggtttctgggtaaaaatcatatgaaggagcatttagtttcattttcagtgtttttcttctgtagcttttcataaggaatggttaaataattgtaagttttactgtgtatagtgtattcacaccacagacacacacagatcatttgagttcatctacttaaaattcttttagaaaccaagtcacagcgaagttaatgtcacagtctaagttaacatagcttgtttgtacagagttgggactgagaaaatatcttgtttcaatgcattgccagaatcctgtagcattttgtaagcagattaatttcttcaaataaatattttaattggctctctgcttgcttgtttttttttaacagaaatatatctacctgttttctttaacagttatttcgagaagtacgaataatgaagatactgaatcatcctaatataggtatgaaatatatatatattatatatatatatatatataattagcgatgaagtgttttccttaatttgagggtatttgaaaagacacaatgtttaaggatagtttatttaagcagaagaaaagtgataacctgagtgataaccccaggaagtgatactttgggtaaaaatmgattacaaagaagctaactggaggctacagattg

SEQ ID NO: 914103 - DNA, 479 bp, Homo sapiens
caggaatgcagaagaccaatctgccccacatctccattgttgctggacttctccatttatacatcctaacgggcttcacacagaacctatccaaaacagaaccacacaagttcaagttgtattccatgctccacatctcaatgagcagttgttactcaaggttacccagaccacaggttagtgagtcccatttggactcctctctacctgctctccattcagttgtcaagttctatcaacttctttttcaatttcctttcacatttctctttctttctagctccaatactattgctctaattcaggctactttaattttttcctagtctggaagaatgttttattcataggacattttcaataactatcagttaaatggctggrcgactatagaagcttccttttaactggcaatcctgcctcccagacaattgtgctatatgcctttcatttataccccatgctttaatgaaagttct

SEQ ID NO: 914104 - DNA, 736 bp, Homo sapiens
ttcctcagcatggattgcaaatcagagttgcatttacctctacgtgagaaaaacatagacagttggcaagagccatcttgttttastctaccaatttattgctgtttgatgccttttggtaactctggtatagatcagatcatctcaactcgtagtcctcaactagcctctattcaagtgagtaatctgcaaatgatgtttctgaaaaacctcaaaagtggagcctgaattgacagtgttgtctggggtcttagtggtttctaataatcctgtcaaatttccttgtaaaactaagagaactttattgattaggccactgctgtttgcaagaaggcaggaggatgggacaaaagaataaggcggggaagaagagaagggaatagaataaacaactgagttatggtgtttcttagccacaagtcatcggataaaaccccttgctaagaaaatatcttgctgtgcaggtagattgtcgcacctagcaatgcctccttccgtcccttggggagctggtgtgctgagtcagaggtttccaatagccccacataaggtcaatgcattaagtgcctctgttgcttgctagactcggttagaccctgctgtgttgcagctctccaaagtggcagcagagagagacggatctggacctgttcagatttcttgagaaaagttctgaggagggtataatatgggaagggctatggcatactttagataacccagatctgaaacagaa

SEQ ID NO: 914105 - DNA, 607 bp, Homo sapiens
tacatgttcctggagtgaaagactcaaaatagtaaagatcttcattttatccatattgatttatattattaatgaacaaattttattaaaaatcccattaagatatttttgtagatacagagaaactgattctaagatgtgaccctaatctaaacagaaaattaattttgttatatatacaccttatacatgtaccccaaagataattgtatacaatattttaaataattatgtgcatgaaacggagttcacaaccaaccaaaagcaaaggtgtcactgtctcagatgcccatgtggacaatctgtggttgcttgacaattaccatcattcctgactctgaatttatatgctacagataagcaatcattttattacatttattcacacataagtacttaacagtaaaaaagataacatgccattaatactatgaacaaatcgtgtgttcaggataactaagcaacaaagtagcatcacccaccagaatacctgtatccratgttaaacaacagcaacaccaaacaatggctgcagtcttcacctacaatgctgtacagatgagtgtacattgtattctatatttttagtcgcaaagtaacatcagaa

SEQ ID NO: 914106 - DNA, 597 bp, Homo sapiens
aaaccccattttgcttcctggacctaaccaatagactgtgagctgcatyggtcaataacaattaacaagtttgcatgcctcatttgtataagcagaccagagtgggaacctgaatggggattctctgtgaaaaaagagcgatctctgttgtctccaacacaccttcgctttgtaaggaaggcaacatctcccctgtttgcaaaccactcactggaatcgtctcctttgtttttttaaaaagaaaattcttttcagtggatttgttaacaagtggtttaaaagttctatctgtggctaatggagctaataacatgattaaaaaagaacaagtccagcagcatacaaaagcttttaaattacccatattacaagacaagtattagagtattttagagatgaaagagcacttagaggcaatctccaagtaatccattcaagtaagagattctgtatgcaatatcaggcaaagttatcaatctgccaaactaaattaatgtcttttgtccagtttacacacgtctttttcttaaatgtagtaatgtatgaaccaagtaattaaaattaaatttgtatttacaatgttcacattaaatatgg

SEQ ID NO: 914107 - DNA, 601 bp, Homo sapiens
ttgggtatacatacatattttcttgttgtgatagccaaaatggtctggaagcaatcacaacccactagcaatgagcatatctagtgcccatatttggtttctaatactgttctcctgytaaaggatacagggctctttgaaggaatgcctggttctaggacaggtcagaaaacataccaaatgagcgcaaagcattttagagcagcagaaaataaagaagtgttctaacaaaataaaaagactccacaacgataggggtatgacaaagagacacaagatccaactgaaagagttcccagtggtcaagtggaacaatatgaacaacaaaatcacaataatcatgtattgaattataacaaaatataaaataaatatctataagttcatattgataaataaatgattgtataaacatgtaaatgggggaagggagacaaatgttctgggcatagaattccaaataattattatgtagaaactccatcatccaagcagtagagcattctcttcactccttaagtgtggaatgtatatagtgactttctgcctagtacagtatggaagcggtgtgtgtgtgtgcagtaactttacagtgaagaaa

SEQ ID NO: 914108 - DNA, 579 bp, Homo sapiens
tgggtctattttcaggtggaaaactcaaaactaaacaaaggattggctgggtacagtggctcacgcctgtaatcccarcactttggggaggctgagatgggcggatcacctgaggtcaggagtttcagaccagcctcgccaacatggcgaaactccatctctactaaaaatacaaaaattagccgggtgtggtgacaggcacctataatcccagctatctgggaggctgaggcaagagaactgcttgaacccgggaggcggaggttgcagtgagctgagatcactccattgcattccagcctgggcaacaaaagtgagtctctgtctcaaaaaaacaaaacaaacaaacgaaaagccccccaaaatataaaggattaaatgctaattaactaagtacaattcccattcgctcttttctaatcttgctgtcataaaacgacctaaatttccttttattcttattggcacagaagctagggccaattaagaaaagatgatgtcattcctgagaattctaggaaagttgggactacgtttctcattgtattaatttatgtataagttttcccaagaatggag

SEQ ID NO: 914109 - DNA, 621 bp, Homo sapiens
cattttctcactgctgataaatacacacctgagactgggtaatttataaagaaaagagatttaatggactcatagttccatgtggctggggatgcctcacaatcatggtggaaggcgaaaggcatgtcttacctagcagcataaaagagagaatgagaaccaagtggaaggggaaaccccttatagaacaactgaatgttattcacaaccatgagaacaatatgggggaaactgcccccatcattcatttatctccaactgggtctctcccacaacatgtgggaattatgggagctacaattcaagatgagatttcggtagggacacagccaaaccgtatcagtgagctcttgtccttcatccaagaagaatgaggatacactgacagtttgaaggttgaagatgggcagagaagaattttattgagtaatgaaacagctataagtggagaggggacttgagggagggtggtccctcacccccacagttgggtggtttctctcttccagtgtggctgggtccagggctttttatgcactcagaaaggggartgtgtgctgattggcttgtgagtatgcaaaaaaggttaaagcgaagacaccactcaaaggtgggcacaac

SEQ ID NO: 914110 - DNA, 621 bp, Homo sapiens
cattttctcactgctgataaatacacacctgagactgggtaatttataaagaaaagagatttaatggactcatagttccatgtggctggggatgcctcacaatcatggtggaaggcgaaaggcatgtcttacctagcagcataaaagagagaatgagaaccaagtggaaggggaaaccccttatagaacaactgaatgttattcacaaccatgagaacaatatgggggaaactgcccccatcattcatttatctccaactgggtctctcccacaacatgtgggaattatgggagctacaattcaagatgagatttcggtagggacacagccaaaccgtatcagtgagctcttgtccttcatccaagaagaatgaggatacactgacagtttgaaggttgaagatgggcagagaagaattttattgagtaatgaaacagctataagtggagaggggacttgagggagggtggtccctcacccccacagttgggtggtttctctcttccagtgtggctgggtccagggctttttatgcactcagaaaggggaatgtgtgctgattggcttgtgagtatgcaaaaaaggttaaagcraagacaccactcaaaggtgggcacaac

SEQ ID NO: 914111 - DNA, 544 bp, Homo sapiens
ggaacatgacatgacaactataaaacacatgaaaaatgatttatatatgattaattcaataagctaggtgtaaaaataccctggaagaggagatggttctaatattgaaataattattgcattccctctatacggatattctaagtaacacgtgtaaagctggtgatttatagcatccagatatgttctgcaaagtccatcacatgccttggtttccctgtcaatctgcacggcatacccagacacacatggtgttttctccttaaatgcaagttcttaggcttcacaatcagattctgagtagcaacacattaattcaagcagattgatgcctcaaggagtctctgtggccttgcctttccatttgctcagtagtgaaagggatttcataaatgaaaacaggccagggcttactcagttcaatcttcctgcccacgccactctcttccttttgacaactaagccaggtgtttggagaacaatgtcagtggggtttgtggaatgtyacacttggaagattttttttttaaatcagtaaataagc

SEQ ID NO: 914112 - DNA, 660 bp, Homo sapiens
gtggaagtaatgttaattgagtattggaagacaacattgtataaagtactcttcctagattctagacatctccaactagaatctacaagwgctgctgtacagagaagtaggttactacctagagggagacgccgggtggtgggagggtgtgtttgctttgcttgttttgcattttgttcaatagtgggagtgactgagcatttttgaatgtaagaatgtaaattacttaagccactatggaaaactattgggaaatttatcaaagaacttaaaacagaactgccattccacccagcaatcccattactgggtatatatccaagtgaaaatcaattgttttaccaaaaagacccacgtacgtgtgtgatcatcacagtactattcacaatagcaaagtcatggaatcaatccaggtgtccatcaatggtggattggatttaaaaaaatgtggtacatatataacatgaaatactatgcagccataaaaatgagtgaaataatatcctttgcagcaacacatatgcagctggaagccattatcctaagcgaattaacaaaggaacagaaaactacattctacatgttctcatttataagcaggagcaaaacactgggtattcatggacataaagattggaacaatagacactggagactact

SEQ ID NO: 914113 - DNA, 630 bp, Homo sapiens
tcactcagtatatatttattagtgccatttttgttgttccaatatatttcaggtactatgctaagtgctttacatgtgttagcttaataattctcaaactaatcctacatagtaggtagccccttatctgggtaaattatttaatctcactgtacctctgtttcttcatctataaaatggcaatagtaatagaatagacatcatagggttgttgaggcattagatgtgtttgcacaggtaaagtacttagaacagtgcctgacatacactccaatttcaaatattaactgagaatcaccactaccaccctcatgcttcatcatcatcaccacctcattttgaatgtgaagtaactgagactcagagaggttagaagaaaatattgcctcaacttctctctcagacaggtagactgaacacacactgtgacctctccccccttccaccaaattcctagaaatcattttctatatacatacagtaaccacactggacagaaaaaagagaaacaaaccctcactaggctagatgttgtgatgaatcccctctggacagaaagtagctacaatctgatttttaaaaagaaaycacaggccaggtgtggtggctcacacctgtaatcccagcact

SEQ ID NO: 914114 - DNA, 637 bp, Homo sapiens
tgaggagggatgggtcagcatcaagcctgaagagttgctctggccacagtctgccacatagccagtgtgttaggttgtgggggacatcccttgggaccaagtcatccagcctccctggctccagcaggggaaaattgtggcctcaagctatagagatggctcccacccttcccctgcccatggagcttagtgtgttaggcagctgtcagtcccagtgctggcggttgcctctccccccagggagctcaatcagcttaacaggcagctgcagctgtggtgctggtcacccatctctccaggaactcagcaggggagttctagaaactccctagaactgaactctagttaagttctaactagaaacttaatcagattctagctgagatgctgttgagaatctgcatggctctgatgttagaaccctagtccctggtggcatggatttataagtgggatcttccaatacgtgggttgcacagttctgtagaaaaagcatggtttccctagmtgggtagcacgctcactccccacctccattcagccaactgactttcaatgaaggcaccaaagacataccatgggtaaagtgtatcctcttcaataaatggtactgggaaaactggatatccatatgcag

SEQ ID NO: 914115 - DNA, 610 bp, Homo sapiens
aagtgttcttgcaagaaaaagaaaaaaaatggcaattttgcttaaaaattggtcccttcactctctctgagcatcaaaggtagtaaaaatccggtgcctattttcttacctataatgctcaggggagatgaatgatttcacctgagagtggcttttatgccctcctttgttatattattccataaaacatggaagattggaggaagaaggagtcagggatgagtgagcatgctgctgtcctcccagaattcctttgtaattaattggtaaaagtatgaataaacaaatccactaatgttttcttgaatggctaatttattaatgaatttcaaatataaattcattattattcttcacaaatatagttctagttttaaagattttctttgctttttattttttaaatatttttatttactgttaaagttatttaatatattgttgtttctctctttccattgtaatgtaaggcacatgaggacagggcctatgtctatgttcttctttacataccccaatgattagaatagtgactggaacatagtaggtactcaagakatacatacaaaattagtgatttttatttttatgttcaacctcttatctaaat

SEQ ID NO: 914116 - DNA, 610 bp, Homo sapiens
aagtgttcttgcaagaaaaagaaaaaaaatggcaattttgcttaaaaattggtcccttcactctctctgagcatcaaaggtagtaaaaatccggtgcctattttcttacctataatgctcaggggagatgaatgatttcacctgagagtggcttttatgccctcctttgttatattattccataaaacatggaagattggaggaagaaggagtcagggatgagtgagcatgctgctgtcctcccagaattcctttgtaattaattggtaaaagtatgaataaacaaatccactaatgttttcttgaatggctaatttattaatgaatttcaaatataaattcattattattcttcacaaatatagttctagttttaaagattttctttgctttttattttttaaatatttttatttactgttaaagttatttaatatattgttgtttctctctttccattgtaatgtaaggcacatgaggacagggcctatgtctatgttcttctttacataccccaatgattagaatagtgactggaacatagtaggtactcaagagatacatacaaaatkagtgatttttatttttatgttcaacctcttatctaaat

SEQ ID NO: 914117 - DNA, 498 bp, Homo sapiens
cacactgtcttccacaatggttgaactaatttacactcccaccaacaatgtaaaagctttcctatttctccacatccttgccagcatctgttgtttccagactttaatgatcaccatyctaactggtgtgagatggtatctcattgtggttttgatttgcatttctctaacgaccagttatgacgagctttttttcatgtttgttggtcacataaatgtctaagaaatgtctgttcatatccttcactcactttttgatggggctgttattttcttgtaaatttgttcaagttccttgtagattctggatattagacctttgtcagatgaatagactgcaaaatttttctcccgttctgtaggttgcctgttcactctgatgatagtttcttttgctgtgcagaaactctttagtttaattagatcccatttgtcaattttggcttctgttgcaattgcttttggtgttttagacatgaagtctttgcccatgcctat

SEQ ID NO: 914118 - DNA, 630 bp, Homo sapiens
tatttctccttcacttatgaagcttaatttggctggatatgaaattctgggttgaaaattcttttctttaagaatgttgcatattggcccttactctcttctggcttgtaggctttctgaagagagatctgctgttagtttaacgggcttccctttctggataatccaacctttctctctggctgccgttagcattttttccttcatttcaaccgtggtgaatctgatgattatgtgtcttagggttgctcttctcgaggagtaacttgtggtgttctctgtatttcctgaatttgaatgttggcctgtcttgctaagttggggaagttctcctggataatatcctgaagtgtgttttacaacttggttccattcttctggtcactttcaggtacaccaatcaaacgtaggtttggtcttttcacatagtcccatatttcttggaggctttgctcattcctcatcattcttttttctctaatcttgtcttcatgctttattttatcaagttgatcttcaatctctgatatcctttcttccgtttgatcgatttggctattgatacttgtgtatgcttcacaaagctctcgtgctgtgtttytcagctccatcaggtcatttatattcttc

SEQ ID NO: 914119 - DNA, 631 bp, Homo sapiens
ttttttttttttgagatggagtcttgctctcttgccaggctggagtgcagtggcgtgatctccgctccctgcaatctctgcctactgggttcaagtgattctcctgcctcakcctcccaggtagctgggattacaggtgtgcaccaccatgcccagttaatttttgtgtttttagtagagacggggtttcaccatgttggccaggatggtcttgacctcttagtctcgagatctgcctgcttcggcctcccaaagtgctgggattagaggcatgagccaccgtgcctggccaaggccgactaattgtttcatccaactacaacttgggagccagagttaactggtgcatagtgacagtaccagcattttctctagtatataaagaaaaatagtacaaatgccagaagtctacatgattctctggtctctccaaaggataatgggttctagcagtttgctagaactccccctgatgcaatggaattctagaagaagaagtggttagatcttcctacatgaatgagagaaggtgtcacagagatgctagtatttaggctgatatttcaagtatgagcaaaaattttctgtaggtgtaatagagcaaaaattttctgtaggtgtaatagagatg

SEQ ID NO: 914120 - DNA, 588 bp, Homo sapiens
tttcaaaggaggtatcaatagtgaaccaataaccagatctagtacaccctttcatacaggccttttccatagtgtcaactactgaatttatctctttgtgtgtggcaaggccaggaatttctaacttgaaattgtggttatatctccaattctcaccttaagctaaaaatacttaaagatgtcttgaaaaagtgtttttctcttacctataacaagacttttcataacatctttgacttctcccttttcttgttaccaggttctgttgctttccttcatatatttctcatagccccattcttccttcttattgtcacattaccttcttgcatcaattcttttgaatagccttttaatatctagcttctttccaccagaccattctgctcactgctgctagataaattttcttaaagcaatttttattctttcattcattcaagaaatacttatcaaatataatgccctgagcttcatgccattcccttgctcaaaaacyattttactataataatattccctttctttttccatgacccaacacttctgtggggtgaaatacacaccttaataacaatgactcactac

SEQ ID NO: 914121 - DNA, 670 bp, Homo sapiens
attcctagagcttttgcagtgcctygttgtcttgaggtaagaaatatggttggctcagcagcatttgttaatttatgtaagaaggaaaatgaatcacatataaacatatggaaatatccaaatgccaatttttttttaggttagttctttgcgtcctcattttccttttagcctggggtttacattatcaacttttaacattaaacagactccttgctcttagttttcaaatgcgtgtatgtatgtgtgtgtatgtgtatgtgtgtgtgtgtgtgtgtgtgtgtgtgtgtatgtatatatatttcagactaagtaaaattagtgttttctttggacagaaaactgacaaagaatgggaaatccttactttagaatattgcagttaagggtcatgaacatttaagcaggagttactgccatccagaggcagaaagccatgaactgccatatcctattacagttttactataaaggaagtaagccaagaaaaatgtgtaggttgttgcagttttgctcattaaatcatcaaagaatggaaaactaatacctagattcaagtgtcactgggtttgtgctcctactgtcatcatgaatgacggaatatatttagcattcttcaaagctttcatcgtgaaggagaatgcagctttctgtgatctaaggctaacca

SEQ ID NO: 914122 - DNA, 622 bp, Homo sapiens
attctgactggcgtgaaatggtatctcattgtggttttgatttgcatttctctgatcagtgatgttgagctttttttcataagtttgttggctgcataaatktcttcttttaaggagtgtctgctcatgtcctttgcccactttttgatggtgttgtttgcttttttcttgtaaacatgtttaaattctttataaattatggatattagacctttgccagatgggtagattgcaaaaattttctcccattctgtaggttgtctattcacgctgatgatagttttgtttgctgtgcagaagctctttcagtttaattagatcccatttgcaaattttgacttttgttgcaattgcttttggcgtttttgtcatgaagtctttgcccatctctgttttctgaatggtattgcctaggttttcttctggggtttttatggttttgggctttacatttaagtctttaatccatcttgcgttaacttttgcatcaggtgtaaggaaggggtccagtttctgttttctgcatatggctagccacttttcccagcaccatttactgaataggagatcctttccacattgcttgtttctgtcaggattgtcaatgttgtagacggttgta

SEQ ID NO: 914123 - DNA, 698 bp, Homo sapiens
ttggcttttttttttcttccaacagagagacctttaaaattgccatgattttgtattattctctcattattagtaattaccctggaagaaaatgtgatgttaatgcccagtaaaatgtaktctctctcactctctctctctcccctcttcagacattctctttgtatttacttttcacactttattttataaattgcaaattaaatacctttcttaagggcttctcttattatataaacctaaattgggcttaacaaattgagaaacatatatgaagtatttcatttggatacaaaccttaaataaaaatgtagctgaatgatatgtgacctattgaaaactaaataaagtaagggctcctaatgactaaaagtatagaaagggaattatctgatctcaacatgacacagaaagaaatctattttttgatagaaaaaattaataacatattaacatctggacttcatgtggatacagtgttgtttaacaattagcagcagtgccttttcagctgcattcctacatctgggaacaaaacatcataggaactaaaaataaagacaaggagaaaataaaaaattgcctgctgtaaaatagcacagttactctacattataaattaaagggatcttgtcaccctctttgggagtacaaacacactttctgcaatagatacaccccagatactacccagagat

SEQ ID NO: 914124 - DNA, 608 bp, Homo sapiens
aattattcccgggggagaagaatataatgataaggtatcaggctctttattcaaagaactaatcagattttagaaagacacaacaatgcactgtagggtttctraacaggctataatgacctgttccccacaatggttaaggaagtatatgtttagcagagaatgagttttccgggtttttgagggagggctcagagaaggaggtgggaaaccccattgtgcagcagcaggagagataccaggcctatagtaagaatattctctttcgaaaaattgaacgataatcctaatagttgcaatgtattaattcttcagtctctttctaggaaaaaaaatgaagttattgtgaaagagatctgcctcagagaggctaccttgcaagacaggttgattatggctaatgaattacacatggcttattgcatttcacaaagaccaaaccacataataatattctcatgagatcacgtcagaatcagccgcatcctgggctcctgcctattgtggtcagaaaacccgatagagacatgcaggttttcctatctaatattactcttagtatttaaggagtgctaaaacgtaggtgaattgagctttctgaagaaata

SEQ ID NO: 914125 - DNA, 618 bp, Homo sapiens
aaaaccccagcatttacatatgaacagatcagaacgggtacctgaggaagccatacttcagctttttaaaaaataagaataaaattagaatgtcttccaaatgatcttttatagcccagcttatgctcaaacaacattttagagaagcttctgttggtcattcaatattgaattctgtttttcttctatttctctaccactcaattagcaccttactttaaatatcccattctaatgtcctgtgacatgtcagctgatacagtttggctgtgtctcacccaaatctcattttgaattctcagatgttgtgagagggatccagtgggaggtaattgaacctttgggcaggtctttcctgtgttgttctcatactagtgaataagtcacatgagagctgatggttttaaaaatgagagtttccctgcacaagctctctttctgcctgctgccatccacataagatgtggcttgctcctccttgccttccaccatgattgtgaggcttcctcagccatggaactgtgagttctccattaaacctctttcttttgtaaattgctcagtctygggtatgtctttatcagcaacatgaaaatggactaatacatcagcactata

SEQ ID NO: 914126 - DNA, 633 bp, Homo sapiens
taagcatgaaacaaatcagcaatttaattagcatacaagacagcatgaatctggggtgttgagttaccagatgagcatttaattaaaagtttactgcaaattgtgatcacatgaggaaatattgcatgggtcagcatttggagcattaaaagcttattcgcagtaaagcataacatgcatgataactagcgtaatggcaaatacagaaatcctaataaggtagtgagattattgtccaattcaaagggtattgatttttacttgaataaagtttctttataccaaaattctaatttttgctaatgggacaaaaaagggacaagttgtgtcattttattcctttaataggacaccaaaataaaacacaaagaggtgaaaaaaattgagtgaagcaaatttttgagtagtggaccctcagaatgggaacccagtgaagactggattattttctcccttattctataaacagaattctattatagagacaagttgaaatacatctcaaattgttgccattgtcacagctgtaacttgtgactgatgtgtaaagaaccattacaagctggactctaagagagatygatatagctttcacctctgatagacactagccagaatctcttccattatggt

SEQ ID NO: 914127 - DNA, 612 bp, Homo sapiens
gtgatgttgagaatttttcatatgtttcttggccatttgtatatcttcttttgagaactgcctattcatgtccttagcccactctttgatgggatttttttttctcgctaattcgtttgagttctttgtagattctagatgttggtcctttgttagatatatagattgtgaagattttctcccactccatgggttgtctgtttactctgctgtttcttttgctgtgcagaagctctttagtttaatgaagtcccgcctatttctcattgttctgttgcatttgcttttgggttctttgccatgaagtctttgcctaagccaatgtctagaagcatttttccgatgttatctgctagaatttttatagtttcaggtcttcgatttaagtccttgatccatcttgagttgattttgtataaggtgagagatgagggtccactttcattctcctacatgtggcttgccaattatcccagcaccatttgttaaatagggtgtcctgatgatatgactgtatacttagaaaaccctaaagactcctscaaaaagctcctagaactgataaatgaattcagccaagtttcaggatacaaaattaatgtacacaaatca

SEQ ID NO: 914128 - DNA, 428 bp, Homo sapiens
agatgaggctgctgcaaaaatcaaattagttagcacatgcaaaatacttagaagagttcctggcatgtattaaacactcaatatttattggttcatgttatcaatatagtgttaatattatgcaaaatcttacgtatgtgagaatgaaagttcttaaaagaatactttagagtaatgttacttgaggaaaattagtaacttaattcagtaaagggagaacaaaacaatttcttttgcttaaataactggacacctgaatgggagtttttcctgatttaccaggaaacttaaacttttcatcttttgtgtttgaggtctggtttttgaaaacaaaatcctagccaggaagagtctgttcctatatgatttgtttctatttgaagagggaatgtggaagtggagtgtrggacaggaaccagatctgcaaa

SEQ ID NO: 914129 - DNA, 678 bp, Homo sapiens
atatagttggttgagaaatgattcaaagagtggccatttagttctctattgatcttcagttgtcttatttttaaaaaacttaattgacacataattattgtacatatttatggggtaaaaagtgatgtctccatacatgtataccatgggtaagatcaaattaggggaattagcatatctatcaccttagacatttctatttctttatggtgaaaacattcaaaatcctctcctagctactttgaaatatgcaatatattattgttagctattgctactctactgtgcaacagaatgccagaactaattcctcttacgtaactgtactttgtacctactgaacaacctctcttcatcctccccactccctcttcctccccagcttctggtaaccacgattctactctttagttttatgagatcaactttttagattccacatgcaagtgagattatgcagtatttgtctttttgcacctggcttatttcacttaacattatgttctccaggctaatccatattgctgcaaattataggatttcattctttttttatggctaaatatcattcaactgtgtaaatacaccacattttctttttccatttatacaatgatgaacacttagctcartttcctgtcttgggctattgcaaataatgctgcaattaacatggga

SEQ ID NO: 914130 - DNA, 639 bp, Homo sapiens
tcctactatcattaagactgtcctgttccagtgatggctgggagtaaatctgaacataaatcagaaaatcgcaggagatgtgtagtagttccttagttacaactatgagaatgaagtcgtacccttggagaattctagtgtgtgacttgaaatatacttagtaatccagtcactgaaagactgacagatttgctcattggtttctcagattccgcctaacaaggcctacgggacatggattctaaatgagaagaataatttctaaaaagtattttgacagttgcctttaaaaaaacagaaacattttatggcatatgtcctttatttataagactgatttttatagattatttagcatgcttgaacccaggaggtggaggtggcagtgagctgaaatcgcgtcactgcactccagcctgggcagcagagtgaaactcagtcttgggaaaaaaaaaaatgtcctctttcacgtgaattttaataaaatactatgatgcacataaaagagaagcagttgaactgtgctaagcatggggcttggccctaggaacactgcgagactgctgtctggttagkaagcagagtcttatatgcacataattacaagatgcatggattcatgcattaatagaagtatga

SEQ ID NO: 914131 - DNA, 718 bp, Homo sapiens
tttgagtagtgcctggcacatgtaggggcataataaatatwtactaaataagttgctaaaataagcaaaataattatagtttgtgataagcaccaagaatgaaataaacaagttgacagataaaacaaaggctgtccaccttggctacacattaaaaccacttgaggagcatttagaaatacagatagctgagttccattctcagaaattctgatttacttcatctagaagaggcctggccattgttttgttttttaatgctctctgagtgattctcaatttgaagcaagcctgagaaccaatgagtttgagaataacgtggggacaagaacctacttgagacagggtgcacagggaaggcttttcatgttcttctgagaaagtataattgaaatggaaacctgaaggacgaaaagaaacatggggaagttggggcaaggctggcattcaattgttggtagagggtcaaaacaagattaaaagcactgaagcagggatgagcttggtgtatcctcagaacagtagatcagcgcaggtggtgcacagggggcaaggggaagagtgtaacaggatgaatgtggagagatgcacaggagccagattattcagggtcttctaggccatgggaaggaaatatgaatttatactacatgcaatgggagccatgggagggttttgaggagggaaatcatgtgatctgattttttattttctaaag

SEQ ID NO: 914132 - DNA, 602 bp, Homo sapiens
catgtggatttcccctgtctcttgtgccaggaacttggaacacggcacaagaaaagtaggatggcgagcagggctggccttgtgggtgtgcaacatagcctgtgccgtggtacagggccccaactctgaagagccctatccttggtttaatgctctactctcactgtcttgaaattaactatttcagcaagaggcctcacatttctgtttttcactgggctctaaaaatgacacagcctgtcctgagggctgcagtggtgagtgggtgggcagcaggagatggtgtggataagaccaatggtcactcactgagttttgccaacctaatggctcatgaaggctccaaggctaaggctaaatgaatgtccagggacaccatatgcagcccatgagtggaagtggcaatggaggtacagggtatcaatcaagaactattcgagggtaccacacatctctccagcacttactatataccaggcaccgggttaaaccctgtgcatataatgtctaattaatttcttattatgagcagggcactgtggaaaaacagaaaaacactttaaaagtccccktttggggagaagcttactgtctagacagag

SEQ ID NO: 914133 - DNA, 621 bp, Homo sapiens
agagagggttgatggccttcatatataaagagcttataaatttgttaagaaaaatactaagacttggctgggtgcagtggctcatgactgtaatcccagcactttgagaggctgaggtgagcagatcacttgaggtcagcagtttgagatcagcttggccaacatggtgaaactctgtccctattaaaaatacaaaagctagccgggcatggtggtgcaagcctgtaatcccgactgctcgggaggctgggacgggagaatcacttgaacctcggaggcagaggttgcaatgaggagagatcatgccactgcactcctgcctgggtgacagagcgagactctggctcaaaaacaaacaaacaaacaaaacctaagactctaatggttaaatgggcaaaagattcaaacaatatctaaaggaggaattgtaaattgctaatgagtatgtaaaaaccattcaacttttacctagtgataaaacacataaaaatgactcaacagtcagatataaattctacccatcaaataagaggttttttaatygggggactaaatgatggcaaggagtctcaaatgggcactctcatgcgtggttactataaattggacaagatttctgta

SEQ ID NO: 914134 - DNA, 621 bp, Homo sapiens
ttcttgggcatgtagggtggctccagcagcctgagggaaggcatacacacttgagcacacctgagaggggcctgagccccgctctgtcctatttctcatgttcttatgctgaagagtttgccaggagcttgtatgaaactgaagtgctagagtctgttattcatggacaaaaaggggaatgctgtatttttggtaatatcccaatgccctatctaaaggaaagtcaaacaaggctggaagctggggctttgaattaagaaaatggcctcatgctccatttatctaaggtaaatttgaagaacacttctggggcttgggtccctgggaaggaagcaatatggtaggataaaggagaatacccagtaatctggggtgtaccacagggcatggaggaaaggggaaccctacaacctgactgctgcagtgctgccagggttcctgccaccctgtgatgaggagctcttcattggtggggcagttgggaagagcatgctgctctctttgggcaaagagatttcccatgtcatagactttgatctygtccgcactgtgagctccaggtcagacacacagagggaccgctaagccctagagtgcaacacttcactgcccattaacagt

SEQ ID NO: 914135 - DNA, 446 bp, Homo sapiens
atcaacagacaaaatgaatcacctaaacctaaaatctttgtgaatagtataaattgtcttttaaattaaatgcatatatttttatgttttactttttcaagacaaaagcrggatattagtacaatataagatttatagaggagcaaatttcttgagataggaaacccttaaaagcagtatttaaagtgcttaaatactgtcacatatgtttaataatcataatacttaattgtgagaactaggagctcatgttactactaaaaccaaataaaaattcaatacatatttgttaactcaatttaaggatgtttaccttaatactgacaaactatggatggtaacactgaccacactgagaacaggcaagtaatcctccttctgctccttggccaaaactgccacaaactacacacatatcctgaagttaagaaaacagaacatatttt

SEQ ID NO: 914136 - DNA, 550 bp, Homo sapiens
tcataaaatgagttagggaggagtccctctttttcaagtgtttggaatagtttcagaaggaatggtataagcctctctttgtacctctggtagaatttggctgtgaattcatctaatccttggctttttatggttggtaggctattaattactgccttcatttcagaacttgttattgatctattcagggattcaacttcttcctggtttagtcttggagggtgtgtgtgtccaggaatttatccatttcttctagattttctagtttattcgcatataggtgtttatagtattttctgatgatatttcttacttctttggggtcagtggtgatatcctgtttataatttttattgtgtcactttgattcttctctcttttttattagtctgtctagtgatctatctattttgttaattttttcaaaaagccagctcctgaatttattgatttttttgaagggcttttcgtgtctccatmttcttcagttctgctctgatcttaattatttcttgtcttcttctagctttcggaattgtttgctcttgct

SEQ ID NO: 914137 - DNA, 574 bp, Homo sapiens
gttgccttatgagaaatctaatttgcttttgagtagcatattgttttgaaattacacgacttattctggataacattaatagataactatcaaaatgcaagtccttgtaggaaagataattttgccacaytgtatcttgtcttttttaaagcatgttgaatatataatgagggcattaaccctgctataaaaacttaagcttctgcacatctttcctttgaggctaaactctgtaacttgaacattacaaatattaggcctgtttctctgaggcattggtgttgatgcgagtttcatcctaagatcaggttgtcagggcactgagcaaggcagaaagctacatttaaggagcttttgcaattagcacctaattaatggggtgataaacatgagtgaccggaggttccatggtctaacacagtgtcatatcattggatgtctccttactcatttaatcttagacttccagcagcagcaacagtgggcatggaagggtcttccggcccagctgagaatgctctgctaggacagaggtataagtgtagggaaaaacataaacagtaaaagcataatt

SEQ ID NO: 914138 - DNA, 604 bp, Homo sapiens
tctgttgaagctatgccccttgggactctggctcattgaactctcaggaagtcccttaggaaagctccsctttctgtactgcctttgcccaccctcaccaccttggggccactactctgggactctattctctctcaagtggcctcttacaaatacaaccatcctaggcagctgtcacatcacctcccgttttctcaagctcagcttctaccaaatatgcatgtcagaaagggttttagaggagctaaaatcagtgacttcatttttgaagagaatgactgtcatgggtaattgacagaattactgcatcttagccatagaagcattggaaattgtgcagaagctaaatggtttttgccactcaatatagttaaactctggaatgactttcgggggatacgtgatgaaagtagcgtgtttttctttaaccctggctactgaactggaattatggagggtcactggcattttttcaaagctctgtaggcaatttggataaacaaccagagctaaaactctggattagagagttagaccgacttttgaagtgtaacagggactagggttgtcaccttccacatgaaatcatgagcttttgggggct

SEQ ID NO: 914139 - DNA, 604 bp, Homo sapiens
tctgttgaagctatgccccttgggactctggctcattgaactctcaggaagtcccttaggaaagctccccyttctgtactgcctttgcccaccctcaccaccttggggccactactctgggactctattctctctcaagtggcctcttacaaatacaaccatcctaggcagctgtcacatcacctcccgttttctcaagctcagcttctaccaaatatgcatgtcagaaagggttttagaggagctaaaatcagtgacttcatttttgaagagaatgactgtcatgggtaattgacagaattactgcatcttagccatagaagcattggaaattgtgcagaagctaaatggtttttgccactcaatatagttaaactctggaatgactttcgggggatacgtgatgaaagtagcgtgtttttctttaaccctggctactgaactggaattatggagggtcactggcattttttcaaagctctgtaggcaatttggataaacaaccagagctaaaactctggattagagagttagaccgacttttgaagtgtaacagggactagggttgtcaccttccacatgaaatcatgagcttttgggggct

SEQ ID NO: 914140 - DNA, 605 bp, Homo sapiens
gtcaggagccccttattaaaggtcctctgttgaagctatgccccttgggactctggctcattgaactctcaggaagtcccttaggaaagctcccctttctgyactgcctttgcccaccctcaccaccttggggccactactctgggactctattctctctcaagtggcctcttacaaatacaaccatcctaggcagctgtcacatcacctcccgttttctcaagctcagcttctaccaaatatgcatgtcagaaagggttttagaggagctaaaatcagtgacttcatttttgaagagaatgactgtcatgggtaattgacagaattactgcatcttagccatagaagcattggaaattgtgcagaagctaaatggtttttgccactcaatatagttaaactctggaatgactttcgggggatacgtgatgaaagtagcgtgtttttctttaaccctggctactgaactggaattatggagggtcactggcattttttcaaagctctgtaggcaatttggataaacaaccagagctaaaactctggattagagagttagaccgacttttgaagtgtaacagggactagggttgtcaccttccaca

SEQ ID NO: 914141 - DNA, 508 bp, Homo sapiens
gatgtatagatttaaaaaggaaacatgctgtattcaaactcactatagattcatcttaagaataaattaatttcataactgtactcattatctgaaacatgcccccagagattctggtcattaccccaaaaccctgtaagggaagtttaatttatatcataagcatattcaaaggaatgtcttagtaagagtcccactaattcttaaagagctgggaaataaacctagactactattacagaaaacctttgcctttacggaagtaagatcataatgctcaggacttccccaaaattccatttaccttgttttagaaaatcagcaatagtactcaattgttatatatatttatttgattttataagcttgagaatggaaagttgggacatacatatttacggtacggaaatcaagatgatttctggccttctattttttccatctgccaatrgagagacctagcccagtgccaatgttcacttacctttcaattgcttatttgctagct

SEQ ID NO: 914142 - DNA, 621 bp, Homo sapiens
gttttagaggtcatcactcaatcaagtataatcctgcattaatattaaagcctaatatttaggggtaataatagagtcaagtgtcttcctgggagtgcattaataccatacaaacttttttaatttgccaaaccgtctgattaaaattattaagtagctctcttttgcaaggtgctgttgaaagtaattgtacatgcaacactcacggagtattttttcatcttgtaaaagggtaagttgctaaactttgattaaaaatcagacacagaactagatatatctgacattgtcacatatactattgagcgactttaatcaaattcagcattattatctttttatttgcttttactctgcctgcaggtacaataaagtgaaaatatgtaagcaatggagcatatttatattactagtctgtgtgccaggtgggttgtaaaataaatgtaattgttttcaaagattgaaccagattagcatggattaacacattcattttggaatccatggcaggaagtattctaaacatgccttcaaacagcccttgktactctgtttatatcccatcttagtactacaaaatcactgccccataaaacagggagcattttaactgtttatttt

SEQ ID NO: 914143 - DNA, 662 bp, Homo sapiens
aattcaatcattcgttcagtagatattcacttagtattcattacatgccataaatattagtatttatcacacgcaatacataacaccatgtgttatggggagacacaattatataagccmaatttcctgcttttaagatcacaccatagttgtgggaaaaaaaaaatgtgtaccatttggagataggaattcttggaatatgttaaactgttagattagaaaacgtttctaaagaccagctcccacatttcttaatgtagccttcaacatgagtccattgcatgaactaatgaaaatagaaactatagtagccttctttgactggatgggtctatgaataaagatgtaaacagaaaaacagtatgctgtcttttaggacagtgtcttttaggacagccagttgttgctgggacagacactggaaatttcatgttcattcaaatcaccaagtactcaatatcactgtgtttggcactatcaaaggatcaaggtgggaatacaatgtggtttctgcccctagggagtttttagagagaaaaaaattgcaaataaaggtgttagattgtttgagtggataaaagctaccctagtttggggtcattcatgttactcattatattcctcatctttacatacacaatgtattgttaaacttctattct

SEQ ID NO: 914144 - DNA, 694 bp, Homo sapiens
aaaccttgaacataaatgaactaactgccccacttaaaagatacagactgaaggaatggattaaaaaaacaaaatccaatcatgtgatttatacaagaaaccagcccaagtggtaaaaacatatagagtctcaatgttaaaaggtggaaaaggatttttccattcaaatgaaaaccaaaatcaagtgggaatagttatacttacatcagatgaaacagactttaagtcaaccatgttaaataaaattcgaaacatatatgtacccaatactggagcacccagcttcataaaataaatatgattagacctaagaaaaaagttagacaacaaaacaatacaccacactgacagagcaggaaatcaacaaaaaaattctggatttaaattgaactctaaaccaaatggccccaaaagacattaacagaacatttattcaacaatggcagagcatacattctcttctcttgtacacataggacattctcaaaaagagaccatatgctaggccacaaagcaagtctcaataaattttaaaaaatcaaaatcatatcaagtatcttctcagacyacagtggattataactagacatcaatacctagaggaaccctaaaacctatacaaataaagggaaattaaacaacctgctcctgaatgaccactgggtcaataatgaaattaaagcttcaatttaaa

SEQ ID NO: 914145 - DNA, 694 bp, Homo sapiens
aaaccttgaacataaatgaactaactgccccacttaaaagatacagactgaaggaatggattaaaaaaacaaaatccaatcatgtgatttatacaagaaaccagcccaagtggtaaaaacatatagagtctcaatgttaaaaggtggaaaaggatttttccattcaaatgaaaaccaaaatcaagtgggaatagttatacttacatcagatgaaacagactttaagtcaaccatgttaaataaaattcgaaacatatatgtacccaatactggagcacccagcttcataaaataaatatgattagacctaagaaaaaagttagacaacaaaacaatacaccacactgacagagcaggaaatcaacaaaaaaattctggatttaaattgaactctaaaccaaatggccccaaaagacattaacagaacatttattcaacaatggcagagcatacattctcttctcttgtacacataggacattctcaaaaagagaccatatgctaggccacaaagcaagtctcaataaattttaaaaaatcaaaatcatatcaagtatcttctcagactacagtggattataactagacatcaatacctagaggaaccctaaaacctatacaaataaakggaaattaaacaacctgctcctgaatgaccactgggtcaataatgaaattaaagcttcaatttaaa

SEQ ID NO: 914146 - DNA, 577 bp, Homo sapiens
acataaactagaaaacctagagaaaataaattcctgtaaatatacacctcccaagactgaacaagaaagaaataaaaatcttgaacagatcaatggtgactagtaagattgaatcagtaataaaaaaagtctatccccaacaaaagttcaaatccagactgattgacagcgaaattctaccagatgtacaaggaaggactgataccaatcctattgagactgttccaaaaataaaggaatctaattcttcctaactcattctatgaagccagcatcaccctgataccaaagactagcaaggaaacaataaaaaaagaatattacaggccaatatccctgaggaatataaatgcaagaattctcaacaaaatactagccaaaaaaaaaaaaaaaaaaatcagcagcatatcaaaaagataatataccacaatcaagtggattttttccaaggaatgcagggatggttcrccatatgcaaattcataaatgtaacacacctcataattttaaaaaatgatatgatcatttcaatagatgcagaagtcttttgataaagttcattattcctttatgatta

SEQ ID NO: 914147 - DNA, 626 bp, Homo sapiens
aaaagtgtggctgggtatgagaacatagttccattaggttgtatataatgaccacaacagcagcccccatctgtgtcaagactcctaacttttagagtaaacctcctaacttttgttcatcaaaactgaactggttttcaccatgccctcaaactcaaaagatcctaaacaaaatgatggagaatgctgataagagaagagaggagtcattctcattgatgtgctttgtaaaaataaggcagagaaaaatgggagttctgtgtactgttgctctaactgtgaaggaaaacaactttaataattcagaacattttcctcttgggccttatggaacagaacaaagtttgatacttgagcttacttaaactctaaactcctaacattagcatgaccttgtttttgcttttgaacaattgggaaattatctgtaaagaaaagttctcaaacataagctgaaacctggtttctctatttcatcccaaccccaaggaaaaactatcacaaaaagaactttaccaattaaaaaaaaaaatcaaaagtaaccccaaaaytacattacatctatttgtttagtggatgttttgtggtttgttgatgttggttttttgtctgctttttcctttatg

SEQ ID NO: 914148 - DNA, 644 bp, Homo sapiens
acaagccagaagagagtgagggccaatatttaacattcttaaagaaaagaattttcaacccagaatttcatatccagccaaactaagcttcataagtgaaggagaaataaaattctttacagacaagcaaatgctgagagatttcatcaccatcaggcctgctgtaaaagagctcctgaaggaagcactaaacatggaaaggaacaaccggtaccagccactgcaaaaacatgccaaattgtaaagaccatcaaggctaggaagaaactgcatcaactaacgagcaaaataaccagctaacatcataatgacaggattaaattcacacataacaatattaaccttaaatgtaaatgggttaaacactctaattaaaagacacaggctggcaaattggataaagagtccagacccatcggtatgctgtattcaggagacccatctcatgtgcagagacacacataggctaaaaataaaggcatggaagaagatctaccaagcaaatggaaaacaaaaaatgrcaggggttgcaatcttagtctctgataaaacagattttaaactaacaaagaccaaaagagacaaagaagccattacataatggtaaagggatcaattcaacaagaagagctaagtatcaaaaa

SEQ ID NO: 914149 - DNA, 634 bp, Homo sapiens
catagaaagtcactataaatgcatacattacagatttatatttgaataaattagtcttacctttatagaatgatctgttatatttccacacttattctttttctttttttttaagtgacagggtctctctctgttacccaggctggagtgcagtggcaagatcatagctcactgcagccttgaacttctgggctcaagtgatcctcctgcctcagcctcctgagtagctgcgactacagccacgtgccacaatgcctagttaactttatacttttgtagacatgaagtgtcactgtgtttctcaggctggttttgaaccctcggcctcagtaatcctcctgtctcggccttgcaaagtgctgtgattgcaggcaacagctccccacccaacccatgtttattctgtcagatttacttctaaaactgcagcagcttgtctctcattttgagaaacttgaatgatctttgtgcaataatgccaagtcaaacttcttttgtcagttataatttggtcctcctatttagaaacctagaataaatccttattgctrtgtcccttttacggaaagtcatattaatccacactcttgattttcaatattcatcatcatccattctctttggcctcctcgcc

SEQ ID NO: 914150 - DNA, 595 bp, Homo sapiens
gcccatgggtaggtgtgggcctcggccgagggatggcggctgcatcgggccgcccagggcgcgctgcaagaccgtggcgcgctcccatatgccggtgcgcggcsgccccgggatctacggatggctacgggccctgacctccccggcctcccctgggtacaccatgtaaggaactgggccaagtggagacttcaggcatccgcgggccccttctttccaagagtatggagcctgcactggtgggtggcgtgggtggcggtggtggcagcgccgggatgccgcgggttttagctggccgcacgctgactctcaggggcctgggtccctagttccccgcggccctccaggcgttcatcatcccctcctcaaagccagactccctttgcagtatggcattctgtgtatgctggggtcttcctgttacagcaggacgcacccacataccccacctcgtccttcccccatcattatcccctgccctctgaggtggtgaggcccatcggatctttgtatttaagtggtgagccatataccgagcatgtgtttgtgggtgaactgtgctgggactgaggttcacttctctgttcaaatcagt

SEQ ID NO: 914151 - DNA, 595 bp, Homo sapiens
gcccatgggtaggtgtgggcctcggccgagggatggcggctgcatcgggccgcccagggcgcgctgcaagaccgtggcgcgctcccatatgccggtgcgcggccgccccgggatctacggatggctacgggccctgacctccccggcctcccctgggtacaccatgtaaggaactgggccaagtggagacttcaggcatccgcgggccccttctttccaagagtatggagcctgcactggtgggtggcgtgggtggcggtggtggcagcgccgggatgccgcgggttttagctggccgcacgctgactctcaggggcctgggtccctagttccccgcggccctccaggcgttcatcatcccctcctcaaagccagactccctttgcagtatggcattctgtgtatgctggggtcttcctgttacagcaggacgcacccacataccccacctcgtccttcccccatcattrtcccctgccctctgaggtggtgaggcccatcggatctttgtatttaagtggtgagccatataccgagcatgtgtttgtgggtgaactgtgctgggactgaggttcacttctctgttcaaatcagt

SEQ ID NO: 914152 - DNA, 627 bp, Homo sapiens
gaccccacccccttctgcccagcaacctgtctgccttccgcygccattcatggcccgggtgttcagcccaaccccacttggagagatccgagcaggcgccgggagagaagagaggtcaggcagtgggagcagacgctcctaagcctgcagggactgaggggggtgccttcctgggcacccgagggtgcaggctgcagagatggccgggtcctgtgcctgggagggtggccacagctatacctgggagctcccgccctgccaactcagggatcccgcttgttcccaactcctgcctgctccatgcagcggggacctggtctgcagctgttggtcgtgggggctgcagctgcacccgggagggcagatcctgcctgctcctggcctcctccaagagcacagggaggctcagatgcacagccatggtttgggcagctgcagccctgcccaggagggtggagcttctacctgctccatagagcatgaggcctgggtctgcagccacagtttgggggggctgcagtggtacctgggtagctcccaccccaattcagaaagggcaggcctcccactggctccatggagtgcccaggcccagcggggcctccctgctgcagctagtgtgatggt

SEQ ID NO: 914153 - DNA, 663 bp, Homo sapiens
cacatgcctgtaatcccagctactcgggaggctgaggcaggagaaccgcttgaacccaggaggcagaggttgtggtgagccgagatcatccacataaatggtgttctctggctataccaaaattaaataagaaatcaataatagaaaactcccccagcctgaccaacatggcaaaaccctgtctctactaaaaatacaaaatgtcattgcataacattgtatgcaatgtctaatgttattagacataatgttattgcacatttattagactataatatagtataaacataacttttatttattattgtttttctttttagacgaactcttgggcgtgatagtgcgcgcctgtaatctcagctattcaggaggctgaggcaggagaattgcttgaatccaggaggtggaggttgcagtgagctgagatcgcaccactgcactccagcctgggtaacagaacaagactctgtctcaaaaaaaaagaaaaaaaagaaaaaaaagagaactctcaaatatttagaaattgttaatatacttctaaataatccatgggtcagagaaaaaatcttaaagtaaatcagaaaatatttgaactgactgaacatcaaaacaaaacatatcaaaatttatgggttgcagctaaygcagcgtgtacaggaacat

SEQ ID NO: 914154 - DNA, 613 bp, Homo sapiens
taaaaaggtgcttgaaactccagaaataatgtgttttgtaggtatatttttctgaattgagtatttattgttttaaagatgctcagagttctgtgacccacaaatattaaaaatccaatctatawatctttagataattcttctctccttccttctcctcaatgccacagttgtctccttgaactcatctattttcatcttcacttcttccccttttttatccctagcccatcaccatgtaggaccagtttctctaccattctctcctttgcccacagccataagagctgatagtaaagccaatttggtcatctttgaaatgaactcaccattcttttggcttacaaaagggtccaaacttcaaccacgagtggtctgaaggagtttggtggtttcaagttcaccttcccccaattgctgttcactcttttgagtcaccttagtatattatggttgccctgtcttccagagcctgaaactcagaaatatcaccccttgtcagagattacacagcaaaacctggttacagtctcatgactttctatctatatgaatgtgtaatttctcccacatatgctttcaggaacattccccctctgctcctctttcaagg

SEQ ID NO: 914155 - DNA, 595 bp, Homo sapiens
caacggaacagaatggagagctcagaaataaactgtacacctacaacsaccagatctttaataagtcaatgaaaacaagcaatggggaaaagacttcctattcaataaatggtgctggaataactggctagccatatgcagaagattcaaactgggcaccttatttacaccatatacaaaagtcaactcaagataaattaaagacttaaatgtaaaacctaaaactatagaaaccctaaaagataacctaggaaataccatctggccataggccctgggaaagatttcaggatgaagacaccaaacacaattgcaacaaaaataaaaattgacagataggacctaattaaactaaagagcttctgcacagcaaaagaaactatcaacagagtaaacagaaaacctacagaatgggagaaaatatttgcaaactatgcatccaacaaaggtctaatatccagaagctacaaggaacttaaactaacaagtaaaaaacaagcaaccccattaaaaagtgggcaaaagacatgaacaggcacttttcaaaagaaacatgcacacagccaacaagaatatgaaaaatgttcaatatcac

SEQ ID NO: 914156 - DNA, 597 bp, Homo sapiens
gttgggaagattaatgaaacaatcratgtaatacacttcatccaagtgcatgctcattgcaagagctcagtacatgttagcctgtaataataatgctataattttctttaagattttaaaattttcttttaggggttagttgcttctaagccagctatctcgatgagagtttgaagatctacattgaaatcttttacctaagaaacttagtccttacccataaacccaggagaagagggggagcacgcatcagagctagtaaatatagtaagtaccaaatgtgggtatttgttaaaaacatacacatacacacaacactaatgggattctcttttttgttgtagttttaaatttaagctggaatttcaatcaaatttttgtatggagtaacttgcttatagttagagtgcttttgcccagtcagcttgggcccaatgtccacacctcaaattgaagtactctgacaccagtgctgccgagtggagagctttgtctgcagcatcttctgctcagccaggtttgtcttggtggcatctgcctggcaagcattggaatgttaaagctttcaagcccatatctgtgcctctcatgaaacac

SEQ ID NO: 914157 - DNA, 607 bp, Homo sapiens
tggtgggagtgtagtagtgaggacgaccagaggtcactctcatggccatcttggttttggtgggttttaaccgacttctttactgaaaactgttttatcagcaaggtttttatgacctgtatcttgtgctgacctcctatctcacctggagacttagaatgccttaatcatctgggaatgcagcccagtaggtttcagccttattttacccagctcctgttcaagatgggggtgctgtggctcaaatgcctctgacacatcaacagataacctaaatgaaacaaaatactgatacgtgctaccacatggatgaactttgacactattatgtgaagtgaaattagccaaatacaaaaggtcacatactgtataatccatttacataaaaaatccagaataggtaaatacatagagacagcagattagttttgtcaggggctaatggggcgagggaatggagattaactgcttaataggtatgtcatttccttttggggtgatggaaaatgcattggaattaratagaggtgaccattgtataacattgtgtatgcagtaaatgccactgaattgtatatttccaaatggttaatgttatatatgagaa

SEQ ID NO: 914158 - DNA, 645 bp, Homo sapiens
ctgaccgtattattaattaaagcattttttcttttgtttgcttattttttttctatttmttttgagaaaagtctgttcatgtctttggcctccttttttattgagttgtgctttatcttattaatttatatattcagagtgctctccttttgtctgttaaatatgctgcaagtatcttctctcagttggaaggtttacttttgttgtcttttgaaacacagagatgtactgaactttaatgtactcgaattcatcaaactttaataatttatacttttttatcagtttcagtaatcccatagtctgtgcttatatctctttctatagcttcttaccaataattttaaagttgtattattttcatttaggtatttaattcgactgtaatttacaagtggtatgtaatagggaacaatttatttggcctaaatgcatacacaattttcccaacacatttattgagtggtcctgtggtgagtgaccttaaccttcattgtctgtaaaatgggggtgataacaggaattatctgtgcttgttttccagtgccatgtaacaaatacctccatatcttgcagcttaaaacaatacgtattatctcacagattttgtgggtcagggatttggctgtctctggctgaaggtgt

SEQ ID NO: 914159 - DNA, 578 bp, Homo sapiens
aaaactgtctaagtcatttatcccatccttactccaaaaaaaaaaaaaaagctaagaaactgcaaatcagtgatttttgttggatccataagagaactgaggttacaggacaaactatcaccctgaaatctgaaragaaaggacaacccagacagtcacagctgagatcttacttggaggagcagctgctggagtcataaactggtagggacacttcagtggtaatttgaagtgttgggggctgagtgtggactaataggaaagcgagcaactcctgagggtaacagtcttagtggaagggggcccacactttcatcggttttacctccaggaatccaaagagtcaagaatgatcccctcttggctctggcagggggagggaaagcgtaaacactgtaaaatattttttacagtgtttttccataacacagagttctccataataaagaccttttaagaggaagagactttacaaaagcctattgcacacaggggaaggacatctcttcaactctagtgcctgcaagccttctgtctcacctaaaggagtaggggcctaagaacatctatgaaggtca

SEQ ID NO: 914160 - DNA, 600 bp, Homo sapiens
gcagaagaaaaacttactggctcattctatgaggtcagcattaccctattaccaaaaccagacaaagacattaaaaaaagaaagccaaaatccactctctctcatgaatatagatgcaaaatattcttaatataatattagcaaatcaatccaacaacgtgtaaaaggaattatataccacaaccaaatacgatttactccaggtgtacaaggttggttcaacattcaaaaatcagtcaatgtaatccattacatcaacagattaaataaaaacaattatataatcatgttgataaatgaaggagaaatatttcaaaaaaatctaacaatcattttttattgtgattaaaaattaaaaattcacagcaaactatgaatataggggattttcctcacctcgataaagaacatgtacaaaaaaactctacagctattatcatacttgatggaaaactggatgctttcccactaagatcaggaacaaagcaagaatgtcctttctcaccactyctattcaagactgtactggaagtcttagctagtgcaaaaagacaaagaaatgagaaggcatacatactggaaagaaagaaagaaaactgt

SEQ ID NO: 914161 - DNA, 612 bp, Homo sapiens
tcattgaaaaaattatatgtcttatccaaagtgattcaatattaaagaaaaagctaagatgcatatagctagaaaaccaacagaagaattaaaattaataagaaattttggttaacacaaaatcagcaaaagaggaggaacaaaagcaaataaaatcccttccctaagaaaagcaaaaaatgatagacctaatataaccatattaataattactttaaatgtaaatggattaatttcaattaaaaagcatggactatccgattattttaaaaaggcaagaactgactatattctggtttctaaagaacaattttaaatataaagacagaaacaaactaaaagtaacagactggaaaaagatataccaaagctagaatggatacattaatgtaaaacaaagtagacttcgaaaagtattactagaaacaaaaaagacgtttcatagtgattttaaaaggaaaatataacaatattataaatatacatccatctaatgacagcttcaaaatacgtgaaacagaaacagaaacaaccaatgcacaatcrtatttggaaattctaacatatttctcagtaattgataaaattggaccaaaaaacaataaaacaaag

SEQ ID NO: 914162 - DNA, 568 bp, Homo sapiens
acggagacctctcttcttctttttgttttttccttcaacttttaagttccgggatacatgtgcagcatgtgcaggtttgttacataggtaaacacgtgccatggtgatttgctrtatagatcaacctgtcacttaggtataaagcccaacatgcattagcttttcttcctgatactctccctcctacaacccggtgacaggccccagtgtgtgttattcccctacctgtgtccatgtgttgtcactgttcagctcccacatataagtgagaacatgtggtgtttggttttctgttcattaatttgctgaggataatggcttccagctccatccacatccctgcaaaagacatgctcttgttcctttttatggctgcatagtattccatggtatgtatgtgccacattttctttatccagtctattgttgatgagcatttgtgttgattccatgtcttgctattgtaaagagtgctgcaatgaacatacacgtccatgcatctttatagtagaatgatttatattcctttgggtatataccctgtaatgggattgctggctcaaatggg

SEQ ID NO: 914163 - DNA, 661 bp, Homo sapiens
catgagggagggagagttggtcccatgcagacattctttataacagtgacacagacagcttattcattcttcccttcatcccatgtgacaatattattcatctcagttatggaaacacataaatgtaataaaactgattactcagaagcaaaataaattttccagtaatctaacttctcctattttttttttccttttgcttcttgagcttttcaactcaccacatattctcattttcatgaagtgacagaaagggccaggaagctcacttaaagacacaagaaaactttgttttatttgcaccaggaaatttgtcccagaataccaatatagaactcgacagagctaagatgaaataaatcaaacagtgcttgtctattttaattttcttttgctgcttttacaagtgatgagaaacttactggcttaaaacaacacaagcgtttcttacagttttaaataatggaagaagttcctagaccatttcttattctctgtcaccttttttgtttctcatttgcagtaagctggattctgctccttcgctcccttttacaagcgtctgtaactaaccagatggtaaaaaatatagaagtgttttcttaggccaytcaattcatccctttccaaaggctttcctctttctttacctgtgacactg

SEQ ID NO: 914164 - DNA, 571 bp, Homo sapiens
ttttgaacagttctggtgctttccctgcaatgggtagatcacttaagaaaatatcacggttcctttacccttcattttggtttacttgaaaatagtgaggcaatataaaagttaatgtaacttccacgattactttagcactcagcaaatccagatcaccttgtattttagtaagagattatatatgttattactttgaaagctttcacaaattgctgtaaacatttaagaaatggattctccatggtataacacagtatctgtcaccactaagcagtgggcacatattttttttttgcttgccctgtagccaccgtttcactgttgtgaaaaggtgttgattagattttatttatgctatatatttaggatatttgacagttagctcaaggaatagagaatctgaataccaccaaacaacctgaaactcagcaaacaccctactctctactgcctgaattatagagcctggaaacatktgcgttcctatatgaactccatttctcaagggttttcatatttttctgttgtcaaagagctctgtgctggaaaatccccactcctgtgtgag

SEQ ID NO: 914165 - DNA, 576 bp, Homo sapiens
tgttgcttgggaattgtaatgcatgttattacgtggaaatgataaaatgatgaggtagagggaaaatcagagacagtttcactttccctacaaggaaaaaatggtcaaacaatagttttctctttagatgggaaaatctctgtgtatatttaaagattggtttatacactggttcatatttattttgtgtatgtatttgttgaagtttcccctactgtcttttagtcacctggttttccacacatgtgagtgaatacaatagcagaccatggattctataagtgactggtaaggctagggctcactgaggtcacctagactgaagaggagctatgttagaacttcattttacatggtctcacagcatcctgtacacctctgtaacacttatgactatcataatcatgtaatgaattacataattagtagattaagatctactctttaaaatgcaagactaacttttttgttgttgttcaccgggctttgtgtatagttaaagcttactactgtttgttctgtgagtgaatgaataaaatakcgtcataatctaatagttttatggtatgggcaaga

SEQ ID NO: 914166 - DNA, 554 bp, Homo sapiens
aaactgtagcacctctaaactagagcttaacccttgatcctacctttcattactatctcactcccaatctggcctggggatgcatattcagtgtgtcctgctatctctgaaacccctctgaytctgcacattgagggtgagttacagtaaagccttcagtcccctactctgccatggatctcaaaattccactgcagaaactgaacctagcaaattgcctggaaggggaggccttacacaacactcagaaagtacaccagacttttttaattccattttttttttctggccacagtgtattacaaagaagtaaaatgtttaaattttttaaaagacaggaaaacaaattatattttctgtatgtcacaagggggaaaggaagaacagaatgcagagacaaatgggaagattcctttactgtgtttgtcttgttttttggttatatccctctttacagctgagcttttatctgttctgtacatccctgtgggcaatgggtctgcagaaacatccaggattggtccccatagggttggaaagtattccttttaaag

SEQ ID NO: 914167 - DNA, 614 bp, Homo sapiens
ttggtctgtttttctatttttcaaaattcttctttttcatcttctaaggaattatctttggatctatttactcacatatttttttctagtttagtttttatttctgaattttttattttgtattattttctgagttccacaaactcttgatctaatcttcctttcctctgatcacctcatttctgaattttgataattctgatatatgctttttttcatagcttctgtaacttcttaaatttcttcttgttcagttttgaatattaggtaagatttccatttgttttcctggcatctacttctagttagtttcattatctgtaagaatattattctttttctaataacttagtttttaattgttttacagctttaaaagagctataaatgacataaaatagtgtatagtataaatgtaaaatttgataagttttgacatataagcatgaaacattgaccataattaaggtgataaatattatctatcacccataaatgatttttcatgtgcttttgtcatctgtctttctactcccaccccrctaaaggtaaccactaatctgctgtcatattagtttggatttatatgaatagatcatactcctcttaattct

SEQ ID NO: 914168 - DNA, 633 bp, Homo sapiens
ctgacaaaactgactcaagaataaaagtaaaaaaaatccgaataaccctgtagctattaaagatattgaatttgtaataaaaaaacttttcataataaaagagtttgctaacacttggaagtcctgcattcaaccagacaaaataatggttggatatgtggccaaggtggaaataaatgaagagattctttgggtgcccaaaataaagaggaaattcagagtatcaagaggcaggaagccatgagttacgggagtcagatccaggtcttaacactatggatgtggtactaacttggattggaaagagggtaagagaaacaggcttcacattctcaggaggtgaggaatgacctccttgcccaaggcctgtagccataaagggttattccttttcttgaaagaataattagaaatagctaacccactgggccaggagggaatagacaacttgtagaaaacccgatacctcaattcctaatatttttctcaggtctttcctacccttaacctttccctggctatttacttattgctattttaaacaaagatagacaagtattaaaaggaaacactcaaaattcctgtcacttgcccccacgaaaaagaaaacctrctaaaaatgtttcagagatt

SEQ ID NO: 914169 - DNA, 652 bp, Homo sapiens
ctcgcaccacctgcaccaggacagacacttgtatccacagctgagagactcatagaaggttcacatcatrggactctgtgcagacaacccccagtaccagcctggatctgggtagactcaccaggtggctagatccagcagacagacaacaatcactgtgattcagctgacaggaagccacatccataagaaaagggggaaagtactacatcaagggaacacctcgtgggacaaaagaatctgaacaacagccttcagccctagaccctccctctgacagagcctacccaaatgagacggaaccagaaaaccaaacctggtaatatgacaaaacaaggctcttcaccactccacaaaaatcacattagttcaccaccaatggctccaaaccaagaagaaatccctgatttacctgacaacgaattcaggaggttagttattaagctaatcaaggagggaccagagaaaggcaaagccccgtgcaaggaaatacaaaaaatgatacaagaagtgaagggagaaatattcaaggaattagatagcttaaagaaaaaacaatcaaaaattcagaaaaccttggatgcacttttagaaatgtgaaatgctctggaaagtctcagcaatagaattgaacaagtagaagaaagaaatt

SEQ ID NO: 914170 - DNA, 601 bp, Homo sapiens
ctgttcaatatatcttttgtgcaagtgataaatatgtcaaaatcttttaaagcaaaatttcagataatattatctacagcgatcatattaartgtatatacatttttttcaacatctatatttagagaaaattgactaattatagtcaatttatgaattataaactaaacttttaccgattcttcatgaattaatttaattcttcttgaagtacatatttgcatttaataattaagggggtattaagaaatatattcacaaatatattgattttgttcagtacatctatactgcttttgtattctattgctctgcaacaacttactgcaaatttaatggcttaacacaacacaaatttattatcttacattttcataggccaggagtcctgggatgggttcataggcctgggagtcctttgctcagggtctcaccaggctgaaatgaagatgttagctgggactgtgatctcatctgaagtttgggatccttgtccaagttcagtgattattggaaggactcaatttttttgcaggtgcaaaactgaagtccctacattcttgcttgctctcagcctgggacaattcatagctcctagaca

SEQ ID NO: 914171 - DNA, 583 bp, Homo sapiens
ttccttttttcttcctattatatttgctttttctttcatattagtgctgatactcattttaagcacaactctcactagatattattttgaagtctttggcttcagaggcagcaggcttgaaacatttttaccaacatcaagttattagcaaatgtttattagaaacacatttattagaagattaattgccctggaacacatgtatctaaaaccacaaggtaattactgtttttaaaaattgaaatgaatgtcaagagtttcagaatatatatttgttaatctttgtttcatttttttcagttaacaagaatcttccagagtttatttttattcattaaccttaattatttccgtagtcattttccctcaggtactttggatagagaacaagtgactctctggagttgggggtggggtggatggaattcttgccccaccaggaaaatcctggacatagacaatgattctttcagtggtaataaatatccactcatgtttaaacgggtttcaagaccagcatttcttactcacakatttcttgaataaagtatctacttgtaatctccctcttttaactttttag

SEQ ID NO: 914172 - DNA, 628 bp, Homo sapiens
aagaaaaaatatagtacaaatgggaaaaacagaaagcacaaaataataggatagaaatgaatccaaatagttaatcacagtaactataaaaggactaaaatttccaatgaaagacagaaggttttttacttttaaagactgtttttttttaagtacatccaaaagctctttttaaaaggaagacttaaaacataagtacagtgctcacttggacagcacatatacaaaaaccagaattattagcatgattcctgcataaagatgacatgcaaattagtggtgttgtctatgtactgtacaattaaagatgtttaagaggatacatctttaaaaaaaacacacaaggacaggaaagttgaatgtaaaaaagattggcatatgttaatcaagagaaagctgatacagagttaataccaaatataatacactttaaggcagataacattactagaaataagaaattcactccttatttataagaggttgaattcactgggaaggtataataattctaaacttatatgcacctaatagcagtttcaaatacaggcaatcttcgctatttggggtttccatatttgcaaattctcccactcaytgaaatttatttctaaccccaaaagcaata

SEQ ID NO: 914173 - DNA, 606 bp, Homo sapiens
tcatgtttaataggcatacaagattataaatgatttattgggaaattaatggaggcaattccataaaaacaaccatttaatcttgcggacttcagctattcatgaagtgaattatttctgaatacacaacttgaaaggggatacattcgtttgacatggaaacaaaacacactaaaatgcagaatacttatttttctagtcttatgctaaaggctataaaatgagtaaagataggggaaagcatctcttcttctgggctttgtagaatccagagggatcagagacaatgaataatgatgtttcaggcatgacattgtatgaaccattattagagagataaaaatatatacattaattaggataaaataggatcaatgttataatggcagtgctaaatagacaaagggagtatttagacaagtaagggggaaagaaaattaggacacacaaagtgtgtgaatgaaaacctggagttcaagcataagcatgatgtgtttgaaaatcagtaaagaagagttgggtttgagctgaacaattatgctgatgtgaactatacaggacgatcaagttagcttaggwtggtgtcaaactatggaacaagttttt

SEQ ID NO: 914174 - DNA, 552 bp, Homo sapiens
gaattcaattttaacccaatgttgtagacagtattttcacacggttgcttaaggcaagtgctctccatatatatggcaaacatatatatatatatatatgacaaaaatatatatatatggcaaaatatatatatatatttgagatagaatttcgctcttgttgcccaggctggagtgcaatggcacgatctcagctcactgcaaactctgccccccgggttcaagtgattctcctgcctcagcctcccgagtagctgggattacaggcatgtgccaccatgcctggctaattttgtacttttagtagagacagggtttctccatgtcggtcaggctggtctcaaactcccgacctcacgtgatctgcccacctcagtctcccaaagtgctgggattacaggcatgagccaccacacccagccgattgctataattttataaaggtagcaatcaatctcgttcaactctasatctgtacaaaaatatgttgaagaataaatccctcagtgttagagagcatttgaaattcctcttcttaattagaaagtgctc

SEQ ID NO: 914175 - DNA, 639 bp, Homo sapiens
ctaaagaccttgtctcctgatgggattgagctttgagctagagttcagaagaggtgggagcagatagctctggcctgggggattcccattttaagacccttccttatccccataccacatcccaccccacaacccctccagcaacataaaaaccttatttgggcagagagattctataaagaactttctattccatatcaggaaatctgggttttggtcctctctctgtcaccaactttggggaaaccttaaacttctctctgtatgcagcactatcttccatctgagaagtaggaaaaagtccatcagggaaccttagattgttactggaaagcagagagtgccatttaagctggccctgaaggtggagtcaatattaaccaagggaagtgggtaggatgagagatgaggacaagaagagggtgctccagacagactccatggcacaggcaaaagctctgaacagatagaatttctgagcagtcaagggaggaaaggacagccatgtggccagagctcaggtgggctctgggggtgggagaccaggcaagagggaagtagacaagggagacagaaaccagaacwgaagctgcttgaaaagtattttaaagactaatcttaacccaataacaatggaaa

SEQ ID NO: 914176 - DNA, 593 bp, Homo sapiens
aacttggtgtggtggctcacacctgtaattccagtattttgggaggctgaagtaggaagactgtttgagccaggaggccaaggctgcagtgagccatgatcatgccactgcactccagcctgagcaacagagcaagacttttctttttctcttgaagaaaaagaaaaagacagataatattgtacccatcttatagtgttgttaggaggattaaatgaaattatttatataaactgtactgtggtatgacgaaatgtttaatttcaaaaataaataaaagaaatagaccacatctgtggtgtggtgaaataaaacaagtaaataaaaattaaaagtaaattatttatataacatagcacagagctcaataagtggctattgttattcccaagcatccactctgggccctgacatccttcaacagacatttgtcctgggcctggtaagagagttggaaccagcagaccaggttcaaatcccaggcaaaccagttaacaactcaatggcttcaggtaaatgactaaatctctgagccagtctccccatytggaaaatagacatggccatccctgctatggagagctgtgatgacc

SEQ ID NO: 914177 - DNA, 554 bp, Homo sapiens
ggaactagtggctttataagaagaggaaaagtgacctgactagcatgttagcatgctcagcctccttgccatatgatgctttgggttaccttgggatgtcrcatagaatcaccaccagcaagaaaggcctcaccagattcaccacctgggtattggacttcacagcctctataactgtaaaaaataaatttccttataaattacccagtttcacttattttgttataagcaacagaaaatggactaaagcaataacaaaaaacagaaacacaacaccagcttagaatagggaataataattcacagttgctgtaatatttcatattaagtggccagatttcaaaacccagtgctatacacaaagaaatagggatgtgtgatcagtatacagaaaataaaattcaatcaatagaaactatctccgaagggctccagatgtatgtagtacatcacagaaaaaatatcaaagcagctcttataaatatatttaaaagcctcagaaatccttattaaaagacgtaaagataagtatgatgtcaacagattatcagagg

SEQ ID NO: 914178 - DNA, 609 bp, Homo sapiens
ggcctgcctcgctaggttgggaaagttctggataatatcctgaagagtgttttccaacttggttccattctccccatcactttcagatacaccaacctgatgtagatttggtcttttcacatagtcccatatttcttggaggctttgttcatttctttttattcttttttttctctaaacttctcttctcacttcatttcattcatttgatcttcaatcactgataccctttcttccacttgatcaaatcggctactgaagcttgtgcatgtgtcacgtagttctcgtgctatggttttcagctccattggctcatttaaggacttctctacactgtttattctagttagccattcatctaatcttttttcaaggtttttagcttccttgcgatgggttcgaacatccttctttagctcagagaagtttgttattaccgatcgtctgtagccttcttctctcaactcatcagagtcattctccatttagctttgttccattgctggcgaggagctgcagtcctctggaggagaagaggcgctcttatttttagaattttcagctttyctgctctggtttctccccacctttgtggttttatctaccttt

SEQ ID NO: 914179 - DNA, 672 bp, Homo sapiens
cgtcaataaatgttaatttcatttgcccttatatatatttaaaagcaaatacaaacttctgtaaaattttccyagaactatctagccatggtttttgggatccttctgattttccatagcagttggcacagaattcttatgtaaagttttcatatctatagctgtgtaaggctatgatttcctggaaggccaattgagtgcatcaggattctgggcatcctaggaaaatctatagtaacaatattgttaatatttatcaataagtcacacaggacttatcaaaagtccaataagtttgaataaataagtgaactaggaaagctaaaatgaattcagtctgaatcatcttaattacagccagacattgcataatgatgtttcagtcaacagaccacatgtatgatggtggtcccataagattataataccatatttttactgtaccttttctatgtttagatatatttagatacacaaatatttatcattgtgctacagtcacctacagtattcagtacagtaacatgttgtacaagtttttagcctaggagaaataggctataatatatagcctagtaggctatgccgtctagtttgtgtaagtgaagtacattctgttattcacagaaagatgaaatcacctaaagatacatttctcagaacccatccctg

SEQ ID NO: 914180 - DNA, 640 bp, Homo sapiens
gaaaaaggttgacaatccagtagaaaaatgggcaagaaaattggaggtagtttaaataatgtcatgcrgatgaaagtgcattcaatctattagtcaacagaaatttacaaattaaatccacaataatttactataaatcactcataaaaattgctaggtttaaaagtattgaaaatacggattctcaaacactatcagtggtagtataccttgattaaaacactttggttataatttacataaccaaatataagcatacccttggacagaagttccgatcctatgtacatatctggcagatctaatgatatttgcataagaaatcacatgcgcaagattgattacagcagcattacacataataattaagaagtagagacaaccctaatgtccataaacaatagaatggatgggtaaatcatgatatatttctataatggactactttaaagcagtgtgtttgtttgtttgtttgtttgttttgagactgagtttcactcttgttgcccaggctggagtgccatggcacaatctcagctcgctgcaacctcctcctcccaggttcaagtgattctcctgcctcagcctcccaagtagctgggactacaggcatgtgccaccatgcctggctaatttttgt

SEQ ID NO: 914181 - DNA, 635 bp, Homo sapiens
acctacaaaatgacaaattcctatggcataacttaccatctatctaaaatgaaaakaccagttaataggttataaacatcttcaacccaaatgcctaaagccaaattttaagagatggttttctaaaatccttttgtgtatcaatacgcaagtcccgaaaaatcggttcaacagccaagtctgaaatatttgctttacagccacaaaatggctcaattccatagagtagagaaaatatgtcttctatctatgaaagggaagaaatagggcacaagaaagaacctggaagttcccatgcagctgtgtcatctactaaaccaagcagataatggctatttcattttaaacccccaagttttcactattcccccaggctaagacatcgtagatgactaaaaaaaatttggtacactagtctactgtccagtgatatttgagcttttgtctttaatttctcgtttagaaaaaaagaagtgcagctcactcattgaattttacataaacatgctctttgaggctgaacgaaatctgactgattttcaatgtgagaataaaatataaaaactgttcttggagttatttctaaacagaacatcagaatcgtctaattaagaaaaaatcaaattcatcaaatg

SEQ ID NO: 914182 - DNA, 618 bp, Homo sapiens
ctatgtcctaattcaaccctaattttttctctgaaacattgtctacaactcttggcctctattcttttttcccctaagcactgaaggaatttatatcagcaatatacaatgtattattttttaacagttttattgagatataattaacacatcttatgatttacccgtttaaaatgtacaattcaaagttttgtagcatgctcacagggctgtttaaccatcaccacaatcaattttagaacattttcatcaccctaaaaagaaaccacatacccatttcccctcaacgttccagctttaggcaaccaccaatctactttctgtctctacagatttgcctattctaaacatttcatataaatggaatcataaattatgcagtcttttgtgactggattctttcatttagcatagggctttcaaggtttatccatgttgtaatgtgtatcagtgttttatttgttgttataactaagtaatattccattgtagggatatgccaygttttattcatccattcatcagttggcgagtatttagatgttccccactgtttggttattctgaataatgttgccttgaacattcatgaacaagtttttgtgtggacatatgttt

SEQ ID NO: 914183 - DNA, 662 bp, Homo sapiens
acctgacaaaagtcctggacgatggccttgaaatcaattccttcatgtctttagagggtctctgtagtttttccataggtgcttaccagccacattcttggaggcgagctggctaaagtaaaattctgaactgaactgagcttgatagagttctgtgctcatattcccagcacagtctccatgttgggagggaaaattgctttttctcccattgcagtaaaaaaaaaaaaaaaaagtcaatgatcaagtctagattccttacaacttctgttagtttcctgcactccatggataatcaaattcctcgcaacaaaacagatgagctgtccctcaaaattgttgacttgtgccttattaggttggtagaagtgagaatgtggtattttaaattctcaagactgacttcgtgtatccatagagaataatgtattttatcctattttcttaactctgtatgtatttgaataagggcgatttaaaagttctctcacatcagtagaaataactgagctagagtttgcttgttgacaatgtataggyacaatatatcattagaagagtgataatgacttttattttggtgaaataataaaaaaggaatcataaaaatagagctgtctaataatgaaccatgtgtttaaaaaagaaaagttaactttctc

SEQ ID NO: 914184 - DNA, 622 bp, Homo sapiens
actatatgctgctcataaccgtgacacatttaattatgggaatttctttagatattgcctcttctccaatctcatttctcatcytctacaactcttattatattagacgcatgttcaacccatttagtctgcctcaatttctcaaccattttccccctattttccatttctttatctttgctggattttggttagcttttccatctctgtcttctagttcagtaattctcattttagctatgatctacctattgtttaactctttcgttgaatttttaatttcaaaaattaaaaaaatcattttttggagttctttcctatttttcaagttcacatattcttatataataatatcttaccctttccttgtggtttttactcctttatcactttaattatgttaagcatagttattctgcaatacatttcatattgttctagtttctcaagtccttgaagttctaacagtcctcttcactatgtctaattactctctgtcatactgaattattttcttctatgatttataaattttaatcccaagctcttgttggtagttctttatcaccctggactgttggaagtgtagctatacagagttttgcttctgccggacacccca

SEQ ID NO: 914185 - DNA, 622 bp, Homo sapiens
actatatgctgctcataaccgtgacacatttaattatgggaatttctttagatattgcctcttctccaatctcatttctcatcttctacawctcttattatattagacgcatgttcaacccatttagtctgcctcaatttctcaaccattttccccctattttccatttctttatctttgctggattttggttagcttttccatctctgtcttctagttcagtaattctcattttagctatgatctacctattgtttaactctttcgttgaatttttaatttcaaaaattaaaaaaatcattttttggagttctttcctatttttcaagttcacatattcttatataataatatcttaccctttccttgtggtttttactcctttatcactttaattatgttaagcatagttattctgcaatacatttcatattgttctagtttctcaagtccttgaagttctaacagtcctcttcactatgtctaattactctctgtcatactgaattattttcttctatgatttataaattttaatcccaagctcttgttggtagttctttatcaccctggactgttggaagtgtagctatacagagttttgcttctgccggacacccca

SEQ ID NO: 914186 - DNA, 576 bp, Homo sapiens
aaaatcaactttgttgatatataatttacatgcaatawattttatctacttttaagttcaatggatctagacaaatgtattcatctttgtaatagcctccccgactgggatgttgaacatctttgttatccccagacaattttcttaaggtttttgccaggcaatcttccactccaatttgcagcccagacaacaatcactatacatcagtttcacctatcttcgaattttatataaattgaaacatgcagtatgatttttgtctgccttccttggcttagtataatgtttttgagagtcatagatattgactctcgaattgtatgtatcagtagtttatagctttttactgtttagtagtatgtcattttatggaaatgccataatttgttaatcctgatgtaacctgttgatttataattaagttgtttgtagcttttggctactataaataaatctttaaaaatgtttttatgcaagcctttatgctgatatatgtttataaatttatttttgtatttgatgttaaatagagattattattgattattacgactatgattattttgcatctgg

SEQ ID NO: 914187 - DNA, 640 bp, Homo sapiens
tatctaagtgttttctgtattgattgcctcctcggtgaaacacatacgtttgttaartatattcctataattaaacttgccatctagatacagacttctgtataggagacactttactgacagtatgatttaaaagtagcatgattataggttggatagagattccaaagtattaatatcatgataatcacatgctaatggaaattttaagataaatattgaagaaaaaactcaagttaacttcattatttctcagaagctttctttttggactcagctatgtttagcaatatgtgtctaaatattttcaattcttttaataataaattattcataggtgatttagcaattgagagcatgtaaatatgtaatttcaagaaaatgcatccagtggtgtgcagttctctggaagacaaactatgaaaaatccttctacatgatataaatttcacagtagcttacattcatatatattcatctaattatggttctaggattactatacctttgacctttctattggtacgggataaattgatatacgtaaatgtagaatgtgaaaaaaaattcacaacacagaataataattcatttattttctttaggtaagagtctgactttactaaacccgatagccaca

SEQ ID NO: 914188 - DNA, 720 bp, Homo sapiens
ggaggcatctttgatttctctttttcttctttacccacatctattgagaggtggccatattgtgatcattacatcttttcgctaagcattcaaattcctaattccagtctttattaataatcttccactttgtgtattgagacacagtacaacactgtgcttaaggtgatgggctctggagccagacctctgggagtaaaacctcagctttgttatgtatgcattagctgtgtgacctgtggcaggattcttaatgtctctccttgtctctgttgtgtaagatgagtaatactatagtacttaaccaacatggttatggtgaagattacagagtgtcttctagctattttgaaacatactataaattcttaattatagtcaccctgccacgctattgaacactagaacttatttcttctatctaactgtatttttgtatcaattaaccaacctctctttatcccccctcctccctacacttcccagcctttggtagccaccattctatttgttactcccaaaatatcacatgtatgccataaacatatacaactattatgtatcaatacaaaaatattagtagtatcaggaaaaataaaagtatcaaatattaaaaagtttacagaagatctacygtctacaggcactcaaatggtgtagcccctgtcatatttgtacctgcctctctctttctaatctgtcctatgcactactgccaga

SEQ ID NO: 914189 - DNA, 451 bp, Homo sapiens
attcaacattcttaaaagaattttcaacccagaatttcatatccagccaaactaagcttcctaagcaaaggagaaataaaatcctttacagacaagcaaatgctgagagattttgttaccaccaggtctgycttacaagagctcctgaaggaagcagtaaatatggaaaggaaaaactggtaccagccactgcaaaaacataccaaattgtaaagactatcagcactatgaagaaactgcatcaactaatgggcaaaataaccagctagcatcataatgtcaggatcaaattcacacataacaatattaaccttaaatgtaaatgggctaaatgccccaattaaaagacacagactggcaatctggataaagggtcaagacccatcagtgtgctgtattcaggagacccatctcacatgcaaagatacacataggctcaaaataaaggaat

SEQ ID NO: 914190 - DNA, 659 bp, Homo sapiens
tgtgacacaatgtgtcagatgactagctgtctccagtagtcactctctctgtctttataagcaacagaattgtattgcttggctgtgttctcaagcctcccttgcagcaagggatggctgtggaggttttggggagaaggagtgtcttactcctgggtctttccatggtaaagattgggcatgtgcttccctggtcatttacatccttccttctgatgagcgagtgcagagaactagacccaaaggtgaaaaccacacatggaagaaaaccacacatagctcccaccagtcctggacacctgttgctgggctactttaagaaggaaaataaatgtttctcttggggcctacatgagggtggacagggagaggagggagaggaccaaaaaactattgggtattatgcttattacctgggtgacaaaataatctgtacaccaaacccccacaacactcaatttacctatataacaaacctgctcatgtacctctgaacctaaaataaatgttaaaaaacaaacaaaacaaaaaaagaaatgtttctcttattgaagctactctgtatttgggktctcttagaaaagcagcttagcctgaatataaatgcaacaactgctcttgtactaagagagtgagacgctatctcttcaattcatcct

SEQ ID NO: 914191 - DNA, 570 bp, Homo sapiens
gtagatcaaacactaattacctccasggttaagggaaaaggtgaagactgtggagcatgataccaggctgataatcatcaccttaacctcctgtgagttctgtaaatgaggacaagtgccttgggacaaaggtctccacactgttggaaaagcaacttgggcagtgagggcaggagtcttgggaaatgatacataatatccagctgtcagatcagcctctgtgttcccagtaactcagtcaccatctgtagggttcaactactttcccagctcactgaacacaagaatcactgtttcacctcctcctgcttctcttattcagaaataagctcaattcattcattaaaatgtgccctaaaaggaaaggaaagagggatgatatgggaatgacaagggttcaatcctattacattcatgtcaacaaccatggtgggagtgggagtgatcacggttgggctggttggcataggaatctttagtagttacagggctagactttttgcacacagtaaagggtaggaaaggctggcttgggagaaaggaaaaggcaggcaaagatgggtatggagg

SEQ ID NO: 914192 - DNA, 573 bp, Homo sapiens
agggctagactttttgcacacagtaaagggtaggaaaggctggcttgggagaaaggaaaaggcaggcaaagatgggtatggaggttacctctggcaatggtgctaaatgaacttgagcttcatccgtggattggagaacaaagaacctgtgtgctaatagtgcaacccacccctgccccagataagctcatctcccaggcatcccgaggactggctcctgtgcttccagcagctatattacttgggaggctcagggccagacatttctcatttcctcagagagttcctttgatggtcatgtgtggagagtgtagatggtagaggggaaggagagggattatttggggagggatctgattcatcgtcggctctttgttggaaggtttgaatcactggttctcaaccctggctgctcctagaatcacctggggaacttttttttytttttgtaattgatgtctgggctctcctcccaagagtctagttgatttgagatggtgcctggacactagcattttccaaagcacttcaggggattttaatgtgcaaccaagattaagcaccttaagaatt

SEQ ID NO: 914193 - DNA, 653 bp, Homo sapiens
tctctctttgtatggatgtccctgtgtgttatattgaagaagaaggcataagtcctaggttcacttatgaatgggttcactcagtatgtgggtgctaactgtacatggatgacatcagcattacagccacattcagttggccaggaattacagttgaaagaaatttatttcccagcagtcagagctaatgaaagtgctagtcttctacaactcatctggccagaggcctagaagaaaaggagagacaaatcagagacaaatttctctggatagagtcacatggatgggtggcatatggaaattagcaccaagtgtggatgcccattataaaacaccaccatggaagtgtcactggattactaaacaaacagaatgacatggccagttgatgttggccagacttcatcatatgccattttgaactggcatgcatcaatagaatggccatgtttgtgttttcaaggttaattacagcaggtttgtcattatcttgggctgctttgctaacgttcgtttatgacaatgacccttactcgaggcacaaaacatactgattaatagtattgctttgcaaccatgggtctgaagagtttytggaccattcattccagttagttgggattgtttattgataacaatgagattgatgattt

SEQ ID NO: 914194 - DNA, 672 bp, Homo sapiens
aatggtgacacccaggcaaacagtgtctggagtggacctccataaaactccagcagaccggcagcagaggggcctgactrttagaaggaaaactaacaaacagaaaggaatagtgtcaacagcaacaaaaaggacatccactcagagacccaatccgaagatcaccaacatcaaagaccaaaggtagataaatccatgaagatagggagaaaccagcgcaaaaaggctgaaaattgcagaaaccagaacacctcttctcctccaaaggaacacatcctcatcagcaagagaacaaaactagacagagaatgagtttgacaaatggacagaagtaggcttcagaaggtgggtaataacaaactccaagctaaaggagcatgttctaacacaatgcaaggaagataataaccttgaaaaaaggttagatgaattgctaactagaattaccagtttagagaagaacataaatgacctgatggagctgaaaaacacagcatgagaactttgtgaagcatacacaagtatcaatagccaatagccaaatcaatcaagtgaaagaaaggatatcagagattgaagatcttaattaaataaagtgagaaaacaagattagagaaaaaagaatgaaaaggaataaacaaagcctccaagaaatatgggactatgtgaaaa

SEQ ID NO: 914195 - DNA, 650 bp, Homo sapiens
tttttcattaaaagtattgtagctaatttcagtcatagctaaggtgttttggaagttttaatgcatctgcttgctttaaaacatgctctggaaagaatgacttaagaaacattatgcaactgtaatttggtacaattatttcatttttgtgccacaaatagatgcccatttaacacgattagacaatgtaatataaaataatataatagagatttaatgcaactttcaatgatgtgtcaaaattgtacatcttcaagtggatagaaaaatctgctgcacaaatacacacacagatacacacacatacatacacacccatgtcactctgcatagctaaaatatattaaaagataatattcatttattttacttctattcaggtattagacttgttatttgttacctttatcatttattttacttcttttgagatactagagttattatttttaacttatgctatttatatttatgttgtagtgaaggaaagccctctgaagactctaacaacatttataaggcatagaatcatttgaaattaagaaaaaaacctggagtacattaraggtgtgtaaataagggtcaacaaatatacccattataatcagagaataggattgatctattgtacaatgcaaagaaaatcagct

SEQ ID NO: 914196 - DNA, 655 bp, Homo sapiens
atggtcaggggctcaggtttcacaacaaggctgcaataaaggtgtcagcctggctgcattctcatctggagccttcactgggaaagaatccacttccaagctcattcaagctgttggctgaattcattctcttgcagctcaatgaccaggggctccaactttttgcaggcttccgactaaagtcctccctcaggtttcagaatgcacctgtggtgcctagaggcagcccacaatgaagcaaacatcccccctctatgggcccttatatcatcaagcctgcaaggagagtcccttcctccagcctgcctgctgtcagtcttgcctagatcacataatcatggagtgataccctgtcacgtttgttacagcctgttgattagaaggaggccaacctcagcggctcatgcctataatcctagtgctttgggagcctgaggctagagaacaatctgagcccagaagtttgagactgcagtgagctgtggttgtgccacggcactccagcctgggtaacagagcaagaccctgtctgaaaaaacaaacaaacaaacaaacaatcaaacaaacaaaaaaacagcaggtcacacacaggattatatargggcataaatgccaggaaggaggccactggggctcccttagggtcttactgaca

SEQ ID NO: 914197 - DNA, 555 bp, Homo sapiens
taagatattattaaaactggggccaggagtaggggctcatgcctgtaatcccagcsctttgggaggtcaaggtggaagaatcacttgaacccaggagttcaagatcagcctaggcaacataatgatacctcatctctacaaaaaaataaaaattgaaaaattaattacacttggttgttttcatatttttgtgggattacaagataaaatttgaaaaatagatgtagcttgtgtttgtggcttgcattattttgctatttgaaagtccaagtatagagtgaggcacagcatagactggaggcacattgcttcacttcaaatcctgatccttccccctactcgttttgtggtctttggcaatttactaaatctgtctttcattctttgtcttatcatcttgtaaaatcaagatagtgatagtacctaactcaaaatattgttatgaggatagtttatatgtctaaatcatttagaacagtatctggcatagagtgcatactcttcaaatgtttgttgaataagtaaataaacccactggtcatgtgcaccttcact

SEQ ID NO: 914198 - DNA, 542 bp, Homo sapiens
aaatacagtatctagtattgaatgataaggtagtatyttcatgcaccatacacatgtccgaaaagtaacatatcagtcactcaaacagacattttgtgtttattaggttagtttggtattttttaaaacggaattatctggtttggttggaataatgacacaatcctgacaatatgtctttgtataatagtaaccaagaaatggctaagatatttataagggatgtgaagtgtctttctccaatagaaatccaaccaattgttctcctactaatatcatcacttcagaatctgaacacttaactgccaaacatattcatgtctcattaatcttgtcctggatatatgtaatttacatattacatatagctaggacattatcagtacaatattcatattcctatcaaggtttatgtttttgcatgtttgttctcttttttaatcagaagatagtacaacaggactactgcagttccatatagctaatgattgtttcatttctatcacctatgagtagcacacatgaataattttgctataggc

SEQ ID NO: 914199 - DNA, 643 bp, Homo sapiens
aatagttctaaggaaaaggagtctgattcactggcaggtaacctatgaaccgtaacataccaagacagctctttcatcttaccgcctcctcatactaacccagtaaggcactacagagctagaaggcacctaatttcaacttaccttctgcttttcttttcttgggcaatatctaatgttaatgtgttaagtaaacaatacacccttgtaagacacaactagagaagaaagtcatttccaattttatcagttattctatactgagaaatatagtaattccatatgtaagtctaagaagtcaaaagaggcactggttggtaagaaatatttccctttgtcttcaaaatgtgattgtcacaagcactgatccatatagccatgaagacggggcttagaagatcagctttgtcaagggcagagcatttacagaagtttagaactgaactctgtcaaaggtaaatacccacctctatatacgcatgtgtaccttaatgatgtcaacgtactgactccaacacasttagatttccttgctgcaataactgcctagtacccataatatagagagtgcactgtttccaaaataaactaggaaaaattgtacattttttgggatagagaaattcaggttacttgccttgat

SEQ ID NO: 914200 - DNA, 634 bp, Homo sapiens
tgcatgcttttgaaagtcctccggactctgatagtctgtgattcccagaggaggaactcgggaaaattcatgactctccgttcagccttcccacacatgctactccagagcaccagagagacaaaccacaaaatcgggcacagcagaaaaaaagctggccccacagccaggacactgggtttctagcctggatccaccaattactcataggatgactgggagcaagtcacttcaccactctgagccttggtttccttatccataaattaattaacagatgcccaaagtccttttttgcaaggcacagtgcctggcacctagaaagttctcggcatgtgttagttattgtcatcattattaattattacgccctcttccaatagttcccaccagcttcaagtaagaaagaacccttttaatgcaaaaatgaactagagtcctcttcccatctaataggtttaacatctagaatcaattaattagaaaaaatatagaacatcaaaaaatcactatgaattgttattcaattcatcaaagcactttcatatatgcttgaaaaatgtgaaacatttttctcatcaccgatgatgttggattctcaaaacccttrcaatgatactgaggagctgggctg

SEQ ID NO: 914201 - DNA, 303 bp, Homo sapiens
agaaagatgatggaatttatgtaacttaggaataatctgcaaggaaaaaarcggaactttcagtaaatctgcctgattccaagtttgctctataaaaaacaaatctccaagtctcaacagggcatactcagctgcaaagccatctgtattcgttttccattgctgtgtaacaaattaccataaacttagcagtttaaaataacagtcatttattagttcccaattctataggtcagaaattcggcatgatatgactggattctctactcagagtatcacaaagatgaaatcaagatatcagct

SEQ ID NO: 914202 - DNA, 680 bp, Homo sapiens
aattccctactgaagagttcactcgaggataattgcaatattggaatcactaaatcaacttaagttcaattaatgatctgtaaacttcgaaagtgttgtttttagtgattctgtagcattcatgatttcaaatgaatacatttgagattatgagaactactgtctcgaaatggaggccaagggagaccgagaacagccatggtcacactacattattatccaattgtgcttaatggagagttcatagtgaatgggaatgataagaattcttgtttcagcctatactaatgttttgctttgcttaaaaagttactaacacattgattaaatactcactttagtatcagagttatggaaaataattatgatctactgaagtcagtgaaaagaaacaaagtttaaacaatcatatcaccgggttttaaatttctcgtccttagagattactttttcagtaataaagtatgtttaaatctaattaataaataataaactagatagtcatatcttctgcccctcatatctcttcctccttctttttcaccatttttttttcaattagtggcatggccagctataaacatataattagtctctggtaacattgactactcatagttwgggaggcagtaaattggtttagggccaacactgacaagtcacacagtcctggactccca

SEQ ID NO: 914203 - DNA, 595 bp, Homo sapiens
catcacacatactatctacaactcagttattgaatacaaacttcctctaaaaaacaaactaaaaaaacaaactagggttctttagagtaatgyctgatgtgagttcattgtcggaagaacataattaatttgaaatactggttgtataccagaaagtgaagaattactttaagaatgatggggagggctgggtgcagtggctcatgtctgtaatcccagcactttgggaggccgaggtgggaggatcacctgtggtcaggagttcgagaccagcctggctgacatggtgaaactccatctctactaaaaatataaaaattagccaggagtggtggtgcatgactgtaatcccagctactcaggaggctgaggcaggagaatcgcttgaactcaggaggcggaggttacagtgagcccagattgcgtcactacactccagcctgggtgatagagtgagacttcgtctcaaaaaagaacaaaaaaaaatgatggggacatgccagaaagatatggtcagcttggagatattctcacaagccaaacgtggtacaatctgagcatcgccatagagaatgatagggctattgccaatata

SEQ ID NO: 914204 - DNA, 628 bp, Homo sapiens
tgaggctcagccaggtaggataaaaaggattttactatacaaaaaaagggtaaaattgggacagaagggtggggaacactagactaagcagagtcatgtgactttgcatatgccttgctttgccaaaaaaaaaaaaaattgagcagaacatgtaccatatctgaatggaagcatgcaagagccagaatagaatgttccatgttcactttttccagacgttttcttgaggtaccgtttgcctgtgtcactgactaaggagaacataaaacagaatccttagagaagttttgataattatgaaataaatctttatagttttatgccactgagattaataggttgctggttaccacaatatattctatccaatccttgccaatacaacctcattcatggcaactttgaggactaagtaaggtaaagagattacaaggtaaagagaattgtaaaaaattgggaatgaaactatcaatgcccaggaagatcccagaatatcactatcaagagtacagacttatacgcaacataaaactatcraatttattttatgcacttttcatgcagagagttggcatcttgaatttatgaggggtgatgtttaacaagtaaaaaccagaggttggaagaa

SEQ ID NO: 914205 - DNA, 659 bp, Homo sapiens
tgaccctgagggcaattggaaacacagmttttctttgctgcatttctgtggttttgttaatgtggcttgtggttattttgttaattagaaagactagttttccataaacaacaggctttctgaataaaatatttcctgtaactctaaaggcaaggatttattgcctttgtttttaaagccataactgtacatggtaattaagttcctggtaatagtgttctaaaattctagtagtcgggtcaaaatcttacctttagtcaaacctggatataaaatagggagacctgatacttgttttcaaatgatttccaagggatatatttttgcgtgtgtgtttatatgtatacattcacttgcaaaggatcagagggatatgtatttaatgacaatgtattcaacattttctttgttttgttataaccttcctctgtaagagtgttcaaaataacattttttctctatatttcttgttccccacttaagtctatttaatatgtatagtacatatgtataggacatattaaaatgtgtgcttacatatttcatagcagcatttgtgcaaaagccttcaaatttaaatatgtcaatgctataattatagtagaatgaaggcaaatgcaagaatggctctgagaggtttatccttttaaactgcaaat

SEQ ID NO: 914206 - DNA, 618 bp, Homo sapiens
atgcagaagctgtagtggtgatgtttyaggagcccttgcaacatccggcacaaacttttttgcatgtagtagacgctcggtaaatgtctatgaaattgagataatggtgaattacgtgcatgtggtttatctgttcttaccacattaagaaccataataaagaagcacatttattcaggaagtaccaatagctactgtaataaaaatatcaaataagataaaatattaatactaactagaatctaaaaaattaaaattcaaagtttgaaaaacatttaaaataaaaatatcagaggcaaattatagcttcacagagaaaaataaagttgtcatcagaaaaagaaaatagcagggaaaaaatggtcctaatacctggatttttacctttttatactgtcaggaattgttcacttcaaaattccatcaaatatggtgaaaacagatgagtacaatctggaaataaattattttattgatgtttttgatatcaaaattcaaacaaaaacggaaattaactctttgttgttgttgttgttgagacagagtcttactctgtcaatcagctggagtgctgtggcacaatcatgcctcactgcagcctcgacttcccaggctcaa

SEQ ID NO: 914207 - DNA, 603 bp, Homo sapiens
aatttgtttactactttgaattccctatttgatggaagtgaaatgtgatcttgctggacagtagaaggaaagactgcctgtatttcatgctcatacctactaaagcatcagactgtttcatatttaagagcagtttaaaaagcacgtgagggtcttcttaatcttaattctagtgtcttaaaaaatgtatgtggagattatatgtttttgagacactataattaaggtcaagaagggaggtaatttgcattccccttgaaaaagctttgataccagctctggggactgaggggcattgtcagtgagagggccccacacagaggcttctatgtctccagcctgcagcctggagaactatgaagacttctgtttagcctcacacagaggaaggcagaataaacaaactgaaatggcccaaacaagctactgggtttttccctagacttagggtaaggaaaaggatcaggcactgatttgmcaaaaaaaaaaaaaaaaaaaaaaaagtgagcatacagaaaaatatttataggacactctatgccatgctcctggttcactgcagattatcaatcagtggaaagtgatagaagcaatggaagcatc

SEQ ID NO: 914208 - DNA, 549 bp, Homo sapiens
ttgaaaaggatttgagtctggtaatagtcaaagcagtagtcactgctggggttgggggtattaacttacttgcagggggtacaagagagccttctgagatgtttgttagacattgttttaaaaattttaatctggaggctagcccacaggggtgtggagggtgtgtttatgtgtgtgaattttgagggaattttgtgcatctgaatgagagtacaagtactgaaagtcttcaacattctggagaggggaaaacaagagagaagtcagaccagccacatcccaccatttagctatgctcattcctaccctgtttctgttgatggtcattgccttcctgagggcctctacatgtatggatttcttagaaaatctttctatatcagctgctgcaattattctttttataaaaatatgatctctttcctaagtgtctgccatgttgcagatttctactgccaactgctaagcatgtctctatgcatcctcygctgggtctttatagctcagaggatctaactaactaataaacatttttagaatggatgcatg

SEQ ID NO: 914209 - DNA, 709 bp, Homo sapiens
gtatagtaaaaacgtaaaaaaatttcttggtgattatatgtaaaacagaattgagttccagtctcagataatgataaagaatattacacctatatgaatttgagggtaacagccaaaagcagtacaatatgggggacaattcttcagtgggtccattaactcctccatgtctctctcagtcatttgataactaaaataatcaaaaaaatttccaaaatagcttttggggatgatattatctcactaagaaccactggtttcttgaatgtggggttggggagagggaagatatgtgttgggacacagaagggatgatgccaacagtattagttcaataattaaaagagatctagtggcaggactgtcctcaaaattgaacagtcaaaatatccttcagcaagtatctattgcatttataatgaaaatattaagaaataaaggatcattctcaaaatcaagtatgatcagcaaaaccccagattctgggaaaatgtctgaatacaaaagtatcttcatggggggcagttccaagatggccgaataggaacagctccagtctacagctcccagcataagcgacgcagaagacaggtgatttctgcatttccaactgaggtaccgggttcatctcactggggcttgtcagacagtgggtgcggracagtggatgcagcccatcaagcatgagctgaagcagggcaagacatca

SEQ ID NO: 914210 - DNA, 616 bp, Homo sapiens
agaggggcaaggaagcaagacaggaaagaaccctatgttaggagcccttggaggaaggctgacctgctttttctccacaagaggatggggtcattcaacccttcccacactgggattaattaaagaggcctctgagaagataatgaatgtggataaggatgcaggacctctgtacctgggctgctatcaatctcatcctcactaaaactgtcatcttgaggctctatggttgcctcccttcattcttgctctagtgcagtcagcttttggtaggttccatcccttccttctccctcattatgtctgagaaatcgctttttgtttaatcctgtagtttttagctgacagccaaagtgagatggatccagagggtaaactcaagggatggaagcctaccttagatgacatcccaattaatgttacccttgtgtttctgtgtagtatatccctaatttctaagttacgaataataatgaagggaaaactctctgagctacagatagtgaatcttctattaacaagaaaggcatttcttcaaaacatccagaaatacaggtgaggacrttagggttttttcataactaatagaacctattccttccagattacagatttc

SEQ ID NO: 914211 - DNA, 592 bp, Homo sapiens
tcaccctttttagtatacagttctatgagctttgacaagcatacacagtaatgtaaacatcattataatgaagatgtggattagaaaaaaacaattccctttttcctttgtagtcaactactccttctacccttaggtctacagatctgttttcagttcctattgttttgcccttttgagaatgtcgagaaatagaatcatagagtataaagacatttaaatctgattacttttatttagcctaatgcatttaaatcttacccatattgttgtattatcaataatttgttactttttattgttgagtagcatgccattgtatggacataccacagtttagatgtaatttagaatgaattcacatgttgaaggacatttgggtattttccaattttagatgattatgtacgaaggtttttatgtaaaaatacatcttttttctcttgcctaaatactaaaatttaaaaattaactttsttattataaatttctaagatgtttttcttattctctgggcatgcttgttttgtttgtttgttttccattgcacttaatcctggttttatgtataaaatatcttttcaaacatctg

SEQ ID NO: 914212 - DNA, 525 bp, Homo sapiens
aggggcaaaatgccgccagtctctttgataaagcrtaacaagagtgacttttgctccagttcccaacaagttcctcgtttccatctgagaccacctcagcctggactttattgtccatgctgctatcagcattttggacaaagtcattcaacaagtctctaggaagttccacactttcccacaccttcctgtcttctgagccctccaagtctctaagaagttccaaactttcccacattttactgtcttcttctgagccctccaaattgctccagcctctgcctgttacccagttccaaagtggtttccacatttttgggtatccttatagcagcaccccactctctgtggtacaaatttactgtattagtccattctcatactgctaataaagacatacctgagactgggtaatttataaaaggaagaggtttaatcgactcgtgttcagcatagctgaggaggcctcaggaatcttataatcatggcggaaggggaagcaaacatgtcctttttcacatggtg

SEQ ID NO: 914213 - DNA, 650 bp, Homo sapiens
attccaatgcattccattccattccatagcattccattgcattcgattccattccatttgataccattccatttgakgccattccatgacattccattccgttccaattcattccattccgtttcatgaaattcgagtcctttccagtacatttcattccaatcccatccaatccaatctactccattcaattcctttccattccatttgatttgattccattgatttgattccattcagtttgattccattccgtgaaatttcgttccattctattccattgcattactttccattcaattccattccatttcatttcagtccattcgcttcctttcctttcgattcaattccatttgattccactccattctatgcgatttcattccaatcgattcaattccattcgatgacattcctttcgtttccattccattcgagtccattcaatttcagcattcgtgtccattctattcgagtccattccattaccgtctattctattcccttccattcctgttgattcaatttcattcccttccattcgattcctttccattagattccattcgtttccattccattccattcgttcccattccatgtgatttcattccattccagtccattatattagagtccactccact

SEQ ID NO: 914214 - DNA, 650 bp, Homo sapiens
attccaatgcattccattccattccatagcattccattgcattcgattccattccatttgataccattccatttgatkccattccatgacattccattccgttccaattcattccattccgtttcatgaaattcgagtcctttccagtacatttcattccaatcccatccaatccaatctactccattcaattcctttccattccatttgatttgattccattgatttgattccattcagtttgattccattccgtgaaatttcgttccattctattccattgcattactttccattcaattccattccatttcatttcagtccattcgcttcctttcctttcgattcaattccatttgattccactccattctatgcgatttcattccaatcgattcaattccattcgatgacattcctttcgtttccattccattcgagtccattcaatttcagcattcgtgtccattctattcgagtccattccattaccgtctattctattcccttccattcctgttgattcaatttcattcccttccattcgattcctttccattagattccattcgtttccattccattccattcgttcccattccatgtgatttcattccattccagtccattatattagagtccactccact

SEQ ID NO: 914215 - DNA, 695 bp, Homo sapiens
tacctcagcctggactatattgtccatatcactatcagcattttggtcaaagccattcaacaagcctctaggaagttccaaactttcccccatcttcctctctcctgagscctccaaactgctccaacctctgcctgttatccagttccaaagttgctcccacattttcaggtatctttatggcagcaccttactctaccggtagcaatttactgtattagtctgttctcatgttgctgataaagacatacctgagactgggtaatttataaagggaagagttttaattgactcacagttcaacatggctggggagccctcacaatcatggttgaaggtgaatgaggagcaaagtcatgtcttacatggtggcaggaaatagagcttgtgcacacagggaaacttccacttataaaaccatcagatcttgtgagacctattcactactataagaatagtttgggggaatcatccccatgattcaattatctccacctggtcccacccttgacacatgggaattattacaattaaaggtgagacttgggtgacaacatagccaaaccacatcaaatggacttacagtttcacaaggcttgggatgcctcacaatcatggtggaaagcaatgtggcagcaaaggcatgtctttcatggtaacaggcaagagagtgtgtgcaagggaactgcccttta

SEQ ID NO: 914216 - DNA, 556 bp, Homo sapiens
acaaataagaaataaaattaacttttgtaacagcagtaagatggttgttagggaattttatttttatagtgaaaacttaaagactgagtttctcaagcgttaaaatgaaaatgtttttatttgtgaattcattcattctgcaattatttagtgaacacctactaatatcagggagcagtttatgaattttgaaaataatgatcaaaacagacataatctctgctttcttgcagcttttatttaagtaagagggtcaaacaaaacacagcctagtgaataagagcattacatagttaggagataataaatgctatgagaaaaaaaagtgcaggataaatgcaagggagggtcagggtgagttggaactttaaatagggtgatgaagaaaagcctctttgagaaggtgatattccagcaaagacctgagggaggtgaggaaattagctgcactaatgcttaaggaaacagggacaaagaaaggtaacattttgagatggtgcaaataatatcacatttatatgctgatgggaaagatcyactagcaaaagaaaaacat

SEQ ID NO: 914217 - DNA, 398 bp, Homo sapiens
acctggtacagagttggagtatgtgcgcagggtcaggacagcatctcacatgtgagggccgctcagcwcaaagtatcacagcccaaaggtgtgaaaacagtatccattatagggatcgtgttgggggtcaaaagtaggatgttggggtccaagcagggtgagaaagaggtccctatggtaaagcaagcagggaggcttagcacagagtactagagttgaaacatggtgagaaaggtgtccttgtggagaagctgtgtgtgtcatgtcagagcctgagaggaaggaaaaagctgtgacacaatattggtttttatactagtagactgatcaaataaataaaagtattatgaacaatgaaaaccaagtttctcacttctggagaagagttacaggtatgg

SEQ ID NO: 914218 - DNA, 588 bp, Homo sapiens
gagggctcagaagaaggcaggaagatgagggagagattggaacttcctagagacttgttaaattgttgtgaccaaaatactgatagtgatacagtcagtgaagtccaggctgaggagatctcagatggagatgaggaacttattgggaactggagcaaaggtaacttctgttacacattagcaaagagattggaggcattgtgcccctgccctagggatttgtggaactttgaacttgagagtgatgatttagggtatctggtggaagaaatttttaagcagtaaaacattcaagatgtagcctggctgcatctaacagcgtatggtgataggcataagcaaagaggttatctgaaactggaatttatgtttaaaagggaagcaaagcataaaagtttagaaaatttgtaacctgaccatgtggtagaaaagaaaaacccattttggggggaggaattygagccagctgcagaaatttgcacaagtaatgaggagtctagtgttattagccaagataatgggaaaatttcttgaaggcattccagagaccttggtggaagcctctcgcattacaaacctggtggccta

SEQ ID NO: 914219 - DNA, 651 bp, Homo sapiens
gccaggcattctcagaggttccagcagtggctcacacccttcaaactgcaaagtgttctttcctctctcagatgatcgacaggyctgataaacacttggttcagttaggtgactgaaaaagagggctccagatgagcagaacctcctcacccctatacctcaccgatgggtcataaagcaatggactttcagatattagcaacagatctcgctcacctgtggttttcagagctttggttaataacctgagttaccctggcctccaggcttgtctctttccccaagaatcgacccagggctacttaaggcagagagatccatttcctggaatgagctgctctgaaccaagacaagttcatggtctctgagtcctcatttgtggcctgctgtcttgataacagctctcttgtcagtcctccataagctctggtccagcctccccgttgcaggacattttttcatcttcagaagattctgagactttaggaatgaatcattgctggtatgcaaagttacataagaaaagctagggacaaactaggcaagtaaagaattctagtttttccaaaatggaaattttagaaaaatataaaaaataatcttatcaaagcatgtgcttcctctggcaaagcatacctctcctatccacaa

SEQ ID NO: 914220 - DNA, 364 bp, Homo sapiens
caatattagatctttttatacataaacatggatcagctctcagtggagaaatgttcaactaccatcagatgatctggtacatcaatacaaacaaatgtgtttatcacaatatatcattcccagggctagttttgtttggttttaaggatgggttaagaggtataaaaggaaggcagtcagtggggattggcagctagtaaaagttaagtttgcagcaatgtagaaccaggatagyaatacttaggtaaaaaggccttagcagcattagacaaaaaatcaaatcacagaggtgactgaatggtctgtcccaattataaggtttttttgttttgttttgttttgccattgataaataaatttaatc

SEQ ID NO: 914221 - DNA, 633 bp, Homo sapiens
gaaatgtttgtgcttctaggcctgcagaactgctttgcttcagtcccatttccatgcctgattcttgggtatctcctggattgtatagagccttaatgtctttccagcaaattaatttttgcttaatttagcccaaattttttttgctcaaaatcacaaagtccacaatgatatacaatctcacttagcactaacacaattctaagatgttgccattataaccatttctcagaggagaaaggtttagcaaagaatggttaaatgacatgcatacacgcagctagtaatggatacagccaggactcaagcaaggtgagttcgacccagagtttcaaatttttaacctacattatcccaattcctatctttaattctcaaactactttcccaaagatcattgatgtgccacatgctgttccaaggattttcattgctgaaattgaataatggcagtcttgccaatttagagaaaataataacttaatggatagaatgttttcaattttaaatttttctcccataaatttttctaaaasctttggtgctttctactgcttgtctgtgaggcagacaacaaaacaaatgaacaagcagccaatgaatattaatggcaaaactcagaaacaacagatc

SEQ ID NO: 914222 - DNA, 652 bp, Homo sapiens
tgccaaccctatgagcaactgaggaaaggtgcctcacgccaccttcctaaagccagaatttgtgtcagattgtagggcaacctagaacctacagggaaaaattagtaaagggagacttagcaatcagggttaaagagataaggtttttggaaatctagaagggaaatacagtacttcctcatttatccaggtcaggaaccaggcagacacagtggcaggagccctggcattagcaccctatgccttagtgtgaatgtcacctctttctctggccagtatgcactgtagttagaaatgcagggtgctaaaccccagtatatgagttgaagcccagctccattgtactgagtaaatttcacaatctcttgtttcttcatctatagaattgtcaaatattgtagtacttttctaacagctgttaggaggattaggtgattgcatacatgtaaacacatccacctgtgtcagaacctactaagtacacaataaacattaaccattagttttatgaggcattgagaaaggtacttagyttctttgaattttcattcttcttatctgaaaacaggcacaataacatccatgtcataaagtggttaaaatatttaaatgaggtaaggtataggaaagtacatgtttgggccgggcgcgg

SEQ ID NO: 914223 - DNA, 608 bp, Homo sapiens
gtgtacatgtaccacattttctttatctattctaccagtgatgagcatttaggttgattcyatgtcattgctattgtgaatagtgctgcaatgaacatactcatgcatgtgtgtttatgatagaatgatttatattcctttggtatatatccagtaatgtgattgctgtttgtttttaggtctttgaggaattaccacactgcttttcaccatggtggaactaatttatactcccaccgacaatatatatgtgctcctttttctccacaaccttgccagtacctgttatttttacctttttagtaatagccattctgactgatgtgagatggtctctcattgcggttttgatttgcatttctctaatgattagtgatgttgagctttttttcataagcttgttggccacatgtgtgtctccttttgaaagtgtctgttcatgtcctttgcccacttcttaatacagttgttcatttttctcttgttaatttgtttaagttccttatagatgccagacactagacctttgtcagatgcatagtttgcaaaaattttctcccattctgtacgttgtctttttattcaattgataggttcttttgctgtat

SEQ ID NO: 914224 - DNA, 598 bp, Homo sapiens
actttggaaaactcgaattagagttaaaatctcctgaaagtgatataaaccaaaagattggctcagtttctgtgatgtcatcaacacatttaattatgtgagagaaatgtttggataggatgcagggaaaacacacacacacacacacacacatttaaaatgcaatagttcaaccataggccaagaaattaatgttaatttcacaattttcacctaaagaagttttgtctataaaccccttatgatgcttttattattgttgttagtaataataatgacaatagcttaaaacagaaataggagttcggacagaaaatatcattgtccctcatttgatttgaatagggatgctccctcaaacaagactttgcatagtttgcatttttctaatatgctggtactacaatttcccctcaaaagttctcagcacattagggagtcacttacatatagaaatccatttaaattgacaagctgatgaatgacctgcccaggtaatagagatgactgtgggtaaacatattrggtgcaatgtattttaatgatgtctaaacagtcagatgttggtacacccagttgggaaaggtctgctgaaatt

SEQ ID NO: 914225 - DNA, 235 bp, Homo sapiens
aacatgccctgttatgtggccamgacttactggagctcatttaaacttatcgtcccttagttttttggtggaaaacagggccaccatgctcacccttaaaacatacgctgggcattgtgctcacttggaaaacatcttagggtgatggatgggtttccctccttatcttggaagacaccttttcttccttgttacctggcttggcaattttactttccccatacatctcatcaca

SEQ ID NO: 914226 - DNA, 608 bp, Homo sapiens
gctgtttccagttctagttamgcggtcccttccatcagaaagactttcctgaacattcctgcttgactaagaacccacttctgtctttcataaaccataatcttttgtaaacttttccataaccttggttaattttatggaatttatttttctaactcactggcctgtatttattatctttgtatgttcagtgcctagaaaagtacttgccacacataggtactcaacaaacatgtattgaactaactacaaaggtaacttttatatttaaagtctactaaactaagtattatttgaagatatataaattaaaataagcattttagagtctataaactataaaaaccttgaaaccatttttctcttctttgaggggattatatgattaaattttagaaatgccataagcagataccattttttttctatagcaggggagatagtaaatactttcagatgtctgaatttccagatggtctggccagacagtctgtatcatagctattcaactctgctgttatagcataaatcagccatagacaacacataaatgaatgagcatggctggattccaataaaactttattttggacattgaatttgaattt

SEQ ID NO: 914227 - DNA, 564 bp, Homo sapiens
tggaaaagtttgtgcaagctagccacccgttgatgtttgcttcttcaacctaagatgttagcacaattcgtggaagctttatcttggggaggaatggctcgtagctctgaagaatcagcataggagaagttatgcacaacaattcgggctccaggcttccaggtgtctcttctttatgagacccaaggcaagccacctgacctctttgggcttcagttttctcctctgaaaaatggggatgatataagcccctgcctcatggggctgttgtgacaattacatgaattaaatgcatgtaaaagtaagtatagcacttgacccacaatgagtcctcaagaagggtttggcctattgttagagctgtgactctgaacttcaactcttaatttctcagggccttttggagaattgtcttggtgtcttatgtctagttttctccctggagaattgttagtgagcccctatgacttcatcakacttgaagaagagttttattgtaaaaagagatgctcattatcaggctggttctgcagttcattttcttacttctcagagcaagggttt

SEQ ID NO: 914228 - DNA, 543 bp, Homo sapiens
cccactatttccgtttcttctggggttgtgaagattaaaygagataacccacattaagcatttaacacagtacatggcatatattaaatgctcattgcttatcaggtattactgttagttacccaatgcctttgtcaattctgggtattgtaattgtaatttttctaattttttacttttttttttttttttttttgagacggggtctccctctgttgcccaggttggagtacagtgacacaatcttagctcactgcagcttcgatctcccaggctcaagcaattatctcacctcagcctcccaagcagctgggactacaggcacctgccaccatgcttggctaattcttgtattttctgtagagacatggtttcactatgttgctggtctcgatctcctgggctcaagtgatccactcaccatggcctcccaaagtgctgggattacaggtgtgagccactgcacccagccaatttttaacatttttaagttataaaaataatgcatgcttacagtaaagaaggtctcaaaccatatcaaag

SEQ ID NO: 914229 - DNA, 623 bp, Homo sapiens
ttttacattattggtgggaatgtaaatttgtccaaccattgtagaagacagtgtggtaattcctcaaagacctagaaacagaaatgccatttgacctagtaatctcattactgggtatataccaaaaggaatataaatcattctattataaagatacatgcacatgtatgttcattgcaacgctattcacaatagcaaagacatagtatcaacccaaatgtcctatacttgataaagaatatatgatatatatacaccatagaatactatgcagccataaaagggaatgagatcatgtcctttgcagggacacggacggagctggaagccattatcttcagcaaactaacacaggaacagaaaaccaaacactgcatgcttttgcgtataagtgagagctgaacaatgagaacacctggccatgggcggtggaaacaacacacactggggcctggccagagggtggggagagggaaagcatcatgaaagatagctaatgcattcttggcttaatacccaggtgatgggttgataggtgcagcaaaccattatggcacacgtttacctatgtaamaaacatgtacatcctgcacacatatcccggagcttaaaatataaaacat

SEQ ID NO: 914230 - DNA, 623 bp, Homo sapiens
ttttacattattggtgggaatgtaaatttgtccaaccattgtagaagacagtgtggtaattcctcaaagacctagaaacagaaatgccatttgacctagtaatctcattactgggtatataccaaaaggaatataaatcattctattataaagatacatgcacatgtatgttcattgcaacgctattcacaatagcaaagacatagtatcaacccaaatgtcctatacttgataaagaatatatgatatatatacaccatagaatactatgcagccataaaagggaatgagatcatgtcctttgcagggacacggacggagctggaagccattatcttcagcaaactaacacaggaacagaaaaccaaacactgcatgcttttgcgtataagtgagagctgaacaatgagaacacctggccatgggcggtggaaacaacacacactggggcctggccagagggtggggagagggaaagcatcatgaaagatagctaatgcattcttggcttaatacccaggtgatgggttgataggtgcagcaaaccattatggcacacgtttacctatgtaacaaacmtgtacatcctgcacacatatcccggagcttaaaatataaaacat

SEQ ID NO: 914231 - DNA, 600 bp, Homo sapiens
cgggagagacctgagaccttcccatatcatactaagtcaaaatgctgatacaaccttcaggaattcggccgggcgcggtggctcacgcctgtaatcccagcactttggsaggctgaggcaggtggatcacgaggtcaggagattgagtccatcctaacacagtgaaaccccgtctctactaaaaatacaagaaattagccaggcatggtggtgggcgcctgtagtcccagctactcgggaggctgaggcaggagaatggcatgaacctgggaggccgagcttgcagtgagccgagatcatgccactgctctccagcctgggcgacagagcgagactccatctcaaaaaaacaaacaaacaaacaaacaacaacaacaacaaaaaccctcaggaattcaatgctttcaaggggaaaaagccaatgacactcacacagtgtcattcaaaaggaaactaatatgaattaaaaaaaactaacaaagaatggtagcagggaaatctgtgagctacatcataacccctggcagcaagcatgcaccaactccacttcctggccatcattcacgcctgatgttcttggaaatgtgtgttttgcccctc

SEQ ID NO: 914232 - DNA, 645 bp, Homo sapiens
tctaagtatgcatgcctctaggcttatccagctgactttcattgaccaatagaatgcagcagaastcatgggatgtgatcctaagtctcaagaggccttgcagcttttgctcctgcactcttggaaactggctacccatccagactattctcttggagacatgtggcccagctgatagtgaccacaactctagagacatctttgaagccaagttagcccataaagcccaaatttagccactggacaactgctaactgcagctttagaagtgaccctacgtgatataagcagaagaacctctcagctgagcccagcccaaatatgagcaaataaaatggttactactttaagtcattaagttttggggtagttttttttcatagcaatagataactgatacctatgagcttatgaaagctgaatattttcatctatcacatcctcaaagtgaataaaaccatacaatttaatcataagaaaccaactggaaacacgcacttgaaaaacctcttacagctgaaaacatctccatcccatgaggttcatcaaaagtaagcagcagggatgctgtttctctatttttatttttcttagaggagtcagtgatatgaaattaactttacaggtcaacctacaggcatttct

SEQ ID NO: 914233 - DNA, 574 bp, Homo sapiens
agctaaaagctataatagataacactaaaaaagtaaggaataaaacacattactagagtgaatcacataaccacaaaggaagcctttaagagaggaaaaaaggaaaaaatatctaracaactaaaaaagaagttacacaatcgtgatagtcatcccttacctatcaataactaccttgaatgtaaatggttgaaattattcagttaaaagagaggctgaacggatagaaaaatatgaccaaactatgctgcctacaggagacttactttacgtataaaatgacatgcatagattgaaagtaagtggatgggaaaagctatttcatggaaatggaaccccaaaaagaacagaagtagctgtaattatatgaacaaaatagactttaagttaaaaactgtaaaaagagacaaggccattatataataatagcaggggtcaatgcagcaagcagatacaattataaacatatatgtgcccactagcagaggacctatgtatataaagcaaatattaatagatttaaagggagagatagactgtaacacaataatagtaggggacttcaacactccac

SEQ ID NO: 914234 - DNA, 640 bp, Homo sapiens
gatccctcagtggagggtcagggtcagtcctgctctcctccctaaccctgatcttccacccgagggcaagcctattgaygacatccaaagaagttgccttccaggcaaggagcaaggtggggaagaggacaaagtggggctagagaggaaaactaaagaaacccagcacagccccaacactgatttggtggcaaaattcaactggaactaagccaagtcgatttcagttatttactccatttactacagaaatacataggactttgattataggatgctaccctagacccagttgagggtgttatacaatatatataccgtcttacctttctaaaatttgaaaacttttgaattccaaaatatagctggctccacgcattccagacacaattgtagaaatacacctttcatagttaggtcttaaatccatctggagtccatccttgtgtaatgtaagacagggattcagtttttttggtttccacataacgaaccagtttattcacaccacctatccttctttctctcattggttcattgcagttttcatcctatattaagttctcatatatatctgtgaatctatctttgcattcttctgccagtcccacactatttttattactttggcttcctgata

SEQ ID NO: 914235 - DNA, 603 bp, Homo sapiens
acttttctttattgaaagattttttattactgatttaatctcactacttgttattggtcttttcaggttttctaggttttctatctcttcctggttcaatcttgagaggttatatgtttccaggaatttattcatttcctctagtttgtgagcatatagttgtttgtaatagtctctgatgattttttttttttcaggagaccagagtcttattattactcaaatctcaaattagtctccctgagcattcagggatcagtttttaaggacaacttagtgggtggggaaagccagtgagccagaaatgctgattggtcaggtcagagatgaaatcatagggagttgactcttcttgtgcagagtcagttcctgggtgggggccacaagatcagatgagccagtttattgatctgggtggtgccagttgatccatcatctgcagagtctgcgaaatattttaaacactgatcttaggagcagtctmgggagggtcagaatcttgtaacctccagctgcatgactcctaaaccataatttctaatcttgtggctaatttgttagtcctacaaagacagtctaatccctaggcaaaagggggatttg

SEQ ID NO: 914236 - DNA, 640 bp, Homo sapiens
atagaggatgacacattaaaactcttctcacttaactgggcagcagcagtgcactggcttgctcagcttgttatgtcagagaaaaattgcactggacaagtgaaacaggcatggaggacttygtttaagactattacaacagggttcaagactttcaagatgaaagagattgaactgaactccactgaaacaaaagttctgagaatttctaagtgctgggataagccagtgaaaaagcaccggaggatactaccagagaggttggtccatgtattaggccatctgtttgctaattggtgcttattaaagttaggtttctacccttttattgagattaggagataggaatactatgtttcttgatgattacatttcaaaggaaaggctgcccggtccttgagaaagacccttctgggttgtaaactggcaagaggctgtgagatttcatctcaaaggagcagaaaaataatttacaatagcaagttttctcaagtacatgctctaaaagggaggtcagggacatgcagttaggaagaaacctgtataaagtttagtcaagctgagggaaaaattttaagatccccttggccatcatcagagccacatattcaggaaggttccctagcagtcacgtaatgtt

SEQ ID NO: 914237 - DNA, 599 bp, Homo sapiens
gacttaagtgtaagacctaaaatcataaaaacactagaagaaaacgtaggcagtatcattcaggacataggcatgggcaaagacttgatgacaaaaacaccaaaagcaatggcaacaaaagccaaaatggacaaatgggatctaattaaactaacgagcttctgcatagaaaacttaacttttatatgcacttggaaaccaaaaaattcatgtaactagctttattgtaatattcattttcttgccgtggtctggaactaaacccacaatatctctgagatatgcctgtaccacagactgggtgacttaaaaaatttttttcctcacatttttggaggctaaaagtccaaggtcaaggtgttggctgatttggtttatccagaagcctctttccttggcttgcagatggctgccttctcactgtgtcctcacatgaccttttttctgtgtgcatgcatccccagtaacttttcctcttttttactgaatattttaaagacaccagtcctattggaataggggcttacccttatgaccttgttttaccttaattatcactttaaakgccccatctctaaatgcagtcacattgaaggatg

SEQ ID NO: 914238 - DNA, 590 bp, Homo sapiens
ttgtgataaacaataattgtaacttttgtaggtgactgataccctggacaaagaagtaaggatgtcaggattttccacctctaccttggaaattaactycttgtctttgaatctcactcagtgtctccattcagtccctgaattgagatatgctttcctctctgagctaaaatactcagtcttttggaagggctacctaataaacgataatcactgaagtgttgacaacttaaagattggaagtggagcagaaaatacttggtataatttgagcacttggtgggtgctgtaagatgactttctggttgatggggtaacatcttttactctggttcgggtttaaaagaatccaggtgacagagacaggatacctgccctaatatggtagccactagccacgtggctattaaccacctgaaatatggctagggtgaggaagagctcaattttaaattttatttaattttagactttgataacttgatttagttattggaaagcttatttatatttggaaacatacttgagcttacgcatctacttttgaaactaagtgttttgaaatccaaacgcaaattaagtattttgat

SEQ ID NO: 914239 - DNA, 641 bp, Homo sapiens
aaagaatcccatctcaaagttcatcttccttaaaacaaaatataatgcaggtgcaaagggagaggagttgaaaatayattacggaataacagagctttaaaagccagtcaaaattctttgaccctgatagaactctaatacaggtcacattggtaagagtaactatttaaaagcacttagtgatgtagatcaataatgattggatgggtcagcaccaaaaatgtctgttatttgacatgaaggaaattaggcagaaacctctatgagccagttcattgccgtcatcatttctgatgcattttttctaaaatatgtagatttttacaaattaagataattagtaagtcagaagtacgatactttgtaaaatgcctaatacatagattagaattacatgaaacaacaaataatgataatgaagaaaatcagcatgtaaatgtaaaataactctcacaaatattaaactactttttcagcaacagaaaagtcattagttttaaaataaaaattagtttttggattccctacattaatgaaactgctccttggcttacaaatggcatgacatttaaaatttttgacccattcgcaacaaacatctgtagttaaagtgaggctatcacagtctcttagtctataac

SEQ ID NO: 914240 - DNA, 652 bp, Homo sapiens
tgagtttacctcttttttttagtaatactcccaaccaaagtgattatgtaatttttgaagatagataggtctttcaaatttgcctctgcttgtgttctcaatgtcacgtttagttyttcttttgcttttgggagaatccatttattctttctgtccaaaactaattagacaaaacacatgagtaaaggtgtgaggttctatggacttgaaatcacaatagccttttacaaaatactgagagcactgtttgcaaattgcaattttgttattgtgtcaattttttgccattccttttgaacaaagcattaatgaagcatttgtttatatttttcttatgatggaatgatggtatttgtaaaaaactataaatggtcttgttgcatagggttttttataagttcattttaaaaattggtttctgagaaattaatgcaatttcatgtttttccaattttacttcaatttattatatatttaaaaactcatacacaaaatgtatgcgaataattctttatatcaaagccttattgtctaaatttacatgagtttaattatgatcctttggccttttacttgttttttctttgtcagaattcaaatctttgagtagtcaacaggtgataaatgtcccattaatctttctgactcccta

SEQ ID NO: 914241 - DNA, 638 bp, Homo sapiens
catttggcttcttgttgctcatgctaatttctgcagcatgcttgaatttctcttcagaaaatggggttttattttctattgcatcatcaggctgcagattttccaaacttctaytctctgttcacctcttgaatgctttgctgcttagaaattcttctgccagatatcctaaatcatctctctcaagttcaaagttccacagatctctggggaaggggcaaaatgctgccagtctctatgctaaagcatagcaagagtgaattttactccagttcccaacaagtttctcatctgcatctgagaccatttcagcctggacttcattgtccatataactatcagcattttgtcaaagccattcaacaagtctctaggaagttccaaactttcccagattttcctgtcttcttctcatccctccaatctgttctaacctctgcctgctacccagttccaaagtcactttcacatttccaggccttatagcagcacccaactctcagtaccaacttactgtattagttcatcctcacactgctatgaagaaatacccaacactgggtaatttataaaagaaagaggtttaattgactcacacttctacattggtggggggggcctcaggaaacttaaaatca

SEQ ID NO: 914242 - DNA, 650 bp, Homo sapiens
aatagctatcatactcattctccatttctccccaggctcacaggttctaggcaataactattctcctttttttctctatggatttcctattctggatatatcataaaaatggaatcatacactctatggttctttatgagcgggttctttcatttagcatatgttcaaggttcaggcctgctatagatactcccttttttctttttgtaaacatcatttatttttattgtcatctaatattgcattttatggatataccatattctaacttagccatacctcagttgatgaacatttgggtagtttccagcttttgactactatgaataatgctgctgtgagcattcatgtacttgtggacatgtatttttacttctcttggatatatatgcctatgagtggaatttctgggttatatggtaactctatgtttaacctcattttgaggaactgccagactggttttcacagcagctgcaccattttacaatcctaccagtactgtatgagggttttgattttgtcacatcctggccaacatttgttattgtctttttttattatagccatcttagtgagtgtaaaatggcatttcatagtggtttttatttgcgcatgactgatggcwctgagttatctttttatatgct

SEQ ID NO: 914243 - DNA, 668 bp, Homo sapiens
ctggtgggcggtgattgaatcatggtggtgctttcctccaagctgttcttgtgatagtgagcaacttctcacgagatctgatggtttaaaagtgtgtggcasttcccccttcaagctctctctctcttctcctgccaccatgtaagatgttccttgcctcctcttccccttccaccatgattgtaagtttcctgaggcctcctcagcaatatggaactgtgagtcaattaaacctctttactttataaattacccagtctcaggtagttctttatagcagtgtgaaaatggactaatacagaaaattgatgctagaagagtagggtactgctataaagatacctgaaaatgtggaagcaactctggaactgagtaacaggcagaggttggaacagtatggagggcttgggagaaaacaggaagatgtgggaaagttttgaaattcctactgactgttgaatggttttgaccacaattctgatagtgatatggacaatgaactcaggctgaggtggtatcagaaggagattaggaacttattgggaactggaataaaggtcactcttgctatgctttagcaaagagattggcagcattttcccctgccctagagatatgtggaacttggaacttgagagagataatttagggtatctggaggaagaaat

SEQ ID NO: 914244 - DNA, 694 bp, Homo sapiens
ttagaagtgggggtgggcaggctggttgtgagaactataacagtatgttacatgaaatttttttttattgtcttggaatttgggctgaggctcsaaaactgagaaaaatgatggtgaaatgcccacacattctgagagagtgcttagacacatctcatcttcagggtttgcacaggaaaattccatctgtgaccctcaccccatcacctgcttcagtcccataaataaaagcaggtaaatcaaggatggttcagagagcggatttcctgggacttgttaccttacttagtaaggagtcctgtcccctcacctcagtcttgcagagaaacacatttagaaagcataggccatctgcaatgagcagaaggaaaccttcactccataaggctgaagcaaagcagggaaagagcttctggaggacctaaactacatctggggagtttgaggggcacagagactagggactggcacctgatcctcacctggcagcagaaggttggggccggctggagctgcctgtcagagctacctgggagccccgagtctagtggggctttccctgggataagcagatgtcacaataagagccagattagagttatcttaagaggaacctgccctaaaggactgcttgctgggataaagtgaccccagcagagaagctgggtagggggcatgatcctggagaaggagc

SEQ ID NO: 914245 - DNA, 640 bp, Homo sapiens
gagacatacaaggccccaatataggaaactggtgcctgcaagaaactgcaaagccaagacrgcccaagtgtagaggcagagggattgttaggagaagaagatggagggtaggtgaggacttgatagtgtggggccctccaggtttcttagaagtctaggtttcttctaagcacagtaggaagtcactgaaggatttcagcagagaaggaacataatccacccttcactttgagtgctgcatggagaaagattggacccgctacagagttaagttaggagactgtggcagggaagattttagactaaaggagtggcaatggatgtgcagagaagtgacaatattggagaaatattttgggagatataatatttgagatacagttattgccaccaaatttcttgaatgtattttcttatttattgtcaatgtttcacaattagaacataagctccatgaggacaaggacttgtcttatacactgctgagtcccactgcctacaacagtgcttggcatatagtgggtattgggtaatatttgtcaaatgaaattatgatggaatgacttataaatttgaggtaaaaatgaaaaggaagaaggtgtagagagagaattccaggattgaaggtgatatttattga

SEQ ID NO: 914246 - DNA, 646 bp, Homo sapiens
tacagagttgctaagaaccagaaaaatacttcctttacttcccaaccacagggttttttcaactcctggagtaatcctggctttgattaaatccccccctatcacataactgtaacaaccagaaatcagtggaggtgtggggtttgtccatacacctcagggaatgtgcctgtgaggtttaaactgaggtgaccccggagttcaatggctgtggagtgtcagtttccctgtaccaggccttcccaaaccccaggtttttgtttgtttttgaaacagagtttcactcttgttacccaagctggagtgcagtggtgtgatcttggctaactgcaacctctgcctccggggttcaaacgattctcctgtctcagcctccccagtaactggaattacaggcacccaacactactcccagctaatttttttttctttttcttttacttttttttttttttaagtagtagagacggggtttcaccatgttggccaggctggtctcgaactcctgacctcaggtgatccacycgcctcggcctcccaaaatggtgggattgcggccaagagccaccatgcctggccaaccccaggttttttatgctgcaagagatgactcagtgcttcaccacctctagctaaataaaccatg

SEQ ID NO: 914247 - DNA, 627 bp, Homo sapiens
tgattaagtcaaacactgtgtgaaagtgtgaggaattttgaagtcccatgataaataaccgacagaggctttgcttctaacaattcaacttgctcattctgtactttcatagcccagrgtgaaaaattgctctaaatcactcatgagttccttcacccgagtagtggccagctcaccagctagatccaaccctgggagggacagggcacttagacaaggtggctgctgacaccacactgaactcacagcatccaaccccagtttacatacttaaaatgttgccaactcctaagaaaaccttgaaaaagagaactccattttccattctgaatgaaaaagtcatgagattttcttgtgatatatgaggagaggcagaaggcaaatatttctctttttgtccttaaaactaaaaggaaaaccaactgtatgttctcctttcaaagtgtgataaattgttgtattcactctcttctcaaaagacaaataccattttctgatttactagggtactagtgtgttctttgtggttggggccaaaatttgaataagccttgccaaatcactttaaagtttagcttgaatcttgtttaaattccttatcactcagatttaactcaatacatattc

SEQ ID NO: 914248 - DNA, 596 bp, Homo sapiens
gattacagatgcccaccaccacgcccggctaatttttttgtattttttagtagagacggggtttcaccatgttagtcaggatggtctccatctcctgacctcgtgatccacccgcctcggcctygcaaagtgctgggattacaggtgtgagccactgtgcccggccagtatcaacaatcttatatatagttatgcattgtttaacaacaggactatgttctgagaaatgtgtttttaagtgattttgtcattgtgtaaacataatagagtgtacttacacaaacctaggtggtatcccctcctacacacctaggttacaaatctgtacagcctgttattgtgctgaatactgtagggaattggaacacaatggtaggtatgtgtgtgtctaaacacacaaaaaagtttagtaaaaatacagtataaaagataaacaatggtacacctgtatagggcacctaccatgaatggagcttgcagaactggaagttgctctgggtgtttggtaagtgagtgtgtgtgaatgtaaaggcctaggatatttttgtacattactgtatgttactacattactgtagactttatacacactgtac

SEQ ID NO: 914249 - DNA, 555 bp, Homo sapiens
gctccttgtatcttatgcaaatttctgcagccagcttgyattttttcccagaatatgggtttttgttttccatcacattgtcaggctgcaaattttccaatcttttatgctctgcttcccctttaaatataagttccaatttcagaacatatctctcaaagttccacagatctctaggacaggggcaaaatgcctccagtctctttgctaaaacatagcaagagtgacctttctattccagttcccaacaagtttcttatctccatctgagaccacctcagcctggacttcattcttcatatcactatcagcatgttggtcaaaaccattcaataatctctaggaagttccaaactttctcacatcttcctgtcttcctctgagccctccaaactgttccaacctctgcccgtttcccagttccaaagtcacttccacgttttgggtatatttatagcagcaccccactctactggtaccagtttactatattagtcctttcttgctgctataaagaactccctgagactgggcagtttataaagagatttaatt

SEQ ID NO: 914250 - DNA, 571 bp, Homo sapiens
tagttaggtaaattaaagtacaacatgattaaattacttgctcaaggtcacatagctggtaagtgacataactgagtgacttctactgtaggaagctaattccagtcacttaacttctcacctcattgtttcttatcagcatcaagctgaaccttagcagtgtcaaaagtacaataaaggaccatcattgtcatgttaaaatagatttgttgatgaaaacctgaaaggaaacaggtatttatttgttccatttcatttttcataaaactatgttaacatttcatttgtgtatctgcattttcatcgtttcagaccttcccaacagtgaatttggtgtgtgagtttttgatctcttgccctcaaagcagacaggtggtcagccacctgtcccattcactccagtggattgtgcgaatattatcatttctatatgtgttttgatgtgaaatcagttgggaaaacctagcaaattagttgatrtatcaagttttcctcctcttgtcttcttattaaaatacttatgaataccaaatatgcagggtaaccttgcggcttaaagagcctttttttt

SEQ ID NO: 914251 - DNA, 656 bp, Homo sapiens
ctttggttgcctatataatgttgctagttattatagtaattgtggcctcatagcttctggagattaagtcccaatcctagtcctatgtttgttgaaacatgctgagtgcttctttaaaagtgtaagccttctggggaataataacatgaagtatttgttagtcatacacaacttattgtgaattagtttctcttcctagtaccatcttcagaactcggtactgagaaaagaaaatctgatggttagggtgggatgaatggaggtggagaacagtgtaggaaaatataataatggaatctggaccacctattatggagagaagcctgataatttgcttgcctctggacaatcaggacattcaaataaataagcaaaatgggtacttggaagtgaagacatcagtaagggaaagtgactagaaagtgatgggggaaaatataataaactttacaatttgggccataggtttaccacacttttgggatttctatttttgaccaataactgtaaatgataatttttcaataagatatttccttgcagaaaaggataaactatttctggtaatctctttgtatattgggttcaaatctggtaaagtgtgaagagacayatggttaggtaaatttcctgtgtttctactgattatatggcct

SEQ ID NO: 914252 - DNA, 621 bp, Homo sapiens
atgattaaattataaactcaggtcactgctttcaagtacagtcctcccatgttaactgtgtggggtttgttccargaccccagtggataccaaaacacttggatgctcaagtccctgatataaaatggaatagtatttgcatatagtctacacacctccccttgtatattttatatcatatccagattacttctaatatctaatataatttaagtgctatataaatagttgtttatattgtattgatttttgtttgtattactttgtgttgtcatatcgttgtattcttaatttctatttctttccaagtattttgtctctgctgttggttgaatctacagatgtggaaaccatgaatacagagggcaaccgtatataattcctgtctcctgattgaaacaatttggggtcctctccttctttgcccttattaaaagccaaaccaatcaaacatttgttacaatgaatctcaagtcactggtttgcttttctttctgttttgcatgacatgacaccattttgggggtgaattaaacattataactttcttcttggcatttttatcttttctcctcatgcttattatttgttttgttttctttttactctgggatatacatc

SEQ ID NO: 914253 - DNA, 572 bp, Homo sapiens
cctgacgagtaaattttagtcagaccggtcatctgctctcaaaccctgtctcctgataagatgttatcaatgacagtgcatgcccagtgggacatgaaacttcaatagcaattttaatttcacccctgtcctgtgatctcactctgcccccatttgccttgtgatattttattgccttgtgaagcatgtgatctctgtgacccacaccctattcgtacactccctcccctttgaaaatcactaataaaaacttgctggttttgtggcttagggggcatcacagaacctgccaatatgtgatgtctcccccagacacccagcttttaaatttctctcttttgtactctttccctttatttctcagaccgactgacacttagggaaaatagaaaacctatgttgaaatatcaggggctggtttccccaataatgtgtgttctatcaatacctagtttattgagagtttttatcatgaagggctgttgaattttattgaaggccttttttgcatctattgagataatcgtggtttttgtcattggtyctgtttatgtaatggattacatttattg

SEQ ID NO: 914254 - DNA, 595 bp, Homo sapiens
acagatatgttggccgtgttagtcagctccggctgctgtaacagagtaccakagactgggtggcttaaacaacagacatttatttctcacagttgggaagctggaagtccaaggtcaagctgttagctggctcagttcctgatgagggctctcttcctggtttgcagatggccaccttcttgctgtgtcctcactcagttgagagagagagctctggtgtcccctccctgccttcttctcctcttccttctcctcttcctgcttcttcttttcctcttccttgttctttattttctaaggacatttatcccatcttgggagccccatcctcatgacctcatttaaacttaatcacctcccaaaggccctatctctaaatacatcacattgcaggttagggagtccacataagaattttgggggaactcaaacattcagtccataatattggctaaatttgcgatgtaggttacaggggcagtaaaagtctgcaaatcttgaaaagaaaatatgttgaagcaccccaatatctaaagccaagattgttctttacttccaaagtcaacctcaccatagttccagggacccacattac

SEQ ID NO: 914255 - DNA, 564 bp, Homo sapiens
caacagagtgagaccctgtctcaaaaaaaaaaaaaaaaaaaaaaaaggaaaagaaaraagaaagcatcttaaaaaacaactttcttaattatatatatatatacattacataatatgtcattattacaaaagtttatttgtatttcccagtttgtgtctgcacagtttgtgtttcctgtttctagaggagagagaatgctctattcctttctaggttccactggtaatctcttatgggtagaagacctagtttgttaagaatttgttgtaaattacagttgacagccctgtgtgagaaaccaatggacaaagtgtaatgacttcactgtaggagctttatttcttgaatttaggtctgggaccatgttttagagcgttaaaatttggggaaatttgacttctagttaactagactgttacttaatgcgtttttcttttaattggaaataactttgtgccactgaagtatgcctatgagatcacaaacatcttttttctcttgtgacccttgactggaatcagaccacctgctgagattcaacaattgctaagaacagcggggaa

SEQ ID NO: 914256 - DNA, 635 bp, Homo sapiens
aaaaaaaagaaagaaaaagaaatccctcatctgccctgcagccacagcacacacaaaatcatccaccatattcagacatatggagccaactggctattggtctgagatgatgcatcactttcctagatcttttcatcctcccttcagtctttgctgacagcaattttctgaggcttcggtgcagcttcttcctatgtataataatatgacatgatttttaaatggtggtatcattctaaactttggaaaaatagaattaggaaggattgagatggtgtagggctggtagtcttgcactgagctaccaataaggacagagacaatctttctgactcctgacatttattttttgtgcctctcctggtagatggtcccgaccagcttttaatccaatacaggagtacagaaaggcaagcagtgtctctgtttagatgcttctctttcacctctcatctctgcagacctctctgcaagcaaaaaagtttgacctctttctttccaagagtaattacagctcctatcaatttttccataagaagatagatatgaaaaaaaaaaagtgaaaacttgatggmgcaagacttggggttgaatacaaatgtcacttcctcacctctctttcacatttctcttaa

SEQ ID NO: 914257 - DNA, 567 bp, Homo sapiens
cctggcagttttacataacaccactgacaatttccttttctcatcactactagggatatctgaaatacagaacaagcattgtctgacctgtccattttgtagcattcttatgaccaggttaataaaaaagcataactaaatattgtataatagatgacatataaaagttgcaaaattccaacctttgaggaatgctatgcttcattcatggctgcagaaatgaagggttctagtctggcttttccactgccctctgaggcatgccttctgatactgtactgattctttcccttctagttcctaattatgtgagcatcacctttagtctttccagaaccataggcaacctttctgctctatagttattctcggttttatgcttcatcatctggattactatgatatccaccaggaatagtttttagcctttgatgagcagataagataaaagtcattttctttctaagaacaagtatgttcacatcatttctcttttgtattgctagtatcttggctgctcactatagtggcatgcttcaccrggaagagttcagcttctactcttta

SEQ ID NO: 914258 - DNA, 657 bp, Homo sapiens
agccatgaactggaaggaaatatttgcaaagcacatatytgatgaaacatttgtatccaaaatatagatagaactcttaaaactcaacagtaagaaaaaacaacccattaagtaataagcaaaaaatctgaacatatacttcaccaaagaagatatacagataacaaataagcatatttatggatgctcaacatcacatgtcattagggaattgcaaattaaaaccacaaggagataccaccacacataatctattagaatggctacaatctaaaacaccaacaacaggaaatgatggtagggttgtggagcaacagaaactctctccttcattgctggtgggaatgcaaaatgatacagccaatttggaaggcattttggcagtttcttactaagctaaacattgtcttaccatataatccagttatcacactcctaggtatttacacaaatgtattgaaaacttatgtccacaaaaatctgtgtacatatatctatagccgatttactcataattgataaaaattgaaagcaacaaagatatccttgaataggtgtaatgctgacatacttttatgtttccaatgttgtaaaaggtgatactatagagattaaaaatatcagtggcttccagagttggcggggcagtgttaaaga

SEQ ID NO: 914259 - DNA, 645 bp, Homo sapiens
tttaccaacttccccttgttgccatattctcacacataaatttgtcctcttggatctctgtcttctatgagaaccatccttaagatccakatgggaagtgccaggttttctgtaatgaaggagtgggtcacacagtttaattcagatcattaaaacccaagaatattgcccagaaataattagcctcctagcctcacctattccttacattcatttgcatcagtttcccaatctggcttgttctttgattcagctctttgtctctcttgttgatcagtctcccttcctctagcagctgctcttccagctatggttttggtttgttgggcactgattcccagccagagagctacttgccttcttgatttcaatattttgctctctaagcacagcttattgaaaagccatcctgtcttcaacttggcctgtgaattttatctggacaacccttatcaccaatccctagtggaagtctttttatcaacacttcattcagcttagcaatcacttacctgcctaaccagcctatgcttctagctaaggtttcaagaactgagttgtttttttgttttgtttttgttttttgtttttttttttttggtgaggggagaggtgttgtttttgtttttgctttttagtggattc

SEQ ID NO: 914260 - DNA, 640 bp, Homo sapiens
aaatactggtgaatcaccttctaaatccatgaacagtattttaagaatccttaaacttaatacacatttggagtcagctattgtctgacttaaggaggactgcttgctctaccacaagaaataggcaacgggatgctgcctcacacaggaaaagaaagattgactctgcctgatatggtttggctctgtacgcacacaaatctcatgtcaatttgtaatccccatgtgtcaggggaggggcctggtgggaggtgattggatcatgggggtagtcttcctccttgctgttctcatgatagtgaatgagttctcatgagatctggttgtttaaaagtgtgtggcacttccccctttgctctctctctctcctgctctgccatgtgaatatgtgcttatttccccttcgcccttctgccatgattgtaagtttcctgaggcttcacagccatgcttcctgtgcagcctgagggactgtgaatcaattaaacctcttttcttcataaattacccagtctcagatagttctttatggcagtgtgagaatggactaayacactgcctctaagtctttggcctgctttttttccttgacaggaaaacaaaaacaaacaaaaattactgaacaaggcatttaatgagc

SEQ ID NO: 914261 - DNA, 495 bp, Homo sapiens
cttccattcagtttctgggagtacaactagctgacagccttcagctattacagatttgaggatgccctcagctttcaaacccaggttacaatcttctggggaagcctctggacaatgtctgagcatgataggaacactaagaacatagtcatttctgcccagtgtgggggtccactaatgggcaatgttttctctgaagctccccatcaggattttacagaatgttattgcctgatattctctcttctctaatcctgctcctgctttcttttctttcattggtgtcagtggtgaaaaaatgatcaggatgaagtttataaaaagtcatgactggagaatcacaataccaaaccttgaatttgaggactaaggcaatgtcatttgcagctgagagttacaagccttttgaaaattacctcttggtgtgctactgggccatggtagagatgaaatactsaactaggggacatcaactggccatgcaccaggaactgc

SEQ ID NO: 914262 - DNA, 604 bp, Homo sapiens
ctcctgagtgcaggatgtattccaaaatatttcccawttttttttctttctgaatgaatgtttgacagtcctaaatgtgggctaagcactggtgtttctttggatacccatgtccagctcccaactaccacctcacctcatctccctccttgaacagcaaccttcccttcccttttctgcctacttttggctacttccaattgtcctaagctgggtgatctctcttcttgcatctggagactctcccttctttctcacacatttattggcctaccataatttacaaagagtgaaatattctacagaaatattcaaggattatcactttcactttcaaaggatgattaagatttccttttttaatcaccaacagatgaagcacaatctaatttcaggtcacaagtttccttcagatcactccttggttcattaagagtaactaaaaattataaaacttaagataattataaaaacttacctgccaacaaaaggctctccctgaggtatttgtattccctgtggtcaagcagttatgatgcctctcagaaaggggaacactgattggaagccagtggattcaattctgggttggtaactcttacct

SEQ ID NO: 914263 - DNA, 605 bp, Homo sapiens
agtagtggtttcttcaaaatccccaatctacatcttggaactctattctgtgcaaattcatttctcctcaaagatgaaaataaakaaacttatttaagacttaagggtaaggcaaacaaaaaatgcatagacaaaatttagaatacctaataatctgggatttaacctgaaagtctttaaaatgcactagcatttaatttgagagagagaaaaaaaagaagaccctactgctgtatatttctgttcaaaatttactgctgtttctctggaatagaaaagaagcagtttctgttgagttggcaaattaatgtgcttgaacagaataaagagagcaggccaaggaaatcacactgcttttaatactttctttgcaaagagcttttttggaccaagtccatgactgctacaagtaagtactcagttgcaagaagaatgtgagtagagatcaagtaggctggagctttttgttaattcactcttaatgttactaatgttaatttgaatctggagacttaagatcaaaccaagcggctaatattctgcaaggccccgttccctttcctagtgattcctgggggtagaaatcatttcttaaacctaatata

SEQ ID NO: 914264 - DNA, 691 bp, Homo sapiens
acaaattcttttgtctcagaagttaattttgaaaatatggctttatttagagttgtcaaatcagataagcatctctgtgtggaagctttggaaaggcagggaccatgtttatttggtttgtcaattattcatgagacctggtgcaaagaagaggctcaatacattttcaatgaataaatgacttctgcaagccacatgattgcttgtagggcatgagaatgccagacagaaaattgtaaggaatgccagaggaaagtggtattggttgctcagtttccaaagtccgtaacttatggaagaatcataagaagttacgtggctgattgctgaagatggtgatataaatagggaagataatatggccatagcagttcatactttccaaccctgaatagcacagtggagacagaactggactgtgactaagaagacaggaatcctaatcctggctctggcaccttcccactgtatagcccttgggcaattcacggaacctcctagtttcttcctcacttgagaagagcaggcagcaactaacatttactggtgatttacaacgtactgagtcctgtgtgaggagttttacctatgttgcttcacttcatctgaggaaatttggctaggttcattccagctctgaacgctaaacrttttatgatcctcagttaatttaattcacatgccaaagtac

SEQ ID NO: 914265 - DNA, 614 bp, Homo sapiens
aactctcttactctcactgttatatacaacccatagccaagactcatcaattattsagtatctcccatgcctgtccccttcattgtagtacttttcctgactcactcttctatctcactatcttgcctccaatctctatactattccaacattccttctcacagctgggtaacattcctaaaatacaagccagatttgccacaacagaccttcaaaacctctcttgcttcctatcaagtaagtgattcttacttagaatggcatttacagcttcctctgacctaagtataatctgtcttcccaggaccatttcctgctataactcttcattcttctctctccaggccaatgattggatatcttccccaactctttgtttctagcaaagctcttttgatattctatttatccagaacaacctctttctactccaaagccaagatcagatgctgtctttactgatattccagtcagaatgaattattatcatccacggcatgttatacctccaatacagaattagttgcagctgtagttagttgtttaagagtccctatttcacctacagattttaatctccccagggttaggggttttcagttatctttattatc

SEQ ID NO: 914266 - DNA, 594 bp, Homo sapiens
ctgcagcttggcgagagtcccagagccgcaggagtcaactaagccacactaaaatttctgaccyataggaactgtggcataaggaatcttgttctaagctactgtcttttggtgtcatttgttatccagccatggataactgatagacttcttcatccacatctgctacctgtagtcaaccaaagcagttttatacaaaggtactattttctggctttttattccaaccagatttcacaatttttttgagtgtgggtgtagaggatggtgaaatatccatggaatagaagattgttgaataagaaagtcagaggtagcaaggaaaatgtgtatttagttcaaaaaaatcctatcaacctagttgtatgtgttgataataaagatctctctgtctttcccagcaattcggatcaaccttgttaaggttgaacagagacagacccaggtgtttgaatggttcatatttgtgttttactcctaagggtgaagcacctgtaattttagggcttaagatatcatcatgaaaaaaattcaaagagaattttaaatggtgaatggagatgctaagcttgtataatggctatttttttttta

SEQ ID NO: 914267 - DNA, 602 bp, Homo sapiens
tcccattttatctaaaatcttattttgccaataagtaccatgtctatgataaacaaggagttttattagccagcttttgttcaaaggaagaaatatgaatagaatatattgttttttatrtagtcactgaaataaaactctttggtagctttgatcaaattatttttgtttgacactggacaagtcatttcaaataatccagtgcattttgaaaacaatgtagagaagattgtaaaaggtacctaatggtttttatcttcaatgaactatgctattctgggttaagaaaggcatatttgatgggaacagaaagaaatgagctctgatgaaaaatattgtaacaaccacccagcttcccataacactaatggcatcagtaataagtgtaaggtggttacttttctctgcttttagtattaaggataatgagactttagccgcagtagagaagagagcttctccctgaagctgggaagataacagctccaagatgtaggtaatatgtgaataggagattcagatggaaccatgagtcactggagatgatttagaaagaattttagttgattaaatctttgacttcattgtagttatttttctga

SEQ ID NO: 914268 - DNA, 587 bp, Homo sapiens
agtggggaaagttctttgcaatctttcaccctcctaccaatatagtcctgtgcaaactggtaattataatcaattataggccacagagtggtgaaaaagacacttttttttctcctgcagacgcctatgagaaactattcaattttagggtctgaagctaccaaaaagttcaagatacagggttgtctttaatatagtaatacaccattaagaattgtgatatttccgaactcaatctcaccatcagaggttgatttttgtgggtagaaacattttcacgtgttcttgggcatcaaaagcatgcaagccttggctcccgtttgaaagttccatgacaatgacaattggaagaccaggtaaaatttaacagatattatttaatgaagttaacgtattaacacattcaattctcataagaaacgtataaagtaggtaccactatttaccctctttaatatatgaggaaactgasacaaagaaaagaatatttcctcagggttgcaccgttaggaagcactagctcaaggaattgcactcaagtcctctagcttagagttcatcctcttatccaagagcctctactgcct

SEQ ID NO: 914269 - DNA, 604 bp, Homo sapiens
gcttatcagcttaagaagctttgtgggtgagacaatggggttttctggatatrgaatcatgtaatccacaaacagggatagtttgacttcctctcatcctatttgaatacgctttctttctttctcttccctgactgccctggccagaacttccaatgctatgttgaataggagtgtgagagagggcatccttgtcttttactgctattcaagtggaatgcttccagcttttgttcattcagtatgatgttggttgtgggtttatcatgtatgcctcttgttattttgaggtatgttcctttaatacctagattattttttaacatgaagggatgttgagtttatcaaaatcattttttatatctattgagataatcatgtggtatggtctttggctctgtttgtgtgatgaatcacacttattgatttacatatattgaaccaaccttgcatgtcaggaatgaaacctacttgattgtggttattaagccttttgatgtgctgttaaaatcagtttgtcacgttttgttgaggatttttgcattgatgttcatcaaagatactggcctgaattctctttttattgttgcgtctttccctggat

SEQ ID NO: 914270 - DNA, 614 bp, Homo sapiens
ttcaaagagtgaagtagatctatagacactgatgtggaaagacattatggttatgttgttaaaagtaaacaaagttttataacagtttatagtatgatyccattttgagaaagttctgtatatcaaactgtaattcaaatatacatcaaactctataatgcagtgattatttctgtaagagagatgagtttactggagacaagcattctgcttggcgtatattgctgtattgattgagttttataagcatgtgttagctttatgataaaaaactcaacacatctgaaattatgtcaaaatatggtgtgttctcatttcattaaatgaataaatgaataagctatggttcatacatagaaatattccttccatatacagagaagaggtctctgaaaaaccagtgaaaactgggcatgttgagttgttgtatcagttagggtttttgggtgaaagtaacaaagacccaccttaaatgagaaacaggaatgtattgggagaaaactgaaggaagggttgagcaacctggcctcagggagaactggactgaggtcagttgctgggatctcagtataggagcccacagaccatcactatgtgtctagggtagtaggaac

SEQ ID NO: 914271 - DNA, 637 bp, Homo sapiens
ctgtgtctctgattaggatccaaattcccaggaaagagaatctgcttggccaagattggatatttccaccctgttaacccaggtgggtgaagaggactgtgatgtgtggcccgccatgggacttcacgcatcagaaagggagttccactgaggaaagggctgctgtttccttaaggtgagatgagatgtagagcagataaaaatcaacagatttctactgtaattactattttgagcaatggcataaagttgtactgaatcagccatattctcttgcctgttgtgacccatagcaagtatttttgacagaaaaatgaatagagaatagtaataatatcatccatgacaaaatgatataactgatgtcaattagctcatgagacttagagccacgacattggcatcattaatgttgtgcttgaactgatctagttaatcatccatggataatatgccccactcacatgctccctggtggtccctgctccccacaggtctagcggaacagggcagtgctctaacactggtgtcaagctggtgagaggctacctcccagggtttccttctgaccatttaatgtcaggcagtgctcaggagtatgaaaraaatcaggcaattttcacagctataaagtaat

SEQ ID NO: 914272 - DNA, 582 bp, Homo sapiens
aacccaaaactataaaaacccagaagaaaatttaggcaataccattcaggacatagacatgggcaaagatttcatgatgaaaacaccaaaagcaattgcaacaaaagcaaaaattgacaaatgggatctaattaaactaaagagcttctgcacagcaaaagaaactatcatcagagtgaacagacaacctaccaaatggaaggaaatgtttgcagtctatccatctgacaaaggtctaatatccagaatctattatacaatgaacgtaaataaatttacaagaaaaaaacaaccacattgaaaagtggacaaaggacatgaacagacacttctcaaaagaagacatttatgcagccaacaaacatattttaaaaaagatcaacatcactgactattagagaaatgcaaatccaaactacaatgagatactatctcacaccagccaaaatggcaattattaaaaagtcaagaaatgactgatrctggcatggctgtgaagaaataggaatacttctacactgttggtgggaatgtaaattagttcaaccattgtgaaagacagtgtggtgattcctcgaagac

SEQ ID NO: 914273 - DNA, 675 bp, Homo sapiens
aacttggtccagcatgttggaagatgagaaagacatagagaggaggaaacttggcccaattscgtcaaccaaagccagcctagattatccaatatccagttaatgctcagacatatgaggaagtccaggataagccagaagaaccatgtagatgactctcacactaaataatttactgagttttagggttgtttgttattcagcattattgcagaaaaataaaactaatacagatgtctgcccacagagttgttttgagaattaaataacaactccctttcctagaatttctgcaatgtattcatctttaaaaagaaaaaaaagttattgaacataattttctaccatttgtctaacatttagagtttattagttactttcacttttatttacttcctttaataaaataactgctattcccaggcttcttggttgcagatgacaatacaataatttaagcaaaaagtaatcaattaaagagtacgaattggctcacaaaatctcagaaagaggcagagaaccaggcttggatgctataccattaacaacactatgggcaggaaaagcttccattcattctgttgccccatgctagtgaaaaatctcttgcccttgatgcttgctgtttgatttctgctgcactcaggcttgaagccatgaactcgacccccactg

SEQ ID NO: 914274 - DNA, 674 bp, Homo sapiens
ctgttatcccagcactttgagaggccaaggcaggaggattgcttgagtccaggagtttgagaccagcctggacaatatagcaagaccctgtctctacaaaaaatttaaaattagccagacgtggtgatgcatgtctgtagttccaactactcaggaggctgagatgggaggatagcttgggcccaggacttcaagactgcagtcagctagaatcacgtgccacttcaccccagcctgggctgcagagcaagaccctgtctcttaacacaaaagaaaatatcacgaacataagatgcttctcattcactttacaaaacttcactaactctggttcatgaactttctatgtaaattaattcccctttcatcattttgctttcaaaagatggaggaatagagcttgaaatagagccaaaaaggtaatgaatatacttagagaatttggctgaaaactaaatgtattttaccaatgtggatttttaattttttaattattaagggtacattttaaatgtatatgtttatcagatacatgtggtttggttttgttttgttttttgtccccaacaatctacagcaagtagaattgtttsgttttttaattgagacagggtctcacactgtcccacaggctgaagtgcagtggcaacatcatagattactgtaaccttgca

SEQ ID NO: 914275 - DNA, 690 bp, Homo sapiens
ctagacatagatgaattaacatggcaaaatatttttaataggaattacaacttaagattgctccaggtgttctattctagtttattcatattttgtgttcagtctcctttcaatrctttcgaatttacttgcattatgacattagcagaaggaagaagaaattctctccatttcaccattgtatctttagcctctagaactgtgcttaaagcagagaaggcactgactgaaacattcagtttgacccagactagtctctccttttactgtatctctgctaaatgctatctgtactaatttatttgcttctctctacattacttcctcatgtctatcatcactttaaccacctgatggattcccattccatttttaatcctccattccagctgtagatctccgaagtaactccctgggtagagttaattgttcttctccacacacccagcatcttgtatattcttcaaactaatatttaagaaggttaattacataattccttgtcttcgtcatgactaaaatccagaatcttttggtgtgtgtgggggcaacatccaaattaggacactctcattcaagacaaaggctaaatagaaaacaacaacaacaacaacaaaaaaacaggaccagcatgaactgggacttcagatggctccatatgtaagcaaaggggcatattttaatctgtgt

SEQ ID NO: 914276 - DNA, 652 bp, Homo sapiens
aggctaagtaattttggaagctgtgccaastcttatgggacaccaatgtagcatttaattttctaaagaaataaattactagagtaaatagcattcaaatggcaagccagttttcccaatactgtgtattgaacacattgtctttttcctagtgtatgttcttagcatgccttatcaaaacatctcatgcaccccataaatatacacacctactatgaacccacatacaataaaaaattttaaaatagatataaaaacataaatggcaagtctccaagtgcgatggaatacaaatgaaacagtaattccaagccccccccatgtaattttaaaaaattttataatttatatttagataatataaataaaacaacatgttgtaatgttggccctgagctcaaacttcgcttttctgttactgcttttagcagaaagggaaaacttattggcatgtggtcaggagtaaatgagataatgcacataacgatttgcagagtgcctggcatcttaaagtttctgatcaaatattaacatcttcccagattccctgagctggaaatctccttacttttcacagaacttctgaagctcatctcttgtggacctctcctgtggcacttgccacttgctaattatacgagtgttatttgtt

SEQ ID NO: 914277 - DNA, 640 bp, Homo sapiens
gtttaacctaggcttgctttctttgtaatataccacatgcaggtgagggtgtggggtaggagatatggcagatactatctacctaccagagtcttcaggtgcttacaaaaaacttgaagacagctgaagagccaaattgactcaagacagtttgcaaaaagagggaattctggccaatggtagtaagaatgaggagtaaagaagaggtttgattattatagattattttctccactttgtattaataggttttttagagaaggacaaaggaaaggagacagacaaaagcaaagatatatatgaaagtttaaaaaatgatacattctgtataaggctctataatacacaatctcaaacaacagaaatgataccaaatcaatgcaagagtatccttttgtcaacaattgtgttttttttcatttttaccagtgagcctaatgcagactaaattttattccattgaaattaatacaaaccaaaaataaaattatattcaatatcctgctattcmataaaaaaattgtgagtccttctagaggcagataaaaccatggagattacaaagcaaaataagaaagatctatcatttcaaagagtatgtaccatagtggaagaggacagaagacaaagtgctgattgc

SEQ ID NO: 914278 - DNA, 600 bp, Homo sapiens
ccattttccataatggctgttctaatttatatccytatcaacaatgttcaagtgtccccttttgccacatcttattgaatacttgttatctttcatcttttagataataaccattctaacaggcatgaggtagtatttcattgtggtttcaatttatgtttttctactgattagtgctcttgagtattcttttcatatactgttggccatttgtcttcttttaagaagagtctattcatgccctttactcatttttagagttggaatatttgttttcttgctactgagttgtttcagtttcttaaatattttagatattaatctcttaacagatgtatggtttccaaatattttctccaattctgcaggttgtttcttcactgtggtaattatttcctgggctacgcagaagatttttaatttgatgtaatctcatttgtcttttttttttttacttttttggcctatgcttttggttcacatccaaaaaaatcttttctcagaccaatgtcatgaacttcttcctcaatgttttcttcaactaattttacagtttcaggtcttacatttcagtgtttaatcttttcagtttatttaatt

SEQ ID NO: 914279 - DNA, 636 bp, Homo sapiens
caaatgaggacagactcctaaatcttaaaaaaaaaaaaaaaaaagacaatgcatccttgttttcaagcacttatttcccctcccccccacccaatcaatttccagttaaaagcatgtrgcgttttttttttggtggtggttaaatggaaactatgtgtgttaaagataggaatagaagtgaaaatgagaaaaatcagtccttaaaacatcttcctgactggaaggctcccacagcattcagaagccgttcagtggtcctgacaagttaaatcagtggcataattattcttgcagaggaaagataagtcgtgatttcaaaagaatatgaagaatgcttacagaaatctgcatatttatcttattcttaaacctactcttttcaactcccactctcatcatatttatggacaaaggaaagggtgaagagacaatttaaaaggccacatgatgtgcaggctgattaaaaatgaaagccagatctgctgacaattgacaaaagatcaggtcatcatttatttaattggactctgagtgacaagaagaggagatgattatcgaagagatgactcctttgttccagcctcacagtttaagtcatttcaaatagacagggaactttttcaatttctctaggac

SEQ ID NO: 914280 - DNA, 579 bp, Homo sapiens
ggcccagttggtttaccctttggtttacctctgatcaggtcagacccagctgcttttgagtcccgcctggagaaacgcagtgaatttcggaagcagccagtggggcattccaggcaaggtgattttatcaaatgtgtggaacagaaggtaagaccttcccccatttgtggtgtttgcttaccagcactccttcaccctccttaccctcacccttatccttaaagttggtttattgatgggtcagctgggtgaactgaacatagtctctcccaactccatttccatccataaatgtttatcctgctctttctaggcaaagtactgtggtcatggtggagatatagaagtatgagaggggtacttcctgctcccaagaggagcagtctggtggtcaaggcaaggcacacatggtagtaggctagaggtatcagagaaaatttcccatgrgagatggaacctgacctaggctaggaacgttgtgggggatttaaattaagtagagaggaaggaatgggactttgatgtagagcaggggtcatcaaattttttctgtaaagaactagatgttaaatattttag

SEQ ID NO: 914281 - DNA, 579 bp, Homo sapiens
ggcccagttggtttaccctttggtttacctctgatcaggtcagacccagctgcttttgagtcccgcctggagaaacgcagtgaatttcggaagcagccagtggggcattccaggcaaggtgattttatcaaatgtgtggaacagaaggtaagaccttcccccatttgtggtgtttgcttaccagcactccttcaccctccttaccctcacccttatccttaaagttggtttattgatgggtcagctgggtgaactgaacatagtctctcccaactccatttccatccataaatgtttatcctgctctttctaggcaaagtactgtggtcatggtggagatatagaagtatgagaggggtacttcctgctcccaagaggagcagtctggtggtcaaggcaaggcacacatggtagtaggctagaggtatcagagaaaatttcccatgggagatggaacctgacctaggctaggaacgttgtrggggatttaaattaagtagagaggaaggaatgggactttgatgtagagcaggggtcatcaaattttttctgtaaagaactagatgttaaatattttag

SEQ ID NO: 914282 - DNA, 618 bp, Homo sapiens
caatcaactttacctctttttaaaaaagatgaaatggacccacccaacattttcagtaggatgaacagtctcttcaaggcaagttaccctgacaggctgcatactgaggacttactatgargtttatctgtggctacagcatatgcaacttctccaacctaagcaaaactagaacaaacacctcaataaatagtaaagttgtttatattttatttaaagggatctttttaaacttttgattttgaaatatggagtagactttcttttctctatttctaccacaaagtgcaactgaaaaatttggacattatgtgtaaaacaaacataagactgaaaggctgacaaagaaggcaagttggctaaagactttgggacccaggagatgagacagtggtgagtttcctgattttcttttcactttgtgtactccagactctcagctgaagaagttaccaactcagaagtgccaatgagagcagacaaagcttgctctctctagtcaaaggaccaacaaaggcatagtctagcaagacagaacatgtttagacagtaatcactatattccaaccaaacccaccctcaaatacaccagcaaagccaagtgggaagtctagactt

SEQ ID NO: 914283 - DNA, 657 bp, Homo sapiens
caacagctgaatattctgaactattgttaaaatgtccacatatttaactttaaggttcttagatgaacccttgatgttcacagactttaaaaatggataytagggaaattactttaaatgatgactagttttgcctaatatctcagttttcagaagtaatttttataaactgttaaaaatgaaagaattggggtacatgaaaatgagataaatgcttgtaggtgaactttttatgtaatttaaaattttttaaatattttaaactgaataataggtgctcattggatgtctgggtcatgtccaattaagacagttatgatatggaaaaatatatttacaaaaattatggagttgtttcatctataaaatgcaaacatctgaaacatctgatagtttaggatttcttgcttcctaggttttcacaaaaatttaaaattactaagaataagaattccagttagtgtataattctgtaagttctgttcttattgagaaaaaaatcactttatgtaacttggatgttattctgaaataatgtgtgaaagaagataaaagataaatagtaagtacaaaagagagatgtgaagaaaattgtttatatgaagatgcagttttggtaaagaaggtttttttaaatagaataattttgtatgagaa

SEQ ID NO: 914284 - DNA, 608 bp, Homo sapiens
gcacacattttcccatcagtggagagaccctgaatggataaaggacagacagacaggagacagacatgtccctgctgtaggccacacttagctgtcaccttgtgtaggggtacggagttttcttctcctcccctgcccattcctctcaatcagagcccagcaggtggatgcttcagaaatagggtgcttctgtagggatcccttcccttcactgtctcccctccctgctcggcttctgaccctaaaggaagctgttggcctcattacccctgggcattgagctaaggcttcaggcctctctctgactaattccctcccaagagaggcccagagatcctcagattccaccatccatccagcactgtattgaccatggtggccttgattagggaatctcccatcctgagtcacctccaaggatgccagaaacctggaaaggggcaggtagggagtaggctaagagaaggctcagggaaggacagacccccagggccctgctcccccagacagctctcaaagggmtccctgggcacggagttcagagtcccatcagtgggtcccatcagtagggcagctgagcctaggacccagggctgtggaccagcccc

SEQ ID NO: 914285 - DNA, 601 bp, Homo sapiens
ttttaaaatatgaaaaatatgttcaatctcattattaagataaatgcaaatacaaattataagaggacttaacagattggcaaacatcagaaaagtgaacaacctcctccactggcattcttttttttttttttttgagatggagtttcactcttgttgcccaggctagagtgcagtggtacgatctcagctcactgtaacctccaccttccagtttcaagcgattcttctgactcagcctcccgagtagctgggattacaggctcctgccaccacacccgactaatttttgtattttcagtagagatggggtttcaccatgttggccaggcttgtcttaaactcctgacctcatgatctgcccgccttggcctcgggagtataatttgctgtatggagggcaatttgacagtatctgtcagattttataatgtacagagccttgaattcagtaattctacttttaggaacttatcccacagatattccagacatgctcaaagatgtaggtacaaagattttattgcagtattatttggaagagtaaaaaaccagtccatgaggaagactagttcrataagttaataatctagaatatatc

SEQ ID NO: 914286 - DNA, 659 bp, Homo sapiens
tctggtttaatccttacctcaacccagggaatgggtattattgtcaccttccattcaccatataaggaaactgaggcttagagaggatgagaagcccttccaaggtcacacagccaaaccatggcagcttgacttcattcctttattcattaactatttattgagtgcttgctgtgtgttctggcgattggccatacagctgtgaagaagaaaaagtctctaccctcgtggagcttatattctggaagctgggctctctatggaacagcacagaatttggagacaaagggcctgcgatctggtttggctctgcctcccactagctagaagccctgggtcagaattattatgagtgtcagctttttgtgtgttatatgggactcatggtgctgccagacttacttctcttacagatgccaagataaaaagaaaattgctgtaacagctatgcagtttggtttggttgttaagtgcaatttttagagtcaaagtgattcaggtttaaatcttggttctgccagtagmtagcctttcacttcaggcaagttacatgacttgtctgagcctcagtttccttatttggaaaataggtaaaataaaatacatttcctaagatagtagtgagttgttgatgagatatataaattatttagaacagt

SEQ ID NO: 914287 - DNA, 679 bp, Homo sapiens
tagataattttacattttattccataagtttttctgaatttaaaaatatcataaaacaacatgttacttacataaaattttagatttgtagttagaaatatttaaaataatttaaaatgttgcattctgttattaaatattatcaggcccttcaactgtgtctgactactgaaataagtctattattaaataggtgtagtgctttcttaaaaatattatactcaaacattaattgaaaagcttacatgttaaacacatattcttcttccagcaaaatgaaatgtcaccccgagttaccttgggtcaccaagggtcccagttagctttgtactgatatttggccgtgtcttgtagaactgcatgatgtcatccttttttgtaaccatttgcaactgtagtttctatggggaccaaggaacatcctagggcaagaattaaaacagagtcaattgttttggtagaaattcactaggtcaggactgtatcacaaaagagaaatgagggacctgaagagagaactcaccataaagaaaggagtcgggcagggtgaatgagtcaatttagtagtagttcctgaaagtcagaaatgggtcatgtttcaggaacagtgtggcaatctgaacctgaacacttcccatccaattatttcakcaatcattgtaccttgccctctggggga

SEQ ID NO: 914288 - DNA, 589 bp, Homo sapiens
aacaaaacctagtaaaatctcgattttatcttatatcacaaatattaagcacccgaacccccatactgtctcatttaggattttctgccaggtttggacatgaccgcttttaaaactggcgccaagtctacactagcgcccggaatgaatttccagtttaggtcagcgtttgttgtgaactgaactttgtgatagagcgagttaggggtggactttcggtaaaagggtccgcaaaccaattagagaaaaggtgctcctctgcaagagtttcataggataaactcatagaagagtataaaaagcataaaaacgttaaagtgtactatataaatagcagttaatcgtgtgaatatgttgacaattgttaagtgaatgatgacagtgagtttttgcatttaggaaatgcatgggaatggaaattgttaaggagaaaagagccatactccagttccttgtttaagtgccgtggctttgcaattcaggatcctgttagcatatctgtatatttkccttactcataaagtttaagatgtttgtgaaggttacttcctcctttcatccattttcggacactattaacttgttttgt

SEQ ID NO: 914289 - DNA, 421 bp, Homo sapiens
tcctgaggcttccccagccaaatggaactgtgagtcaattaaacttctttyttttaaaaattacccagtcttgggtatctctttatagcagcatgcaaatgaactaatacagtaaattggtaccgggagtggggtgccgctgtaaagataaccgaaaatgtggaaggaactttggaaatgggtaacaggcagaggttggaacagttaggaggactcagaagaagataggaaaatgtgagaaagtctggaacctcctagagacttgttgaatggcttagaccaaaatgctgatagtaatatgggacaatgaagtccaagctgaggtggtctcagatggagatgaggaatgtgttgggaactgaagtaaaggtcactgtttctatgctttagcaaagagactggtgacattttgcccctgccc

SEQ ID NO: 914290 - DNA, 578 bp, Homo sapiens
tgtttaaaacaaagacaatttcacaatattaatagctaccaagagatattctacatgaaatttgtttgatgttttatactagaaagattaaggactatgaaatgtttcccttsatcatttgacaatgtaatattgtatatcttgtaactattaggcatcatcctaggttctaaaaataaaatttttaaaatggaggaaaaattctgccaccagggagtcagggagacagagggtgacagcgcttaaatgctacagcatataaatcccaggaggctgagtgtagcacttgacggccacctagtccagacggggtcagataccatccaagtgagttgatgtttgagcacagtccctgtatccttcactttctaaagcatgaatgtcctgagccctattcctacaggattctattctaaggacgtggtcttcacattaaagagcatcatgaataaacacacactgaagtgttaatagctgatgatgagttcatgtgttatctcgtctcacattttattaaagaacaaaagactttatgtctagctcatgtagctaatgatggacttaaaaataaaaaagcg

SEQ ID NO: 914291 - DNA, 614 bp, Homo sapiens
caagtgtgcctttctctcttaccaataccaccactcttgtgattactacagcattataacaagtctcgaagtcagagagtgttagaactccaatwgtattactatttttttcgtagcattttcacatgatttataaaaccatcttgcctatttctataaaatacctgctaggattttcactgggactatacttaatctgtagatcaatttgtggagaattaatatctgaaagtattgattcaaatggtagggttttcaccatgattaaaagctgttaggatcaaattgttagagaaaagccaatagtgtaaaagaggaaaagtattattaatgatccatgaccacaatatatctatttatttagatattctttaatttctgtcaacagtcttttgaagttttaaatgtgtaggtcttgcatatttttgtcagatttactatatatttaatgttactgaaatattataaccatgtggaacacatgtaatagtttcagtatttttaatagatttagtaggatattccacatagacaattatgtcattagtcaatacttttattttttccttttcaatctgagtgctttttctgtattttccttgtcttatttcacc

SEQ ID NO: 914292 - DNA, 613 bp, Homo sapiens
cattgatgcaatactgttatctaatccacagtatccatttaaattttatcagttgtccctacagtgtactttatagtaatattttttcagtccgcatacctttttaaatccttaacgactacatgcatacattcagttgacagaatattgtgagaaactgatgaacaagtttaatctttctacactttttacctagcagtgcaggtaagcctagactcgattgagtaatacatagtccattgaaagaggtatggccttccagtgacagtgtcaattaattgacctgcaataagtccaggagagaaaggtggaactgtccttttagggccaaacatttctgcaagcctgaagtcccttcctgagtgtctcctaggcaaaagagcaggattccaggtaaacttccaaaagacactgtttcagaaaaacacatctggccatgtcaactacagagtacagagagacacaaggacatgccagaccaagaacatcggccttatatgccatagstgagctttgttttgatgcaaaaataagtttctggcacttttatgccactgtcaggaggaagctgacagaggtagaagtgagggaggtggctaggctgcatttccag

SEQ ID NO: 914293 - DNA, 570 bp, Homo sapiens
ggcatcagcctccaggcctctcctgggaaacatacccactcagtggggctggatccctcctcttycggaagaagccattccagcagcctgtgtgtgctaagtcccagggaaatgagagacttggctccaggaaggaggaagtcagagtgtatcccaaaaggtcacccggctgccaggattcaagcccacgtctacctggagccaaagccgaggatgctccataaagcagcaggcatcctccagcagcctccccagttccctcccaactactgaatggaaggaaggttctgctctcccagttggcactgagcaggctactctcacctgcaagagaattactttaaactcaggaaatgcaaaccagttttggcatccatcaaaataaaagttcccttcccccagaaataaaggacataatctcttaggccgccttgaggtgcttgcattttgaaataggaacttggtgaaggcatggctctggaatggcagactccaagcacattggcagtggatgagcgatggaaatatttcgggcaggggcccttcccagcagccatcattcacaccata

SEQ ID NO: 914294 - DNA, 605 bp, Homo sapiens
gcccagcaatccccattgaagaccagcactgactcctgtggggtcccattggcccagttagagtcacatgctcaactctgaaccaatcgatgtggccagaagaaggagtggttctgattggacagggctggaacacatgcccattcctggagcaataaacgagaggatcccactaaagacacctggactgacagggaggaggctttgccatcccaggaagccagagtaatcttatgggaagtaaaggagatgcattctgggcagacaatacctagatggatatttatgtatatttatgctttagatggcaccactacatccccacccttgaccactaccacattcacagctcccaaattcggagctggcccatgtttcagtcaaccccagaccaaggcaaagcatttatcagccagacggttgactacagcacaagatcttggcaatagtcaactgaaatacagggaatcacagatgttaagtcactaagtccaaccttrccaccacagcctccctgagaggctggcagtacttctggggactcgctcctcctgggcagctttgtccactagaaggtgggttccttgagggcaaggactttgttc

SEQ ID NO: 914295 - DNA, 610 bp, Homo sapiens
gcctttgctggtgctaagaggtaaagaggactcttccctataggctttcaaaggaatcatggccctgccaacaacttaatttcagacatctagtctccaaaagtgtgagatgataaatgtctgttgttttaagcttcccagtttgaggcattttgttatggcagcactggaaaactaacacatgttttatgtaaagagtcaagaataacacacatgacaagattcaacataaggctaattatacatgtgagcccagtgtaaaaaaaggaacattagaagaattgttttggaatcttgattccatgaggtccattttttaactttttgtaaatcattcaccctttctgaatcttaagtccttcatagaagctattttgttcgtttattccttagaaggaataccaagccaagcaaaaagagctgttaggaaaagaaagatgagcagtattacctgcttaatttctgttttaacctggggggagagatttacattattacttcttaatgatggtataaaagcaactttttctgtatgaatccttayaaagtaagttttaaacaatccaaaaataccaaaggctctctggatttgggctgcatttaactttcc

SEQ ID NO: 914296 - DNA, 567 bp, Homo sapiens
aaaattgggaggctatcctgggtgatccaggtgaacccagcctaatcacaggagctcttaagagaattttctctagctggagccagagagatgcagcagaaaggaaagtyaaagagatttaaagtataatgttctcagcaatgtgacattgctgctgaggatggggggggcaatgtgataagaaatgcaggtggccttcaggagctgagagagggtcctggcttataggcagcaaggaaacagggacctgagtcctacaaccacagggaacttaattctgcttagaattaagctgaacaagcttagaagtggattctcccctagcgcctgcagagaagagctcaggccatctgacactttgatttctgtctcttgagacccagtaaagagaaaccatctaagcccactcagacttctgacctgaagaaccgtgaaataacaaatttgcattgtttcaagtcactaagtatgtggtaatttgctatggcagtgatagaaaatgaacacacttgcatttggacttgccccagagctggagctgcctgccctttgtgccacctttattta

SEQ ID NO: 914297 - DNA, 648 bp, Homo sapiens
ttgagtgattttcttagtattgatttctatgtttattgcaatgtggtccaaaastgtggttggtatgatttcaatttttttaatttactgtattgtaatttactgtactgtacagttctgtagatgtctattaagcctatttgctcacttattgagttcaggtcctaaatatgtttgttaattttctgcctcaataatctgtctaatactgtcagtggggtgttgaagtcttccactattattgcatgggaatctaaatctctttgtaggtctctaagtatttgctttacaaatctgggtgctcctgtggtgggtgcatatatatttaggatagttaggtcttcttgttgaatttaaccctttatcattatataatgcccttctttatcttttctgatttttgttggtttaaagtctgttttgtgtgaaattaggattgcaacccctgttttttttttctgttttccatttgcttggtaaatttttctccattgtttattttgagtctatgggtgtcattgcatgtgagatgggtctataacacagtataccattaaatctttcttctttattcagcttgccactctgtgccttttaagttgggcacttagctcatttacatttaaaattaagtattgatacatgtgg

SEQ ID NO: 914298 - DNA, 552 bp, Homo sapiens
gcatacagttactgcttaagaataaatgaatatagacctgtatatgttcatgttaccattaagaaacatgcccaaaattcataggttttttccatacatctactgaagtttgtcttcctaagcatacttcttgagaagcataatcaagaattaatgtgtctgaacaatgtacagggcatgctcattggcctgaacgcaaatgaacaagcaagctaaactaaaatctggtggtggtactttcacatgctccatattatttttatgagaaatggcaactacataataaaacatctcttgcattaagtaactttagagctatatgagcgatatgagcagcagctcaattgcctataccttctacatctatagatgtgtacagtgaaaacagacatcagttaagatgcccctaagacactgaaggattttgagaaagtaaaagttcaaagaaaatcacacaaagacaagtatattttaatacacgttaattacctgaaaayacatcatctttatctgaggtaatccaaatatccctttaatgtgaacattagtttc

SEQ ID NO: 914299 - DNA, 552 bp, Homo sapiens
gcatacagttactgcttaagaataaatgaatatagacctgtatatgttcatgttaccattaagaaacatgcccaaaattcataggttttttccatacatctactgaagtttgtcttcctaagcatacttcttgagaagcataatcaagaattaatgtgtctgaacaatgtacagggcatgctcattggcctgaacgcaaatgaacaagcaagctaaactaaaatctggtggtggtactttcacatgctccatattatttttatgagaaatggcaactacataataaaacatctcttgcattaagtaactttagagctatatgagcgatatgagcagcagctcaattgcctataccttctacatctatagatgtgtacagtgaaaacagacatcagttaagatgcccctaagacactgaaggattttgagaaagtaaaagttcaaagaaaatcacacaaagacaagtatattttaatacacgttaattacctgaaaacrcatcatctttatctgaggtaatccaaatatccctttaatgtgaacattagtttc

SEQ ID NO: 914300 - DNA, 671 bp, Homo sapiens
tatacaggagacatttagttatgtttggcacagactcgatattgtgtaaatggaacctaacttctttcttccagggacttgctaaactctactcctggactctgtttcaacctttcctctggttcagctgttatttttcaagaagccttatccattcctcctattacacaccttctgatccgggaaatattgttggcctctctcacttgttagggtgaatagacaggctcatgttcttacttaacaattcctgcgacatatcactgaaataaacttaagctatggattataaagctttctggcacttcagtgatattcaaggccactcaaggagctttgctaatacaaggaggtatttaacagagaggtctcactcaattcaatgtctccagctgcacaggcctacctgtcccttgaaagaaagactttgctgtctacgctgcagagccattatctctttctttttgtacagtgacacgaaccaaatctgatcccctccatagcactttccgcaaacattatttaatgtgtgttaggttagatagaaatggcaagtatttaggtatgcrtggtaaaaagttatgcatatgacctgctaagctctctgggcagaaacaaaggactcatcatgtcactttctgtattaaaagctttcaatggcttcaggataa

SEQ ID NO: 914301 - DNA, 632 bp, Homo sapiens
ataaagcaatgattataaaactgtgtcaatgtgctattaaagatgtaatttatatatctcttagctgatgacatgactctatacttagaaaatcctaaagactaccaaaagactcctagcctgatacaataattcacttcagtaaagtttcaggatacaaaatcaatgcataaatatcagtagcatttatgtataccaatagcactcaagctgagaaccaagtcaacagcacaatcccatttacaatagccacacacacacgaaaagtaccccagaacatatataatcaaagaggtgaaagatctctacaaggagaactaaaaatcactgctgaaacaaatcatagataacacagacaaatggaaaaacatttcatgctcatggattggaagaatcaatattgttaaaatttccatactgctcaaaggaatctacagattcaatgcaatccttatcaaattaccaacatcattcttcataaaattggaaaacaaattctaaaattcatatggaaccaaaagagctcgactagccaaagctatcctaagcaaaagaacaaatatggaggcatcacattaytcaacttcaagctacactacaaagctacagttaccaaaacagcatggtacttg

SEQ ID NO: 914302 - DNA, 616 bp, Homo sapiens
tatcccctcacctagccccattcctagccaagtgaatacttgaatgaattaatgcacaatttaatcatggctcaaatcaggcacaaaagcaacytcattgcttatttactggcatacttagaaataatgcattatataagtggtatgtatacgaataaggtctatctaatgcattttttcaaaaaatagctatagtacctacaatctcagtgcctatagcagatgtcacttggcaagttcaatcttagaccaaagacaaatagggaatctaatattgcatagcagtgctccattgtatggtgattatttaaatgactatgaattagcttatattaatttttatatgagcattaaagttaaagccagaaaaaaattaaattgaattaaatccccaaagctagtatatttaagaatttcctagaagtcagttagcccatttgggagatactggtatacaatatctatgcataatgttggtctttgaaagaaaaattctttgtttccttcaggaaatctatagattctgctcaacagaagtttcatggggtctacagatagggctcctggggttccattaatcccagaaattatggatatacaactcagtaaaggcaag

SEQ ID NO: 914303 - DNA, 624 bp, Homo sapiens
aacagccacatgtgactagtagctaccatttggacatcatagatataggactttcgtagatagttctggacagcactgatcaacatttctaactgttcccatccctggacgtgctcccttccacatgtgctagcctcttcttagaatacccttctccctttctttggctaattctcacttattccatgtggtgaacaggtctatgcaaacctaactccgaaagccaagggagctaacaggccaaagaaagaggttgacaaatccagtttctcagaaaaaaaaaaaatttttttagggacttaggaacagaagcaaggtctctggtggccatgagacggtggattcctacacttgtagcaagattttagagtaaaacatgtgcagttggtcatgtttcagattttcttgtgaaacttgtgactattgggaaggttagggaagcatctttttcaggctatctacactataacattgtttaaagaccttgctgcttaaaaccttgctatggaggagtcaaatattagccaccacggtgatttcacttcaagatggcgtcactcttgccrtgcaataggctgttttcctataccacttgtccttcaacatacagctcagatgtcacct

SEQ ID NO: 914304 - DNA, 623 bp, Homo sapiens
ttaataatagccatcctgactggtgtgagatgttatctcattgtgattttatttgcatttccctgatgattagtaatgatgagcattttttcatatttgttggctacttgtacrtcttcttttgagaagtgtctgtacatgtcttttgcccacttcttaatggggttattttgttttttgcttgctgaattaagttccttatagattctggatattaaacctttgtcagaggcattgtttgtgaatattttctcctatcctgtaggttgtttatttagtctattgatagtttcttttgctgtgcagaagctttttagttcgattaagtcccatttatcaatttttgtttttgttgcaattgcttttgagaacttagtcacaaattctttctcaaggccaatgtccagaatgatgtttcctaggttttcttctaggattcttatagtttgaggtcttacatttaaatcgataattcatcttgagttaagttttgtatatggcaaatggggtccagtttcatttttccacatatggctagacaactaccacagcaccatttattgaatagggagtcctttccccattgcttagttttgttggctttcttgaagatcaaatggctg

SEQ ID NO: 914305 - DNA, 623 bp, Homo sapiens
ttaataatagccatcctgactggtgtgagatgttatctcattgtgattttatttgcatttccctgatgattagtaatgatgagcattttttcatatttgttggctacttgtacatcttcttttgagaagtgtctgtacatgtcttttgcccacttcttaatggggttattttgttttttgcttgctgaattaagttccttatagattctggatattaaacctttgtcagaggcattgtttgtgaatattttctcctatcctgtaggttgtttatttagtctattgatagtttcttttgctgtgcagaagctttttagttcgattaagtcccatttatcaatttttgtttttgttgcaattgcttttgagaacttagtcacaaattctttctcaaggccaatgtccagaatgatgtttcctaggttttcttctaggattcttatagtttgaggtcttacatttaaatcgataattcatcttgagttaagttttgtatatggcaaatggggtccagtttcatttttccacatatggctagacaactaccacagcaccatttattgaatagggagtcctwtccccattgcttagttttgttggctttcttgaagatcaaatggctg

SEQ ID NO: 914306 - DNA, 665 bp, Homo sapiens
ttaaatgtatgtttgctgtaactacagttatttagaattcagtacttgtttaaaaagtttcaaacaattctgaaatacatgctgtcgaagtaaaagtggayactattctgctgccctcacaaaaagattagatgtagaacttctgaagacattctccaataactagaagctacagacaacgaataataatttagatgacagaatcaggctcttactttaatgtattatatacctagcttcaaagatagtttcaatatgtatcaaaatttaatccagtaattccacttctaaaattttctctaaggagagagcaaaatttttcaaaaaatcatataaaatttttatcccagagtttcttaaaatagggaaaatgtaaatagttgaaaagtttatgaatatgatatatgtatccaatgtagttattgaaaaatcataatatagatgagggattgccatgctatgggctgcaggccaaatttggcctgtgtcctgtttctatatagcatgcaagctaagaaatagtttttatatatttaaagtaccataaaacaaacaagaacaacaaaacaaaaggactatatgcaatataggctgcatgtggctcacaaggctaaataaagtatttgttatctatgctattagaaaaaaggtactgacttctgtga

SEQ ID NO: 914307 - DNA, 625 bp, Homo sapiens
atttgcaacttcaaggacccatgaaggctattactattgttgatgatgaggacaatgacggtggtgatgacagaaaaggaaacggggcggggagtacagggtcaaagcagtgtgagaagacacaaagagccccaatgccaccacatcaacctcacttcagcttcctgcacccccactctcttggggtgcccttctctctccccacccctggaaatcctttagcctcagagttaaattaatcaacaggattaggtggaattggccacagaggccctgctggttggggctgagtcttctgtgtaccaaaagcaggtaccttggtgaagcctgggcagctggttcgaggagggggacgtggggggagtgaacatgggaacgcattcattaaacggcagccagattcggggtacgcagtaggggagcagcctcatggccagcctgggctcctgccctcgcactatcaaacagctaaggaatgggatggtcccagggggtgctggtctggagattgccccaaaagagaaggatacagggagagatgctttctctgagttcctggatcctgtctctagttagggatgtggagcagtscatactgagcaaaggagaattgcagctcctacct

SEQ ID NO: 914308 - DNA, 711 bp, Homo sapiens
gaggctttgcagtcctgtgtgaacttgcgtacatcactgcctcactctgtctcagcatcttcttcaagggaattggtgatgacacccacgtttcagggtcattatgaagataggtgaaatgtggactgcagagtgtccctactgatgaggaggagcagggcacccggagtgggcaggtgcaggaggaagagggaaatgctctccactttccctggctctggttttattatacaatccggcatcttggagttcaagggactttggaaatgactccttccccagttttctaactgaggcccaggttgctaagcagagatgcagatctatatcctcagagtaagaaatcctggctctagcaggaggcatcaggggctgcctgcctgtagcaaaggttctgcagcatccctctcccaaatccccagtctggcaccatcatcaccaccatcaccctacgttgcactcatgcatacatatgcccccacacacattcacaggtgcacactctcctactcacatgcgcacactaacacaaaattacccatgcacacgcacacacactgacttcaacaatactacctgcatgcacacacatrctcacgtgagcacacacctcccccctccacacacacccatgtgcatgtactctcacacacacacagacctgtgggcgcacacctacctacacacacccacacgcctacccacatgcag

SEQ ID NO: 914309 - DNA, 711 bp, Homo sapiens
gaggctttgcagtcctgtgtgaacttgcgtacatcactgcctcactctgtctcagcatcttcttcaagggaattggtgatgacacccacgtttcagggtcattatgaagataggtgaaatgtggactgcagagtgtccctactgatgaggaggagcagggcacccggagtgggcaggtgcaggaggaagagggaaatgctctccactttccctggctctggttttattatacaatccggcatcttggagttcaagggactttggaaatgactccttccccagttttctaactgaggcccaggttgctaagcagagatgcagatctatatcctcagagtaagaaatcctggctctagcaggaggcatcaggggctgcctgcctgtagcaaaggttctgcagcatccctctcccaaatccccagtctggcaccatcatcaccaccatcaccctacgttgcactcatgcatacatatgcccccacacacattcacaggtgcacactctcctactcacatgcgcacactaacacaaaattacccatgcacacgcacacacactgacttcaacaatactacctgcatgcacacacatactmacgtgagcacacacctcccccctccacacacacccatgtgcatgtactctcacacacacacagacctgtgggcgcacacctacctacacacacccacacgcctacccacatgcag

SEQ ID NO: 914310 - DNA, 609 bp, Homo sapiens
agctgctttcattctccaaaataagtgtagaaagataataagaaacgtttcactgaaactataactttgtctttgaccayggaacagaggtgggtggaaggcaattggggaaagaagccaatcagcaacctccagaaatttcctctttttttcagtcacaaggacagtttattggggtagccgctgacctcatgcaagctgctccaagtcaatgaaagggggcagcactagcagtgtgccaagaggcaaaagacagaaaaataaaactagaggatccttggataccaaagctgggaaaaagcacaaattcagatgagaggttataatgtagactgagataagacaacagaattccaagtgttagagagcagtgaatccaagatgtttgcaatgtgatgtcaacttaagccttttttgaagttttcattatgaacattcccaaacatgctcacgagtacagagtacaacattacccatcatcaagcttcagcaactatcaacttttctccatacttgcttctttttttaccctcttttaattttgctaaaatacattgcagatactcctaaacacttcagtatgcactttattttttaacataatcacaa

SEQ ID NO: 914311 - DNA, 595 bp, Homo sapiens
cagcaaaccaccatggcacatgtatacctatgtaacaaagctgcacattctgcacatgtatcccattttttaaaagaagaaataaagaaaaacaagacaaataaaatatctttatattattttcttttttatccttatgtaacattagatttatcacttcatagcagcatttaattatttttaacttcaatagcatttaggttaaggattagtgcacttttatttgtataaaggatagttgtattatgttaggtgtaattatgactttattattacctatatttggagattaagtataatttcaggagatgcatatagatgccaagtggatttgtgatggttaatattaggtgtcaacttgattgaattgaaggatgcctagatggttggtaaagtattgtttttgggtgtgtttttgaaggtgtagccagaggagatagacatttgagtcggtggactggaagaggaagacccaccctcaatgtgggtgagcaccatctaatcagctgccaatgtagctagaacaaagcaggtgacaaaaggtggggtgactttgcttsctaaatcttctggcttctttttttatttatttatt

SEQ ID NO: 914312 - DNA, 583 bp, Homo sapiens
ttaaaagttaaaaaaaaaaaagaccaaaacaacaacaaacaaacaaaaactcttaaggaccatacaaacagaggccattggttggctttggmccacaggccatgatttgctgactcttgcactagacttttaaccctggagcagccaaagcacagttcttgaactctgtctttttatctacagacattaccttggagacctcacccagtgtcgtggttttgaattacatttatatactggtggcaccataatttatgttggaagccaagacttctccttgaagtacagactcacttatctaattgcataatcaaatctccacttgggtatctaccaggacctctaactttacatgtccagaattaaacttcttaccttcatggcttccaaaatgtttccattgtagttttcattatatcagttaataccttctaagatcacttctaacttaggttgaatttctaccagacccaaatcctgggaatgatttgagtgccagtagctgttttggatgtgattccaggaaactatagtaggaagtggggaaatgagacaagaaagggaaggcagctagtaagaggta

SEQ ID NO: 914313 - DNA, 617 bp, Homo sapiens
aaaaaattgagttcaagaactattgaactttyaaaatatgtaaaacggtgttgaacaaataaaccagcaaaatttatagttaagtatatttaatagttgaaggtgtggctgtaaaccttaagacaatctataaaatttacatctatgaaagtagaagcatattgaaaatataataaaaaccagatattaaaactccagaagatttcaacaaaatatgggatattggaagaggaagaaagtgacagcttgcaaaaagcatttttatttggaaggaaatgttatagttgctgattaattttccatgttgatggaaaaatatgtttaaatattaaatgtttaatataaatgttacataaataatagtggagtcatcatattagcactggatcacctacctcaagacaattattttacatgagaaagataactctgtcctttggaattacttattactgctatgtgcaactcaacctaattttgactgatgtgtattctctttggatgaaaaaataagtttgacataatttttaaaaatatcatttgagattttagcttcaaacttttatttttaagcatcaattttacatgtaatagtaggtattttttccctagtgttt

SEQ ID NO: 914314 - DNA, 606 bp, Homo sapiens
ttaccaagaaagtaacagacacaatttttcttaaataataattaagagttttgcagaagaaaaaccagggaaagaatataatctataagcaggtgtggcagatgtggttgttgcctactcaatagccatttcttttcctctttttcctcttcccatgataaagtctggaaatacccaataatttgccacattttcttgcagccaggtctgtccatgttaggcaattctggccaatgaaatataaggtcaagactgctgggttgaggtgaggggtgcttcttgaaaagagaaatagaaaaatgtccaagaagagccttctttccttccctctttctttggattctgctatgtgagtttacgatgtgaagctgaggcaaccaccttgtgaccatgagacaaagagcctgaggatgggaatgccaatctcctgaggatggcagaaagtcaggaagaagtaagccacttactatagccttttgtgaaaaatgaaatctgcttatcattartccactgctggtgagagattcagttactaacaatcaaaggcagcttagctgattcagtgtggaaactgtatttttggtcattaaatttgacaaataagtt

SEQ ID NO: 914315 - DNA, 589 bp, Homo sapiens
cttgaccaggcttcctctttaaccaatacacmctacaattcggattaaaacagatacattgggctggctattgtgcagtaagaataattgctgagttattcaagcacaatgggcagaaggcatacaagaattttgcacagcacccctttaagccctgtggcatcaatacaaatggcctgtaaaggatatgttaggtcaccctgacataaaataaacaaagataggggatcacccgttttcagcacaaaataatgaagtggagggtgtgcatcatggcagatgctaccccataacagaattatagaaagtaaaaagatttcaggctgtgtgtcttgttttaacactatttgaaaaaaaaaaagtcagactgtcatcgatggctgtattagtccattttcacactgcttaaagatatcacccaagactgggtaatttataaagaaagaagtttaattgactcatggttccatatggctaaggaggactcaggaaactcacaatcatggcagaaggggaagcagtcaccttcttcacaaggcatcaggaaagagaagagtgaggagcaaagggggaagagccccttataaaa

SEQ ID NO: 914316 - DNA, 597 bp, Homo sapiens
tagaaacacctcttatgattctgatgtattccagagtttgatratgtctgggtcagctggtccctcttcccaccctgtggtgctctttctcttctgcctcaggatagcttaatctagagagttttagcttctctagttggagggtcttcctacccaggtggagtctgtctttgagcctgttaactcactatcccagtttataagcagcccttttttatggtaggccccacgtggttgggtaacctaactgatgtgataatgaggacagactaaaggtcacgagattgttaacacgtgtgaggagattgtaggcttagcctatcaggtgagggaaaggttagcgtaccaactgtctccacacttcaaagcatgtagctagtttgctgcactaacttaattatctgtgctattgatatctttgaggaacatatctataccctggatacagttacttcacagtaggagatagcaggaggtggcttgttcggttgccaacttcctaaaatgctttttagagtcagctgggttgcttagtcctctcttgctcttggattaaatataaaaataactatgtaaagcatatcagccctcttttcc

SEQ ID NO: 914317 - DNA, 597 bp, Homo sapiens
tagaaacacctcttatgattctgatgtattccagagtttgataatgtctgggtcagctggtccctcttcccaccctgwggtgctctttctcttctgcctcaggatagcttaatctagagagttttagcttctctagttggagggtcttcctacccaggtggagtctgtctttgagcctgttaactcactatcccagtttataagcagcccttttttatggtaggccccacgtggttgggtaacctaactgatgtgataatgaggacagactaaaggtcacgagattgttaacacgtgtgaggagattgtaggcttagcctatcaggtgagggaaaggttagcgtaccaactgtctccacacttcaaagcatgtagctagtttgctgcactaacttaattatctgtgctattgatatctttgaggaacatatctataccctggatacagttacttcacagtaggagatagcaggaggtggcttgttcggttgccaacttcctaaaatgctttttagagtcagctgggttgcttagtcctctcttgctcttggattaaatataaaaataactatgtaaagcatatcagccctcttttcc

SEQ ID NO: 914318 - DNA, 600 bp, Homo sapiens
cagtgaaagcatgtaaactagatcaaatatgtgatcaccaacctggaatttagaccaagtgacgttacgtttctgataaagtacaaggaagtgtttttgagtggaatcacccaytacagaaagagccatctgagtagagtatatttctagtttttgaaaacttactagagcggtattgagcatgagctgagggcttgaattatgatttagacccattctaatttagtggtctgtgagttctttttcactatcttcttaaagaccacctgattcaaagtaagcactaattgcaaaaacatgcacagtgtttgtttttgtgtgcttgtgtaaatgcacaaatgttaagtggaagggcctgggacacagagcacagtaatgaaagaaaagtcagaattagcacttaaaacatttcagcagaccaggaatgagctggaaaaaaaaaattatgtgggcctgctatgcttgacttactgtgactgagaatactgttgaatttctatgagttctctaaaagataaaaatgatttctctatcactaggtaacacatccaaagaccaagttttaaaggcactaatttaactaagtttcaggacaccatg

SEQ ID NO: 914319 - DNA, 620 bp, Homo sapiens
tttgttgaaaagtgtgaaccaacatcatrgggaaaaattaccttaacattaacttctaaaaaatgatgaatcaagcaatttcctgaaaatgtgcaagaacagactttcagaatgatgttctatgaactgtagtctgcaggtcatttgaaatccagcaaatattttcatcctccttcttctgattctataacttattctatatctagaattactctaaagactaattctaacctggatacaagataaaaagtaaagatggaagattctaaagaacaattttaacaatgtcccatttagggggattttcattacatactttatgaacacaggttcggcatattagctatccgtggaaataagtcacttactacatctacatgagcatgttgagatgaaagtgtttgcaaatcatgctttttcaagggtggctaaacaaatctctattcatctattacaactcatagtcattgctaatgttcaaatatattagggttgaacataacacaaaaatggaaatgccggaaagattaacattatttaatctacagatgactcatgctactggtttaaccattttctttagatttttttcatatacaggaatatatttttatatacat

SEQ ID NO: 914320 - DNA, 578 bp, Homo sapiens
taaatgatcatttattttcatcaaagcctgttctatatatgccacttcattttctaacttttggtatgaaaaaatcagtttacttacartatgttaattgtattgtactactataaacaggaacataatttgcaattcagttctaaataattttaccagtactactaacttttaaggaaattaattcagttggttactcagtgtttgttacagaaagagtccagaaaagtattcaccctaagagaatgtcaatcatataatgataatttgtgaaagctttgagaatcaatcatcagtaagttactatcagtttataaaatattatcacatttgtttaaatgtgactttagatacttttatgccaaaaataaactcacatgagcacatgacagtctgagctctataatcagtgtgcttctgctgtgcagaaatgttagaaacgtattgtctaaatatctttgataattaaaatgtttaatatttaatgaaatttgttgttacttgttttaaatcttttttcttttaataaagatttaaataagaaataactgcctgtcttttggtttctttaatctaga

SEQ ID NO: 914321 - DNA, 597 bp, Homo sapiens
acatggtcctatgtgaaatggtccccagctttgtgtttatcctgagagttgactcagcacttcttactgctggtggggagaaatattcatagcattttttcagttgcccagactgcaggttcttcatcttaccatttaaccgcccaacagctgctcacaaaattctgtgtcattcacactgtgcccaatccaggaaagtttaagtgaccatggaatggcacactggcagtgtctcaaaaggatcagttcttttaggaagacttttaccttggtcttagaaacctgaggaaactgtccagtttattccagaggaatgtcaaatgtcaggatctaaagtctaaaagaagtaaaataataatgaattattagttttcatgattacatgggttgggttggcattttgtatgttcatttcacctggactcactcatgtgactacattcagccgctgggttggttgaaatggagaaggcccaggatagccccactcacatgtctggctgttgcttctggctggggtaagggtaccttaattmtcctccacagggtctctcatcccctggtagagtagaccatcttccttgcatggctatctca

SEQ ID NO: 914322 - DNA, 684 bp, Homo sapiens
gcagtgagccatgatcataaaaaaagcattccggcctggacaaagactgagatmagaaaatttaaaaaaaatttttttaattaaaaaaatgagtagaggtaaatgaaacatagaaaagttaataaagccaaaagtgattctttgaaaaagatcaataaaactaaaattttttttgaactgattgaaaaaagaaagaaggttcaaacaaataaaatcagaaatgaaactggggacattactacagatcttgcagaaataaaaataatcacaaaagaatactatgggttgggtatggtggctcacacctgtaattccagcactttgggaggctaaggcaggtggatcacttgaggccagaaagtttgagaccggcctggccaacatggcaaaatgttatctataataaaaatacaaaaattagccaggcgtggtggcatgcacctgtaatcccagctacccaggaggctgaggcacaagaattgcttgagctcaggaggcagaggttgcagtgagctgagatcgcaccactgcactccagcctgggtgatacagtgagactctgttcaaaacaaaaaaaagaataatctgaacaattacatgccaataagataaccaacatgaaatggtcaaattcctagaaagatataaactaccaaaattgactcaaggagaactagaattagt

SEQ ID NO: 914323 - DNA, 622 bp, Homo sapiens
gggtcagatatttccagatgaaaaagaaaacaagatcttgaccaaatacccagggaactgtcacacatatcaaatatttcatggatcaactttcccaaaagttacatagcaaaacttcctctgtcgtctcagaygctcagaacaccctttattcacaaaatagaagcagtcacatagggacttcttcaattttccatgactgaatgcactaccctgccagcctgtacccttgccttttgataaagagagaagatgtcttgatcctctgagaggccaggactcgctgtggtggggaggtcaccactcctaattgactcaggtgatttcttccaagaatgattcccttgataggctggataaagaaaatgtggtacatatgcaccatggaatactatgcagccataaaaaggaatgagatcatatcctttgcagtgacatggatggagctggaagccattatcttcagcaagctaacacaagaacagaaaaccaaacaccgcatgttctcactcataagtggcagctgaaaaaacgagaacatatggacgcagggagaggaacaacacacactgggacctgtcagggggtgtggggtgggggaagggagagcattgagaaaaac

SEQ ID NO: 914324 - DNA, 498 bp, Homo sapiens
ataggcatgggcaaagacttcatgtctaaaacaccaaaagcaattgcaacagaagccaaaattgacaaatgggatctaattaaactaaagagtttctgcacagcaaaagaaactatcatcagagtgaacaggcaacctacagaacgggagaaaaattttgcagtctattcatctgacaaaggtctaatatccagaatctacaaggaacttgaacaaatttacaagaaaataacagccccatcaaaaagtgagtgaaggatatgaacagacatttcttagacatttatgtgaccaacaaacatgaaaaaaagctcgtcataactggtcgttagagaaatgcaaatcaaaaccacaatgagataccatctcacaccagttagratggtgatcattaaagtctggaaacaacagatgctggcaaggatgtggagaaataggaaagcttttacattgttggtgggagtgtaaattagttcaaccattgtggaagacagtgtg

SEQ ID NO: 914325 - DNA, 586 bp, Homo sapiens
catctcacaccagttagaatggtgatcattaaagtctggaaacaacagatgctggcaaggatgtggagaaataggaaagcttttacattgttggtgggagtgtaaattagttcaaccattgtggaagacagtgtggcaattcctcaaggatctagaaacagaaataccatttgactcagcaatccctttactgggtatatacccaagggattataaatcatgctgctataaagacacatgcacacacatgtttattgcagcactataccctatagaaaagacttggaatcaacccaaatgcccatcaatgttagactggataaagaaaatgtggcacatatacaccatgaaatactatgcagccataaaaaagaatgagttcatgtcctgtgcagagacatgggtgaagttggaaaccatcattctcagcaaagtaatacaggaacagaaaatcaaacactgcatgttctcactcataagtgggagttgagcaatgagaacacrtggacacagggaggagaacatcacacaccagggcctgtcaggtagtggggagcaaggggagggagaacatttggataaatac

SEQ ID NO: 914326 - DNA, 668 bp, Homo sapiens
tatctctcctcagatctgttaatatttgctttatgtrtttaggtactctgatattgggtgtacatacatttacaattgttatctcccagtggaaattgactcctttgttattatatgatgaccttctttgtctcattgtatagggtttgacttaaaatttactttgtgtgatataagtgtagcaacctttgctcattttttgttctaattagcagggaatatccttttttatctcttcatttttagtctttgtgtgtccttacatgtacagtgaggctatcagcagcattcagtctgtagattggattttattttctcaaccattcagtcactctatgtatttaattggagaattcaatccatttacattcaagatatttcttattccccagatttggaaatcttttgatattagttctttaaataagctttcagctcctatgtctctctcttcttctccttgaaattgtgtaactcaaatgttttctcttttgatgctgtccccaaaatcttgaaagttttcttagtttctttttatgctttatttttctcttctgtgtgtgtttgtttcaaatagcctgtggtcaagttcacaaattgtttcttctgcttaataggttctgctattgatactctctattgtatttttatttcattcattatatttc

SEQ ID NO: 914327 - DNA, 523 bp, Homo sapiens
aaatccaaccagaactccgcagaacataaatggttagagacaaagagtgtcagctctacaggaactgccagagctaatgttacaacggaaacacaggggtctaggcaaatctcacctakgtttgctgattgacttgattgtcagtgtcctctgttctcaattgtattgattaacactaggggggaagaacccaagaggacttggcaaagcagagcataatctctgctatagactgaattgtgtccccccatatttgtatgttaaagccctaacccccaacatgacttgaagatagagcttataaggtggtaattaaggttaaatgaatccataagggtggggccttaattcaataggattagtgtccttattagaagagacaccagagaacttgctctctttctctctctccaccatgtgaggacacagtgagaaggcagctatctgcaagccagaaagagggcccttcctagagcccaaccatgggggcaccctgatctcagacttccaacctccagaactg

SEQ ID NO: 914328 - DNA, 579 bp, Homo sapiens
  misc_feature 568, 569, 570, 571, 572, 573, 574, 575, 576, 577, 578, 579: n = A,T,C or G
acaagtcttcattttgtggttctttgttgctgttgttttcagaggttaatgcatgtatatctaaacacatgctccattggtttaataatatctttatcatatttaaactctgcctaatggaatgtgggagaaaatattcaacatggtttaagcagatccaggaaaatgatttttccagtttctttttcaaaggtgaaattgcttccagaaatttgtcttaaaactctcccatgtacaattgcatgggtgtgggtggtggacatttatagcaatcctctgaaataattgacaatccactgatgagccagtgttccctttgacactggataaaatgaaatacccaggcagcaaaagaaatagaagcccaaagatatttcccaagacttgctttagatttggaaaaaaataagtaatgtgtattgatacatttatgtcattgtccctgcagttagtcttttactcctcttctttctgtttgcaawgatatcaattacagaccataacgtttctaggaggagaaacacaatctatatcattagcacagaagaaacagctttggtttaagacnnnnnnnnnnnn

SEQ ID NO: 914329 - DNA, 615 bp, Homo sapiens
ctttaactattcccaggtttctctctcactagcctccttatcttctttctttcagatgtaaaagttggttgctcatgcatttcaaataacggaagataaaaactgccagagaaagagaaagcaggagagaattaaccagttcatttttctctagttttaaaataccttcaaactaccagtttctccaataggggacaatccatatagacatgatttttttttggtttttggtttttcaattttttatttttttgagacaaggtctcactcccactgcccaggctgaagtgcagtggcatgatctgggctccttgcaacctcgacctcccgggctcaagccatcctcccacctcagcctcctgagtagttgggggtacaggcatgccaccacaccaggcaatttttttggtattttttgtaaagatagggttttgccatgttgcccaggctggtcctgaactcctaggctcaagggatctacctgccttggcctcccaaagtgctaggattacatgcatgggtcactgagcctggccatgattgctttgtgagacaacatacccagctacctgatagctttagtaaacacaaraatatgacgctattcatggatgc

SEQ ID NO: 914330 - DNA, 600 bp, Homo sapiens
ttaaagctttgttctagaggtaacctcactactgctgaggtaggactctaaaatgccttttgaattatgaggttgctccattgatgggaacaggtactattctcagccctattggagcaccaggaattgttttctctaatcctttagagtggttccttgtttagcctgaatagtttccttacctgtatatgttggtcactactaaactgactttagttcaatttaagtaagcctctgcagatttctgcaattcattctctatgtagctctcttctctctggtactctgctttttgtactctagctgacttgtcctcctgacctcttaaagtctgcttatctttgggaggccaccaagctctttctggggccttcttcaatacactgtaggctggaaacattctctagaaagtaagatgggtaatcatagcactcatgttatttgtttctcatcttctaggcaacaaacccagttgtttctgawgtccaatatctcgacaaccattaattagtcatggtgttcagttttttagttggaaggtgaattcaatccctgttactccatcttacccagaagttataactgagaaacatgaacttc

SEQ ID NO: 914331 - DNA, 716 bp, Homo sapiens
caggatcgaacagattcacagccaaattctaccagatatacaaagaagagctggctggtaccattcctactgaaaatattccaaaaattgaggaggagagactcctctgtaacccactctatgggaacagcatcatcctaacactaaaacctggcaaagacacaacaacaagaagaaacttcaggccaatatccttcatgaacatcagtgaaagaatcctcaacaaaatactggcaaatcgaatctagcagcacatcaaaaaccttatctaccacgatcaactaggctttatgcctggggtgcaaggttggttcaatatatgcaaatcaataaatatattcattacataaacaaaactaaagacaaaaaaatgataatctcaatagatgcagaaaaggcttttgatataattcaacatccttcatgttaaaaattctcaataaactaggtattgaaggaacatacctcaaaataatgagtcatttatgacaaactcacagccaacatcatactgaatgggcaaaaactggaagcatttcccttgaaaactgacacaagacaagtatgccctctctcaccactcctattcaacatagtcttggaagttctggccagagcaatcaggcaagagaaagaaattaagkgcatccaaataggaagagaggaagtcgaactatccctgtttgcagatgccatgattctatatctagaaaaac

SEQ ID NO: 914332 - DNA, 595 bp, Homo sapiens
acatatgcacatatatgttaattgtggcactattcacaatagcaaagacttggaaccaatccaaatgtccaacaatgatagactggattaagaaaatgtggcacatatacaccatggaatactatgcaggcataaaaaaatgatgagttcatgtcctttgtagggacatagatgaagctggaaaccatcattctcagcaaactatcgcaaggacaaaaaaccaaacaccgcatgttctcactcataggtgggaattgaacaatgagaacacatggacacaggaaggggaacatcacacaccagggcctgttgtggggttgggggagaggggagggatagcattaggagatatacctaatattaaatgacgagtcgatgggtacagcacaccaacatggcacatgtatacttttttaactaacctgcacattgtgcacatgtaccctaaaacttaaagtataataaatttwaaaaaaagttaaaagaaaaacaatatgaattcttgcaatccatgaacacaggatatctttccatttatttgtgtcctgtttactttctttaataagtgttttatagatgatgatatatgttttgt

SEQ ID NO: 914333 - DNA, 598 bp, Homo sapiens; identical to SEQ ID NO: 913337

SEQ ID NO: 914334 - DNA, 636 bp, Homo sapiens
cccaactcctggtagtgacagtatggtgcagagacatttctgtttgctatggagagggagaacacagcaattgtgagacattgaactcagtactgctctatgatagtagaaagaaatactgaaccaaattctactcatgcccacacagagagggagtatttaaaccagccttagccagaggggaatcactgaccccagtggtcagaacctgagctcccactagcctcgccaccgtcggctaaagtgctctgaggctctaaataaacttgaaagggagtctaggccacaaagactgaaactgcttggtgagtcctagtgctgaacttggcccagaggcagcagactggggaggcacatgacctactgagacaccagctatggtggctaagggagtgctgccatcaccagttccctaaccccaggctgcacagcttatggctccgaaagagaccttttctttcacttgaggagaggagagagaatagtgttgcactttgtcttatatcttggataccagtttcgctgcagcaggatagggcactagtaagagtcatgaggccccctttctgggtgggcccaagctcccagatgacatttctggacattccttgggccaraagggaacctgatgcctta

SEQ ID NO: 914335 - DNA, 589 bp, Homo sapiens
aaggactaggggctccccttcccttagttttttttctattctaggattttcttcctctgttttcatttyctgactccttaggccaatgcaagtggacttttctacttgagttctgtttgttacagactgtacagacccagaagtgcactgatatggtttggctgtgtccccacctaaatctcatcttgaattgtagcttccacaattcccacctgtcatgggagggaccaggtgggaggtaattgagtcatgtgggcgggtctttcttgtgccgttctcgtgatggtgaataagtctcacgagatctgatggttttataaaggggagtttctctgcacgattctgttattgtctcttgtctgctgccatgtaagatgcgtctttcaccttgcgccatgattgtgaggtctccccagacatgtggaaatgtgagtccattaaacctatttttctttataaattacacagtctcgggtatatttatcagtgtactaatatgtgcacttagggaaaaagctaaataaatgcgcatagcaaaaatgtagttaccttcttcgatcacatcctctctgttgtcagcttgcttttg

SEQ ID NO: 914336 - DNA, 589 bp, Homo sapiens
aaggactaggggctccccttcccttagttttttttctattctaggattttcttcctctgttttcatttcctgactccttaggccaatgcaagtggacttttctacttgagttctgtttgttacagactgtacagacccagaagtgcactgatatggtttggctgtgtccccacctaaatctcatcttgaattgtagcttccacaattcccacctgtcatgggagggaccaggtgggaggtaattgagtcatgtgggcgggtctttcttgtgccgttctcgtgatggtgaataagtctcacgagatctgatggttttataaaggggagtttctctgcacgattctgttattgtctcttgtctgctgccatgtaagatgcgtctttcaccttgcgccatgattgtgaggtctccccagacatgtggaaatgtgagtccattaaacctatttttctttataaattacacagtctcgggtatatttatcagtgtactaataygtgcacttagggaaaaagctaaataaatgcgcatagcaaaaatgtagttaccttcttcgatcacatcctctctgttgtcagcttgcttttg

SEQ ID NO: 914337 - DNA, 666 bp, Homo sapiens
aagctgatttggaatccccttgaayttctctacaaaacaaatagatcaactacgattgtaaaacaaaaatccacagagaacatctacagcaacactggatgacaaggtatctccaggaactccaaaacatcaaaatgtgtagggacaaaaaattaagagctaagaaactcacatggtattatgatatcatacaggagatgtggcgaaaaggcaatggagttttcaatagccctgaaacagaagaatcctcaaatgccaacaaattctcactgcaaagcacaccacgcatctggaaacagctcctaaaagtggaagggcacatagcatctaatttataggtaaggtaagtgcaaggggaccataataagttgtataggctagagtggtttgtaccccgtgaacaaaatgaagctcacttctagtacaaagcaccacactaaagagaaactactaaaagtagaatccagattgagcaggacaaggacaatcagggtatagcaaagaggagatccagaaaaagtgatgaaggggacgcgggaaacagatcccagcagatatgaggatatatccttctgagaaaacaacagaaaatgaagcttcgagccaagaagctaatagaaaagatattttggcccacctttctttcttaaaagtagtgaaaaacta

SEQ ID NO: 914338 - DNA, 563 bp, Homo sapiens
gccctctgcctttttgcatgaggtggctcccctctgccagtgaaggcaaagggccagtgtgacagccttttgtatccacactcatggctcctgaackcttgtccagtgtccaggaaaaatgaggttgcataaatgaattgaaggatggtaaaagcaggggattttattgccagtgaaagtggctctcagcaggaaggggagctgaaaaggggatggggcaggtaggtaatcttcccctaaagtctggccatctatggccaggttcctctccaaagttatgctatcaagctgtccctctgaagtcaagctgcttctctccaaaattcagctgtagaccctgaagtccagctgcttcttctctctgctggctgagtctgagctctttataggtgcaagatggggtggagtgggccatggatggtttagaaaaagacaacatttgaggggaaaacagggatagaagttctcacattggcccactggctgcaggattttctgcttgagggtggagtttgttgggaacctgcccttttctgcctagaatttctctgccccctgtcact

SEQ ID NO: 914339 - DNA, 600 bp, Homo sapiens
caattacttttgcaccaatctaataacttagggaggaacttagtttatagtttagctttgaaacaaagacaataacagtcctttccctaaacaaacatccttcgtacaagtgcactagactgcctaaagtcacaagattagaagtcatggtaattttagtaaataattcaagatgtagctattttcattaaaccaatatcgatgtcttatttattagacaagcaaagatcattctgtttttggccgggtttacagttgacccctatgccaaattttgacaccttatagtatttgtcagggataaatataaaattgcttaatcaataaatgcaaacaaaaatgtatgctggcaattcttaagacatttataatattactttagcaataattttaaagctagctcatttattaaagattttacttaagtcatgtaaactcgaaaaagcatttgactagtctttccttttttctgataaagtatttgatttaagtgcttttagttttctttaagttaattaattagggctcttttatatattttcagtagtgaaacattgtgtacacaacacataaatacataracatattaggcatactgtt

SEQ ID NO: 914340 - DNA, 611 bp, Homo sapiens
taaagtactcattctccaataaacactgcatttcagcagcactgtagactcctgcttgcctagggagtgagtgactggcaatcaaactaaggtcagctacatggcaatgaagaacgtttccattagcccaggtagacattttgataaatccatttaatcacgctactggaaagcaacagattataaacaatgacatctcctgtctgcttttaattatgtggattacctattttatgacagtgattacactttgttaactaacctacaaaataatgttctacatgactagatacagaaccatacctataactatttaacttaatttcatctgaggttcacatcaacattattataaacacatggaccataagtttgtagtttgtaattttgtaactgtgtgcaaattccacttcccattaacatacggtctaaacatagaaaataaagagcaatccaagaactctttaaattcttaacccaaaacmaactattaacagaccatccaatacaactacacaagatttaactttttcagttcagtgatttctacttcagtgaagccaaatttaattttatttttgctactatctacctaaaaatcaagacatttg

SEQ ID NO: 914341 - DNA, 641 bp, Homo sapiens
actgtgcttattctgccactttaatgggcagtcctaattgactacaaagaaatctgtaaaaacaaatatcgtgattaggacctattgatttatgcaggtggctttattttaatcaattatccactagttacggagttatttgatgtgtgtttttatcttgtacatatgtttcctgagttgtctcaggccccatagcttcagtaaaactaagataaatagctgagcataaattctcaagtctgttcattgctccacggtatctatctttttactattatgtttgtttaaaggcaggttagaaatgcttacctgtcccagaggaagagtaatgtgcttggtgtttaaaatacccagctggttgggattgagagcgactcatgatattctttgcaggacttcctaattaaaggaaggcggaagcaactttgtcccagaataatgaaaatcaaatggatgccatcccgtttacaccctggaataacacaaggaagggccgacttacaatgtccagaatgaccttgaggggccaccttaccctaatattgggctctccctgctatgtcataaacctaaatttttatgaaatgaaaatgcttccagaatgtggtgtccagctctatrcaaaatgaaatctaggcatt

SEQ ID NO: 914342 - DNA, 626 bp, Homo sapiens
attataaccttagcttttactaatgcttaayacagaaaatgacaaataatgttatagaaattgtccaatctattatttaactggacacaaaattccctttcaagctttggctagcagtggtaaccagggctgaatttatagagattccagtatacaagtaaaaagggtatatgtacataatagctagaaagacaaagagttcatcttatttgttcagtcacttaacttcaatgtttgtggctaaatcagataaatagacaaccagaatattgttcaggtttgcaggaaaaagcaacaatgaaatcaatactctactggggcaaaattactcttatttagtcctgtaatttcatctcttccaactgggccacaaatcatccaacacaagaattcaaaaggatgagacaaaccaatgattctccagaattaccaaaaccacagttcttatgtggtaaatatcacctccacataaaaaaagtttgttaatcattaaagaggaagcctatcttttatgtgggtgtggaaattctagggaagaccagcaagccattttgtaagtgtctgactattcaaggttaccctgccttgaagtgataaatcccgcatggcaggaggggagaagattt

SEQ ID NO: 914343 - DNA, 561 bp, Homo sapiens
aaaacaagttcttagagacatacaaagagacttagactcctacacaataatagtgggaggctttaacaccccactgtgaatattagrcatgtcattgagacaaaacattaacaaggatattcaggacttgaactcagctctggatgaagtgaacccaatagacatctacagaactctccaccccaaaacaacatactatacattcttctcactgccacacggcacttactctaaaatggctcacacaattagaagtaaaacagtcctcagaaaatccaaaagaaatgaaattataacagtctttcagaccagggtacaatcaaattaaaactcaagattaagaaactcattcaaaaccacacaactacatggaaattgaacaacctgctcctgagtgactcctgggtaaataatgaaattaaggtagaaatcaagaagttctttgaaagcaatgagaacaaagagacaatgtaccagaatctctgggatgcagctaaaatagtgttaagaggaaaatttatacactaaatgcccacatcaaaaatctagaaagacttcaaa

SEQ ID NO: 914344 - DNA, 603 bp, Homo sapiens; identical to SEQ ID NO: 913433

SEQ ID NO: 914345 - DNA, 641 bp, Homo sapiens; identical to SEQ ID NO: 913434

SEQ ID NO: 914346 - DNA, 686 bp, Homo sapiens
tcccagctgtccattgttgccatctttatgtccctgagtacccagcgtttagctctcgcctatgagtgaaaacatgcagtatttsgttttctgttcctgtgttaatttgcttaggatagtggccgccggctgaatccgtgttgcctcaaaggacatgattttttttttgttttttggtggctctgtaatattgtatggtatatatgtgccacattttcgttttccaatctacctcggggtgaccgttttaaaggttgcctacctcacttctataaatcaatcttttttcaatgaacaccaaagtggaaaaaaattaggaaaatagggatttttttcaaataagaaatctaaatgtctgctgaatatataaaaaatgtacaactctctagtaaccaaaggagtgtcatttaaaatagtaattaggtaacaatcttcatctgacaaattttttaatgccagacgttgagaatatataaaaactagcaaacttgaacaaagctggtaggagtgtaatttagtatctatgttgtggtttaatttggcagtatgtcttaatacccttaaaagcccaggtgtccttaaaaatctatatattaaatccatattaaaaattcattgttcccaaatttcacattgaatcacttatcctaaggaaaattataacataataaaaatatttatgtaaa

SEQ ID NO: 914347 - DNA, 597 bp, Homo sapiens
atgaaaaaccctcctgtataaaggtaaattccattaacgccagtggctgtgcatatgtgagggcgggatgggtgcctcttcatgtcattttyacattttctggcactgcaatttttctccttttaaagcattcttcttaaagacctatgtgagcgttgaaaaactagacaggaagcttggggaatatgaatacgtgtaaataacaagtcagacttttttaaggatgtcacttattctaaagtgtgtaagaattacttcaaagccattagtgtctagaattctctaaaggtagagacacgtcttaaaaacacactttttcaatcagactttaatagtgttaaaggcaaatcttttttcaatgagaaagaaacaaaaaatattgcttttgacctgacaaaccacaacattcgcctgtaagcttttcataaggatctcagacacaacgtcttcaggtgttcagccataaagagttactctgattagaaatgtaaaggaaaaaaaaaattattgctgaattgaggttctatatttgagggtaagtcaaaccttgaacagcatttattgtttggatttcgattattacagattttgacctgt

SEQ ID NO: 914348 - DNA, 501 bp, Homo sapiens
ttttcctatgttagggctttcctcagcatccccacaaaggaaaacacacacacacacacacacacacacagaaacataaatggaggaaaaatctattatttgtgtgacattatagataaattattttcctgccacctgaggaaaacgaaactcctttggagagaaacagattaattgtattagacagtatacattttaatatatttcttgagataagatcaacacataaaattcacctatttaatatgtacatgtcaatagcttttagaacattcacagagttgtgtagccaccatgaaagtctaagtttagaacattttcagcaccttcaaaagatatcttatattcatcagtgacttctactccccagycataggcaaccactaatcaactttgtctctataaattttcctattatagatatttcatattaatgtagtctgttgtgtaactgacttctttcacttagcgtggggtttgcaaggttcatgcattctgtaa

SEQ ID NO: 914349 - DNA, 642 bp, Homo sapiens
tttattgcacctcaggtcctgccagctcccctttcccaggtttctaaattgccgaacactcaaactccttttgtacttccttctatgggacttaaacttatattgtcagatcttacaargccaaatggtgtcatgaataaagtggctatgggtggcaaggatggaggtcatgcatgggctcagccaaatgtacttctacttaccaaggtggacctggttacagcaaccactgaatatatacaaactgttagcaatagaggccaacactcagctccaatgtggtaccattccctggggtgatcagctagctacctggtggcaggagattgagttatggtatagggacatgtgtttgggtgccaagttgacaaggggtggacttaattgtatgtgtcaactctactgggttaagagatgcctgggtagctagtaaacattatttctggatgtgtctgtgagggtgtttccagaagacattaggatttgaattagtagattgagcaatgaagatttgccctgagtaaagaaaacttgaggacatcatcccatcctttgaggaccctgatagagcaaagaggggaaggaagagcaaatcctgtatttctcttcttgaactgggacatctgtcttctcatgccctca

SEQ ID NO: 914350 - DNA, 601 bp, Homo sapiens
tgttgagttgtaggtagtttgccttctgttagtgagttgtaggagttctttatatattctgtgtatagacccttaaaagacatgtgatttgcaaatattttctctcattctgtgggtcgtctttctttctcatagatagtatgctttgatgcacaaaaattttcaattttaatcaaatccaatttatcttttatttttgtattgttacctgtgcctttggtgtcatattgaagaatccagtgtcaaatcaaaggtcacgaagattttcccctatgttttcttctaagagttttacagttttggttctcaaatttagagtctttgatctgttttgagttaatttttgtagataatatagagtaagggttcaacttcattatttttcacatggctatccagttttctcaacacaacgttgaagagaaagagttctgttttttggatttggttttgttttattttgttttttgagagagggtctcgctctgtcacccaggctggagtgcagtggcrcaatctcggttcactgcaacctccacctcctgggttcaagtgactctcctgcctccatgtcatcaatgttgtacttttgatcatttta

SEQ ID NO: 914351 - DNA, 670 bp, Homo sapiens
ccatcactgccttggggccacagtctctgagtgacaggacactttttctgtctgtcttcttctcctctgctcagtcccaagggaatctcctctattcatccccaggaatgaagaaatgaaagggttcattgattttcatcacatcatcctcaagagctgcccaagcccaagagagtggactccagaaatgtcctcagggtcatttaagattctaattccagaatatgacctgggagctccctactactatttcagttcttctctgctttttaggggatgtctgtttggcaatcatttttcattgttttcaatggcagtactcaggaatctgagttatagatcccagtaacttagccatcattattggaaacattctttcctgttgatcttccctactgactgatatcacactttaattctgagagtgactaccttaatataacttttattgatatgtaataggtgtacatagttttgggggtgcagatgataattagttcatgcatattatttgtaaaaatcaaatcagtgcaattgggatatctrtcaccttaaatagttgtcttttcttcatgcttgaaacattctcattcttctcttctggctattttgaggcatgcaatagattattgtaaacggtagtcaccctactgatctatcaaacactagg

SEQ ID NO: 914352 - DNA, 571 bp, Homo sapiens
gacaggaatccaggaaagggccctgtcttagtctgctcgggctgccataacaaaatttcacaggctgagtggcttaaaccacagacatttattttgacatttctggaggctgggaagtccaggatcaaagtgctgacctggtagattcattctgaggcctctcctcttggcttgtaggcagcggccttcttgctgtgtgctcctgtgacctcttctttgggcattcaaagaaagagggagggggagagagacagagagctccctggtgtctcttcttttaagggcactaatcctattgcatcagggccccattctcatgacctcagctaatccttatcacctctcaaaagtcccttctccaaataccatcacattagggattagggcttcagtagaagacttttggggcaaaacaaacattcagtccatattaggtccctcaaaagagcctgcagtccaaaagaaaataaagggaaagattcctatggcatgccttgccaaagtgagcatgctctgggmgtcaggaatgctccggcatttaggagcgagcaggggagagccagcagccgca

SEQ ID NO: 914353 - DNA, 604 bp, Homo sapiens
tgcataaaatttgcattagaaaactgagaacactaatgaggaaatgaaacagccattaatcatcattgcgtgactgcagaaggrttaagtgggtttctatagattttgcttcacttattaatgacatggttttacaggtataaaagatatgtatacacagatccaaaattggggcgtaggctgtggcaatttatttccccttggatttaaagtaactatctctgaatttttctcaataactatataagtacaaaagataaaatcttgttttaactatctatgtataaactttcctaagagctccagatcagggttactactcaaatatatgtagaattgggttttattaaaaacttactaggataatagtatctcagtatatatagtctttagagtccaaaggatagactgaaatctcagcatcttgattcattaagtatgagactgtagatgaactaattaagctctctgaccattagtctcatctctaaagtgatattaaaatgccctttacaaagtgagactggaagcatgaaatgagaatacacagataaagcacctagcattgcacctgacaaacggtgaaagcttgaaaattcaaatt

SEQ ID NO: 914354 - DNA, 663 bp, Homo sapiens
tgtgtgaagcaagtcttgttaataccatttttccaatagcatgtgttcactttgtatctctgtgtcacatgttggtaattctcacaatatctcaaacattttcattattttattatatgttatggtgatctgtgatcagtgatctttgacattactattgtaattatttcggggtgccaccaaccacgcccatataaaatggcaaattgaatccattaatgtacatgttctgactgttccactgactggggcattccactgtctctctccctcttcttgggcctccctatgatttcctgcgacagaacaatattgaagttaggccaattaataccctacaatggcctctaagtgttcaagtaaaagagtcacatgtctctaactgtagatcaatggatagaaataattaagcttagtgaggaaggcatgtcgaaagccaagacaggtcaaaagctaggcctcttatgccaaggagtcagccaagatgtgaatgcaaaggaaaagttcatgacggcaattaaaagtaccactccagtgaacacatgaatgataagaaagcaaaacagccttattactgatacgaaraaagtttggtctggatagaatatcaaaccagccataacattcccttgaaccaaagcctaatccagagcaaggccctaa

SEQ ID NO: 914355 - DNA, 527 bp, Homo sapiens
atcctgagatcaaccctccaccccttcaggtaatgatcctcctgctcttagtcatttatatcctttggttcatagatattttgagtcaagtgccttctaaccgctgagctacataatatcccttggtttttaaagataatacaaagtggattttagcaacaatcttgagtcatcacagaagctaatgaatttggggattccatgaagccatccaagcacataaagcccatttcctgggtccctttcccttagctcaaggccacaaaaatcagaacatgaattccagcccatatttgcattatgtctaaataattatgaattataaatgaagctaaaaatagctaaatatgttctattcttctacttcaataactataccgccataataacccacaaggtcaaagtcgagtgtagaattctctgagttcttggtgctctgcacgggaatgtgttagtaaagggagagctgaycctcagccccaggctatttttttttctttcatcatagctagccctgtccttacttg

SEQ ID NO: 914356 - DNA, 584 bp, Homo sapiens
aaactagacagaagaattctcagaaacttcattgtgatgtgtgcattcaactcacagagttgaacctctcttttcatagagcagtaatggaacactcttgtagaatctgcaagtggacctttggagcgctttgaggcctgtggtgaaaaagaaaatatgttcatataatactacacagaatcattctcagaaacttctttgagatgtttgctttcaactcacagagtagaacattccttttcatagagcagttttgaaacactctttttgtagaatttgcaagtggatatttggaacgctttgaggccttctttggaaatctgatatcttcacaaaaactggacagaagcattctcagaaaattctttgcgatatgtgaactcaacttacagagttgaaccgttcttttgatagaggagcttagaaacactctttttatggaatatgcaagtggacatttggagcgctttgaggcccatggagaaaaasgaaatatcttcacataaaaactacaaagaagcattctcagaaacttctttgagatgtttgctttccactcacagagttgaacattccttttcata

SEQ ID NO: 914357 - DNA, 584 bp, Homo sapiens
aaactagacagaagaattctcagaaacttcattgtgatgtgtgcattcaactcacagagttgaacctctcttttcatagagcagtaatggaacactcttgtagaatctgcaagtggacctttggagcgctttgaggcctgtggtgaaaaagaaaatatgttcatataatactacacagaatcattctcagaaacttctttgagatgtttgctttcaactcacagagtagaacattccttttcatagagcagttttgaaacactctttttgtagaatttgcaagtggatatttggaacgctttgaggccttctttggaaatctgatatcttcacaaaaactggacagaagcattctcagaaaattctttgcgatatgtgaactcaacttacagagttgaaccgttcttttgatagaggagcttagaaacactctttttatggaatatgcaagtggacatttggagcgctttgaggcccatggagaaaaaggaaatatcttcacataaaaactacaaagaagcattctyagaaacttctttgagatgtttgctttccactcacagagttgaacattccttttcata

SEQ ID NO: 914358 - DNA, 598 bp, Homo sapiens
agactgaattttcaaatggtcctgctgagtttgtcattttagttcacaatctgaaagatatgagaggacaggttttaatcctacttcaactgctcatttcactcaggttcctaatttcarctgatggctaactcattttcaatcctctgtacccatattcttcctcctgtgctgccatttcaagagctatcattttaataaatgcattgtcatcctcctatgttacacttaactcctcaatttctcatttactgtatcccatgttcagtggaagaattatcataaaactaataatgcttaactttcagggcccctcacacccaagggtcactttcaaaacatttagcagagccttaacaatgattttgtgagatttggaaaaataaagtattttgaaattcttttttttaaaaaagagtaccaagaaatctactgagtttcagatcttcatatacatggtatgcttctgccccaaatgcaggcttttaatatgtccatgcattaactgacactgggtaggatacttaatttatgacctagtgaaattgagaacttagaaatcttcaatttccaaaagaatgaatcaacatcacaagat

SEQ ID NO: 914359 - DNA, 598 bp, Homo sapiens
agactgaattttcaaatggtcctgctgagtttgtcattttagttcacaatctgaaagatatgagaggacaggttttaatcctacttcaactgctcatttcactcaggttcctaatttcagctgatggctaactcattttcaatcctctgtacccatattcttcctcctgtgctgccatttcaagagctatcattttaataaatgcattgtcatcctcctatgttacacttaactcctcaatttctcatttactgtatcccatgttcagtggaagaattatcataaaactaataatgcttaactttcagggcccctcacacccaagggtcactttcaaaacatttagcagagccttaacaatgattttgtgagatttggaaaaataaagtattttgaaattcttttttttaaaaaagagtaccaagaaatctactgagtttcagatcttcatatacatggtatgcttctgccccaaatgcaggcttttaatatgtccatgcattaactgacactgggtaggatayttaatttatgacctagtgaaattgagaacttagaaatcttcaatttccaaaagaatgaatcaacatcacaagat

SEQ ID NO: 914360 - DNA, 614 bp, Homo sapiens
ggctgatctgagtctctagagatctccagatgtccccttcccactcccatctcctggaagtatcctctccttatgagactcctgtagttaccatcttcatctcctctgaagccctggaaccttttctgacacccaactctcaaaccccatgtcataggtgggagggaggtaggaatcgtctgcagcagctgttcttttttctatggtaggagattttttaattcccttttaaaaaattcaaaaggaatagcctttgcttatttctttatttgtttacaaactattggtattacctattttatttatttctattttcttttcattaagatcttaggccagattctctaggactaactcaagggaaaattagacagatgctcacatcgtcacatcctgtcagtgtatcctaaacctggctgcacagcaaaatcatttgggaaagttttttctttaattatatcttctggaaatgaaacttaagttcttagaagttactgaatgagatgtctgagatggggcctaagaakcctcaccaagaatatcaccccttagttacaatcagtaagtgtttctcaattgtatccaagaactatttttatctcctacttgagagc

SEQ ID NO: 914361 - DNA, 626 bp, Homo sapiens; identical to SEQ ID NO: 911396

SEQ ID NO: 914362 - DNA, 653 bp, Homo sapiens
tgcttaaaacagtgcccaaccctagggctgragtgctgtctagtgtttctaagcacaagaaggccatgttgtaccttagggagaaaatgcatgtgttaggtaagctttgttcaggcatgagttataagcaccaatgtgagctcaatgtcagtgaatcaccagtacatattaaataaggtggtaacaagcagagcaagtgtagatgttgtccagaaacacatacaaaacaaggttatatattgatcaattctcaaaaatgtgaccagaggctcccaggaaactaactctgtatttctcctaggaacaattattcagtattcactaactcagtgttggtggcaacttcatagaccataactaccatggataatgagaactgactatacatataaaattacaattaaggtaagtgcttttcagaataagcggttggtattaggtaagtgtatgtttttgtttatggagaaggcagatatagcattgagttaggttgtccgggaacatattcctgaggatatggtgtggtgttagagtataaaagtagaatagggtttaataagattaaaacagagtggatgtgtcatcccagacctatggaacagactccttggtgagaaagcatggtttttatcaaggacctgaaagaagccagt

SEQ ID NO: 914363 - DNA, 679 bp, Homo sapiens
tatgtgctcaggtacaggtagaagatcctttctccaaggagtgctccccttctaccaggtcagctcctcagccatcacctggacagctgctgaatgtcacctagagtttattccttcctttcagagtgtaacagccttagtatactccagggtgacttgggtgtaaaagaatgcaaagtgaataatgttattatcagtaggtgtcatgtaaacctagtggtttttctagctgatttttaagcatgtctggaatttttcatgactttatttatttatttattattttaatttttgtagaaatggggtcttgcttcattgccctggttggtctcaaactcctggcctcaagtgatcctcccgccttggcctcccagactgctgggattataggcataagccaccacacctggcctcatgaatttttttttttttgagacagggtgttactctgtcacccagactggagtgcagtggcatagtcatagctcactgcagtcttgaacttgggctcaagcaaatctcctacctcagcctctgagtagctgggactacgggtgcatgccaccamgcctgggggatttttttttttatttttaatagagatgaggttcctccatgttgcccacgatggtctcaaactcctgagctcaagcgatccacctgcctcggcctcccacag

SEQ ID NO: 914364 - DNA, 628 bp, Homo sapiens
gcatccagttatcatggctttaatcttaatgccttccctgcactgttttgggaatatcttaatactgctatttttgaagagtccagctcagttattctgcagaatgtctgttgatttggctttgctgtttcctcataagtagatccagattatacgtttttgttgatgttgggttcttctcagtgaatcacatccgatgatgtcagcacgaggcctgatcatttggtttaggtagctttcactagactttttcattgtaaaggtacctatcccttttctaattaataagtaatatgttgggtgatagtttgtgtgtgaatatccttttctccagtgacctttcatccaatggtttcagcattttaaatgatcctgggctgagtcagttttcagtggtggctgcagacttgtggttttccaattctttcatcacttttacatttattaattggcagtctatgacttcttatagccacataaagataattcaggaattatctgaacctatgaatgttaccttatttggaaaaagagtctttgcagatacaattcaattaagaatcttgagatgaggagattatcctggattatccaatgggccctaawtccaatgacaaatgtccttggc

SEQ ID NO: 914365 - DNA, 623 bp, Homo sapiens
aaacattttgtggttctacacacagttccccagcagaacttgctgagaaatcttttctttaaatacttcttacaggaaacatgaactatttacctttcaaaaaaaagtcataaccctctcctttcttcctcatgaataaaatgactggcaccacgttttgtaaaacatgccagattttgtttaaataattaatattggcagtcttcagatgagtggttctatggtagcatagaaagaggcctaaactagaaatcaggaaacatgggtttgaaactcagtttggccactattgggctgcgtgatccaatagtttgggtaggtcacaaaactacctaatagtttgggtaggtcacaaaatatcactggacctcagcttttattgcataaaatattagaggtagattaaactgtggttctgaaactcaaatgctagtggggtttggggcggtaagaccaatgaaggaagcagttgagtataagacaataaggagtagtggtgactgaggtaaaccagagaagacatgtcttacctaaaaatcctctgctccaactgactattgctgatgggawtgtggtacatgcacatggagccctatcttcctcatttttaggggaaggtggaa

SEQ ID NO: 914366 - DNA, 676 bp, Homo sapiens
ggcgagcgcacccctgtttcttctcacccccaccccgcgggcatttcgaagtcacgcgtgctgctgtggcctcattcattcaacacgcttctcagcgcgtcagctcagagaagccagggacttctaagtgtgcggagcagtccggcaagaattggaaggcactagcattgccaagggtggctctaaaggccacccctaactgcactcaactccctccaactcccaccccgcacgaaaacaacagaagtaaaagcaggcagcttattagagatgcgccttcaaaatacccttcgagttaatctcagcccccctccccggattgctgtctctaaaccgctcttaccaaaaaataaaacacataaaaataaaataaaattggaaccgacacgaatttcagactgtagaagacagagaaaacttctaatttttttaagtaaacatgttttttaaagaaaggagcaagttttttctctctcccactcgacctttaagatagtgcatgttccaaggtcctgagtagataattatatcaaaagcagaaagggatggacaccggtagctacgcgaggttctggaatgggactcagtcattgattcctgtatgtccgccactggcatgttatrtaaaagctggacctggccttgaaggtaaatcgtcacaagccccgagcaagaa

SEQ ID NO: 914367 - DNA, 653 bp, Homo sapiens
atcattcttaaaatacatattttaygtatttataattctctataatacagtctaatcttatctgtaaaatatatttataattctgcaaagcactttctatgtcaaatcattccctgggttataaattctgtgatacttgaatctattaaattcctaaactatggtaagccctaaattggagataattcagcctgattctcagccctgaagatagaaataatgtcataaactcttgagaagtccttagcagatttgcagcaggcattggtggtatgccaatgaaagcagaatgaacctacaccagtgattcaaacctgctgaggcttaagggcagaggggagcaaaggatagtctccctaaaactctttttcctgtgtagccagtgttttgttgcttactgtaaatcagtgcttttacagacagcataatggctgaaggaggccaatacttctggcttggttgggactaagacaggccacttcagagaatttaggaaaaaagcaaagaggtgtttcagtagccacccaactcacaaccctcttctcattctctctcccccctctatctcctccagtctccccataaaatacattatacgttacagcatatggaagaaaaaaatgcacacaatgatggcttttcttgttaacttt

SEQ ID NO: 914368 - DNA, 427 bp, Homo sapiens
actatcaacagtaagagacatctgatctatggcatcccraacaatcacctgacctttacttaaataaagcccataaaagatatactgacagcctcccaaaacggccaggtctgtggctggccacatcttgtaattagtgaatgcttgctgctgcagagctgaggtttgctctacccaggtttggtctctgctttctgaaatggctcagaacaaggctgccctgtcctgggccagaacagtgccaactgagccaatgaacagccaccaagaaaaagaaccgtcctgatttatctttgaagccccagcatttgctaagacagggcttggaacacaggaggtgttaataaatgtcgcaagaagagggaaaaaagtgtgtgtgtctgtgcagaaaatggtcatcattaccactgtgctctaatcattcatc

SEQ ID NO: 914369 - DNA, 647 bp, Homo sapiens
tcacactgcccagagcagttccctgtcatcatttgagatgtctcatgatgataatttccttctctgctatcatgtatgctgatgggctgatgctgatgagcttctgtctcctccctcagtctccactaagtctcccagtaaaaggctggtgacctctttcccccagtttgttttcactaaacttggattcagaagacctgagtttcagtcctagttctgtcctttgctaactctgttctctgacaagccactgacctctgaggtccagccttctcatctctaaaaggggacgctattgatgtccctgataaggacataaatgaatagcagctgtggagcacttgtaaactctgaaaccctttacaaagctcaaggatgttgattacgcttgctgccatcccagacctcgcactgttctttaataccaacaattcaaactttacagcaattttcacctcatttcgcaagctttgagtggggatttaatgttttagatttgggtaggaatctaattctcaggacaaaattcttttttagaatttaggttctggaagagtttcttatctaggcactattttatgaggcctagcttgaggcgatacattgtaattactctktgcttcagtttccccatccagagaatgacc

SEQ ID NO: 914370 - DNA, 649 bp, Homo sapiens
aaggaaaggattctctcctagagcctctggagggagtgtggccctggaaacaccttgattttggacttctggccaggagaactgtgagagaatccatttctattgttttaaaccattcagattgtggtcattcattatggaaaatacaggaaatgaatacactgatgcttgaagattgcactaactacttcttaaaagtctccttaacgaagcttttttgagactgatttggttcacctctgctgtataaacatgggtgggaaagggtaggaaaaatggctcgccacagacatcttgaaatttctttttatcttttagttattctcactgaactgtgcatgcctatacaggcaggtaaactcagcagttgtatggtgcttactagtagatgttaaatattactcttcatttaaaaaagtcgtaaagtttttaaaatatccctcaaaaccttaggagactgaattcataagaaagataaacagcgaattcttgttaagtggctggtaaaaaaacaagcataatatggttcactcccaccaatggatgccttacagatggacgacatgagtcatgccgctggccttgactcccttctcaccagcaaagaccttacarcaatctgactgcctgtttagaatctgggactgct

SEQ ID NO: 914371 - DNA, 542 bp, Homo sapiens
ctaacgtgtataattggcagcctataaagggaggagagagggaatgaggaagaagcaacatttgaagaaataatgactgaaaatacactaaamttgacaaaacatctcaacccacacattgcagaagatcagtgaagccaaaacaggagaaatacaaagaaaaatcccacttagacgcatcatagccaaattgctaaacatcaaagttaaagaaaaccttaaaggagctagagaaaatagatacattatcttcagagaagcaatcgtaaaactggtgtctggcttttcaacagaaactatggaatctgaaaacaataaaatgacattttttaaagcattgaacaaaaaaagaactctaatcttaaactccatacctagtgaaaatattcttcaacagtgaagtcaaaatgaagactttttcagacaaaacctgagaaaattgatcatcagaagacccatgctgcataaaataagtgaaatcctaaagaaagtttttcaggctgaaagaaaataatttcagataaaggctttgaactacatga

SEQ ID NO: 914372 - DNA, 630 bp, Homo sapiens
caggaagcttccaattatggcagaaggccagcagggagcagctggctcacatggtgggagcaggagccggagaragtgagggggaaggtgccacacacttttaaactaccagatctccaaagaactcactcactatcacagagatagtaccaaggggcatggggctaaactatatatgagaaattcacttgccattatccagtcaccttctaccaggttctacctccaacattgaggattgcatttcaatatgagatttgggtggggacacacatccaaattactagttactattatcagtgatctctatactgagggtaaagagggaaaataaaatagggaataatctctttatgtatttttccccttgccacccaagtcaccatacaggccccacagccctgggttgtactgtcattctatcatgagatggagtggatagggaggttcaaggggacagggtgaggagtggagaagatcttacctaagggtagtgtgttagtggaaacaaaatgcagaagaaaacatccagaggagttatgagacatgaaaagagaatttttatagtcatggagccgctgagaaatattgtggctatcttaggggaggagggcattcttttgtagagaa

SEQ ID NO: 914373 - DNA, 651 bp, Homo sapiens
accctagagcattgtttgctgacccctgacagaaagaaaactactgtacctcctcacataaaatggaggtgagagagttcatttcataggtttgaagtaactcagactaaccaaggtaatgtaacatacttatgagagtatgtagcctgctcgagacattacatgcagctatcattatgatggaggcaagtgaattaatgtttaaactcattcacacaatattctctatggagcaaaatgcaatgttaggcaagagcatgaaagagagctaattatttaactaacaaaagactgagattatgaaggagctctagccttaatgatattcatgtcgaaagttttctattctaagctctatttctcgaagatttagtagtagtattttttctataagcgcagaaaatttgaaatgattctttcaagaaaatacaacaaacagccattggattctctaaatctaggtaagcttcatcactacaaaacagaaaagaagtctaagtttatattataaattgttctcactgctagtaattactgamtgcttctttaatggctcataatgaattccatgcatttttctaagaattattttgttcccagagttatgtggattaatttatgtatatttaatttaaaaattagcatcacttt

SEQ ID NO: 914374 - DNA, 583 bp, Homo sapiens
aacatgcggtgcttgtttaaaaaaaacaaatcttaacaaacttgaaatagaagggaacttttctaactaataaaaataattaaagataaacctatagcaaacaacatgtcccaaacacatatggatgtttgatgtctggcatagttagttaaccctgtaaatcagttaagaaaaaaaaagctgacttttcagtaaatagtgctggggcaattatccatagggaaaaatataaaactggactcctaccacaaacaaatatcaactccaggattaaagttccaaaagcaaatggcaaaacataaaactttcagaagaaaatatacacaaatagcttaattacccatggataggaaagcagattataaataagatgaaaagtataaaccacaaagtaaaatatcaacagatttgagtgaattaaaattaagaaaatctgtttataaaagatcacatcaaggagaaaagtcacaaaattggaaaaattatcagcaactcatatacaggatgaaaatcaaaaccacaatatatcaataacttgtataattcaatttttwaaaaaagtaaacaactcagaaaacagcct

SEQ ID NO: 914375 - DNA, 547 bp, Homo sapiens
ctacagggataataaatggcagagcctggccttgaacctagatcttcagatttacttgtaaggaggagggttctgttcactggaaggagcaagaatgtttctttcagggtctgaatgaaatatcagctaagacaattcaattttctttgctctcattctgggcttgtcaagtaggctgctgatgactgatctatctgacttcctttgagttttaattttgagatggaatgccctggaacaaagagaaatgacaatgaaaaagacaaaattttacaaattaataaactgacatttttgttcatagttttttttttccctgagttggcagatggacagatttttccaagctgagttcctgaattgtcaaaactcagagtctgccataactcatgcgggcttcacagtgagccacgatactgtgaagggttgggaatcacaatgtmtaaagaagttgggtctgatttgggccaacagtattacccaagagacttaatctggcaggtaaggtgtgacagcagatgcttctgggttgatacaatcatttctt

SEQ ID NO: 914376 - DNA, 653 bp, Homo sapiens
aaaaaaaaaatgacagccaaggattttataacctgctaaattaagctatataaacaaaggagaaataaagtcttacccaggcaagcaaaccctgggggaatttgtcaccacttgtttcctacaagaaatgctcaagggagttctaaacatggaaataaaaggataataatcatcatcataaaaacacatgtaactacaaagctacagaggacataaagcaattacacaattgagactactgactagttaacaatagttaacaacactataacaggaacaacactttacatatcaatattaaccttgaacattaatggcccacatgctccacttaaaagatatagactggcagattggatacaaaaaaaaaaaataaataaaacaagccccaactatctgctgcctacaagagacccacctaaggggtaaagacatctacacactcaaatataagggtcgcaaaaagatatatcatgaaaatagaaaacgaaaccagcaggagtagctattcttatatcagataaaacagattttaaatcaacaacagtaaaaaaaagacaaggtcattatacaatgawaaagcgttcaattcaacaagaagatttatcctaaagtagacctattgttcacccaagcaatcctactacttggta

SEQ ID NO: 914377 - DNA, 478 bp, Homo sapiens
aattccacgaatcctgaattttaaattgattcctcaggggtatattgaagggttcyctattagtcagcctgcttttttaacagtcatttttaaggttttcattttcttttaaaaactctatttcatataagccatatttatattaacatttgaataaatgttggtgtacaagaacagagttttcatataccttgtgaaataaaatgttcatacaattatataatcttctgttcatcatgtgaatagggtaaagaatgtaggtataaattccaattctacaactttctaatgaaataacatgggcaggtcctttctataagatttgtttttttatctgtaaacaagagaatgcttctactaagaagaaaaaaagaataaaagattgaacatgcagagaatatatgcacttgggcaagttacgagcctcgttgtgatttggctttctgacctgtgaaacatgggtagtagtatctacttt

SEQ ID NO: 914378 - DNA, 677 bp, Homo sapiens
catacatgtgcatttgtctttatagtagratgatttataatcctttgggcatatacccagtaatgggattgctgggtcaaacggtatttctggttctagatccttgaggaatcaccacaatgtgttccacaacggttgaaataatttacactcccaccaacagtataaagtgttcctatttctccacatcctctccagcatctgttgtttcctgactttttaatgaccacctttctaactggtgagagatagtatctcactatggttttgatttgcatttctctaatgaccagtgatgatgagcttttattttcatatgtttgttgtctgtataaatgtcttcttttgagaagtgtctgttcatatcctttgctcactttttgatggggttgtttttttcttgtaaattcatttaagttccttgtagattctggatgttagacctttgtcagatggatagatggtgaaaattttctcccattctgtaggttgcctgttccctctgatgatagtttcctttgctttgcagaagctctttagtttaattaaactaaaaatgacccatttatcaattttggcttttgttgctattgcttttggtgttttagtcatgaagtttttccccatgcctatgtccactttctgtacgtatccaaaattagttatgttagtataat

SEQ ID NO: 914379 - DNA, 640 bp, Homo sapiens
accagctgcaagaataaaagggaattttatccataaaatayggaaagttagactgtaacactgattactgacaatttaataaggattttttcctcatgcatctgatgtatgactccggaaggaatgggttacactgttgaagaaaacacactggacaaattacaggagtctctttattcttcatttcctaatcatggattcatctgtgatatgttgaaagcagagactggccttttagttctgaaactttacttttttgtgctttgtgatataggtgttacagagatgattttgacattgttgccattcaatgtgacattttaagacctaggagataacaaaaactaagaggttgattacagcaaaatgccagacactgaaatatctgactgatttacacatagccacatacttttgaaaattgagacaactaaatatataatgcatcaaatatttccttttaatgaaatttatctttagagcatgacaggagaaatctctcattaatcatctacatcaaactactcattatgttattgtgcaaaacttcatatccttctacaattgtaccattaatcataggttgtactgccagtaaagaatgcatatatatttcatgaaaacaaaaagaaatattttt

SEQ ID NO: 914380 - DNA, 552 bp, Homo sapiens
ggtttgactccaagttttggtggacatgagttacctcaaccgtgaggagagttgccagcatatgaaacagacccacacctgtggttgatttcagtgtaaaattgacatgcgaacctgagtggcataagtgatgccactgtaaatgcacactgtaaaggcttgtgaaatctcttcagaacacctgttctgtgatttaaatcaatagggactcttacttgcttaagtagaacttttgctggattagaaacactaaaatcttctgtttctaaaatagcaacagaagctctctgagaggatagcacacacaaacctaggtttgtctcttggtcttgctgctgatttatggatgcctcttgatcaaatctgagtttgtatgtgttttcaaccaagaacagttatctaaacattgacttttatgartttatgtatagggactgttttcagatattaaataactctgtaaaggaagtacgatgttaagaaatatttgaaaattaaaatcaataaaaacataggtttgttttttattgtagacatttgtaggaagtccaa

SEQ ID NO: 914381 - DNA, 697 bp, Homo sapiens
gattcagtttgagggagacattagttttgtggaaaataagcattctttttctgattctctttttctcacacattagagtaggcataaagggtattttgttagtatgaaatttgattggaatgcaattttgatttattcaggcagaataagactagtattgttgctgcccatttaagtttgcagcccatctttcaaagcattgtctgctcaaggacagtacttgtagtacttaaagacacaaaagcagcaggcatgcaaacaaaaactgcctttttacccccacctggttattttgcttcacttctcttcatctgaatacacataagcttttctgaggatgtttaggaagagcagactgttatccctaagtgtcaagtggagtggcgaacctattatttgctttgtttgacacagaggagaaactcaatgaatatttttttcagtgaacaaactggttcatataatttcctcacctaaactgaattaagcctgtgggaaagggattgtggagtgctttttaaaatctttccttttatccatccatcttatcgttttttttttaattaacctctactaattctaagtctaaggtagtctgacttgtggcttaaaataactgagtgccttccacataccactcattgtttttgttgttgttgtttgcttttkgtaaatcaaatgcaggatttaattttga

SEQ ID NO: 914382 - DNA, 575 bp, Homo sapiens
ttaacattaatctgagatctttctaacttcttgatgaaagtgtttagggctgtaaactttcctgtttttactgcttttgttacattctggagatgttatttcccartttttattaattgcaaataattttttcatttctgccttaatttatatgtttacccagaagttgttcaggagcaagttgtttaacttccatgtatttgtgtacttttgagagatcttcttgatattgatttctatttctatcaatcttcttgatttctatttctattgtactgtggtccaataatatacttgatatgatttaaattttttaaaatttattaagacttgctttatgaccaagaatgtgttcaatcttagaatatgttccatatgcagattaaaagaatgtatattctgtagttattggttatggtagtctgtagatgtctattaggtctaatcagtcaattgttgagttttaagtccagagatctttgttggttttctgccttgataatctgtctaatgctgtcagtggggtgttgaagtctcccaccattattgcgtggttctcgaagtcttttcatagg

SEQ ID NO: 914383 - DNA, 687 bp, Homo sapiens
tggaggagtctgttagacttctctaatttcacccttcaggtgatgcagaagtctctactgccgactacctgccctcacacacacatacacagaaggtggagcacatctagcttggattttagagccagtctacrtgagtctgtatcctggctcaaccattctctacttgtgtgaccttgggcaagtcctttgagctctctgagtctcagtttcttcatctgtaaaataggcataatttcaccgttgtgaggtttttgcaaataaggtaacacactgcaaaacattcagcaccactctggtgtatagttaagacctgataagtgtcagccattgtcttttatcattagggatgggcatctcttgccaccccagtgaaacagttccttgtcctgtctctttctttgcttctgcctcccggggcactcagcccaaggcaaatgtgcctgaagatgggggttagtcatcaggttcccctgcctcagaggatgagagcatgactgctgctctctgcccagtctcctaagaaatctgattcatgccttgccagtactctatgaatatgcatacttcacctgcagccctgtctcctttcacaatgagctcagtcatttgtacctcctgggtcatgtgcagacatcctcagtattacccactgatgggtgttggagaaactgctaagaagatgag

SEQ ID NO: 914384 - DNA, 666 bp, Homo sapiens
ctcacctcagtttttgtattttttggtagagacagagttttgtcatgttgcccaggctggtctctaactcctgggctcaagtgatccactagcctcggcctcccagagtgctaggattacaggtgtgagccaccatgcctggtcacatcttcatttttctaagccatttcttcttctaaaaagatgggttacaaacagaacctgtttcataacgctgctgtaaggattaaataagaaaattatcttaaacagaattcctggcacatcctaagtgctcaataaatattagatactataattatctttcataaaatgctttactagtgtggacaatccttttacagatttaaacatgaaaagaccttgacatttttgctctcttaaacttttcataccaattacatcttcctcccctcttatgctcccctttccttcagataaactccatagaagtctttctctgggactattttaatcaccctcttttcctgtcatcttggcttctccctggaacatgacagatattcaatttgagctgggcatggtgccatgtgcctgtagtcccagctactcaggaggctgaggtggaagaatcacttgagtccaggagtttgaggctgtaatgagctacarttgcgtctatgaagctacttcactctggccaga

SEQ ID NO: 914385 - DNA, 615 bp, Homo sapiens
cataaactcttcattttgaaatgggtttattatcaccaactaaatattgcatctgtatcttattgcagatgcgtgcaagagaggcgatgtgactgtgaagccttcccatgtaattttacttggatccactgtcaatattacatgctctttgaagcccagacaaggctgctttcactattccagacgtaacaagttaatcctgtacaagtttgacagaagaatcaattttcaccatggccactccctcaattctcaagtcacaggtcttccccttggtacaaccttgtttgtctgcaaactggcctgtatcaatagtgatgaaattcaaatatgtggagcagagatcttcgttggtggtgagcattccattttgaatttttaaaacttggtgatcttttggtatttttgatcttttggtatttggtgttaaacagaaacccaaatacaggttaatgttctttcttttcccaccacattgaagtattttatcttgataccracctgagagcttcaatgtgagttcagaaactggaatcttatttggcaagtctctctctctctctctctcgccattaaaaccatttatctgttgtccttaactccagtggcagaaaa

SEQ ID NO: 914386 - DNA, 538 bp, Homo sapiens
agctggttttgagagtttttgacactgacctctattttgaaagccttccacatcgagtaccatatcaccacttctcttttaaacttttatatcaaaaaaagttaacttttataacacataccttgcaggaaaaaataatgctatgaatgatctcgttctaaatatcatggaaatgttgtgtttcttagaacctaatattttatttaatattagattttaaattatttaactcagtgcccaaaatggcttagcacttttttcttttataagaaataaggcactataaaaacttaaaaaaataatatctataataaattatctctagaaaatggactccagaaaaacccaaaattattcaccattttggaaaatcagttaaatagagtatttagggtttctaagtgcaatgattacatatacattataggattatatacaacatttattataaatgcattctccagaagatgaaatttagagtcaatataaacaamcttctttctgtctaacaaaattttctttcttttggtttagtttt

SEQ ID NO: 914387 - DNA, 528 bp, Homo sapiens
ggtttaacattagcattaacaaaaactggtcttgcaaaagctgcctctacatgattcctatatgtaaggccctaacaattaaaatactaaaatccaaagttacaaaacacaaaagaaaataagtcaccataaacaagagttaagaaacagcataggcctgttgcggtggctcatgcctgtaatcccagaattttgggaggctgaggtgggcagattatgaggtcaagagatggagaccgtcctggccaacatggtgaagccctgtctctactaaaaatagaaaaattagctgggcgtggtggcgggcacctataatcccagctactctggaggctgaggcaggagaattgctttaaccaggcaggcagaggttacagtgagccgagatcgcaccactgcaccccagcctggtgacagagcgagactctgtctcaaaaaaaaaaaaagaaaraaagaaagaaagaaacagcataatgaagatttggaaccccaactaactcagatattggaattccaagtaaagattat

SEQ ID NO: 914388 - DNA, 618 bp, Homo sapiens
tcttaacaattatgtttgaatttcttaggaaaaacagagttagtcattatcttaagttagttttcaacaaatcagacgagtttaagatattacagaagcaaaaaaawtaattgattttcactgtatattctgctgtggttagatttatagctttatggccttgtatatctaggagataacaaacttgtttgactagtaaatctaggtaaaaatatctgcttttattataagtaatgctaattctgaagacattcctgtttttattttacaggaatttttttttactagcaattttaagactagttttatttatcaagtattgtctcaaatcacagggaccaaaatgtatttgagttagtttcctatttctctgacagaacattttaacattgtatattagcatatatatatcatatgcagacatatatacatttagatatatataattacattcagactatcactttttggctatgttttattatactgagcaattgctagccaggctaccctaaatttgcacttgcaaggggataactgttcgatgaaataaggtaaaaaagttacatctcaaaggcccagaacttagctgtaaacaccattatttgtgagacaaag

SEQ ID NO: 914389 - DNA, 593 bp, Homo sapiens
gaaagccttcccaagaaagataggcacaaacaagtccagactgcaaacactaccagaaatagctaactcttcaatgcccaaatatagatgaatgtccacaagcatcaaaactatccagggaaacatgacctcaccaaataaactaagtaagtcaccagggaccaatcctggagaaagagaggtatgtgacttttttagacaaagaattcaaaatagttgttttgaggaaactcaaagaaattcaagataacacagagaagaaattcagaattctatcagataaatttaactaagagattgaaataattaaacataatcaaacagaaattctggggttgaaaaatgcaattgacatatagaagaatgcatcagatttaacagtagatttgactaagcagaagaaagaattagtgagcttgaggacaggctatttgaaaatgcaatcagaagagacaaaggaaaaaagaataaaaaacaataaagcacaactacaggatctaaaaatacccccaaaagggaaaaatgtaaaacttactggctaaaaagaggaartagagaaagaggggtagaaagtttattgaaagggataattt

SEQ ID NO: 914390 - DNA, 608 bp, Homo sapiens
atttatctacttttggtctttgaagttggtgatgggktctctgagtggacgtcctttttgttgatgttgatactattccttttggtttgttagttgtcattctaacagtcaggcccctctgctgcaggtctgctggagtttgctggatgtccactccagaccctgtttgcctgggtctcactggcagaggctgcagaccagcaaagattgctgcctgttccttcttctggaagcttcgtcccagaggggcacccaccagatgccagccagagctctcctatatgaggtgtctgtcagcccctactgggaggtgtctcctagttaggatacagggggtcagggacccacttgaggaggcagtgtgtcccttatcagagctcaaacgctatgctggtagacccgctgctctcttcagagctgccaggtagggatgtttaagtctgctgaagctgcgcccacaaccaccccttcccccaggtgctctgttccagggaggtgagggttgtatctataagtccctgattggggctgctgcctttttttcagagatgccctcctcagagaggagacattctggccacagtggccttggtgagctggggtaggct

SEQ ID NO: 914391 - DNA, 540 bp, Homo sapiens
gcccagctaatttttgtatttgtagtaaagactgagttttgccatgttggccaggctggtctcgaactcctggcctcaagtgatctgcctgcctcagcttyccagggtgctgggattacaggcgtgagccaccgcacccagcttcagaattttctttcaccactgcccttcagtgtcaccctgatgggttacaactgatcttaccacttcagcctcccaactagctggggctacaggtgcacaccaccatgcttggctaatttttttacttttgtaaagatggggtctcactatgtttcccaggccggtcttgaactctggacctcaagtgatccacctgccctcagcctcccaaagtgttgggattacaggaatgagccacacccagcccagaggcatttctttcaactgccccctgaacaggaaaattcactcgctagctctcaaccttctcaccctcctctattcatctgtcttcattcaaggcagaatcttctgaaacatcctgcattcttcccttttcaatgactcccacattcc

SEQ ID NO: 914392 - DNA, 621 bp, Homo sapiens
ttgctctacagtgctcccttaaaagggtggcttcacaatcctcagcctaattctgggtacaaagatagaatcaagttttgatcctggaatgctggggattggccaatgaagcatggtgtccctgccaaagagatcctcctggtgaagtttggaccacataattgtaccatcacattctgaaaagttgtctgtaaattggcattatatggaacatatatagatacatatttttaatacattaagatctttcatcttatctataaacctagctcctgtatttatgacacattactctaagatactaaaataatatatttaaaaccaaaacacactagtatttttctaagttagtatttcactactcatatccatgactaagcctgaaaactaatttacaaatggatgtcctcaaatagcaggaactcaagaaattagtcagcccaagcaatggctctatactgtgccagggccatgggccaaaaaagctattggccaggccttgcctcttttccccaccactttcaaatgataaacacacacacacacacacacacacacacacacacacacacacacacacacasagagagagagagagagagagagggagagagagagaat

SEQ ID NO: 914393 - DNA, 555 bp, Homo sapiens
ttaagtttgtttactccaaagaatcatgggtagttctagaggtaagtctgaaagaaccragaatctcaaggaagagctgatcaatccagagcttggggtttggcagaaggaatggggttactacacttcaaaaggtcagttactgccaaggccaagtatgtccttcttggctagggtcatgtggctaacattttccactgtggtaatgccacaatatgtacacaatttcccctggctttatacccgggagttgagagtgtgcagattgctttcataagggcccccaatatatcatgtcccgttgtgtccatacgtctttgcattgtgatttttgtcactcctcccatcaagagatgaaaatgattttctgaccctttgaatgtgggttgaccctatgactggctttgaccaatagaaagtggcagatgtgatattgtatgacatttgaggataagacatatgaggccttgaagcttccattttctccctcttggaattcccatcactatgtaaggaagcctgagagagactaccacatgatgaaaaccatgtaga

SEQ ID NO: 914394 - DNA, 414 bp, Homo sapiens
aatgttttaaaattttaaacaamtaaaaattccaagtggtcacaaagaatggcaacttatgcaaacatagttctatttcttctctctgtccattgcgcaattattatttattttgaaactactgtttaagtgcaggaaaatgtagttctgcagtacctggagacaggagctgcactaggagcacgcgaaggattctaaacaattacaaactcattgacaagcaaacatgttcagggaaatattcatgtgtgacggggtggctgcctaactgtgagcttttcaaataaacctctatgtaaattacaacgttttttaaaggataattaataagccatgctatgtttaagtttatatattatgaaaactcagcagcagccacataaattgttgagaactcagaccagcaaaatattt

SEQ ID NO: 914395 - DNA, 597 bp, Homo sapiens
ttaaactggaaaacaggttacttaataatagagggcacyagacagttaccactcagttttcctttatttctgattgtttctttacaaccatccatgcaagagtaactccctcatgtttctcaagcctccactctagacattcaaattcccattttccactctacaggacacaggtccccaaagtcccatcgaatccatggcaacacttcccccaagtcctgcccctgcttgatcaccttccctttcccactttcagagcccatgtgtgaaatgatgggttctgtgctccctataggatgtacctaagacctaggttttagtttccaagtgtccagaagaaagcgtttgacatatccacccaaataggcaggcattcaacagcagcattgatctgcctccaggtcataaaatgacctgttgccacagtcagggcagcagtcagtacagaacaagatcctcttggggtgccttaagtccctcactctcttcatcagctcagccctaatttgagcaaatctgctccagcagagagtaccatcagcatcataactctcccggggggcaggatacagctccacgcataagtttttgagtatg

SEQ ID NO: 914396 - DNA, 567 bp, Homo sapiens
catgatagaagccaatgaggggccgggctcggtggctcacacctgtaatcccagcactttgggaggctgagggaggtggatctcaaggccaaaagatcgagaccatcctggccaacatggtgaaaccccgtctctactaaaagtacaaaaattagctgggcttggtggcgcgtgcctgtggtcccagctgcttgggaggctgaggcaggagaatcgcttgaacctaggaggcagaggttgcagtgagccgagatcctgccactgcattccagcctggcaacagagcgagactccccagtctcaaaaaagaaaaaaaaaaaaagaagccagtgaggaaaaaacaaaaactgcctgggtcagtagaggaagggggtggggatgtgtattgaaagaaaaggaagaaaaccagaagacgggggtgttttagagaccaagaaataatagaggttcaagaagatgaatagtaccaaacactatagagagggttaattaggattggaactaaaagacatttattgccttttttttttttctttttwaaggagtggggtaatttgggacttttcc

SEQ ID NO: 914397 - DNA, 591 bp, Homo sapiens
cacaatcttgttagtcatccctggttggaatagccctagttcactatggaaatttgctctgaaatacaggtaatgctgtatctggaattcagtggctatcctcaatggagtgagaacaaatrgatagtaattgaagcaccagcctcaggcatataagactccattgctgcttttttttttttttttttttttttgagacagagtttcactcttgttgcccaggctggagtgcaatggcgtgatttgggctcactgcaacctctgcctcctgggttcaagtgattctcctgcctcagcctcccgagtagcttggactacaggtgtatgccaccatgcccagctaatttgtgtatttttagtagagacagggttttgccatgttggccaggctagtctcgaactcctgacctcaggtgatcctcccgcctcggcctcccaaagtgctgggattacaggtgtgagccaccatgcccagcccattgctgctttttagacttcttgctgtccccagaattagctcccaccccatcccactgtgttctacctctcccttggcttggggtacatggtaggcttgggcatctaactgga

SEQ ID NO: 914398 - DNA, 580 bp, Homo sapiens
  misc_feature 135: n = A,T,C or G
agtgttgggataaggaataaatcatrtgtcatataccaaaagtctagcaatgttcttaatccagcatgtcccaaaaagacttctatttggctacaaaatacatactctctcctctaactcctactagtatccccngaatacttaggaaagtatgcgctctccacaactgctgattcccttttccgttttcttttttctgtgggagtggcaagcagaccctttaggctggcacattgcagttcctttgccttaggctaactgacctcttcagatgtcaaagtattgtgaactcatattgggaatccccttttctgaagtggcctgacagggctttgataatctgagaatctttggcatagtgactgttccactgtcagcttcctgcatttatcatttaatcagacatgtttagtttttacaatggatacttttcttcccagaacaatgttgggataaatatgtcatttaagaaccttcctttatgtcttgctgatctcccatcaaattttatcttggtcacataaagatcagattgtcctttgtctatgagtgtgcaatgattggggaggttgagagaagg

SEQ ID NO: 914399 - DNA, 662 bp, Homo sapiens
agcactgcctagtggagctgtgaaaagagggccactgtgctccagactccagcttgcacctgcacctggaaaagccacagatactcaatgccagcccatgraagcagccaggagggaggctgtaccctgcaaagccatgaggcagagctgcccaagaccatgggaacccacctcttgcatcagcatgacctggatatgagacctggagtcaaaagagatcattttggagctttaaattttgactgccctgcgggatttttgacttgcatgggccctgtaacccctttgctttggccagtttctcccatttggaatggctgtatttactcaatacctgtacctccttgtatctagaaagtaactagcttgcttttgattttacaggctcataggtggacgggacttgccttgtctcagatgagaatttggtctgtggaccttaggttaatgttgaaataagttaagactttgggggactgttgggaaggcatgattggttttgaaatgtgaggacatgagacttggagggggcggggtggaatgatatggtttggctgtgtccccacccaaatctcaacttgatttgtatttccaagaattccctcgtggtgtcggagggacccaggggaagataattgaatcgtggggggcagtccttccca

SEQ ID NO: 914400 - DNA, 641 bp, Homo sapiens
ttaagtattcatattactttatattattttttgtaatatatttcttatctaaatgcatatgtagtttattaaaattgtagtcataatgcccacraaattttttttctgtatttttacttaatctgttatacaattttaaaattatttttaataactgcacaaaatattattgaagcaatatgctgtagttaattattcccatatgttggacatttaattttctcaaatttgtcatcactattttgtaatgaactttaaaaaatacatttttctgtattttggattacctccttagattctcagaagtggtactactgtgttaaagactctaatatattttattgtctggacataaactgccaatttgctacccattaatattgtggcaattcatgatgacagctaccctgtagaacaaatcagttttatgaaaaactttcaagtacttattattgttatttccaattttagctaacatagtatggctataatagcgttacatttctggtttttaaaatgtgttttaatacatctaaaattagatatttagtcaactgttcacctactattagtatttcttctcttgttgcatttctgtttaccatatcaattaatatggccttttagtattaaatttatat

SEQ ID NO: 914401 - DNA, 630 bp, Homo sapiens
ctgcagaaaacacagctccaagttgggctcttttatctccatggaccctcccacctctaaccctggcttccttagattcctgggtyctttcatttagccccaacctgttcatgccccagggagaaaaacgttccccactcttgtacaggcggcatgtgtcagtgttgatatcaacattcctgaataaataaatgaataaaactaatttatgtttggatgaaaaatacatcagggcctttaggaaaaatgagcaatggaagggcagcattcacattagtattgcacacaatgcctctgcctgggctgcttccctcccctgtattccctctgcctcacccttttcattactcttaggtctagagttgaaacccgtgttcattctttcctcttcccttagctttaggctcaaggatgaagaaatgaaaacaaaataaatcattgaggagtaaggagatgaattgcataagagaaacatgcttcttctcatacaaggagctgctatgttgtccatgattctgtgtcactctatggggtgtgtgcgcataggttgtgtgtgtacacaaagacaaacacaggcaaccctgggcactgctgtcttccagaagccaggtagcttaccaagtggtttgt

SEQ ID NO: 914402 - DNA, 643 bp, Homo sapiens
caaccctgatcaacagacccccaaccaacccrctgacaagtaaactatgattataaataatcattgtgttaagcctatgcactctggggtaatttgtaatgcagtaacaggtaactggcacagagaataatcatacatattcatgcccaatgcgtggcatatagtagctgttggaaaaaaagaatagtcccctttcataccttttcaaccaatcagaaaagtcccagctcatcccagtgaaagttgcaaaattatgttaagatcattagtcacaaagatggaggaagcaagttcaggaataccatttatcaatgcttctactttggctccttgctgagaggagagaagcaaagcaacggctggaacatggacctcctgcactgggggcatgcagctccaccatcgacacgcaggtggcctgacagcctcagagcaggttttcctggaataattattcccattgccatgattggttatttctatgtcaaagtcacttccccttttcactcctgatttttcatttttgtaaaaatgacagtgcttgatttagctcttggaagaggatagggaatttggggaggtgtagagacatggagcagaaagttgaggaaggggaacaaaattagtcatcaaaatgggcttt

SEQ ID NO: 914403 - DNA, 648 bp, Homo sapiens
ttcaaaactctgtctctctggcacaaaagcccatgttttctccatttgactacacaaagctcatcaaagccttccacaaccaatgtctgtaccaccagttcacagtcgtaggtcaaggaaaataataacttccaygagcaagcatttattttgtgccaggaattttgtttaacacatgatcttatacagtcctcataaatcctattagagtcatcattaaccacgtattgcacgtgaggaaatggaagttcaagaaggaaaaagtgaaacacagcttgcaagtacagaagcaggagattcaagctcaagtccatctgccctacagactttaagcccaccacttagtgaggatgtgtgtgagtttcccattgctgctgtaacgaatgaccacaaacttagtggcataaaacagtgcaaacagttttgcaggtcggaagtccaaagtgggcttttgtggggcaaaatcaaggtgtcagcagggctgcattcccttctggaggctcttggggatagcccctttccttgtcttttccagctcctagagtttcattccttgtctcctggcaccttcctcccacttcaaagccctcaagtctctctgtatgtctatcttcacatccccctcgatgagtctaatgccactgcctg

SEQ ID NO: 914404 - DNA, 569 bp, Homo sapiens
atggtgtgaatgatggctgctgggaagggcccctgcccgaaatatttccatcgctcatccactgccaatgtgcttggagtctgccattccagagccatgccttcaccaagttcctatttcaaaatgcaagcacctcaaggcggcctaagagattatgtcctttatttctgggggaagggaacttttattttgatggatgccaaaactggtttgcatttcctgagtttaaagtaattctcttgcaggtgagagtagcctgctcagtgccaactgggagagcagaaccttccttccattcagtagttgggagggaactggggaggctgctggaggatgcctgctgctttatggagcatcctcggctttggctccaggtagacgtgggcttgaatcctggcagccgggtgaccttttgggatacactctgacttcctccttcctggagccaagtctctcatttccctgggacttagcacacacaggctgctggaatggcttcttccgraagaggagggatccagccccactgagtgggtatgtttcccaggagaggcctggaggctgatgcc

SEQ ID NO: 914405 - DNA, 508 bp, Homo sapiens
actcccaaaagatcacagtagctcaccagcaatggatccaaaccaagatgaaatctctgaattgccagaaaaagaattcagaaggttgactattaagccaatcgaggaggcagaagagaaaggtgaagttcaacttaatgaaattaaaaaaaaaaaaaaatacaggatatgagtggaaaaaactccagtgaaatagatagcagaaataaaaagcaatcacaacttctggaaatgaaggacacagagaattgcaaaaggcactggaaatctcagcaatagaattgcacaggtaaagaaagaacttcagagcttgaagacgaggctttagaattaacccaatctaacaaagacagaaaaaaagaataaaaaacacgaacacagccaccaagaagtttaggattgtgttaaatgaccaagcctaaaaataattgttgttcctgaggaagaagagaaatcataaagtttrgaaaatacatttgagggaataattgaggaaaacttctgcagc

SEQ ID NO: 914406 - DNA, 694 bp, Homo sapiens
aggtcctgatggggatcgaaaccagcttccagcaacaatgtgagagggctaggctgggcttagtcaatcacacggctcagattggaatcttatttgagtacaccctggatgtatgcggagggtgttagaccaataattcttggccgggcgcggtggctcacacctgtaatcccagcactttgggaggctaaggtgggagaatcactggagcccaggagcagcctaggcaacatagtgaggcattgtctttataaattaataataataataatagtaataattattgagtgcttatggtggatcaggcctcatatgtgatgggcacacacatacatctcttacaattgccacagcagtcttagggtagttgttaattcttgctttacaaaggaggaagcccaggcttggacagttacaacaacttgctggaggccacacaatgattcctgggtagaaagctgtctccctgccttcaaagctattttgaggccacacaatgattcctgggtagagacctgtctccctgccttcaaagctattttgtcaaaggaagtttatatttattcagtgtttgagaaacagctgctctcagtttttaatgttttgctaggagtgactgtgcagcctggatagcaacaatggtgggtgtattagtccgtttcacactgytattaagaacttccctgagactggg

SEQ ID NO: 914407 - DNA, 614 bp, Homo sapiens
  misc_feature 541: n = A,T,C or G
tattagtgtaaataaatcagtaaaggaatgtgttctgatttggaactaaaatgtatcatatatatatatacacacacacacacatacatatatagtgatagagaataataaatgatttttaaaattaaaagcaatatgtatcgtatgaaattatttccttcaaattccttctaaataaattttaagcttttaaaaaattattatttatagcaaagacatggaatctacctaggtgtgtatccatcgtgaattagataaagagaacatgatatactgacaccatggaataccatgtggccaaaaaggaatgaaatcatgtcctatgcagtaacatggatggagctggagaccattatcctaagcaaattgacacaagaacagaaaactgaaaactgtatggtcccacttataagtgggagctaaactatgagtacacatggacataaaaatggcatccatagacactgggaactgttagagaggggagagaaggaggaggcctaggctgaaaaactacctaatgagttttatgctcatgacntggggaaygggatcatccgtaccccaaactacagcatcactcaatactgccatgtaacaaacgtgcacatgca

SEQ ID NO: 914408 - DNA, 526 bp, Homo sapiens
gtaaaatgccaccagtctctttgctaaatcatagcaaaagtgacgtttagtctacttcccaataaattccttttctccatttgagaccacctcagcctggacttcattkttcatatcactatcagcattttgctcaaaataatcaacaagtctctaggaagttccaaatgttcctacattttcccgtcttattctgagtcctccaaactgttcaaacttctgcctgttacctagttccaaagttgcttccatattttcagctatctttatagcagtgccccattcttttggtaccaattttttgtattaatctgttctcacactgctataaaagaactacctgatatggagttatttatgaagaaaagagttttatttaactcacagttccacaggcttaacagaaagcatgactgagaggtctcaagaaacttaaaatcatgatggaaggcaaaggggaagcaaagaccttcttcctgtggtagcaagagagagagagagcaaaggggatgtgacacacactttt

SEQ ID NO: 914409 - DNA, 487 bp, Homo sapiens
cagtcgtaagtttttctttcccatcttatgactttctgacttgtcctatattttgctctttcctagtcattctactttagracaagaatttgccatacaagatgctctctcacataaaatttctttccttcataacctatcttacataaatatatcttcatatccacaactttttcttttcttctttttttttttttttttttttggagatggggttttgctcttgttgcccaggctggagtgcaatggtgtgatctctgctcaccacaacctctgcctcccgggttcaagcaattctcctgccgcagcctcccaagtagctgggattacaggcatgtgccacaacacctggctaattttctatttttagtagagacagggtttctccatgttggacaggctggtctcgaactcctgacctcaggtgatccgcctgcctcggcctcccaaagtgctggaattacaggcatgagccaccatgcccagt

SEQ ID NO: 914410 - DNA, 655 bp, Homo sapiens
ctttgttttgaaatctattttgtctgatgtaartatagctactcctgctttctttggttttcattagcatgggatttttttttcatccctttatttctagtctatgtgtttctttgtaggtgaagtgtgtttcttgtaagcaagatctcatgaccactgccactataggcccacagggagtgctgccaggctaccactgatgttaccttaaggcccaagggctcttcagtcagcttggtgaatgctgcctgtcctgggattcatcactgagggcataggtttaatgggcttactgttccacatggctggggaagcctcacaatcatggcagaaggtgaaggaggagcaacagcacatcttacatggcggcaggcaagagagtatgttcaggggacctgcccttcataaaaccatcagatctcatgagacttactcactatcatgagaacagcatgggaaaaacctgtcatcatgattcaattacctcccaccaggtccctcccaggatacatggggactgtgagagctattatacaattcaagatgaaatttgggtggggacatagccaaaccatatcacttctggtgcagattgtgtctagaaatgtcatccaggagttatggcctgaaaagagtgcctaatgactctgactgg

SEQ ID NO: 914411 - DNA, 660 bp, Homo sapiens
cactccgtctcacttcaaaatgcattattcagtcatattatattgatgttacagttactgaagttcataactactttctaattctataggakattttcatattctgggaatacataatgatactacttagaggataaaggttataaggcataaaattgagagagagggagaaatgaggaagaaaaagggttcatatagatgttctttgtactacttttatttatgctaattttctgtaaaattgaaattaattttaaataaataattaaaatatgtcccctccctcccaccttttttgagcagtacacatgatataatatcttagaaaacttgctgattgcaatgtagttattcactgctgagacaatccagccatttgtccacccttattggaggctgtcttggcccacatggttggttcctgaaagattaaggtctgttattgaggttaacagtcttcatcaagtgctgggttttgaatcccgaattccgttaagagactgtggaaaacatattagcctggggtgaaaagaagctttagagaagatttccagcacaaagtgacatctgagctgagttttgaagtatgtaatttattagacaaataagaagaggtagagtatcaaatatccaattgttcatttatccagtaaatatttg

SEQ ID NO: 914412 - DNA, 523 bp, Homo sapiens
  misc_feature 482, 498, 500, 516, 517, 520, 521: n = A,T,C or G
aggatggtataaaaggcagagaagaccttatctttgattggggtgtggtaagattggggaagcgtatacgtatacaaggcagccccatagaacaatgtcaccaccatcatgtgtgaagagcaggtggcaaaggccttcttcctcccttcagccgatgtcatctgatgcactgtgatgagaatcctggtgtaggatgcagtcaccaccgagaaggggatcagcagcattgcaacgcagcacacatacatcactgtttcataggtggttttgtccccacaggccagcctcagcatggtgggtgcctcacagaaaaagtgattgatttggtgagaggcacagaacgggagactcatggtaatgggggtgaggagaaaactgtccaaagccccaccgaaccaagagctggccaggatcatccagcagacccgccagmtgatgaggacaggatagcgcagtgggttgcagatggccacgtagcggtncatagggtattttagncncgcacctccgaggagnnggnntt

SEQ ID NO: 914413 - DNA, 651 bp, Homo sapiens
gaacacctggattgtaccagagtaactgacactctcttacatgtgccttaaaaatctaaattcttcacctcatgataatgacataatccaaagctctgtttggcctctcaacattttgtcagctgcctataaataggtgaatgtctcaagagaaaagtctactctgaatgtcaagaccccttccctatgcttcctttctttcataattttggctgctcagcttctagatgtcaagttctccagttctgtcttttatctttctagctccatgaaactacagaagccactatctggctttcatacaattagccattgctttctgattaggttctgcctttgcatcaggaaatatctataggagatagatatcccaattacctagatttcacattgtgtacttgtatcaaaatatcacatgtatcccttaaatgtataaaaccaacatgtatccataaatattaaaaatttaaagtcaattttaaaataaaagaataaaaaagaaagcaccccaggaggaaagcatagcacagtgtagagtttgccataaaatgttttacttttcttgtgtctttggtcagtttaatgttagtttgacttttcttaaatccattaaaagggataatttctgrttgttgctgtactgtctctagt

SEQ ID NO: 914414 - DNA, 634 bp, Homo sapiens
tcaccatatggtaagagttatgcagggtttttgtaacttttcattgagctgtttgagggagatataattttgatcccatrtatcatcagaatcctcatttttgacctccttgctcctttattaactgtttttcctgtgatgtgtattcaggttctattagggaatcatagaagggaagcagtcgtaagatttgttgagactgcacactgaaagctgctgctttggcttccttatcagcctttttgttcccttgtgctgtaggggttaagtcctttgatgccctctacagtggatcatggctacagcctctggcaagtgtattgcttccaatagctgtagaatttcagacccatgctttatgagggaacatttgctagtcagtggttgccttactttccgaattgcagcatgattatgagccatgagaaatgcatatttgaaatttgtatagatatttagcttcttcctttttcccaatatgagggctcaaatgagagcaatgatcttagctttttgtgatgatgtgcctggggtagttgttgggactcaatgatgatgttgtaatttactaccacatatccagccaggcattctccattggacacaaagctattgctgtctgtaaaccagttat

SEQ ID NO: 914415 - DNA, 581 bp, Homo sapiens
tcatcttaccctcgaggcctgcttctttgccctgtttctatgttagtcaaaggttctgcctatctcccagtcatttgcctctacttccatattcatgtttactgtatctcccacctcttttttcccactcctctctgcctattcaaggcactcagtgtccctgacctggattatttcaaaagcctcctaaatggtacaccttgctccagtctctgtacctgtcattcatcatacatacagtggcctgattattccatccaagggactgctttgtcatgtcacattttggttcaaatttgtttgatggatttccatccactcccagaaaatcaagtccacattccttagcacaagagtcaacatccctctgttccaacctttatccagtatatcctcccaacgttacaggcgacagtttcttgctactggggtctccttgctcttccctttgacttcctccttgctcctccctagcttgacccccacaaatawccccaaattcttcttccttccttatacaccataagtcttactccctgctcaccctatctatatcctaaggcagtggttttcaaattttg

SEQ ID NO: 914416 - DNA, 601 bp, Homo sapiens
acataactccatggctaaaaccaagtaaaagtacttcattcaacagtgccacagatcaaaactattcttaagtcttgcctcccttaagaattgactcgaccccarataaaattgccaagtgagcgaaatctgtctttcacttactcatctacattctatgtccctttttaaccctctatcacttttcactttccacatcccatagatattagcatactgcctgaggccataatccttgagaaagatatctgaaatcatgctaatacttttttgtaaattaatttaatattattctcatgtgtattgacacttttaaaaaagacttctgagttaatagccctctccttgaatgatgtccatggcttaaatggcaaaatctatattctagagtaaaatatgccaaacctatatttccagctctaaaatatcttgcaagctccagacatacattcctggctaagaaccatagccagtgtggggtaatgtggtgaataacactggtttaaagtcttatatgcacctcgtagttattaacttgcgtgtacttccacttgaatgttgtgcttgcatctcaaaacacaacccaaactgaaattatcat

SEQ ID NO: 914417 - DNA, 676 bp, Homo sapiens
ttaatttaactttttcactttataaactttcattttatgaactttttgactcttttgtaataayatttaaattaaaacacaaatacattgcacaactgtacaaaagtattttctttatgtccttattctataagctttttactatttaattttttaaaaatatcctttcactttttaaacttttttgttaaaaactaacacacaaacatacacattattccaagcctaccagaatcagaatcatcaatgtctctgtttaccgtctccacatcttgtcccactggaaagttttcaagggcagtaacatgcatggagctgtcatctcctatgataacaatgacctcttctggaacacctcctgaagaatctgcctgaggatgttttacagttaacttatttgtaataagtagatggagtatattctaaaataacactaaaaagtataatatagtagacggataaactaatagcagtcatttattattaatatcaaatagtatgcactatatataattgtatgtgctatactattatatgactggcagtgcagtaggtttgtttacaagagcatcaccacaatcatgtgaatgatgcattgtactacgacattaggactgctgtgacaacactggacaataggaaatcttcagctccattacaatctaacggggatcac

SEQ ID NO: 914418 - DNA, 592 bp, Homo sapiens
gaacccagcctgggcttctctcctttggaaagaggcacagcatggctcccaaaaggccaactacaagtcaaaggctatgcatcatcatgctttgacttttcaccatcaaaattcatctatcagtgagacacagatcatatgactaatcttgtttgatttggcaatgaagtgaaatgtcaataggcttcctattttgagtgaaattattaaatataccaaagggaatattacatgtgtgttagtcatcccagaataaagatgagcatacatccctgaaaacttcaactccattaatgggataatggatcaccagaatattttatatttcaaatacatactttgttcacattcttgcttcacttggagaattgtgtcactgttgcctaagtcttgggtttcctttactccatgcctggattctccattgacactaatgggaatttcaccttccagcacaagacaatatatggaactaaaatgacaatagcagaaggaaaataatacattttgtacattgtgctacagaatattttyttgactgtttctgttatagtcattgactattgctaagaaagatccatttggaaaccca

SEQ ID NO: 914419 - DNA, 589 bp, Homo sapiens
aacccagtaagtgggaaggttctgaggcaggtaaaccaggctgtatggtcacctgtcctctgaggtcctatctgcattggtcttaacacctcttgatctcatctttaccacttrtcctcttcacccatccttctgggccacacagacctcctaactgattctcagacacatgaaacatgaggttctttctccagatagcttcacagctcattcttttttttttttttttttttgagacagagtcttgctccatcactcaggctcgagtgccatgatgcaatcacagctcactgcagcctccacgtcccaggctgaaattatctgctcacttcagctttccaagtagctgggactgcaggcatgcaccaccacgcttggctattttttaaagttttctatagagatgaggtcttgctatattgcccaggttggtattgaactcctgggctcaaacaatcttgcctgcatgtattgaaggaagtgttggaattacaggcatgagccaccatgcctgacctcattcttttagttcctgtaggtctccatgcaaacaccatcttatcggagaaggctttcctgaacattttat

SEQ ID NO: 914420 - DNA, 585 bp, Homo sapiens
ttcagcgtcactattatcagtcttatcagtgcctttctcagagcagggttggatggtacccactgtatggtagcaaaagagctcgagcttttggagctgggcagtctgggtttgcacttcaggtttcccacatactagctgagtgactctaagcaagtaagggttttctcatctgtaaagtaggaatcaaatctaccttggagagtcatccaggaggttgaacatccatatgaagaaaaccctagcactgtgcctggaacagaaaagcgtttaggaaatgatagctactgttactcccccaggagtatagaaagtcctgcttgactacattgcacacagttgaaactttagaagtaaaagtggccttcgattttggctagttggattctttcctttttgaatgaggaaactgaagtccagaaatctttagacgtttttgaagtcacccgctaattaacaagaaaacagagraagaactgaggccacctgattccttacagtgtttttaactaccaccacaccctgcctcttctgaactcgaaaggctcaatctcacatgggcagatcccaaaacaggagatgatc

SEQ ID NO: 914421 - DNA, 482 bp, Homo sapiens
ctcctgaaactttactgtacwtatgaatcacctggggtctggttaatgcagattctgattcagtaggtctagaataggccccagattctgcatttgtaacaggctgccaggtaatggtgatactgctgctcattgctttgtggaccatattttgaggctttacattaccaaatgcttagtacctgtattagtctgttctcacactgctataaagacatacttgagaccagggctataaagacctgatgctgggtaattcaagaagaaaagatgtttaattgactcacagttacatatgctgtacaggaagtgtagctggggaggccttaggaaaattacagtcatgttggagggcaaaggggaagcaggcactatcctcacatggcaaaacaggagagacagcgagtgaagggggaagtgccacacacttttaaaccgccatatctcatgagaactcatgatcacaagaacagcaagaggga

SEQ ID NO: 914422 - DNA, 514 bp, Homo sapiens
aagatacacaaaaaagcacaatgtgttgttggcctgcagtaacccgggcctsagcacagccagaaatggaaaaatactctcaaagagctagagaatggggagcagatctgaaaaggggtttaactaatgtggcaaatggcccagcacacactcctctctcctggtttgttttgatacatccccacctggtccccaggtgtgtaagaaccacaaaatactcttcatgccactgctctgggccagactcatgcagtgggagccaggctgtgcacctcggaacaatggctttattctttcaggtgcctgaagagaggtctgaatgtagaaggaactgctgctgctaagggcaggggggaaaaagaggtcatataccttgaggaatttgggcccaatgtaaaaaatcaggaagttgcaagatgccatgtcgaaatgtgaagccggtccttcccttctagcctgtaccccaagtttgagataattgtgaaggtgaattggctgcatattgagaagggaa

SEQ ID NO: 914423 - DNA, 514 bp, Homo sapiens
aagatacacaaaaaagcacaatgtgttgttggcctgcagtaacccgggcctgagcrcagccagaaatggaaaaatactctcaaagagctagagaatggggagcagatctgaaaaggggtttaactaatgtggcaaatggcccagcacacactcctctctcctggtttgttttgatacatccccacctggtccccaggtgtgtaagaaccacaaaatactcttcatgccactgctctgggccagactcatgcagtgggagccaggctgtgcacctcggaacaatggctttattctttcaggtgcctgaagagaggtctgaatgtagaaggaactgctgctgctaagggcaggggggaaaaagaggtcatataccttgaggaatttgggcccaatgtaaaaaatcaggaagttgcaagatgccatgtcgaaatgtgaagccggtccttcccttctagcctgtaccccaagtttgagataattgtgaaggtgaattggctgcatattgagaagggaa

SEQ ID NO: 914424 - DNA, 603 bp, Homo sapiens
tgggtcaaaaacaaaatcaagaagaaaatttaaaaaatttctgagctgaatggcaataatgacacaacctatcaaaacctctgggaaacagctaaggcagtgctaagaagaaaagttcatagccccaaacacctccatcaaaaagtctgagaaagcacaaatagacaatccaaggtcacacctcaaggaaccagagaaacaagaagaaaccaaacccaaacccaggaggagaaaggaaataaccaagatcagatcagaactaaatgaaattgaaacaaacaaaaaagtacaaaagataaacgaaacaaaaagctggttctttgaaaagataaataaatttgatagaccattagcaagattaaccaataaaagaaaagagaaaatccaaataacctcactgagaaatgaaacaggaaatattacaactgacaccactgaaatacaaaagatcattcaaggctactatgtatacctttacacacataaactagaaaacctagaagagatggataaattcctggaaaattaaaatcctcgtagcttaaatcaggaaaaawtagataccctgaacagaccaataactagcagcgagattgaaatggt

SEQ ID NO: 914425 - DNA, 697 bp, Homo sapiens
gaaaagactaagatattaaaagaaaagaaaagaaacaagtacataaagtgctaccgggacagattaaaagtagctgtcaattktttgatgcttttaaaggtgtgggcttattttctaccccattgttttctgcataagcttcatgatgcctgcctaacagagaacagtgaaagacaggttgtgtcagttttcaagctgagacattaagggaatggtaacctccacttctctcctttgggacacttgctgtgtaacccagctgccatgccatgagaaagcataagcagctaaacagggagacttatttggagaaaaagcaggacccccaccaagaatcccagttgaaattccagccaaaatccagcaggaacttgtcagccatatgagtgagaaaataagttccatgacatggagctaagatgaaccattcctgctgagccctgtccacatttcagattgtggcaaaataaatgattgttattgcattaaatcacaaagctttggtggataaataccagaacacctataaacttctatgaaggaaaactcttgacagccatgaaaacaaatataataatgggagccatctaattttctctgaaggtttaacaaaaaaatgctctcatttaaatatattattatattacaaaataagctctcagattataagagtatcactggataggcatttgaaaag

SEQ ID NO: 914426 - DNA, 613 bp, Homo sapiens
ttcattcattcattcattcaaatactaatggagtcccactttaatcttgatcatgtgctgatactaaagatacaaaaaagattaagtcatggattcaacacatgaagaggccacagttcatcagrgaaaagacaacacagtacaatacgagctatggtacaggaaatcacatggtctgtatggatctgtatggattgccctcttctaggcagctccccactcctttcttctctgctaggaaaaggtaaacagatctagcctgcactggcttagctaggaatggatgtttagatgatctttcctttctgacaagaataccttactggcacatgaggtgcctattgtccagggtgtgttggtgcaaaaaagagacacagtcagggaggaaagcagtctgagtatatgaagtccacttcacaattttgtataaggttgccctctctggatgaagaatctgactctacatctcagtgtttccttcaaaatgaatacaaagttctacagagtcaggaaagaactggaaagtctcaatctgtggccactcttcatggcagggaaagctagactcatggtgaagaaaagcttttcctcattgcaaactgcattccaagtt

SEQ ID NO: 914427 - DNA, 564 bp, Homo sapiens
gtatcactctttctggggamagccagctgctattttgtgagcacactcatgcagccctaaggagacccaagaaactaaggcttcctgccaatagccagagaggaactgaggcctcctgccaaagctgtgggagtaatcatcttggaagcccattctccagttccagttaatccttcaggtgactggaacttcatctgacatcttgactgcaaccccaagaaggtccctaagccagaaacacctagttaagcctccctcaaattcctgatccatagaaactatgacataataaatgtttattgttttaaacttctaagttttggggtaatttgcaatcgagaattaaacaaaagcagatgactatatctaaggtagatgacatatccaaaacatttgccggtggtagcagctgtagtcccagtgggcaggcctccgggatgatgtcagctctagcctaccttattcacactagtttgtccattctatttcccacatctcagtctcgtctttatcacttggtacggggttagtagcctcatgtttcccagttgccatctggaatag

SEQ ID NO: 914428 - DNA, 611 bp, Homo sapiens; identical to SEQ ID NO: 911970

SEQ ID NO: 914429 - DNA, 542 bp, Homo sapiens
cttcccacctagttcttcttcagtgcaggtgaagtagataatcaggccggtaggaatcagaaccccacttgggtgggtgggaggagcaaccaaagagaggccaggtagaagactatgactaaagctaatcacagatatggaggggatggcccagggaagcagaggagtggacagataaaacacaacatggcccacttctagacatacacaccagttcatgatgtaaggagaaacaaatatgagctgcaaactgcacctcattcatctgaacctgaatcaagaatgacttgtctgactcatcagtgccatcccatgaagactggcatcatcttacatcatcttattcactcttatgagggtccccacctatactggtggccatcttcttttgacagaccaacttcgacctgtggcctcacctgcactaggtccctgaggggcatttgcagycttgtgggtatccctgggagacgcatgctaactaactcactcctacagggctttggcccctaatgttgtcccccatcctaggaaccagatgg

SEQ ID NO: 914430 - DNA, 542 bp, Homo sapiens
cttcccacctagttcttcttcagtgcaggtgaagtagataatcaggccggtaggaatcagaaccccacttgggtgggtgggaggagcaaccaaagagaggccaggtagaagactatgactaaagctaatcacagatatggaggggatggcccagggaagcagaggagtggacagataaaacacaacatggcccacttctagacatacacaccagttcatgatgtaaggagaaacaaatatgagctgcaaactgcacctcattcatctgaacctgaatcaagaatgacttgtctgactcatcagtgccatcccatgaagactggcatcatcttacatcatcttattcactcttatgagggtccccacctatactggtggccatcttcttttgacagaccaacttcgacctgtggcctcacctgcactaggtccctgaggggcatttgcagccttgtgggtatccctgggagacgcatgctaactaactmactcctacagggctttggcccctaatgttgtcccccatcctaggaaccagatgg

SEQ ID NO: 914431 - DNA, 644 bp, Homo sapiens
aaaactcttaaaactctatagggtaaaagtatgctaacttccagaaacctaaatttgtgttctttattataaaactgaatattcctgtcacagaaccttggtcatgaagttcatgtaaaaattatcttaaatttacaaaaagggaagtttacacataaagaaaatcaaatgtcaaaggccatcctttttaacgtcttctgtggtgtttttgcacaaggctgtattgcttatttattacagaattgtgtgtatacacttttgaatgacaatatcctagagcagtcctgatttgttcatttttatacctcctacttatttattgatttgtttatttattatgtgacttcttgactaaactgcattttataggggacggaaactgagtctggcttattcacttttgtatgtccagtaccttgatctgtctctggcacagggtaaataactcaataaacattttggtgagaataaatgaatgaatgaccaccgaaaggggttttataagcaaatggaaagaggagaaatgttgcagttttagttatttaaatgaaaacattttttatttaaggcaacttaatctgayggtaactagcttgtgttagacaatttaagacgattccctttatggcgagattttgtgagcc

SEQ ID NO: 914432 - DNA, 677 bp, Homo sapiens
ttgatatcataaaatagcagtggtattcatcataattcaagctttacctaaaggaatttttatgtgggggctaggaaaaaaaaactcatgaatttttagtttattttctcaggatgtgatttaactcttctattgctttatatttagagtattccttatgggttaccagaagaacatatgcttccttgttaatgcaagtcaacagaggcttcttttgaagttacccatcatgcataatgctaaaaaccctaatctgaagtgtcaattttacatgatgctattggttcgttttattatgcaatgaaaccaaataaaaggaattacttgcaaagtcatagaaaacagtttctttaaaaaaacatgttgttattggcaaaagcactgtaatttttagaaagaattcattttttaaatgagaaaacacaaagttcttttaaaaatctccatagttttaaactttgtagataatttcagtccactttgcctatggtataccgtaatttgtgttgagttgaatgcctaacagttactctcagtaaaaagaattttgctgtatgatatcctgatatcgtctatggttttctctttttgcaggttttgttcacaactaatcaaattccctttttttttgatcgtttaaaaataacaacaamaaaaaaaaacccacttgatattcc

SEQ ID NO: 914433 - DNA, 618 bp, Homo sapiens
gaatcagcatagctctggatgccaatagatatccccttagacctgccgcctgtgtgaatttttgttctgttttcaccctgttcatgacttaaattccagaaagatcaactccttagtctagcttcagtcgtgtgctcattctttggctactgaagagctaagtgccttgatttgcagactgtacttactaggacactaaatagactgtattctgtggaacaaagacaatcctcccaaagggaaatcagaatctttttccaaaatgaggcacattttaggaggaaaaggtgtacagaaccactgaagtttagttaattgctagtatacttaaataagttggtgtggaacaccaatgaaaatagtttcaatgaaaagatattgagttatgcaagaccaaaatgacctacgttaaataaagtaagggaacagaccaatggcatgaaaggaaaaagaaggctgttcaaaatagattggaaatggagagaaaaagaatagaactagagaccagtctttcaagttcctaaatacaatgtgacatccatccttgagggtagaatgtcttcatgggtgktttactcatattcgttttcatagcttagtccctcctaagtatacagc

SEQ ID NO: 914434 - DNA, 598 bp, Homo sapiens
tggttgaatctttataactatttctttctaagaaatattggtgtaaaaatatgatctatttaaattagctgctatttgtacatggtgctttgtgtctgccccactgaataaagacattcacaatgggaaaatattctgattttggaaagttcataaaccccagtacacctttttttttctttttccaaaatatttggaaacaaaatctcttaagatagagaaggcattaaggcctatcatcccaccttttctctttcaaatgaagcaccttttatactttgtctgtaccaagtactatagagctacttggtctgtacttgaaatgatgctctagacaaacagctctatgaatgaacagctctatcaggtatcttttctttatatagagacaaaactccttggcaactcttccatcattggaatgctaaatgctgtacttttatcagaattggtacaatctgtgatgttggaattatgtgcaacagaatggaagtgaatgrtgtgttcatcctggcttgttacaacctttcagtatgaaaattatgtacagctgtaagatctgcagtaaatcaggatgaatgaagccatgacacataga

SEQ ID NO: 914435 - DNA, 616 bp, Homo sapiens
ttcagttcatctctgcttttgattatttcttggcctctgctatctttggggtttgtttgctcatggctctctagttcttttagttgtgatgttagggtatcactttgagatctttctagctttttgatgtgggcatttagtgctatcaatttccctcttaacactgctttagctgtatcccagagattctggtatattgtctctttgttctcattggtttcaaagaactggatttctgccttaatttcattatttacccaggagtcattcagaagtagattgttcaatgtccatgtggttgtgtggttttgagtgcatttcttaatcttgaattctaatttgtttgagctgtggcccaagagactgtttgttatggtttcagttcttttgcatttgctacttcctcatacttcttgttcaacctgccctcatttcctccagccaccatgaccctttacaatccttagacaggtcaatcatgcttccctttagggtatgtttgttatgttttccactcctttggattctcttgcctcagataactgcttggctgactccctctctaactcaagtcttygcttaaatttcacctttgcaaagtggcctctactgacaa

SEQ ID NO: 914436 - DNA, 644 bp, Homo sapiens
aagtctttcctattgtgaacagtgctgcaataaacatacatgtgcatgtgtctttatagtagaatgatttataatcctttggatgtatacccagtaatggtattgctgggtcaaatattatttctggttcaaatattatttcgggcaattcttgaggaattgccacattgtcttccacaatggttgaactaatttacactcccaccagcagtgtaaaagagttcctatttctgtgtttttatgtgaagaaacatgagtttaggggagagggcaggagacaaggtccccacccaggagataagtagacaaagtaagataaaggcccgtgaatgagcctaaggcataggtgggttatagggagatgtgtctgtgtctcactaagaatgttctaaagatcaccctaaggaagccatccacatcagcagcagggaaacatctaaggtgatgacaccactagcagcagaaaagaagagtttgtgccggagtaggactggggtctctagatgaagcctgcatggcaccagagttgcctccccaccaccaatacacggccaggtctgtaaaacctgawgattctttagtttcccttttcttctctctgccataccccaagaaaagctagacccagaagagaaagggaagaa

SEQ ID NO: 914437 - DNA, 663 bp, Homo sapiens
tttcattcttttttctctattcttctctgactaccttwtttcagaaagccagtcttcaagctctgagattctttcctcagcatgatctattctatttaaatttgtgattgcattatgaaatttttatagtgtgtttttcagatctatcaggttggttacattcttttctataccagctattttgtctgtcagctcctgcattgttttattgtgattcttagcttccttggattaggtttcagcatactcctacatctcaatgatctttgttcctatttatattctgaattctatttctatcattcagccatctcaacctgtttcagaacacttgctggagagctagtgaggtcgtttgaaagaaagaaggcactctggcttttttaattgtcagaattcttgtgctggttctttgtcatctttgtggactgatgttccttcagtctttgaagttgctgtcctttggatggttttttttttttttattatgtttgatgatcttgagggttagactatggtataacgtgggttcagtaaactaggttcatttctggaagattttagggggcccaggctcagctcctaactcctggactgcatgctctaactctgggggattggtatcgggccccagcttttgtctctggctccctgaaattagat

SEQ ID NO: 914438 - DNA, 612 bp, Homo sapiens
tcatactgtcattggtctgtgtacatcagtgtgtttttgtagtggctggtaatgatttttcctttccatatttagtgcttccttcaggagctcttgcaaggcaagcctggtgatgataaattacctcagcatctgcttatctgaaaaggattttattactccttcacttatgaagcttagttttgccagatatgaaattctgggttggaaattctttaagaatgttgaatatgggcccccactctcttctggcatatagggtttctgctgagagatccactgttagtctgatgagcttccctttgtaggcaacctggcctttctttctggctgcccttaacactttttctttcattttgaccttggagaatctgacgattatgcgtcttggggttgatcttctcagggagtatcttactggggttctctggatttcctgaatttgaatgttggcctgtcttgctaggttgtggaagttctcctggatgatatcctgaagtatgttttccaacttggtttcactttycccatctctttcaggtaccccaatcacttagaggttcagtctttttacataatcccatagttctcagaggttttgttcatttcttt

SEQ ID NO: 914439 - DNA, 603 bp, Homo sapiens
caaagaaggccatcacataatggtaaagggatcaattcaacaagaagagctaactatcctaaatatatatgcacccaatacaggagcacccagattcataaagcaagttcttagagacctccaaagagacttagactcccacacaataatcctgggagaatttaacaccccactgtcaatattagacagatcaacgagacagaaaattaacaaggaaattcaggacttgaactcagctctggactgagcagacctaatagacatccacagaattctccaccccaaatcaacagaatatacattcttctcagcaccacatcacacttattctaaaattgaccacataattggaagtaaaacactcctcagcaaatgcaaaagaatggaaatcataacaaactgtctctcagaccacagtgcaataaaattagaactcaggattaagaaactcactcaaaaccacacaactacatggaaactgaaaaacctgctcctgaatgactactgggtaaataacaaaattaaggcagaaataaagatcttctttgaaaccaaygagaacaaagacacaacataccagaatctctgggacacagataaagc

SEQ ID NO: 914440 - DNA, 688 bp, Homo sapiens
catgattatatggaccagtgagcaattcttttggtctgagttggcttggctggaattggatggtctaagttggcctcactaacatgcctggggtctcacctgagatgactgggatgactgaggtctctctccacaaagtctcatgctccaggaggcttgcttgaatatgtcacatggtagcaggagggtttccagcagcaagagagggcaaactccaatacacgtgtacctctcaagttgctacttgtgtcacatttgctaatgttccattggccaaagcaagttacaatggcttgtatttgtggggatgggactaggcatgtgcatggatatgggaaggcatggtttgtgggggccattactgcaaccacggaccacagcatgttccaaactattactctagccctgcagttcccagactggctgagcggcccagggatgccacagtgaattcacaggggtgttgtgggattttttaaagtttctagggacacatagttatactcaacgactactggacatctaacaatctattggctttatgtagtttgcaatgtcaacatcattatattccttttggagtgagctgtcatgtctttgyaaagctggatttttgtggttgctgtgataaaaagcaagtactgcataaaaatcaatgtggaacagcagataacggtcatggtgtcca

SEQ ID NO: 914441 - DNA, 592 bp, Homo sapiens
tccacttcaccatggctgccttgccaacacaacctttcctaagcccagatgtgttgatgtgcattgcgccagatttctgaagactcaagtcacttcytgagataaattactcatataggaaagcagactagcagttattgtaaacaactctaagactctcatctaaagagcggatatgccttcctaaagggcgtgctccaaggcaaataaatcctttggatctaagtctaccttttagcacacacaagaacactttcagctcattgatccagaagtgataaaggaaatgaaaagttcagccaaccaaaatggggtgctcaaaggggttcttttaaggtccaggctgcacagggtagttctgttttgtccccaccaaagttagcctctgccaaagaattgctccgggctctggccaccacatgtgcctacaacccccaaagcagaaagcctgggaaagaatcacatactcataaaggccccataattaggcacattcactgggaatggtgtttaagttatcaatcatggggtacaagaagaattaataaaattctgtatatttttaaaactttttatagaattatacattact

SEQ ID NO: 914442 - DNA, 636 bp, Homo sapiens
aaccatcacatcttcagaaacttgctatgatatggaaatccaactcatagaaaaaaatcatctgacaaagtatttttatttgcaattcgttcaaatttcttagtatgaacatgacaagcctctcatatatgtgtaatttgaaggcttgattttttgatatgaatacagctatattcaagtcatatttaatatttaagataaagcagaaaaagagtgggctatatttgataataaaagtagatatctagagagttaggaagcaaatcagaagtgttagtattcccaaattccgagtgaatttagtatttcaatcaagaagaaatgaattgcctatggtgatacatgatgaacaaggactgtaattaccatgaggtaagtcagttggtaataagcatttcatcatgtgtgctcttggtgatagaaatcagattacaatgtttacagaataaataagacattcaaaactgaagatgaaaaaaggaagtggttacgtagaattctgtctcatgtctgcccaaggtgggatgcagagtgagtaacctgatagagcaaaacwatgagcttagacagctgtttcttaatgcttatttatatttgataaaggaaggatgttgagaggaaaatattaaacatggg

SEQ ID NO: 914443 - DNA, 593 bp, Homo sapiens
cctgatggttttatcaggggtttccacttttgcatcctcctcattctctctttgcctactgccatccatstaagatgggacttgctcctccttgccttccaccattattgtgaggcttccccagccacatggaactgtaagtccaattaaacctctttattttgtaaattgcccagtctcaggtatgtctttatcagcagcatgaaaatggactaatacaatagtatatgtaaaatgctatttcttttctatactttatataattgctataataggtaaatcaagtagttaaactacagaatttctcagtttagccttaggaattcagctactacgtattcggaaatggctttttttttttttttttttttttatgaagagacaagattttcaacattctccaattaaggttaataaattgggataatatttaggccaaattaatttgaaaaagccattcacaagtattctggaaatacaaggggactccaaaaagtttgtggaaaaaatggaattagatgaaaatagaaagtataaactttatttctcaacataagctccatcaaggtcaagacacctgtaggcaataataa

SEQ ID NO: 914444 - DNA, 575 bp, Homo sapiens
ctatatggagctgaaagacctactttccttgaaggacaaatactacccatctcaggtaaactgagagtgtcactagccccctaggtaccttctagtatcttatataatatgatattttttatccagcaatagagagtagttgaagttctatgactgtaaatgaaagagccatgtgtgcatgagggccttggcttgagtctgtctggcttagacactgcttcgcctgcagggatggagactttccacagatcctttccagctcattggttctgtgtatctgaatgtctgcttctgtttagagtgcatctctcaaaattttccaacaaatggcagggagtgacttctgggggtacagggtatgtgtgtgtgaatgtgtgtgtatgtgtatctgtcccattgcacatgtaaagtttctttgaagtatcatgcttcatcttaaaaattaaggcaaatttgaatttcactccraaacatttgtatttgttttaaattaagatactattaaaattgtttagaaaagaaaattgatgagtatccgtggcatcctgcattgttcctgaaacaacaagtactcc

SEQ ID NO: 914445 - DNA, 613 bp, Homo sapiens
  misc_feature 591: n = A,T,C or G
ttgaagacctttcagtgggacaacatgaggaggtggaagacaatgatattaacatcatgaatccacataagcctgatctactgtgtatgtttgtgtcttagttttcaggaaaaaagtttaaaaagtaaaaaataacagtaaataaatttaaaaatagaaaaaatcttctagcaaaaggatataaagaaagaaaatatttttgtatagttgtatgatatttgtgttttaagtgttatgacaaagaagtaaaaaagttaaaaaaataaaaagttcacaaagtaaaatagttatagtaagctaaggataatttattattaaagaaagaaaaaaagtcaataaatgtagtgtagcctaagagtaaagtgtttataaagcccgtagcagtgtagagtaatgtcctggaccttcaccacttactcactgacttgcccagagcaacttccagtcctgcaggctccattcatgataagtgccctgtgcaggtgtagcatttatttaaatctcatatttttactctgctcttyctatgtttagatatgcttaggtacacatatactcacaaatgtgttatagttgcttatagtattcacnacttaacttgctatacaggcgt

SEQ ID NO: 914446 - DNA, 618 bp, Homo sapiens
cacaatcatagctcgtggcagccttaactcctgtgctgaagtgatcctcccacktcagcctcttgagtagctgggactacaggcgtaccaacaccctcagctgatatttttattttttctggtgatgaggtctcactacattgcccaggctggtcttgaactcctggcctcaagtgatcctcctgcccaggcctcgagaagctagtaagtttctaatcagtttgcacgtgcttctgagtatgctaatgcttttttttattaccactcaatggtaataaatggtgacgtggtaattccaagctgtttaggaaaatttgtactaccaaatgtcactgtcactcaagggattattgcatataggtcttattttgtttgttcttttttaaggctttctctgcctttctcccttctgttaccatggcaatattaatgttattgatctgagtggaacatgatgttattcaccagtgtgacatacattagatttgtaaagaatctatttattagaacaatttatcaggtgttaataatgctcatacattatattattttttggtcacccaatatagaagcctctattgagataaagaggcatgattttttttttcacaaaatgga

SEQ ID NO: 914447 - DNA, 648 bp, Homo sapiens
ttttttaaggtagaatatatagaggataatagaagctaagacttaaagccaagtagaggaagattttttaaggccttaaagaatgarattggacgtttttagccacagtcaataaggaatttctaaatatttttgagcaggtaagtgccatgaacaagcctttgtaacaatgtgaattgtgaagtgtccatgatgggatatctagagtgagaacaaagaacacagaagatttatttcaaacttttaaaaataaggtggtcagcacctgaacaaaggccttgtagaagaagtgaaaagaagagaactgagagaactggtgaaggaagactcaactggatacaaaagtcaagggcaaaggagaaggaaagaaggaaaagtgaaatacaaatttcatgcagtgatcaatgctactatgaatatgtacagggaactctatggggtggaaacatatacagaatgacaggaattaaaaaccaactagagcagtacctaagttgacaatttcacttagatttggagatacagatttttgctttatttttaattctgagttttatctttacttctttacttactgatttgaacagtaacactcctgtcatctacatttcatttcttgattatccacctttgattttcttacatcta

SEQ ID NO: 914448 - DNA, 707 bp, Homo sapiens
cacgttctctacctatgggtgagcaaaagcctcctgccctctttggaaaataagcatggcagttcctaggctcattggcccagagcatttaagcacttaagagcagagcagggccagagctggaagtggttggracggggtgaaggggacgatcaggggaggcagtggctccatagctgcagtgtttatacatttgcagtgtcctgctccagcaatcagcaagcactactccagaccaagtagggttcaggcactctgctgttcctctgcatgactcaaaggagatgtggctgctgctatgatgacactctcaggacatccctcaccacccacctactgccctcctgatcagaagaaatctcccagatcccgaggcttggatcaaaataatgatgactactgcaacaacaataatgttaatgacaataattttgcacatttaccaggttccaggcaggcattactttaaactctttatgcatattaatttatttgatgcttgtaacaacctaggaggcagatactattattacacttattttacagttgaagtaacggaagcagaggaggcttaggaacttgctctacacaggaagactggtaggggcctgagctgggatttgaatgaggctggcaatgtgagagctcatgcttcttacttgctatacccaagcatttactgattcgtcatttctaagtattttagt

SEQ ID NO: 914449 - DNA, 603 bp, Homo sapiens
cggtgtccagggagctgtcacaacaagacgtgggtgccgtgtgaactagctggtaccttaactacctaggaatgttagcacacagggtggaaacaaggaaatcactggaccaaaccatctttacagattctgacttagttgcactgctccaaattaagaagaatgaggctatttccttttaagttggaaatttgtacttgggaggctgaggcaggaggatcacttgagcccagaagtttaaggctgcagtatgctacaaccacgcctgttaacagcctctgcactccagcctggacaacatagcgagatcctgtctcttagaaaaaaacaaactggaaacttggtccatgtgaagcctgttagttctacaaaagccaaagatgaaaacttcagaaaagcgaaataaaagtctgtgttcacgattctatgaaacacacagcaaaagtctccaaaggctgacaatacacctaggaaaaatasaacaagactgtagattaagagctgcttctgaattcctacagtaacacaagtcttgccttcattcaacaagaaaatgttcacaatttactatttgcaaagagacgcccttttcaatgtaagttg

SEQ ID NO: 914450 - DNA, 582 bp, Homo sapiens
aacacttttctgtgtagagaacttatctagtctttccttttcttagaaggtgctgatactatcatttttaataggcatttgattaaaacatattggatgccactttatayataccaatatatgggtttttctaagccttttttctttcttctcaaacaggatgtgcaaaactataacctactgcccaatttcagctttctgttttatggatctgtccccgaggctgcatgacagttttgctgaaattgagccaatgcatctcagatgatcacacacagggtggtctgtctgctgctttcactttccaaacatccatgactatgtgaaattgttttgtgttgtgctaggaccatcttctgcccaaatgcctgtggcttccctatttcatctccttcttcaacagctgtttgggattctctcctacagtcattgccacctttacttatgaaaaaatttcccaccgtttgcagattctttctctaatactactggctaagtgactcagctggagagtacaaaccttatcttttttatcttggcactctgggagtcttgtagaagtgcagcattttgtacaaaaag

SEQ ID NO: 914451 - DNA, 662 bp, Homo sapiens
tttttacaggtgggagtgaggtggatttcctggaggaagaatcaatgtgatcacaaccatgagggcagggaaaggacagcaaktgagccccttaggttggaggataaggaattagcagaaaatggtcctgaaaaggtgactatggcagtaaatgccaagcacaggtgtccctattgaattccgcaggccacggacaagcctctggtgggttccacactggggctaattccaagattggggttccacattggggctaatatccatccttctgctaaggatgcctaccacccttggctggagggggacagccaaattcctgctctggttttaactcagtgagcttcaacacatcaatgtggagaaggtacttcgtatgaggcactctacaagtgggaataaagatgaaatagtgtatgtctttaaaaatccttgcagtttgggaacaaggaagaagggcaaagaggagattagacaacgacatgtagaaccatacatcgtatgagtggtaaaaggagcatcacaagagtcttgacaaagtgctcagacctccttaattggggttcctgccagcttctcaagaatgggaaccaggctttcttcatctctgcatggtctggtagctcagtgcctggcacttggtagacattcattaaatgaatgaa

SEQ ID NO: 914452 - DNA, 690 bp, Homo sapiens
acccctgcttctcaggccttcagatctggactgcaatctataccatcggccctctggctctcaggttatacgaccagctttcctgggtcctcggcttgcagacagcagattgtgggacttctcaacctccatattcacgtgagccaataccttctcataagtccctttctagagatatatgtatacatagatcctattggttctgtttctctagagaaccttgactgatacagatttaatgctatggaatgagtgtgtccccacaaactcataacttaatggtatatcatgaacaacttctacattattacatatttttactacaacattttcttaaatcacaacatttttaaaagatctttggggccgggcatggtggctgacgcctgcaatcctagcactttgggaggctgaggcgggaggatcacctgaggtcaggagtttgagaccaacctggccaacatagtgaaaccccgcttctactaaaaataaaaaaattagccaggcgtgatggtgggcacccataatcccagctactcgggaggctgaggcatgaaaatcgcttgaacctgggaggtggagtttgcagtgagctgagattgtaccattgtactccagcctgggygacagagtgaaactcagtttcaaaaaaaaagatctttggtattccatgctgaggttatactgagg

SEQ ID NO: 914453 - DNA, 291 bp, Homo sapiens
tcgcctttgcaaaattataactgaggaaataatgacaatgaaagaaatcagacctaascaactctgtcttgcttttaatctttaagctgtccttatttattcctgggcataggccaaactaactttgggaaggaattcagttcacgctttgactctgaaacaaaattgataacagccctttcctcaaaagacccccttcttgcctggggaccagtctgactttgcaggactaacaaattagctacaaggttagaaattacaatttaggggtcttgcagcctttggctccaa

SEQ ID NO: 914454 - DNA, 565 bp, Homo sapiens
ttatctttgtagcgattgggaatgggagttcatttatgatttggctctgggcttgtctattgttggtgtaaagaaatgcttgtgatttttgcacattgattgtgtaccctgagactttgctgaagttgcttacagtttaaagagttttggggctgagatgatggggttttctaaatatagaatcatgttgtctgcaaacagacaatttgacttcctctcttcctatttgaatacactttatttcttcctcttgcctgattgccctggccagaacttccaatactatgttgaataggagtggtgagagacagcatccttgtctcgtactggttttcaaagagaatgcttccagcttttgaccattcagtatgatattggctgtgggtttgtcataaatacctattattactttgaggtatgttccatcaatatctagtttattgaaagtttttaacatgaagggatgttgaacttcatcraagaccttttctgaatctagtgagataatcatgtggattttgtcattggttctgtttatgtgatggattccatttactgatttgca

SEQ ID NO: 914455 - DNA, 565 bp, Homo sapiens
ttatctttgtagcgattgggaatgggagttcatttatgatttggctctgggcttgtctattgttggtgtaaagaaatgcttgtgatttttgcacattgattgtgtaccctgagactttgctgaagttgcttacagtttaaagagttttggggctgagatgatggggttttctaaatatagaatcatgttgtctgcaaacagacaatttgacttcctctcttcctatttgaatacactttatttcttcctcttgcctgattgccctggccagaacttccaatactatgttgaataggagtggtgagagacagcatccttgtctcgtactggttttcaaagagaatgcttccagcttttgaccattcagtatgatattggctgtgggtttgtcataaatacctattattactttgaggtatgttccatcaatatctagtttattgaaagtttttaacatgaagggatgttgaacttcatcaaagaccttttctgaatctagtgagataatcatgtggwttttgtcattggttctgtttatgtgatggattccatttactgatttgca

SEQ ID NO: 914456 - DNA, 592 bp, Homo sapiens
cctgcagatgttgtgtgtctgagggctaagccaggtgaatgcctccctttgtttttgtttttgtttttttgaaatggagtcttgctctatcacccaggctggagtgcattggcrcgatctctgcttactgcaacctccgcctcccaggttcaagcgattctcctgcctcagcttcccgagcagatgggattacaggcacctgccaccatgcccggctaatttttgtatttttggtagagatgggatttcaccatgttggccaggctggtctcaaactcctgacctcaggtgatccacctgcctcggcctcccaaagtgttaggattataggcgtgagccaccgcgcccagccccaggctcctctttgaatcttcctcaggcctctgtcttcagccccttccctgctccctctacaatcctttcttctggacctcaccactctcatggcttcggctgccatgtgcagggtccagctccaaaaacctcctccagcccatcctgtatcctgagagcactgaacgagcatgccctgcatcttactcgagacatctgcaagcacctcagacaccaagtctttcttctccctctcatc

SEQ ID NO: 914457 - DNA, 508 bp, Homo sapiens
tctagatgtgtattagtaagcttgggctgctataacaagacyacaggctgcatgtcaaacaatagaaatttatttctcacagtcccgcaggctaactctgagatcaagctgccaaccaattcagtttctggtgaggggctgttttcgtggctcacagatgacttccttcttgctctgtgctcatgtgactttctctggggtagaggaagctggagagagagagagagagagctcctctatggtgtctcttctgataaggacagcagttctctcatgagggccctaccctcatgaacttatctcaccctaattacttccaaaaggtttcacatccatatgcccaaatgctatcacattgatgagtaggccttcaacatatgaattttgtgggggacacgatcattcattacaagacagaagatcaggaatataggcaagaataaaaagttgtgaaaatgttaaacatctaagtattgaccttgtccttacggtatgataataataataa

SEQ ID NO: 914458 - DNA, 581 bp, Homo sapiens
cttaccactctgtacaaaaatacaaataacctgacttaaacagggcaaagawtctaagcagacatttttccaaagaaggtgtacaaatggcctggccaacaggcatatgcaaaggtgctcaacaccattaattatcaaggaaatccaaatcaaaaccacaatgaggtattactgcatacctgttaggatggctattatcaaaaagacaagagataataggtgtcagccaggatgtggagaaaagagaaccctcgtacactcttggtgtacactcgggtgaaaatgtaaattggtacacctattataaaaaacagcatggatgtttctaaataattaaaaatataactattatttaatccagcaatatcacttctgggcatacatgcaaagaaaatgaatgtaatatgttgaagaaatacctgcatttccatatttattgcagcatttttcttattagccaagatgtagaataaatttgtataaataatacaactatgttaggtgatggatgtgttaattaacttgattgtggtaatcatttcataatgtatagatatatcaaaccaccacactgtatacct

SEQ ID NO: 914459 - DNA, 472 bp, Homo sapiens
gagcagtcaatgtggagcgggccttcgccatgcttgcagaggagcgattcctaactgtaacaagtattacagtgtaggagacaaccaagaggagaaaggaactcagagaaagaaagccactatctgcaactattagtaagctgacaacataagtgtctatgcaggctaacttggtcactagaggaaggtcacagaaaaaactgtctaccttattaggaccacaaaatggcagattaacagtgaatgccaactggctggtagtatggatgaagcccacaaaccatgaaatgaggacgagcacaacacatacacgacggctcatgactgtcatgtagtggrgaggtttgcatatagcaacataacggtcataggccatggaaactaggagcaccatttcactgccagtgaagagatgaacaaagaaaatctgggccaggcaggcatcaaaagaaatagtcttgcgctcaaccag

SEQ ID NO: 914460 - DNA, 637 bp, Homo sapiens
ccctcttaacaaattttgaagtgtacaatactatattaattaatacttattaatacagcataacggaaactttatacccattaaacaagtccctgttttctcctcccctcaacttctggcaaccgctattgtattctttgcttctatgagtttgactattatcaaatagtaaaactatcaaatagtccatcatacaagtggaatcatgcagtatttgtccttctgtgactgtcttatttaatgtcttcaaggttcatccatattgtcccacatgacaggatttccttctttttttttaaaggctaatattctattatatatgtaccatatattcttaatccattcctttgtcaatggacacttgtttccatatcttgcctattgtgcataatgccacaatgaacatgagagtacagatatgtttgaaattctgatttcaattattttggatatatacccagaagtatattcctggatcatatggtaattttgtttgtaatcttttgtgaaacctctgtactgtttttcatagctgttacaccattcccaccagtgatgtacaaagttttctatttytctacatctttgccaacatttgttatcttttttgttacagtagccatcctaacagatgtga

SEQ ID NO: 914461 - DNA, 608 bp, Homo sapiens
tcttccccaaaatttctattcctctggcctttctcccttcaaattatatctcccacagaaccatcagattattctatctagaaaaataaatccctgcttaaaaccctgccctggctccccattatctatagtgtcaagtccagaccccaagaatggactcccaggtacctctgcagcctcatttcttctctactctcctccttgccctttaaataacaaccatgttggcacttttatttatgtgtgtgtgtatttatttatttattatttttatagagacagagtctccctatgttgcacagattggtgctaaactcctgggctcaagcaatcctcccacctcagcctcccaatgtgctgggattacagatgtgagccactgtgtccggccatgtcagcactttttctcatgtctttccaggcccatgagaccctcttcggcccccattgttggcctgcctgtctcccaatggttatttgagaaacagctcagggtaacagctccaggcttccatgctgagatgctctctagccctgactcttcttcaacagagaattscctgcatcacgttgaaatgcctcatctcccaccttcactgggaacaccg

SEQ ID NO: 914462 - DNA, 618 bp, Homo sapiens
acaaacaaatggaagaacattccatgctcatggatagcaaaatttctaaactcgtggctagtttgttagtcctgtgaaggcaggttaktccccaggcaaggaagtttgttttgagaaagggctgttattatctttgttttaaactataaactaagttcctctcaaagtttatttagcctattcccagaaataaacaaggacagcttggaggttagaagcaagatggagttggttaagtcagatctgtttcactgtctcagtgacaattttgcaatggtggtttcatttccttgtggttgtatattgagggccccattatcttgctagcaactggctgtaggctattctcagctcctaggggcaccctcagatccctgtcacatgccccctccagtggccatctcacagtattctgcctatgtcttgcaggccaccagaacatctcacttttatctgctaagaaggagtcttatggaacatgacataatcacaagagtaaggtcccatcacgtttgccacataatataacctaagcacggaagtgacatcccattcctttgccatattgtattggctagaaacaatgacaggtccattccacattcaagggaaagaaga

SEQ ID NO: 914463 - DNA, 593 bp, Homo sapiens
gtacatatgcaggtttgtcacatgagtgaatttcatgtcgggggggtttggcctacagatcattttgtcacccaggtaatgtgcatggtacctcacaggtagattttttaatctcctatctcttcttcccaccctccaccgtcaagtaagccctagtgtctatttttcccttctttgtgtccatgtagtcaatgtttagctctcacttacaagtgacaacatgcagtatttggttttctgctcctgtgttaattagcttagaataatggcctgcagcttcatgcatgttactgcaaaagatatgatttaattcttttttatggctgcatagtattccacagtatatatgtatcacattttctttatcaagtccaccacttttggacatttaagttgactccatggttttgctattgtaagtagtgctccagtgaactatacatgtgcatgtatctttatggtggaatgatttatattcctttgggtatatacccaataaagggattgccaagttraatgctagttctcagttctttgagaaatctccaaacttcttttcacagtggctgaactaatttacattcccaccagca

SEQ ID NO: 914464 - DNA, 625 bp, Homo sapiens
actttaatggcctcaagtctgagtttccactagcctcctctgcactgctgggttttctttgggagtcttcagagatccctgaacagtgayggttcatcggctcttctggacctttcttaactttgtgccttacatgcgctctgattcagttcagagtttgctttgcttcctaccttccttgctcccaagccctcaggttcatctctcatgctctgccttactcttttgggctaagcaaatgcagggccaggcctgcggattaaatgttgtggagacttcttttaacttttccattttaaatttcagcctcacttaattgaattgcaaagttaaatgtccatgagacgggaacagagcagctttaagattggagaaggaatgcaaaattcaaattctcacagcttcttactgaaaaatatcatgatccacttggatgaagccaacactgttggaaatgccactcccacgctgcccttggctctgcctgtctgcaaggactgatgattttcaactggaaggaccagccacagccagtccccaagctgatcagaacaaagctgagaagtttatccagggttccttacctatcatgcatgagacatagaattaagctgtctgagaagtt

SEQ ID NO: 914465 - DNA, 589 bp, Homo sapiens
gggaagataccacaataaagcaactgaaaaaaataaaaagaagaaaagaaagccataagcttttgtgaataagagagaataataaaactggagagatttaaaaaaccattgtggatatatatttttaaaagacaggatgcttcatagctaagattggagaagaaacaattagaagaaaactgggatattattagtcaacatttatttatttatttatttttatttatttatttttgagatggagtcttgctctgttgcccaggctggagtgcagtggcacaatctcagctcactgcaacctccacctcccaggttcaagcaattctcctgcctcagcctcctgcatagctgggattacaggtgcccgccaccacacccagctaatttttatatttttagtagagatagggtttcaccatgttggccaggcaggtctcaaactcctgacctcaggtgatctgcccacctcagcctcccaaagtgmtgagattataggcatgagccacagtgcacgacctattagtcaaaaatttaaattgtaaaacaggttggatgacaaaaatgaaaaagacgtctcagaaagtagaag

SEQ ID NO: 914466 - DNA, 541 bp, Homo sapiens
gcaactgaaatgtttatcatagcttttaggatctttgcgcatctgcttgaaaattactcagccttttcccatttttcaaaggattgcaaaaacttccaattattttaaagctctttgccacawgagacaacttatgcagcttcttttttcctggctaaattttatggataagagtccccattttttatgtacatagttactatattcttagaattccaggatatattagacagtgttgttgcttttctctttctctctgaaagcagtcttctcttgacttttgagtctttcagtgttccttcttatttcaattcctggtcttcattttattctttatcaccagatcttcttccatttactcctgaaatgaaagcatttcctacaacactctactcagcttcctgtttgaaatatatgggcattcccctatttattatttgcaatcccatgccataacttctcacaaatatatcaaaatttacactttaggcctcatctcctttgggaattctagaccatcactgatacctgctataaaata

SEQ ID NO: 914467 - DNA, 628 bp, Homo sapiens
gttcaattagaaaaagcaatgtgcagtttagtgtcaatcaaggttatgtgagatatatttcataaattaatgtaaaaccagaattttattgcacggaccaccatccgcctgcctttcaagacaccactccaatcacaggtagtgcttgtggttgtgctgagtgttaggcttttctattgacaatctatgtagtcatgaccacaaggagcattaggtcttgttttaaaagtctcactgatactatagggagttcaagattatcgagatattgttgcatggcaaaatttttcaataggctagaaaaggaaacatattgactgagaagcacaatctgctatggtactgtctcaaggaatgagatataaagtaaaagacagaaaaaaaagcactcattaatgttatcaacagaaggcaaataaatttctagtagccaattaaaaagtaaaaaaaagaaaaaagcaacaggtgagtgaattttattaatatatcttatttagccaaatatatccagtataacattttgaaatgtaattaatgtaaaaattattaatgagatatttacattattttttcatatcaygtctttcaaatctggtgtgtattttacttatagtatatctcagtttgg

SEQ ID NO: 914468 - DNA, 628 bp, Homo sapiens
ttggaaacgttaagtattagactaaatttggcatctttccatraagacctaaagggtataggctctagtgactcagaagaaagactaaattatccatgaaactagaaattcgttttggttctaagtatcacattgatcatcaaagtcaaatggactagaacatatctcttaattgtaattgatttcaaaaatagttgaccctcagactttcttcatctcacaatccaacattaccattctattacattgattgtgatattcttatgcaatcccagatttctcttattttcttacttcttacatccaacccaccgtaaaatgttgttgattatacccccaaatctatagaatcactccaacatgacccaaatctgggtcatcataatctttctctactattgggatagacttaacaagtcaccgtgttttcactcttgtcactttgtaatcaattattccttgagcagccagagtgaacttgaacttttataaatgaaaatgcttcctggaagcataaaggaaaatttgctccattggacaagagctggtcaagcttcctcgtgtgtcacaattgctaccatgccattggccaacacatgcgtgagtccaagcccaaaacagacaggag

SEQ ID NO: 914469 - DNA, 683 bp, Homo sapiens
caggaaacctgagagcttctgagcaggcatcctcaccaaccaaaaacaaagaaagaaagaaatactgccgcagatttctaagctggccgcccttcagtgggttcatcacatctagtacgttccatggccagagacagagcattgccctctcccctaagtgcacgggtgcaccagagcatgcatagttcacccatgcacttcatacacatcctccttctctatggacagtgaactcaggaaagagcaggaatatgccaataatatcaacaaatggcaacagaagaatacgtacatatcctggatgcttcgagaataaaacaatccaaacagctttgcttatcagtctaggtttcaacacaacatttgcgtaatttttaaacaactgggcaataaaaagaattttaattgaagtttcagtcaccttatccagctgcctaaccttagaaaaacatgcaactgaaaaacatttcagttaaaagaaaaaaagaggcagtttagtattttcatttaagttataaaatataaacatgtagtatatatttaacattatttttcaccaaaaaagaataagttagatgctaatttttatgtaaagatacattctaatcattattcttttattacatagccycctcttctccaccaccaccaactttcatgttttgctgttcaacatggaaaat

SEQ ID NO: 914470 - DNA, 652 bp, Homo sapiens
tctatattaacaaagctgtagcatatgtttcccttgtgttcttaaatcmccttacatagcaccaaacatgtgctgtacatccaaaaaatggttgttgaatcaagtggagttctttgagtgagcaagggaaagttgggatttgtaccgaggaagcagcaggtgagtttgggaaggacatctttttgctatgtgagtggacacctccattggcttgggtggctgcagaacctgcctcccccttcacacatcctcccttgttccctctccctggcagcttaagcaagagcactaagcttggccagttggaacgccagccatgcccagtcttgtgttttgagggagctaagcagagagacaggattactacagatgcctcagaggtagcagcagaatcgagggtggtggcagtggtggggataagtccccaaagccagcagtaccagagtctgtctcctaacaggcttcctctggcagcaccttggttgtattctcagctgtctgtgcttatttttctgagcttgattctccaggtttcctgttgactctgagaggcactgcctatctgtccaataaattcctttcctgggtaggtgagccagagtccacttctgtagtttgcaaccaaaaaccttgacaggtagaagttagggaa

SEQ ID NO: 914471 - DNA, 615 bp, Homo sapiens
caatgtagcttttgtcattggttctgtttatgtgaaggattacatttattgatttgcctatgttgaaccagccttgcatcctaggatgaagctgatttgatygtggtggataagcttatttatgtgctgctggattcagtttgccagtattttattgaagatttttgcatggatattcatcaggaatactggcctgaaattttcttttttgttgtgtctctgccaggttttgctatcaggatgatgctggcctcataaaatgagttagggaggagtccctctttttctactgtatggaatagtttcagaaggaatagtaccagctcctctttgtacctctggtagtatttggcatgagtctgtctggtcctggactttttttggttggtaggctattactgcctcaatttgagaacttgttattggtctattcagggatttgacttcttcctggtttagtcttgagggggcgtgtgtatgtatgtgtccaggaatttattcatttcttctagactttctggtttatttgcatagaggtgtttatagtattctctgatgatagtttgtatttctgtgggatcagtggtgatatcccctttatcattttttgttgtg

SEQ ID NO: 914472 - DNA, 596 bp, Homo sapiens
atatggttaaaatagttccacttctagctgcgatagaataatgaggactaaacttactagttcaccataaaaaaataggaaaatgaacaaaatactgtatttaaaattgttttccatttggacagaggcagcacaggactgtcatgcctcagtaaagggcaactaatgagtatactattatcactgcctacctttctgcttagagccagcacattccagaccacagctcaaggagtaagaacacaagcaaagccttgtggttatgttgagttgaggagatagaggttagaattaatggtgtttgcagtgggttcaatctgtgatgaccggaagaaaggtatacagagtagaagactcagaaatattttacaacatttcatttgttttacatttattgggggttgctttatgacccagtatattatatatcctggaaaacgttctatgtgcatttgagaaaataaatattctactactgttgagtgaawtattctatacatgtctgttaggtctgtttggtgtataatgttgttcaggtctattttctgtttttatactaggcctatgttatctatccattatttaaagttaaggat

SEQ ID NO: 914473 - DNA, 613 bp, Homo sapiens
gcactgctcctaatgctcacttggaagtagtccatttaatctttaatgaaggtctatggtatcagtactagtattatctttgttttacaaaaaaaaatacaattcaggcatcaagttagtaacttccctagggtcttactgctagtaagtggccaaatggattagaacctaagacatagtatcagtgtccacacatttaaccagaatgctatattacttcacagaagagatctgatagcttctacagattagagttagaaaatatttaggacattaagaaagaaatgttagttcacactggagtgaagtggcactggaaaagacaaaacaacatcaaaaagagaagaccagagcttgtgtctgtaggaaaggtgataagtgaagccagcatgaatttgtggaatatgtaagaattttccagggataatcagaaatactagggaaagagaaggccatagaagacagaacttgcaatcagctagaatgaacactcattaacttagatagtactaaagagaattcytaggggcttgagaactttcaacttggaagcattctagaaatgaaaggctaatttattatttaagagttcttgcctcctgatatgtgcttg

SEQ ID NO: 914474 - DNA, 595 bp, Homo sapiens
tttttttaaggtatgcaagaagataatgatactactgagcacttctaaggataatcctttacrgaaagatgaaagttaaaaaaattttaaagtgggcataccacattaatgttaaatacatttaaagtcttaatgcacaaaaatgtcacttaacagacaactgcagctacatattacaagcagttggttatggacatgctcatcttttgatgactatttttaagttaaaatgcattaatattcatgattctgcctttcttacatttacaggaataatgctgcgcttgtatatccaagaaacttattttttttttgagaaagactcttgctttttccgcccaggccagagtgcactggggcaatctcggctcactgcaagctccgcctcccgggttcacgccattctcctgcctcagcctccccagtagctgggaatacaggcgcccgccaccacgcccggctaattttttgtatttttagtagagacggggtttcaccatgttagccaggatggtctcgatctcctgatcttgtgatctgcccgcctttgcctcccaaagtgctgggattacaggcatgagccaccgtgcccggc

SEQ ID NO: 914475 - DNA, 595 bp, Homo sapiens
tttttttaaggtatgcaagaagataatgatactactgagcacttctaaggataatcctttacagaragatgaaagttaaaaaaattttaaagtgggcataccacattaatgttaaatacatttaaagtcttaatgcacaaaaatgtcacttaacagacaactgcagctacatattacaagcagttggttatggacatgctcatcttttgatgactatttttaagttaaaatgcattaatattcatgattctgcctttcttacatttacaggaataatgctgcgcttgtatatccaagaaacttattttttttttgagaaagactcttgctttttccgcccaggccagagtgcactggggcaatctcggctcactgcaagctccgcctcccgggttcacgccattctcctgcctcagcctccccagtagctgggaatacaggcgcccgccaccacgcccggctaattttttgtatttttagtagagacggggtttcaccatgttagccaggatggtctcgatctcctgatcttgtgatctgcccgcctttgcctcccaaagtgctgggattacaggcatgagccaccgtgcccggc

SEQ ID NO: 914476 - DNA, 573 bp, Homo sapiens
tggagaagacttagtgtgaggactgagtctcggataaatcaaatttagttgttggtagcagaaagatgatcaagcaggagacactgagaaatctgggttatagttagaaaaataattgtgatgaagataatcacccaagttattgttccttctatgaagaaacgaacaccaaatcacttcaggcttcatatcataagagttaaatactttaatggtaaaaccaacttagaatctatactttaattattaaaagctcttgaatggcatccacgatggcttttattttgaactcaatttatttttgcatatgtgttcattcatttatatatcaaatgtttattgactaatatttgtgcagtaaagaaggtgaatggtagattaccaaggatgagagacagaattcctacattccaggaggtacaaagccaaaagaatataaatcaaggaaaatgactgaggggagtcataattattttagaggtttaytttgccaagattgagaatgtgtccaaaaaggaacattgtgatcttcccaaagagagttttgaagacttcaatatttaaaggagaaag

SEQ ID NO: 914477 - DNA, 657 bp, Homo sapiens
tctccatggcacttatcattgtttgttatattatacttttatttattgagttgtttgtcagacttctcacactacaatatcaattccatgaaggtaggaatatttgtctttgtccactgacaatcctcaatgcttatgcagggcctggcacatagtaggttctcagtaaatattttttgaatgaatgtggtaggtatggactttcaacatataatctaatttagtcctcccaagataagtattaatgtttctgttttagaggcgaggaaaggaaagctcctcatcacctatacaaaaaaggacagaggttttgagaaacgggtgtgtatatgttgagcctatagattcaaagatgattgattcaaagatcagggtcacaagatatggggatacaacaaaaatgtgagcccaataaaaataccagttaatgagtgaatctctgccaagctgaactgaagagaaacactgtgtactctttcccccagatatttcacattctacaagtagaatcagttttgaaacttaaatagttaattttctttctgttgttcttaaagaatctgggggcttgtgaggacttccataggaaaattaggaggcaaggtcattggagcaagggtrcaatttttgtagacaagccgttaaggatttacagag

SEQ ID NO: 914478 - DNA, 614 bp, Homo sapiens
atcaagttgggcagtaggaggagcataaggaggaggaggttgagtggccaggaccaagggartccatgagggacttggggcagtgattattcacaaaccattacagaagcgtgttaatatttttaactccaggtttttaatcactgtgcagagcatctcagtcctgggcctaggaaagcattcttagctaacaattccgtgtccacctctaatgctgccacagagaattcttgaattccttgagatcttcctgccagcgataattaggcagacagccaataccatagcattgcaaagagatgatttaactaagtctctaaaatcttctatcattacccttggaaaagtatatcaatgacactaataacactggtattttggtcacattgcaaaccaggtgataacctgtattcttggccttttccttaagtcatgctgttgctattacatttatactaaagccaaggtggggcttattggatacagggattacacagcttgctggagttaagctagggagtttccaattctattcttcaagtagaaggtgtcctatagtttgagaatggccaagggtaaaagtgagtctcatctcagtggctcacatttatcca

SEQ ID NO: 914479 - DNA, 659 bp, Homo sapiens
tctattcttcaagtagaaggtgtcctatagtttgagaatggccaagggtaaaagtgagtctcatctcagtggctcacatttatccagcttyggctgccaagagtagatggtaccctaagtccattctgctcctctgctcttaggattaaagctcagattcaggatggtgggcaggggagatggccacagtgtggacttgggaccctgactgctgctggagaagcagcccatgtgtctttgggaagacagaggttccggtctcccatcctggaccccacaggcttcccttggccacccagggatcaggcaggactagagctgggcagccaagagacagacagagctgacccaaggcaccagagtgtcaggtgcagaagggacccgcaggctacctgccctccttggtcagcccttctctctccaggcccttaccaggctcaggctagaaaagctttcagattacctgttatcaccctctctccctgctgccaggtttccctccccagccttcctgcccagtgctccccatgtatcttccaagtgggctaggatggatctggaagctcccttcctctctctgcaggcacaggattccacttgtcagaacgttctttctgctggtgagccaagccttctccctgcctctctctcccacataa

SEQ ID NO: 914480 - DNA, 630 bp, Homo sapiens
gtttgaccaaatgtatgggcactgtgtggcccattcaagttgacrcataaaagtaaccatcatagtgggtttaaccacagggttattttcctagtgtttgcatttcttggcccttattaattggccttttgtacaattttcttaattattttgcctgtttactttcctagtatatgttattttttcaggcttcaagaaattattattagattttcactggaattgcctttctccaattcaacctcctcaccactgccagggaaaacttcttcgagtacaaatcacatctgttgctctcttgattaaaatattttaatggtttcctaggctcctaaactcctcagtaaagatactaggcctttcatgatcttacctctaccaacctctctggcttcctgccacacttctcctgctacactctagttatctctcataatttgcatttccctaagtggagtgtgtgctctctttttctcccatgctcttgctcatgcttagaataccttcttgacccacccatgccaagtgaacatctacacttattgggcccccctgggcccagcacgaaaagaagtttcaaagaagaagaaatcagcaaagttaggagatcaagaaggaggcagacagaga

SEQ ID NO: 914481 - DNA, 630 bp, Homo sapiens
gtttgaccaaatgtatgggcactgtgtggcccattcaagttgacgcataaaagtaaccatcatagtgggtttaaccacagggttattttcctagtgtytgcatttcttggcccttattaattggccttttgtacaattttcttaattattttgcctgtttactttcctagtatatgttattttttcaggcttcaagaaattattattagattttcactggaattgcctttctccaattcaacctcctcaccactgccagggaaaacttcttcgagtacaaatcacatctgttgctctcttgattaaaatattttaatggtttcctaggctcctaaactcctcagtaaagatactaggcctttcatgatcttacctctaccaacctctctggcttcctgccacacttctcctgctacactctagttatctctcataatttgcatttccctaagtggagtgtgtgctctctttttctcccatgctcttgctcatgcttagaataccttcttgacccacccatgccaagtgaacatctacacttattgggcccccctgggcccagcacgaaaagaagtttcaaagaagaagaaatcagcaaagttaggagatcaagaaggaggcagacagaga

SEQ ID NO: 914482 - DNA, 608 bp, Homo sapiens
ttcataaagtaaattttcagcacatgttaagctctgacctcaattcatccaaccatggaaagaaaaaaagtcacacatgcatatacgcacaaaccccagctttaactttttcccyttccaaagttgttcatcattttgccctcctatagtgacagagaaagtacaccaattcattgggcatttgagcaagataaagccctcactacagttttggtgaagctcttgagaaatacacagatggcagtcaaaagaactatttgtggtgtcagggatacacacacaaacatatgcacatattcaacaagtcatgggaggtgagacatgggtgatgtgcagttgaggcagacagatagaaaatgggatgggaagcttgagagtttggtttgttttactcccttgccccgtattttccagatatacattagatagatatatagatagatagattcttctttcctttttgataatttatttttactcttgacttagtagaaatgaccccatctgtgatatattagctaaagagaaaatcattttgctttggttcagatccagaatgacctagcccaaagaggaaagaatgaccagctgcctttgtccaggagtgt

SEQ ID NO: 914483 - DNA, 558 bp, Homo sapiens
taataagaatccaaataagaagaaaggaactcaaactattcttgtttgcagatgatatgattctatacctagaaaaccccatagtctctgaccagaagctgccttgagctgataaacaacttcaacaaagtttcagtatacaaaatcaatgtgcaaaaatcagtagcattcctaacaacacccatacactgatagcacctaagctgacagccaaatcaggaatgcaatcccattcacaattgccacaaaaagaataaaatacctagagatacagctaaccggggaggtgaaagatctttacaatgagaactacaaaacactactgaaagaaatcagagatgacacaaacaaatggaacaacattccatgctcttggataaaaataatcgatatcattaaaatggccatactgcccaaaacaatttacagattcaatgctatttctataaaaccaccaatgacattcttcacagaactggagaaaactattctaacattcatatggaaccaaaaaagagcccaaacagcsaagggaatcctaagcaaaaagaagctgga

SEQ ID NO: 914484 - DNA, 636 bp, Homo sapiens
aataatgtgacattggttatgctgaaagtgtttggtgttaggtttttgttgtcatagtgacatagactatttgaatcatcctagcctcaaccccattgtatctcatgggrcctcccacaatagccctggatatttgaaaagtgtgtacaatgtactaaaagttgatgaacatgcttaacttttactcttagtaaatagagtaaaaaaaaccttgttcaacaagttcttgtctaggccgttgcatgtggtgccattttggcagagtatcagtgatttccgggtattccattctcagcaggaaatgcctactcttgggtcctattctggagccctaacattttagaatcagtagcctgtttgcaaaagccagaagtcatctgaaatataaggtacaagttatctgaaatgttgctggggctctgcagtattttagattgtctttaaagctaattatttaggaggaaaacatagtgaccaacttagtctggtgaaacagttgtacattttgatactcaccagttgtgttggttctattagtcagagcctagtcatccaccctggcagaggaagcaaaaggatgctgggtagaatgaattcccttaggtattttgtagatgatgctattaacacaggtag

SEQ ID NO: 914485 - DNA, 633 bp, Homo sapiens
  misc_feature 597, 598, 599, 600, 601, 602, 603, 604, 605, 606, 607, 608,609, 610, 611, 612, 613, 614, 615, 616, 617, 618, 619, 620,621, 622, 623, 624, 625, 626, 627, 628, 629, 630, 631, 632,633: n = A,T,C or G
ctctgtgactcgcctttcaattcttccctgaagtagacccaagaaccctctcttggggtctggatcgagacccctttttccagyaacacaacccgcggggccgcctcccgcccaccctcaggtgcaggagaccccgggccatgcatccttccgggcaggaaaatgtcagccagcgctcgccggccgctttcctcccccgcctcccgaagttctcgcccggtagctccccgactggctctcgcgccggacaaaggcgcacgctgattggccgcagggccgtagtcatgcaggacgcgcgactctaggggcgggaccagacaaggggtgactgccgcgcggcgcgggggaggagaccttcatctgttcacgcggtagcgcggattgcggttcgcggcgcgcgccaccgggcaaggaacggtgggccgaggggttggaggtggggccccaggaggacctcgggctgtgggccgggagagcggagtcggggagtggggcgggggagcgaggtggcgccggggagcctgggatatggcgcggccagacgatgaggagggggcggcggtggcgcccggacacccgctcgcgaaaggatacctnnnnnnnnnnnnnnnnnnnnnnnnnnnnnnnnnnnnn

SEQ ID NO: 914486 - DNA, 631 bp, Homo sapiens
atgagaacaacagcttagggattataaaataataaaatggaaagaagacaagaaataaccaaaatcagagctgaactgagggagactgagacacaagaaaccattcaaaagatcaacgaatccaggagctggttttttgaaaacatcaataaaatagctagaatgctagctaggctaataaagaataaaagagagaaaatccaaataaacacaatccaaaacaagaaggatattaccacagaccccacagaaatacaaacaaccatcagagaatgttatgaacacccctatgcatataaactagaaaatctagaagaaatagataaattcctggactccgaagactgaaccagcaagaaattaaatccctgaccagaccaataaagagctctgaaattcaatcagttataaatagcctaccaaccaagaaaagcccaggaccagatggattcacaactgagttctaccagatgtacaaagaagagctggtaccattattccaccattcctactgaaggtacttcaaaaaaaaaaaaaaaaaagagraagagggaatcctcccctaactcattctgtgagtccagcatcattctgctactaaaacctggcagaagcacaacaacaacaaaaa

SEQ ID NO: 914487 - DNA, 565 bp, Homo sapiens
tgtattcccccatgaattaaatgggaaccacaaaaataaaagaaatatatattgttgtagagtattttttatttctagwtaaatgtgttattagaaaaaacttataaattttataaaatgcacattcaacacttattgaaatcaaatatgtatatgtacaaacattttctttattttttttttcttttttgagatggagtctcacactgtcgccagggctggaatgcaacggcgcaatcttggctcactgcaacctctgccttctgggttcaagcgattctcatgcctcagcctcctgagtagctgaaattacaggtgcccaccaccatgcccagctaattttttgtacttttagtagagatggggtttcactatgttggccaggctagtctcaaactcctgacctcattatccgcccacctcggcctcccaaagtgctgggattgtaggcgtaagccactgtgcctggcttgtacaaacgttttctttgtataaactctgtatatttttctttatttcattttttgttgttgttgttttcatctagtttatggtattaatagac

SEQ ID NO: 914488 - DNA, 650 bp, Homo sapiens
taaatgtaggtggcataatattttgggaaatagttttatggcaccataggtgctattatctaagatatccagcaggaaactcagcagccagcaagaggtcccccacatttttgtgtatagactgaaatgtggtcactaacaaaatgaccgagggatgtctagccagttattatgccctcatttgcttagaaattttaagtttgaatcttgacacatttctttcttagatgagttgataagagaaattacagtcatagcagcaatgcttctcttttgaagtattgtccttgtgtaaataggtttttatatggcgagaattttaagaattttagatgttttcttttatttgaaaaaccttatcctattgccagtaggcagtatttaatattgcatattctgtttctatgatgagaaattattaaagttaatgaatctatctagatccttaggcttcattacacacaaacacacacacacacacacacacacacacacacttcatcagaaataaatatgatagagactctccccttgaatttgaaatctcatttccttgattttccaaaaaaatttctattgtaataaacatggtaaygtggaagggtagaatagaaaaataaaaaatggcatgccctcatctaaatttatat

SEQ ID NO: 914489 - DNA, 647 bp, Homo sapiens
ccttaggcattagtttataagatatttataatttgatagcttcccttgtggatatttctagtttctaaaacataattctgagtgtgcacagagaattctgctagggtctcatcaaaatgaaatatgacttcctgatcttgcagagtcaaaattttccagttgtgttaaactttaaaaatagcttctttctctaaacaacaggcccctctttggctgttagtatagcatctgtgagtagatcatgctctctgccattctcacacttctagagccatccagctgggaactgctctccctgactcaaacacagatgggtcgtgcatcttaccacttgagccacctattttgctatttagttaaagaacagcacacaggtccagggcagagctattgaagaatttagattaaatgttactggctggttcacactgtagtgctgtatagaattttgggtattacaatgtctccagtgttttttttttttcaatttttggtaaaatggcttgaagttatattgatagcacattatgatactactctgtcccagctccctaaagcatttttctgttaatttggttttctrcttcttctattagttcatcagtgggtagtattctcttgggctgaatatagtaaagtgttcaggg

SEQ ID NO: 914490 - DNA, 606 bp, Homo sapiens
  misc_feature 18, 22, 86: n = A,T,C or G
atttttagtgagaacagnatgnctggagcctaccagacatttctaaacaatatcattattcagaaaaaaatcatatgcaagaaagnatttctggataaaagaacacattaaaaatgaacaagacaatttggaaaaagtagattgaattaaacatgtaaatgtgatactttgttatactgtccttacacatgcagaatcacctagaccaggctaagaaagtgattgtttgcaataatgatgattacagatactactaattcctgtaaataaccctttatgtgtccagcagtctaatccactgtacccaaaaagatgtagcagatctcatagaactattcaaatttacagctttgcattttctctacagaagttataaaatgactaaagcaaaatgaatcttcaacatttcgatggaataaatggcaacatataaaacgtaatcatctgctcaactacctattttaaggtagtttaacacattaactaaagattcacctgtgtttctcatgttaygtggaatgcagaataaaggaagaagtaaagatactgtgaactacggcctcctgcaggacctcccagtggcttctttctacatgttagctcacc

SEQ ID NO: 914491 - DNA, 639 bp, Homo sapiens
gatggatttctgaagtcttttatgatgcagtaaaatttttcttagctaaaaaaatgggaaatgttttatcctaaaattgagaacaagagcccagtacagtccccttctagtgataaatttattataacttagcatcttatgggcataaaaataataatctaaacttgagttttttattattaaactggactccatgggacaaattcaggagattcatgaacctcaaacaattatgtgcctactgggtgttaacgtatatctggagtggaaggtggagtctatcactttcatcaggttttaagaggtttgaaacactgtactggctttatacgaccttatatttatattcccactattaggctagtttcaaggagacacttgacactggggctaggtcctctatttcaacttacaccatgttgagaaaatggattttaagaaaaatgtgcatgcgtgtgtatgtctgggggttaaggaaatagaaaaaatgattacaatccacggtatgsaatgcttcccgagtttgcagtagagactcctggatgctcaagaacaagaatgaggttgtggctagtaagggaagcgagggttactaataagaatcttaaagacaagctctacttcacattcaatctccaa

SEQ ID NO: 914492 - DNA, 639 bp, Homo sapiens
gatggatttctgaagtcttttatgatgcagtaaaatttttcttagctaaaaaaatgggaaatgttttatcctaaaattgagaacaagagcccagtacagtccccttctagtgataaatttattataacttagcatcttatgggcataaaaataataatctaaacttgagttttttattattaaactggactccatgggacaaattcaggagattcatgaacctcaaacaattatgtgcctactgggtgttaacgtatatctggagtggaaggtggagtctatcactttcatcaggttttaagaggtttgaaacactgtactggctttatacgaccttatatttatattcccactattaggctagtttcaaggagacacttgacactggggctaggtcctctatttcaacttacaccatgttgagaaaatggattttaagaaaaatgtgcatgcgtgtgtatgtctgggggttaaggaaatagaaaaaatgattacaatccacggtatggaatgcttcccragtttgcagtagagactcctggatgctcaagaacaagaatgaggttgtggctagtaagggaagcgagggttactaataagaatcttaaagacaagctctacttcacattcaatctccaa

SEQ ID NO: 914493 - DNA, 636 bp, Homo sapiens
agaatcatatggcccaaaatggcagcataccattgttgataaatgccgatttagatatatcaaaaaaaatttaaattaacaagacatcagataaaagctaaaattatcatacttatttgctatttcaayttatataaaggttcataagatgggcctccaataagtggttgctttgagatattaactaatgatggcaatacatatatactggggctactccctcaaaaattttgggtgcagtacatacatgactgaaaatattagagtccatcatgccacaatctcctccaatttggtcattctccttgggtgaggtacattttaggggagaagaaaagtgctgcagcccctcttatgattacttttactacctccattgcacaagaaagaatggaagagatcagcagcctcctgattttaccttgggaaaaatgaagcttatcaaataaccttcctgacataagatcttagctagatgctgtgaaaatggactgaaaagtggaaattacagtcatgtttataattggcagttttcaggtatatttaaatatgtaaaatgtaaaccttaaagaggaaataccatgttctgccaaaccactttctctgatctgtgttttttgggggacataatacagt

SEQ ID NO: 914494 - DNA, 656 bp, Homo sapiens
gttgtggctgaaaagggccaacayagaacttgggccatggcttcagatggtgcaagccccaagccttggtgttgagcctgtgggcacacagaagtcaagaattgaagtttgagaacctcctcctatatttcagaagatccctggaaagtccaggcagaagtttgctgcagtggcagtgctctcatggaaaacctctgctagggcagtgcagaaggaaaatgtggggtggaagcccccacacagagtccctattggggcaccacctagtggagctgtgagaagatggctaccatcctgcagaccccagaatgatagatccaccaacagtttgcaccatgtgcctggaaaagctgcaaacactaaacaccagcccatgaaagcagacagaagggaggctgtaccctgcaaagccacaggggcagagctgcccaagaccatgggaacccacctcttgcatcagtgtgacccggatgtgagacatggagacaacagagatcattttggagctttaagatttgactgccctgctggattttggactggcatgggccttgtagccccttcgttttggccaatttctctcttttggaatggttgtatttacccaatgtctgtacctgcattgtagctaagaaataactagcttgcttttgatt

SEQ ID NO: 914495 - DNA, 560 bp, Homo sapiens
cgagtgaggatgagagtcataagacagttaagggaaagctgagcaagctgggccttgagacgatgttaaggaaagcccttgcagatctgcaagctggagagtaatgtgttggctatactaacttgtattagtctgctcaggctaccatgacaaaataccataggctgagtggcttaaacaacagaagtttattttctcacagttctggaggttagaagtctaagatcaaagtgccatcaggtttgggatctggtgttgcagctcttcctagcatgtatattgccactgtctcactatcctcacatgatcttttctttgtgtgtgtgcacagagagatctctgagagctcttccttttcttataaggacccccatcctatctgtttatggatccagccttatgttctcatttaatcttaattaccttcatgaaggccctattctaaatacagtcacattgagggttagggyttcaacaaataaattgtagggatcaaaatccagtgtatagcactacttgaagaaggctactctggcatgaatttgcaatgaatgggagag

SEQ ID NO: 914496 - DNA, 590 bp, Homo sapiens
gcaatccaacaaaattgagtcctttttccttttctttgtaacttccttcactgtaagaaatttgactagcagtgctgataatatacttactgatttattcaaacctagtatacatataaagtagtttcagttgctgatttatgcctctgtgagaaacacatttactaactagattacagtatttgtatataggatttttgtcttttggatctaaacttattttgataatacatttatttcctctcaaatttagttttcaagatgaccttctccagtatcagctatagtgagataattatcgcataaattgacttttggtggcacaggttatcactggaacacagaaatgtgcacactggctacagataacaaagatatctgtaatatgaaggaaaaaggtttcacctatgtttgcttattcttaattggaagtatatactttgttataactttgtgcttttttgtccagtatcagctcaaaaatcaatatttctttgaagtctcagagcaacatactaaatttttacaggaagcccatactatcaacacacattttagattycagttataagattagtatatcaaaatga

SEQ ID NO: 914497 - DNA, 580 bp, Homo sapiens
gaatacctcagttgctggtgcaggattccctygccattttcattcttctcagtgggagcctccaactacagctgtttctagtcagccatcttggcccttaatcctaacatttcttgtaggacaaatctggtattgatgaaatccctcagcttttgtttgtctgggaaagtctttatttctccttcatgtttgaaggatacttttgctggatatgctattctagggtaaaagtttttgtttttttttttcctttcagcactttaaatatgtcatgtcactctcacttggcctgtaaggtttccactgaaaagtctgctgacagacgtattgaagttccattggatgttatttatttcttttctcttgctgattttaggatcctttctttatccttgacctttgggagtttgagtattaaatgccttgaggtagtcttctttgggttaaatttgcttggtgttctgtatccttctcgtacttagatattggtatctttctctaggtttgggatgtcctgtgttattatttgttcgaatcaactttctaccccatctccttctctactttctctttaaagcca

SEQ ID NO: 914498 - DNA, 545 bp, Homo sapiens
gttgtttaactgtgaacagaacacagtcagcctcgtaaacaggacaagccctgggcctgctgagataagctgggaagagaagggtggcaaccacagcttgccaagagatttcccttccagctctgacattcatccggacaagataaacaagagtaggcagcagccctcaccctctggggagagtcgctagatgtcagctctgtcccacacacaagtgctctgagagctgcagccacccctcgagatgcggccccccctccagaatttagactcaaatcacctgtggtttccagcccacagccaacattcttaaacagggtgatcttagagaaaagaacgtttgagaatcttcacatgattttctcattaaatgacaatttctttggcaaagaacaaatcaacaacctaattaagagttactttttttttttttttttttgasttgggtcaaaatactgctcagggtccctaataatcttcctctttcccaagtgttttcctcttaggaggagaatgctagatcgtttgcaacctgagagaccctc

SEQ ID NO: 914499 - DNA, 631 bp, Homo sapiens
gatattgaattttatcaaaagccttttctgtatctattgaaataatcatgtggtttttgtctgtagttctgtttatgtgatgaatcacctttattgatttgtgtatgctgaaccaaccttgcatcctagggatgaagcctacttgatcatggtggattagctttttggtgggctgctggatttggtttgcaactattttgttgaggatttttgcactgatgttcatcaaagatattggcctgaagttttctttttttattgtatatccgccaggttttagtatcaaggtgatgctggccacatagaatcagttgaagaggaactccctcctcctcaatttttgtggaatatttcagtaggaatggtaccagcacttctttgtacatctgatagaatttggctatgaatctatcaggtcctgggcttttcttgattggtaggatatttattactgattcacttttggagttcattattggtctatagggaatcagtttctttctgggtcagtcttgggagggtgtatgtgtccaggaatttatccatcttctctaggttttctagtttktgtgcgtagagttgttcatagtggtttctggtggttgtttttatttctgtggggtcagtagca

SEQ ID NO: 914500 - DNA, 520 bp, Homo sapiens
gtgaaaattgtgtgtgtctctctttttgtgacataagggccctggggatcattgattagatctattatttcattatggtgacattataattctataattcctgcttcctctatgagttagaaaaactctgataaggagaagctttccctcattaattatgttacctcaggtacagctcatacaggaaaaacataatgtgattttttaacgtagtgtattagtccgttctcacgctgctgtgaagaaatacccaagactgggtaatttataatgaaaatacgtttaattgactcatagttctgcatggctggggaggtctcaggaaacttacaatcatggtggaagggacttcttcacagggcggcaggagagagaatgagaggagcatgaaggggggaaaagtcccttataaaaccatcaaatctcatgagaactcactatcacaaaaacagcatgagggkaaccacccccatgattcaattatctccactcggtcccatccttgacaagtggggattat

SEQ ID NO: 914501 - DNA, 606 bp, Homo sapiens
attaacagaaggcacagagaaaacaaatcgaagcctctccctctcgtgcaataacatagtaaaaaaacaatccttaagccttcaatttgtactgtacaggtgggtstattagatgctatgggttgtgatagataaatctctctcctagttgtactcccaaattcccgacctcctcgcttcttcttacatagagaagagggcaatttacagggaataagcaacagttgagccaaatccacaaactcatttctccttatgtggagaagggtgcaatttacagggaataagcaacagttctgcaagatattctcctggtttaaaacctaaaatcttatgacattaccgccacctgaatttctccttcacaatccgaatcaacaactcctgggactacagtaataccgtgtaagttaagttgacttttacctaaaattactcccatagatccaatttttctacacttataacatttagcatttttgcaaccactaaagaagatgatacaagccaattttcatcctccctctcctgttcatcaccctccataggtgctgtaggtggggcaaaaaattctctcaaaccctgaaataacagaagatggcacgt

SEQ ID NO: 914502 - DNA, 632 bp, Homo sapiens
taaatgttcttaccataatgaaattttaaaatgttaagtatgtgaggtgatgagtatgttagttgcttgatttcatcattctgcmatgtcagcatgtatccaaacatcacattgcaccacataaatatactgtgcagttattatttgtcaattaaaataaggtaaaacttaaaaattgaattaaaattgttatacagtattcattatttgggcttaattacatttcactgaggtacaatggcatttcccagttacccagaacaagttattattcagtaaagggaaataagtttctgtccagcgacacagtaaatgtctgtattatccagattaaaacccaacagctcttttcttagtggttaattgttgatacttctacactgttaagagggatttgtggaagcagatggccattagtagttcagtagactagttactcttcagtagtagtgagaggtgacagcgtgctggcagccctcgcttgctctcggtgccttctcggcctcagcgcctactctggccatgcttgaggagcccttcagcccactgctgcactgtgggagcccctctctgggctggccaaggctgcagccggctccctctgcttgcggggaggtgtggagggagaggtg

SEQ ID NO: 914503 - DNA, 698 bp, Homo sapiens
aggctctgaacagacagctgctctcgttgttctctcaaccccaccctccatgcctgaaggtgaccctgtggcaaatgcccttatggggaggtggcaggcttggccagaaactccaggaaaccctgggccttagcaggacacccagaggactgtcttgggagtggtggaggtgagggttggccagtgtcagcccagacctgtttagaacactaaacaatactataataaacaaatgaccaagcgcagaaagcatcacgtaaaggtgcaagtgatgaggacaagctggccaagagtcatcctgggctcggacatgtctggggatggatcagcaggaacctggcagcaggaaccatattacttatgggtgctcatgttcagtattacgacagggaaccttgttacctgagtcctggtgaccatctcaccccactgtgaatccagcacccctagaatagccatgaagcctggcagatacagcaggtgtccccatggtgtttactgctgggtgagggagggaaggtcttcaaacagagctttacatatgcctcctagttagacaggaaatggrgagagattcccagagaagggaaagagagggaagtcccttaccaggtgtttgtgagcagaatggtcatctccaaagggtaggagttagttctcctctgtgtctcccaccttcctgggacagctgggagtcc

SEQ ID NO: 914504 - DNA, 390 bp, Homo sapiens
attcagttcttgtttacttatgcaaatttctgcagccagcgtgaatttctcctcagaaaatgggtttttctgttctttcacattatcaggctgcaaatttttcaaacatttttgctctctttcccttttaaaactgaatgcctttaacagcactcaagtcaacttttgaatattttgctgcatagaaatttctcccaccagatatgctaaatcatctctctcaatttcaaagttccacatatctctagggcaggggcaaaatgctgccaatctctttgctaaaacataacaagtgtcacatttgctccagttcccaamaagctccttatttccatctgggaccacctcagcctggactttattgttcatattactatcagcattttgggc

SEQ ID NO: 914505 - DNA, 568 bp, Homo sapiens
ttggatcatgagcataaggagggagaacacagactgagcccagcattctcactggattgacaagatgggggaggaaattaaaggggttgagagggctggacgttgtgggacagagttctgggaaaggagtctyatggtgaaagagcactacagatgagtacagaaatacccttgaggcattgctgaatactatcccatcctacatagagtaggtagatttttaaaaggctgggcaagggatggttaagtggaacactgctcagagctcacacaaggtaaaaggatgtccaaatcaccaccagacccactggagaatccttaattctcattcactgaggcttttagcagaaccccagaatagtcacaccttgtagaagagcacaactttctctggagtgaaagctgcttcatgcccacactagtgaaatgtgcaattagtctgcaaaggggacacagaagattttcagtaaaaatttttcactgtaagattttttttaatttctcatccagttctttatacaattttgaggaaaataattaaaattactttcattaattaaacactagt

SEQ ID NO: 914506 - DNA, 671 bp, Homo sapiens
actttccaatatacatagaagagatgcacatacagggttttaaaattttaatttggatcaatttatgttgacagttattggtttttacccctttaagaataygtgttcacaatctttctatgtcagtttccatggctctcattaacttaatagccacacttcatagaaaatatcattaactattatttaattgttttctgttaatggaaaattagagttttcctcactttttatatcaattaaatacgctgttatcttacacatctttatacatatcttttggctcacatggaaaagtcttgctaaaaggtatagttctagaatatgctgagatttactccaaactgtggagatggtggaattggaatttttggagttgcaaaaattaatgccaaattaaaataccaccgaatacaggacagcccctactactccctttcttcaccattctgacctttctctgacctccagatttttctgtctgttgcatgttttcacttgtgtgtgctacgcagcttctgttactttgagattctgttcttccttttgctacttgtgagctgcattccatcacagcctttcccacggaggaccgccatactgagtgtcttgataatgctgccttccacacacagcacactctttatttggtatatagagcatcctttggg

SEQ ID NO: 914507 - DNA, 562 bp, Homo sapiens
tgccggactgcaaattttccaaacttttatgctgtttctcttttaaaacagaatgcctttaacagcacccaaatcacctcttgaatgctttgctgcttagaaattycttctgccagataccctaaatcatctctctcaagtttaaagttccacaaatctctagggcagaggcaaaatgctgccagtccctttgttaaaacataacaagtgtcatctttgctcaagtttccaacaagttcttcatctccatctgagaccacctcagcctggaccttactgttcatgtcactatcagcattttggtcaacgccattcaacatgtccctagggagttccaaaccttctcacattatcttgttttcttctgagccctccaaactgttccaacttctgcatgttacccagttccaaagtagcttccatattttttaatatcttttttttttttttttttttgagatggactctcgctctgtcacccaggctggagtgcagtggtacgatctcggctcactgcaagctccacctcccgggttcataccattctcctgcctcagcctcc

SEQ ID NO: 914508 - DNA, 616 bp, Homo sapiens
  misc_feature 234: n = A,T,C or G
taaaatccaggttttgtaaaaactctgcaaggttacctttgcaagaacactcccactctctctgtctgatcaccttggataactgacatgttcctcagcctgcagcataacccgaatgatgcctgatcacccgaacctgccttcaacaagaatcctgtaggtcagtttagccagaatccttcttacccctaatgtttccttttaataatttttttatctattgactcccccacnccaatcttgctaggcggctatcaatcaattcccacttgttcttgctgtatttgaatttgagcccaaaatattctcccactgcaaaatcccattgcagaggtccctgtaaccattgtagtggtcctggaaaatagtctgccttcctgtgctttaacaaaagtcattgggtttttttaatgtagttcccccaggagaacatgctaatctgtagtatgccagagctaaagtattaaccaataggtaatagaggaaaaaacaaaaacgaaacagaaaaagaaataggaccaagtaatacraagaattagttaagaggccctgcatacattttgggcatgtctacaatgtgtaaacttgaaagaggctactcttaaaaagggaaata

SEQ ID NO: 914509 - DNA, 660 bp, Homo sapiens
tagctgctttcattataatatcacattaacaattagttgtgattattgcctcctctatggtacagtttgtcatgaatccagtactactttacaatttaatattcccttaaaatagccatttttcaaggagtgaacatcagatgcgcaaatgataaaacatagatgtacacaaacatagcaagcaaatcagtgttcgaagttaagggaatctctagggtaaatttaagtgattcaatatgcccatagtacaggttgttaatcagccacggacaatacttcagacagattcaactctctgtgtattcatttagaaagattgatgtagatttctgtaagcaaagaaaaataattatgaactcataaaatttccccaaaacagttaaaaataactttggcaacaacactctgaaatgattttatatatattttacatttaacaatttttatttaccataaatgcacagtatttaaatattatgaccacgtctttccacaaagtgtttaaaaaatatattagattaaatagttcaataaataaataataatatatacaaaaattatcatctcttgtctttcaaaaactcatctttggtttatgatacagacatgatatatacctcaattaaagaaggaaattmaatttgtcatagcaacttttct

SEQ ID NO: 914510 - DNA, 637 bp, Homo sapiens
  misc_feature 612, 613: n = A,T,C or G
gttttcatagacattacattcttttactgggaatcagacaataagcaaccaaaaaaacagatatatgccagtggaggtaaatgttaagaaaaataagaatgatgagaatgccattttagacagcattatcataaaatatctatttattatatataatttcagtggagacacaaataaaatggaaagtgatccaagaaaatggctgaagaaaatactgaatgcagagggagccacaaatgcaaaggccctgtggtgggctcagcttctcatgtttcaggaatagcaaaagaccacatggtatctgaaggtgagtgagggaagcagattatgtagggcactgtgggctctgggttttagtctgaatgatataggaagcaactggaggatttcgaacaagagtgatgtgctctgtcttatatcttaacagaatctgtcatgtggactttaaactataggaagaaaagtatagatgtgtggtaacaacttacagtgctgtaaaaactaagatggtggtggcaagaactattttgattatgaatttactatcagttgcattrttcttatttttttagaatctataaacttatttttagacatttttgtccacattcnngtgattggctatactttccattgt

SEQ ID NO: 914511 - DNA, 649 bp, Homo sapiens
aaaagaaagctggagggatcatgctacctaacttcaaactatactacaaggctacggtaaccaaaacagcatggtactggtaccaaaacagatatataaaccagtggaacagaacagaggcctcagaaataacgccacacatctacaaccatctgatctttggcaaacctgacaaaaacaagcaatggggaaaggattccctatttaataaatggtgatgggaaaactggcgagccatatgcagaaaactgaaactggatcccttccttacaccttatacaaaaattaactcaagattaaaaacttaaatgtaagacccgaaaccataaaaaccctagaagaaaaccaacgcaataccatttaggacacaggcatggacaaagacttcatgactaaaacaccaaaagcaatggcaacaaaaggcaaaattgacgaatgggatctaattaaactaaacagcttctgcatagcaaaagaaactatcatcagcatgaacaggcaacctacagaatgggrgaaaaatttcgtaatctctccatctgacaaagggctaatatctacaagaacttaaacaaatatacaagaaaacaaacaaccccatcaaaaagtgggtgaaggatatgaacagacacttctcaaaggaagtcat

SEQ ID NO: 914512 - DNA, 600 bp, Homo sapiens
gaaaagaggtttgactagaacccttgtaggaaaagaaagcgggaacataatctcaatatagaaataatctaaagcaaggawcttttgttttggcttgggcaatttgagaggatataatatttgctgggtcagggctatattcagaagtgaccattaataatgctgacgtgacccttgaaagccaactacacttctctagcaactgtattcccaacaagggatatggggagaaagtcattgcccccattttatgggtttaaaaactgacacctctagaaaggcagtagataagacagccacttggtgacagagccaccctgaagcctgtgagggtcactgcaaccccctcccctccaatccctccctgggtaggtcagctcacatttcagctccggcccatccacttccactttgtttcgaagtctcggctgcccgcttgggttcttggtggccccaaggaactcatagagcaagttcttctcggctggacatgtaggtttcttgggcggcagggtcagtgatgcggtgcccactgcgtcacagcaaccctcctcaccacaggcgtccttctggctctggggccactggctgagaaagagg

SEQ ID NO: 914513 - DNA, 603 bp, Homo sapiens
ttgcctcatgaaattctcccaagagtcctggcaggtaggtgctaaggtcatccccatatgtaatgagcagcctgaggttaagtggtgctatttttgtctgtagttcctgtagttcctaactcctaaaatccttgggatctcccaagtgctgtctttcttttgtgtgataggttcaaagtggggctgatcactggaaagaataaggcaggattagagggttgggacttaacagctccactcctgaacctccgggaaagggacaggggctgaaggttaagttgatcaccaatggccaatggcttaattaatcatgcctacgtaatgaagcttccctaaaaacccaagaggacggggtccagagagcttccagagagcggaacacgtggagattcctggaggtttgtgtgcccaggaagggcatggaagctccaagcccctccccctacaccttgccctacacacctcttcatctaacgttcatctgtatcctttgtatatcctttataacaaactggtaaacgtatgtgtttccctgacttctgtgagctactccagccaattaatcaaacttaaaggrggggggggttgtgggaaccccaactt

SEQ ID NO: 914514 - DNA, 649 bp, Homo sapiens
gttttcatcattatatatcttgaagatatttctatattaatgaaacacaagcatcctcaatctttttaaactgctgcgtatattttccagtgcatatatgtaccacaatttatttaactggtcttttattcaagggtattgagattgtttcagtgctacaataaatatcctttcatatattttattttacacctggacaattatatctttagaattctgtttccatcatctattgctgtataacaaactaccccaaaacttagtactaattttaaactaacaatcatggcagtatctcataatttggctcatatctcataatggctgcatggcccaccatggctcaatcacacagctagcaccctcacaggtaaagtaggaagactatactcaacaggaacaagtacccagagatatctcacccggcctctccagcatggtcatctcagggttcttgaacttcttacatggagtctcagagcttctaaaaaggaattaactcacctcagctctggtttagacaaacaggaccttacagtctagatagtgtcatctgtatcacgtgcaaatacagacgatactcttcagtgaagatacctgagtatgrctcttctcaacctgaagatttgtgaactaaaaacaaaagcaa

SEQ ID NO: 914515 - DNA, 607 bp, Homo sapiens
aatgaatttacagtttcacattaatatatatgatgatgatgaagtctgcttttatgagccatttttcttcctatggagaaatggaagagtaatttactgtgtttggccaggactkcccaaacttagtaccaggcaacgcctgatagaaacttggatcacagggggcacacaaatgtcataggctctagggctgaaccaaacaaggttctttcttgttctatgattccaaaagattctctgtttgagagaaaagggcaagattaggcttcagagaaaagagcccgtggttccagagtaaggaatcaagcagtttatcagtctttcaagcaagagaaaagtatacctcacagatatagaatggtcaaccaatagaaaaactaagatggaacaaggtatagcattaaagaggaaatctctgaaggtctcaataccacttatacactacagtatcctttttacagataacgtgtatcaatcccatagaggagaaagggaaatattaaaggaatacaaagggaccagacaaggttagatctgggaaagtcctggaactccatggaagtataattatgcaccagcagatgattaaatacaagtatgaaacgtg

SEQ ID NO: 914516 - DNA, 595 bp, Homo sapiens
agctatttatcctgatattctccctccctgcaccccacctacrggcccctgtgtgtgttgttcccctctctgtgtccatgtgttctcattgttcagttcccacttatgagtgaaaacatgcggtgtttggttttctgttcctgtgttagtttgctgaggatgatgtcttccagcttcatccagatccctgcaaaggacttgatctcattcctttttatggctgcatagtattccatgattatatgtacatttttccttatccagtctatagttgatgggcatttgggttgattccatgtctttgctattgtgaatagtgctgtaataaacatacatatgcatgtatctttatagtagaatgatttatattccttcgggtatatacccagtaatgggattgctgggtcaaatggtatttgtggttctacatccttgaggaattgccacaagtcatgccgaatggttgaactaatttacattcctaccaacagtgtaaaagcattcctatttctctacagcctcgccagcatctattgtttcttgattttttaatagccaccattctgactggtgtgagatggtatctcactgtggt

SEQ ID NO: 914517 - DNA, 595 bp, Homo sapiens
agctatttatcctgatattctccctccctgcaccccacctacgggcccctgtgtgtgttgttcccctctctgtgtccatgtgttctcattgttcagttcccacttatgagtgaaaacatgcggtgtttggttttctgttcctgtgttagtttgctgaggatgatgtcttccagcttcatccagatccctgcaaaggacttgatctcattcctttttatggctgcatagtattccatgattatatgtacatttttccttatccagtctatagttgatgggcatttgggttgattccatgtctttgctattgtgaatagtgctgtaataaacatacatatgcatgtatctttatagtagaatgatttatattccttcgggtatatacccagtaatgggattgctgggtcaaatggtatttgtggttctacatccttgaggaattgccacaagtcatgccgaatggttgaactaatttacattcctaccaacagtgtaaaagcrttcctatttctctacagcctcgccagcatctattgtttcttgattttttaatagccaccattctgactggtgtgagatggtatctcactgtggt

SEQ ID NO: 914518 - DNA, 597 bp, Homo sapiens
gtttgctgcctatgagcaagttccagaccacagtacactgaagaggagtgtaaaacaacctaagagttttgctgaattaaagagaaagaatgttagtgtttctagayggcaagatggctaagatgtgtggtcccgagtaccagaaaacagcagctacacatacaaagcccttaagatctgcagcaggatctagtaaagtctttggcttaagattgatctgtccatgtgtaagagaatgcttcctaagcccagagaaataaccactggaaaggaacaggcatcacaatttctgaagctcatacaggactgaacaatttttggcccttaataagccagaatggaaagccatcaaaatccatggggcatgggtagagtcatcaaaatatattgccttagtggagagaataaattattactagattgaagacatcattgtacatttcttaacaaagcttaaaggcttcaaaaggatttaactaaatccaagcaactgaactgcaaaccataacaaaaatccaacaatgtataaagtaacgtaacaaacttgaacataatgtaagagtctggtatcaaaaatcattaggcattcaaaaaaaa

SEQ ID NO: 914519 - DNA, 585 bp, Homo sapiens
tattttataggtacatatatgcatatatttaacaaaaaaaagtcttttaggratgcatctattaaagaaagcagggtagattacaatgtctcagaagaggggatgcatgcaatggaaacagcagcattctggaaccagaataagaatcagataacctgggtttgaatcctgacaccaccttttagtactggtatgattttgaataaacagttttatgggtttgttcacagtttcttcaactgcgacctgtttaaaataatgtttgtcatgttgcaaaggttacataaaaattttaaatgcctggtactcctatcagagactctaagaaaaaaaaaatctctactaggataactttgcttcccctgagaaactgtgatacttctttttttaagagaagaattatgtagccatgcttttcttccattttgcttcacctgctaaaaaattcagagccaatttggggctcaactgtaagaactgggctgaccctgatactctgtgaatgtgtgttcttcctttccctggtattgaatttccagcttcatttaaaatttccctgatctttattttaattaccttttttaa

SEQ ID NO: 914520 - DNA, 564 bp, Homo sapiens
agcatctgcttggaatttctttatttcttgccctgctttcacagaacacctgctagagaagtgcaaataattgcaagatcatttgaaacatgaacatgaacttatctttacrtctggtatactaaccctaagtctctatcataaaggccaaacagagttgagccacaggagattttcttcctggccagtactaagaaaagcaaccatggtgctttgcatccaagggacaaggacggtcaggtttaaaacatttgtttctattgttgtcactgatgggctgggagctctctgcagctccactgattggatggagaaggaggaagccattctccatgcttgaccattccgccctgcccagtttcttaggagatgaaaatgataacatgctcgaggtacagatacatcctcatgtctcacaaaccagatgcccattcatttgttttgaacatagagtatgtgacatatcagtcagattcgactagatgcaccttggaacaaacatccttcaaatcccggtggcttcaaacaacagattgctttctcacttgcgtgtcatgtttttca

SEQ ID NO: 914521 - DNA, 599 bp, Homo sapiens
agtctggttggattggagagaggcccagaagcagagctataggttaaaagcccattctcatagttcaggtgggaaaaaaaaagtgcaaaattacaggcaggagaagagatgacaggaaagaaaaatatgaggaagttataattgataagacatagaaaccccttggaattgtctgagaacgagaaagatatgagaaatcttatatctttcttgttaaaatagaaaatagagaaaattccaactaaattaacctttaacaaagttttttaaatttacctgagtaatttactgggtgctgggaatacagaagtaaagggcatagccccagcattcaaataacatgctgagtcttacggagaacatgacactaagctcaacaagggttttgcgtgttagcaatatgtgccagacttttctatccatgaccacatttacattcactctagagtgactctcaaggttcaccctgaaagtgactccagggcaagaacttttctctgttttttgtttttgttttgttttgagatacagttttactctgttgcccaggctgtagtgyggtggtgcgatctctgctcattacaatctctgtctcctgg

SEQ ID NO: 914522 - DNA, 593 bp, Homo sapiens
gtatgcttattaaattcataatgtaactctcttatttagttgttggctagaaaaccarcattcattcagcaaatagttatcaagtccaaactatatacagggcactcttctgcatactgaaatataacagtgaacaagacaaagtcctcctcccagggggcttgtatactagtggcaatgaaggagagaaacaaaaaacagatgaccaagcaattgtatgaatggtggtcaaaatgctatgagaatgagtagagcagagtatgggaagagggagagccatagaggggtgtttctattttataaaaagcatccaggtttggctagtctgggaaagtggcatttaaatatagacctgaaggagatgaggaaggtattcatgtggatatctggagaaagggcactccagacagaggaaccaccaaggaaaaaggcctggaatccaagacacacctggtgtgttccaggaacagcaagaatgcgagtaaagctgcaaaggaatgagccaaggacagtggggaaggagatgaggttagagaggaaaaataaagcaagatcatgggcgacatgataagctggggaaagaactttgaatt

SEQ ID NO: 914523 - DNA, 657 bp, Homo sapiens
aatttattgaatactgtgctaaaagtgataaacagaayggctgtatggctagtcaaagtacagtttctactgaatgcacatggctttcgcaccattgtaaagttgaaaaatcttgagttgaactaaggtacatcagggactgttggtccatttcattaactttttttgtttttttacttttaaagtaacgttattgaaggataatttacattcaacaaaatgcaccccactttaagatgagctttgacaaatgtatatacctttacagtgatcactgtattaatcatggctttttgttaaattttatgatgatttgacatcttagaggacttgctagagaggggaagatactgccccttccagggctagctaattcctatatattgcaaatgactcccctgtgagcgtgtctttcatacgcaaaccaaccaatccaaagcccatatcctcaatcacatcctttatctaactaacacaccaagccaatatttctccagcctaaatcactggagtgagatggactaccttataggccagggaccactgaaattattcaagctagccaatgttaaacagcttttcatatcctaccttgtctttcctggggaaactacaacaaaggctctgggccatgctttcccctggctccttctgcct

SEQ ID NO: 914524 - DNA, 643 bp, Homo sapiens
ttctgaaattgagacagtaataaatagcttaccaaccaaaaaaagcccaggaacagacagattcacagctgaattctaccagaggtacaaagaaaaaggggtatcattttkactgaaattattccaaaaaattgaaaaggagggactcatccccaatttattctatgaggccagcatcatcctgataccaaaacctggcagagatacaacaaaaaaaaagaaaacctcaggccgatatccttaatgaacatcaatgcaaaaaccttcaataaaatactgacaaactgaatgcagcagcacatcaaaaagcttatccactagaatcaagttggcttcatctccaggatacaaagttggttcaacatatgcaaatcaataaatgtgattcatcacataaacagaactaaagacaaaaaccacatgattatctcaatatatgcagaaaaggccttcgataaaatctggcatcccttcatgttaaaaattctcaataaactaggtattgaaggaacatacctcaaaataataagagccatatatgacaaacccacagccaatatcatactgactgggcaaaagctggaagcattccccttgaaaaacagcccaaaacaagatgtcctctctcgccactcctattcaa

SEQ ID NO: 914525 - DNA, 648 bp, Homo sapiens
taattcgtcttgcctttttattagaagtaacaataaaattaattatttagaaaggtggcaagtgcatcctttattcccaggtaattcatgatgtcttgcaatttgattttagacttcaagccacaagctgattgtttattatatacacctatgaagttactgagtatttcctgctacttgtagagtacaatttcttcacaggcatttttatttgccatgtttatcttttcagacaacacaaaccatggcttcctgggttcattttaagtgcaaaataaagtaacaatttttttctggctttcttagaatcccttccttttctgccccattttcctgtatttccataaccggatcctgttgcatctatctgtgcattcctcattatgctgtggcaaatacagctgcttcacttgtcccatacgcactattatttttcctttgcttgtgctatttcctttgtctataatactttctcttttctccttttcaaattcaaatcttacccatcttttaggactcagattaaggctgtgcagctttctcactgacttctactctgttttatcccaatagctttcagtcagcactcaaaactgaagcagttcattgtgctttgacttatattaackgtttttaatttttttcttt

SEQ ID NO: 914526 - DNA, 621 bp, Homo sapiens
attttccagtcaccagttcatttcccttgttttcctcaggaaaaaaaatcttaataaatgagtggtttgtacacactgtcttcatctcctcaactccccgtttcttctcatctgactgtttgaccttccccgtccaccacaccagtgaaatggctcttcttaaagtcaacaaagaccttaatattgtcaaatccagtgatcacctctcctgcctcatttacttgccatgccagtatgtgaccctcttaaacaagttatttccttttgcaacacttgcttcccttggtttcctcagcaacacactctctgggtttttctccttcttattttctgctctttctcaggcttcttggatagttcctcaaccacagtacagctactaagtgatggtgtgtagcagggctcctgtcctgtaactttaaataacaaactgtttgacaatgattttcaagtttatgcctggtcaccattgcccgaactctagactgtatttatctacaactgcctaagttacgtagctatgtgaatgtcaaaagtgtatcttaaactcagaatatccagaaaggaactmttgattctcaacctcctaaactgcaccatccctagaatgcatcatctgag

SEQ ID NO: 914527 - DNA, 621 bp, Homo sapiens
attttccagtcaccagttcatttcccttgttttcctcaggaaaaaaaatcttaataaatgagtggtttgtacacactgtcttcatctcctcaactccccgtttcttctcatctgactgtttgaccttccccgtccaccacaccagtgaaatggctcttcttaaagtcaacaaagaccttaatattgtcaaatccagtgatcacctctcctgcctcatttacttgccatgccagtatgtgaccctcttaaacaagttatttccttttgcaacacttgcttcccttggtttcctcagcaacacactctctgggtttttctccttcttattttctgctctttctcaggcttcttggatagttcctcaaccacagtacagctactaagtgatggtgtgtagcagggctcctgtcctgtaactttaaataacaaactgtttgacaatgattttcaagtttatgcctggtcaccattgcccgaactctagactgtatttatctacaactgcctaagttacgtagctatgtgaatgtcaaaagtgtatcttaaactcagaatatccagaaaggaactattgattctcaacctcctaaactgcaccrtccctagaatgcatcatctgag

SEQ ID NO: 914528 - DNA, 600 bp, Homo sapiens
ccaggcctgtgattttgttctctggttccttgaggttaagcaccttctgcattggaggggccaagatattcccagtcagctggcaacaacactccaatggggggtggttcacagtaaaagcatttcattgtggtggtgtcacagtgaggtctgctcataaatgtgcactggtggtaagttgtcagggtccacatgcacgtgcccatgctgctggttgcagggtggcaggatccattcacacatgcacgctggcatggacaggccagtggtggggtgatggggtctgcatgtgtgctcatgcagtgctggcagtagggtggcagtgtggaaaggtccactacacccacatatacaagcacattggtatggcagtcaagggaggctgcaggtgagtgcatgcaggccgagttgtgttgcggggttgtgggcaggcacatgctggtgggggcccatctgtagaagctctctgatggttagacagggtcttttggtgaatgagctatggaagtggtcactaggaagcaccccagttgagcatctgaggctgtgctgcaagcaggtgaggccrggcagggacttttggaaagactggtagacagg

SEQ ID NO: 914529 - DNA, 607 bp, Homo sapiens
tataatataaaatattgtgacattttgtggatagggtcagttattgctctcaacattgtgactacttgcctgtattgacaaatttgtaattgaaaaaaaaatgctgagtgtcaaacatgtaatgtctttctaaccatccacattaatggatttgtgaaatttaactatgagcttcattggatatcatattaggaaaccctgttctaggatatgaatctaggagtctagttaatagggcattcattcacctccttgaccttacaataaaatgccaaaccattttctgaatgggtgtagtaatacccacacctgtcaacaccaagagttttctttatgacagcatttgatactgtatgatgtttgctaatgtggtgggtataaaatggtattttattttttattataaatgcataatgtattgacatattaacccatatatgcctgaggttgctatttttggaatttgaaaaatcagaccttggcaatgaccttgaacagtaggatgctgagctttccaatgtaaaacaaatgtaaagaaatcttgcctccatttatgtacctytctatcccattttcaccattctgccctccgtaggaaactttcagg

SEQ ID NO: 914530 - DNA, 598 bp, Homo sapiens
gtttcaaatttatttaaccatagcaccatgaagasgggagtaagcaccatggatctttggaggccagtgtttgggaggagctggaaagggtcaagtagggcttctcaaatgtacatcaaaactcatattcataacatgtaagtgtgcagagacacttcccattggttgcttccttgtgtccttccaaccgcccatttaaaaaagggtaaacataaggttcagagtggttcaagctgggcacagtggctcatgcctgtaatcccagcactttgggaggccgaagagggcagatcacctgaggccaggagttcgagaccagcctggccaacatgatgaaaccccgtctctactaaaaaaaattagccatacgtggtggcatgcacctgtaatcccagctactcgggagactgagttgggagaattgcttgaacctgggaggtagaggctgcagtaagctgagatcgtgccaccgcactccaacctgggtgacagagcaagacttcatctaaaaaaaaaaaaaaaaaaaaggttcaaaggttcagtgagttccacaaggtcccatggctaatctgtgactgagcagagatttgacctaagt

SEQ ID NO: 914531 - DNA, 603 bp, Homo sapiens
ccaaattagcaaaaataggaaaaaggtagatggtgacccttgagcctcctaataatattaagcaacatgttcagcgacccagccaagaattacaaagtaaactttgtcttgtcctttccccactctgtaatccacagctccagacaattcaaacattgagattcctgggaactaccagatagtagcatcagttcaccaagaaatgaagctggtgaggcagtgaaaatccagggcctagaaagctgggaatgccatgacgtgggcacattgaaagacaagaggcaggcatgatcagccttgaactttaggaagatcccaggaagctgatggaagacaagatgtggagtgaatgtgaaggcaagatacaaaaataagaattttttgtaataagcttttaagaagtggtggggcctcaactaggtctaaggtggtgtgtgtacagtggaggagaagatataagaaatactcagaaggccaaataatcaggatttgggaatgggaatgggaatgggagaatggaagggtggacgattactctctgmcttctggcttagggatcactggctttagcaataactctgttaagataagaatacagggaga

SEQ ID NO: 914532 - DNA, 583 bp, Homo sapiens
ttttaagtttctggtaagtctgtgtaaatataccattttggaactgcaaggcttatgacaaaggattatctttctttttttcaactttaattttaagttcaagcttacaagtgtargtttgttacataggtaaacttgtgtcatggaggtttgttgtacagattatttcatcacccaggtattaagcctagtacccataagttgtttttcctgatcctctcccaccctccatccttcagtaggcctcagtgtgtgctgttcccctctgtgtccatgtgttctcatcattcagctcccactaatatgcggtattcagttttctgttcctgtgttagtatgctaaggatcatggcctccagctccatccatgtccctgcaaaggacataatctcattcttttttacagctgcatagtattccatggtgtgtatgcaccacattttctttatccagtctactattgatggacatttaggttgattccatgtctttgctattgtgaatagtgctgcaatgaacgtacatgtgcatgtgtctttataatagaatggtttatattcctttgggtatataccaagtaatg

SEQ ID NO: 914533 - DNA, 652 bp, Homo sapiens
gggtgatttagaacaactgtctgttaygttgcacgaagaaagatggatggactaaggctaatgggttccaaaacttgacaagaacgtttggttttggcagagattcctcagcagaaaaatggagtgcttggatggggctctgggttaaaacaattttaaggtctctggaggcactcaagtacctaaagtacttgtattacattattgtagagggggtctacttgtagttctctattgcaaagaatatcaacaagtggaaaaccttggtgttcaattaaatgcccagtgattctcaaatgaagtctgtggagactttcttctggagtaggccaggcttcactcccttgccccagaacagaggggatcccaccgaaaaatacagggcacattaaaggaatattgcagggaggaaatcacgttgttgtcatcaggggaaagcaactgcactaaatctccttcctccagccttcattcctcaaactgcctcacaggcacttgtagaaatatttctaggacatcaattaacttagttttgggaaaatcttgcagttgtaggcctgatctgagcatctgattccattttatcaagaggcttacagctgtccttctcaaggtacctctaattaaagatgagccaagggggcagactaga

SEQ ID NO: 914534 - DNA, 652 bp, Homo sapiens
gggtgatttagaacaactgtctgttatgttgcacgaagaaagatggatggactaaggctaatgggttccaaaacttgacaagaacgtttggttttggcagagattcctcagcagaaaaatggagtgcttggatggggctctgggttaaaacaattttaaggtctctggaggcactcaagtacctaaagtacttgtattacattattgtagagggggtctacttgtagttctctattgcaaagaatatcaacaagtggaaaaccttggtgttcaattaaatgcccagtgattctcaaatgaagtctgtggagactttcttctggagtaggccaggcttcactcccttgccccagaacagaggggatcccaccgaaaaatacagggcacattaaaggaatattgcagggaggaaatcacgttgttgtcatcaggggaaagcaactgcactaaatctccttcctccagccttcattcctcaaactgcctcacaggcacttgtagaaatatttctaggacatcaattaacttagttttgggaaaatcttgcagttgtaggcctgatctgagcatctgattccattttatcaagaggcttacakctgtccttctcaaggtacctctaattaaagatgagccaagggggcagactaga

SEQ ID NO: 914535 - DNA, 639 bp, Homo sapiens
gttcttcacacaagaatgaaatgaacagcctttaaccttttctgtttttttgagtgaaccatccyatttttttctaccttctgacagatgataagaaatcaggtgaaagctcaatcgttcctcatgttacaatcattctaacatctagtaagaatcattcttacatctagtaataaagggaatttttttttctaaaaggactatattttaaagaatgccaatcctcttccacagtccttctagtaagtttgtacatacactgttatctaatagtagtcaattaaggaataaatcaagttgactttgaaattatattttacattactctagtatctttattcatgctacatcaatttctaaatgcagaaatgcataccattgccttctctcctgaaaaaatttatggctgtaatttgtcatcttcaatattagaataaactgttgcagatctctgtcaattgatttatcagctgatgatatttaaaatggaggcagtaacactgaaggagacaagctgaagtgaaggagaataaaagggagagtgtacaaaattcaagacgttgaactttgctttggaccgatttagaaattatgtttttgtttgaacaaggaactttaaacctggattcagcaaaacta

SEQ ID NO: 914536 - DNA, 613 bp, Homo sapiens
tgaacccagaagcaagtttggcagagcagatctgtcagctgggtattggtctgcactctcaaaatgaccctcttaggtcatgggctctgctaggctttcacagactcctatctgaattccaaggctcaaacagagagactttttactgtggataggtgcagaattgttgttgtgagggaatatgagcaggttacctcctattctgctatcttggtgacatcatccccacagaagacagttttgaaactgaaagggaatttgaaattttgtagtttaatatttccatttacatttaagatatctgaagcctaagtgggttcaatcaatttttaaaaaagttctgccgtgtgggtatgaattaggttcaatggggacatgaacgtaagtgttataccatcatgtctttaagaagcttataattgtgtagtgatgagattcaaacaaaaataactataatcagcagtacgtggtgtgggctttaattttgtatccawtcagatacaaatttgaagtccagcttctgatcttactatctgtgtgatcatggactaatttactaggttcttttagcttcaattttttcatctgtacaaacagaggtaacaatatctaa

SEQ ID NO: 914537 - DNA, 581 bp, Homo sapiens
ttaaatgtatgtagaattaaaatatatgatgacaataatgtaaatgtggtagaggtaatttgggattgttgtatgagtagtagtagtaaaggtattataaagtcttataattgtaaaaaaaagtagtcaaatactaaattatatcagggtatacgtgaggtatgatgtaatctataggtaatcactgaaagaatagtagaagtgtatataaataacaagcaattagagggtgaaatggaataataaaatatttggttgattcaaaagaaggcaagatgaaagggaactagattatagaaaatactggataaatataaagctaatggcaagattacaatttaaacctaagtatattagtaattacattaattgtagtagattatgcactccaatgaaagaatagttgagaaacccaggtgcttgatacaggaagatgttagcatttacaagaatggtccactgaagttgtaastgaccttgtagatgggcccaaggcatataagctagagcctcagcaacatttgatatactaacaagtgcactccttgttatatgtacccatatgcaaaccaaaaaaatgc

SEQ ID NO: 914538 - DNA, 331 bp, Homo sapiens
taaataatgtgtatatgtttaaatggctccccagttgaaaactgaacacattaaatgatattaaagtaaaaatgcacatttcacaatgacttggagagattcactatttaaaatttataaatatttttctaagacagaaattttaaaatcaacctgtctgctactgttgcttctatttttgcagatcaagttctctatctactacactttaggttttagtatggcactattttaaactctatgtcatataaaaaattccagaaaacaaaaagaaatcyataaaatgactctttttccagactgtcagaagcaaacttagaaaaaaagtcat

SEQ ID NO: 914539 - DNA, 608 bp, Homo sapiens
ctacatggcaactgaacaaccggctcctgaatgactactgggtaaataaagaaattaaggcagaaataattaagttctttaaaccaargagaacaaagacacaaggtaccagaatctctaggacacagctaaagcactgtttagaggaaaatttatagcattaaatgcccacaggagaaagtgagcaatatctaaaatcgacactctaacatcacaattaaaagaactagagaagcaagagcaaacaaattcaaaagctagcagaagacaagaaataactaagatcagagcagaactgaaggagatagagacacgaaaaacccttcaaaaagctggaggcatcacgctacctgacttcaaattatactacaaggctacagtaaccaaaacagcatggtactggtaccaaaacagatatatagatcaatggaacagaatggagccctcagaaataatgccgcatatctacaactatctgatctttgacaaacctgacaaaaacaagaaatggagaaaggattccctatttaataaatggtgctgggaaaactggctagccatatgtagaaagctgaaactggatcccttcattacaccttatacaaaaa

SEQ ID NO: 914540 - DNA, 618 bp, Homo sapiens
tcataaaagggaatgtgtakttcattttatcatctaccaaacatttatctgatttctgcgaagaaatttaatatgcagcaagttggtagaaagtattctacaccaatgtcaatttcaaaatctgcctttaaaacttcagtaacttctgctactcaagggaaatttattgaataaaaatagatgacaaggaatagacaacctgaaaacatgtctctttcttggatcacataagccttttataaaggatgctaataaaatgtatccataatatgtcagaacaattatttaacttgactatcaaagaactagaaactgaagtagagtaattacaattaattcagtggctgtagtttttttttttaacagggacttaaatcattaagaaattaaagttggcaataatttgttttgtactgggagccctataagaaatatctgagaaaaatgaaatctgtgaaagattaataaaaaacaagaggaaggcagttggatttacatgacttaatgtcagtaaaatacattgtcctcattgacaccagtcagatattttctagcagtgaaaataggttgtatcaactatctattaacatatgaggtaggctttaaaacaattaaatt

SEQ ID NO: 914541 - DNA, 560 bp, Homo sapiens
tccatcacaattgaaagcactagagaagcaagagcaaacacattcaaaagctagcagaaggtaagaagtaactaagatcagagcaaaactgaaggagatagagatgcaaaaaaactcttcaaaaaatctatgtatccaggagctggtttttttgaaaagatcaacaaaattgataaaccactggcaagactaacaaagaagaaaagagagaagaatcaaatagacacaataaaaaatgataaagggatatcaccactgatgccacagaaatacaaactaccatcagagaatactataaacacctctacacaaataaactagaaaatctagaagaaatggataaattcctggacacatataccctcccaagactgaaccaggaagaagttgaatccctgaatgggccaataacattctctgaaattgaggcaataattaatagcctaccaaccaaaaaaagtccaggagcagacasattcacagctgaattctaccagaagtacaaagaggaactggtaccacttcttctgaaactattccaatcaatagaaaaagaggga

SEQ ID NO: 914542 - DNA, 659 bp, Homo sapiens; identical to SEQ ID NO: 902808

SEQ ID NO: 914543 - DNA, 608 bp, Homo sapiens
ggggaaaacagtgtatacgaaaaactattcaaaattactttgtggtatatttaaaatggagttcagttttaggatcaaataattctaagtattttctagtcaaataattacctagtgaaacatatcaaagttttgtagaaaatctagtttccctggttctaacccacaacatgccaatataactccccccaatcaccaagataacacaaaatgtctccccatatttccaaaattccaaggggaaaaatccgtgtcctttgataaccactaccttagactgagttaacaaacgatagattggaaaatgccatctcccaccttgaaactcagatatattttatatttaaggctataagaaaccttcctgaaaatgaataataaatttaaagaaaacaaaaacaatgtgcaaaaattaaaaacattcctttataccaacaataggcaagcagacagccaaatcattaatgaactctcattcacaatcactaaaatgtgactgaaatacctaggaatacagctaacaagggatgtgaaggaactcttcgagaactacaaaccactgctsaaggaaataagagacaacacaaacaaatgcaaagcattacatc

SEQ ID NO: 914544 - DNA, 625 bp, Homo sapiens
tggcagatgctactttcagcttttcagcaaatgaccaaagtcaatgtcaccactgctaagtcatgcagatatcatgtacccctcagaagatgcagtgagaaaagcacttcccctcggagataattttgcttcattggttaacctcagactgattatgagaaaatattagacacaaattgagaaaaatactacaaaatacctggtcaaggctctttaaaattgttgagttcactaaaaacaaagaaagcctgagaaatcatcacagattagaggagactaaagagaccggatgactaaatgcaatgtgatctcctagattggatcttggaagaacaaagtaacaccagtgagaagcactgaaatctaaataaagtctttaggtccatttttataatgctatacattggttaagataaagacacataaatgatgttcgatgggtatgaagtttcagttatgctagtggaataaattccagagatctgccgtacgacatagtgcctgttgtgaacaacatgatatggtgcatttgaaaatttatgaagtggatagatcgcctgctacatattyttatcaacttccctcctccccccacaccccaaaaaacaatgaagacaacacaaga

SEQ ID NO: 914545 - DNA, 595 bp, Homo sapiens
aaaattagccaggcgtggtggcgggtgcctgtagtcctggctacttgggaggctgaggctggagaatcgcttgaacctgggaggtagaggttgcagtgagccaagattgtgccattgcactccagcctgtgcgacagagccagattctgtctctaagaaaagaaaagaaaagaaaaggaaagaaaaggaaagaaaaggaaagaaacacacctgtagaagaggaaatgaagagcactgaaatggtgagtatatagtaaatagactattttttccttaatttctttaaagtaagtggttgtttatataacaatgtaatgtggagtttattacatgtagaaataaaatatatacaacaattgcaaaggggatgggagagcattaagttaaaatatactatcgtaagattcttctatatcaagtggtataatattaattcaaggtaaatgtgacaacttgatgcatgttgtaatccttaaagtaaccactaaaagaataatgattaaaatattaagaatcatgcaaagagatatgcctaaatatccaaaagaggygattcatcagttgctaaaatgatgacttgatttggcaggaaagg

SEQ ID NO: 914546 - DNA, 564 bp, Homo sapiens
ctcaggtgatccgccccccttggcttcccaaagtgctgggattacaggcgtgagccactgtaccgagctcaacattcttaaaggraagaaattccaacccagaatttcatatctggcaaaactaatctttataagagaagaagaaacaggatcattctcagacaagcaaatgctgagggaattgttaccatcagacctgtcttataagagttcctgaaggaagcactaaatatagaaaggaaacaccattaccagccactacgaaaacacactgaagtacacagaccagtgacactataaagcagccacataaacaagtctgcaaaataaccagctaccatgatgacaggatcaaatccacaaatcaatactaacttttaatgtaaatggactaaatgtcccaattaaaagacacagagtggcaagttggataaggaaccaaaagtcattgttatgctgtcttcaagagattcgtctcacatgcagtgacacacacaggttcaaaataaagagatggaggaaaatttaccaagcaaatagaaagcagaaaaaaagcaggggctg

SEQ ID NO: 914547 - DNA, 668 bp, Homo sapiens
aagttggtgttcccaatggctctgccacgtggggccctttctcctccttctccagggatttagaagtggagcagcatcggcrtctgggcctcattgcagaatgaggggacaaaaggcttcttgtacgataaggagacaaaagcctccaagggacttaccacaaaacagaagcaatattttaaatgctttttagaacatttgcatgaagataatccagaagtacagtgaaaaagaaatacaaaagatttgcaatgaaatctccttcctgtttctgaccacaggccacccaggccccttccccagcgtttattacaatcagtttcttgcatttcctctcagtgataatttatgcaaaaaactacatgtatttaaatatgtgtgtgtgcatatccttttgttttacaactgataaaccagaagacaaaattctgtacctcgcttttttcaattcatcgatcttggatattgttccattaatgcttagagaactggtgctttctctttaatggtatttcacagcatggacatttgcctcatgtctagccttttgcaagtatgagtaaagctgcaataaacatcccagtacatacatttcctgcacatgaacacacacacacacaaaatcagataaaattcctagaaatagaactacttttagatggacaaga

SEQ ID NO: 914548 - DNA, 639 bp, Homo sapiens
aaatagaaaccaatgtcaagaagatctctcaagactacacaatcacattaaattaaacaacttgctcttgaataattcctgsctgaacattgaaattaaggaataaataaaaaacactttgaaattaatgaaaatatggacacaatttatcaaaatccctggaatgcagctaaaggggcgttaagaggaaagtttataaccctaaacaccttcatcaagaaattagaataatcccaaactagtcaaataactttgcacttaaaggaaccaggaaaaacagaacaaaccaacctgaaagctagcagaagaataaaaataattaaatttagagaacttcatgaaactgacatgcaaaaatccatttaaaagatcagtgaaaccaagaattggttattcaaaataataaataacattgatggaatgctagctggactaacaaaaaaaaaaaaagagagaagatccaagtaagtaaaatcataaatggcaaatataacattacagctgatccaaagaaattcaaaagatcctcagaaactactatgaatgactttatgcacataaattaaaaatctagaagaaatgaatgcattactggaaatgcacaaccttgtaagactccattatcaggaagagattgaa

SEQ ID NO: 914549 - DNA, 655 bp, Homo sapiens
gctgcaatttgagtgttattgtcatttctagttttcccatcttttcccagctrcttctgactactgtcaacattccctcctctagctgactagaaacttctcttttaaattggtgcttctggttgtggcaggccagaaaccagacacatggtcctattacaggactacataaaataaagagaaactgcctctgtgagaatttgagaaatcctctcgtaactgatgttttatgacaactacttgactagtcaagatttttacacactaccaagttccatgcaattgaacaaagaataggcaaggtattattgaagtcactacgggtacttctattacataattaatactacactgttaagtacagatttggaactttttcagcattgccttcattcactcaaaaatatttttgagcatctagtatgcaccagggagtgtcctagtattaggcatacagcaatgaacaatagagacaaactcacttaaaatttatattctaatttgagagatgacaaagataaaccagctaagtacaacaaacaaaaaaagggataatatgatagaactaggatgggggaatagcattaggtaggatggtatggttaatcagggtctgatcagaaaagaaccactaggatctaatacacatacacat

SEQ ID NO: 914550 - DNA, 655 bp, Homo sapiens
gctgcaatttgagtgttattgtcatttctagttttcccatcttttcccagctgcttctgactactgycaacattccctcctctagctgactagaaacttctcttttaaattggtgcttctggttgtggcaggccagaaaccagacacatggtcctattacaggactacataaaataaagagaaactgcctctgtgagaatttgagaaatcctctcgtaactgatgttttatgacaactacttgactagtcaagatttttacacactaccaagttccatgcaattgaacaaagaataggcaaggtattattgaagtcactacgggtacttctattacataattaatactacactgttaagtacagatttggaactttttcagcattgccttcattcactcaaaaatatttttgagcatctagtatgcaccagggagtgtcctagtattaggcatacagcaatgaacaatagagacaaactcacttaaaatttatattctaatttgagagatgacaaagataaaccagctaagtacaacaaacaaaaaaagggataatatgatagaactaggatgggggaatagcattaggtaggatggtatggttaatcagggtctgatcagaaaagaaccactaggatctaatacacatacacat

SEQ ID NO: 914551 - DNA, 567 bp, Homo sapiens
aaggaagtggtaaggtgggaagggtggctatggtcataatttgattgtgatgatggttacacagttgagtacatatgccaaagctaatccaattgaatgctttaaatatgtgttgtttcctgaatgtcaattatgtatcaataaagctattatttttagaagaagaagaaggaatccaatagatttgaatgtagagagaaaattcggagggtagggattaaaatgaggccacaaaaacttcttgctgactctgagagcagttctgctaatgaagtcagagtgaaagctagagtgccagagtaaaggagcaagaagaggctgatagatgtgtagaaggagtgtgtgtttattgctcttgtattagtctgctagggctgccataacaaaataccatggactaagaggtagaaatttattttctcccagttctggaggctggaggtctgagatcagggtgccagcatggttgttttctggtgagggctctctttctggcttgtacatggctgccttacactgtgtgttcacactaaaggayggacaggtgggaagcaagtgaaggagagc

SEQ ID NO: 914552 - DNA, 576 bp, Homo sapiens
ggctctccttcacttgcttcccacctgtccrtcctttagtgtgaacacacagtgtaaggcagccatgtacaagccagaaagagagccctcaccagaaaacaaccatgctggcaccctgatctcagacctccagcctccagaactgggagaaaataaatttctacctcttagtccatggtattttgttatggcagccctagcagactaatacaagagcaataaacacacactccttctacacatctatcagcctcttcttgctcctttactctggcactctagctttcactctgacttcattagcagaactgctctcagagtcagcaagaagtttttgtggcctcattttaatccctaccctccgaattttctctctacattcaaatctattggattccttcttcttcttctaaaaataatagctttattgatacataattgacattcaggaaacaacacatatttaaagcattcaattggattagctttggcatatgtactcaactgtgtaaccatcatcacaatcaaattatgaccatagccacccttcccaccttaccacttccttaagcaatc

SEQ ID NO: 914553 - DNA, 672 bp, Homo sapiens
ttcttggctggtgggcctctgtgyggccagcttcctagatacccctttcttccagctaagccctgcttacttcagaagttaaagccctgaagatacttcctctagttccaactattattttttgtcttattacaaaagtaatatatataacttgaataaaaattaggaaaaaaagatagacaaaaaagtatctgtactgccacaatccatgttgatgtatatttttacaatcttaaatttagaatagatgttaatgtggatctggctgtggatacagatataatatagttacaaaaatgctttctatagtgctttatgccctgcttttttatttattatgtcattaatatagttgcttgtcaatagaagttctacaagttttgttaggactacattactttctgttatattgacattctcaacagtaggtggattgaaaagtataatccactgataaagtttaggtatgttattccactagaacacagatttctgagatttttgtggctctcaggctatcaggcatacattaatatttctttgtctttaagcagaaggaacagaaaaagatactctaatacattctaaatcactatcctctaataagtaatatcagagccatattatagtaagccaaattcttggaggcaataggtaatacttaggagtaaa

SEQ ID NO: 914554 - DNA, 626 bp, Homo sapiens
ccaggactagttttccatttactttgtgaactttggcaagtcatttaattgctgttcactttgaccatctgtaaaaatcagtaacctttcattaggattaagttggaggcagttaactcactccttgtacacagattcaattcatgccaactcttttttattcttcactttaaccattctctgccttgtataaaatgctgtggaagatccgaaattgagaaagaaagagtccttgcatttaaagagattacaatgtagtgaaagacatacttcacacagtatcttaagtatggccataatagggataagacattttcttcttaactccagacctaatactaaactgtctacttggactttttcattgaatttcttcaggcatctcaaatgtgatgtatccaaagcttaactctggatttccacccactcttcatcaaaatatgcattccctgtgtaatctttcccatttccataaatagcacctctatcgactttactcaagccagaaatcagtgttacccttgacatatctatgtcctcayttcttgaatccaattcatcattgtacttacagtttcacttctaaaacatagcttaaagttgtcttctcatgcccaccttgactg

SEQ ID NO: 914555 - DNA, 576 bp, Homo sapiens
gctcaattagaaatgaaacaggagatatgtcaaccgaaaccacagaagtacaaaagataattaaaggttactatgaacacctttatgtgcacaaactagaacacctagaggagayggataaattcctggaaacatataaccctcctagattagaccagaaataaagagagactcttaacagacaaataacaagcagtaagattgaaatggtaatttgagttaccaaacaaaaaaaattccaggaccagatggattcacagatgaattttatcagacattcaaagaagaattggtaccaatcctattgacactattccacagatagagaaagaaggaatcctccctaaatcattctatgaagccagtatcaccttaataccaaaaccaggaaagaacataacagaaaaagaaaaatacagaccaagatccctgatgaacatagatacaaaaatcctcaacaaaatactagctaactgaatccaacatcaaatcaaaaagagaatccactatgatcaagtttgtttcattccagagatgcagggattgtttaacatactcaagtcaataaatgtgata

SEQ ID NO: 914556 - DNA, 614 bp, Homo sapiens
ctcatttgcctgaaagaaaattgttgccttagacttttcttttctttctccccgtactgccccctaacggctttcctttgggctagaccccagaaatgccaatgatccagcttcagtgatgcaaatgaagacctcagggatcaacagagcaatgagagaaggaacctaggtccctgaatgactctggagcagagatgccccagacatcttaccatgccccttacctcgaatggtaagaaatttacatatatgagaaataaacttctatttaagttactatatatttggaacactttgttacaacaacttagcccatactgtaacctacatttttcctctacctcttcccaaatttattattctgcctagtgcttaacatcatctaacacaaaaaatgttttccttcttttcttctcatctgtcttccttaattagaatagttcctgaaaggcaggggtttttcagttagcaataatcacctcagataaacttcactggctataatactgctactgcacaaagctgaaggcaagkgtttttgtctttgttcactgttgcattcccagcatctagaagagtgtccagttcatagtaagtgctcaacaaatatatag

SEQ ID NO: 914557 - DNA, 585 bp, Homo sapiens
tgggtctattttcaggtggaaaactcaaaactaaacaaaggattggctgggtacagtggctcacgcctgtaatcccarcactttggggaggctgagatgggcggatcacctgaggtcaggagtttcagaccagcctcgccaacatggcgaaactccatctctactaaaaatacaaaaattagccgggtgtggtgacaggcacctataatcccagctatctgggaggctgaggcaagagaactgcttgaacccgggaggcggaggttgcagtgagctgagatcactccattgcattccagcctgggcaacaaaagtgagtctctgtctcaaaaaaacaaaacaaacaaacgaaaagccccccaaaatataaaggattaaatgctaattaactaagtacaattcccattcgctcttttctaatcttgctgtcataaaacgacctaaatttccttttattcttattggcacagaagctagggccaattaagaaaagatgatgtcattcctgagaattctaggaaagttgggactacgtttctcattgtattaatttatgtataagttttcccaagaatggagtgctag

SEQ ID NO: 914558 - DNA, 628 bp, Homo sapiens
ctcagctcttagctttattcattcctttcatgctgaagcatccacagcactcctggaaacacatctcctctgccagctggactcttargagtaatttttatttgtggagaacaatgactttattatgaaatctttattctggagtattcctctaggtttatacaaatattcatttcaataaaaatttattgagcatccataaagtacaaagtatttgaggggcacaaaagtggagcacctgtcttccaggagtgtacagtcctagtggatgtctgacagacaagtagaatgaaccagaatgcaaactattagtaaaacgaaggtattaataacatgaggtgggagccaaggggaagaagctatgaattttgattggaaggaaggcttgaagaaagtttccagagaaagtaactagatgacttattatcattacttgttctgtcttcagtgggtatcatacatgatagtgtgacaggctgggtcacccaggaaccagggccttgagcccaacatttgaagggggaagagcaataggttgaccaactgttctggtttgtccaggactgagggaagttcccagcacatggaacttctagtactaagaccagaaagccctaggaaaactgcg

SEQ ID NO: 914559 - DNA, 623 bp, Homo sapiens
tgatgtgagtatacaaaagtaatgcactggcagtatagcctcataatttggagtcacatgtcctgggttcaaatctcaactatgaaatttacttgtagaataatcttggacaagctgcttgacctctctgagctttggttttcttgtctcataaatgcaagtaaaaataaaactttacaaagtcaaaaggataaagagacatacactgtaggaaaaaatagtagatgcctaatagatggtacccattcaataaattcaatggtggtggtgatgatggtgataaacaaacagcataaaatatatgtttaaatggtaggggtcccattcaatgattttcacttgggaagttgtatacttatcttaatgatattacgagctcccaactcctatttacaaatgatctttggaacagcctgagaatattggtcacccacaatgtcatcaacagcaatagctatgaataagattttgacatctttgtttagttcatattattgttatatattattgaatcattttatatagacattttatatcctattttttcacttaacktattaaaagcatgttcctgcacctttaaactttttgtatattctgtgttaacaaccacataatattct

SEQ ID NO: 914560 - DNA, 588 bp, Homo sapiens
tatctgcctaaaataatttcttagtaactcctataacaccaggagggatrgaaagagaaatgagaggtggtctttgtcctctagaaggtcacaatctgaagcaggaaaaggatattcataaaaataactgacaaaagtagactgataaattatacaagagagagagaaggtatgataaaacatggattcatactcactagaaagggtgtaagggaaggtttcttagaataactgaaattggaagtaggccatgaaggatggctgtgaccaaatattatgaggaatcggagaagaaggcagagtagaaggacattgcagagcagatggactagtttaagccaaagcaggtgattggatagctcatagtgtgcccagggataagatggggccaaaattcatgtgcagtagtgtcttagtccatttgtgttgctataaaggaatacctgaggccaggtaacttataaagaaaagaagtttatttggttcacagttctgcagggtgtacaagcagcatggcaccagcatctgcttttgatgagggcctcagatggcttccactcatggtggaatgaaagaggagccagcgtg

SEQ ID NO: 914561 - DNA, 638 bp, Homo sapiens
cataatagaatttggaggtgtgggttcaaggtccttacctcattgtggctaattgtgtccctaaagttttagtcaacaaatatatcctgaggcatttttggcttagtgcatgtctgaatccatggttgtggtacagtcatgatggaacgcaattcagtgcatgcctggagctaatgatcatggaattctacagtcttgctgtgtttgtaacacgatgtgtgtcatgcacaagaagaagggcttcatgcagactcttttacagacccacatattggtgaacagatgggtcattgacatcagacagatctagatgggttggccttgggcaaattagttatcctctctgagcctcagactcctcatctctaatggagatgacaaagacgtctatctttggactgtataaccctggaatatgacaaagcatacaaagtctgggctagcattaaaacatcagctgttattttatgtcatagagataaaaatgtcagtgactttcgaacatttattctctttatgtcagagataaggcaatgacattaatgtctcctcttactttgcaraacatttagaagatgcaggacccaaagctggagtagttggctaatgtgtgtatgaaaattctcttaccgtttaaa

SEQ ID NO: 914562 - DNA, 647 bp, Homo sapiens
ctcctttatctaaaagtacccctgaaaataaaataggtcagaataataggtcatttttcaatgacaaaatatttaataacacatagtatttatcattttagtacataacaatattcagccagtcacatcttataaattgaaatagtaagattaaaattccctgtcattaaaatttcatttctttttcttctaagtaaaaactgatgattttagtcttttggaggctgtcattttctaaatcagtatttgaataatggtagattgtggtagtgaaatgagctgtgtgaactagcagatacaatattttaccttttctggcttgtgtattacatggaattttacatgtgtttttggttcctaagagtcattaaggaaggagaggaatgtcaatggtagacatttgccacttggttttggtttgctggcatctgtattagggttctccagacagatagaaccaataggatagatatagataatagatacatagatggatggatggatggatagatacatagatagatagatagatagatagatagatagatagatagatagcatttgttaggagaattggctcgtgattatagagactgaaaagcctccagacaagccatctgyaagctggagatcctggcatggagtag

SEQ ID NO: 914563 - DNA, 677 bp, Homo sapiens
gacagaagattaaacagagagggattggatcccagggagacctagctgattttgacaggcggcattaagagagtggtyccagaaagcaaacaggaggttccctttaagagggaacatgcaatactcttctctctgcaacagagcatggctaccatgggagccagagaggaagagagcagctggtgttcattgcactggacagataggagctgaggaggatgaagactcagctatccctgtatggtacacacagcacacacagagaaacacaacagctgccacaccttgtttcttagctgggttgaatttcacatactgtggccaagggaatgcaggctttgggcccattatagactccagacatggtgtgccttctaggcctttttattttaacactgtgacataaaatgtaaatttttttgtctaggtacttttcctggtgtttagctttgctaggtacttcctaattcctctgcttgttgcctctttgctatttatctttcctaacaagaacctaaagacaaatgtggagaaagcagctttgcacctcctcctggttttcacaacaggggagaacaggtcttctctgtgtgtgcaggaaatccacggggctggtgagtttatcgagggtcatgcttacaggtacaatgaagacaatggacaagcatgttaacagg

SEQ ID NO: 914564 - DNA, 655 bp, Homo sapiens
tattccacatacattttaggactgttttttaatttctgtgaagaatatcatcagtattttgatggaggttgcattgaatctatagatcattttgagtagtccgatcattttaacaatattaattcttccaatccatgaatacaagatatctttttttttaattgtgtctttttcattttccttccttaatgttttataggtttcaatgtagagctcttctaccttgttggttaaatttattcctaaatattttgtttttgtagctattgttaatgctattgttttcttgacttgtttttcatgtaattaactgttaatgtataaaaacactattgatttttgtacattacttttgtgttctgtaatgttactgaatttgtttaaatcaaacagttttttggtggactttttatacatttttatatgtaaattttgtcatctgcaaataaaagacaatttagtttctttctttccacttttggtgcctattattttttctcttgcctaattattctggctatgaaatccattactatgttgaatagaagtggagaaagtgggcatcattttcttgttccayatctagaaggaaaaaattttaaccttttgactttcagtatggtgttagctgtgattttgttatatttggtacatt

SEQ ID NO: 914565 - DNA, 654 bp, Homo sapiens
cacaaggaaaaaaaaaatcattaactttcaggagggcagagagtaattccaaaatgattgaaattctgccgctagcacccggtgyagaatggagctaaagtaaaggatcaatatacttatgaaaatattaagacaccatgtgcttgagtaactgtgtttgtgaaactgaaaaaaattttctactctgtgtacatttgttcttatgttttgtaaaattgggatgatgtcatataatacatctctatgctcagatatgttttttacttaatattctttcatgatacttttttcatgtcactatcttgagaacccaccacagctaccgagtttccaacacttcttccagccaaaataacagaagccctcttctaagtaccaacttatgccagtatacactcggataattaattttaaaatctgcaacggtcaaaatgcattttctcttgttcagtcctcagttgtggtggaatagaagatgcctgttatcttcctaagtaaatgaaggattcatatcaagcaactcagttttcacttttctgaatactcagccctactcccatcatcccatgaccctgaataaccaatactgattgtccccttgtgattctggggacttcaaggaaggaacaagatcatatttacaaaatcaggaac

SEQ ID NO: 914566 - DNA, 601 bp, Homo sapiens
tattgcaaatgtctttaccttgctaagaacaaaaagacctattgcacactggtttttcatgatgcaatagactgtggyatatgcattgttcacttgttttgcaaatcaactctatgcagcaaagtttcccctttttagagaagactactatcttagttgatttgggtcttctggatgctgagggttccaagatcaaggatggccaacttagtttctggtatgagccctcttcctggcttgcacatagccatatttatgcagggtcctcacctagtgttgagagagagagagagcactctctgatacctcttcttataagggtgctaatcacattatgaggaccccaccctcataaactacccaccaaaggcctcgttttcaaatatcatcacactgggaggttatggcttcatcatatgaatttagataacataatccagtgtgtagcagtaattgaagctattttctaaaaactaggcgcctagttagtgttggagccaaattcaaaccagatctaccttattccaaagcccatgcacttgaatgctaagcaaaattacttccttgatttactaatttctacacatattgtttctttagc

SEQ ID NO: 914567 - DNA, 478 bp, Homo sapiens
aaagaaaaagccaccaggtaggagtcakttagttctgctaactaactaaccaaaaaccttaattgtatggccaccagcaccctagccctttgtcatgaaagctaccaataaggtggaaatttaaaatatgaaatatttcattatacatgttttattaaaccctacatgtgcagaaatgattgtccattttccttcttaacttgcttttgtaagacttattaagtagaaaatataaatctcaagctccttaaatgtgattttgaggaactgagaccaaaacaattttttgctgtggaaccagatccttgaatgcactacaggaaaatattatttgatatgaaatttttttggtacacacaatttttcaaaaatatatctctctccacaaagttaattcaaattgtagaattcttccaagtcacaaatggagttttcaaggctctgggtacttacctttgagttccacatcctttatctc

SEQ ID NO: 914568 - DNA, 655 bp, Homo sapiens
tagttttaggaaaaaaaggtattaaattttaaaatctttaaaaacaaatcaacctaattttaattacatgattgtaggacatttaaaagcggacatcagctgaaaatttatgtttcagtgaatacttaaaattttgagaatatacaacttacattttcacaaactaagtgaattgctaaaataagatgaagtctatcaaaatgtcaccataaaatatagctaccttaatatgaataaacatgaagaagaactgaatggcttcatagaatgtgataataaaaacatgagcatgagaagagtgccgtgtccctttacattgcttccaagcttcccttttgttgctcttccttctgcatatgtatattcatttataagaacataagcaggaaagaagagcctcaagaaaatcccaaaaatgatttaacattgtattcttgctgttttatatatcacaatttattttgtatggtggaaattgtcttcaatatatgaaattcaggctcataaaatgatgggctaataaaatgcaagcttttatattaaaaatagataaacatatacattataataytatcatgttagtcatttgtggaagttgtacaaaatacagcaaccctgtaaggcctataggactttaatttaaggaaaatgtaac

SEQ ID NO: 914569 - DNA, 633 bp, Homo sapiens
ttattctctatataatggagagctctggaggggttttatacagaacataatataatataaattatttaatacatgtgaaaagacttagaattgtttatgtcatgtagtaagccctctataatttcttgttattattatcatcatcttcatcagagcaatgtttattaatcctcttaaaagaatttctacctaatgttcatattctaatgtacaaaactgtgagtttgcttttggtattttcaaagcactttctttgcaaaaacaaattgcaggaaagttgctcccagttttagtctcctactctgaaagaagtctggttccaaagtcaaccacctgctttaatctccagaactcactccaagttaaaatcactcaactccagtctatcaccaaacacgaaaaatttcagtttaaaaggatctccagcatctgtctggcaccatggtcgacaaagccagagtgagccagggctcctgcttatatgaaaaggaggagtctgagtatatttgcctggtgatctttgcaaaaaatgaagagaygaccacagaggagacccagttcagggaagtggagaaatgagcaggcagctctacacagaccacaaaaagttaatcaggctttggaacaatttta

SEQ ID NO: 914570 - DNA, 590 bp, Homo sapiens
ggtactttcaaatgggatattatcatcatctctgcatcaccatttattcaccaattgtgggtgaggggcggggggagggaacaccttataagtgagaacatgcgatatttgattgtctgttcttgtgttagttcacttaggattttgatgtctttttagatattatctcaacacttacagtatgtgaatttaagtctgtcattacttgataaatacagtataaataatcttttattgcattctccagatttaagtgtcttttctgccactgtgcaggtccagctgcgacttggccctccccagacatattttgcatggataatgcatttgcattttaagattcatctgttattttgattctctcttccacagcagtttatttgatttcttgtctagtgaaatcatcctcatcagagttctttttattctagtttctgcattattttactagcaatgaaaatttgcttattgagacatcttgtcacccttargacagaaaaaaggctgtagatttttaggcagcagcagatcaatcattcttccatttaccagcatggaaaccaatttggcagagatgtaatgtgagaata

SEQ ID NO: 914571 - DNA, 590 bp, Homo sapiens
ggtactttcaaatgggatattatcatcatctctgcatcaccatttattcaccaattgtgggtgaggggcggggggagggaacaccttataagtgagaacatgcgatatttgattgtctgttcttgtgttagttcacttaggattttgatgtctttttagatattatctcaacacttacagtatgtgaatttaagtctgtcattacttgataaatacagtataaataatcttttattgcattctccagatttaagtgtcttttctgccactgtgcaggtccagctgcgacttggccctccccagacatattttgcatggataatgcatttgcattttaagattcatctgttattttgattctctcttccacagcagtttatttgatttcttgtctagtgaaatcatcctcatcagagttctttttattctagtttctgcattattttactagcaatgaaaatttgcttattgagacatcttgtcacccttaggacagaaaaaaggctgtagatttttargcagcagcagatcaatcattcttccatttaccagcatggaaaccaatttggcagagatgtaatgtgagaata

SEQ ID NO: 914572 - DNA, 630 bp, Homo sapiens
tgacttaatgaatactatcaatatatagtgctatgtaacaattgaatcagttctgtaggaatagctcacttggccataatactaccacccagaaaacagtatataacctgtgtattattatggttatacacaaagtgaattaagagagaagttatctaaaattaaaaatctgctaaactactcaggaggctaaggtgggaggatttctttgaggcccagaagtcaaggctgcagtgagccatgattgcagcactgcactctagtctgggcaacagagtgagactctgccaaaaacaaaaaagagagagagaaagagggaaaaagaaagagggagagagaagaaggaaggaaggaaggaaagaagaacggaaggaagggagggagggagggaaaactgctgatctgagaatagcagttaaagcaatatatctacaacgcctctttctctgacctgtttaaaaatataaacaaagaacatgtgtttatatgtatgtagatgtgtattttcaaattcacaaaaagacacataataccatgtgatctgactgcctgttgttacyccttacgcatacctctctttctaatcttcatcatctctttcttcaaccacatcagcctcctttctgttct

SEQ ID NO: 914573 - DNA, 565 bp, Homo sapiens
gttgcaggacacaaaataaacatacaaaaatcagtagcatatctataaactaatyatgaactatccagaaaagaaaacaatcccatttcctatagctaaaataaaataaaataaaatgcttaggaataaatttaattaagaaagtgaaagacttatacaatgaaaactataaaacattgatacaataaattgaagaagacacaaataaatggaaataaattcatgctcatggatttgaagaattaatattaaaatgtccacattggccaaaacaatctacagattcaacacaagtctaatcaaaattcaaatgacctttttcattgaaacagaaatagcaattctaaaatttgtaaggaagcaaaaaacacccttgaatagccaaagcaatctttatgaacaatagcaaagcttcacattgtctgactttaaaatatactacaaagctatagtaataaaaacaatatggtgctgacataaacacagatacatagaccaatagaacagattagagagcgcaaaaataaatccatgcatttgcagtgaattgatttttggccaagat

SEQ ID NO: 914574 - DNA, 624 bp, Homo sapiens
gtgcttaaaggactctacgacagatcccaggcttaacaggtaaacagagccataattgattaaagatgcctacactggattgaagtaggagggattgacaacttgtatgccttatagctaatgaccctgggtcctctaaggtcctgtccagccctaatattctctagtaatgttctgagtgtgtgtgtgtgtgtgtgtgtgtgtgtgtgtgtgtgtgtagacatagcctgaggggaggttagtataaccccattacaatatattagtagcgtggmttaaattttcaaaaaacaagaacaacaaccaagattatttgtatattacagtctattattaaagagttttaacagcccgtaagtacttctaacagtccataagtacttcatagtgtattatgtcctttagattattgattcgtatgtttgctttgattcatgatggctttgaaaattatattttaagttatttaccacaaatgactctctatattcaaatacttagctttcatttgtcttgacctaaaattccaatgtagagaaacgaatttctctattcacagaaatggtaacaattccaaacacgaccagtgaaattagttacaggagcaatgttgttcttccttag

SEQ ID NO: 914575 - DNA, 619 bp, Homo sapiens
acctatgagtgagaacatgtggtgtttggtttttgtccttgtgatagtttgctgagaatgatggtttccagcttcatccatgtccttacagaggacatgaactcatcattttttatggctgcatagtattccatggtgtatatttgccacattttcttaatccagtctatcattgatggacatttgggttgtttccatgtctttgctattgtgaatagtgctgcaataaacaaacgtgtgcatgtgtctttataacagcatgatttacaatcctttgggtatatacccagtaatggaatgtctgggtcaaatggtatttctacttctatatccttgaggaatcgccacactgtcttcaagaaactaccatcagagtgaacaggcaacctacagaatgggagaaaatttttgcaatctgcttatctgacaaagggctaatatccagaatctacaaagaactcaaaaaaatttataggaaaaaaacaaccccatcacaaagtgggcgaaggatatgaacagrcacttctcaaaagaagacatttatgcagccaaaacacacatgaaaaaatgctcatcatcactggtcatcagaggaatgcaaatcaaaaccacaatgaga

SEQ ID NO: 914576 - DNA, 614 bp, Homo sapiens
ctgacaggtgcttataatgctatgcaggaaaacgaatcctcctatgcctgggaaagtctgtccccagagaacctggagggctcagggctcagtgggcagggcagagaaggagggagaaagggagggagagagtgatggggttcagaatacactaccccaaaatatggcaccttggcatttgaggaacagcagaagcaggaaagtctctctgaccttctgcagccattctttcctgaagcaggccataaataattatctgaccttcctctaaagtagattataacaccctcatctttaaagtgtacaacctatacccaaaggaaaggagtatccttatctctgaagacaccgggatgcagcgaagaatccgagcaaacaggccttgctaagctccccccagtttattgccattaaatcatactccttttgtccaattatacttctccacatctgtctgctattcttcaaacttaagcataaaaatacactggtttctgttgctttgggtcttcatttttgcaggctyctgtgtcatgtaaattttatattaagcacatttgtacatttttctcttgttactctgtctgtataggtgcctcagctgagaaccttta

SEQ ID NO: 914577 - DNA, 539 bp, Homo sapiens
ctgaaatgggaggggctgcaatgaagacctctgacatgccccagagacattttctccattgtcttggggattaacatttgrttgcttgttacttatgcaaatttctgcaaccagcttgaatttctcctcagaaaatggaattttcttttctattgtatcatcaggctgtgaattttctaaaattttatgccctgcttcccttttaaacataagttccaattacacatcatctcttcatgaatgcataaaaatgcactgctttaagagcacccaagtctcgtcttgaatgctttgctgcttagacatttcttccactagataccctaaatcacctctctcaagttcaaagttcccgagatctctagggctggggcaaaatgctgcccatctctttgctaaaacataacaagagtcccctttgctccagttcccaacaagttcctcatctccatctgataccacctcagcctggacttcattatccatatcactatcagcattttggtcaaagccattcaacaagtctccaggaagttaca

SEQ ID NO: 914578 - DNA, 539 bp, Homo sapiens
ctgaaatgggaggggctgcaatgaagacctctgacatgccccagagacattttctccattgtcttggggattaacatttgattgcttgttacttatgcaaatttctgcarccagcttgaatttctcctcagaaaatggaattttcttttctattgtatcatcaggctgtgaattttctaaaattttatgccctgcttcccttttaaacataagttccaattacacatcatctcttcatgaatgcataaaaatgcactgctttaagagcacccaagtctcgtcttgaatgctttgctgcttagacatttcttccactagataccctaaatcacctctctcaagttcaaagttcccgagatctctagggctggggcaaaatgctgcccatctctttgctaaaacataacaagagtcccctttgctccagttcccaacaagttcctcatctccatctgataccacctcagcctggacttcattatccatatcactatcagcattttggtcaaagccattcaacaagtctccaggaagttaca

SEQ ID NO: 914579 - DNA, 580 bp, Homo sapiens
gcattttcaaaaacatcccttttcctgtatactgttctcaagttaatgttaggccctggagtcatgctggagctggagatgggattcacagacccattaatgaacactttgcaccaaaatagttargtcccttgctcctggcacctgtcctggtgagaaagggaagcacagttgcccgctgcctggcctcacctcctgcctcagaagtcagagaacttaggaagaaagtgcagtgagccatgtagatgcttcataagtaaactaatgagcataggctaaaatatttcattttctatttgaataaatgtatgcggtacaagggcaattttgttacatgcatagattgcctagtggttaagtcagggctctagggtacccatcacccaaattatgtacattgtacccataagtaatttttcatcatccaccccctctcactctctcacctttccaaatctccatcgtctatcattcctctctctacgtccatgtgaacacattttttaacacccacttaggagtgagaacacacgatatttgatgttctgtgtctggcttgtttcacttcggataatgactt

SEQ ID NO: 914580 - DNA, 523 bp, Homo sapiens
tggattggaagaatcactatccgtaaaatgaccatactgcccaaagcaatctataaattcaatgccattcctatcaaactaccaacatcattttttcacagaaccagaaaaaactattctaaaattcatatggagccaaaaaagaacccaaatagccaaagcaatcctaagcaaaaagaacaaagctagaggcatcacattacctaacttcaaacgatactataaggccaaagtaaccaaaacagcaggtacaggtacaaaaacagacacatagaccaaaaaacagaatagagaatccagaaataaagctacacacctacagccatctggtcttcaacaaagttgaccaaaacaagcaatggggaaaggactccctgttcaaaaactggtgctgggatagctggctagccatatgcaaaaaaaataaaaaaataaamaaataaactgaactcctaccttttaccatatacaaaaattatctcaagatgtattaaatatttaaatgtaagaactcaaactataa

SEQ ID NO: 914581 - DNA, 588 bp, Homo sapiens
aattcacacataacagtattaactttaaatgtaaatgggctaaatgcgccaattaaaagacacagactggtaaattggataaagagtgaagaaccatcagtgtgctgtattcaggggacccatctcatgtgcagagacacacataggctcaaaataaagggatggaggaagatctaccaagcaaatggaaaacaaacaaacaaaaaagcaggggttgccatcctagtctctgatagaacagactttaagccaacaaagatcaaaagagacaaagaaggccattacataatggtaaagggatcaattcaacgacaagagctaactattctaaatatgtatgcacccaatacaggagcacccagattcataaagcaagtctttagagacctacaaagagacttaaactcccacacaataataatgggagactttaacaccccaccatcaacattagacagattaacgagacagaaagttaacaaggatatccaggaattgagctcagttctgcaccaastggacctaatagacatctacagaactctccaccccaaatcaagagaatatacattcttctcagcaccacac

SEQ ID NO: 914582 - DNA, 644 bp, Homo sapiens
cagattgcacattgtcaccacttcctaaatagctggccttattaaaacactacaggctttggtaaaaatatctcttgctttggataatttaataactgtggagggggaagatctggttttgtttctacaaaatcctatctttgggtttaccacccaaaagaaagaaatcaatttaaaacatgtgtttggagagtgtactatttgcttaataccatgcttgacagagagggagatggagaaaagcttacaaatgagatggcagagatcagcagcactctcaaaatgatataatgagagtttcagcaatggggttactcaaagggtcagaagaaggagaaactcctagatgctagtctcctcaccaagcctttgttcactgttgttgcttttagttatcggctgtaccctcaactgttctaatgaaaccaagtcatcacaatctatagtgggaaaatactttccatcagctcagttgcattcttatcctgtcatcttgatatttattggtttcccaccaagaaatcaaaggtggtcagaatgcccagttacgtccctgctgtatcttgatttagcagcaatggctgttgaaggccggagacccartgatgtaggaagaaaggctgatcctttccctgccagctctg

SEQ ID NO: 914583 - DNA, 614 bp, Homo sapiens
agttacgtccctgctgtatcttgatttagcagcaatggctgttgaaggccggagacccaatgatgtaggaagaaaggctgatcctttccctgccagctctgtgcccaagttaatgattccatcatgtgggtttgtttcctgggagaaaatattccttttggaaggggagggaggatgagtgcagtctgacttcatggcagagcattttgcagtatgcttttttttcccttactgctaattcctgacctcagcagataaatagaaatgagactcaggcaagttaaaaataattttaagctcttctcccagaggcaaatgctatataacaggagacccaaacagaacacttcggcccgagtcctagccatgatctgggttccacaatatgctagttaaaattcttatcatcgcttgatgacaatcagtccctgggaattctggaatggttgcaaatccgccatttcctgcaattcatcaaaacctggcctctaaatggttatgactttcttcagaaatatcatcatacatcacagtcatgggagycccctgtgttcctcttccctactatgactgggtcacctttcagaatgcttatttttaccagaggaaaatgt

SEQ ID NO: 914584 - DNA, 611 bp, Homo sapiens
tcttctttgttaagactgaatagtatttcattatgtatatataccacatttgctttatttactcatcctttggtggacacttatatcgactttctgtcttggckattgtgaatgctgctgcaaagaacatgggagtccagagatctcttcaacatacaaatttcatttcctttgcatatatattcactagttggattgctatgtcatgtgattgttctatctttaattttttgaggaagcaccagagtgtttttcataatgggctgtgctaatttacattcctacaaacagtgtgcaagaattctcttttctatacaacctctccaacacttgttattccttgtcttttttaacaatagccattttaacaggtgtgaggtcatatttcattgtggttttgatttacatttacctgatgattagtgatgttgagtatgtttttatgtaactgctagccctttgtatgtgttcttttgacatccaagtccttggcccattttttaatcaggttatttgttttcttgttattgaaatgtttgagtaccttatagattttggctatgaatcccttatcccatgtatggcttgcatatattttttcccattcatta

SEQ ID NO: 914585 - DNA, 556 bp, Homo sapiens
ctcacatgcaatttcaggaggttcatagacactgccccactccaagcccatccactgacagtgaaaccactgtcaagtgtgacacactgagatatggactacaaggagaacctggttaagggggatattagcgagttcacttttggacagttgaatttgaggtgtttcaaaaaaaaattttttttttgagacagagtttcgcccttgtcacccaggctagagtgcaatggtgctatctcatctcactgcaacctccacctcctaggttcaagtgattctcctgcctcagtctcccaatagctgggattacaggtatgcgccaccatgcctggctaatttttttgtattattagtagagacagggttttgccatgttggccaggctggttttgaactcctgacctcaggtgatccacccgccttggcctcccaaagtgctgggattacaggtgtgagctaccgtgcccgcccgaggtgtttcaaatttgacayccaagtggaaatgtctagcaggcaggtgggtgtaccggtgtggagtttaggtgaaaagggtagg

SEQ ID NO: 914586 - DNA, 637 bp, Homo sapiens
agaagtctgaaatcaagatacgggcggggccmctttctctaaaccttcagagaggaatcctttcttgcttcttcctagcgtccggtggctcccaagaatccttggagctcctgggcctgtggctgcatcactccaacctctgcctctgtcttcgcatagccttctttgtgtatctttgtacccaaacctgccttttttttctttatagacaccacactccaatccagtatgacttcatcttaacttgattgcatctgcaaagaccctatttccaattatggtcacattcacaggggactaggacttcagcctatctttctggggcacacaattcaacttactagcatgatattctatgtagggcgacagaaaatccagactcagaccccacttctaccattttgtggccttgcatactggcttctcaacttaaaggagaaagtaagtaggtaattaagctttgttaagtgactgaaatgtgatggaagggtattgtgaagttggtggtatctttctattttacagataaggagattgatccgggaaggggcacaaaggctacccaagcatacggctggtaagaatggtttcctggaacatgagtggtgatgggtttcagtccatctggatttcaagt

SEQ ID NO: 914587 - DNA, 588 bp, Homo sapiens
gatcattcctttccatctggctcattgttccgattggccatatcaacccctgattgcatgacactgggtgatgagctcttacaggtgctcaktttttctacttataacttaaatatcttattcaatatatttcatatataatattacacaatatcttttttttttttttgagacaggatctcgctatgtcgcccagactggagtgaagtggtgtgaatatagctcactgcaactccaactactgagctcaagtgatcctcccagctcagcctcccaagtagctgggactacaggcatgcaccaccacacccggctaatttttgtattttttttttgtagagacagagtttcgccacgttgcccaggctagtctagaactcccaggctcaagcaatctgcccaccttggcctcccaaagtgctaggattacaggcgtgagccaccacacctgcctgaggttgaacctttgaataggctaagtactcttctaagcaaagtccatttaacctgagaccactttacactggacgtgactgagcgtcccctccttttcacctcataggaatgaagctccaaagaaacatggac

SEQ ID NO: 914588 - DNA, 599 bp, Homo sapiens
ctgagtctatcttgtacaaagggcaaattatttcagaagtctaagagtgtttatgtcctcagagagagctgtgggactacaacacattctcccataaaaatgagtcatcaagatattttgtggaacttagatttggttttattcgtgggagattcaccaaattgggttgattagtgcttgttcattaatttgtgctgtccttgcattttcttagcaagctcctatttaaccagaagtgttttccatttgatgggaataaatccagccaccaagagtgaattgaatttctggctgaccagtagtgaagtttaggtagaaaccaaaactgggaaatgaccattgaaagatagtcactgatcaaaaagaacctatcaactgaaacttgccatgaactgacaatgtggtcagtaatttaatgttgagtaatttaatacacttaaagccagaagatttgaatttctctctaaacatgttagtagcaggcaaatcatttagcctcttcccctggtctgtgaaagctctgtttgattctagtgaatcagagagaaagagcgactgacactggattygcagagcaaagagagataggatgctgacaa

SEQ ID NO: 914589 - DNA, 650 bp, Homo sapiens
cgaacctgtaatctcacctactcgggaagctgaggcagagaattgcttgaacccaggaggcagaggttgcagtaagccgagatcgcgccactgcattccagsctgggtgacagaatgagacttttctcaggaaaaaaaaaaaaagaaaaaaagaaaagaaaacggagtctggaaaggtgaagtggcttggggtcctatacaggataaaaagcacagtttggaaacaaattacccaagacattaccactatgagactttgggaaaggttgcttaacttccgtcaacattagttcttcacctgtgaaaaaggaaaaaaaaggatgtctacattgcagactggttgtaggaaatcagttattcagtcaatagtctttcctgggcaccttgtgccaggcactgcatttggtgctgaggatagagtggagaacaaaagacatacagctcatgaccacaagaagagtagtttcaggatgagaactaaatgaggtagataggtaatagggtgcgaggcttagcttttttcctctggctcattgtgttcgctcagttattttcccaaaggtgggggccttattgtagtactcttttgtttgtttgtttgtttgtttgtgacagtttcacttttattgcccaggctggagtgcaatggc

SEQ ID NO: 914590 - DNA, 605 bp, Homo sapiens
gcgagagagacttgaaaatgctaaatttggctttcaatggggaggaagggcccatgagccaaggaatacaagtgatctctagaagctagaaaaggcagagttggaatcgctcctggggtttccagaaagaacatagccctgttgaccaattattttttaggacttttgaactccaggacatgaaaaatattaatttgtattattttaaatcactacatttgtgttaatttgtcatagtagcaatggaaaactaatacggaaaatatgggtggcttaaatatgaaataaattataatagataaatgttagaaaataacttcacttttaaatgatactatctgattataacaagtaagtaattgaattaattgctatagataatacttatgtcccctcaaaatcatatgtcaaaacctaattctcccaaaagtggtggtatttacaggtgaggtctttgagaggtgataagatcataaggtcagagccctcatgtatggaattagtgcctttataaagacttcaggagcttggcacagtgacccaygccaataataccagggttttgggaggccaaggcaggaggatcacttgaggccaggagttta

SEQ ID NO: 914591 - DNA, 611 bp, Homo sapiens
gctcaaatctcctctacactctcaaaactcctaaactaatgggtgaattgcttaaatttcaacccactcagggatctaccaatattgaagtctttatatttctccttatgattttctagctccatatacatagagaagaataagcagatttgtaaagtttaggttgcattgtatctatcagataaatatgtcttgtgtttccctcaaccttgctatccctccaaaaaaaaaaaaaaaaaaaaaaaagaaaaggcatagtttttacttcttaaatgtctattgtctgaggaaggtcagtctttataatctagccatctgaatgcagtaactatcaagaaacagaaaaatcacataatcttttaaaatatcttcatactagactttacgttacactgaatctttcaatttgacttctgcatttttaaaataggtattttatttttgctaaaaaataattcagttttcaggactctaagggcttctccaggtttagagttgacttctctgggttttatgattagacctagatatcttwaaatgaatgttttaattttttggccatagataaaactactacattaatatttaaggtgatcgaagggtatgtgaaa

SEQ ID NO: 914592 - DNA, 585 bp, Homo sapiens
tctcttttttttttcttttaaatttcatcaagtgactagttttgagctcatgttcatggtttgggtattgaacatttcatcattttattatgtgaataatgtatcctataaaatcaggttctgtttttattcttataacatcagattcctgctgttccatgaattaatattaactgtgtttctgagaatatgatgataaaatgaaagaataatgatcattgactgatgagtttattggaggtggtttgtttcgcttagttttagattgtcagcatctactctgctaaaggcattggatttctatttgtaatacattagacttatctttaaaacaaatgaacactggagactaccaatgccatagatgagctcctgcatgctaatctttacaccacattttgcctacaatttattccttctctgacacatttaaacaactttctcaactccagatgatttggttcatgactttcttgagatataaatgtgttggccytaacatatgatgtatccctgcaaccaaggagacaaaaatgttctgtaatgttccatatctaattccaggaaaaagccttttcggttgtc

SEQ ID NO: 914593 - DNA, 649 bp, Homo sapiens
tgaaacagatgaggaaccagccctgcccccttgacctgtggtaagagtggcagctctgatgctctccaaattgcctttgggattattcttcccttttcttgaaagataaagcatgttcacagccaaatggccycatcatcctatcctgacaatgtacgaagcccaatatcctgtttttttttttttttgctttttaataattttttctaattttgttactttaatttccccatagcaccttggcgatggcccaacatccttctttcagtcactcctgtttatttctgccccctttagtcccagctggcaacatttctcttggtataatcccatccccattcccggcttctgttgaaatagctgatcaaatccttcattcacatccatactatctccttatcaaatagtgttcagccacacccttagtgttcttttcagaataatctttctcattctttgcaatatggatagcctaagaatttgccaaatcttcaagttctggttcctttttgcataggaattccttcttaaattcatttctcttttctccattttactagaagcagtcaggaagaaccaaggtactccttcaatactttgcttagacatttcctcagctaaatatcaacttcactgcctgcactggaac

SEQ ID NO: 914594 - DNA, 569 bp, Homo sapiens
gccattttcatgatattgattattcctatccatgagcatggaatgtttttccatttgttgtgtcctctcttatttccttgagcagtggtttgtagttctcctcaaagaggtccttcacatcccttgtaagttgtatttctaggtattttattctctttgtagcaattgtgaatgggagttcactcatgatttggctctctattttggttgtataggaatgcttgtgatttttgcacattgattttgtgtcctgagactttgctgaagttgcttatcagcttaaggagtttttgggctgagacaatggggttttctaaatatgcaatcatgtgatctgcaaacagatacaatttgacttgctctcttcctaattgaatatgctttatttccttctcctgcctaattgccctggccagaacttgccaacactatcgttgaataggagtggtgagagagggcatccytgtcttgtgccagttttcaaagggatgcttcccgtttttgcccattcagtatgatattggctgtgggtttgtcataggatagctcttattattttgagatacgtc

SEQ ID NO: 914595 - DNA, 495 bp, Homo sapiens
gcctccccagtagctgggactacaggcatgcaccaccatgaccagataatttttgtattttttttttttttttttttttttttttagtaaagatggggtcttgcttgccaagctggtctcaaactcctgggctcaagtgatccacctgcctcaccttcccaaaatgctgggattacagacatgagcttaaatacacacaagagaagtagggtggccaagtggaagaagttcccagtttgaaaaccagctcttccattaaccagctacttgaccttgtcaagtctcaaaatgcaaatcaatttcatcttacctgccagcccctagaggtaggcagggacttcctagagcactgctttagagctgggcttaggagaaaagagcaccttgagcaatkcctgtggatgcagagagaggagtgcaagtacaaatgattttgctgactctgaacaagtcaccccaccctctgagccctgaggtcttccctggaggctccct

SEQ ID NO: 914596 - DNA, 580 bp, Homo sapiens
cttctcaactgcagaggttcttcccttttgtcctaacacactgggagggaactctgcactgatgacaagtaaccatgaacgtgattcctttccctcctgcrgtggtcatcttcagcaactctagccgtgaagccagcctgcctgtctctttctttgcttgtgttgggtcatattactgaagaaagaataatagcaacactgttacccgcctgtgtaccagtctttgttcacgggaggttttaggatctctatgacacacgcaggcagagcatgccaccgtcacttaggaggggaagccagaggtcttggaagtcacacactagcagggaagagacctaggttttcccatggctcactgcagcctccctgaactctttttccacagatgctaggctgacactcccttgtccccctctagagctctgtgaacaggaagaggttgtcttctagctgtgtagaggctgggggaacagcccacagtgcaagccacgactacctgctctgaagtggaggggctgtggagcagacagcagacttctcccagctgagcagagctgggcaaaacagatcgatctaaacc

SEQ ID NO: 914597 - DNA, 655 bp, Homo sapiens
ccttttaaaggaaaattgagattggttcacagaaagtaagatcrgtaaagggaataatttaaaagaagagagcgacacaagtgaaaaaagatcctgaaggatggtaaacattaaagagtacagttaaaggaagggattctgtaggatcctgcctgaccaaattccttttccctttttgaggcctacagcagccaccaaatctttgaactaccacttccacatcaccacttctctgtccataaacctaccttatctaagaaaaacttagatgtggtcagcatactaattaatgcaatgtattaagtgagtgaatcaatttttaaaaaacttatttggaataaaggagccatgagttgttcttcccgcctgaaatggcaatttgcccaatatccacttattaaaatcccatccatctttcaatgtacaaaccaaatctcacctcctcaaagacaccctctccaccccatctccacctctgttggaataaacttcttgcctatacttacataatacctttgacctactattatagctacttaaatgtctttcttttaatttgccaaaggcataaccccggtaattgtgctctatacaataagtattcaataattgccagtaaaagaacacagatttaagaaattaaaatatgtacaaa

SEQ ID NO: 914598 - DNA, 669 bp, Homo sapiens
gatggctgagctagtatccaaggtgcaaggcaaagaactctttactcttcactctcctctctttaagcagaagttaggagytacattcattgctgtgagctgcgctacctgtggttaggggaggagtgttgcaagcactcccttagccactctagctgatgtctgcctaggtcacgtgtcatcctagtccactgactctgagcctagcccagtgcgaggagttgcctgggaattgcaatttttgtgtgttaggcagcttttcaagtttacccaggatcccagagcactttggctacaatgatgaggattgccaagagactgaagttctgactgttgggttgagtgattcccctctggctaagtcagctccaaatgctcccttcatgtgcaggcattggctgataacagcatgacttctctcaactgtaacagggcagcacttagtccaatttaaagtccctcacttgctgtgctctccctctcccaggttggcagactgtttgtgcttctcatcctcttctgggggatgggggaggattggcatcagctatttaagactgtctttcaaactctctttaatacctcttttagggatataaagttaaaaccaggtactgttattgcttacctgatttttggttcttttaacactgttttctgtgtgtagat

SEQ ID NO: 914599 - DNA, 712 bp, Homo sapiens
ttagctgcagtctggaattgactggccagcaatagggtgtatcacaactcttgctgaagccatctgaccccttttgtttcagtgccatccttttggtgtgtgggatgaggactcatagggctgacatctttagcttctcttttcttcactatgtatataagtaataatctggctgaatctaaaattagttcattatttctttaccagctgaatctgtaagtgttagacttggacggtcctttgtgtttggcacctttcataatctgattcaatcaaagcctttaaccctgatctatttactagtctaaacaactatctcattacaaacttaacatatgatattgtgaaagtctgcttctttatctgactatccattttctgctctatacaaatacagtagtcactagccatacatagctaattaaatgtaattaattaaaaataaataaaacaaaaatctagttcctcagccacactaaccacaatttaattgctcaataatcacatgtaactagtggctactatattgaacaatgtagatacggaacatttctgccattggagaatattctatttgatagcactattccagattgtaaattcctcaaggacagaaattctaccctgttcaacactgtgttcttcagttcttagaatagggcatgacacatatttactaagcaastggctgcttaataaatatttgatgaat

SEQ ID NO: 914600 - DNA, 587 bp, Homo sapiens
tgccatagtaatgtactcagcttggaaaagcagagactggaacccaagtccctgaatctttatctgggacctttttaccatttgcatcatccactaggtctgcaggaagataattcagtcattcaacacttacttatggctagccctgaaagatacactgtgggggatcacagatatttataatctaatgggattgacaagtgttaagtaacagcagcatttaaaccagcatttcattggtaggacaattagtgtgaggccatcagtgaaatgcataaaacacacaggaaaagaaatggccccattatttaagtaatttaatgattaacaaacattttattgagctcctaattgcatgaggtattttgctaggcttgagagatacatggtctctacccttaaggatcttaagtttagatgggatgatatatatggaaataaataattgcaacacrttatttttttttaaatatctgcaagaaaggtatttgcaaggactgtgtaagctcagatgactttaggagcactaaagagatagctaagactgtttcaggaagccaagttcagggaaatgacactggaactgg

SEQ ID NO: 914601 - DNA, 690 bp, Homo sapiens
tcataacctggacttagattatagtctgttttgcagacttgttttctttttccttaggttgccatagttactaactttgtrtataaaataaccatcattcctcttcctttattcccccaccagaagtttcagtgttttctgatgtggcctttgcaaaaggaattggatggctttttgatcttttcctttctggttctacctgtagtacacatttcttgctctcctttttgtgggtctttagcatctggattgacttgggcttcagattgatgcttcattgtgcagtatttttacatagagggcctctgcccatgacctagatagaggattatgagaggggaaataactgatttgaaaagaacaaaaaacatctgccctaaactggttctacctgtattactttgattgtgagtaatataagcaaataaattatataattacaagggaagtgagggctatccgattgtgatcaaaaacctaaagcttttgttttgtgtgtcacatcatcttggctgaacccagaactctcagaccattggctttagtagactgtgagccttggtaatttcaggctgttggggttagcagagcctcacctagatcactcgttttctttgtaatagagtaaatgactagtaaaaggaaccctctgccagaagctgtctgaggaagtgcagtcatttttggtag

SEQ ID NO: 914602 - DNA, 574 bp, Homo sapiens
gtagtgtgcaaaatgctttattcgtatccatactttcctctcactcagaaactactayatttattcctcattttacccaagaagaaataaactttcagaaatccagccatttacctaagcttgcagcatagttgagaaatcctggacactttgactgtggagcccacttcaaccactaagctccaataatttacttccatgtgtttatttctttaaagtgaatcgtaagccagttcaggatagaacctttcttttcatctttgtgttcctaataacagggcaggggcttgggggacaggtgttgtaagggaaagagggagctgagaagtacaagcggaagtcataattaaatacgaagaacctgacctaaattagaagagaaagaatttaagaattccatgaaatggcaagaatgagctgaaaaataaaaaatattgagaatacagggggaaaagctatgtttcttcacccaaaaaagaaaataagaggcagtcgaaaactttgttgtgctggatgggagttccctgtataagaaaaggataagccaaatgtaaactaaactaaatatgggata

SEQ ID NO: 914603 - DNA, 547 bp, Homo sapiens
tagtttcttttgctgtgcagaagctatttagtttaattagatcctatttgtcaattttggcttttgttgccattggttttggtgttttagccatgaagtctttgcccatgcctatgtcctgaatggtattgcccagattttcttctaggatttttatggtcccaggtcttagcttttagtctttgatccatcttgatttgatttttgtataaggtataaggaaggggtccagtttcagttttctgcatatggctagccagttttcccaacaccacttattaaatagggaatcttttccccattgcttgtttttgtcaggtttgtcaaagataagatcgttgtcatggcatgaaaaggatgacctttccagtctgcaatacctgcttgaccactaagaccaaacagctcaaattaaaggtaacaaattccgcagaggcaattgttcaacamaggaaaaagaaaccactttaaggattttaaactggaagagattttacataagctgttttaaacaaaaccattggatgacctggagtaacagtgtcgg

SEQ ID NO: 914604 - DNA, 638 bp, Homo sapiens
tggtggcatcacgctaactgacttcaaactatactacaaggccatagtatccaaaacagcatggtactgataccaaaacagatacatagactgatggaacagaayagagccctcagaaataacaccacacatctacaaccatctgatctttgacaaacctgacacaaacaagcaatggggaaaagattctctatttaataaatggtgttgggaaaactggctagccatatgcagaaaagtgaaactggaccccttccttacaccttatacaaaaatctgaaactggactccttccttacaccttatacaaaaatcaactcaagatggatcaaagacttaaatgtaagacctaggactataaaaatcctagaagaaaacctgagcaataacattcaggatgtaggcatgggcaaaggcttcatgtctaaaacaccaaaagcaatggcaacaaaagccaaaactgacaaatgggatctaattaaactgaagagcttctgcacagcaaaagaaactataaatcagagtgaacaggcaacctacagaatgggagaaaatttttgcaatctatccatctgacaaagggctaatatccagaatctacaaagaacttaaacaaatttacaagaaaaaaacaaccc

SEQ ID NO: 914605 - DNA, 603 bp, Homo sapiens
aatgtagatgatggtttgataggtgcagcaaaccaccatggcatgtgtatacctatgtaacaaacctgcacgttctgcacatgtaccccagaacttaaagtataacaaaatatatctatatctatgtacaaaaatttctgggtgatcaccaaaaatgtaatcaataatgttactttcctttgtttctctgaatcctctttctcctacaatgaaagtgtatttttttaaaccttaagaaattctttttgtactatcttttcctaccgatagtttatgtgctaccagttaggatcttggaaaactactcacattaaaatcttgtttcctgagttttatttcaaactgtcctgaatttttactacagtaatttttgctaaaggtagttcctagtaatcagttatttacctttggtaaacttaattttagatgaaaactacacacaaaaaaacaattgtcttatgattagaacttcaagttaggaggtgagtagtctatgyagcataagacaaattataactcttacctttaaatttcctcgtttgacaagaactatcaaattcctttttaagagtgtacacatatatgtttttaatttggaaattc

SEQ ID NO: 914606 - DNA, 590 bp, Homo sapiens
attcaggaaagatttagcattttttataatarggattctatagtattttctcaatgtgtctaaatgcagcaactatgacttggcagaggcaatgataacagtctttttcctgttaacaacaataatctccaaaagctgaaacttcatatttacagttatttgatataaaggaatttatggcacattaaaaagtgcattgcttcttctctcagtacctgtatgtgaaatatagtgaaaatatatatttttatagttgttgactattttgaagtatatcatgagagcatccactataatgcctggtaattaatatcagcagcaaaacacattactgtctaaattaatgcccatattctttatttcatttcttcatttaattcagcacttcaatattagcatatatgttaaatatcttccttaaattataataaatgaagaagccaattttgaaacctaattacagtgatgtattaaaacattttctaaatatgaatggttcctaacatatttttcatctgaatgtttatctttgttataatagacaaaagagtaaattaagacaatgtgatcactatgcttgatatgacaca

SEQ ID NO: 914607 - DNA, 606 bp, Homo sapiens
caccctaacaccacaattaaaagaagtagagaagcaagaaaaaacaaatccaaaagctagcagaagacaagaaataactaagatctgagcagaactgaaggaaacagagacacgaaaaacccttcaaaatattaatgaattcaggagctggctttctgaaaaaaaaattaataagatagactgctagctagactaataaagaagaaaagagagaagactccaataaacacaataaaaaatgataaaagggatatcaccactgaccccacagaaaaaaaactaccatcagaaaataccataaacacctctatgtcaataaatcagaaaatctaaaaaaaatagataaattcctggacacatgcaccctcacaagactaaaccaggaagaagtccaatctctgaatagaccaataacaagttccaaaattgaggcagtaataaatagcctaccaaccaaaagcatcccaggaccagatggatttactgctgaattctaccagaggtacaaagaggagctgstaccattccttcagacatgattccaagcaattgaaaaggaaggactcctccctaactaattttatgagaacagcatcatcctgatac

SEQ ID NO: 914608 - DNA, 569 bp, Homo sapiens
caatttaccagactaacacccaggggaaagcgctggattaaagagagacatttagaagtcacagttacatggatggtgtttcatggaaatgaatagaggtggaaagagcagaacgaatgggagagaagaaaagaggtcttgagcggaagccctgggaatgtctgtttagaaaccaggaagtggaggcggaatcggcaaaggagaaggagcagccagtaatgaggccatcttggatgctaggatgcctacagggttgcactgcagaatttctacatagagttgagccatcagtcaggtttgcaattcattgtgaagccagttagtgtgagcttctcaaacagtattcagcagttcagtccaatcacaaagaaagtagatcattgggttcaaccagggttgggtgagtgagtgatttttgctgggtgagtgcaaaggagagtaggaagttagcaagaaggagggaaggtagtagccaggacayagggcatttaaaatcaagattccaaaagagatgcagtttctgctgatgacaagacacagaataagatgatgagggtcaatggctgggg

SEQ ID NO: 914609 - DNA, 623 bp, Homo sapiens
tgtatccaagttcaaaacctggcttgattttttttaaccagtagtgttaccttggaaatgttactttacctccatgagtactagtggcctcatctttaaaatagtaatttttataatttccgcctcatgggattgcattgaggattaactgaggtgtttgcaaagtaccaagcatagtgcctgtatttgttctcttatgatgttatggttctgtaggttagaagttggatacaggtctcactgagctagagttcagctgggctgcattcctagtttggagactctaggggagaagtggtttccttgtctgttctagcttctggagacctcctgtattctctggctcatgtcccctttctctttcttcaaagccagcaagtgtcatctctctgacctatcttttgtactcacatctctttctgaccacagtcacaagaggttctctacttctaaggacacatgtgattagctcagaatccaggataatctctacatctcaaggcccttaattcagttctatctgtcaactgttttttaccatgtaaggcagcgtattcacaggctgcacagattaggatgtggccatctttaggggcctaccaccrtgcctaatgctttatggt

SEQ ID NO: 914610 - DNA, 619 bp, Homo sapiens
aagccatgtttatttggtaattgaaggcartgctttttctttgatgtcttgcttcagctctatcctacaagattggcatgcagtattttcattgcttctcagttcaaaatacagagtatactgaatgcatattgcttttgcagcatcataaagtctaaaaatcgttaagtcaaactactataaattggggacttgtctgtattttgtaatttctcttgtaatttcctctgtataccatgggtcacttaagagtgctttttaactcaccaaacaatattttccatttaagtaagcattttcttgatttccaatttaattctgttgtcataatataatgtggctatatgatatcaattctttgaaatttattgtctttgtgacccactacattatcagtctttgtaagttttcaatgcatgctaaagaaagaatatagtctgtattggctgatggcagtttatgaaccctcatcactattctggtaaaaagtttatatctctatctttttctttaaaagtagaatcatattgtatatagtatcttgcagatttatttaaacatgtaataatgtattttaaacatatttccatataactacatgtgacttggagcacatctt

SEQ ID NO: 914611 - DNA, 619 bp, Homo sapiens
aagccatgtttatttggtaattgaaggcagtgctttttctttgatgtcttgcttcagctctatcctacaagattggcatgcartattttcattgcttctcagttcaaaatacagagtatactgaatgcatattgcttttgcagcatcataaagtctaaaaatcgttaagtcaaactactataaattggggacttgtctgtattttgtaatttctcttgtaatttcctctgtataccatgggtcacttaagagtgctttttaactcaccaaacaatattttccatttaagtaagcattttcttgatttccaatttaattctgttgtcataatataatgtggctatatgatatcaattctttgaaatttattgtctttgtgacccactacattatcagtctttgtaagttttcaatgcatgctaaagaaagaatatagtctgtattggctgatggcagtttatgaaccctcatcactattctggtaaaaagtttatatctctatctttttctttaaaagtagaatcatattgtatatagtatcttgcagatttatttaaacatgtaataatgtattttaaacatatttccatataactacatgtgacttggagcacatctt

SEQ ID NO: 914612 - DNA, 540 bp, Homo sapiens
tttttccatatggtaagacacagaggtctagtttcattcttctgcatatagttacacagttttctcagcataatttattacaatgatcatgctttttatttgtatgttcttgccatctttgttgaagatgagatggctgtaaatgtgtagatttatatcaacgttccctattctctttcatttgtccatgtgactgtttttatgcgagtactatgctgatttggttactatagctttgtagtaaattgtgaagtcaggtaatatgacgccttcagcttttttctttttgctcagtattgatttggctttttgggggtctttcattccatatatatattaagacttttcttatatttctgtgaagaatgtcattggtatattgatagaatttgcatgaaatctgtaaatagctttggaatagtattgccattttaacartattaattcttccaatctatgagtatgaaacattttctactgttttgtgtatcctcttcaatttctttcatcagagatttatagttttccttctatacatca

SEQ ID NO: 914613 - DNA, 553 bp, Homo sapiens
ggcttcacatttatggataacatattttcaaagatgtaaaggcaatcaaatggagaaattatagtattttcatgaaatagtgttaaaacaatgcaatctctatgtaaaaacagttaatttccatccacatcacactcataaattaactcaaaataggtcataaagttaagtgtaaaacctatgactataaagttactaaaacaaaatgaaggagaaaaattttctgagtatgtgttggcaaatatttctcagctataacataaaaaataaaaccaataaaaattggtaagtttgacttcctcaaaatacactatgagagcatgaaaggacagcctgctgactggggaaaaatgccaatcatatgtccaataaaatacttgtatccagcatatagaaagaattttaaaactcaacaataagaaagcawacaaccagtaaataaaatgggcaaaatagttgaataaacacttatccaagaggacagatggatggcaagtaaacaaataaaaagatgctcaacatcaaaaagatgtaaattaaaaccaagatgtaa

SEQ ID NO: 914614 - DNA, 599 bp, Homo sapiens
gaggcaatcattgaagaagatatcagaacaagtaatttmccaatgaatatctgacatgcacaacagataacatatatttttgttactcagcttgcccatagtgttgagtgaaggtaggtatttaacacttgccaaataggaaatgttcttaatgaaaactaggaattccaatactgtatatatatataccattctagagctagcaggactattagaaaaaatctggaccaacgtcttctagtttacaaataaggacagtaagtcccagaaggtcaaatgactaagttagttcaagggctcattctgttccaatggtctttctattaagttccactgtctctcttgtgatattaattatagaaaccggcctgtagtttcaacatacagctaaaatagttatttccaaaggtctgccaatattatgctaaggatttttataaaaatgttgttttgggttctgaatactacaaaacatcttgtgctcacacagtgctaaatattaccttgcaattgttacagttaaccaagcagttctgtatgtgccaatttggaggcttaggtggggtgaaaaaaaacaagttaaataaaatagtagcaag

SEQ ID NO: 914615 - DNA, 618 bp, Homo sapiens
cggccactggggctgaagattcactttcaagattttttttcactgacatttctggtgccttggtgtttcttggcttcccttcctctctacatatttcattatctcattatccagggctcctccatgtggcttctcatgacatggcagtctcagggtagctagtttcccccagagtaaataatcttagagtgagtatttcaagaagcccaggtaaaagctacaaagccagtggggcacggtggctcatgcctgtaatcccagcactttgggaggctgaggtgggcagatcacgaggtcaggagttcaagaccagcctggccaacatactgaaaccccatctctactaaaaatacaaaaattagccgggtgtggtggcacctgcctgtagtcccagctactctggaagctgaggcaggagaatcgtttgaaccccggaggcagaggttgcagtgagccaagaccacgccattgcactccagtctgggtgacagagtgacaytcgatctcaaaaaaaaaaaaaaaaaaaaaaaaaaagctaggaagccttttgtaacctagctttggaagttccagaacatactcctgcattcttatgatcaagcaagtcactgcagccaa

SEQ ID NO: 914616 - DNA, 595 bp, Homo sapiens
atgttaagctgcatgaaaaggaataawaattttgtcctacctgtaagacttagggtcactgctggctttataaattcgtgtggtttttcttggcagctacctaatagtttttctagccaccatgactttaaccccacattacagcatcattgagctatttattcagtttagttcagttggctgaggaactgtgccagaaactgctattaggaagctaattttatttaccccaaagcaaccaaaggattctcaaaatggttttcactgcattttttttattcttaaaaaaatctcacttttgcttctcttgttgaagtgagataaggaaacaaatttccaaagaggttaagtcactccataatagtaggtgatgaggacagaactggaattcaccataatcctcaccatctctgagacgttaagatttgaatttaagtttaaaaaaatagtgaggtaaatgaagagttgagagtccatttcaggtgaaactcagagtaaaagtgattttgtgattctgcaatatatcatgtacaggtgagggaatgtgaattccttttggattagcatagaatagatgcagcctggataagtctgg

SEQ ID NO: 914617 - DNA, 659 bp, Homo sapiens
aaacttgtagattgaaaagtgaagactgccttgcrtcatttaaaaaaaaaaatgtgaggctgggtgcagtggctcacgcttgtaatcccagcactttgggaagccgaggcgggtggatcacgatattaggagagcgagaccatcctggctaacatggtgaaaccccgtctctgtgaaaaatacacaaaattagccaagcatggtggcaggcacctgtagtcccagctactcgtgaggctgaggcaggagaatggcgtgaacctgggaggcggagcttgcagtgagctaagatcacgccactgcactccagcctgggtgacagagcaagactctgtctcaaaaaaaaaaaaaaaaaagaaaaattggcaaaaacatctggggaaagaagaggtgcccaaaccctctttcaggacttgggaatgtgattttatttgaggactggtcttggtactgtccctttgtcattcatggttaagcaccattccaggccaagttgccagtggatggagggagcaaggctctccctgcatggtaccataaaggtctgtggatgtgggaaactcacaaaatccgtgaagttggcatgggaggtaagaagaggaggctggcagagttcgcccgcagcccgcctgtttggttctcccagattctgtcccctc

SEQ ID NO: 914618 - DNA, 614 bp, Homo sapiens
aggatattatccaggagagcttccccaacctagcaagacaggccaacattcaaattcaggaaatacagagaacaccacmaagatactcctcaagaatagcaaccccaagacacataatcatcagatttaccaaggttgaaatgaaggaaaaaatgttaagggcagccagagagaaagggaagcccatcagggtaacagcggatctctctgcagacaccctacaagccagaaaagagtgggtgccaatattcaacattcttaaagaaaagaattttcaacccaggatttcatatccagccaatctaagcttcataagtgaaggagaaataaaatcctttacagaaaagcaaatgctgagggattttgtcaccaccaggcctgccttacaagagctactgaaggaagcactaaatatggaaaggaaaaaccagtaccagccactgcaaaaacataccaaaatgtaaagaccattgacgctgtgaagaaactgcatcaactaatgggcaaaataaccagctagcatcataatgacagtatcaaattcacacatagcaatattaaccttaaatgtaaatggagtaaatgcctcaattaaaagacacagactggcaaat

SEQ ID NO: 914619 - DNA, 671 bp, Homo sapiens
tcttaaataaatgttgctttattcgctgtwtaacctccagacaatttctgagagtttaaatggatggtttttaaaataattttctccagttatggtagtttcactggagagaagttcttcaaatcccctcacactgcatctccagaagtagaacctctcaagcaagttcctgaacttagttttgctgggtatgtaagtggaggttgatatttacttcctgtcagtgtgcaaagatattcctgtgctctgtctttcattatttcttttcagaagtttaatcctagtctaattgcttatagattacctgtctctatcaattatcttcctggttgtttttaagactttcccttcttcctaggcactgtgcattttactgcaatgattttagctattgattttctttatatttactctttgcaatttgttgaactttctgaatctaattgatgtatttcttaaaatgtgggagattcttagtgtatgtcttctcaatattgctttctcctaatctttttaattttttttgcaacaccaattagacatatattagcttctctcagtgtatcacaaacaccattttcccctttcagccttccatgttcattaatatttcttttatattttctacgtcttgatctctgtatgctgcattttgggtaatttattcagat

SEQ ID NO: 914620 - DNA, 671 bp, Homo sapiens
tcttaaataaatgttgctttattcgctgtataacctccagacaatttctgagagtttaaatggatggtttttaaaataattttctccagttatggtagtttcactggagagaagttcttcaaatcccctcacactgcatctccagaagtagaacctctcaagcaagttcctgaacttagttttgctgggtatgtaagtggaggttgatatttacttcctgtcagtgtgcaaagatattcctgtgctctgtctttcattatttcttttcagaagtttaatcctagtctaattgcttatagattacctgtctctatcaattatcttcctggttgtttttaagactttcccttcttcctaggcactgtgcattttactgcaatgattttagctattgattttctttatatttactctttgcaatttgttgaactttctgaatctaattgatgtatttcttaaaatgtgggagattcttagtgtatgtcttctcaatattgctttctcctaatctttttaattttttttgcaacaccaattagacatatattagcttctctcagtgtatcacaaacaccattttcccctttcagccttccatgttcattaatatttcttttatattttctacrtcttgatctctgtatgctgcattttgggtaatttattcagat

SEQ ID NO: 914621 - DNA, 657 bp, Homo sapiens
ttatcttcccaatcctaaatggttggtatggttattattggmgtttttacagaaagagaaactaaggcttagaaaggttgtttcattcttcaaaggctgcactaagagtaggtggctgcaagcggtagttgagcctaaatgatctggcttagaatgccaagttctcagttttcatatcagcctgttaattgtctacaaagttttgccattatcaattgtctgtttatattcttcaacctgtattatttgttaaggacacagcagacattgataattaaatgtctaatggaggaattttgccttccactgggttaaatagaacgcaaaagatcttttttatacagctgacccttgaacaccataagagttggggtactgaccctttatgtagtcaaaaatctacgtataacttttgactcccccaaaacttaactattaatatcctgctgttgaccagaagccttaccaataacacaaagtcaattaacacatatttggtgtgttacatgtattatatacagtatttttacaacaaaataagatacagaaaaaatgttattaagaaaatcataaggcagagaacatatatttactattcattaagtgggagtggatcattttcatgtttagtaggctgaggaggaaaaggaagagttg

SEQ ID NO: 914622 - DNA, 663 bp, Homo sapiens
gcccattccaagcgctgacacatagggcctgtttgggagaaagcaatgaggcagctgagtgaatattgagwtgaccatctcacttcagcacgggagtactctgaggacagggagggtgggagagtgcatggctgggctggggacaccttccaaatatgcatgacaggacagagcagtggatggcattggaataccctcagctcctccccctgtcatttgatctgtttctcatccatctttcttcacttgcttctaggacagccctttcttcttttccttcctctccttacctctcatacccatggagtatgtgttgaatgagacatgagcagggaccaattatgatttaacactcacaggcaaagtgtgattggagggcatgggtaagagacagtgatgaaggcaggaaaatgataagcatcactcaggccaccggtggtcaggccaccatgggcctgtgtgggcaggaagaggatatgaaggggcatcatctgtcactgctgcctcctggcaggccctgtctggaggctgagccctgatctgcacacctcagagcatagccaccttaccacaataagaggagttggcaacaccctcagccaaaggtaacagagaagctgagcgcctgctccgtctgtattccctgacaactggacgtggcac

SEQ ID NO: 914623 - DNA, 595 bp, Homo sapiens
gggaggctgaggcaggagaatcgcttgaacctgggaagtagargttgcaatgagccaaaatcgcaccactgcactccagcttgggcgacagagggagactccatctcaaacaaacaaataaacaaacaaacaaaaaacctccctgtacaccatttcaactcttgaataatacaccaggtctatagtagaattttctcttctgttttgctcttttggcaggactctgtgtttatttggcgccaaataggcttttgattcaggaaggacgtatgaattaggaatgcacttggctgtgattaacagcaagtctgtcagcattagattgttatggttaaaagtctggttgtaggaagtttaggctactacagcagctcctcaagtttgcaatcaaaggcacaggttctttccagcttctactctgctcttcctaacatgtggcttttgtcctcctaattgcaagataaatgctttacattcagattcctcgcagaaataaaggtgaaagttaaaggccaatgggctttctccaaatcaaatattactcaggaaagaacacgctctccaggtaaatctgcccataccttatggacccaaa

SEQ ID NO: 914624 - DNA, 613 bp, Homo sapiens
gaactcaaaatcagattttacctgtaaagttcttaaagcagtacttggccaatgtatcctaggttaggatactgctggtattttgtttccaagatgcatgctactgatttttttcccataagaatttttagcatgaaatttatttcagtgcattacagttttattttcaaaggaaacttaacctagaaatcaaggcaaatcccaaaagttattaactaatcttttcagttctaatatcatttataggaaaacaggaaaagaaaacttgtagaaggaaatagtgcaaatggagaaacaaactggggtgagagaggagagaataaggaagggtgagaagaatgaggtggagaaatggagagaatttgggaacattgtatagatagggtgataaacagaaataggctagagagatagaacgtagacatataaacaggtacagagataaacagagaattaaaatggaaagagtgagaagctcartatcttaaagggaagcttgtccattgatcatattgtaataaatgtatatatcatgtaaaaatccctttaagcagtacaaaataataccagttatatcaaatatttaaaatatctattttgtttcatagttttt

SEQ ID NO: 914625 - DNA, 456 bp, Homo sapiens
tctctaagaaaaatttgaacagttcttaaaagttgaaggagttgaaagaacaagacaaactccatgcctgtgtcacacaggattcccttctcttggttgcggtggctgctgtaagtgttgggtgttgaggacamttgcattgcatactgcagctaagttttctgcatgtttggggtaggagaatgaagcagcctatctgatcacttggctttactcctttccagtgtcattccaggcacttttattatccccattttacagatgagaaagctgctgtcactccctgccatcagttagattttgggttacgatgacaattaaggtattatggactatcagatctagtccttcacagatttaagatagaatctaagcagtgagctctaacagagaggccagatgtgtgtgtgtgtgtgtgtgtgtgtgtgtgtgtgtgtgagagagagagagagaaac

SEQ ID NO: 914626 - DNA, 580 bp, Homo sapiens
atattacacataataaccaaaaactagaagcaactgtaatattcattaactgatagatgaataatccagttgtagkttttccacactatggaatactatttgacaataaaaataaattaaatattaatatatttgaaactacagatgcttctcaaatatgtaaattaaagaaaacaaacacaaaagaccacactttctatgaatccattaatataaaattctaggaaaggcaaagctatagtgacagacagcagatcagtagttgcctgggatcaagggtcaagagaggtcatcgattgtgaagtggtagaagaaaacatttgaggatgatggatttgttcaatatcttgagttttgttgaggttatgtgaccatgcaccatacaaaattcatcaaactgtatgcttaaaatgagtgaactatattgtatgtaaattataccttgacaaagctgaaaactgaataaaaacaaaacattaggagaaaatctaggggactctgtaacctcaggaagggagcagctttcaaaataacagaataaaagacaggcatatttgactacataaaagtttaaaaaata

SEQ ID NO: 914627 - DNA, 583 bp, Homo sapiens
acattagccaggtgtggtgatgcacacctgtaatcctcaggaggttgaggcacaagaatcacttgaacctgagaagcagaggctgcagtgagctgagatcatgccactacactccagcctgggtgataagagcaagactccgtcttaaaaaaaaaaaaatcaattcagcaagaggaaataacaattctaaatatatacgtacccaacactggaacactagattcataaaacaaatattactagacttaaagagagaaagatagaccataatacagaaatagtagtggacttcaacaccccagcagacagattacctatgcagggaatcaacaaaaagcctttggactaaacctgaactttagactaaatgaacctaacatatttacagaatattctaagccaacaactgcagagtatacattcttttcatcagcacatggaacattctccaagatagaccataggttaggccacaaaaargtctcaataaatttttaaaaatcaaaatcatatcaattatcttctcagaccacagtagaataaaactagaaatcaataccaagaggaactttggaaactacaa

SEQ ID NO: 914628 - DNA, 600 bp, Homo sapiens
aaggcaaatcccccttttgcctagggattagactgtctttgtaggactaacaaattagccacaagattagaaattatggtttaggagtcatgcagctggaggttacaagattctgaccctccckagactgctcctaagatcagtgtttaaaatatttcgcagactctgcagatgatggatcaactggcaccacccagatcaataaactggctcatctgatcttgtggcccccacccaggaactgactctgcacaagaagagtcaactccctatgatttcatctctgacctgaccaatcagcatttctggctcactggctttccccacccactaagttgtccttaaaaactgatccctgaatgctcagggagactaatttgagatttgagtaataataagactctggtctcctgaaaaaaaaaaaatcatcagagactattacaaacaactatatgctcacaaactagaggaaatgaataaattcctggaaacatataacctctcaagattgaaccaggaagagatagaaaacctagaaaacctgaaaagaccaataacaagtagtgagattaaatcagtaataaaaaatctttcaataaa

SEQ ID NO: 914629 - DNA, 611 bp, Homo sapiens
ataggagaatctatgaatatttatgagaggagctaaacgcatgctcagtgagtaaacatatatgttaaatacattccatgttcactttggggtagagatttaacattaaaatgaagtaaaatttggctttttatgtcaagaggtgaaagacaggacacaaaggcatcccatgcacagcctctgtggactggtcagaaccaggctctggttggtggtcatctaccaggaaggaatgttttgtaaggctggtcagttgtaaaggcaagaccataataagagaggggaggtcagctacgatgtcaagcggtctgtcaaggttggtggggaaatcttccaaacattgattctcaggaactggtttctgtttaattacaggaaagaaaatcttgcggcagttggcaaggtaggggagtgttgaggggtcactgacctcctgcctggccaaagctgtagaatctggttttaacattttctgggtctctttttgccacagggagtccatttcaagggcttgacccaatatataaagaactcttacaagtcattaataagtttaacaatgcaatttaaaaagaytgaaacagatacttgacagaagagaatatatacat

SEQ ID NO: 914630 - DNA, 599 bp, Homo sapiens
actgattagcccaatgttttccttttttatattttggacatatttcagactcagcagttttcttttttcccctatctggcagcctgactcgctgattatttctacattcttttttagtatgaatagcttgtttaaattctttgagtaatttaaaaggaaaaggctcaaatgtagctataatatttccttgttgatctgggggggtgtattctaacagggaactgccaagcctctaaatcaccctctcatctagcttgctgaattcctgcctgaatagaactaagagtgatcgctcaaggcactgctcaaacagtcactggggcaactacttttcgcccagtgttctccggaaaagaaagatctggagggtcattttcttcaaaataatgagggggaacacaagggtagggatgaacctctccctcctttgccgctttagctttagctggcaaataaacctggtctgtaacctcttctgttacttcattatactctccttcctcygcatcatcagtgtgaaaaagttccaaggtggaatgaatcacagcccacacttgtcccattgttaccctgatgcttccgagctccccttcttactc

SEQ ID NO: 914631 - DNA, 630 bp, Homo sapiens; identical to SEQ ID NO: 907105

SEQ ID NO: 914632 - DNA, 602 bp, Homo sapiens
gaaagacttttctttccatatttcctctgttgccatycacctgcctcacctatgctagaagcaggtatccttcttgactctttgcaccacatccacagccataggatcctctattctccctcctaactttattcaaaccacctgcttctcctaaacccattacccctaacttagtgcaatcacctgcctttccccacctagaccattgcagtagcatctttttaattttattttttgagataggatcttgctctgtcacccagactgcagtgcaatggcacaatcctggctcactgcatcctcaaactcctgggctcaggcaatcctccctcctcagcctcccaagtagctgggactacaggtgcacagcaacacacctggctaatttttttttttttttttttttctggagatgaggactcactatgttgcccatgccggtctcgaactcctggcctcaataaaccctcctatctcagcctcccaaagtgctggggtgacaggcatgagctactgttcctgaccacagtaacttcttgactagtctccctgcctttaatcttgtatccactgacttatcatccacactgcagccagagtgg

SEQ ID NO: 914633 - DNA, 667 bp, Homo sapiens
atccaattcaaatacagaaagagacaaaagaaaaattatttactttaaaagtgtattttttttttcaataaaaaggggggaacctcagatttacctcaatgtttcctttggtgcaaataccatattgaagactaatattatttcagccatggcataaaaatgttttaaccacaagtgttagacttcataacttcacattcaaattggatttcattttgtagttcacatttttatgaatttggagggaaattaagttaaaatatgtaataattgaacgtcaattatatgttcgacttcatgcatgagaattgagaggaagggagaggatgtatcttatttagctttttgtttataatatctagcacagttccttgtacatagtagtaatcaatatatttttgctgaaagataaatgaaagaatgaaagaacattgtattagtcatctattattgtgtaacgaatgatctaaaaacttaatgtctgaaatgtttattatctcattttctgtggatgaggaatactggcttatctgagtcctctggttcagggtctctcacaagcttgaaatcaagttgttggtataggatgagggtctcctctgaaggctcagctggraaaggatccacttgcaaatttatatggttgtcagaaaaatgcagtttctta

SEQ ID NO: 914634 - DNA, 273 bp, Homo sapiens
ttataaccaaactactagaattaataagtgaatttagcaagtttgctgcatattagaccaataaaaacattatatttgtatatacttgcaacaaataaatagaaaattgaattttaaaaatacatttacaggagcataaagaacagcagacatttctgaattaatataatgaaagatgtacaagatctctacattcaaaattaaaacaattaaaaaatcaaaaacattattgagagwaattaaagtagttctaaataaatggagtatatatac

SEQ ID NO: 914635 - DNA, 659 bp, Homo sapiens
cctctttggttgcctatataatgttgctagttattatagtaattgtggcctcatagcttctggagattaagtcccaatcctagtcctatgtttgttgaaacatgctgagtgcttctttaaaagtgtaagccttctggggaataataacatgaagtatttgttagtcatacacaacttattgtgaattagtttctcttcctagtaccatcttcagaactcggtactgagaaaagaaaatctgatggttagggtgggatgaatggaggtggagaacagtgtaggaaaatataataatggaatctggaccacctattatggagagaagcctgataatttgcttgcctctggacaatcaggacattcaaataaataagcaaaatgggtacttggaagtgaagacatcagtaagggaaagtgactagaaagtgatgggggaaaatataataaactttacaatttgggccataggtttaccacacttttgggatttctatttttgaccaataactgtaaatgataatttttcaataagatatttccttgcagaaaaggataaactatttctggtaatctctttgtatattgggttcaaatctggtaaagtgtgaagagacayatggttaggtaaatttcctgtgtttctactgattatatggcct

SEQ ID NO: 914636 - DNA, 620 bp, Homo sapiens
atgattaaattataaactcaggtcactgctttcaagtacagtcctcccatgttaactgtgtggggtttgttccargaccccagtggataccaaaacacttggatgctcaagtccctgatataaaatggaatagtatttgcatatagtctacacacctccccttgtatattttatatcatatccagattacttctaatatctaatataatttaagtgctatataaatagttgtttatattgtattgatttttgtttgtattactttgtgttgtcatatcgttgtattcttaatttctatttctttccaagtattttgtctctgctgttggttgaatctacagatgtggaaaccatgaatacagagggcaaccgtatataattcctgtctcctgattgaaacaatttggggtcctctccttctttgcccttattaaaagccaaaccaatcaaacatttgttacaatgaatctcaagtcactggtttgcttttctttctgttttgcatgacatgacaccattttgggggtgaattaaacattataactttcttcttggcatttttatcttttctcctcatgcttattatttgttttgttttctttttactctgggatatacat

SEQ ID NO: 914637 - DNA, 609 bp, Homo sapiens
tggtgtaaggtaagagtttgtttgttttacatgtagatacacagatttytattcaatatttattcaaaaggttatctttcaatcttgtggatttctggtgcccttgtcaaaaattagttgcaaatgatgggcaaagacttcaagactaaaacaccaaaagaaattgcaacaaaagccagaattgactaatgagatctaattaagctaaagagccttttgcacagcaaaataaactatcatcagagcctacagaatgggagaaaatttttgtgatctacccatccgacaaaggtctaatttccagaatctacaaggagcttaaacaaatttacaagaaaaaaaaaaaaaccatcaagaagtgggtgaaggatatgaacagacacttttcaaaagaagatattcatgcagccaacaaacatgaacaaaagctcatcatcactggtcattagagaaatgcagatcaaaaccacaatgagataccacctcatgccaattagaatggcaattactaaaaagtcaggaaacaatagatgtgaggctgtggagaaacaggaacacttttacgctgttggtgggaatgtaaattagttcaatccttgtggaagacag

SEQ ID NO: 914638 - DNA, 590 bp, Homo sapiens
ttagtttctcttccacttaacttcattaaatccaactgaacatacatttagtgtcttctaaatactacttgttatttagtcctgtgatgagctcagctacctgaggttgyaaaatgcttaactgtggagttgttggacaactaataattctgagagactcaagccaggctaagtggggttggcagggggtagtgggagggtcctcatagattggtcttgctgcactcctcactgtgacctcactctgtccaggaaggacactgtgagctatccctcactcataggcattgtagggtcctgcacatgctcagaatattcatttgatttattacaattctagatattaatgaaacacaatattactgcctttgtagcctagattaacccagtttgctgaggccatgactaagtttatctgatatcaagtatttggcaatgaggacattaaaaatttaagtacatcttttcctgtaagtacggggtgtggctaaagcaataatcctgctttattttcaaataacataaacatgactagcattttgacaaattagcctatcattacaaaattaccagctcaagaaaaattatta

SEQ ID NO: 914639 - DNA, 689 bp, Homo sapiens
cactattcagatagaaattaagatgttcattcttaaaagtaagagttaacatagattaataaaacacctctacttacctcaattttggtatgctagtttaatgacttgtaatcatcattaatatttatgcagttttatgtagttggttttttgaatcatttaaaccaaataggggtataccatattttatattattccaaatgccctctaacctgttatgtataatattcctttcccatcccttaataacatttgtctagaatactttatttcctgtcattttcagttatttaaaaactcaatctggtccaatatgaaatgtaaacttctaatttcaaattcaattcaaattttgtctccttattcccacctatgcattcccatcctgtggtagctcatctccaaagctggccctcaatggatcattcccttctatgtccccttctgcatcgaatctgcacttggcctgtgactcattaaacaatagaatgcagtggaaaggatcctgagctggttctgtgcctaagtcattagaaggcctagaagcttcttcttttgtgattttggaaacattgagccaycatttaagaaatctggcatgtccacatatcatatagagagaccacatggagagggagaaaccctgagctttcaaggagagacagagagagaccccgttattccaaagt

SEQ ID NO: 914640 - DNA, 611 bp, Homo sapiens
agagaaagggcaaaatgatcatktcataaaattctttaatctgaaagcagacttgaatattgtatcagtggcatgcaatatggaggtttaattattttctatgtactaacggatattttatattgacatttgagaaactgacttttggtttaaataacgattactttgaaaaacacaatataaactggcaataacatttggttatttaaactgtctgatcaacaaagaaaggtattgccacatgaacaaaagaggttgcacaaaaatgataatctatttaccacgttgattagagaaaacagttggaagtcaaaaatacatctcttcatcttgagtcactgatgaagaaaataattaaaatttaaaatacaatcacactttgcctctaaaggtatgctttttctgcatggtctgcacatccatgctagaatatgctatcaagagtaggtactcacatgagtatctgaaaggagaaaagataatatttactttaaaaacattttttttcaggtgaatgatgatgccattggaatattcaggattctgagtaatataacctaatattttagaacgaaaccattatgggtttaagcacaagactatcagaattt

SEQ ID NO: 914641 - DNA, 609 bp, Homo sapiens
gcaatggtatttcatcagtgctctgaaaggacttgtctccttttccttayagtttaagagttccatttaagggaagaaagatgtgcagggcttcataactttcccacagtggctgctgttctcctccaggctggcaccatgaggggcacattctcaggcctctcctgtatcatttctgtgaacgcctggtgaggtttgtgagaaaaaaaaaaaaaaaaaaaggcctacaagtggatgcaatttccctttatatctcataggctccacattttctcaccagcccacacttggcctttaccaattcttttaacaatttcaactaattcttattttttaatttttttttgtaaagatagggtcttgctttgttagccaggctggaatgcagtggtgtgatcttagctcactgcagccttgaactcctaggtttgaacaatcctcctgccccagcctcccaagtagctgggcctacagtgttgtgccaccatgcacagctaattttttgacattttgtaaagacagggtcttgctatgttacccacactggtcttggactcctggcttcaaaccatcctcctgccttggcctcccaaagtgctagaactacag

SEQ ID NO: 914642 - DNA, 611 bp, Homo sapiens
acccattttacaaaataccagtgaattgggtgtgattttatcacccccatcttataaatgaactggataagccatacagcwgttaagtaacttactcgaggtcacatggtttgtatttgtgaaaccaagatgcaaacccaggtcaagcatgcttagtttctctactcttttgaaaagagctgaagctcaagctgcttcagaggtaaaagtggaaggaaagatagtacccataaggaatcaccaccctaacgggtaaaagctacaggtaacagggtaacctcaaaaccagtgaacccccaatcacacctgcttgcaaacatttgcaattaaaattgaatgcaaagttagcttggagattcaggtaagactcatttccatggaggacgtttttggtaaataagagacatgttgtccaaattagaatgcgtttcctctagattgttgccagccattggaaatggctttccttcacaatgcttttcatagcacttttgtttaaaaaaattagaagtttacatttggtattttgtctttttgggctaagaatccagtggcaaactctttggataaagtgcttgctttgaagaatcaaagaagatggatgtcaggaa

SEQ ID NO: 914643 - DNA, 728 bp, Homo sapiens
atcaattacaattcttcaagaaataggtaatgtttggaggaaaattcaataatcaggttgtttagagaattatgcagggggtggggggggggaattattttttggaagtagacttattaggcacattcctgagcaaggaatgaaggacaagatagtgtgccagattcagattctggctttaatagtcaagttttcagtacaaaggcattgtatctattccaattaatagaccttaaaatttaccctagctttgagaaaactttatacactgtcttttatagtatttagcatttaggatcccggtaaactatcaccgacttggtgccaaatttcctatggtaccaaggagttttgtatttccagttgagcaattggtggcagtatcatttaacttagtcacattaatgttatggtagaaacaatccctaaacctcagatgcttacaaaaacaaaggtttatttttcactcacagtgcatgtcttttgggttggccatgggcttcatattgatttcattataggccttaactgaaaggaacagtccctcttggggacattagtcatcttgtgacaggggaaagaaaatggcaggatttggrggtggtcttcatctcttccactcatataccacttgatgtgccatggcatcaagaaggcagaatgtataatccttctttgaggggagaagtgaatactttgaacaaaaataaaatcaactacaaggatgc

SEQ ID NO: 914644 - DNA, 632 bp, Homo sapiens
gaaatcaggatcaataaatgaaaacattgataagtagatcttatcaaaattaaaaatgttttctctgccaaagctcatgttgaaaggatraaaagtcaagatacaaattctgagaaaatattcacacaccctctatctgacaaagaactggtgttagaatatataaagaactttagatactcagcaatttaaaactttccatctagaaaatgagggaaagacatgaacatatattttaccaaagaggatacacaaatagaaaataaacacatatagatgcattcaacttcattaggcatcagggacatgaaaactaaaatcacaatgaaatattgctatatatctatcagaatgactaaaataagaaaaaaatgtgacaacaccaaatactggcaaggatatgaagatattggatcactcatgcactgctgatgtgaatttaaaataatatagccacccttgtctacggccataccaccctgaatgcacccaatctcatctaaaataatatagccactctggaaacttctgaaatttaacatgcaattcccttgcaaccccgaaattgcactcttgcacatttaaaccagagaataacaactgatgttcacacaaaaacctgtatatgaatg

SEQ ID NO: 914645 - DNA, 620 bp, Homo sapiens
tttgggctcttttttggtttcacatgaattttaaaataattttctctgtgaagttattggtagcttcattaggaagagtattgaatctgtaaattgcttytggcagtgtggccattttaatgatattgattcttgctatccacaagcctggaatgtttttgcatttgtttgtgtcttctctaatttctttgagtagtgttttgttattcttatagtagagatctttcacctctctgattagatgtattcctgggtatttttggtgtgtgtgtgtgtagcaattatgaatgggattgcctttctgatttggccctcagtttggttattgttggtgtataggaatgctagtgatttttgtaccttgattttgtatcctgcaacttcgttgaagttgtttatgagctgaaggagcttttgggctgagactatagggttttctaggtgtagaatcatgttgtttgcaaacagagatcgtttgacttcctctcttcctatttggatacgctttatttctttctcttgcctgattgagctggctaggaattccagtgctatgttgaataaagtggtgagagagggcacccttgtcttgtgccagttttcaagggaaatgcttccag

SEQ ID NO: 914646 - DNA, 620 bp, Homo sapiens
tttgggctcttttttggtttcacatgaattttaaaataattttctctgtgaagttattggtagcttcattaggaagagtattgaatctgtaaattgctttkggcagtgtggccattttaatgatattgattcttgctatccacaagcctggaatgtttttgcatttgtttgtgtcttctctaatttctttgagtagtgttttgttattcttatagtagagatctttcacctctctgattagatgtattcctgggtatttttggtgtgtgtgtgtgtagcaattatgaatgggattgcctttctgatttggccctcagtttggttattgttggtgtataggaatgctagtgatttttgtaccttgattttgtatcctgcaacttcgttgaagttgtttatgagctgaaggagcttttgggctgagactatagggttttctaggtgtagaatcatgttgtttgcaaacagagatcgtttgacttcctctcttcctatttggatacgctttatttctttctcttgcctgattgagctggctaggaattccagtgctatgttgaataaagtggtgagagagggcacccttgtcttgtgccagttttcaagggaaatgcttccag

SEQ ID NO: 914647 - DNA, 609 bp, Homo sapiens
tatcattgttggacatttgggttggttccaagtctttgctattgtgaatagtgccgtgataaacatacatgtgcatgtgtctttatagcagcatgttttgtaatcctttgggtrtatacccagtaatgggatggctgggtcaaatggtatttctagttctagatccctgaagaatcgccacactgacctccacaacccttgaactagtttacagtcgcaccaacagtgtaaaagtgttccttatagagacactagtgattggatttagggcctactctactccagtacgacctcatcttaactagttacatctgcaaaaactgatttacaaacaagctcacattctgaggttccaggtggacatgaattttgacagtggacagaactcttgaactggggacagcatctaaatgtgtacatgcggtgtagtcattatttacacatgactcaaaaaatctagttctactctccagtctagtctcttttcttgagttccaacaaaagagatggactcatgaagaattcagaccctctcatatcttatgtgcatctataaacaggaacttttgaagggactccagaaagacctatccaagaagtgtttgaagg

SEQ ID NO: 914648 - DNA, 609 bp, Homo sapiens
tatcattgttggacatttgggttggttccaagtctttgctattgtgaatagtgccgtgataaacatacatgtgcatgtgtctttatagcagcatgttttgtaatcctttgggtatatacccagtaatgggayggctgggtcaaatggtatttctagttctagatccctgaagaatcgccacactgacctccacaacccttgaactagtttacagtcgcaccaacagtgtaaaagtgttccttatagagacactagtgattggatttagggcctactctactccagtacgacctcatcttaactagttacatctgcaaaaactgatttacaaacaagctcacattctgaggttccaggtggacatgaattttgacagtggacagaactcttgaactggggacagcatctaaatgtgtacatgcggtgtagtcattatttacacatgactcaaaaaatctagttctactctccagtctagtctcttttcttgagttccaacaaaagagatggactcatgaagaattcagaccctctcatatcttatgtgcatctataaacaggaacttttgaagggactccagaaagacctatccaagaagtgtttgaagg

SEQ ID NO: 914649 - DNA, 609 bp, Homo sapiens
tatcattgttggacatttgggttggttccaagtctttgctattgtgaatagtgccgtgataaacatacatgtgcatgtgtctttatagcagcatgttttgtaatcctttgggtatatacccagtaatgggatrgctgggtcaaatggtatttctagttctagatccctgaagaatcgccacactgacctccacaacccttgaactagtttacagtcgcaccaacagtgtaaaagtgttccttatagagacactagtgattggatttagggcctactctactccagtacgacctcatcttaactagttacatctgcaaaaactgatttacaaacaagctcacattctgaggttccaggtggacatgaattttgacagtggacagaactcttgaactggggacagcatctaaatgtgtacatgcggtgtagtcattatttacacatgactcaaaaaatctagttctactctccagtctagtctcttttcttgagttccaacaaaagagatggactcatgaagaattcagaccctctcatatcttatgtgcatctataaacaggaacttttgaagggactccagaaagacctatccaagaagtgtttgaagg

SEQ ID NO: 914650 - DNA, 575 bp, Homo sapiens
tctaaagttatctaaagaaacaatctattagtctgctcgggctgccataacaaaaataycacaggctgcatgacttaaacaacagaaatttatttttttgacagttttggaggcttacagatcaaagtgctctaagtggggttagcatctgggaggcctctcttcctggcttgaagatggctaccttctcaaggtgtccccacatggcctttgctatgtgagcatagggagtggggagaaatatccctggttcctcttcctgctcttataagaacacaagtcttattggtgtagggtcttactcttataccttatttaacattaattacctccataaaggccctgtctccaaatacagtcacagtgaaagtttacatcttcaaaatctgaattttagaagaacacaatttgacccataacaaatactatattggatcatttccacaaaaatctttggataacattgatctttaaaaagtcgtaaaattggctaggcatggtggctcacgcctgtaatcctagcactttgggaggccgaggtaggaggatcactggagctcaggagttcaagacca

SEQ ID NO: 914651 - DNA, 600 bp, Homo sapiens
ctaaaggcaagtatatcttacaggcaatcttcaataaacactatttctcacaagtaagctttgatagaaattgggcagctgagtgggtttataatctctggcagaagytgaatggcagttctattgtgttgctaatcaaaagtataatgatatgctttgaaagttcatggttaggttctaaaaagctggtctccctaggctcctgcttcagtagaaagaaacatgacttctcttgatcagcttgtgatgaagcaataactgtgggcacaaccaataatattctcaaaaacttgctgctctaacacacgaacaaaatagtatgtgtggcctgtagatctgtgctccatttcagtagttcccaatctatgggctgcacactctaagtgattgtattttttatgtgtgggaggggtcaaagttttgcaaagttattttttttaatactaaatttggatgtgacctttcaactaatacaaagtacaactattacactgtagaagatccactaactttttcaacattaaacttgtaaaatttggggagttctttttatagttagaagatgcttacaatcaataaattaggataaataaatctgga

SEQ ID NO: 914652 - DNA, 600 bp, Homo sapiens
ctaaaggcaagtatatcttacaggcaatcttcaataaacactatttctcacaagtaagctttgatagaaattgggcagctgagtgggtttataatctctggcagaagttgaatggcagtwctattgtgttgctaatcaaaagtataatgatatgctttgaaagttcatggttaggttctaaaaagctggtctccctaggctcctgcttcagtagaaagaaacatgacttctcttgatcagcttgtgatgaagcaataactgtgggcacaaccaataatattctcaaaaacttgctgctctaacacacgaacaaaatagtatgtgtggcctgtagatctgtgctccatttcagtagttcccaatctatgggctgcacactctaagtgattgtattttttatgtgtgggaggggtcaaagttttgcaaagttattttttttaatactaaatttggatgtgacctttcaactaatacaaagtacaactattacactgtagaagatccactaactttttcaacattaaacttgtaaaatttggggagttctttttatagttagaagatgcttacaatcaataaattaggataaataaatctgga

SEQ ID NO: 914653 - DNA, 620 bp, Homo sapiens
aacccatccccaatacactggcccctcaggaaggcttggccataggcatggggtctctcatgctcggaaaacatatcatcatgcctgakgcccaaagtggcttggagttaatgttattgagtgcctacagaagtctttctttttatgatgatgatgatggtgacaaataaaatgttatatatttatgatgtacaacatgacattttgatatatgtatacattgtggattggttaaatcaagctaattaattgatccattatcaatttttttgtgatgagaacatttaaaatctttcttagcattcttcaaatattcaatacattcttgtcagctatcgtaaccatactgtacaatagatcccctgaactggtaattctttctaactgaaattttgattccttggaccaccatctccccaaccccccactgtcactctggcccacggcatctcacccttcttctctctgcttctataagttcaacttttttggattccacatgcagtcacacattgcttaatgacagggatatgttctgagaaatgtgttgttagatgattgtgtcattgtgagaacatcatagagggtacttaaacaaacctagatggaacagccaactg

SEQ ID NO: 914654 - DNA, 523 bp, Homo sapiens
agctgagagactacttcctaactcactcaatgaagccagcattaccctaataacaaaccaatatctctcataaatatagacagaaaaatcttcaacaaaatattagcaaacaattaaaaaatgtataaaaagaactatatactatgaccaagtgggatttatcacaggtatgcaagtatgatcgacatttgaaaactgattattccatcatatgagctaaaggggaaaacttatatgattatatcaatagatccagaagaagcatttcacaaaatcctacacccattcctgatttaaaaatggaaaatagactctcagcaaactaggaatagagaggagtctcctcaatttgataaagaacatctgcaaaatcctgcatctagcatcacgcttaaatggtgagaaacttgaagctttcccastaaaatcaagaataggacaaggatgtctcctctcaccactcttttacatcatgatcctggaagtcctagccaatgcaatgtgacaagaaaaggaaataaaa

SEQ ID NO: 914655 - DNA, 581 bp, Homo sapiens
agcatgtgggagccctttcctsgttttcctcccagtggcttttaccatatatgtgttcagttggaattacttgaaaaataagatgagtgtttgcttggttttataaaaaataatctgctcccaaattgtcattcttgaatatttagtctttcttctacagagaagtgtgcaggaagaattagagacccttgtgggagagcgtatttggttctgaaaggatttctgctttccatttcttgtaggagataaccaaatttaggagacagtttgcttgactaaacaagacactgaagggattttcttttggcaaacacagagcagtgtttctaaccttggcactgttgacattttgggccagagaatcctttgttgtggggctgtcccgtgcatgacacgatgcttagtggcttccctggcctctacccagggatgccagtggtatcacaccctctccttctcatacttaaaaaaaatattgccctcagttgagaactactgagggtatacagagtcagctaaaacagggaggacagtaaaagctagggctcatcattaaaatttaggtaaaaacaaaaaggatt

SEQ ID NO: 914656 - DNA, 695 bp, Homo sapiens
agcattgaatacatgtgcatatgtaatacacacatggtagtaatcaaactattggccaatcacatcaaggtttagatacttaatccactgaagctggtagttattttgatctgtaatcatagtgagtaataagcatgtttgaattatgggggactagtttcttatttgtcttttattatatttttagagatggggtcttgctctgtcatccaagctagagtgcagtggtgtgattacagctcactgcagccttgaactcctgggctcaagtgatcccctcacctcagcctctggagtaattggaacttctagtgcacaccaccatgccctgctaatttattttatttttttagagatagggtcttgctatgttgcccaagcaggtctcaaactcctggcctcaaggaatcctcccacctcagcctcctgagtgatttggattaaaaggatgagccacctgcacccaatgggaatattttcttgatagcatttgtcctagagccaatcttctatgcaggccttaggactcctgccaagaggttcagaagttgacatcagataaccagacgttgttatccagacagtcctctyaagtacctgaattcctgggagtgtttagatactcccagacaacatcaacagtaacagaaatagggatagataatagggaaagagccgcaatagttgactaattc

SEQ ID NO: 914657 - DNA, 631 bp, Homo sapiens
catcagtgcattagtaaataacagaaacttattatttcttgactaaataaattatgacatggtaagaaattgttcctgccctcaggatgaacacaatcaactgaaaaagataaaaaattcgacatttacaaaagaatgtactttggtaggctgaagcaggaggatcacttgagcccaggattccaagtccagcttaggcaacatagtgagacactctctctaaaaagaattttaaatttttaaaaagaatgtactaaatattataaaatgggaaatttgaagcactatgagaaggacttacctttctaacaatatgaaggaatatgtactctgaaaatcctttttataacatcacttacaaaaatacatagttgagctgacaaaaaaataagagagccccttaaaggcctgaattaaagagcgattttgaattcagagagaaaatagttgacatctgccatgtgcttctgccattgcctagtggctgagagcttagatcacacatgcacaagggaaaggaagcagagccttctagctggtaagagggtcccaagtaaagcaaaaactgcttaagggcaattgctgcaaraaaataataaaattgggtgagggaaccacctcagaaagggag

SEQ ID NO: 914658 - DNA, 667 bp, Homo sapiens
ctcatcacaaatcctgcactataggtaagcactaattcttattgggtgtttttctcttatcagagactaagtcttgaccagaaagtggctcttgacattgtttctttctttttaatttttaaaaattattatgggcacatataatatgtgtatatatttgtggggtacaggtgatgttttgatacaggcatacaatgtgtaataatcaaatcagggtaattgggtatccattatctcaagcatttatcatttctttgtgttaggaacattacagtcccactcttttataatagttatctttaagtttacagtaaattattgttctgttgtgctgtgaaatactagaccttattcattctatctctatatttttgtacccattaaccatccccactttatccccagtccctcaaccttgtttcttgtacttgaatccctattttcattaccttccttaggaagtgggggctgcctcaccttccgcagatctcctcagaacaccatctcgttatgggagctcagctaccatgtagactgccatccatttagytctgttcatagagcttactggttgctctctttcccatgattgtgctctacctgactgtcacctttgcctggttcttgatgccagctgcaactgcagagtcaccggttgccaatcata

SEQ ID NO: 914659 - DNA, 620 bp, Homo sapiens
tagtgttcatgggatataggcatggctggcatgcatgctgcatttcaggtaggtgtagagtacaagggaaagggcataggaataaaaagcataagtaaaagtaaagcatataaaaaattgataccttaagatacaagaatttatgacatgggcagcagggtacagactcagacagtttcaatatttggttattgagctacttgccgcggggaggctgcaatccctctgcaatgccaataagaaggggatgtatatggactgaggtacaaactgcctctgccatggagccattattcccctggtaggggaaaggggtggtcaaaagaaaattcatacttttattgtttacttccagtacacaagacttacaattatttgtgtaacataaatttaaataattgatgttttcagctgtaatttttggattacatttcaaacagttcaaaatacatttattttttctgataaataaaacacccttacacaacttttaaaaaaattctaaaaaatatctgctacagaaatacctatatctgaaggaaattartgccttactttattgtccaggtagaaactgaccaatcttgtttgggtctacctactccccattacctatcatg

SEQ ID NO: 914660 - DNA, 567 bp, Homo sapiens
tatggcagaaggggaagcaaacacgtccttcttcacatggcagcagcaaggagaagtgctgagcaaagcgggagaagccttttataagaccattagatctcgtgagaactcactcactatcacagaacagcatgggggtaatcgcccccacgattcaataacctcccacaacatggcttcatagtggagtggagtcatgtggatatgtttaatcttgtcaatcagatgtctgaaggctgaagtgatgtttttataagttgtctgtcatttttctttgggttagatagacttttagggatgggtaaagttatttgagttacaaaactaggtcagggtccccctctcttcattccaaattgcacaagaaaactttaattttaatcttgttaactaaatatatttgttattaatgaaccagcattagtcagtgttaatgttgatcaatgttacattcttgtcatgcgtaaactttatcactattaaggggaacaacacawacctgggcctgtcgggggtagggggatgaggagagggagagcatcaggacaaacagctaatgcatgcagg

SEQ ID NO: 914661 - DNA, 468 bp, Homo sapiens
aatgttattacagccattatggaaaacagaatattctgtggctcctcaaaaaaataaacttagaaytatcgcatgatctagcaattctacttctatttctaaaggaaatgaaatcagtatgtggaagagatatctgcactctcaagtttactgaagcattattcacaatcatcaagatacagaatcaacctaagtgtccatcaacaggtaaatggataaagaaatgtgtcctggctgggggcggtggctcacacctgtaatcccagcactttgggaggcagaggcaggtggattgcttgaggtcaggagtttgagaccagcttggccaacatggtggaaccccgtctctactaaaaatacaaaaattagccaggagtggtggtgggtgcctgtaatcccagctacttggggggttgaggcaggagaatcacttcaacccaggaggctgaggttgcagtgagccaagat

SEQ ID NO: 914662 - DNA, 596 bp, Homo sapiens
tgtaacccaggcctgcagacaagtcctcactacacagaggtagtgagagagtgtatgcaggaggccttgtctttatgcataacctgctagcaatgtagcaagacagtgctgggggcacmgcaataaaattacacttcgtgcccagattatagatccaggtgaggtgacttgctagagaaagggcttccccattccccccagctatataaggtaatgaattatgctagggtctcaggatttcctgattggcagggtaggaggcttggttttccccctctgctcccactcagggcttcctgtgatatggcaggcggaaaaccaccaccatgaccactcatgaaaatgggagacgggccgggcacagtggctcacacccgtaatcccagcactttgggatgctgaggcaggtggatcacatgaggccaggagttccagaccagcttagccaacatggtgaaaccctgtctctactaaaaaaaaaaaaatacaaaaattactcaggcatggtggtacacatctgtaatcccagatactcgggaggctgaggcacaagaatcgcttgaatccgggaggtagaggttgcagtgggccaagat

SEQ ID NO: 914663 - DNA, 573 bp, Homo sapiens
aagaccaagaaccctggtgttcctccagtcatcagagccatatcacaattgagccgctttcttttgtaaatggcctggtctgaggtatgtctttatcagcaatgtgaaaatggactaataagtaaacagtaccagtagagtggggtgttgctgaaaagatacctgaaaatgtggaagcaactttggaactgggtaacaggcagaggttggaacagtttggagggctcagaagaagacacgaaaatgtgggaaagtttggaactttctagaggcttgttgaatggctttgacaaaaatcttgacagtgatatgaacaataaggtccaggctgaggtggtctcaggtggagatgataaacttgttgggaactggagcaaaggtgactcttgttatattttagcaaagagattgacagcatttttgcccctgccctaaagatttgtggaactttgaacttgagagagatgatttaggttatctggcagaagaaatttstaagcagcaaagcatttcagagatgacttgggtgctgttaaaggcattcagttttaaaagggaaacagagcattaaag

SEQ ID NO: 914664 - DNA, 548 bp, Homo sapiens
aaatcattctatgaagacacatgcccatgtatgtttattgcagcactgttcaccatagcaaagactcggaaccaacccacatgcccatcagtgatagactggataaagaaaatgtggcacatatacaccatgaaatactatgcagccataaaaagggatgagttcatgtcctttgcagggacatggatgaagctggaaactatcgttctcagcaaactaatacatgaacagaaaaccaaacaccacatgttctcactcataagtgggagttgaacaatgagaacacatggacacagggaggggaacatcacacactggggtctgtcagggggtgggaggctaggggagggatatcattaggagaaatacctagtgtagatgacgggttgatgggtgcggcaaaccaccatggcacgtgtatacctatgtaacaaacctgcacgttctgcwcatgtatcccaggacatgaagtataataataaaaggcattgctaagtgagggactttgccgccctagttttaatctattaagaatattatgcacaggg

SEQ ID NO: 914665 - DNA, 661 bp, Homo sapiens
atcactgataccgtttcttccagttgatcaaatcagctactgaagcttgtgcatttgtcacrtagttcttgtgccatgattttcagctccatcaggtcatttaaggacttctctacactggttattctagttagccattcgtctaatcttttttcaaggtttttagcttctttgcaatgggttcaaacttagctcagagaaatttgatcacctgaagccttcttctctcaactcatcaaagtcattttctgtccagctttgttctgttgctggtgaggagctgcgttcctttggagtgggagaggcgctctgatttttagaattttcagcttttctgctctgttttttccccaactttgtggttttatctacctttggtctttgatgatggtgacgtacagatggggttttggtgtggatgtcctttctgtttgttagttttccttctaacagtcaggaccctcagaagcaggtctgttggagtttgctggaggtccactccagaccctgtttgcctgtgtatcagcaatggaggctgcagaacagcaaatattgctgaacagcaagttttcctgcctgatcattcctctggaagcttcgtctcagaggggtacctggccgtgtgaggtgtcagtctacccctactggggggtgcctccca

SEQ ID NO: 914666 - DNA, 617 bp, Homo sapiens
actacaaacatgaattacatataaatagaaaccttatttgaaagaattttcttttgttaacagcttattagacatttgtttcatgttgtaactttagataaattaaatttgaatatttcataattgtaatcaattctcttcagcttcaattttaattcctaattgattcaagcctattagcaagatccctggtggtagtctgttacataatgttagtaaaaggcctgaggtttttctcctaacaaacttggtgccagctcgttagactgaaaataagatactctctggtagatccagcggattggatgcctgggtcctaagtttcccaagccagggattatcaccttttaggagctgcaaggaagttagaaggataaaggagaataacttaggaaaccaaataacttcttatgtgtcgcggtgatacttttcttttttttttaatttatttatttatttacttttcatgcgcgtctgtgtgaagagaccaccaaacaggctttgtgtgagcaataaagctcttaatcacctgggtgcaggcgggctgagtcggaaaagagagtcagtgaagggagataagggtggggccgtyttataggatttgggtagataaagga

SEQ ID NO: 914667 - DNA, 549 bp, Homo sapiens
aagaagagagagaaatagaggggctcataatcaaataagtttcccaaaacacctccactcccaattgcacattaaccatacttagaatattacaatctcctagaagtcctctggtaagtaataataacagtaaaaataacatttgattgagtgcagccattcttttgctggcaataggaaataaaataatgcccatatcaaggcccatataggccttgattcatctggtcccccactgtattagttcattttcacactgctataaagaaccacctgagactgggtaatttagaaagaaaagaggtttaattgattcacagttccacatatctggggaggcctcaggaaacttacaatgacagaaggcaaaggggaagtaaggcatatcttacgtggcagcaggagagagagagagagcacagaggggggtgctacacttttaaaccatcagatctcatgagaactcactcactatcacaagaacagcatgggggaagtctgtccccatgatctaatcacttccctccmagcctcaacccctgacacgtg

SEQ ID NO: 914668 - DNA, 576 bp, Homo sapiens
tctatcctacagccttgctgaacctatctattaattctaggaggtttcgtctagattccttgagattttctttctttttttycccccctttacattttctttttttttttattattatactttaagttttagggtacatgtacacaatgtgcaggttagttacatatgtatacatgtgccatgttggtgtgctgcacccattaactcgtcctttaacattaggtatgtctcctaatgctatccctccccctccccccaccccacaacagtccccggtgtgtgatgttccccttcctgtgtccaagtgttctcattgttcaattcccacctatgagtgagaacatgcggtgtttggttttttgtccttgtgatagtttgctgagaatgatggtttccagcttcatccatgtccctacaaaggacatgaactcatcatattttatggctgcatagtattccatggtgtatatgtgccacattttcttaacccagtctatcattgttggacatttggcttggttccaagtctttgctattgtaaatggtgccacaataaaaatacatgtgcatgtgtct

SEQ ID NO: 914669 - DNA, 623 bp, Homo sapiens
gacctgaaacaataaaagttctagaagataacattagaaaaacctttctgaaattggcttargcaaagacttcatgaccaagaatccaaaagcaaatgaaacaaaaacaaagataaatagataggacttaattaaactaaaaagcttttgcacagaaaaaaaaaaatcagcggagtaaacagagaactcacagagtggaacaaaatcttcacaaactatgcatccaacaaaggactaatatccagaatctacaaggaactcagttttctcttcaaacaaatcagcaagaaaaaagcaaaaaatcacatcaaaaagtgggctaagggcatgaatagacaattctctagagaagatacacaaatggccaacaaacatatgaaaaaatgctgaacatcaattatcaggaaaatgcaaataaaaaccacaatgtgataccaccttactcctgcaagaatggccataatcaaaaaataaaaaaaataagagctgttggagtgaatgtggtcaaaggggaacaattttatactgctggcgggaatgtaaactagtacaacccctaaggaaaacaatgtggagattccttaaagaattaaaagtagatctaccgtttggtccagcaattt

SEQ ID NO: 914670 - DNA, 634 bp, Homo sapiens
tcactgggtccctcccatgacatgtgggaattatgggaactccaattcaagatgagctttgggtagggacacagccaaaccacatcattctccccctggcccctmccaaatctcatgtcctcacatttcaaaatgcaatcatgcacttttaacagtcccacaaaatcttaactcattccagcattaactcaaaagtccaagtccaaagtctcatctgagacaaggcaagtccctttcacctatgagcctgtaaaatcaaaagcaagttagttacttcctagatacaatgggggtactggcactcattaaatagacccattccaaatgggagaagttggccaaaatgaaggggctataggtcccatgcaagtatgaaagccaatagggcagtcattaaatcttaaagtttcaaaatgttttattttactccctgtctaatatccaggtcatgctgatgcaagaggtgggctcccacagccttgagcagctccaaacctgtggctttgaaaggtacagccccttgcctggcttcttcatgggctggcattgactgcctgtggcctttccaggtgcatggtgcaagctgttggtggatctaccattctggggtctggaggatggtggttctcttctc

SEQ ID NO: 914671 - DNA, 644 bp, Homo sapiens
tttaccaacttccccttgttgccatattctcacacataaatttgtcctcttggatctctgtcttctatgagaaccatccttaagatccakatgggaagtgccaggttttctgtaatgaaggagtgggtcacacagtttaattcagatcattaaaacccaagaatattgcccagaaataattagcctcctagcctcacctattccttacattcatttgcatcagtttcccaatctggcttgttctttgattcagctctttgtctctcttgttgatcagtctcccttcctctagcagctgctcttccagctatggttttggtttgttgggcactgattcccagccagagagctacttgccttcttgatttcaatattttgctctctaagcacagcttattgaaaagccatcctgtcttcaacttggcctgtgaattttatctggacaacccttatcaccaatccctagtggaagtctttttatcaacacttcattcagcttagcaatcacttacctgcctaaccagcctatgcttctagctaaggtttcaagaactgagttgtttttttgttttgtttttgttttttgtttttttttttttggtgaggggagaggtgttgtttttgtttttgctttttagtggatt

SEQ ID NO: 914672 - DNA, 638 bp, Homo sapiens
aaatactggtgaatcaccttctaaatccatgaacagtattttaagaatccttaaacttaatacacatttggagtcagctattgtctgacttaaggaggactgcttgctctaccacaagaaataggcaacgggatgctgcctcacacaggaaaagaaagattgactctgcctgatatggtttggctctgtacgcacacaaatctcatgtcaatttgtaatccccatgtgtcaggggaggggcctggtgggaggtgattggatcatgggggtagtcttcctccttgctgttctcatgatagtgaatgagttctcatgagatctggttgtttaaaagtgtgtggcacttccccctttgctctctctctctcctgctctgccatgtgaatatgtgcttatttccccttcgcccttctgccatgattgtaagtttcctgaggcttcacagccatgcttcctgtgcagcctgagggactgtgaatcaattaaacctcttttcttcataaattacccagtctcagatagttctttatggcagtgtgagaatggactaayacactgcctctaagtctttggcctgctttttttccttgacaggaaaacaaaaacaaacaaaaattactgaacaaggcatttaatga

SEQ ID NO: 914673 - DNA, 621 bp, Homo sapiens
ggcagactgggaccctaggtcatgaactgaagctgctgtcacagtaggaatttcttctttaaaaaagcctctgccaggttttttgtattgggatgatgctggtctcacttctcaaaagraaacatttatgcggccaaaaaacatacgaaaaacagctcatcactggtcattagagaaatgcaaatcaaaaccacagtgagataccatctcacgccccagttagaatggcgatcattaaaaagccagcactccagcctgggcgaaagagtgagactccgtctcaaaaaaaaaaaaaaaaaaaaaattcaggaaacaacagatgctggagaggatgtggagaaataggaatgcttttacactgttggtgggagtgtaaattagttcaaccattgtagaagacagtgtggcgactcctcaaggatctagagccagaaataccatttgacccagcaatctcatcactgggtatatgcccaaatgattataaatcattctactataaagacatgtatgtttattgcagccctgttcacaatagcaaacacttggaaccaacccaaatgcccatcaatgatagattagataaagaaaatgtggcacatatacaacatggaattctat

SEQ ID NO: 914674 - DNA, 603 bp, Homo sapiens
ttttcacatgtaaattcaacggcgtgactaaactagttgccattttctatttggctaccacgaaacttagggaaaaaaatgagggaacattattaccagatgtgtggtttacaagagtctaatgtttatcctcatttgttgttcatccattataaatactatatttcaatgttttatatgtctttgaatgcaactctaaagcagcacaccagcatggcacatgtatacatatgtaactaacctgcacattgtgcacatgtaccctaaaacttaaagtataataataataaaataaaaaaagaagaaaaaataaaaaaattaaaaaaaataaagttttcttataataataatgtgtgcataaagaatgaatggttaaatccccatctaaaatactagtttgtacaatatcatctctatttagtacctagtcttgtaaaagtacataattcttaaatcccagcttatattgttataaagacatgtgaatggattttgtaacttatgggcagttctatagatagactctcagaaaggactagaacaaggattccaaacatatctgtrtattgaaattattcagagagattttaaaatactgatgtc

SEQ ID NO: 914675 - DNA, 638 bp, Homo sapiens
ttcaatcttagtccaaaaaaatctataaaggacattattatgacaaatgcaacttgaatatgggttatgaattagatgrtaagttgagtcaatgttaaatttcctatttttggtaattgtgttgtgatgatatattatcatttcttaagaaatactaaagttttacgggtaaagagacattatgtttccaagttacccctctatagttcagaaaaaataatagtttatgtattaaatatttatcatgtttataaatatatgtacataatgtttataacacatacatctacatatgaacatagagaacattataaagcaaaaaggacagaataaaactgaataaattctagaagggattggaatcccttctagaattctttcagtttctctgtaaacttgaattgatagaaaaatcaaaagatttttaaaaccctattatacaaaaagcttctatgaaacaaaaaaggcaactaacgggaaaatgggcaaagaatataagtaggcaattcacagaagaaattaaaatagaaataatagtaagtctattgttactaaatagaaataattctcattaaagataaaactgtttatattgtttatttttaaaattattttaaaaattttagtaaacatacatt

SEQ ID NO: 914676 - DNA, 629 bp, Homo sapiens
tccacaaatctctagagcaggggcaaaatgccaccagtctctttgytaaaacataacaagagtcacctttgctccagttcccaacaagttcctcatctccatttgagaccacctcagcctggaccttgtccttatcactatcagcattttgggcaaagccactcaacaagtctctaggaagttccaaactttgccacattttcctatcttcttctgagcccttcaaactgttccaacctctgccaaagtcacttccacattttcaggtatcttttcagcagcgccccactctactgataccaacttactatattagtccgttttcatgctgttaataaagacatacctgagattgggaagaaaaagaggtttaattggacttacagttccacacggctggggaggcctcagtattacagcgggaggcaaaaggcacttcttacatggcggcagcaagagaaaatgagaaggatccaaaaacggaaacccctgataaaaccatcagatctcatgagacttattcactaccatgagagcagtaggggggaaaccgcccccttaattcaaattatctcccaccgagtccctcccacaacacgtgggaattatgggagtacaattcaagacga

SEQ ID NO: 914677 - DNA, 607 bp, Homo sapiens
tatgggtggggacacagagccaaaccatatcacacttacttggtatctaaacaactataatttccagaagcccctaagaaaaccattcctctgattcccattcaraatctatctaaaaactagtcacattactaactttatgtctaagagtacattgttagctgctatagatctctttctaaaaataaaaaacaaaactgccaaggcaggagggttgtttgaggccacaagttccagaccagcctgggcaataaagcaagaccctgtctctacaaataacttaaaaagtagtcaggtgtggtggcgtgagcctgtggtcccagctacttgggaggctgaagtgggaggattgcttaggcctgggaggtcaaagccacaatgagttgtgatggcaccactgcactcaaggctgggaaatagtgagtccctgtcccaaaaaaaaaaaaaaaaagagagactcattaagaaggtctccatagcagggcgtggtggccaatgcctataatcttagcactttgggaggctaaggcgggcagatcgcttgagcccaggggctcaaggccagcctgggcaacatggggaaaccccgtctcttaaaaaaaaaaaa

SEQ ID NO: 914678 - DNA, 562 bp, Homo sapiens
ccatggcacactctgcataagaaagggaatattttcattgaatcaaacaatgattaattattccttaggaaaaccatctaaagaataatgcagtgcatgctatattcacaaaagtgggatctttgtaaaaacagacctgacaagacaaagaggggatagtaaaaaaagcccaaagaagtgtgaagagcaagccacttgagaagggttgtggccttctgtggagaaatacagcctgcacgtggtgaactgacaggagggagctgatagaacaaccacttcacactcactctcctctcatgctcagaatctcctgttggtgatctctcatttacttctccaaatggaatttgaagggaaagtgaactggagattgtctttcagggcaaggagagcactagtgaagagaggagtgttttgaaagtgtacatgggcgataktcagtgcactctatatacttgctttctatatctgctgtaacaaattaccacaaactcagtgggttaaaacaacacagatttgttaccttacagttctggaggtcagaagtctgaaatggctttca

SEQ ID NO: 914679 - DNA, 562 bp, Homo sapiens
ccatggcacactctgcataagaaagggaatattttcattgaatcaaacaatgattaattattccttaggaaaaccatctaaagaataatgcagtgcatgctatattcacaaaagtgggatctttgtaaaaacagacctgacaagacaaagaggggatagtaaaaaaagcccaaagaagtgtgaagagcaagccacttgagaagggttgtggccttctgtggagaaatacagcctgcacgtggtgaactgacaggagggagctgatagaacaaccacttcacactcactctcctctcatgctcagaatctcctgttggtgatctctcatttacttctccaaatggaatttgaagggaaagtgaactggagattgtctttcagggcaaggagagcactagtgaagagaggagtgttttgaaagtgtacatgggcgatattcagtgcactctatatacttgctttctatatctkctgtaacaaattaccacaaactcagtgggttaaaacaacacagatttgttaccttacagttctggaggtcagaagtctgaaatggctttca

SEQ ID NO: 914680 - DNA, 562 bp, Homo sapiens
ccatggcacactctgcataagaaagggaatattttcattgaatcaaacaatgattaattattccttaggaaaaccatctaaagaataatgcagtgcatgctatattcacaaaagtgggatctttgtaaaaacagacctgacaagacaaagaggggatagtaaaaaaagcccaaagaagtgtgaagagcaagccacttgagaagggttgtggccttctgtggagaaatacagcctgcacgtggtgaactgacaggagggagctgatagaacaaccacttcacactcactctcctctcatgctcagaatctcctgttggtgatctctcatttacttctccaaatggaatttgaagggaaagtgaactggagattgtctttcagggcaaggagagcactagtgaagagaggagtgttttgaaagtgtacatgggcgatattcagtgcactctatatacttgctttctatatctgctgtaacaaattaccacaaactcagkgggttaaaacaacacagatttgttaccttacagttctggaggtcagaagtctgaaatggctttca

SEQ ID NO: 914681 - DNA, 606 bp, Homo sapiens
ggctggagtgcagtggcgcaatcttggctcactgtaacctccgcctctcaggttcaagcgatgctcctgccacagcctcccaagtagatgggattacaagcatgygccaccacacctggctaatttttgtatttttagtagagacaggttttcaccgcgttggccaggctggtctggaacttctgacctcaggtgatccccccaccctggcctcccaaagccctttcttaatttatacagattataagtacttactatattgtttcagagttatttctgttcttacatgtttccacagtaggctgtgagctccttgagggtagataggaccaatatttattcatctttatattcctagtgtccaatatagtgtccaatatagtccaatatagggcgtattgtaggaattgatgtgttcgtttgaattgatcaccagcatacataaattatactctcttttgaaagcctggttcttcacaaggctcctagctctgtaggtcccctgaggctgccactaggaggctccaaagccatccacatgaggaattttggtttgcttccaggttaggcaagaaactgatgatgcttgacaaattcttataaaaa

SEQ ID NO: 914682 - DNA, 577 bp, Homo sapiens
tgctagcataatccatcattcaagaaagccagcacactaaacatagctacaactaaggaccctgacacagtctagtttactcccctgccacctccaccacagcagacastagtatccatggctgagacctgaagatggatcacatcataggactctttgcagacattccccagaaccagcttggagcctgggagccccacttgatagcgagacccagaagggcaataatgatcattgcagtctggctcccagaaagccccatccctaggggaaggggaagagcaccacatgaagggatcacaccatgggacaaaagaaactgaacagcagctcttgagtcccagatcttccctctgacatagtctacccaaatgagaaggaaccagaaaaacaattctggtaatatgataaaacagggctctataataccctgaaaagatcacactagctccccagcaatggatccaaaccaagaagaattctgaattgcctgataagcaattcaggggattgattattaagctactcaaggagataccagagaaatgagagaactaacttaaagaaatgaaaagaa

SEQ ID NO: 914683 - DNA, 669 bp, Homo sapiens
attattccttttaactttttttcaattttaatttttattcagcctcttacctttttgctaaaaccaaaagttcaaaagaaaggtgatcaggacactcccaggaattttttagccatgtgagaatatatggtgaaatgattcaagtagatgcaacatggtctactggaaaagcactgagattttgaggagaaaacttagctctgccattagttaattgtcatcaaggtcttcctatgaaaattgtagttcaattttcaaacatttattgtttttctccaaagtgctaggcatatgcttttgtgctggagatgaaagatgaataacatgtaggtgctgtttttgaagaacatcactgaagagagagtgagctaaaacaaataatgatttgtgtgctagaatagagccaggttgtacagaaaggttctattaatagcgctcagtgatccctgcaaaagaagcatttgattctgtccaaagagatgagtacagaaaaagccaaagagaagaaatgatatttgatttgggattttgaaggatgaataggatttaaccagatgaatacattggaggaaagatattctggtaggaacactgtgagtaaacaactgtaggactttgggagggattgtgagtagagtgtgcaagayggaaagtacgttggcattataa

SEQ ID NO: 914684 - DNA, 652 bp, Homo sapiens
aacttgctttgcctcaagtctaaaaacagtaggctccaaagtgaccatcagagggatccacaggaccctgcagygggaacacaatagacatgtgctgcacttctggaaatccagaaggagagagagaggtcagcaggcggctttcatggcagaacaggcagaaagttgaggctctgtgggaagaaactggctcccctctgacagatgatcacaggtctgtgaaattcaaggaccagatgtagtaggtatggtgggcatacccaaagatgacctccaatgagtcatgattcttctgtacaatcccctcctgtttaatgtaggcagagcctgtatcttgcttctggtcaatagcatatgacaaaggtagttggatgtcactcccttgattatgttacatggtgtggaaaaggaacgggatgtctctaccttggttaggcaaaggtgataggatagtcactcccatcattacattacatccatataggtaaaccagttagattatctttctgtctttgcaagacatctgatcaaaggacctaagagaggaagctaagagagcaaagaactgcaagtggcctccaggagctgagagaagaccccagctgacaaccagcaagaaaacaaggacctcagtcctacaactgcccagaac

SEQ ID NO: 914685 - DNA, 580 bp, Homo sapiens
acagcaatatctaaagttttctccatgtagaagttgcatgtttttgttaattttagtccaatgcattttaacattttaattcttgtttgtaagaaatattttcttccttatgatttaattagcttkattctgtttattaaagttgtttatttctaattagtgacttaattaagagaattctctttcaaggcatgtaaaaatgctttaaaaacttactataagtgatatgaatgaaaaatactaaaccactttttttaatactcagatttttaaaaagccttcaactaaagattaaaactaaagtccctaaaatacttaatagatatataaatagcaggcatttgacaaaagaagacttgaaggtagaacaatatactaagaaaaatagattttgataaagattgctttgttgatacagcatttcctattttcacaaaaatcgtttaaaatttaagaagtaacgtataatgcataaattataattaatattctggaatgtcttctaccagaagatccattactttataaaggaaaaataaaactttcaaagtaaatatttgtttgcaatatcaactcacaa

SEQ ID NO: 914686 - DNA, 589 bp, Homo sapiens
ctagggtttaatcacaaagggatgctggatttcgtcaaatgctttttctgcatctattgagaggatcatatgatttttgattttaattctgtttatgtggtgtatygcatttattgacctataagttggcttcattttggagttgatttctaattctattttactgtggtctgagcgagtatttgatataattttgattttcttaatttaccaatatttgttttgtggcctatcatatggtctatcttggagaatgttccatgtgctgatgaacagaatgtatattctgcagttgttgggtagaatgttctgtaatatctgttaatgtaaatgtgtcttaaaccatccccacatccttggtatgaaatccacttgatcatggtggattatctttttgatatgctgttggattcaattccctagtattttgttcaagatttttgcatctatgttcatcagggagattggtctgtagttttctctttttgttatgtccttccccagttttggtattagagtgataatggcttcaaagaataatttagggaggattccccctttttctttcttttgaaatagtgtcaatagg

SEQ ID NO: 914687 - DNA, 589 bp, Homo sapiens
ctagggtttaatcacaaagggatgctggatttcgtcaaatgctttttctgcatctattgagaggatcatatgatttttgattttaattctgtttatgtggtgtatcgcatttattgacctataagttggcttcattttggagttgatttctaattctattttactgtggtctgagcgagtatttgatataattttgattttcttaatttaccaatatttgttttgtggcctatcatatggtctatcttggagaatgttccatgtgctgatgaacagaatgtatattctgcagttgttgggtagaatgttctgtaatatctgttaatgtaaatgtgtcttaaaccatccccacatccttggtatgaaatccacttgatcatggtggattatctttttgatatgctgttggattcaattccctagtattttgttcaagatttttgcatctatgttcatcagggagattggtctgtagttttctctttttgttatgtccttccccagttytggtattagagtgataatggcttcaaagaataatttagggaggattccccctttttctttcttttgaaatagtgtcaatagg

SEQ ID NO: 914688 - DNA, 629 bp, Homo sapiens
tataggcattaggtaaatacagccattccaaatgggagaaattggccaaaacaaagggactacaggtcccwtgcaagttcaaaatccagtggggcagtcaaatcttaaagctccaaagtgatctcctttggctccatgtctcacatctaggtcatgctgatgcaagaggtggtttcccatggtcttgggcagttccactgctgtgactctgcagggtacggcttccctcccagctgctttcatgggctggtgttgagtatctgcagcttttccaagtgcacagtgcaaggtgtcagtggatctgccattctggggtctgaaggacggaggccctcttctcatggctccactaagtggtgccccagtagggactctgtgtgggtgctccggcctcacatttcccttttatactgcccaagcagaggttctccatgagggccccacccttgcagcaaacttctgcctggacatccaggcatttccatacattttttgaaacctaaacagaggttccccaactccaattcttgacttctgtgtacttgcaggctcaacaccacatggaagttgccaagtcttggggctggcaccctctgaagccatgacctgagctctacattggccccttt

SEQ ID NO: 914689 - DNA, 621 bp, Homo sapiens
ctctaaataattcagaagccttaaggataacctcttgattaaagccttatgtaactaaayccaatagcaaacacaggcaaattcaggaaaaaaggtatatatatgcctttacgcatatacatacatatatgtgtgtgtttgtattatctctctctatatatacacacacgtatatgatatatataacatgtatatataacatatataaatatacacacatgcacacatactttctgttaaacaagcacacttttgtttctagcatcttagagcactttggccaaattcttagcatatattaaaggtaatttaagataagacatttacaacaagatactatcatatgcattctttttattatggatacattttgtttgttcataaatttgtgttagctcacacttcctatctctcattttatatatatatatatatatacatatacacacacagatatatatgtatacacacacacacacagatatatatatgtatgtatatatgcacagggtacacagtttaattgttcctccattcattgcattgtgtaaaaaatcattcagataattcttcctctgtatgattaaaaaaaataaaaagctgatgggttgaagaagttta

SEQ ID NO: 914690 - DNA, 626 bp, Homo sapiens
agactgtgaagactacaataaataccaaactctttaatgcctggacatatgagcatccacaagcattaagatcatccaggaaaacatgacctyaccagatgagctaaataaggcacaagggaccaatgtcaaggaaacagagatatgtgacctttcacagagagaagtaaaaatagatgtcttgaggaaactcgaagaaattaaagataacacagataagaacttcaggattttatctgataaatttaacaaagagattggaataattttacaaaatcaagcagaaattctggcatttcaaatgcaattggcatactaaagaatgcatgacagttctttaatagcagcattaatcaagcagaagaaagagttagtgagcttgaagacggggcatctgaaaatacacagataaaggagacaaaagaaaaaaatgataaaatacacctctgagatctagaaaatagcctcaaaaaggcaaatctaagagttactggcctttaagaggaggtagagaaagagattggtgtagaaagtttatttaaagggatagtaacaaagaacctcccaaaactagacaacaatatcagtatgcaagtacaagaaggttatagaacatcaagcagatt

SEQ ID NO: 914691 - DNA, 626 bp, Homo sapiens
agactgtgaagactacaataaataccaaactctttaatgcctggacatatgagcatccacaagcattaagatcatccaggaaaacatgacctcaccagatgagctaaataaggcacaagggaccaatgtcaaggaaacagagatatgtgacctttcacagagagaagtaaaaatagatgtcttgaggaaactcgaagaaattaaagataacacagataagaacttcaggattttatctgataaatttaacaaagagattggaataattttacaaaatcaagcagaaattctggcatttcaaatgcaattggcatactaaagaatgcatgacagttctttaatagcagcattaatcaagcagaagaaagagttagtgagcttgaagacggggcatctgaaaatacacagataaaggagacaaaagaaaaaaatgataaaatacacctctgagatctagaaaatagcctcaaaaaggcaaatctaagagttactggccyttaagaggaggtagagaaagagattggtgtagaaagtttatttaaagggatagtaacaaagaacctcccaaaactagacaacaatatcagtatgcaagtacaagaaggttatagaacatcaagcagatt

SEQ ID NO: 914692 - DNA, 623 bp, Homo sapiens
ccaaccgttatctgctcaaggactaaagactattgtataaatttccacagttttatcttacaccttaaagggagataactagaaaaggtcaagattatctaaattggtttctataaatccaataaagacgttgttactaagcatctactgtattggagcactggggacgtaaggataaatgttgggtgccctgccctcaaggaacttacaaaacctcctccatataccagtcatttaagaggaggtgttttcttcgccagcagagaaagtcgctactaaatggatttcgtacttctctgaccttttgtcagtgattcccaagtcttcatttaaaattgtcagctgtaatgaggtgatgccctctggagagactggagcctctaactctttctttacaacagccagaaatctgagtgacatcctggactctttttttctccctcgcccttcacctcaatccatcatcctgcagtacaaattctacctccatcatctttcaagtyttacacatttctgcatccccactaccccgatcttaatttggggtttcagatgtcttacctgaaatacttgaaatgcattttagcttatcttctgatttaagccgaatcaggcacttaatc

SEQ ID NO: 914693 - DNA, 608 bp, Homo sapiens
aaatcattgattaagatgcctgcataaacaacagattttcaacgyagatgaaacagctttaagttggaaaaagataccatctaagactttcatagttagagagaagaagtcaatgcctggcttcaggtcttcaaaggacagtctgaatctcctgttaggtgctcaagcaactggtgactttaaggtgaagccaatactcatttacccttctgaaaatcctagagcccttaagagttacgctacatttactctccctgcactccataaatggaaaaacaaagcctggatgatggaatatctgttcataacatggtttactaaatattttaagctcgctgttgagacctactgctaaaaaaaaaaaaaaaaagattcttttcaaaatattactgctcattgtcaatgcacctagttacccaggaactctgatggagatgtacaagaagatgaatgttatttccatgcctgctaacacagtatccattccatagcccatgggttaaggagtaatttggccttccagctcttattatttaagaaatacactttgtaagcctgtggctaccataggtagcaattcctctgatggatctgggcaaaataaatgg

SEQ ID NO: 914694 - DNA, 584 bp, Homo sapiens
atggctacctttgtcacagcaccaccagaatggattttggtcagttgctgcttcttaacctcactggttcttgccacgaaatttaggactagagtatctgattggtgaaggctagatcatgtgacagcactcttactgtaagggtggttaggaaagtgaatatatggaaatttcagattctttgctgaatagaggtctttgtctcataaggtggggaggagattcctcaaacccaaggggaagttcagtcactgagcagctaaaaggaatgacaaatgtctacacactggtgtttgattccctttcacaagtgcctgggcaaaccttagggagtagaggtcccaaaagtcaaactagatctggtaaagtaggtacccagagtgaccaggggcagatgtaacctgatgagcaaatgtaggtagaagcctaaggtcaaaacttaaggatcatgaccagttattgggcctaagggagtaatgcaaatattacaggagtggaagctacatatccctggatactaggaaatttaggaagaatatagagcttgccttcaygtgtagaagtgttgtcatatggaagagtga

SEQ ID NO: 914695 - DNA, 567 bp, Homo sapiens
gcagcactattcacaatagcaaagacttggaaccaacccaaatgcccatcaatgttagactggataaagaaaatgtggcacacatacaccatggaacattatgcagccataaaaaagaatgagttcatgtcstttgcagggacatggatgaagctggaaaccatcattctcagcaaactaacacaggaacaggaaaccaaacacgacatgttctcactcataagtggaatttgaacaatgagaacatatgagcacaaggaggggaacatcacacaccggggcctgtcgggaggtggggggtaaggggagggataacattaggagaaatacctaatgtagatgacaggttgaagggttcagcaaagcaccatagcacatgtatacttatgtaacaaacctgcacgatctgcacatgtatcccagaacttaaagtataattaaaaaaaaaacagaacttgttgattaagtaatatctgcaataaatagtccaagtttaattttaagattatgtggccaggtatgtaggttcatgcctgtagtcctagcactttgggaggccaaggtggg

SEQ ID NO: 914696 - DNA, 592 bp, Homo sapiens
cacttgggtcttctgtagggcactttagatttctcagctgaagctaaacattgtcaggttaagtgctgactacaccaggtgtaattgcctagttcactttccctggaccaaaagtagtggtgaagaccctgaaatccggcagtttgaggtcaagtttggcattggtctgaaaaaacatacttgcctcgggagacctgtgcgtagagacagtactggcttcccaatcaaggaaggccgtggagggtgtgtgtgggtgggagctggggattttgttgattctagccccatttgagagagaaatcctgatttatatttgctagctgtgttttagaatcaccatcagaggcaacctgaaactaataaaactgggacagagaagatgtgtaataaagaaatgaataaataagggaataaaagagtaaagaaatgaaaaatccaaaagtcttccaacttcaccttatggataaaattatctttgaccacacggatatttctcagaggttgattatacaactrcacttcttttgaaacagaaaaatatgttaagtaagtgctaaataatgactttaaaatgatattaccaccagagctt

SEQ ID NO: 914697 - DNA, 588 bp, Homo sapiens
ttgccacactgtattccacaatgtttgaaacccaaaactataaaaactctggaagaaaatctaggcaataccattcaggacataggcacwggtaaagatttcatgacgaaattgccaaaagcaattgcaacaaaagcaaaaattgacaaacaggatctaattaaactagagagcttctgcacagcaaaaaaaaaaaaaaaaaaaatcagagtgaataggcaacctacagagtgggagaaaacttttgcaatctatccatctgaaaaaggtctaatatccagagtctacaagaaacatacacaaatttacaagaaaaaaacaaacaaccccattaaaaagtgggcaaaggacatgagcagacacttctcaaaataagacattcatgcagccaacaaacatatggaaaaaagctcaatatcactgatcattagagaaatgcaaatgcaaatcaaaaccacaatgagataccatctcatgccagtcagaatggcggttatttaaaaagtcaagaaacaacagatgctggtgagtttgtgaagaaacaggaatgcttctacattgttggtgggaatgtaagttagttcaacc

SEQ ID NO: 914698 - DNA, 604 bp, Homo sapiens
tgaagagcacagcaaaggagctgtgcaaagaagagttcacagtccactgccttggtctgagtcccagctgcaccacacgtgctgggcgacccccttcccaatctgcagttttctcatctattcaatgggataacacaatacctaccttataaggttgttgtgagaaataattaagatactccgtctcaataaattaaggtctactggtggcaaaatatgatatctgattctggccaacatgagcacagattgggaagacacagagtcatttgtccttatacaatgagaggaaaaagagaagcatgagatttcagaaagtacggggaccagatgggttccaggcacctgcaccgcagaaacggtcggtctcctgagggcatccacaaatatcttccatttctatgcaaatcacatttctagggagtcgattgagcctgggtcacatgtgtagccctgtacaggtgaggggggagcctcttgattgacagatccaccagcctgcatgcaagtccagtggaattgtcccccaragcaaagttaaatttactggaacttaggggaatggatgcttggggggaaatggaggcagcacctgtacctctca

SEQ ID NO: 914699 - DNA, 605 bp, Homo sapiens
caagcactgcacttgctcatctcagtgtcctcagcgtggcaggaggcaggtgctgttaccaccctgttaccggctgaggaagttgaggcacagagtggsttagtcacctacctactgttgcacagccagacaatggccctgtggggagtaccgccccaggcttttctgatcctggagggggtttgttcttgagacctccagaggcattttctacaacagctcttggagagccctgaggtactgattagggaaaacaccagagccctggggcactaaggttggccctcactcctctggggctgacaggtagctggattttcatgtgtctgaatttgagcattctagagatatcatataaatggaatttctccgcctatgactgttttatttcacttagcataatgtcttgaagcttcatccaggctgtaccatgtgtcaaaatttccttccctttttaagactgaataatattccattgcatgtacacaccacattgggtttattcattcatctgtccatggacacttgtgttgcttccacattttagctatcatgaataatgcggttataaacatgggtgtcaaatatctgttagaggctctgtt

SEQ ID NO: 914700 - DNA, 617 bp, Homo sapiens
tgactaatagcagaaagttcatccaaagaaaacagataatgagtaatattaaaacctttcagccctgtccagaagcaatttttttcctcagctctcatgggagatcagatttccaacccctctttgcartggttttggctgctcctctcacactgaaagcacaggggccttggtccttccattgattcataagtacaacaccctacttcttggatacagagccatcgcggaatgttcgctggagtgaggcagcgtatggagcacatgggacatgcagacccaggtaaggtgtacaggaggccgggatcacctgcaatgactgtaacctcaggcaaatctcacaacttttcacagccatggatttcacatttatgctctggcaacattacctcaaacccacactgtgtggattatgtggagaactctataaactataaaagttacacaacatttattattttggtgtactttaattcaagggacagtatttagcacattgagatggtcttctgatctatttttaagaaaaggtcagctaacatgagatctaagaagagtattattctgaagttaccattaagctataagtcaaaagacaaaatcttggtgtcaaaaaa

SEQ ID NO: 914701 - DNA, 626 bp, Homo sapiens
actttcggaactcattttaaatcctgtcaatgattgtagaatatactaggaagcagtagagcatataggttaagagttcattttcagaatcagataactggccccatgactcgatgactccagaactcacaagctgtgtcatataaactctgcaggcttcagtcctgaactgcaaatgggagtagttaagtctattttatagtgttaatgtattacataacatagtatttataaattccctagcatagcacatggaacatagcaagggtccagtgaataatggttattttcataaataatatagaattgagagagcaaatgagcaacatagaaaaatcttaaaacaccactagtccgaggattcttgctcttctcttggtagacaattatctgtaaatataaaccaactacacacacaccatttatcaccaccaccaccaaaggggcttgattagttggttggtagaaccaaaagttcacttgggtgatttcattgcccttttctcttaggagaactggagtgggcagtgaggatggaggggaaggagcattgmccccatgtaagaaaatccttctcagtaatggtttctcacaggaaaagatgtgctaaatcaccttgcctagag

SEQ ID NO: 914702 - DNA, 651 bp, Homo sapiens
atttactttggcatccccccaaaatgaaatacttaggtataaatgtaacaaaatatgaacatgatctatatgagaactacaaaactctgatgaaagaaatcaaaaaagaactaaataaatgaagagrtattctatgttcatggataggaagactcaatattgccaagacatcaataatccccaacttgatctacagattcaatgcaatcttagttaaatctcagcaaactattctgtggacattggcaaagttatatggggagtcaaaagacacaacattgaagaagaagaacaaagttggaggaatgacaatacccaacttcaagatttaatataaagctacagtaaccacgactgcatggaattggcaaaagaagagacaaagagatcaatagaacaggatagaaagcccagaaataaactcacataaacataatcatctgacctttgacaaagaagcaaagacaatacagtggagcaaagatagtctttttggcaaatgatgctggaacaactggaaattcatagccaaaaaatgaatctacatacagaccttacactctttacaaaaattaacttaaaataaatcacaaacacaaatgaaaaatgcaaaactataagctcttaaaagataatataagagaaaatcta

SEQ ID NO: 914703 - DNA, 598 bp, Homo sapiens
ttgggacttatgttatattttaccaacaaatttakaattatttcaagttgctttatgttaaaatatataacaagttacattttcttgctgcattaataagtttttgatttttaaaatctgatatttcagcaactaaaggaatacttttctttataggtctgttctgtttttaacctcttgactgtatatgttttatttacccgtgccaggagtctagaatcgtgcttaggtgccattcttaggtatgaaaacaagtttggagaccaatgcaggtctctgtgcagaaatttggggctctatatgaattaccaaactcaatggaaagttaaaatactactcatgatgtagtgtgtcatctgaagctatgatagaatatattatttctaaaatagtattgagaagttaattgttcagtccatagtagtgtaagtgaagtgtggaggtcagccatagttgtctttcttcagcaggtactctaaccagagactgggttctgtggaaaatagaattatattcttggtttgggatcaacaaatgttttgttattgttttaatgttgctggcattgcctgaaacaaagtgccctgttattcctctt

SEQ ID NO: 914704 - DNA, 441 bp, Homo sapiens
ttggaatagtttcattagtaatggtaccagctctcctttatacatctggtagaattgggctgtgaatctttatggtcctgggctttttctggttggtgggctttttctggttggtaggctttttattactgactcaatttcagaactcattattggtctgttcaaggatcccatttctttctgattcaatcttgggaggttgtatgtttcaggaaattgtccatttcttctaggttttctaatttgtgtgcatggaggtgttcattgtagtttctgagggtttcttttttttgtatttctgtggggtcagtggtaacatcctcattgtcatttctgattgtgtttatttgaattttctctctttttttctttactmgtctaactagaactcttatttattcttccaaagaacaaattcctagatttgttaatcatcttttg

SEQ ID NO: 914705 - DNA, 598 bp, Homo sapiens
gtgatgcaaacctactgcatgtgcagtatacacggggccccttctgcatcacccccatggcacttgggtgggaagtgtagctaaagcaaaaatgatgttcatgtggcctgctgggtcctgagtaattaaaccctttatctctgctataggatctcatgacttttgcaggctaactcgtcagcttgcaagtaaggtaaaatctcagactcttcatggttcttgatagttttaactcattcacctgaattccacctaacgctgccccttttcaattaattctttaattcatttatcaaatgaaaactgctaaacctctcactgactcccattttaactgcactttttttttctttgatacatcttaggaaatgtgttagcaatgcaaatttcaagcacactctccttatttctaccttggaactctagaaggtagcaatatatatacatatttttgagacagggtcttgctctgtcatccaggctgcagtacagtggcactatctcggctcactacaacctctgcctcctgrgctcaagtgagcctcccacttcagtctctgagtagctgagactacagatgtgcaacaccatgcctggc

SEQ ID NO: 914706 - DNA, 623 bp, Homo sapiens
gaaaactctcctgtgttacccagtttgagtgtaccataccatccatctcttgcagggaccttgactgatacaacattaaaatgaagtgtaattttaaaaaattttatttacatatttcttattaagaattggatgaattgaaacttctttattttctttctctttcttgtcacacagaaagcctgattaagtagcattattcttttgtctacagaagtaaccacttctggccaggcatggtggctcactcctgtaatcccagcactttgggagcccgaggcaataggatcacctgagattgggagttggagaccagcctggccaacatggtgaaaccctgtctttactaaaaatacaaaaattagccgggtgtggtggtgggcacctgcaatcccagctactcgggaggctgaggcaggagaattgcttgaacccaggaggcggaggttgcagtgagccgagatagcaccactgcactccagcctgggcaatggagtgagactctctctcaaaaaaaaaaaaaaaaaaaaaaaaaagtaaygacttgtgctgatcttttttctcccctataggttcatagaaaaaaaactcccaccttataaaggaatctttaaaaggttcct

SEQ ID NO: 914707 - DNA, 621 bp, Homo sapiens
tttttaaataaaataaaacaaaacaaaaatcaactccaggtggcccatgtgaggtcagcagggatgagcccattttttctgcatagtcagaaaaggctgcagtgccgatccacctgggttgcctatgctatctgggtgtaactggactcatggggttaactctgaagtacttaacactaatcattctagtttcctgagtttgattcctcattttttcttaactatatgttttcaagatcttcctaaattgcttctgtaagtatgcaagctaatggatttggtgaatagtgacctctgaaagagtaggttcagtagggcaggtaaaatatagattttaagacataatcatcatcactaaaatttactgagctgcttttacttgtctcttttcacttaaacctcacaagaactgtataagattatatacatgcatattttacaggttaagttggaggtcagagtggttaagtaactcatcaaatgtccctgactattgtgtcagatagagtctgtctcaatccatttcatattgctataaaagaatacctgaggctaggtaattttgaaagaaaagaggcttatttgkctgacatttctggagactgtacaagaagcacagtg

SEQ ID NO: 914708 - DNA, 637 bp, Homo sapiens
aagcctggagataggtccatgctgagcggagctgaaacagatttttaaaggctcagggaagtgaacatgctggtatattatggcgatcagaagacccatcagaggattattatgcccagggaggtctggagaacacagcattcaccaagccattgggaaattagctgaaggctttcctctgcagaccacaactggtggtgtgaaaggctgttgtggagttgaatccacagagagtagtgatgatggggtgaaacagatgggaatcttgtgaggatacttcttaatacatctaatcaaaagatagccaacacaggccaggcgcagtggctcccacctgtaatcccagcactttgggaggcctaggtgggtggatcacttgaggtcaggaattcaagactagcctggccaacatggtgaaaccctgtctctactaaaaatacaaaaatcagctggatgcgatggtgtgcacctgtggtcccagctacttggaggctgaggcaggagaatcacttgaacccagaaggtagaggttgcagtgagctgaagtygtgccacttcactccagcctgggaaacagagtgagaccttgtattaaaaaaaaaaaaatccaacaaggatgcccaggaggctgagggtg

SEQ ID NO: 914709 - DNA, 556 bp, Homo sapiens
cctgaacttcagggttatgcctgaaaataccagaaagtcctgttgccctttcataggaggagctgaacaacagaactggctcttcagaaggcagagaaggcaaggccacatcccagttactactgagtcctcaccccgtaagcctcacaggtgccttgaatcccagctctcattatatctgggagaccttgagcaagttaattaaccttatgagctattccgtcttcatctgcaacataggaatagggaataattacagaattgctgtgagaattaaatgagataacatatgggccgggtgcggtggctcatgcctgtaatctcagcactttgggaggccgaggtgggcagatcacctgaggtcaggagttcaagactagcctgaccaacatggagaaaacccgtctctactaaaaatacaaaaaaattagccgggcgtggtggygcatgcctgtaatcccagctactcaggaggctgaggtaggagaatcacttcaacctgggaagtggaggttgcagtgagctgagatcgagccattgcactgcagcctgggca

SEQ ID NO: 914710 - DNA, 606 bp, Homo sapiens
ccatggttctccttagcacaaatctagcaaccactgtgtgttacatatagcagggrtgctcgtaaagtaagtgctaattgaggtggtaatttttttaagagaaggaaatatgaaagattcaatttactgtagtggagaaaaggagtctaccacggattccagctagtcttaagtctaagaaatggaatcaatatagcccttaaacaatcaatggattgtgctaacatcctgtcctgaaagaaaacataactgaaacaatacttgggctccgttctatgcttaatcatatgattccttcattcctgatatttaatcactctaccaagtattttgacaggcagaagccggagcatctaacaagaatggtgtgcaaaacagacataatccttgtcccttataaatttaaaagatcagaaaatatataactatgatatctcttgttaacaaaaatcaaatcatctactgttattaaagagacctaatttatagatttcatattaaaatgtgcatttagagtaaaagatgtactttttactgaatccctacaactaccctgactaagcttagatgcttaaatttgatactttgatgctaaattttttgcat

SEQ ID NO: 914711 - DNA, 557 bp, Homo sapiens
attcattgtctgatcaaaggaaacayggctgcattctaggaacaaattttctctcctggactcaattctaaaaggaatgaatggcatagcttcttagactggggacactgaaaaacaccatattatttttctgtatttctagcaaataaatatgcccaaacattagaaaacagtggagctatggtgggtgatgaaaagcaagaaaatagacattattgggtacccactaggtgtgccgtactatgttttttatatttatcattatattttatcttcaccaatttcctatgagatagatattatttccactttaaatatgggaatcctgaggcttgcagatactaagtgtccatagccagcattacaggtatttacaatctttggtgtgttaagcatcagatttgaaagtgtttattcatattgatttctagagattactgttcatggtgctagtttcatgcttcttgcaggtcttagactttatcaattggacttgtgttgcctcaaagccacacttgtgacacaagaatatgggagaggttctgtcctaggttcca

SEQ ID NO: 914712 - DNA, 669 bp, Homo sapiens
ttaggaatttcttctgccagatactttaaatcatctctctcgagctcaaagtttcaaaatctctagggcaggggcaaaatgccagtagtctttttgctaaaacataacaaaacctgcctttgctccaattgtcaacaagttcctcatcttcatctgagaccacctcagcttattgttcatatcactatcagcatttttgtcaaagccattcaacaagtttctaggaagttccaaactttcccacattttttctgtctttttctgagccctccaaactgttccaacctatgcctgttacccagttccaaagttgcttccccatttttgggtatcttttcagcaacaccccactctactggtaccaatttactgttttactccgttttcatgctgctgataaagacatactcaagattgggaaatttacaaaagaaagaggcttttaattggacttataagtccacctgggttgggaggcctcacaatcatggcagaacaagtcacatcttatgtggatggcggcaggcaaaaaaagagcttgtgctgagatactcctgttttttataaccatgatatctcatgaaaccatccactatcctgggaacagcatgggaaagayctgccccatgattcaatcatctcctaccgggcccctcccacaacatgtag

SEQ ID NO: 914713 - DNA, 588 bp, Homo sapiens
gcattacaaaaggatttacacttttagttctatattctgcaaaggcattatgctgagaaggtcaaytatgttttgtatgaaggaggagattaaatagcaaaagtagcagcaattactcccttttcaccaactgtaacttgatttaaacaagtcataagctttttaagttgagaataactgtaaggaaatgatgtccttatatccaaagccctgtatttgacagtgatgtaaaaaaattgaatttgttttgtatacagaaattctaagtcacataaggcactcaaattcattaagcaaaagagaacatgatagaatcaaaaatatttcacaggcaaatagttaaatacttctgtggctttaattctttcttcaatttatcttcaggtaactattccataaataaaaatttatatttccctcacttgattttggatcagaaaatctattaggaaaagtaatgcaaatgtgttcttttgaaattgtgtttagtccctttagattgttatgtttacaccaaccactgatattggaagaacatttgaggacatgttaccccagggtggagagccagttacatagtagttatgc

SEQ ID NO: 914714 - DNA, 584 bp, Homo sapiens
agtggaatacaagaaagaacgtcaaaatacccagagctgkcctggcatggaaatcggccatcccataagtaagtgatgcctggggaaacggagcctgtttcactggaaaggcaattggattagatcaattcttgtcttctcgtcaagtccggcctggcccaaggttacagggagaagccttgggtaggggacaggtgtaagagcgttatgaaccagtaactctcccacttggggagaaaccaaacccccaagtacaggtaagagtagttcttttctaaaatctgaactaatgacaatggaggggacaaaggattagggggagaagatgcttactttaatgaggaggctttgatttttcagaacaaagctttgtagccatgtttttggggagccacaaaatccaggtccaatacatggggtcaagagtatgagaattttggcccaagatggataaacctgggcctcaacagctgccacccactctggaaattggtatgttcagagaatgtaagcacttgagactatttctagttccagctgctccatggtattaataaaggtctaattgctaaaaccacgtggag

SEQ ID NO: 914715 - DNA, 531 bp, Homo sapiens
gtgtttccatacatcctctgaaatccaagcagaggcttcctagcctcaattcttgccctctgtgcaccagcaggctaaacaccacagggaagccaccaaggttttcagcttgcaccctctagagcaatggcctgagatatatattcagctatggctggagctggagtggctgagacacagggaacagtatcctaaggcttcacagagcagcgaggctctggacctggcccacagaactatttttcccttctaggcctccaggcctgtgacgggaggggctgctgcaaaggtctctgacatgcctagaggcattttccccattgtctaggctgttaacatttggctcctctttatttacacgaatttctacaagaggcttgaattccttcctagaaaatgggtttttcttttctaccacattgtcgggatgcaaattttcraaacttttatgctctgcttcccttttaaatctaagttctagtttcagataatctcttcactcatgcatatgagtgtacacagttagaaaca

SEQ ID NO: 914716 - DNA, 613 bp, Homo sapiens
atcactagaattttcaatatttgatackacagattgtattcaatgttgatagggtttggctgtgtccccacccaaatctcaacttgaactgtatctcccagaattcccatgtgttgtggcttggacccagggagaggtaattgaatcatgggggccagtctttcctgtgctattttcgtgatagtgaataagtctcatgagatatgatgggtttattggggcttctgctttttgcttcgtcctcattttctcttgctgccaccatgtaagaagtgcctttctcccccgccatgattctgaggcctctccaaccatgtggaactgtaagttcaattaaacatctttttcttcccagtcttgggcatgtctttatcagcagcatgaaaaaggactaatacagtaaattggtaccagcagagtggggcattgctgaaaagatacaagaaaatgtggaagcaactttggaacagggtaacaggcagagactggaacagtttggagggctcagaagaaataggaaaatgtttggaactttacttaagagacttgttgaatggctttgcccaaaatgctgatagcaatatggacaataaaatccaggctgaggtggtct

SEQ ID NO: 914717 - DNA, 673 bp, Homo sapiens
tattgtaaactggcctttagaaagcatgagccagtgtccacataaagataatgtgtaatcaaaagtctcatttcccatttccagaatgataaaatcattaatttaaaaaaatttgattgatgcagcagagtgataattctttgttttaaattgcattacttcaattgtttacacaattggacatttttcaaaattcttctaaaaattgactatgatttcttcttttagaaatgcttatttatttatatttttcatttaaaaattatttggctttacttttatgatatttacatttctacaattaaagaagtaattatctttcataagtgtttaaaatattttttactcatttttaaattttatttaatagccacttcatattgttatataaataatttacacattcaaatcttttccttcatgcttacaacttctattttcatgtttgtagagctcgtctatatttagagaactctccaacattagatgcatttacctaaatttgctttttaactcactataattttgaaaatatggtaatatctgatctattttattttagattatattttgaacrtaatctaattggcatcctttagtattaaacaatgtgcatacttctatttctttaaaaaataacctttcctcactaattgaatattacttttgaata

SEQ ID NO: 914718 - DNA, 564 bp, Homo sapiens
tagttggagtggaatgtgattcttcgctaaatgtttttttgaaaataaaaatttacctgaggggttggatattggtttatatggggcactgaaaacagctattatgtgggttgccttctgttagtgtaaatgtgtacttgtcctggcacttggtgagagctgtcttatgatttcaattgtcatcgatctgttcaatgttaaaggatgtcttagaaaatcagtccaaagccagcctcataggctacaaatctagttttagtgctattataattttttgtggccaaggtaacagaaattccataatcctaacttggtataaccttttcttttccctataatgtattcaaaaacatatatacataatagactatgatgaatgggaattcaaaacatcaatttattattattggttgagtttatgcttaaaattcaagtgcagatttctctgtaagctaaacaggcatatgtggcctagytagaaggcctaagggactttactctcttgctaaggccaactacaaatctaaaaatcttacccctctcctgcaaattacatatgactgg

SEQ ID NO: 914719 - DNA, 625 bp, Homo sapiens
cttcaactccccaggctcctcaactgaggccacctttgagaaactggtgayattattttttccaaaatgaacttgactcctaattaaccccaagacaacagctccagtgcagtagatctaacctcaggagtccagtgtttacagtacatgcttctaataaccacatcccacgttggtcatcagaacttctgaagatggtgacttatctggagaagctgggagtcctgatagatggaggaggctagctctgttgattcagatgagagtttctatctcaaggcagcttccctctcatttgctgttatttcctcaggctctgatttgtggcagtggtgctacttgtcaggagactgccaaatactgaatagctgcttctctctaaattagaagggagagagcaatgtaagtacttaccgagcagtgggaacattgacctagcttggggatttgtggggactggacttgaatgatgggtagtgtttgagaaagcctctttctgtgcctcccatggagatcagtgatggcatttctggtaagtagcagagttaaaaaggagaatcagaggctacctttcactgaacttactaagagtgactgggaatggcctttataattctcagaattt

SEQ ID NO: 914720 - DNA, 677 bp, Homo sapiens
gagttcatgagtgcctcaaactctgcaattattgatgaagcttcacccacttacagtgagaaggacactgatttgattctgatcatgaagtttcactggttgtcttgcaaggaaaatgtttaacttgttatgttgtcagctaaagtcaatgattgtaacctctgtattgtaccttccaatggaaaaaacaaaaacaaaacaaaaactcaactctatttgagccttgccaggtcagtaaaacaaaagaaaattaaaaaaaaaarctgataggaggagtctcattcccttcttttaacttttctcacaaaagcattccaacttgtaacagactttggaacacacccactttgttggtctgtgtcttccacattgattctcacatttagcttccaatgaagatttatttaattatttctgccttaagcgccttaccttccactgacaccaggttgcatggtgacagtttgaactggggtgggatgaaaaaatatttttatgaattttattatataatccttgcatgtcatctccattgaagaatgaatagggtcttctccaaatatgtgctgagtatggatgcatccaataaatgaaactattgtttatttcatatggtagagctatagatgcattctatttgcctcgagtttccaatgaacaaatgtctagtttcagta

SEQ ID NO: 914721 - DNA, 578 bp, Homo sapiens
ctacaaagagacttagactcccacacaataataatgggagactttaacaccccactgtcaacattagatggatcaacaagacaaagttaacaakgatatccaggaattgaatccagctctgcaccaagaggacctaatagacatctactgagctctccacccaaaatcaacagaatatacattcttctcagcaccacactgcacttattccaaaattaaccacatagttggaagtaaagcactcctcagcaaatgtaaaagaacagaaattataacaaactgtctgtcagaccacagtgcaatcaaactagaactcaggattaacaaactcactcaaaaacactcaactacatggaaactgaacaacctgctcctgaatgactactgggtacataatgaaatgaaggtagaaataaagatgttctttgaaaccaatgagaacaaagacacgacatacaagaatctctgggacacattcaaagcagtgtgtagagggaaatttatagcactaaatgcccacaagagaaagcaggaaagatctaaaattgacactcttgcatcacaattaaaagaactag

SEQ ID NO: 914722 - DNA, 635 bp, Homo sapiens
gccaaggcatggtgctcccaccctctgaagccacagcctaagctgtacactggcccctttcagccacagctggagcaactgggacatagggcaccaagtccctagactgcmcacagtgtgaggacccggggcccagcccacaaaaccattattttccttctggacctctgggcctgtgatgggaggggctgccaagaagttctctgacgtgacctggagacattttattcatggtcttggggattaacattaggctccttgctacttatgcaaatttctgcagccagcttgaatttctccccagaaaatgttttttcttttctatcatatagtcaggctgcaaattttccaaacacttatgctctgcttctcttataaaactgaatgcctttaacagcacccaagttacctcttgaatgcttcactgcttagaaatttcttctgccagataccctaaataatctctctcaagttcaaagttctacaaatctctagggcaggggcaaaatgctgccagtctctttgctaaaacatgacaagagtcacctttgttccagcttccaacaagttcctcatctccatctgagatcacctccatctgaattttattgtcaatatcactgtcaacattttgg

SEQ ID NO: 914723 - DNA, 587 bp, Homo sapiens
tcatcaaaaatgggcagatctggcaagcagaatttcaatkagttcataattaaactcaacaacaccatcaatcaactagacattatagacagtaatctataatgaacatctatagattacttcatccaacaatagcagaatacacattcttctcaagcttgcatgaatcattcatgaaggtagactacatgctgggccataaaacaaactttaccaaaattaaaagagtagaaatcaagcaatacctatattcagactacaaataaattaaactagaaatcaataacagaaagctaactgaaaaattgcaaaatatgtggaggttaaacaaagaacacacttttaaataagacataagtcaaagaaatgtcaagagaagtttaaaatatttactaagtgaaaatatgacacaacttagtaaaatttgtaggatccagcaaaaatcatgcttagaagaaaagatctaaagtcaataatataaattcctaccatagtaaactagaaaaaagaagagcaaattaaacacaaagtaagtataagaaaaataagaaaaaacagagaagaaataaaattgaaaacaggaaatt

SEQ ID NO: 914724 - DNA, 587 bp, Homo sapiens
tcatcaaaaatgggcagatctggcaagcagaatttcaatgagttcataattaaactcaacaacaccatcaatcaactagacattatagacagtaatctataatgaacatctatagattacttcatccaacaatagcagaatacacattcttctcaagcttgcatgaatcattcatgaaggtagactacatgctgggccataaaacaaactttaccaaaattaaaagagtagaaatcaagcaatacctatattcagactacaaataaattaaactagaaatcaataacagaaagctaactgaaaaattgcaaaatatgtggaggttaaacaaagaacacacttttaaataagacataagtcaaagaaatgtcaagagaagtttaaaatatttactaagtgaaaatatgacacaacttagtaaaatttgtaggatccagcaaaaatcatgcttagaagaaaagatctaaagtcaataatataaattcctaccatagtaaactasaaaaaagaagagcaaattaaacacaaagtaagtataagaaaaataagaaaaaacagagaagaaataaaattgaaaacaggaaatt

SEQ ID NO: 914725 - DNA, 635 bp, Homo sapiens
ttttaatggacatgagaacaaaacaaacaacaacaaaaaaaagagtgtgccaccttttgaggaaaaccagtaaggacacccacaaaagcacagtagggtccatggaatttactctcactcacagtttacttttgtgttattgaatatcacaaacaatacagtgtgaagaacacatagctacagatgcctcctcccatcactttgctttcttatttgacatgaacattattgcacaaagaacactgaacactgacagtgtttccatgacaaaatcaaattacaaagataaacataattcggctgggacaggagaagctggcttctccttgggccagtgccttcccatctccttgcctgcatgagtaagtgaattggaactactctgcatgtgatcttgccctcctgtttccaactggattttacggtttgataatttcatactatttgtctccccaccatcctatccctatccagagttcataatttgccaggaaacttagcatttattttccatttcttcctcactgcattgctcagcaaccacagagaygccttggactgattttgcaacaccccccaccattgtccccaggcgaggaacacaagtttctattggacccatcatttggatgtgc

SEQ ID NO: 914726 - DNA, 615 bp, Homo sapiens
ccttggagattaagtttcaacatataaattttgggggaaagcaaacattcagaccacagcattttttgttagtgtttcctataaatggtatggctattcactcctttggcaatcattttgttggcttgtctatcttttgcttataaacttataatatttctttatacaaaatatatacttatcctttgataggattatgtgcagcaagaatcttttccaagcttatggcttatcttttcacataccatttttggaatcttttaatgagctactattcttcattataataaactttaattaatagcattatatacattcatcttatggctagcatttttgcatcttaattcagaaacctctacctgtcataaggtataaaagatagtttccaaaattttcttcttaaatgttggcatttgtcttacacagttaagtcttaagtccatctgaaattttgctttttacatctgttaacaggttccaatccaaatttctttcctatgaatacccaattgtcccagaataataattaaatagcctactcaataaccatttttttgctatgcgaatttttttatattaygttgttatatatatatatgtatatatatgtgt

SEQ ID NO: 914727 - DNA, 447 bp, Homo sapiens
cacatttgaagctattgggatgaaacgaacrtattttgcatgtgagaaggacataaatttgtggggccatggatggaatgctatgggccgattgtttctgtcctctcctaaattcctgttgaaacttaatccccattgcaacagtattaagagttggggccgttcaagaggtgattaggccatgagggcttcttcctcaggaaaggaaaagtgcttcataaaagggctggagaaaactagctaggcttcttttttttttttttttcctttttgtcccttctatccttctgccatgtaaagactcagtattcaaggcattatcttggaagcagacaccgggccttcactagatatctaacatgctggtgccttaatcttgggctttccagcctttagaactgtgaaaaataaatttccatggtttataagcagaaagggactgagaga

SEQ ID NO: 914728 - DNA, 610 bp, Homo sapiens
tgttggagttcattgtagattctggatattagccctttgtcagatgagtagattgcaaaaattttctcccatkctgtaggttgcctgttcactctgatggtagtttcttttgccatgcagaagctctttagtttaattagatcccatttgtcagttttggcttttgctgccattgcttaccggggcctgttgtggggtggggggaggggggaggaatagcattaggagatatagctaatgttaaacgacaagttaatgggtgcagcacaccaacatggcacaagtatacatatgtaactaacctgcacgttgtgcacatgtaccctaaaacttaaagtataataaaaataaaaataaaaaaggaatagaagctattgagtggaatattgtgcagagatataaaaataaaaactacagtatagtgttagatttaaaagtgggatataaaattacataaacagtattatcacaacaatgaaatatttgcagaaactcagaaatattttctttccagattttccttaatactattcttaaattctatttttaataattggcttgaaagtacagatgagaaagagtgaaatcagcaggttggctaggaaaggaa

SEQ ID NO: 914729 - DNA, 610 bp, Homo sapiens
tgttggagttcattgtagattctggatattagccctttgtcagatgagtagattgcaaaaattttctcccattytgtaggttgcctgttcactctgatggtagtttcttttgccatgcagaagctctttagtttaattagatcccatttgtcagttttggcttttgctgccattgcttaccggggcctgttgtggggtggggggaggggggaggaatagcattaggagatatagctaatgttaaacgacaagttaatgggtgcagcacaccaacatggcacaagtatacatatgtaactaacctgcacgttgtgcacatgtaccctaaaacttaaagtataataaaaataaaaataaaaaaggaatagaagctattgagtggaatattgtgcagagatataaaaataaaaactacagtatagtgttagatttaaaagtgggatataaaattacataaacagtattatcacaacaatgaaatatttgcagaaactcagaaatattttctttccagattttccttaatactattcttaaattctatttttaataattggcttgaaagtacagatgagaaagagtgaaatcagcaggttggctaggaaaggaa

SEQ ID NO: 914730 - DNA, 540 bp, Homo sapiens
tatagtacaaatcaatgaaacaataaaagaaaactgagagaaaaattgctaaagtaaaaagttggttccttgaaagatcagtacaattatcaactgtcagctaggttgaccaagacagaaatgaaggaaaacaaaccaccaaaatcaggaatgaaacaggagccatcactactgatgctacagaagttaaaaaatttaagtgtatactataccttatagtgaacaacaactttatttctaatacattaaagaaattagataaacaaatttctaggaacacacatattactaaaactgactcaggaagaaagataatctgaatatatctgtaacaagtaaaatcatttagttattaaaatctttccataaataaaatctcaggcccagagtatataactggtaaattatataaagacaaaattaatcctttgcaaatctttcagaaaatagggaatactcaactcattctgtaagtctatattatcctacacccaaaaccagacagacatcmaaagaaaaaaacacaaaacaaaaactacc

SEQ ID NO: 914731 - DNA, 597 bp, Homo sapiens
gttccaaactttcccacatcttccagtcttcttctgagccctacaaactattccaacctctgccagttacccagttccaaagttgcttccacatttttgggtatcttttcagcagcaccccactcctggtaccaatttactgtattagttggctctcagactgctgataaagacatacctgagactgggcaatttaaaaaagaaagagatttagtggacttacagttcctcatggctggggaggactcacaatcacggtggaaggcaaggaggagcaagttacatcttacatggatggcagcaggcaaaaagagagcttatgcagggaaagtcctgtttctaaaaccataagatctcatgagattcattcatcctcataagaacaatgtagaaagacttgcccccatgattcaattacctcccactaggtccctcccacaacacatgggaattcaagatgagatttgggtggggacacagccaaaacatataggtttatatacatacatactwaaccattgtgttatacttgcctacagtattcagtacagtcgcttcctgtataggtttgtagcttaggagcaataagctctacca

SEQ ID NO: 914732 - DNA, 616 bp, Homo sapiens
ttttccatttcaatatggataccttttaattttttttttttttttggtcttattgcacttactagaatctacagtgtaatgttgaattaagatggtgagtgaagacatatttgcrctgttcttgaccttagaaggaaagcatttggcttgtcaccattaagtatgttaatgagttgcttcttttgtttgttcaattgttttttatagacgctggtttttgtttttttttttcttttttttgagatggagttttgctcttgtgatccaggctggggtacagtggcgtgatctctgctcactgcaacccacacctctagggttcaagtgattctcctgcctcagcctccagagtagctgggattacaggtgcccactaccacaaccggcttattttttgtatttttagtagagacaatgttttgctatgttgggcaggctgatctcaaactcctgacctcaggtgatccacccaccttggcctcccaaagtgctgggattacaggcatgagccaccatgcctggccagtagatcctgtttaaagacaggaagttatttctttgtactcttggtttgctgataatttttttaaaaatcataaatggatgctgagttttt

SEQ ID NO: 914733 - DNA, 561 bp, Homo sapiens
ctttttcttttttctttcttttttttgagacagagtctcactctgttgcccaggctggagtgcagttgcacgatctcagctcactgcaacctccacctcccaagctcaaatgattctcctgcctcagcctccckagtagctgggattacaggtgcgtgccaccacgcctagctaatttttttttttttttgagatggagtgtcactctgccgcccaggctagagtgcagtgatgccatctcagttcactgcaacctccgcctcttgggttcaagcaattctcctgcctcagcctcacaagtagctgggactacaggtgcccgccatcatgcctggctaacttttgtatttttagtagagacaggatttcaccgtgttgggcaggctggtctcaaactcctgacctcaagtggtccacccacctcgacctcccaaagtgctgggattacagttatgagccactgtgcctggcccacttctgttttctcaatgaagaatgcagttgccagccattcagagtaagagaaagaagagatctcagagagtgaaaatcaaaccttct

SEQ ID NO: 914734 - DNA, 606 bp, Homo sapiens
gtggacaatgagcgtaatattagtacgcccctggcrgagttcctcatgagtgttaaacaaggcaacacaagctaagccctgtacctgaggcacggtaggcactcagtgaattttcattcttattttgatggctgttacattagcatctaaaggctctaaaaaactctgtagtagataaacctgtttggctttgtccagccagctttcctcaaataatctgacacctgaggaattgtttttctcactcagcatcttgcactttgggaaatgcgatctgtttccttttatctaatgcctgaatcagcaaacggagagaagtaggaatggagagacagaatggtcatgcttcagattggtaaggaagttgacttgttctcttatttcaagttctcccacgagtgtcaacctgaagaattgccccgattctgtgctacagatcaccacaaacagttgacacaacttgtccaaaagcaatgccaaactttgtaattatctgtgtctgctataaagcagtagaagaaaaaaatactctattccttattttccatattcctcctattatgctaagagatcatttttctgtgaatacttttgaataacaaataa

SEQ ID NO: 914735 - DNA, 629 bp, Homo sapiens
ttaaaaattaccaaggtgcggccaggcatggtggctcacgcctgtaatcctagcactttgggagsccaaggcgggtggatcacgaggtcagaagatcgagaccatcctggctaatgtggtgaaaccctgtctctactaaaaatacaaaaaattagccaggtgtggtggcaggcacctgtagtcccagctactcgggaggctaaggcaggagaatggcttgaacctgggaggcagagcttgcagtgagcagagattgagccacaggactccagcctgggtgacagtgcgagactccgtctcaaaaaaaaaaaaaaaaaaaaattactaaggtgcaagtctaataaatgataccattatagatgcctttttggttttgaagcacacaggctctcagctgagccacagtcacgcagagacagatcaagaggcaccatctatggccaaacatgactttgggcagaaggtctaaaaatgaacgaaatgagaacctaagtttccaggactccagacagtttggttactccagtgtgggctgggaggctgttctacaaccccagctgtgaccacagacctgcttccctgcccaaggactttagctcttttgcatgatgagagaagtctccagaaca

SEQ ID NO: 914736 - DNA, 581 bp, Homo sapiens
caagcatgagctagcgtgcctggcccaaattgcgaattttaaagarattcctcttgctgcatgaaaaaccaagcaaagaagaacaatgatttaaaaaaagaaaaaagagagagaaagagttggagagaaagctgttgaactgactgcagttccaccaagccaggggtactttagtgaatggcagggaaccagagccatggggacatatctctgcctctctttgtatcttggtgtggcctcaagttaaaaaaagacaattgtttgagaatgatgaaaagtgttactgataggaacaaagcatgaagagatttgacagatgttcacataagccaagacagagttccgcttgagccatcacttctcaaggacatcaggaacacttcagtagccaaaaatgttctcttccagttctggctgacaaagagtcaatgatctggcagctgtgttacttgcagttgtcacatccaggtttcatgatagcaactcactgctatttggaggagatgcaagctcccatggaggctgcagctgttgcacaagccagcagcttacctactgagtggtgtcagtcacgaagcctg

SEQ ID NO: 914737 - DNA, 679 bp, Homo sapiens
ctccattagtgaggtacatatgttacagttgttattgattatattgattaattatattggcaatataattaatccaatattgacacattattactaacaaaagtccatcgtttacattagtacacactgtatgtattgactattcaatgggctttcacaaacacatgtcatgttcccaccattacagtatcctaaagaggtttcattttcctaaaaatcctatgttctaccaattcatcctcttcttgcctcctgcaagaacactggctattatattattatttctactgtctccatagctttgtcttttccagaatgtcatatacctgtagtcatacagcatataatctttgtaagttggcttctttcacttagaaatatgcatttaagtttacttcatgtccttttgtagctgtatagctcatttatttttatttctgaataataaacacttcattaaatggacgtgccgaagtttgtttatccatttatctatggaaaaatattttgtttgcatccaagtttggcaatttggcaatttatctatggaaagtattttgtttgcatccaagtttggcaatttggcatttttaatgaaaaaaagtgtgcaataaacatttgtgtgcaaaatttgtgtgaacmttaattttcaacttatttgggtaaatgcctaggagca

SEQ ID NO: 914738 - DNA, 648 bp, Homo sapiens
aacttagttttcatgtatttttactgtcatatctatctatagcagagaaaatagatcttctactagtgcaggtgcagtaagatgacaagggaagactaattcttcatttgtttatttccaccgatttctcccatagtaagtgcttagttatcaaatattaatgaaaagcaaacgtgggatgataaatccaaaataaggaataatctatgtaagatatggatgacataccttaatccacagttgttcacacaaaatagagacttgtcagaatttggatactcccaaatttatagatggaatgatgtataaattctttgtattagttttctgtagaattgcttctcagggaccactccaatgtttttccttgcttattatggtaagagtaaagtgaaatgctgactgcattaatctaaatggaggaagagaaagtaagtagaaacacaaaaataaacttcaggataatacaatgttggctatctaaattaagcctaggaatctcttgctagtttataaagtctttattttactttttctccctttagaaatgtcagttgttatttcaaaaatgggcactcaaaattactgactgacatcctagaaagtaattattaarctttttctgtgtagattgcatgttttccttta

SEQ ID NO: 914739 - DNA, 662 bp, Homo sapiens
accctcatacattgctggtgggaatataaaatgtcacagcccctttggaaaacagtttggcagtttttcaaaaagctaaattgaaagttaccctttgaccctctaattccactcctagatayatatccaagagaaatgaaatacatatgtccacacaaaaacttgcacatgaatgttcatagcagcattattcacagtagcccaaaagtagaaacaatacaaatgtccattaattgatgaatggataaataaaatgtggtatatccatacagtggaatattatttagccataaaaataatgaagtattgatacatactacaacatggatgaactttgaaaatatgctatgtgatgttctcactcataggtgggaattgaacaatgagaacacttggacacagagggggaacatcacacaccagggcctgtcgtggggttgagggagggggaagggatagcattaggagatatacctaatgtaaatgatgagttaacgggtgcagcaaaccaacatggcacatgtatacatatgtaacaaacctgcacgttgtgcacatgtaccctagaacttaaagtataataaaaaaaagaaaatatgctgtgtgaaagaagccagtcacaaaagaccatatagtgtatgattccattgctccgaaatatc

SEQ ID NO: 914740 - DNA, 707 bp, Homo sapiens
cctgtggttcactgtatgacttaatctgtcaaaacctcagttttcttatctctaaattggaaattgtcatcttggtacatacctcaccgcagttcctgtgaagactgaataaaattatacacacgaggtgctcagcacaggtcatggagtcagaggtcttgatatagtataggggctgctgtgtgcaaggtagttatgttttcttgaggagttatgggtaaaatgaatcaaattttactacctcaaagctgctttatcttagctgtcatccattgcaggaaagcaaccaaggttattagtcaggatagaaaaaaaaatgccagtagcaactgagagggtagaatgcttttcttgaaaaatcttttcagagttagattcagatagaaaagttcctgagatgaatggttaagtgactagtagtatgcattgcatctattgtttagctgtgggaaataataaagaaaacgagggattggtgcctgaaccagatccttaccactgccccactgggaacagggcagtcagggttgtttaaagactattctggatgttttgtgccccagtcgtttgagagtgaggcttatagacagtggwcagaaaagcttcctgactagaacgtggctcaggagaaaggaaggtaatgggagcctgggaatgataaacaggactcagaaatgggaatgaataggccaggttcagggaatagg

SEQ ID NO: 914741 - DNA, 644 bp, Homo sapiens
gctgatgcagaaagaccagttaggaaacaatcctggagaaatgagggcattcagaccagcgctgrgtgttggagatggtgagaagtggtcagactcaagatacgtttgaccatagaaccagcgagatcttctgtagattatatacagattgtaagaaaaaggaatcagggatgcctcccaggtttttggccaactgaagggatgaagctgccatttcctgaaatgggaagtctgtaggaggaggtagtttggtttccattttggacaaattgaattcgagatgcctatatgtcatccaagtggagacgccaagtaggcagttgaataattggatgagtctagaatttgggagagaagtctggactagagacatgaaattgggagttattaatatatatgatatttaaagctaaatatcatatgatctatggtatttaaagctaagagactggatgagatcactaaaggcatgagtatagatagaaaaaggaagaggtctctggattgactgtgactagttttgactagctcgataaaatttagctgagtcaatgaacaagatgaatgagtcataatagcaatcagtgcactcctccacaaaatgatagtgcagataaaaagcactaaatgtgtaattcatggaa

SEQ ID NO: 914742 - DNA, 644 bp, Homo sapiens
gctgatgcagaaagaccagttaggaaacaatcctggagaaatgagggcattcagaccagcgctgagtgttggagatggtgagaagtggtcagactcaagataygtttgaccatagaaccagcgagatcttctgtagattatatacagattgtaagaaaaaggaatcagggatgcctcccaggtttttggccaactgaagggatgaagctgccatttcctgaaatgggaagtctgtaggaggaggtagtttggtttccattttggacaaattgaattcgagatgcctatatgtcatccaagtggagacgccaagtaggcagttgaataattggatgagtctagaatttgggagagaagtctggactagagacatgaaattgggagttattaatatatatgatatttaaagctaaatatcatatgatctatggtatttaaagctaagagactggatgagatcactaaaggcatgagtatagatagaaaaaggaagaggtctctggattgactgtgactagttttgactagctcgataaaatttagctgagtcaatgaacaagatgaatgagtcataatagcaatcagtgcactcctccacaaaatgatagtgcagataaaaagcactaaatgtgtaattcatggaa

SEQ ID NO: 914743 - DNA, 640 bp, Homo sapiens
tcagcaatatttatatgcccatatagacaagaatagaagaaatactgaaagaaaatatacctaatgtctgtgtgtggtagaaytgtaagtgggttttctatatttttgatattttctagattttctacaatgagtagtatctttataatcataaagatgaataaaagttttaaaaatagtttcaattctcaattcaacaataaagaattgatctttgctgaagtttgccctttgcccccaagtgaaccataactacttcattactcacacaataagaaaccagtgagaaccatgtctcattcattcattcacttcatttgtttgtaacctccacttcattccccaaaaaagaattctcactgtcttataagaatccagttataggacaagctggatttagtgggatgaaatcataaaatgcttttacttttctgatttgattgcctttcaaagcttccaactagctctccctccctcaaccctggattatgctacattgagagatcctgtagttttccagtcactttcctagttaacacacaatctcattctcctatgctcttgaatatgaatgagtcttgcaaatttaaggctgtataaaaaaaaaaaaagcaagttgtttaaaacagggatccccagc

SEQ ID NO: 914744 - DNA, 598 bp, Homo sapiens
atcagaacttgcatcatttaattatctagacagctgacttacatcaagtccaaactgcttgaacatgggtccctgctatgttatcatttataaaaatcaaatcctactgcctttgggtataattgtaccttattagataactttgatagggaaaaacatatttcatttccaaaatatgttttatggtgtctactttcagctaacttaggtgcataaataataggctattctttaactgattccattcacaaccccaaacattctttggacactgtgaatggtggtgaaataaacttggaatagtctgtggtacatagaacaagctggaacctttctcttcagtgcatatgccaagaaataattcattttgggtcattagattagagagacaaaattaaaaacagattatttaactgccagcatagtgtcccaaagaaactgagccctttctcttttctcaaataactgttgtatttatcaactgcatcttctagctaaacagcaatcttctttacgtaagcaaccttctccattctgggatgtcgtttacagtcatacrccatttaacagtagggatacattcgcagaaatgtgtcat

SEQ ID NO: 914745 - DNA, 622 bp, Homo sapiens
aaatactgtccaaaagccaagtcctggaatcagggaccccaagaaacttcttgacaccttaccccactgtggctgagctggtacctaagatgcaagacaaagtcccctttacttttccctctgcttttcttaagtggaaggagcctcaccctacagccaccatagctgacaatgtgctgagtcttacctgaaactagcaagtctcagagtcttacctgaaactagcaagtctcagagtcttacccaaagtcctgacatagtacctgagtttcactgctgattattcagggccaaagggcacttcagttggcaggtgatgaatcctgccaggattgggtccttcccttcaaggcagcaggttcccttctggcctgggatgtgtctagaaatgttgtctggagctagggcctcatgaatctgattggtgccctatcctgctgtggctgagctagtaaccaagaggcaagacaaagtcctccccactcttccctctcctttcctcaagaggaaggaaggggccttttttggagtcttgagctgtacagcctggggttggggagggatgakgccagcacttccttagccagcctggctggtgtcgcagcgggtcatgtcctccctg

SEQ ID NO: 914746 - DNA, 609 bp, Homo sapiens
tgaaaaaattgtttattctcatattgggtggagtgttctataaatgttgattgatgcctgtgggttgatggtactcttaagttttaagtcgttgatgattttacatctagatgtgttaccagttgttgagagagrggtgttgaagtctttagctattctgaatttatgtatttcctcaatcagttttattagtttttgcttcaaatacttttcagctttgttgtttgatacatacacattcagaagaagatgccttcttggtgaattgacatttttgtcattacatgaagtgcttctctgtctctgataattttctttgttctacttatttgatatgcatatatatacttctggtttattataaccaaggtgtgtgtgtgcttgtgtgtgtatgtttgcatgtgtgtgtgtgtgaatctccatcattttactttcaatctatctatataataacatttgaaatacatttattgtagaaagtatatagttgcatctctctcttttatttagtcatgctgccaatttctgctttttaattgctgtaaataaggccacttacatttaatggaattatgcatatgttagggcttgattctataattttgttta

SEQ ID NO: 914747 - DNA, 646 bp, Homo sapiens
acaaacaaatggaaaaactttccatgctcatggataggaagaatcaatattgtgaaaatggmcatactgcccaaagtaatttataaattcagtggtatcccgatcaagccaccattgactttcttcacagaattagaaaaaactactgtaaatttcatacgaaacaaaaaaaagagcccgtatagccaagacaatcataagtaaaaagaacaaagctggaggcatcatgctacctgacttcaaactatactacaaggctacagtaatcaaaacagcatgatactggtaccaaaacagatatatagaccaatggaacagaaaataggcctcagaaatagtgccacacatctacagccatctgatctttgaaaaacatgacaaaaacaagcaatggggaaaaaattttctatttaataaatggtattgggaaaactggtgagccatatgcaggaaactgaaaatagaccccttccttacaccttatacaaaaattaactcaagatggattaaagacttaaatataaaacctaaaaccataaaaaccctagaagaaaacctaggcaatacccctcaggacataggcatgggcaaagacttgatgactaaaacacccagagcaatggcaacaaaagacaaaattgacaaa

SEQ ID NO: 914748 - DNA, 603 bp, Homo sapiens; identical to SEQ ID NO: 904194

SEQ ID NO: 914749 - DNA, 647 bp, Homo sapiens
aaaactctttagtttaattaggtcccagctatgtatcttcatttttattgcattcgttttggggttttttggtcatgaaatccttgcctaagccaaygtctagaagggtttttccaatgttatcttctagaatttttagagtttcaggtcttaggtttaagtccttaatccatcttgagttgatttttgtatatggagagagatgaggatccagtttctttctcctacttgtggctagctaattatcccagcaccattttttgagaatggtgtcctttccccacttgatgttttcgtttgctttgtcaaagatcagttggctataagtatttgggttcatttctgggttctctattctgttgcattcatctatgtgcctatgtttatagcagtgccacactgttttggtgactattgccttatagtacagtttgaaatcaggtagtgtgatgtctccagatttgttctttttgcttagtcttgctttagttatacaggttcttttttggttccatatgatttttagaattgtttttttctaattctgtgaagagtgatggtggtattttgatggggattgcattgaatttgtagattgctttcagtagtatggtcattttcacaatattgattctacccatccatga

SEQ ID NO: 914750 - DNA, 601 bp, Homo sapiens
taccatttcaatctcgctgctagttattggtctgttcagggtatctawtttttcctgatttaagctacgaggattttaattttccaggaatttatccatctcttctaggttttctagtttatgtgtgtaaaggtatacatagtagccttgaatgatcttttgtatttcagtggtgtcagttgtaatatttcctgtttcatttctcagtgaggttatttggattttctcttttcttttattggttaatcttgctaatggtctatcaaatttatttatcttttcaaagaaccagctttttgtttcgtttatcttttgtacttttttgtttgtttcaatttcatttagttctgatctgatcttggttatttcctttctcctcctgggtttgggtttggtttcttcttgtttctctggttccttgaggtgtgaccttggattgtctatttgtgctttctcagactttttgatggaggtgtttggggctatgaacttttcttcttagcactgccttagctgtttcccagaggttttgataggttgtgtcattattgccattcagctcagaaattttttaaattttcttcttgattttgtttttgac

SEQ ID NO: 914751 - DNA, 505 bp, Homo sapiens
tggatgtgagacatgaagtcaaaggagatcattttggagctttaagatttgactgtcccactggattttggacttgcataggccctcttgcccctctgttttggccaatttctcccatttggaattgttgtatttacccagtgcccgtacccccattgtatctaggaagtaactaacttacttttgattttacaggctcataggtagaagggacttgccttgtctcagatgagactttggactgtggacttttgagttaaggctgaaatgagttaagactttgggggactgttgggaaggcatgattggttttgaaatgtgaggacatgagatttggcaggggccaagtgcagaaagatagggtttggccctgtgtccccacccaaatctcatcttcaattgtactcccataattcstacatgttgtgggagggacctgctggttggtagttgagtcatgggggagttttcccacatactgttctcatggtagtgaataagttgc

SEQ ID NO: 914752 - DNA, 603 bp, Homo sapiens
aaggacacgagttgttttggagggggaggtgggtaggggcagaatgctaaggtttgaatgtcccctccaaaactcatgttgaaatttaattggcaatgaaatgttatgggagatggagcctttaagaggtaattaggtcacaaaggctctgccctcatgaatgagttaatgctcttatcacagaagtgggttctagataaaacaataggctcctgataaaaggataagttcggctcccattccctctcagaggcatgcacttcttccccatttgatgccttctgccatgggatgatgcagcaagaaggccctcatcagatgctgacaccatgctcctggactttccagcctctagaaccatgagaaataaatttcttttctttataaattgcccagtccaaagtactctgttgtagcagcagaaaacagactaagaaaagggctaacttctgtgagttaaaagtagagtctagagaaattaacatgcctaggtaagkgcagagagggtgatgaaagctgagaaactcaaaaagcctgaaaggcaataaaagaaaaccctggggctgtagtacctaacatcagccacaactcctatcaattctt

SEQ ID NO: 914753 - DNA, 681 bp, Homo sapiens
tatctagctctgtggtctccatggtgcccttcaaacctctctgcatcaacaatacaggggagaagcaggcatttgagcagaaagtggtatgycccaaaagcattttccacaattattcttctaatgctctgcagctcattctgcaagtttaaaaaataagcagattttcaagggtaccaataagaataacaaatctctgcaaaatagaaagagaagggttcaaaaataaaaaatcaagatctttaacattaaagatccaggaatagaaaggaatagacagataagatgaaaggagaaagaatagtaaacagatatgcagataaatcttatgtaattactaaactttggctctgggcttcctggaggccaaagcaaagaaggaaaataagacatatgattacttacaaatgttatgcaatttttaaagaaaaagcagaccaccttcttagcagaaacaaggttcttttgcatgacctcatgtggatcatgtacctggcatcatcctccacaaaccctcatagttaaggcaggggtaaggctcacagagatccctgcattggaaatggatgacctggcaaagccaactctctgggaaatccaggagatatgcatcagataagtggtttactaatggatggtttcattcaggggtgagactttaatactggaaaagtgcaagga

SEQ ID NO: 914754 - DNA, 629 bp, Homo sapiens
agccactgcatccagcctatgatccatctagaattaattatatctgtatatatatttgttttattgagatataattcacataycataatattcactcctttaaattacataattcagtgatctttagtatattcacaaagttgtgcaacaatcaccactatctaattctagggcattttattcccatgcttatttgctggaattcctagtttctcctcccctcagccctaagcaactattaatctactttttgtctctgtagattctttcacttagcataatattttcaaggttcatccattatgtagcatgtatcagtacttcatgactttttatggctgaaaagtatttcattttatggatatatcaattttacttatccatttatcatttgatggacatttgggttgtttccactttttggctattatgaataatctatgaatattcatgtacatgtttttgagtacacatatgcttttaattatcttgggtatatatctaggagtgttgagttaatttttgtataaggcgtgaggtatgggttgaggttcattattctagaaccgtttgttgaaatgactatcttttctccattgaattgcctttgcacatttgtcaaaaatcag

SEQ ID NO: 914755 - DNA, 642 bp, Homo sapiens
gcaataatgagaagtcctgccctccaactgtcaacaagcaagcagacttctactaccatctggcagtaacaagacagcaactcccttccccaggaattggaggtcctggagctagagcagtgccagagaaagccagataaaacagaaagtttaaataagatccaaagtctcatgacataccacaaaacgtatatatttctataaaaatcacttatcataccaatgaccagaaagatctcaaactgaatgaaaaaaggcaattgataggtggcaaaaccaggatgaaagagatattagaattatctgacaaagattttaaaccagccatcacaaaaatgtttcaataagtaattagaaacactcttgtaacaaacgaaaaatagaaagtctcataaatataataatcaaaacataaaaactcaatgtatggtctctacaacagaatgaagaagatggagaaaagaatcacttaacttgaaaatataatgatagaaactatctagtctgaacaacagagaaaaaatagaygagaaaaatgaacaggcctcggggacctgtagaactacaaaaacaagatctaagttttctctcatcagaagaaaccatgaagaatagaaggcaggacagaaacattatttgaag

SEQ ID NO: 914756 - DNA, 665 bp, Homo sapiens
caagctaggagaagaagaagaattccaagcagaggaaacagcatgtacaaggrccgtgagttgcctgaggacaagctgaagtgcactcaagtaaccagatgagaagagaaggcctttgcaccatcaactttctcatatgctttgttactaagattacattctcttgatttcagatgtcaagggacagggtcctaaggggactggctataggagccacctattctgacctgctaaattaagagagctgatgcctcaattttggagcactgaggtcatatgaaaggtatttgctggatgagagaagccagtggatttggagagaggcaacaacacatgaataaaggggtctaatttagagctctgaagactgatgcctgtgaccccaggtaaaccatctctcacatctcaattccttttatacctaaaatcagttcatctttttgatcagaacccaagttaaggaagccaagaagtgtgttttacacatggtggttttcccattccagttgagagtacatatgttgaacataattgcaatcatatttggagacaactagtcaagtctgggctaatttgactgctccatgttatgtttaaagtgtaattctgtgcacatggaaatattagataaaaatgtgtgtctcaaaaactagcttctgattaaa

SEQ ID NO: 914757 - DNA, 694 bp, Homo sapiens
caggggagctgctgatatttcataggagattaaggatccagttttaggtgttatggatacctaagccttttagttaaagaaatacacccttaatggcaggcttttaggtagtctaactccaattcctggcagaactctctattaaatttgaatgcctacatttatttaatttcagtttcaaatctgcttgggcacagaaagtgagattctatttctatttaaggcctcttccaccctggttctatatatacaatgagctcttagttttagggggtaattttactttgaagctctatgatattacagttttctccacttcccagacagctcttagtattaggtgtaattatatattctatattttggggacaatcatcaataaggttaaagtcactctcttccaaaaacaagttactgggtggtggagttgagagtggggctgactttaccctccactggggtgattcgacacaaggaacctgttgccttggcctggcactatctgtggatctgaaaatccaatacaagacatttcctggcactttaccaaggatgcctgttaccttttggacagaagaaatttgaaaaatcatcccataaggggkagaaaggaatgacataaatggtcctattaaagggaagtcactatctgagacgactgcagaaaaactacatgcaatcgctgcagagatta

SEQ ID NO: 914758 - DNA, 638 bp, Homo sapiens
gttcttcatctctgtctgagaccacgtcagcctgaacttcattgtgcatatcactagcagcattttggtcaaaaccattcaacgagtctctaggaagttacaaactttcccacatctgcctgtcttctgtcttcttctgagccttttaaactgttccaacctctgcttgttacccagttccaaaatcacttccacattttcaggctatcttcatagcagtaccccactgtcccggtatcaattttcagtattagtctgtttacactgctagatagaactacctaagactgggtaatttataaagaaaagaagtttagttgactcacagttctgcatggctggcgaggcctcaggaaacttacaatcatggtggaaggcaaaggaaaatcaacacatgtcttacataggggtaggagagagagagagagagctaagggaagtgcacatttttaaaccattagatcttatgagaactcattcactatgagaatggcatgggggaaactgcctyagtgatccaatttcctcccaccaggttcctccctcaatacatgtaggtcacaatttgagatgagatttgggcagggacatagagccaaaccataacactataattcctagagcaatcacttgaaaag

SEQ ID NO: 914759 - DNA, 594 bp, Homo sapiens
ttttactctgtctcccagctggagtgcagtgtcacaatcttggctcactgcaacctccacctcttgggttcatgtgattctcgtgcctcagcctcctgagtagctgggattacacgcttstgccaacatgcccacctaattttttttgtattatttgtagagacaaggttttgccatgtttaccaggctggtctcaaactactgacatcaagtaatcagcctgtcttagcctccctaagtgctgggattacaggcatgagccaccgcgcctggctgataagtttttccaactatatttttctctctactcccagagttaccaatatcctacagcggtgtatcttttcccacaaatttcatgtaaatatatatatatacatacatatatataatatataaacacaaatccatgtatacacacatatatgtatacatatatacacacatatatacacacacatatatatacacatgtatacacatatatatcttcttcaataagggcatattcttaaataatatataatgactttgcaagtttttaaattttcatagttataattttctaatattattctgcaatctactttttaa

SEQ ID NO: 914760 - DNA, 633 bp, Homo sapiens
gttagtggaaattacacaaggtgaagagcaaagaaaaaaagaatgataaaaagtgaggatggtttcagagacttatggaaaygatcaggcataacaggatatgtactactgttgtacccagaaaaagaagagagagactttttcaaaaaaaattatgatggaaaaattcccaagcctgggaaaggaacaaaaatctaaatagtgtaagcataaaggacaccaaatatgattccacagatatacacactgatacacatcataaattgccaaaagctattaaagatgagttttgaaaacaataaggaaaattgttacctatatgctacatatgtgtattgctacatataagggaacctctgtaagattatcaacagacttttcagcagaaatcttgcatagcccaaatgagtgggatgatacaatcaaatcctgaaagaaaaaaaaattgccaaacaagaatactatattcagcaacatttgaaaataaacaggtaatacagactttctcagacaaacaaaagctgagagagtgtatcacctacagaacttccttacaagaaatgctggtatttgatagtacaacaagggtactatggtcaataataatttaattgtccattttaaaatagctaa

SEQ ID NO: 914761 - DNA, 593 bp, Homo sapiens
acatagctctgtctctctctctmtatatatatatatatgtatacatatgtatatataaaatacatatcacacacatatgtatatataaaatcatgtataatgatgaagctgtacttatcctagagatgcaggttggtttagtatttttaaaaacataataaaatgatgtgattctccatgagatagggtctaacaagtcaaattccctaacaccatgacaaattacttgtaatttttaagtaaaagccttcactcctcccctccactaatccgtgttaaaatcgcctcaaaatccttctccttatccactaaggattcattcaataaaatagaacacatgttccctaggaaattaaacttatagagaataaactgacaacgtccactttgagtcttaaatccatgtgaaagttgtacgcaaaaatatgtgaatggatgagttgtcagctggctcattagaaaacggatctttctaaagacatttggaatggaacgaaggatttatcctctcaagagtgtgctaccaggtgtggtaaagatctatccaaggcaaagaacaactttaattaagataaatcctttctagagcagaa

SEQ ID NO: 914762 - DNA, 692 bp, Homo sapiens
gaatactatcaagcaaaactcaagagctaaactaaaagcatgagaataaagggagccaaaaattgctcgtacttacagccaagcattatgaaaaggagtgtgaggagatattaataaacaaaaacttatattttgttctattttgtttttgtccttatgttcttcccaggacacattaaaatgaatgctattgaggttaagaaagtcctatgtgagaatgagagtatgacctctatgattacatttgccaacataagaaaagacagaagtaggtgttattattatacttttttacaaggtcttggatttaaaaatagaattctcttaaaaagaagagaattttttcttatcttatttagaaaaacactatggaatatttttagcttttgagaatcatggattcaactaaacagaaaactcagagacaattgaataaatgaaaacaagatatttgcatgattcatttcaagtttcaattttaaataaaaacagcaaagacttaaggagaaaaatagcattatattaccaataggcagaatttacccccctggtatagaaatacggattaaaattcaraaatcgtttacattggtacagaatatcaatatgtgaaagtatttttaaaaatcatatgatagtcataatatatgccacaagttatttgctaagatccaatattcatgactaaaaac

SEQ ID NO: 914763 - DNA, 590 bp, Homo sapiens
ggaagaaagtcaatggtagcttgatgggatatcacttaatctataaattactttgggcagtatggccgttctcacgatattgattcttcctatccatgagcatggaatgcttttccatttgtttgtttcctctcttatttccttgagcagtggtttgtagttctccttgaagaggtccttcacatctcttgtaagttgtattcataggcattttattctctttgtagcaattgtgaatgggagttcactcatgatttggctctctgtttgtttattattggtgtataggaatgcttgtgatttttgcacattgatttggtatcctgagactttgctgaagtttcttatcagcttaagaagattttgagttgagagcctggggttttctaaatatacaatcatgtcatctgcaaacagagacaatttgacattttgcttagaattgtcttggctatgcrggctcttttttgggtccatatgaactttaaagtagttttttccagttctgtgaagaaagtcagtggtagcttgatggagatagcattgaattggtaaattactttgggcagtatggccattttcacaatatt

SEQ ID NO: 914764 - DNA, 581 bp, Homo sapiens
aaattcaaaaattagccaggcatggtggtgtatgccagtagtcccagctactcaggagcctaaggcaggagaatcgcttgaactcaggaggcagaggttgcagtgagccgagatcacaccactgcactgcaacstgggtgacagagccaaactccatctccagaaaaaaaaaattattttttaatggtataaatatacataacataaaatttaccactttaacaattttaagtggcatcaagtacattgatattgttgtgcaaccatcaccatcatctatttccataactttttcatcttcccaatccaaaactccatacctgttaaaaaaaactccccattttctcctctcccagccccaacaaccaccattctacttctatctctttgaattttactactctaggtacttcatgtaagtagaatcatatagtttttatctttttgtgtctggcttatttcactccagtttcatctatgttgtaacatgtatcagaatttccttcctttttaaggctgaataatatgccattgtatgcatagaccatattttgtttatccattcctctgttgatggacac

SEQ ID NO: 914765 - DNA, 660 bp, Homo sapiens
aaatattcttattctttttgatgatcttgcacacagaattgttttcttcccgccccctccccaactttactgaggtacgattgaccaatacaaatgttatatattaagttgtacagcatgatgatttgatacatgaatacattgtgaaatgattaccacaatcaagctaattaacatctctatcagctcacatagttaccctttttgtggtgagaactcataagatctactctcttagcaaatttcaagcacagaatacagtattattaactgtagtcaccatgctgtacattagatcttcagaacttaatcatcttataactgaaaatttataccctttgaccaacatctcctcatttttcccaccctccagcccctggttaccacccttctactttctgttcttatgagtttgacttttaaaagttccacatatgtgtgatattatgcagtatttttctttctgtgcatggcttactttatttagcataatgtcctctaggtacattcaagtcattgcaaatttccttctttttaaaggctgaataatatttcattgtatttgtatgtgtgcatatgtgtgtgtgtaccactttgttaaaatttcattcgtcagcaggcatttatgttgttttcrcattttgtctattgtgaataatg

SEQ ID NO: 914766 - DNA, 609 bp, Homo sapiens
gatcttgtcactacaaggtgtgccttacaagagctcctgaaggaagcactaaccatggaaaggaaaactggtaccagccactrcaaaaacatgccaaatggtaaagaccattgatgctatgaagaaactgcatcaattaacaggcaaaataaccagcaaatatcataatgacagatcaaattcaaatgtaaaaatactaaccttaaatgtaaatgggctaaatgcccaaattaaaagacacagactggcaaattggatagagtcaagacccatcagtgtgctgtattcaggagacccatttcacatgcaaagatgcacataggctcaaaacacagggatggaggaagatctactaagcaaatggaaagcaggaaaaagcaggggttgcaatcctggtctctgataacagactttaaaccaacaaagataaaaagagacaaagaaggccactacataatggtaaagggatcaattcaacaagaagagcgaacaatcctaaatatatatgtaccaaatagaagagcacccaaattcataaagcaagtccatagagacctacaaagagacttagaatcgcacatattaataatgggagattttaatacacca

SEQ ID NO: 914767 - DNA, 457 bp, Homo sapiens
tacaggtctttgcagattatttatgactgaattttatgttaagtatactggaagccgttatagggttttaagcaggaaaataatatagcttggttttgatttttttttttttaatgatcctctggcttctgtgtggaggacaaatggaaaggagcaagggtggaaacctggagactaattagcaagatgtatccactgtgcaagtgggagatgagataggcctggaggttctccagggggaccctggagatggggagaagtggatgagtcaagttatattttggtgatagaaccaatcaattctatagattgagtatatgcctcaggtaagaagagggattcatgttttctagttcacagaagacaatcagctaatgggaatgatttcttccagtcatgcacaggaattgtgatcgttcaaagacrgcacagaaactttccctgaaagaacttctga

SEQ ID NO: 914768 - DNA, 571 bp, Homo sapiens
tagaaaatagtccgtccctattttcattcatttgtagtttaacttccctcattatattgcattaggagaaagakcatgggtgcttcctggtgcatccactcctgcggctcatttccccagctgaaatcatcatcagcttgagacatcacagccatctccacagcaaccagctccatcttgagagcacactcttcagctcacatagccttcattcctcttgttatttattactaaaatgatttgatgtggaaaaatagacttgggttcctaagactttgtggcaagttgctacttctctttttctaaagagatggctatgaagtaaggaaaatacgtttccagagtgagattgacttggccctttgaatgctgtctcaaaccctcccccaccacttttatttatttatttatttatttatttatttatttatttatttatttattttgagatagagtctcgctctgtcgctcaggctggagtgcagtggtgcaagcatggctcactgaaacctggacctctcaggctcaggtcatcctcctgcctcagcctcttgcatatctgaaacaagaa

SEQ ID NO: 914769 - DNA, 603 bp, Homo sapiens
agtactttcttctaccctgtggatgcatgaagtgaggaatctataggcagacccagcactgctcataactagccctatagccatggccttgggcaagtcaattattctttttggaacatgattttttcatagataatgaaaaggtaggagggtggtgggaaaagggaaaggagcagaaaagataactattgggtactgagcttaatacctgggtgatgaaataatatgtacaacaaacccccatgacacgtgtttacctatgtaacaaattttcacatgtacccctaaacgtaaaataaaagtttaagaaaagacaagagaagatggtgatttctgagatcctttaagctgtaaaatgtctatgattttatgccttcactcacatctttagggggttttgaaattctgttctctcatcttcttgaataaatttcaagctaacgaaaatgatttttcttaagtaacaaaatattgagtgagattttttcccaatgtcccagaatgttggttaaagccccaagctgagaacaatgggtaagaagtatatctgtcagaggcatttgaaccaaagtgactccrtcttaaatagggtaaaatgagact

SEQ ID NO: 914770 - DNA, 590 bp, Homo sapiens
tgtctggagtttgttccttcagatgttcagatgtgttcgtagtttcttccttccggtgggttcatggtctcgctgacttcaggagtgaagcctcagaccttctcagtaagtgttacagctcttaaaggtggygtgtccggagttgtttgttcctcctggtgggttcgtggtctcactgacttcagaaatgaagccacagacccttgtggtgagtgttacagctcataaaggtagtgtggacccaaagagtcagcagcagcaagatttattgggaagagagaaagaacaaagcttctacagcacggaaggggacccaagagggttgctgctgctggctggggtggccagcttttattcccttatttggccccacccacatcctgctgattggtccattttacagagtgctgattggtgcgtttttacagagggctgattggtgtgtttacaaacatttagctagacacagtactgattggtgcgtttttacagagtgctgattggtgcatttacaaacctttagctagacacagagtgctgattggtgcatttacaaacctttagctaaacagaaaagttttccaagtccc

SEQ ID NO: 914771 - DNA, 491 bp, Homo sapiens
aaaccaattcaagtaatcttttaaattcagaggaatatcactgatttgatccattatagatattgtattacccaacaattcttagccaaataaataacaaatatatgtcaagatcattgtagagtaaaaaaattcttagatagaattagatatgtttagaacggttttaggttcacagaaatattgagtggaaggtacagagatttcccatacacctgcttccaccacacaacacagctttccccactatcaacatcctcaccagcatggtacatttgttaaaattgatgaagctacactgacgcattataatcactgaaagtccatattttgcattagtgttcactattggtgtggtacattctatgcatttgaacaaacataatgacatgtatccaccattatggcatctatatytataatttttagggtagtgaaactaagaaatataaactactgaaacagcaataatttcactaccctaaaaatcc

SEQ ID NO: 914772 - DNA, 590 bp, Homo sapiens; identical to SEQ ID NO: 908283

SEQ ID NO: 914773 - DNA, 674 bp, Homo sapiens
actgtgttcccctaatcattgggtcaatggagaatcttccagcacttattccatgcctttatttcacttctaaaagctttctatcttcaatttggttagaaatgtttctaatcaaaggtcatgcacaagtgycatgacccagataacaatgataccaaagtaaattataaaaatctttcatcaagaaatcttttctttctataatttttgcattgagagtttatcagccttcctataactgatataataaatacaagaatacttctccacccattaaagcaaattgccagatgacactctttgcagtatccaccccactcaggagtacagataaattctgctgtcatttttatagcagctcttatataaatctggatatttgattatttgagatttttcattgacaaatttccaaaattagctcattttatattattgcaaatcatcacagtagggtaatgaagtggggtaatgggtgtttatgacaggaaatggcttacagatgctgcagagtacatcagtcatcttttttgttatcttccttcctgctttagtcccttcctctatgcaatttctttcctgaactatgtcaatattatgagactgagtttctagaataaagatggccaataggctacatctcatgagctgactctagttaacagtgctgtcct

SEQ ID NO: 914774 - DNA, 622 bp, Homo sapiens
aattaaacttcttcaacccatcagctttttattttttttaatcatacagaggaagaattatctgaatgattttttacacaatgcaatgaatggaggaacaattaaactgtgtaccctgtgcatatatacatacatatatatatctgtgtgtgtgtgtgtatacatatatatctgtgtgtgtatatgtatatatatatatatatataaaatgagagataggaagtgtgagctaacacaaatttatgaacaaacaaaatgtatccataataaaaagaatgcatatgatagtatcttgttgtaaatgtcttatcttaaattacctttaatatatgctaagaatttggccaaagtgctctaagatgctagaaacaaaagtgtgcttgtttaacagaaagtatgtgtgcatgtgtgtatatttatatatgttatatatacatgttatatatatcatatacgtgtgtgtatatatagagagagataatacaaacacacacatatatgtatgtatatgcgtaaaggcatatatataccttttttcctgaatttgcctgtgtttgctattggrtttagttacataaggctttaatcaagaggttatccttaaggcttctgaattatttag

SEQ ID NO: 914775 - DNA, 583 bp, Homo sapiens
cccagcggcgctagaaggaacctccaggcaarttttgggggaaattcacctgacaggggaggagcagagagggaatcagtagcggaagggaaagggtggagatggattacctgagcgcagcaaaacttagttgagtagaaataagctcccgtatgaacaccgggcactaaaactgcgaattaatgtggttcccttattatcaattccacgcacgtgtacgtttggcagaagctgagtaagtggagaataactctggaactgaaatgaagtcagtgaaccgacacaaaaccagatcctagcggtgagctggctgcggaggaaccaaagaaaaatgaatcctcgaggaaccctctcccatgctagaaagatgtagttctacagctgcagcaccaaattcgaggcgcaggctgggaagtttaaagcgcagcgctaaccagactggacactgtcaagggaagcatactctgccttcagcaaccacaagagatatctcacgggggttattgcactcaactctatgtaagctggcagtcagctaacattagtcagccctagccagctctcttgcctgcggcgactgagt

SEQ ID NO: 914776 - DNA, 577 bp, Homo sapiens
ggtagagtctctgaaaaggaaaagttgccaaaacccagaattgaaccagtctcctttagatcttcargctgatgccctcccaaccgagctatctcagcttactgtagactgaaaattttattcaatttctctttcaatacttcgattgtttccaactttttagctttcaggtttcttaagtacttttattatacaatgtatttacccactaagaaagacttggaacttattgactcctacatatgatggctgaatccaattccctggcagtgtggaatggataggtggaggagggagatagaagaaaagtaacaggaattaaaaaacaaacaaaaaactttctgctcttccacatcctgttggttgagccagacacagcaaagaaaatttaaaaataaaaataaaaaataaaatgtggtggcgttctttgtttttcttttctttttgtctttaataatcttcgaagatgtggagaattggaacccaaggttaatttctgttaatgtggggtcaggtttctgtctcctagcgatgattttgaatgagctattaatcctttgttttatcctctttcatc

SEQ ID NO: 914777 - DNA, 653 bp, Homo sapiens
gtatcttttttttttttttcattagtttcaaagaacttctagatttttgccttaattttattatttacccaaaagtcatttaggggcaggttattcaatttccatgtaattgtttatggttttgagataatttcttagtcttgatttcaaatttgattgtactgttttccaagagagtggttgttattacttcagtccttttgcatttgctgaggagtgtttttgtctgattatttgatcgattttacagcatgtgccaagtggcagagagaagaatctatattctgttgtttttggatggagagttctgaagatgtctatcaggtccatttgacccagtgctgaggtcaggtcctggatatctttgttagttttctgtcttgatgatatgtctaatactgtcagtggggtgttgaagtctcaagctgttattgtgtgggagtctaagtctctttgaagatttctaagaacttgctttatgaatctgggtgctcctgtgttgcatgcacatatatttgggataattagttcttaatgaattgaaccacttgccattatgtaatgccctttttttcttttttgatctttatttgtttaaagtstttttattctgaaattaggattgcaatccctccttttttactgttttccat

SEQ ID NO: 914778 - DNA, 608 bp, Homo sapiens
ggtcatgatgtgagtggggctttggcgacagatgttttaatagactcagccatttaacctccctttcttctaggccttggaccagatgaagcttattatgaagtggaaatgggcgacctggaagaggtatggtcgattgaaatgatcgggtctcactgttttccatgcgggacaatccccttcccgggcctggctataagaactctcgaggtcttttctttgagggccacactcacatacacactccaatcactgccgtggttaacccttgagagatgatgacctggtgaggcgactgcccacacagccttgattagagagcgttcaggatccatggaccaaaccaccgggcagcccaggaacccagctgcaggacaggagcctcgccccagtttactactcagcatccttaagagccagcaagctcaaccacatcccagtaaacacacgggcttgattacagtccttgcaggcgaggaaacaagaataaatcaatgcrgatggagggtgttctcggcctactgtgaaatctcaggatcccagcaggcgagcttcacagttctcaggggcagatagaggggattctttctctatagggatcttatcag

SEQ ID NO: 914779 - DNA, 617 bp, Homo sapiens
acatttcctatgctggcactcattctctcttctgccaccctgtgaagaggtgccttctgccatgattgtaagtttcctgaggcctccccagccatgtggaactgtaagtcaattaaacctctcttcattataaattacccagtctgaggtatttccttatagctatgtgagaatgaactaatacagtaaattcttaccaggagtggggtgctgctataaggatacctgaaaatgtggaagcaactttggaaatgggtagcagaagaggttggaacagtttggagggctcagaaaaagatagcaaaatgtggaaaagtttgaaacttcctagagacttggagggctcagaagacaggaagatgtgggaaagtttggaacttcctagagacttgttgaatggctttgaccaaaacatagacagtgatatagacaatgaagtccaggctgaggtggtctcagatggagatgaggaacttgctgggaactggagtagaggccacttttgctatgytttagcagagactggcagctttttgcccttgccgtagagatctgtggaactttgaacttgagagagatgatttagggtgtctggtggaagaaatttctaagtggca

SEQ ID NO: 914780 - DNA, 487 bp, Homo sapiens
gcatgcccctttcccccaccctcaccatctgcccccagatcattgaatcaatkatggggctggagatcttgtttcctaacaaccatgattttaatggttagccatgtttggcagccattattctttaccattcaaattgaaaagactctgcagagactacaagctacaaatacagagaaatatgaagtataggcaataagaatctggtacaagactgttaattttaatttcctctatatttctagcaacttccagaatatcaggattcatggacatctctaaagttttgctactaatcgatagtcaatataaacctattatttaagtcttaattttaggaaaatatatgcccctattgcacagcagatcattcagaaattttatagtaataatttaaattgattttttgggaaaaatgtttttgccttgtcttcatctataaaaggtcatagaaagcattaatagattttgatatctttttttaatg

SEQ ID NO: 914781 - DNA, 606 bp, Homo sapiens
ttggcaaactgtcattatcctttcatctgggtctgtatatcacataggtgtcaggcctatggagattaagacttgattaaaaagctctgtgtgtgyataagtacatgatacttactaacaaattcttttaaaaaatctttataacaaagtctatgtttaaaaataacaacacaaatctttataaatcattcaaataaagttggatgcatttctagctgaacataacagaaacatcttgacacagcttctttttctctagagaaattccaggtatggagtttcctagactgagttatgaatcctgtaaagattgttacagctctccaataactcattttctgaatttccttccccctttagtagaggcacttcttccttttaggcatacttaggctttcttgtggcatgcattcccctacaccctaccctagtagggtaggtaagtctctgattcctgtgatagatgctatttgcctgcttgactttgaatcagcctcagtaaaccaagcacgtgcacattaatttgaattatcacaagaaagactccatacctctcttccctaccttgatttcatacgtcatcgaccacgtaaggagatggaggag

SEQ ID NO: 914782 - DNA, 638 bp, Homo sapiens
tggttcttaactagtctgaaatgtctgaaacgacagacatgaaattcagaatacgaatggcaaggaagctcatcaagaactaggagaatgttgaaagtcattccaaggaagccaagcaattcaagagccgaaagatgaaatagccattttaagaaagacccaaattaaactttttaagctgaaaaattcaccacaagaattgcataatatgatcagaagtattaatattaacagcatcccagtgcagtgagtggctcatgcctgtaatctcggtactttgggaggccgaggcaggtggatcacttgaagtcaggagttcaagatcagtctgggaaacatggcaagaccctgtctctactataaatacaaaaaaaatagctgggcatggtggtgcatatctgtggtcccaactactcaggaggctgaggtgggaggattgcttgagcccagggggtgaaggctgcagtaagccaagatcacaccactacactccagcctgggtgacagagcaagaccctgtctaccctgtctccagaaaaaaaagaagtattaatagcagaataaacctatctgaggaaagaatctcagagctcaaataccagttcttcaaatcamctcagtcacacaaaaataaagaa

SEQ ID NO: 914783 - DNA, 638 bp, Homo sapiens
tggttcttaactagtctgaaatgtctgaaacgacagacatgaaattcagaatacgaatggcaaggaagctcatcaagaactaggagaatgttgaaagtcattccaaggaagccaagcaattcaagagccgaaagatgaaatagccattttaagaaagacccaaattaaactttttaagctgaaaaattcaccacaagaattgcataatatgatcagaagtattaatattaacagcatcccagtgcagtgagtggctcatgcctgtaatctcggtactttgggaggccgaggcaggtggatcacttgaagtcaggagttcaagatcagtctgggaaacatggcaagaccctgtctctactataaatacaaaaaaaatagctgggcatggtggtgcatatctgtggtcccaactactcaggaggctgaggtgggaggattgcttgagcccagggggtgaaggctgcagtaagccaagatcacaccactacactccagcctgggtgacagagcaagaccctgtctaccctgtctccagaaaaaaaagaagtattaatagcagaataaacctatctgaggaaagaatctcagagctcaaataccagttcttcaaatcaactmagtcacacaaaaataaagaa

SEQ ID NO: 914784 - DNA, 561 bp, Homo sapiens
tatttgaaagtttcgctcctcaaagtatgatcccctggccaggcgcggtggctcacgcctatagtcccagcactttgggaggccgaggcaggtggatcacttaagctcaggagttcaagatcagcctggacaacatggcaaaaccttgtctctactaaaaatgcaaaaatttaccggggcgtggtggcgtgcacctgtggtctcagctacttggcgggctgaagcgagacaatcgtttgaactagggaagtcgacctgcagtgagccgagattgcgtcactgcactccagcctggggtgacaaagtgagaccctgactcaaaacagaaacaaaaacaaagtatggtcagcagcagattgagcgttacctggaagcttgtgagaaatccagattctccccgaggtatctgaatcagaatctgcattttaataagaccccttcttgccccttgaatgccttccctgactcctcaaggcaggcttctagattcctgccctctcctcccagygttctttgtccacacccccactagacagtgtagcttcttgaatgcttagccac

SEQ ID NO: 914785 - DNA, 625 bp, Homo sapiens
taacattaaacttctgtgctgcttcagcataaatcttgggaatggctgctgtcccctgactttttttataactttaaactcaggccttcaaaatagagccatcgccctaattttggtcatagctctggcagggcagcaaggagagatctgggaataagtagcggctatatgcacagctgtggtgacctggaaatttaaaacaaaacgatccatttcctgctgaaccataacattctccttctcactagtgtggattcagaaagaccagacgggggacctggacaaccgaggcatggagactgaatttcaaacgaggcaaagtaaatagaccttgcagggtggccaccgtcgagtatcccacatccaactcactgactgttgaaatcgccacaaaaacacatgtctgatggcatatggccatgggtgttctgttaatttatcatttcaatgtactttttatgtgccaggtagccgttcagccaataccaattcaatgtctgatctgtgcrcattactattcagacactgggatataaaagagtaatatttagtaagtttttaatggaactatgtgaatacatacaactcatatttatatatacatttatggaagcgtctaatgaca

SEQ ID NO: 914786 - DNA, 631 bp, Homo sapiens
acatatatatatagttacatayatatgttgctattttcatcgattgtggtacttttaacatttctatatatccttcataattatcattttaatgattacatatttttctaggttgaatttattaaatcttttcctttaatcttggacatttatgctattttcagccttttggcatcgtagataagtgttctgtgcatatattgtttgttgaataattagaaattctagagaataaaattaccgaatcagtctataaattattatgcttaattactgtccaaaagaggtatgccaatttataagatcactataaataaataaatggattccttactttcactggcaatgaatacaatatttcttaatccatttgcttttttaataggtgactaaaggtatcttcaggttccatttgggatagtgtttcctcggtatttgtttattaatatttatgtaattttgatgttcatgtcattggcttacccagctttttcactttgagatttccttctgaattttagttattgttatacaaaaaatttaattacaatgttttcacttagtagaggctttctgtatttatagatttagttggggcaatgtgtttcccgagtttcttctgtggattatt

SEQ ID NO: 914787 - DNA, 648 bp, Homo sapiens
aatatatataggtaaagtaataaggtgtttccagaattccttagtaagtytatcctctaagagaaaagcaataaaaccatacacacgaaattagttgtatgtcatgtttccttaaagtaagtatttttaagtagagaaaaaaaattagtaaaggattttgttactgctagatctggatttgaatcctagttgcaagttatgtagcaatgggtaagattctgatgtcacttttctataaaaacttcataggattttttgttgttgttcaggattaaataacatatttcatgtccatagcaaagggtctggctcagaaaaaaaatggtagataattgttttcaaagaaattaattacctcattaattgtatttacatatctgaagaaagactaggttaactaatgaaaagattgaaagagaatctcagtgtatattagtaattggctatcattgacttaaggagataattccctgattctttattgtggggattttgagttgattgacagaactatcccaactcttgatgattccatcgggtaggttaaggatgctagccctttatgtcccattaatttcattgatctggctccctgtttgccaagtaaacctctactattatttttgtttgtttgttttgcctgtttat

SEQ ID NO: 914788 - DNA, 656 bp, Homo sapiens
tcaaatttaagtttggtgagcattttacattgtagaatatagtctaatatttaattgcaaaatacagtataaagttcattaccatgaacttcaagatcagctagactctgtaagaccataggcaagttttttgagctttctctgtctctgagttctcatctgtaatactgggtcaataatgcttcattggtccacagactgttttaaagattaaattagatattatgtgtaaaatgctcatagagtaccttatatagcaattcatggtagctataattttgaactaggccaatgtgccagctcctgcaaaagatcttctcatactttccttctccaagggccctcacccatttcaaatccatcataactcctggctttctcctttcccaggaaaattatttatacagactttctggcccatggacctcagtaaggcccagcagtgctggatgaaacatctactaggtacaagaccatacttttggtatgacacaactaatgaaaactaatttaattttttttagaggtaaataccatagtacagataaaacagcatctggagtcagcgggtttggattctagctttttcacctactactgggagtcttgaacaaaatgagccawagcttcttcatacagtaaataggaataagaaa

SEQ ID NO: 914789 - DNA, 605 bp, Homo sapiens
ttcagctgaaatcttctcaaatgacctttttttcttcacttatggctcacccaaagacgttatttttccctaaacaatcattcaaatgccactgcatttttccagtaaacacattctaaaaataaatgtccttgctgacacacatctactaaatgggaggaagacattgactatactaagcttttttttttttttttttttttttttggtgcgtagcaaacacttttcacaaatttttgaggtgagtaatattaagtggaagggatgtttcttggacctcagagaataagaattggatgtgtgcttaagaacttgcagttggattaactatatttgttgttgtctagtgcacacatgaactgaatggaaaccttcaatcccatatctaaaaggaaaaagagaaaaagctgtgttctctacacagggactcagcaaggaaaactgcctacacataacttaccctttgatatcatcaaatctgcttaaatatgcatagctcctgaaggcttagctcagcctscctgactgagtgctttggctgttcttattctgggtcattcagatgacttccaaaactgtttctggaaggcattaccaatgtttaa

SEQ ID NO: 914790 - DNA, 615 bp, Homo sapiens
acatactggaaaaagagattttgcagggaagtagtaagatctgtyagataggaatcagatccagtgttttatggtttgatagaatacatggaaataatatgagaagagactggggggagaggtagaagcatgtttgaaaccacatagtaactcagaccttgaaaataactattctctaaggcttcaagttctcttcacttcacacctaatttctcagtgaatacatccatattttgaaacattggattcaggaaatcaaattattactagtctggtgattaaattgctctatccatctgctagtatattgtcattattctttgagctttgcttgatgataacaaaaattataaatcacttgtattaaatccaggcaattattgtataaaatcttgtagaaaaaaatgaatgcttgaacttgatttttttctgtcttaaaagcaaaacaaaatatgaaatgcaatataatcaagtttaatattggagtatattttcagaaatggtggtgtccaatgatgtctccacgcagctggactttttcttggatgctcttttggttgacattgaatccacagagatttctggcttcatggatggccaaacactggtaaggtc

SEQ ID NO: 914791 - DNA, 615 bp, Homo sapiens
acatactggaaaaagagattttgcagggaagtagtaagatctgtcagataggaatcagatccagtgttttatggtttgatagaatacatggaaataatatgagaagagackggggggagaggtagaagcatgtttgaaaccacatagtaactcagaccttgaaaataactattctctaaggcttcaagttctcttcacttcacacctaatttctcagtgaatacatccatattttgaaacattggattcaggaaatcaaattattactagtctggtgattaaattgctctatccatctgctagtatattgtcattattctttgagctttgcttgatgataacaaaaattataaatcacttgtattaaatccaggcaattattgtataaaatcttgtagaaaaaaatgaatgcttgaacttgatttttttctgtcttaaaagcaaaacaaaatatgaaatgcaatataatcaagtttaatattggagtatattttcagaaatggtggtgtccaatgatgtctccacgcagctggactttttcttggatgctcttttggttgacattgaatccacagagatttctggcttcatggatggccaaacactggtaaggtc

SEQ ID NO: 914792 - DNA, 615 bp, Homo sapiens
acatactggaaaaagagattttgcagggaagtagtaagatctgtcagataggaatcagatccagtgttttatggtttgatagaatacatggaaataatatgagaagagactggggggagaggtagaagcaygtttgaaaccacatagtaactcagaccttgaaaataactattctctaaggcttcaagttctcttcacttcacacctaatttctcagtgaatacatccatattttgaaacattggattcaggaaatcaaattattactagtctggtgattaaattgctctatccatctgctagtatattgtcattattctttgagctttgcttgatgataacaaaaattataaatcacttgtattaaatccaggcaattattgtataaaatcttgtagaaaaaaatgaatgcttgaacttgatttttttctgtcttaaaagcaaaacaaaatatgaaatgcaatataatcaagtttaatattggagtatattttcagaaatggtggtgtccaatgatgtctccacgcagctggactttttcttggatgctcttttggttgacattgaatccacagagatttctggcttcatggatggccaaacactggtaaggtc

SEQ ID NO: 914793 - DNA, 568 bp, Homo sapiens
cagaggctcacccaaggccctcgacatagtacctagttatcactgctgtttattctgggcccatgggctcttcagttagcaggtgaygcatgatgccagaactgagtccctcccttcaatgcagcaggttttcttctggcccaggttgtgtctagaaatgtcatcttggagctagggcctggaagagagacctcataactctgatcagtgccctattctgctgtggctgtactggtatccaagatgcaagaaaaagtcttcccctctcttttttcttatcttctcaagcacaagtaatgggtctcttttgtagctgtgagctgagcagactggggttaggggagggatgatgccagcactcttttgactgcctcaacccggtatctcagcaggtcacatcaccctccccccagtccactgtctctgggcacagttcagcactaggactttcctaagagttgtagtccttgtggcttagcctgcctttcaagttcacttagagactcagagcagtttaccactttgtggaaaggtctgtgggaactcaagttgtgaccactgggatcgg

SEQ ID NO: 914794 - DNA, 568 bp, Homo sapiens
cagaggctcacccaaggccctcgacatagtacctagttatcactgctgtttattctgggcccatgggctcttcagttagcaggtgatgcatgatgccagaactgagtccctcccttcaatgcagcaggttttcttctggcccaggttgtgtctagaaatgtcatcttggagctagggcctggaagagagacctcataactctgatcagtgccctattctgctgtggctgtactggtatccaagatgcaagaaaaagtcttcccctctcttttttcttatcttctcaagcacaagtaatgggtctcttttgtagctgtgagctgagcagactggggttaggggagggatgatgccagcactcttttgactgcctcaacccggtatctcagcaggtcacatcaccctccccccagtccactgtctctgggcacagttcagcactaggactttcctaagagttgtagtccttgtggcytagcctgcctttcaagttcacttagagactcagagcagtttaccactttgtggaaaggtctgtgggaactcaagttgtgaccactgggatcgg

SEQ ID NO: 914795 - DNA, 600 bp, Homo sapiens
gtatgtatcacagccctcttcayacattccagatgtggtaggaggttcacagaatgtgaactttggagctgatgacagtgtcatcaagtaactttctcccccagtctgtccccagaccctgttactgtcctcagtaaccggctgaatgtgtgttgggagagggcgggccagggaagcgggtagggataggaaatccaccaaggccggggttttagcttttccctatatatatatcatgtatcctgatttttctgtcccgttatcacactaaaaatcccagttgaggatttttcccaaacggtcataaatcaatgaggaaagtccatggtttccctctgagcccataattagcctaattatgctgaccttttctaatcagttggccatgatttgagttccgtgatgtgccagcacctgcccagccatctgcctgtcaccctcgttctggttttggaaaggtggaatactttcctcctcagcctttgcccctgtaagctggccctaggagccagtaaaagaatgaagagaattcctgtcaagtaggagatttattcttttgccgcaactgtggctctgagctaggcaatttagataaatgca

SEQ ID NO: 914796 - DNA, 585 bp, Homo sapiens
agactcagtcgccgcaggcaagagagctggctagggctgactaaggttagctgactgccagcttacatagagttgagttgcaataaattccgtgagatatctcttgtggttgctgtaggcagagtatgcttcccttgacagtgtccagtctggttagcgctgcgctttaaacttcccagcctgcgcctcgaatttggtgctgcagctgtagaactacatcttcctagcatgggagagggttcctcgaggattcatttttctttggttcctccgcagccagctcaccgctaggatctggttttgtgtcggttcactgacttcatttcagttccagagttattctccacttactcagcttctgccaaacgtacacgtgcgtggaattgataataagggaaccacattaattcgcagttttagtgcccggtgttcatacgggagcttatttctactcaactaagttttgctgcgctcaggtaatccatctccaccctttcccttccgctactgattccctctctgctcctcccctgtcagctgaatttcccccaaaayttgcctggaggttccttctagcgccgctgg

SEQ ID NO: 914797 - DNA, 596 bp, Homo sapiens; identical to SEQ ID NO: 912418

SEQ ID NO: 914798 - DNA, 621 bp, Homo sapiens
gactgacgagatctgatgggtttaaaaatgggagtttctctgcacaatttctctttgcctgctgccatccatgtaggatgtgayttgctcttccttatcttctgctatgattgtgagccttcctcagccatgtggaactaagtctaatcaaacctccatgttttgtaaattgcccagtctcaggtatgtctttatcacaagtgtgaaaacagactaatacagtaaattgatatcagtagagtggggcgctgctgaaaagatacccaaaaatgtgaaagcaactttggaattgggtaacaggcagaggttgaaacagtttagagggctcagaggaagcaggaaaatgtgggacagtttggaacttcctagagatttgttgaatggctctgacaaaaatgctgatagtgatatgaacaataacatccaggctgaagtggtctcagatggaaatgaggaacttgttgggaactagagtaaaggtgactcttgctatgttttagcaaagagactggtggcattttgtccctggcctagagatttatggaactttgaacttgagagtgatgatttagggtacctggtggaagaaatttataagcaggaaagtattcaagaggtgac

SEQ ID NO: 914799 - DNA, 562 bp, Homo sapiens
taacataaactagaaataaaatccaatccccaacccaaccctggccaactaaacagaccccttgtggcaaaagtgataccagaaaaaacttaaaaactgagttcccagccctgacagaatgagagstcagacacgactcattataccctcctcttttgtgtggtttagacacaactgaccagcattaaagttaaagtagagatcataagactgatagaataggctctttgtggcaataagataccaaattataagcaggatctaagtccatgccaaggaaggtttaagtcacgcttcctttcatttaaagaagaaactatgttttaactgccacaaggttttcctttttctctagcagctaaacaagcactgccccgagataagaaatattcaaacaatttgcagctccactagatgctgacaaactgtacccctgttccactaactgtaactatagctttgactgaacgtgagactgattttagtaactttctcctgataagaccaaccatggactcattctagcccttttacagagattgtgcacttctgtgctctcatg

SEQ ID NO: 914800 - DNA, 630 bp, Homo sapiens
ctaaagttacaaagatgaaaagttttgttttgttttttttttttttttgagacagagtctagctctgtcacccaggctggagtgcagtggcatgatttcagctcactgccacctctgcctcccaggttcaagcaattctcctgcctcagcctcccgagtagctgggactacaggcacgtgccaccatgcccaactaatttttgtatttttagtagagacagggtttcactgtgttggccaggctggtctcaaactcctgacctcgtgatccactcacctcggcctcccaaagtgctgggattacaagcatgagccactgcacccaactgaaaagtattattttacacaaagtttttaatttttagacatgtgcatttaatttattagtgttctgttggtaaactagtcaagttttcaaagacatttaagaagcatgaagagtatattttaatataatttacactacatacatttctttatgtaaagtgtttatcatccagggtgtcttcagtgtctgyatgtattcaacacatccatcttaaagttccctgacatccataacttcagtgacattccttgatcacactgagtctttctactgttgacatctaaactctaagaaccacagtg

SEQ ID NO: 914801 - DNA, 542 bp, Homo sapiens
ggcttagctcagtgtcctagatcaagtctttcaatgagtcctccctcacagtcagctgtttcacctccatcagtgccagtgagatctagagcaagagattatagggaagcacggcaaacaagaaaaaaacttgccattgtgggtgcagctgagcttcgggaatcataggtggctgatgagctatgacagcagctggtaaagaggtgctgagcttaaccttgctgtcaggttctaagttgacattacttctttttgtatcaaatgccttgctctatataagggatgtgcatctgagaagttgtacatagaccaaacttctgtaaggttgaattttattttcccaatgaaggagttcttagttacatagacactttatcttcagggataaatattttttagtatgcagaggatcctcacacttccatcatcatgtattcatctaaacatatttgttgtgcaaagtgcctaatatacatctgtgaacaaggcagagtccctgccttcaycacagtctggtggaggagaagaaagattaacaggcc

SEQ ID NO: 914802 - DNA, 673 bp, Homo sapiens
ggatttatacttaagtctctgttatactactgactgtattttgtttatatttattggtcttatatagattgttagtcttatatattttgttaaataaatawgctataattaacaatatgccttatctccttactaagctttaagttttctaaggatagaagctgtgtctttgtctttatcacatctcatagcagtgcctacttctggcagatgctcaataaagatttgtcgaattgaataatttctgatgcccagtgggtgaagtccaatctgttaaggaggcatctgacacccttcccaatcaagacagccctaatttcatagcctcatgcctgtcatttctcaactcctcttccccacgcctccagtgttccagccataatggctgtcttccccataaacagtgtgttttgctcatgctctaattatttcctctttttggattgtccttctccaccttgcattcctggcattctcatctttccaggcccaggtgaaatatcacctccaccatgatgttattcctaacccccttcccctctgtgcctctttggaattctgtatacactttcattaaaagcccagttctaacaatccatttacaaatattttctccccagctagaatgatactatgtaagataattttcagaacctagggtgacaggcaaata

SEQ ID NO: 914803 - DNA, 607 bp, Homo sapiens
ttacttgtgaaactgttcaatctaagcatcaaagtgagaaacaaacatgatgaaacagaagcatacatttgagtgggaacatttcgtttttcgatcgcatttttgttttgttcattttaagtaaaactggagtcttttacactgtgttaatagaaagagcctctaaaaaacacaattgcttttcatgtcttgatgctgttaataaaacagtgtgtgtgtcaccactgaagcagatgactcacagagaatctcagaccacatgctgaaatgccaccttctaatgagtaaacttgatttctgagttagggtcctcagaatcttctatgtaaattgaaagcatactacatacttccttctcaaaaacagtttcactttcttaaattatgttgaattaccgccaatgcctagaataaatatagccaggattttaatttgattaaaaatgttgactttattattattattttttgttcaaaaacagttcatcttkgaaaatattattttggagaagtttatatttctcttgattttattatacagacaacataataggtcttggcatatttattgttagtgtggtctctgaaattgtttaattaagtgcaaa

SEQ ID NO: 914804 - DNA, 593 bp, Homo sapiens
gatctaagttcctacactcagcatgcacaaagaaagatgccaaaaaaaaaaaaaatcagtaaacagcagtttagggtctaatgaggtaagtgaagatttcagcatccaacagaagttggacttcaagccttgataaggtacctagatacccagggttttcagttgagatctcagcacatccttggagtaagagcaatataatactgaaataaaatagatctaacaaagcttgaaaccaagccttttcaggatcaaagttatctgccactattctttctactttccaggagtagaaagtagaaactctatggaggtaggtaacattatccagagtctacaattttgtcttatacaatatctgggatccaatacaaaataattatgagccatgcaaaagatcaaatccaaatgactaaacactaagagagcttgagcatacaccaaaaaatttagatataaagtgatgggaaatttgaagccattgtagaagatacgaattggagatggaactacccaaaattaccwtctataaggatcttctagattaaatgcaagctaacttattcttaaaattgttttgttcattatgatat

SEQ ID NO: 914805 - DNA, 644 bp, Homo sapiens
gtatgcattcgggtcagtgataaacccctagactgctaactttttgttttgaatgcctctatgcagtgcaataaagccaaatggtgtggttggacaatcaatcccgaacctctcctcctccttcaatttctgagcgtttattttctatatttttattcactgggccaaattctcctttcagtctggcaagagtttacatgctataaatagctacccttgaatgagtgggagttttctaggctctcatcagagaatccaattttggcttgtcatttagctcctgtcgaagcctggctaagacaactgatatttgaaaaatgcagtttacaggtgtgcagtttctcatctatgtgtgctaagctgtattcagatcaccagaaacatctaaatgtagtgctcattagcttagcctttcccagtaaaaactctttcatgaatcatgttttagtattgtctttatctttttttaaaaaagtccattaatagtagaaacagtgaagtgaagaatatttttgtagcttctgtaaaaactgcttaaagatactgcccattatgttgttcaatrttccttgtgcaagaactcatgcgatgaattcctttaaaaatttattcaggataaagtttgtctttgtcaaagaagtgaa

SEQ ID NO: 914806 - DNA, 560 bp, Homo sapiens
cccagaataaggatgaatgatggaagagggctgcctagaagacctcgtggagcaaagggctttgtgctgaaatcaggacttggacacatccaygtgctttctgaagcacattgcttccttaattgttttcttatatagtagtttctttttatgctcggggaatatgttccaagacccccagtggatgcctgagactgtgagtagtaccaaagctataaatactatattttttcaatctgataaccatgacagctactaagtgactaatgggcaggtagtgtatacagcatagaaatactggacaaagggatgattcatgttccaggctggatggagcgagatggcataagatttcatcacgagactcagaatagtgtgcaaagtaaaacttatgcattgtttatttctggaattttccatttaatattttcagactgcggttgactatgggtagctgcaactttggaaagcaaaaccgtagagaagaagggactgctgtacatatgttttattgccctctcattcggaatcttgcaatgtctctagcaacttaccctgat

SEQ ID NO: 914807 - DNA, 560 bp, Homo sapiens
cccagaataaggatgaatgatggaagagggctgcctagaagacctcgtggagcaaagggctttgtgctgaaatcaggacttggacacatccacgtgctttctgaagcacattgcttccttaattgttttcttatatagtagtttctttttatgctcggggaatatgttccaagacccccagtggatgcctgagactgtgagtagtaccaaagctataaatactatattttttcaatctgataaccatgacagctactaagtgactaatgggcaggtagtgtatacagcatagaaatactggacaaagggatgattcatgttccaggctggatggagcgagatggcataagatttcatcacgagactcagaatagtgtgcaaagtaaaacttatgcattgtttatttctggaattttccatttaatattttcagactgcggttgactatgggtagctgcaactttggaaagcaaaaccgtagagaagaagggactgctgtacatatgttttattgccctctcattyggaatcttgcaatgtctctagcaacttaccctgat

SEQ ID NO: 914808 - DNA, 680 bp, Homo sapiens
tccttgtaagtgaatagggctatcattcattcaatttcactgatgtataacatcctattctgagactaccccacatttatttatctgtccttgtgggttgtttctaagttttgctcttacaaatagtactgttatgaacatgctttgtacatgtcccctgtactaatgtgcaagagtttatcttgagtatgaacctagggttggaattgccgagtcataggttatatgcatcttaggctagaaaaagccataatgttctccaaagtaattgtacaaacttatgctcccagcagcagagtttaaacattttagttgttctacatcctctctagcacttgatgttgtcaaacttttaatttttgtcaatctggcatgtatgaagcagtatttcgttatagttttaatttgcatctccctaattactaatgaggctgagcattttccccacatatttatagggtattcaaattattgtttctgtgaagtacctgttcaaatattctgtccatttttgattgacttttgttggcctttcattgtgtgttaatctgtagttctttatagtatatttcaytgaatttaggagaatacttattgtaagagatgctgctattttatttacactaagaaaaaaacgctagcaattaaattgtgacagtgttgattataagatgcatctt

SEQ ID NO: 914809 - DNA, 615 bp, Homo sapiens
gaaggtgccttaacttttctgagactcagtgtctttttctgtaaggtggaataaaaccacctactttacagtcctcttgggtaaatgaaatgatattaagtttataaagtgtctaggaaagtccttggcccatgctctgccctttatgatgagtttttaatcccagtttctcattttgaattttaggttcagaataggcattgggttgacaagatataaagctaactgggattcaagtttacatttccccttataatggctgttgcaactagtgactttttgaagcaggtgccattttggcatgaaagagttccaaaggctagaacatcctctcttggtcctcgactccaagattgatcctcagagctgatattttctatgctttgactccaaaagattgaccaatgtgagcagcagaaacaaagcctgtttcccatttcttttgggccactgacaacctaaacgaaggctggctgtcatgaagccctatggataagactcaaataaatgcatatgatttctactctctttgctgtagtcaatatgggtrttggccttttcagaacatgcatgggtacttactttgtactctgcttttagtaaaatatatttacc

SEQ ID NO: 914810 - DNA, 588 bp, Homo sapiens
tgccaggaggagattggaacactttccctggagaaaatgtccatgtccatttcaagaagaaaactctaaagatattgacaccaaataatccacaaaaaagtggcccagccagatgatcttaaggygaatccactctacctaattgcttgaagcttcccatcagctattagcttttcattcttcaatataggcagtcaaattgccattcacctgaggaaatcttctaacctgaagtatatagaccaaaataaataaagaagaaaaaaatcaacttagaggaaacagggtttatgcaggaggagttttaaaattctaccatgagttttcctggaaaaataaaagatattgcacccaagaaataagaagagatgaggataatgctatttctctccctctttagttttttggtttgtttctttgcttgtttaagacatacagtttcactctgtcacccaggctggagtgcagtggcccaatcacagctcactgtagccttcacctctgaggatcaagcaatcctcttgcctcagactcccaagtagctcagactaggacaccaggtgtgtaccaccatgcccagttaactta

SEQ ID NO: 914811 - DNA, 618 bp, Homo sapiens
gcaccctagcacccataacttggtttctttaccattttacactaaaacgaactaggacatcttggaaaaatggctaattccagggcttgacaagatagatgtaagatgagtctagaatatcgtgttatwccagaaagtaaagaagtacttttttaaaacaatggttgcatgccatgtaagcaagatttaagggactcctaccggccaaatttggcacaattttgatcaccaaaattagcaatttcttacacaaatgtgaacatcaaaaatggaaattcatcagccataacatgatttcatgagccatcgattaataaatggaaggaaggaaggctcttgattacaggggaatgttgagggccaactggtaaatgtgaagactggagtgttccaaagttgtaaaatcaccattttgcaaccacaagggtaaagatccaatcagccaagaatcatcagtggacaaacaaataaaccaatgtagtacataatacaacacagtagttttcagtcttagaaaaaggaaggaagttcggtcatgtgctacaatatgcatgaagatggaggacacgatgctaagtgaaataagtcagtcacaaaaagacaaacaccgctgggcat

SEQ ID NO: 914812 - DNA, 660 bp, Homo sapiens
ggcaagattatacaagcactgttattgatttttaaatttgatttaaatacatcagcagtcattgaagggttttaaagatatcataaaaataastttggcccttgcgcggtggctcacgcctgtaatcccagcactttgggaggcctaggcgggcggatcatgaggtcaggagaatgagaccatcctggccaacacggtgaaaccccgtccctactaaaaatacaaaaaattagccgggtgtggtagtgggcacctgtagtcccagctactcgggaggctgaggcaggagaatggcgtgaacttgcgaggcggagcttgcaataagccgagatcgcgccactgcaactccagtctgggcgacagagcgagactccgtctcaaaaaaataaataaataaaaacaaaataaataaggttaatattttaaaaagtttatttgactgctggttgtatagagcttagatcagaagagaacaaaagtaaagagagatgggttgttcagtggggtgtatctattaagtggtgactgcagtgggctaggagagagatgatggtgatttagactgaagagttaaagaagcaaccctgaagatgacagaacccttagtgaaagttcaactgagagacttctgagtgacagttgtcataatttagaacagtg

SEQ ID NO: 914813 - DNA, 563 bp, Homo sapiens
ctgatgggtttccctttgtgggtaacccgacctatctctctggctgcccttaacrttttttcgttcattccaactttggtgaatctgacaattatgtgtcttggggttgctcttctcaaggagtatctttgtggtgttctctgtatttcctgaatttgaatgttggtctgccttgctatgttgtgggagttctcctggataatatcctgaaaagtgttttccaacttggttccattctcctcttcactttaggtacaccaatcaaatgtagatttggtctttcacatagtcccatatttcttggaggctttgttcatttctttttactcctttttctctaaccttgttttcttgctttatttcattaatttgatcttcaatctctgataccctttcttccacttcatcgaatcagctattgaagcttgtgcatgcatcacgtagttcttgtgccatggttttcagctccatcaggtcatttaaggtcttctctacactgtttattctagttagccatttgtctaatcttttttcaaggtttttagcttcttgcaatgggttcg

SEQ ID NO: 914814 - DNA, 594 bp, Homo sapiens
ttggctgtttgtgcttctcagtccaacctgtgggccttgaagagcccataccaatcaagggctgaaggaatccccaacaaagcacacccgctctaccaaaaagcagccagacttctttaagcgggtctccgatcccattcctcctgattgagacctcccaacaggggtctccagccacctcctgcaggtgcactcaggatagcaacaggtcagtaacccccactggaacagaggttccagaggaaagagcaggctgtcatcttcactgtttcacaggcttcactgatgatacctccagatatgggaaaaaccgaagcaactagggtctgcagtggaccccagtaaaccacagcagctctaaggaagagtagcctgattgttaaaagaaaaaacaagcaaacaaaaacaacaacgacaacatcaacaaaaagactgcacaaaaagcccattcaaaggtaagcaatctcagaaatcaaaggtagataagcccagaaagatgagaaagaatcaacacwaaaatgctgaaaacttaaaaagccagaatgctccttctcctccaaaagactgcaacacctctttagcaagggctcgaac

SEQ ID NO: 914815 - DNA, 693 bp, Homo sapiens
ctgtcagcctcacggccaggaagccacctgagacacactgtctcctgacagagctcaggagagcaagaggtgtgaggagatgcasttggtgcccttatgtcttggtgcaccgggcacgtggtcaagcctgttcacatgcacaactgtccatggacacaaccaaggcacagtccaatggcactagtccaagggaggggtgaggacttgggggcaggaatccagcccttcccaagccctaaaccctttacaacagaagggcaactaaatacacagggagacaggtagactcacaagtgatcagaataaaagccagtgcacaccccagataactgcagcggccacgagccttgtaaagacccatgttttacggaggcagccaccagcttgcagaagctgagcttcctgtggccctgattctgcattactgaactactcatagaaccactgtttctgtcctcaaagcttctgtcttggtcccattgcctgactttataacaaccttgaaatacccaccaggactggtgatctcattcaagacacagaggtccgtctcaggcactgtgctggggcctgcctgtgcccagcctgcctgtaggactttggagtccgcaatgtcgaagtccttctgcatttacaccctgtggcctgaaccctgacatcatctcacccccagaccacccaacccatgactct

SEQ ID NO: 914816 - DNA, 686 bp, Homo sapiens
gctcacacctcaaggaactagataactaagaacaaaccaaacccaaacgcagcagaagaaaagaaataagaaatatcagagtataaataaatggaattgaaacaaacaaaaaatacaaaagataaatgaaacaaaaagctgtttatttgaaaaaataagcaaaaatgatagaccattagcaagattaaccaagaaaaaaaagagaagatccaagtaaacttaattagaaatgaaatgagagatattacaactgatactacggaaatacaaaagatcattcaaggctactacaaacatttttatgtccataaactaggaaatctagaggagacggataaattcctggaaatatgcaactatcctagattaaatcaggatgaaatagaaactgaacagaccaataacaaatagtgagattgaaacagtaataataataataataaaaaaactgccgacaaaaaaagtccaggaccagatggattcacatctatcagacattcaaataagtagtggtatgaatcttactactattccaaaagatagagaaagagggactcctccctaaatcattctatgamaccagtgtttccctaattcccacaccaagaaaggacacaacaaaaaaagaaaactacagaccaatatccctgatgaatacagatgcaaaaatcctcatcaaaatgcta

SEQ ID NO: 914817 - DNA, 654 bp, Homo sapiens
aataactaatggatactaggcttaatacctgagcgatgaaataatctgtacaacaaaccccctgatacctgtttacctatataacaaacctgcacattctgcatatgtaccctggaacttaaaagttaaaaaataaaagtgtatgcatgtctcagtgtcactaggtactgcacattctgatccacaaaggctgcagcaactcacccaaagcagaggaatggggctttttccctgtatcttttgtttgccctgactgttgtacttcttttaagtgtgggccaatatcctggataaatgtcattttactgttatttattattttattacttattatgtattattcttttgctttttttttggtgaccagcatgattgacatgcacacttcctcttctgagagttgtctctttatgtcatgtgtcaatttttctattggattatctattaggagagatttttgtgttaagaaaactaacctttgtctgtcaaatatgatgtaggggaggtttgatgagaattgtggatagacggcaggactaacttgcrgctcccactcaggtggacagaacagcatgtggagacccacatcatgaacttttgctccaagaaccaccacaggaacataggaaaactgaaagaattcgcagatgcctt

SEQ ID NO: 914818 - DNA, 606 bp, Homo sapiens
ttttttttttgtagattgttacttccttctagtatcatgttccttctgcctgaaagacagtwtatttattctagtgcaagtctgttggtgatttttttatttcagtttttgttcatctgaaaaaaagttacttaaaataaaatgcttatgtaattttaggttgactgtttttacaaaaagtactttaaagatgttgctgccctatattctgacttgtattttttccagtgagatatctgttgccatccttatctttatctgtgtgcaatatgccttttttctctattttctttagaactaactttgaccaatttggttataatgtgcctcaatgtaggcagtttttctttacatttcttgggcttggagttcattgagctttttgaatctgtatctttatagtttccaataaatttgattttttttcaaatatttatcttctcatctctctcctttcctttgggcactccaattatacaggttatatcacttgaagttgtcccagagatcaccaatgttctgtttatttttgacctgctttttttactcactctatttaattttgaatgaattccattgctatgtctagttcaccaatcttttctt

SEQ ID NO: 914819 - DNA, 623 bp, Homo sapiens
cttcctgcacaggcaaggaggaaatcctctaagcttttggacgttcctgatcattttcactgtccacagcagggaaggtggcccaccctgctgtacccctcctcctggggtgtgcgtccctgcactagagcaaagctgctgcaactgcctttgcatgtttggattttttctaagagctgagtgactgcatccaaactgcctgtagttttgggtggaatgattttatagggttcatatgggcgtttctgggagggggaggaggaggaagattaaccaggctggtggagaaattgctctccaggcctgtgattcttatgtgggtctctcaggtgcgttagcctgagcttagatccttccgggcctgactgtttcccaatctctctttaattggatggagctgtgtctcagtggctgtgcatggctgggtgataaccctctgtgggacttggctttctagcacctggtaggaaagtattggatgcctttgggtgcatgagatctgggggtggggttgagacccagacccactggctgggtctcaggaagcaaggagtagcagaggttaagacaattatccagataatcctaattccctctrcggtacagaggccagatgtgtcttg

SEQ ID NO: 914820 - DNA, 626 bp, Homo sapiens
ttcaataagaaggctctgctttttttcattatccactgcttagaacagccagacaaaaattcatccacaatcaactgaataactgccttggagagayagataatctttgcctcttttgtggggatgatgattagtctgccttaaaaatttacttaaaaggtaatgacaaataaaaggctttaggcacttcatttttttaaactaaacgtttgcttgacttcatttttctgactaaaagtgttctctgagagagtactggcatatagaccacttagattcccagaccaagagtctgtctatgcactgaggaggatgtccgtactaaaaaatgtcccttctcaaatcacctcccttcatcaccagtcaataccatagagtttggaatgtagacaggagaataagtggaacatttgaacgaaaatccagcgagaaggtatcttgtaaaaggcaaatgtattgcccaggaggaatagaatgtcatatcccctacatccactacattgccaccctagcacttaagctgtttagttaccaatcaccaaataaggctctgagaaaagagcaggaaatgctcttatgggtaggaagatagaaaagggatcagaaagcttagggttaaggtagat

SEQ ID NO: 914821 - DNA, 588 bp, Homo sapiens
caaaaggcctgcttacttattacagttttcactcctttgctgtgcttgtgtgtggttatgctaatttggactctttacatttggattttgaactacagctktcccttatttgtaagtctccctttctttggtttcctagatactcctcctggcttactcttatgtttagagaagttctctcaggctccatggtctgggcctagtctcctgccattatctcggatactggtgttcccacagcttctttgttttttttttttttttttttttgagacggagtctcgctcggtcacccaggcaggagtgcagtggtgtgatctcagctcactccaacctccacctcctgggttcacgtcattctcctgcctcagcctcccgagtagctgggattacaggcgcccatcaccacgcccggctaattttttttttttttttgtatttttagtagagacggggtctcactgtgttagccaggatggtctcgatctcctgacctcgtgatccgcccgcctcagcctcccgaagtgctgggattacaggcgtgagccaccacacccggcccccacagcttcctttttgggctcttct

SEQ ID NO: 914822 - DNA, 589 bp, Homo sapiens
acagcaatatctaaagttttctccatgtagaagttgcatgtttttgttaattttagtccaatgcattttaacattttaattcttgtttgtaagaaatattttcttccttatgatttaattagcttkattctgtttattaaagttgtttatttctaattagtgacttaattaagagaattctctttcaaggcatgtaaaaatgctttaaaaacttactataagtgatatgaatgaaaaatactaaaccactttttttaatactcagatttttaaaaagccttcaactaaagattaaaactaaagtccctaaaatacttaatagatatataaatagcaggcatttgacaaaagaagacttgaaggtagaacaatatactaagaaaaatagattttgataaagattgctttgttgatacagcatttcctattttcacaaaaatcgtttaaaatttaagaagtaacgtataatgcataaattataattaatattctggaatgtcttctaccagaagatccattactttataaaggaaaaataaaactttcaaagtaaatatttgtttgcaatatcaactcacaaatgcaacaa

SEQ ID NO: 914823 - DNA, 397 bp, Homo sapiens
ctctatgatatatatatatatatagacatagagatatatctctatratagatatagggatagatatattgggtgaaattctggaatttcacccaaatatttgaaatctcctggggagacgttatgtcatttttgaatcagaccctgatggacaatgagaagcagtacactctgcaagcagcagagagatttggggatgcactttgcatcacatatagcatcagggaagggggcaaatattatgcaactggaagataagcagaaccagtgaatgactctaaatgggatcccagtgacaagaaggaagacactttcaggtgtttataatggagggcttgcacaggactaagaccaagccactcagttaggctaagttgttcattatcgaccagggattt

SEQ ID NO: 914824 - DNA, 681 bp, Homo sapiens
agttcatcactaggggtgacgatgagaggggcttctcacttctataactgtgattctccatgttttatggctaactaggaacacagtgatgtataatgtccattggttcaattatatatcagattttgaagaayagcaccccaagctgtcattctcaagttgtcatattaactgtatttgtaaatagactattgagaaattcaatcagcaagtgatatagtatattacaggactgaagaatccgtaatcatgcacccatattgaacctctttcatcaaagtcccaggtgatgatatgagggactccttgaaggtattcaggtagtcttaccccacaaacagtggattgggcaaggcgatgagggcaaagaaggctaactcatatccccaatttgtacaaaatacctgtgaggttagaatcctggatcttataggaaataagaattataatgtcattaaattacctctaaggagctagttggtttcctcaagggatggtacgatatcagcattattttctgttgctgctacattgaacatttggtagcagcagtagttaggtaactctgggtgagaaggagctcatgctttaaggcctaccaattgcctccatcactgccaccatgactgttgaaactctggagtggttgacgccaaaggctagctcacatctacagagagg

SEQ ID NO: 914825 - DNA, 544 bp, Homo sapiens
tgctataaagacacatgcacacgtatgtttattgtggcactattcacaatagcaaagacttggaaccaacccaaatgtccaacaatgatagactggattaagaaaatgtggcacatatacaccatggaatactatgcagccataaaaaatgatgagttcatgtcctttgtagggacatggatgaagctggaaaccatcattctcagcaaactattgcaaggacagaaaaccaaacaccacatgttctcactcataggtgggaattgaaaaatgagaacacttggacacaggaaggggaacatcacacactggggcctgtctcggggtgggggcagggggaagggatagcattaggagatatatctaatgtaaatgacgagttaatgggtgcagcacatcaacatggcacatgtatacatatgtaacaaacctgcacattgtgcacatgtactctagaacttagartataaaaaaaaattttttttaagaaataaattaatttaaaaaaaaagaagtcagccctttgctgggctatagggggcac

SEQ ID NO: 914826 - DNA, 630 bp, Homo sapiens
aatgttcttaccataatgaaattttaaaatgttaagtatgtgaggtgatgagtatgttagttgcttgatttcatcattctgcmatgtcagcatgtatccaaacatcacattgcaccacataaatatactgtgcagttattatttgtcaattaaaataaggtaaaacttaaaaattgaattaaaattgttatacagtattcattatttgggcttaattacatttcactgaggtacaatggcatttcccagttacccagaacaagttattattcagtaaagggaaataagtttctgtccagcgacacagtaaatgtctgtattatccagattaaaacccaacagctcttttcttagtggttaattgttgatacttctacactgttaagagggatttgtggaagcagatggccattagtagttcagtagactagttactcttcagtagtagtgagaggtgacagcgtgctggcagccctcgcttgctctcggtgccttctcggcctcagcgcctactctggccatgcttgaggagcccttcagcccactgctgcactgtgggagcccctctctgggctggccaaggctgcagccggctccctctgcttgcggggaggtgtggagggagaggtg

SEQ ID NO: 914827 - DNA, 611 bp, Homo sapiens
taatctgttgcactgcggactccagcctcacccttcctcctatgcctgctcatctgaaaccacgttttcagggtcagagagttgtaaaacagcaattccaatggtctctctgtctctgctctgctctccctggcctctcagcagtacttggcattccattttgatacccactcctctctcagttgcctgaatgctgaaccacccagagtttcctcctaaatatattactgagcaaatctccctccatatctccttatgcccatagaaatacaaaatacaagatttttccctcagttcgtctctctgaatgtcctttatctcacctatttccacaaatgacagccctaatgaatttagattaaacctgtatctcccaaatgtatcttcattcctttttccatctttatattcttagtacatagtacaatgcttgatgtctagtcaccaaatctcccattcaatatggtgatccacaagacagcagaatttacctttctagtcttgccttaccccattctctcaactgarttatgtactcacagttgtgcttcctatggtttttgcttccaaacttcagggtttcattcattctgtgtctccacatggaaggc

SEQ ID NO: 914828 - DNA, 559 bp, Homo sapiens
gacttcactcatgatttggctctctgtttgttatcggtgtataagaatgcttctgatttttgtacattgattttgtatcccgagactttgctgaagttgcttatcggcttaaggagattttgggctgagatgatggggttttctagatatacaatcatgtcatctgcaaacagggacaatttgacttcctcttttcctaattgaataccctttatttccttctcctgcctgattgccctggccagaacttccaacactatgttgaataggagtggtgagagagggcatccctgccttctgccagttttcaaagggaatgcttccagtttttgcccattcagtatcatattggctgtggatttgtcatagatacctctgattattttgagatacatcccatcaatacctagtttattgagagtttttagcatgaagcattgctgaattttgkcaaaggccttttctgcatctattgagataataatgtggtttttgtctttggttctgtttatatgttggattacatttattgatttgcatatgttgaaccagccttgca

SEQ ID NO: 914829 - DNA, 513 bp, Homo sapiens
tttacttaccctcctaaaattgtgtttagtcttcaacaactcctggttctttaaaaaatctcttctgttgatttttatgatgcaacaatgtcctgtggttttttttttkttttttttttctccctcttgatcctccatattagcctcgttctctctctgcaatgtctaaatcttggagtgctctattttgggacctcttctgattctgcactttaagcacagaatcatatatccaaatgtctatttatcatgaatgcttgtgagattaacctatacatattttatacatatttttttcaagttaattcacttctctttctctccactaccaccattctgattcaatccactgttatctctgaaacttattgcttcagtttctagtctcccacattcactgatgccttctgctaatgcattataaaactaaactgtaatatcaggattagtaacctaaatatgaagcaccaaagcataggatcataagaatgaaagtagaataggaggcaggaa

SEQ ID NO: 914830 - DNA, 565 bp, Homo sapiens
acttcttggtgcctgcctaatcctccagatcattacaggattatttttggccacacactacacatcagayacctccactgccttctcttcagtcactcatatcagccaagatgtaaactacagctgaatggttcgctattttcatgctaatggcacttcaatatttttcatctgcctcttcttacatgttggccgaggtttatactatgaatgatttacattttccagaaacctgaaatattggcattatctacctgctcacaactatagcaaaagcattcacaggatacatgctcccatgaggccagatatcattctgaggcgctacaataattacaaatctactatcagccatcccatatattggaactgaccttgtccagtgaatctgaggtggattctcagttgacaaagccacccttaaaggactttttgccttccatttcatcttatccttcataattacagctctagcatctgttcaccctttattcttacaggaaacaggatctaacaacccttcaggggtttcatcagatgctgacaaaattaccttccaccccaa

SEQ ID NO: 914831 - DNA, 569 bp, Homo sapiens
atattggctgtgggtttgtcataaataggctctcattattttgagatatgtcccatcaatacctaatttattgagagtttttagcatgaagggctgttgaattttgtcaaaggccttttctgtatctgttgmgataatcatgtggtttttgtcttcagttctgtttatttgctggattacgtttattgatttgcgtatgttgaaccagccttgcatcctagggatgaagcccacttgatcatggtggataagctttttgatgtgctgctggatttggtttgccagtattttattgaggatttttgcattgatgttcatcagggatattggtctaaaattctctttttttttgttgttgtgtctctgccaggctttggtatcaggatgatgctggcctcataaaacgagttagggaggattccctctttttctattgattggaatagtttcagaaggaatggtaccagctcctccttgtacctctggtagaattcggctgtgaatccatctggtcctggactttttttggttggtaggctattaattattgcctcaatttcagagcctgt

SEQ ID NO: 914832 - DNA, 684 bp, Homo sapiens
gatgactattttcctttattaattcatttaacaaatgtttgttaggaaatgtatctactcagcccttagggtacaaaggtgatcgaggcaattttacaaaattcctacttgcaaacagcttacattcctatggggagctaggcaatacagcaaatgaacagatatacaaacaaaatagcgaaagagaaatgttcacatggtagcatatagacttgctgagggatgacctcttccaaaataaaaagatgtgacggtatctacccgtggcaatagaattaccatccatttataccttgcctctctctaaaagcagggacggatgagatcagttttacaggttgttttatccccattctctgtcacgatgcctgtcccttggtacataaccacatttattaaatgtctgaataaatgaataccatttatttgttattttgctatgttgtatcatttcttttaattatgttgttaattcacaccctttgaaatgcaccctgaaattcatgtaattgtcatgtagcaaagagtttatgggaagtaagttacaaaattagggaagcccatcaaaataaaatgagaacagagcagaccctttgtaatgcatytaaatatcagtggtggaacctcaaatttactgtatatgtgaagatttattttaaagaaatgtgactaatttggaattca

SEQ ID NO: 914833 - DNA, 627 bp, Homo sapiens
gaacttatgctccatcaggggcyttccttttactacttggcccaagtgccctattttagaagtccacaccaatcactctcaacaaggaaactttgcaacctaaggacaaaaggaagagtaggaggaagagatggatagggaaaagagaagaggaaggaaagcagaaaggacatttttctggcatattacatataaaccttttcttaatatggttcatgcttacctaaactctccttttttaatactacattgaatactccaatgcttctccatttctgagtatgatgagactaattgtacaaatagatttttgttttttcttatttttgaaatttaccttcactgctgaacaccatcttgacttggcaaagattaaaactctcataagtgttttgtgtttgtttgcttgttttttttttatttatttttaatttttgtgggtacttagtaggtgtatacatttataagctccataagatgttttgatataggtatgcaatgtgtaataatcacatcatagagaatagggtatccatcccctaaagcatttaccctttgtgttacaaacaatccagttatactcttttagttattttgaaatttacagttatattattattgactata

SEQ ID NO: 914834 - DNA, 653 bp, Homo sapiens
acattatttaccacattattccacatatttattctatctgttaatggacatttggtttgctttcacatttttctattgtgagtaatgctgatatgaacattggattacaaatatctcttcaagttcttcctttcaattacgtgtgtatatacctaaaagtggaagtgttagatcacatgataattctgttcttcattttttgaagaaataccatacagtcttcctcagtagctgtgccattttacattctcaccagcaatatgcaagcgtttcaatttctccacattcttgccaacacttattttatttttttataatagacatcctaatgggtgtgaattggtatcttcttatggttttgatttgcactcccaatgtttagtgtcatgactaattttaactgaataattattatgcctttggtattcagtgtttaatatagcattaaattacagtaacatcattatctagtactttcagacttaaatattcagtctaaatcattttctacataaatgaatgttatttctttaaagatgtcatttactttttgcattacaggaaatacgttgtgaaaattccaaaggttttcctgataattattmgctagataaatgtatactggaaaaatcagacattttgggatcaaacag

SEQ ID NO: 914835 - DNA, 609 bp, Homo sapiens
gaatgtcctgctcagaacaaattatcactgtttcccttatgagatcctaatgaaagaaattcagttgatactactttttaaaatgggttttaagagtggcttgttgatataatagcgcrtccacttgttctcaagtgattcaaaccttgagtaaaaaggagagtttctggagaatttagaagaatctttgttgacatttaatctagagaagtcttcaggagcaaaccacttcaagttcagtgtaaccaggtgccatgagtcagtcatgtgctacttgtggttttaaacgaaacatgattctgggatgagaagtgcgaggctacactcctaatataatcaaattgccaaagcactgttttgagtcctcggtatcccaattaaggagaaacatgaagacattggagaatcacttagcttagggcttttagtagggaataattaaacatgtagggaaggtgaaggagttagatgggaggtaagaaggctgaggagatttctagtaacaatgatccaaaagttctaaccagggggatggtgcacactttctcttcttgaccacatggatagatttcagagcatccctctaaatcaagtctggagaattatgtg

SEQ ID NO: 914836 - DNA, 587 bp, Homo sapiens
aggtattgatggaacgtatctcaaaataataagagctatttatgacaaacccacagccaatatcataytgaatgagtaaaagctgaaagcattccctttggaaaccggaacaagacaaggatgccctctctcacactcctattcaacatagtattggaagttctggcatgggcagtcagggaagagaaagaaacaaagggtattcaaataggaaaacaggaagtcaaattgtctctatttgcagatgacatgattgtatatttagaaaactccattgtctcagcccaaaatctccttaagctgataagcaacttcaacaaagtctcagaatagaaaatcaatgtcaaaaatcacaagcattcctatacagcaataacagacagacagccaaaccatgagttaactcccattcacaattgtgacaaagagaataaaatacctaggaatacagctttcaagggatgtgaaggacctattcaaggagaaatacaaaccactgctcaaataaataagagaggacacaaataaatggaaaaacattccatgctcatagataggaagaatcaatattgtgaaaatggccatac

SEQ ID NO: 914837 - DNA, 651 bp, Homo sapiens
ctgtattaaatctttgatatttctccttagggaggcagagatttgtgtatcctcaaagtcacactgtgatcagtgttaggtaaggctctccggttcttttcctgaccatacccagttgttatgctccattaattgcctgttgattgctctgttatttataaaaatgtcccaggggcagagatttctctacgaatactctaatcagaatgatttctgaggtcagtgtttgatatttgttctcaccccatgatggttgctcccagctatcttattccccagatgtttccttaaaactaggtgacctacagtgtaggctgtatcaacatcagatccacaaatctcctcccaattcccttctctacaacctccttgtttttaggtttaaacttctctatgtcgtaaaggaagttgcttcgtttggaaagaaattaggagctatatattttgtgatctgcttctcccccctccccagaaaaatctctgagcatgggctcctgagcttaaggtgggaacagtggtaagcttctttttgagtgacaccccactctagaagttgagtgctcagtgttcagtggaggaggtagtagtaactgacgttctcttggcttrcctcttttcttgtggaatcatcacctcatgaatcagtgcaag

SEQ ID NO: 914838 - DNA, 594 bp, Homo sapiens
cattgattgctttaccattatgtaatggccttctttgtctcttttcatctttgttggtttaaagtctgttttatcagagactaggattgcaactcctgctttgttttactttccatttgcttggtagatcttcctccatccttttattttgagcctatgtgtgtctttgcatgtgagatgggtctcctgaatacagcacactgatgggtcttgactctttatccaatttgccagtttgtgtcttttaattggggcatttagcccatttacatttaaggttaatattgttatatgtgaatttgatcctgtcattataatgctagctggttgttttgcctgttagttaatgcagtttcttcatagggtcgatgttctttacaatttggtatgtttttgcagtggctcgtactggttgttactttccacatttagtgctttcttccagagctcttgtaaggcaggcckggtggtgacaaaatccctcagtatttgcttgtctgtaaaggattttatttctccttcgcttatgaagcttaatttggctggacatgaaattctcggttgaaaattcttttctttgagaacattgaatat

SEQ ID NO: 914839 - DNA, 507 bp, Homo sapiens
actttgttaaaaggttcccttttcttcttatccttaccaacacttatcgcttgcctttttgataatagccattctaagaggtgtgcagtgatgtctcattgtrgttttgatttgtttttctttgatgattcactttgttgaacattttttcacgtatttgttggacatttgtacatctttggagaaatgtttattcaggttttgcccattttaaaattgcgttatttatctatttgctgttgagttgggtgcattccttatatactttggatattaatcccttatctgatatatggtttgcaaatagtttctcccattccacaggtttccttttcattttgttggttgtttcttttgctgtgcaaaagctttttaacgcttttcccatttatccctgagaatacttgccagcagcacttatgtctgcatcatttaccccgagataactttgccatgaaatatctggcttttattactatttcacatctctctagtgtatcgactttg

SEQ ID NO: 914840 - DNA, 665 bp, Homo sapiens
acagtaagtgaagggaggaatattcaagaaaatagatagcttaaaggaaaaacaatcaaaaattcaggaaacattggacacacttatagaaatgcaaaatgctctggaaagtctcagcaatagaattggatgagtagaaaaaagaaattcagagctcaaagacaaggtctttgaattaacccaatccaacaaagacaagaaagagtaaaaatatatgaacaaagcctccaagtagtctgagattatgttaaataaccaaacctaagaataagcggcagaaagaggaagaaaatacatctaaaagtttggcaaacatatttggaagaaaaatggaggaaaacttccccagccttgctaaagacctagacatccaaatcaaagaagcacaaagaactcctggggaattcattgcaaaaacatcattgcctaggcacattttcatgttatctaaagttaagacgaaggaaaaaatcttaagagctgtgagacagaagcaccaggtaacctataaaggaaaacctatcagattaacagcagatttctcagcagaaatcatacaagctagaagggattgaggccctatcttcagtctcctcaaacaaaacaattatcagccaagaattttgtatcaagtgaaactaagcatckcacatgaaggaaagata

SEQ ID NO: 914841 - DNA, 591 bp, Homo sapiens
atttgaaatcacacagctacggctacttatgtcaagtgggtaaggataactcargctctggttcagtaaactgccagtaaacagatcccagatcttcagaggcggaaggctcagtcaatcaatctttattaggttaaaaagtctgagcaagaataacagtaccaacagaaagaaattttaggaaggattttaaaatttaattttaatttaatattcctactaaaatggggaatgacgaaaaataaaaagataaaagtcactttttatagataggttgggttttactaaattccgatgtggaagaaccttctaccaattggtatctggcctttctgagttactcagagaggacaactgaaagtcatatgaacccattttgaaaatctgtttccctacatctttaaaaatagattttgttacttgccttattttacctttgacctaattaactaacctaaaattataataggactaaaattatagtctggactttgtgtgccctgaaaatttcatctatttgacccaaatatattgagtaactactaagtgataagaactctagctgctaggtgctgaaaagacagacacatt

SEQ ID NO: 914842 - DNA, 591 bp, Homo sapiens
atttgaaatcacacagctacggctacttatgtcaagtgggtaaggataactcaggctctggttcagtaaactgccagtaaacagatcccagatcttcagaggcggaaggctcagtcaatcaatctttattargttaaaaagtctgagcaagaataacagtaccaacagaaagaaattttaggaaggattttaaaatttaattttaatttaatattcctactaaaatggggaatgacgaaaaataaaaagataaaagtcactttttatagataggttgggttttactaaattccgatgtggaagaaccttctaccaattggtatctggcctttctgagttactcagagaggacaactgaaagtcatatgaacccattttgaaaatctgtttccctacatctttaaaaatagattttgttacttgccttattttacctttgacctaattaactaacctaaaattataataggactaaaattatagtctggactttgtgtgccctgaaaatttcatctatttgacccaaatatattgagtaactactaagtgataagaactctagctgctaggtgctgaaaagacagacacatt

SEQ ID NO: 914843 - DNA, 626 bp, Homo sapiens
atcctagaaaagcttgtggctgtcctcagtagtccataaataacagtgaggaattacatattgattccattggcctctctgatakcaaagagttttagagatgttgaaggggcataaaactcagagataaggtagacatatctctggcagatggtgagctcagtttctgggtattccaaactttcatcaagttctgagaagcatgcctgctccacctgacccagtcatgacaaactaaatacatccctgcattctgggatagctcactgaacagcagctctaacaccagctgccatgcaccttgacattgctcccctccagccaaagcttataaatgacaacaagtgacacagagaaaccagggctgttttctgtctttatgcaagtaaatacagcatatactcctggtaaagttaaaattataccttctccttttaagccttttggttgaaggtttacaaaaacatgacaacttttgaaaatcagatctctaatccagataactgaaagaaaaagaaaggaaaatgtataaaaaataatattgtccgtaatactgtcaattcaaaactttacctcaaaattcttttcactcatgaagtaatgtttattaactgttcttactgaga

SEQ ID NO: 914844 - DNA, 677 bp, Homo sapiens
tttcaattagtctcagctatcattgtaattagtttcttcttcattgatacttatttcatcttgtggttctttaattggttatttttttccttttgtttttagtagatatgtaataactgtacatgttcaagggatacaaagtgatatttcaatacatgtatataatatgtaatgatcaaatcagggtaactatcatgtcaatcatcttggatatttattattctttaatgttgtaaacattcaaaatcctctcttctagctcttcggaagtgtacagtaaattactattaactatattcattctacagggctacagaacacgagaactaatttcatcgaggtgtaacttggtatccattaactaaactctctctctcctctcctggctaccctccctaccctctcataattatgattctactttctacttctatgaactcatttttttttttttttagtttccacaggagtgagaacatgcagtatttatctttctgtgcctgaattatttcacataacataacgtcccccaggctcatccatgttgccataaatgacaggatttcatttttaaatggatgaatagtattccattgtttatatatacaccacattttttatccattcatttgttgatggacatttatgttgagttygtatcttagctattgtaaaca

SEQ ID NO: 914845 - DNA, 591 bp, Homo sapiens
acttcatactgtggactttgagttaatgctgaaatgagttaagactttgggggattgttgggaaggttttgaaatgtgagggcatgagattggggaggggccaggggcagaatgatattgtttggctgtctccctaccaaaatctcatcttgaattcccatatgttgtaggagggacctgctgggaggtaattgaatcatggggacaggtctttcccatgctgtccttgtgacagtgagtaagtctcataagctctgatggttttaaaaaggagagttcccctgcacaagctatcttctcttgtctgccaccatgtgaggcatgcctttcaccttccaccatgattgtgaggcttctccagccacgtggaactgtaagtccattaaacctctttcttttgtaaattgcccagtctcaggtatgtctttatcagcagtatgaaaacagactaatacggtctacatacaagctgccaaattagtaacgcacaacaaaaattccacattcagcttcctccagtgtcaggttctttctctcacctkgatataggataaccttaacctctcaagttatcttataagtccttgaact

SEQ ID NO: 914846 - DNA, 550 bp, Homo sapiens
attcagtatggtattggttgtgtgtttgtcataaacaactcttattattttgtgatacatcccatcaatacctaatttactgagagtttttaacatgaaggttgttgaattttgtcaaaggccttttctgcatctattgagataatcatgtggtttttgtctttggttctgtttatatgatggattatgtttattgatttgcatatgttgaaccagccttgcatcccagggatgaagcccacttgatcatggtggataagctttttgatgtgctgctggatttggtttgccagtattttattgaggatttttgcatcgatgttcatcagggatattggtctaaaattctcttttttttgttgtgtctctgccaggctttggtatcaggacgatgctggtctcacaaaatgagttagggaggattccctgtttttctattggttggaatygtttcagaaggaatggtaccagctcctccttgtacctctggtagaattcggctgtgaatccgtctggtcctggactttttttggttggtaagctattagtt

SEQ ID NO: 914847 - DNA, 597 bp, Homo sapiens
tgcatatgctgtttaggagtaattcattttttaaaaaagagataataaaataagtggaaaacataccagaaaccttaaaatgtgcacagtaaaaggaagaatacagtaagaaagcattagcagactaacataagaacagaaaaccaaacaccacatgttctcacccataagtgggagttgaacaatgagaacacatggacacagggaggggaacatcacacaccgaggcctgtcaggggtggggggctatggaagggatagcattaggagaaatacctaatgtaggtgatgggttgatgggtgcagcaaaccaccatggcacgtatatacctatgtaacaaaactgcacattctgcacatgtaccccagaacttaaagtataataaataaataaataagataattaaaacaaaacagcctcataacaataaatgtaaatggtttaagttatttcaaaagtaagtgacactcaaaatttttgtgtgtgaaatgttaaataactgtatgctatgaagatgaggaaaatctaaactaagcacataaaatgscttattgtcatctacatctagattttccagatcaatattctttggtcct

SEQ ID NO: 914848 - DNA, 648 bp, Homo sapiens
tctacagatcaactttaacagataactgtrggggaaaagatacatgcttgaccctgtacctgaataagttaatttttagtgcaatggatgtagaaaatatttttaaaccatttaatgactcagtaatgtagtgatacaaatttactgaaaagtttatttgaagatgttatttctccaagaaaaagatgaattatttaattcacaaatgagaaagccattttaagaaaactctgccacttaattctctagaaacacataattgatctaaaaggctcctaaaagattactattcattttatatacaattgtcaacattatatttttcagaatgtaaaaacaataagcatgaaaatttagcaatttccaaatcatgtaaacacatggtgaggtattagaaattagataaaatatgctaattttttcaattttaatctcaagattcaaaatcttgactagaaccaatgactggctcattcatacttaatcagtttgtgcttccaatcttgtatatccaatccagccatccctctcctcaaatccagtagcacacagcagctagattgatttttaaaacctaaattagattatgtaacatccatgactaacaccaatccaaggacttctaattgcatgaaaaataaaattcaa

SEQ ID NO: 914849 - DNA, 681 bp, Homo sapiens
agctacaatgtgcttatgatttggctgaaatctaaaatcaaatcatctattgggactctctctctctctctctctctctctctctctctctctctctmtatatatatatatatatatatatatatatatatatatattcctctgggtgtgagccagatctattctaatggaatgcattgtttcaactttaattttcctaatcagtaaacacacttgttagaaggtaaacatcacaaaaaggcaaatagctaaaaaaaaatccccctcacatgtaacttggggaaaaatctaggaaccttttagggagtttgtctttgtaacttaactttcataattatagagcttggcagggtgctgtggcacacatctgtaatcctagaattttgggaggccaagatgggtagattacttgtgctcaggagctggagaccagctggtaaaatctcgtctctacaaaagttagccaggcagggtggagggtgcctgtagtaccagctactcaggaggctgaggtgggaggatggcttgagcctgggaggcagaggttgtggtgagccaagatcatgccactgcactccagcctgagcaacagagccacaggctttctcaaaattaataaataaataaatatagagcttgttaagaaactatggaaaatactgtatgtatattaaagctgtc

SEQ ID NO: 914850 - DNA, 625 bp, Homo sapiens
gggatattagccaaaaaaaaagtcaggaggtactgattcatgctgctacatggatgaattttgaaaacattatgctaagtggaagaagccagatatgaaagaccacataaatgattccattaacaggaaattcccagaatagatggaagtagcttagtggttgccaggagatgaggggacagtggaatggggagtgactcctaataggcacagagtttcttttggggatgatgaaaagaattctggaatttgatagtggtgatagttgcacaactttgtgtgaatctactacaaatcattaaattgtaacacttcaaaattttatgagctgggcacagtggttcaggcctgtaatctcagcacactgggaggccaaggcaggtggatcacttgaggtcaggatttcaagaccagcctggccaatatgatgaaaccctgtctctactaaaaatataaaaagttagccaggcatggtggcatgcacctgcaatcttaggtacttgggaggccgagacaggagactcgcttgaactctggagatggaggttgcagtgagccaagatcrtgccactgcactccagcctgggtgacagagtggacttcatctcaaaaaaaaaaaaaattt

SEQ ID NO: 914851 - DNA, 668 bp, Homo sapiens
tcaacaaaattcatcccttaatgctaaaaactctcaataaactacgtattgatggaatgtatctcaaaataataagagctatttatgacaaacccrcagccaatatcacactgaatgggcaaaaacttgaagcattccctttgaaaactggcacaagacagggatgccttctctcaccaatcctattcaacgtagtattggaacttctggccagggcaatcaggcaagagaaagcaataaaggatatccagttaggaaaagaggaagtcaaattgtccctgtttgcagatgacatgattgtacattgagaaaactccatcatctcagcccaaaatctccttaagctgataagcaacttcagcaaagcctcaggatacaaaatcaatgtacaaaaatcacaagcattcttatacaccaataacagacaaacagagagccaaatcatgagtgaactcccattcacaattgcttcaaagagaataaaatacttaggaatacaacttacaagggatgtgaaggacctcttcaaagagaactacaaacctctgctcaacaaaataaaagaggacacaaacaaatggaagaacattccatgctcatggataggaagaatcaataacgtgaaaatggccatactgcccaaggtaatttatagattcaatgcaatc

SEQ ID NO: 914852 - DNA, 608 bp, Homo sapiens
tcatcagagtgaataggcaacctacagaatgggagaaaatttttgcaatctatccatctgacaaaggtctaatatccaaaatctacaaagaacttaaacaaatttacaagaaaaaaatgaacaaccccatcaaaaagtgggcaaaggatatgaacagacacttcttataagaagacatttatggccgggcgtggtggctcacgcctgtaatcccagcactttgggaggccaaggtgggcggatcagtaggtcaggagatcgagaccatcctggctaaaacggtgaaacccagtctctactaaaaatacaaaaaattggagcgtcaggacgcccggcaacctcccctgccctcatccccgcaccgccgcatctcctcgctgcctcccgggcttcggacccccggtctcaccccctgaaacacgactcgcgatttcaaacctggagacctcatcttcgccaagatgaaaggttatccccactggccagctggagtakatgaagttcttgatggagctgtaaagccacccacaaacaaactacccattttctttttttggaactcatgagactgcttttttaggaccaaaggttatatttccttactccga

SEQ ID NO: 914853 - DNA, 653 bp, Homo sapiens
gaagatgtcactatctacgtaactggcaaaaggttaactcttttatcattcatcaatttaataaaattctgtaagaaaaagaaaactcaacaggaaacaggcaaagatgtaaataggcaaatgagaaaaaaatatatagatgacagatatacatgtggataaatttgtaaactaggcaatataaacttaaaaattagattctcatttttagccatcacgtaatgtcctgagccagcaaagagcattggaaaaaaatatttttatatgtttactggagtttacactggaacaatcttaagtgaggaggacaatttggctggatttataaaaatgcaaccaccttttggcccaggaattctactaatcataatctgtcttctataaatgtacctgtgcacagaaatatacatacaatgatgttcacaacagtttgtagtggccaaatgtctatggaccactttaataggtatagtatatccatcccatgaaatgaaacccagccatcaaaaagaataggagacatttaggcatactgatctggaaagagatccaagacatattgtaaacagwgaaaaaaaaatcacagaaaaatacattttgatcccatttgtgtggaaaaaatggtttgtgaatgtatatacataaatggctcc

SEQ ID NO: 914854 - DNA, 592 bp, Homo sapiens
aatctttataactatttctttctaagaaatattggtgtaaaaatatgatctatttaaattagctgctatttgtacatggtgctttgtgtctgccccactgaataaagacattcacaatgggaaaatattctgattttggaaagttcataaaccccagtacacctttttttttctttttccaaaatatttggaaacaaaatctcttaagatagagaaggcattaaggcctatcatcccaccttttctctttcaaatgaagcaccttttatactttgtctgtaccaagtactatagagctacttggtctgtacttgaaatgatgctctagacaaacagctctatgaatgaacagctctatcaggtatcttttctttatatagagacaaaactccttggcaactcttccatcattggaatgctaaatgctgtacttttatcagaattggcacaatctgtgatgttggaattatgtgcaacagaatggaagtgaatgrtgtgttcatcctggcttgttacaacctttcagtatgaaaattatgtacagctgtaagatctgcagtaaatcaggatgaatgaagccatgacacataga

SEQ ID NO: 914855 - DNA, 328 bp, Homo sapiens
agaattccatttaggcttcagaggtgggamagggtgtcattttaggtggagcagccagggtagacctcaatgagaaacttacatataagcaaaagacctgaaattaaccatacagatagctgaggaaataattttaggaatagattacaaccagggatgggccctaagtcaggagccagcccatctgatgtacttaaggaatggtgaggggggaagtgcagacagagctcagtgacccaaaggaagagtagaggagatgggctcagataattgggagcctatcaagtagggacttttaggatattcttaggcattttgttttactctg

SEQ ID NO: 914856 - DNA, 626 bp, Homo sapiens
ctacaatcagataagaatgtatgtcgtgtgcacaggtaaaaattaaggcatgacatgactattattggtactttttaataaataatataacatcttttctacagcagagcattargaaaaggaatggaaggctgaaggacaagaacactggaagattaaataggattaaaagggacttcctatttttctatatccaagagaaatggaaagacatatcataaggaattatggaaaaagaaattgaatttctcttctactaatttgtgactttttgaaaaagatagtgccttgatcagaaataggttagatgagtgattgccaccatataattcattttctcagatagatgttaagtaaagaaaaccagtcaagacatagcacctaaaggcaagacgggagaaaatgattttgaaaatattgagaagaagaaagagaagtcctaagctttgatttttggagtaacttatcattgaagtcacttctgctccactatggaaataaactatcaatggatttagaaaacagattttgcaggctgaagtcacttaacatttttaagcatctaaatatgcagtttactttattatatagacttttctgttattcagagtttataaaacgctgta

SEQ ID NO: 914857 - DNA, 577 bp, Homo sapiens
ccaaagaaacaatataaacaagtattacttaaaaagtgttttcataataaacatagaagtatatccgttaaaggagaaagcattacatgaaagaggaatattgtaaaaaattgcacatataargtataaggcatttgtgtacagataaggcatttcaatgaaattgatttatttagtgtctataggagtcactcaaaatttctgggaagggaagctattgccaggcttttaggactctgcttaattatccaatggacttagattttaacccattaactagcactcttcaaatatttttatctgaggaaatttttacattcttgtaaagactgataagtccaaagagctttagttgagttggataatttaggtgaatagtatctatagtagaaattaaaatggagaaacttaaaatatttatttaatgttatttaactgagttatacagatcttccacatattgacacattttaatatagaacaaaattaacatttattaattgctaatcttttctgtgaagtctttattgagaagttatgacagataaaaatttttcaatattttaattttcacttt

SEQ ID NO: 914858 - DNA, 631 bp, Homo sapiens
tatctaccacattctccatgtggtacaatagatctcatagaaaaaagtccttatttctttcggtctaattgaggctttgggccttttgacccttatcttccctttcccccatacccctccagcctctggtaaacacttagaaagtttaacatatcagatctatgtatttgcaattcacattaatttttcagactcctattgataaatattggcctgtttgtggtctaggattatatagttttttgggaaataagcaatggatcaatttcacctaagtgaccaaattcttccattcataaactttcagttttgaatttattttgttattttttaaaaaacacataattgttatgaacataaatttatgagatttgtacattttatattttacctttttgtaaaacaaaaccatacttatgtagttacaagggttagttttgaaaatttctatttttttctaataatatttttgccttttttgtaatatataatagaaaaaattatgtttttctgggcaaaattgcaaagtgaattatataaaataatmtctgataatacttctttcatacagtacaggacttttatacagtctcttttttcagcaaatccttttatacagaatgggacttaa

SEQ ID NO: 914859 - DNA, 611 bp, Homo sapiens
gctattccttctttacagccttacatactttgaatttttactyatgttaatccaaataacctaatcatacatccctgttacacttatttcattttgtaagtgtatattttggctgattatttggttaatgttggtcaccatcactgggctgtgagctcctggagagcaaaattatatcctcaattcttagaatagtatttagcactttccagtaacttaatacaattttattttatttagtggatgaacgaatggaatttcaggttctgattgctctctactctttcttaggatggggattctccgccagcacatgccatcaatacttccttttctaaagtctcatattttgggccttttttttttttttcaatctcttgctttccctcctcttcttgccatctccctgtcccctccccttctctttcttcccagtctccaattatgctgatgtcttcaggactgggtttctcccttgtcataaaactctactttgaccatcttttactttcaggaaaaatttccaaggtctttcatgatcttaagcctgattgcttctgttgtcacatatcctgccttagccacacttgtcttttcgatctgggcaggca

SEQ ID NO: 914860 - DNA, 609 bp, Homo sapiens
attttttttttgctcttctccctcctcccaacctcctactctaagtaagctgcagtgtctgttgttcccttctttgtgttcacatgttcttattatttagstttcacttataagtgagaacatgtggtaatttgttttctgttcttgcgttagtttgctaaggataatggcctccagctccatccaagttcctacaaaggacataatctcattcttttttatggctgcatagtatttcatggtgcttatgtaccacattttctttatccagtcttctattgatgggcatttaggttgattccatatctttgctattttgaatagtgctggagtgaacaacgtgtgcatgtgcatgtgtctttatggtacattgatttatattcttttgggtacatacacagtaatgggattgctgggttgaatggtagttatgtttttagctctatgaggaatctgcacactgctttccacaaagcatgaactaatttacactcccaccagcagtgtataagtgtttcctttgctctgaaagtacaccaggatctgtgttttttgatgtttaaataatagccattctgactggtgtgagatggttatctcattatggtt

SEQ ID NO: 914861 - DNA, 494 bp, Homo sapiens
tcccaccagcagtataaagtgttcctatttctccacatcctctccaacgtctgctatttcctgactttttaatgatcgccattctaactggagtgagatgatatctcattgtggttttgatttgcatttctctaatgaccagtgatgatgagcttttttcatgtttgttggccacataaatgtcttcttttgagaagtgtctgttcatatccttcacccactttttgatgagattgtttgttttttcttgtaagtttgtttaagttctttgtagattctggatattagccctttgtcagatggatagattgcaaaaattttctcctattctgtaggttgcctgttcactctgatgatagtttcttttgctgtgcagaagcccttcagtttaattagatctcatttgtcaawtttgctttcattgcaattgcttttggtgctttagtcgtgaattctttgcctatgcctgtgtcctgaatgttattgcctaggtt

SEQ ID NO: 914862 - DNA, 576 bp, Homo sapiens
gccaattaataaccctacaatggcttctaagttcaagtgaaaggaagagttgcaaatctcttactttaaatcaaaagccagaaatgattaaatttartgaggaaggcatgttgcaagttgagacagaccaaaacataggcctattgggccaaattgttaaccaaattgtgaatgcaaaggaaaaattcttgaagaaaatgaaaagtgctacttcagtgaacacgtgaataataacgtgaaacagccttattgctgatatggaaaaagttttagtggtctagatagaagattaaaccagcccagaacattcccataaaccagaccaattcagaacaaggccccaactcaattccattctatgaaggctgagagagaggtgaggaagctgcagaagaaaagtttggaactagcagaaggctcatgagatttaaggaaagaacctgtctttataacatcaaagtacaacgtgaagcagcaagtgctgatgtagaagatggagcaatatatccagaagatctagctaagaccatttgtgaaggtggctacactaaacaacagatttccaatgtagacaaa

SEQ ID NO: 914863 - DNA, 615 bp, Homo sapiens
ttacaggtgtgagcaaccatgcccaacccagattgtgggaccttctatgagttgagtggasagctcttttcaaaaaattaactcgttttgcctgaccaacaagagggaaactctgtctcaaaaaaaaaaaaaaaaaaaaaagaataaaataacacatttaaataaaaaatttgagagagaggtggagtaagatggtggaatagaaagctccactgattgtctccgccttccccaccctcaccagcctgggcccagcaaggacattaagttaactgtctacacagaaagaaacaccttcataagaaccaaaaatcagtccgtagatttaacttcatatcactgaaagaggcactgaagagacagaataaacagtctggaattgtcgatgccacccctcccacccctggtagtggcagcatggtgctgagagcttctctgggtgctggggggtggagagcacagcaactgagaggaattgaactcagtgctgtcctgttagagcagaaaggaaacccggacaaaactcagctgatgcccacccacagagggagcatttaaagcagctctagccagaggggaatcaccaaccccaggggaccaaacttgagtgcctga

SEQ ID NO: 914864 - DNA, 619 bp, Homo sapiens
tgaggtagccagtgtcttcacatataccaaggtwtactctcccacttatcatttacaaaaatattgtgtctcacaaatttatatgaatatcaaataaatgagttttccaacatttacatttccactaaatctgaagataaagagaactagttcctatctgaagaaatgaaatattcctcaagcaagtagacccataattttacacatgatggaaaagtattttagtcagggataagctcccaaaaccctgtgatatgaattcagaaattaattaaagagtaatttttttctcagtttccaagttaactgaaagacctgcatgcaggaatattggagcctcagcgtagaaagtattcaaaaataatatgattcattgtaaagcagttctctcttgaaatccatctgttctaattatctattgctgtgcaacaaaccactccaaactcagtgacataaaacagcaaccattatgctcacagggtctgtgggttgggattttaaacagagtacaatggggagggcttatttgtgctccaggacatctggggcctcagcttggaaggcttcagtgggttgagggtgactcaacagtcaggggctggtatcacctggaagcttc

SEQ ID NO: 914865 - DNA, 516 bp, Homo sapiens
gagtgaacaggcaacctacacaatgggagaaaatttttgcaatctactcatctgacaaagggctaatatccagaatctacaatgaactcaaacaaatttacaagaaaaaaacaaacaaccccatcaaaaagtgggtgaaggatatgaacagacacttctcaaaagaagacatttatgcagccaacagacacacgaaaaaatgctcatcatcactggccatcagagaaatgcaaatcaaaaccacaatgagatatcatctcacaccagttagaagggcgatcattaaaaagtcaggaaacaacaggtgctggagaggacgtgtagaaataggaacacttttacattgttggtgggactgtaaactagttcaaccatcgtggaagacagtgtggcgattcttcaggcatctagagctagaaatacaatttgacccagccatcccattactgggtatatacccaaaggaatataaatyatgctgctatgctcacaatagcaaagacttgaaaccaaccc

SEQ ID NO: 914866 - DNA, 603 bp, Homo sapiens
atttttgccctgaagaaaataattaagacctggatagcacagcttagcttcaatgctgataactttcctcttattttgatttaattgggaatgcttctagtaggtatcttggtaaatgagaaataggaatactatattcatatatgttttcaaagtatattgagaggtgtacatgtgtgaaatacttcttgggattgacatgcaaatcttatggaagtttattataagacttttgactgtttttgagaagtgtctgttcatattctttgccatctttataatggggttgtttttttcttgtaaatcggcttaagttccttgtagattctggatagtagacttttgtcagatagatagattgcaaaaattttctcccactctcactctgataatagtttcgttggctatgcagaggcactttagttcaattagatcccatttgtcaatttttgcttttgttgcaattacttttggcgaattcatcataaagtctttgcccatgcctatgtcctgaatggtattgcctagactttcttctagggtttttayagttttgggttttacatttaactctttaatctatcttgagttaatttttgtata

SEQ ID NO: 914867 - DNA, 524 bp, Homo sapiens
aggggcttcttttccacttcaaagttaaagccattaaacttactgttccatgtaataaattaataaacaagaatagattaaccaaatgatatggagcattaccttcttccagttcctctcattctcatctagttcgttgttgtttctctcttgggaagtggggaaaacttctatttaaatttagattgaataaagtgcttggtaagatatttcagaatcccagaagtgtggtatgtggtggagagaggaaaatggctttttttttttttttttcctggagcttttgaatacgttggcctgtgagcaggtctgttgagcatggctgccaaaatatactggcagtcatttaggctcccaccagagctgagaaagcaacccagaaacaatttccytaaataccaactgtcttatgtggcttcatgaactataatattgaccttctttatgagcgtttgtcttcaacttgtaaaaataccacaggcttcgctatgccaaggagagaaagatcaacagcagcaaccact

SEQ ID NO: 914868 - DNA, 668 bp, Homo sapiens
aatgggcttccctgtgaaggtggcctgacccttctctctagctgcctttaactttttttttttktttgtttcaaccttggagaatctgatgattatgtgtcttagggtgatctgcttgtgaatcatcttactggggttctctgcatttcctgaatttgaatgttggcccctgtagctaggttggagttctcatggataatatcctgaaatatgttctccaagttgctaaaactctcccaatctctttcagggacaccagagggccataaatttggtctctttacataatcacatatttcttggaggttttgtttgttcctttttattcttttttctccattctcatctgtcttatttgagaaagccagtcttcaagcttcgaaattctttcctctggttgctctgttctgcttttaatacttgtgattgtattatgaaattcttgtagtgtattgtcatgtatttttcagctctatcaggttggctacatgcttttctatacggtctattttgtctgtcagctcctgtgtcattttatttttcaatgcactcctgcatctcaatgatcttcagcctgtctatattgtgaattatatttctttcatttctgccatctcagccaagttcagaaccatttctggagaggtagcacaggcatttggaggaaa

SEQ ID NO: 914869 - DNA, 634 bp, Homo sapiens
aggcttaacaccatgtggaagcttctaaggattatggtttgcaccctttggagctgtggccccagctgtacttgggtccttttgatctatggctggaggtggagtggccaggatacagaaagccatgtacaaggccgtggaggggtgaggggtcctgggactggccatgaaaccattctatcctcctatgcctcagggtctgtgatgagaaaggatgcaccttagatctctgaaatgcctttgaggccttttccctgttgtcttgactattagcactttgctcctttttcttatgcaaattttcacagcctgcttgaatccctcccctgaaaatgtgcttttcttttctactacatgaccaggctgcaaattttccaaacttttattccttgcgtctcttttaaatgtaaattccacactgctcagagaaataagcaatgacacaaacaaatggaaaaatattccacactcatatatagggagaatcaatgttattaaaatggccacactgcccaaagcaattcatagattcgatgatattgctatcaaactaccaatggtattctttacagaattgcagaaaactattttaaaatttatataraaacaaaaagagccttaatgatcaaagcaa

SEQ ID NO: 914870 - DNA, 647 bp, Homo sapiens
tgtgcagaatgtgcaggtttgttacataggtatccatgtgccatggtggtttgttgcacctctcaacccgtcatctaggttttaagcccacacgcattaggtatttgtcctattggtctccctccccttgccccccacccctgaagtccccaggttttatcgaatcaagttcccattgcctcagcatggacttcaaggctattcataacctggtcctgacttaactttttggcctcatctcttccccatcacacactctgtgctcaaaccatccagaccattcagaccattcacctttacctaagaaaacacagactttgaaaaccctatacctttgcttatgtcactgtcctttttttttagacagggtctcactccgtcacccaggctggagtgcagtggtgccatacacagctcactgcagccttgaactcctgagctcaagcaatcctcctgcctcagccacccgaatagctgggaccacaagcatgtgccaccacacctggctaatttttaaatttgtttttgtaaagwtggggtctcgccatgttgcccaggctggtcttgaactcctaggctcaagcgatctacccacctcggccttccaaagtgctgggattacaggcatgagccactgtacccgaccc

SEQ ID NO: 914871 - DNA, 618 bp, Homo sapiens
caaaaatgggattttcaatgaattttcccctcaaataaaatgttcctttttggaaacattatagaataatgttccataaaagtacaaaacatcttgaagagagatgttcagaggttaaggtgttattttaacacttgcgagtgaaaatatgatactcctccttagtgataaggaaagctgacacttgtgaatcacccattttaatacattaatgtgcatctgatgcttggcaacattgcagaaaaaataagagtgaacagagcataaatgtgtaagaatgaatgcaggatgctttaaattgcaaagtcccctagatatgaaatgaaaatgcattttaattatcactttagaaatactgctttcacactggtgtcatttcttgcaaacatattctcttcaggtaacagagtcacattaatggctgttgaaattcagcagatattcctggtacttctctgactccattcatgatactgaattatggcttagtgataccactttcatgtgttgtttaggaacaaagatgggattaggaaaattgcttccaagccaccatagcaaattttcaccaaaacgatcaagcagacagctatggyaaatgacattgccttttacttt

SEQ ID NO: 914872 - DNA, 637 bp, Homo sapiens
ctgaaatgaatattactaaactaacattttttytatttaagtgttttgctatcacaaactgaaagaaaaattaacgtttcagattatttaggagaatgagccagggattgcaaatatctcacctcaaatatcgtttttgttttttgttttttgtttttttttttttgagatggagtcttggtctgttgcccaggctggagtgcagtggcacgatctcagctcactgcaacctccacctcccaggtttaagtgattctcctgcctcaacctcccaagtagctgggactacaggcatgtgccaccgcacccggctaatgtttttgtatttttagtagtgacggggtttcaccatgttagccaggctggtctcgaactcctgacctcaagtgatccaccctccttggcctcccaaaatgctaggattgcaggtgtgaggcaccacacccagacactttgcaaatatctttattattcattatatataatagattgttctatagtacagatagttaaaatggcttaagtaacaaaaattaatttttgattaaaatattaggaagtataaagtagatcagtcaaaaagatatgaacataactgaataattcagccagccaaatagcacacactggacaaaat

SEQ ID NO: 914873 - DNA, 522 bp, Homo sapiens
aaaaatctcatgagattttttcctcagtgttctgcctaattcattcatgcatgattcacaatcacagtctacaacaaattaaaaatctattcactctcawtttacacatcttatccaggatacggcataacttaatatttatttccaagcctatatgtaaccactgtacctcaagtatagatgggtttctaacatacatattaacagcttatgtttatttccaagcctatatgtaaccactgtacctcaagtatagatgggtttctaacatacatattaacagcttatgtgccagttttgataaaggaagccattaaagtcaaactgttaccatataagccaaagccctctaccttgcatcacatataaaaagatattcagattgacggaatatgtataaatatgaaaaaagaagaaaatctaacatgttaactctttacttttaactactgtaatatagctaagcatcaaaaataaatattattcccaaaaagcaacatgaatagagaaaaacaggtgaat

SEQ ID NO: 914874 - DNA, 522 bp, Homo sapiens
aaaaatctcatgagattttttcctcagtgttctgcctaattcattcatgcatgattcacaatcacagtctacaacaaattaaaaatctattcactctcaatttacacwtcttatccaggatacggcataacttaatatttatttccaagcctatatgtaaccactgtacctcaagtatagatgggtttctaacatacatattaacagcttatgtttatttccaagcctatatgtaaccactgtacctcaagtatagatgggtttctaacatacatattaacagcttatgtgccagttttgataaaggaagccattaaagtcaaactgttaccatataagccaaagccctctaccttgcatcacatataaaaagatattcagattgacggaatatgtataaatatgaaaaaagaagaaaatctaacatgttaactctttacttttaactactgtaatatagctaagcatcaaaaataaatattattcccaaaaagcaacatgaatagagaaaaacaggtgaat

SEQ ID NO: 914875 - DNA, 634 bp, Homo sapiens
gagcagtgtcattcaaacatatgwgtctatataactcaaacaatataatgaaacctaccaactgaaagcattctagaagctcaattctgtcttctatttatatcagcttgagaattcattaatcaaagtgccctagtatctacatataccttgttaattaattagactaccaaaagtttagagaatacaatctacccatggatttgttataaaagcaataaatgtttatcatggaaagctcagaaaatacaaaaaaaagcttaataaagataaaaatcacaaataattcaaaactcaaatccaaaaatggatcttccaatttatgtcagtttatggcgaactgataaaatatatttaatgtaaaaaaccacaaagccatctcctttgatgggatgcatcccaaaatgaacacagatgactaggaaattttatatagaatagtcactaatttatgctactatatctaataccttgatttatactactataccaaataccttaacatgttaggggcatcatgttctcaaaccacagctaaatagtttcagaaaatacttaagatcttttgacttgttttgtgaggtactgaagttcgtttctttactatcagctatgaaaagggcaagaaaaagga

SEQ ID NO: 914876 - DNA, 618 bp, Homo sapiens
gaattaaagtcatactaatataactataatttataatgaattcaaatagctttcagaagggtcatctgtggaatgtaaagagcaatctgaatttatttttctgtaactggtcacagcaatgttttctagactagtgagtgtgtgctcatacagcaccatgtgtgttcaacaacacacaaagttggatgacaaaatcactttagtgagaaggcagctatttccaggggcaccaatactaatgttagttttgagtttttggtttgcttttgtttgtttacaaggcaatgtaatgtttaaggaaaaaagaaaatcttaccagtccatgttgagtgaacatttcaatcaatgtaaagtcaaaagtcagctgccaccatgccatgcaaaccttacagtacatgacatattaaatcagtaacctcaaaagggacttcttagaagctatgagtaaaaggcatacacaaaatgcctctgagataaattcacaaatgaaatggaamatgatatctgtgtatatccaagaataatagtaattattcaaaaacaagaaaacttctaaattgaaagaatccctaaagtaaaagtagaccaaagaaaaagaaataaaggtgagaagtgaga

SEQ ID NO: 914877 - DNA, 610 bp, Homo sapiens
caataaaatctaatgcaatagagtcccatataatatgaaataagattgaagaaaaaaatcaaccacttcagatttgaaactgattgtcaattgccataaacacctaccctgccttttctgtgactataactaaaatattcttaaggctgaattaaatgaaaatattctttactataataaagattttaattcttttagtggaataaatagaattttccccctctccataaactgaggaaatgtaagcacatattttatcaataaaagcatcattaaaaagcagacatagaaaataaagtatctacagaacacttaaactgtattccagatactcgattacacacacacacacacacacacacacacacatttctcaaggaagtttttatttaatctgattttataggactactcatggagacatttggaggtcaaatatatcacatagaattatggaattatttcaatcctttcataacaakgcaaaaagatataggaagttttatctattcattctgttttaacagacatattctttctttctttttctgacttaaataaggagctaaccccaaaaggtataaagactactagattgtgaatgcaccag

SEQ ID NO: 914878 - DNA, 747 bp, Homo sapiens
agtgtggcgattcctcagggatctagaactagaaataccatttaacccagccatcccattactgggtatatacccaaaggactataaatcatgctgctataaagacacatgcacacgtatgtttattgcagcactattcacaatagcaaagacttggaaccaagccaaatgtccaacaatgatggactgaattaagaaaatgtggcacatatacaccatggaatactatgcagccataaaaaatgatgagttcatgtcctttgtagggacatggatgaaattggaaatcatcattctcagtaaactatcgcaaggacaaaaaaccaaacaccacatgttctcactcataggtgggaatggaacaatgagaacacatggacacaggaaggggaacatcacactctggggactgttgttgtgggatggggagagggatagatagcattaggagatatacctaatgctaaatgacaagttaatgagtgcagcacaccagcatggcacatgtatacatatgtaactaacctgcacattgtgcacatgtaccctaaaacttaaagtataataataaaaaataaataaataacaaaaaaataaataaaaagtcaaaaaataacagatgctggcraagttgtggagaaaaaggggcacttagatactattggtgagaatgtaaattagttcaaccattgtggaaaacagtgcggtgattcctcagagatctagtggcagaaataccatttgatc

SEQ ID NO: 914879 - DNA, 620 bp, Homo sapiens
aaatcactggagttaggaatgttctggcygggtgcagtggctcatgcctgtaatcccattctgggaggccaaggtgagaggattgcttgagcccaggagttcaagactagactgggccatgtagtgggaccctatcaacaacaactacaacaactaaaactacaacaacttagccaagaattgtggcacgcatttgtaagtgccagcaacttgggaggctgaagctgaaggatcacttgagcctggaaggtcgaggctgcagtgagaatatgccactgcacgccacctacgtgaaagagcaagaccctgtctcaaaacaaaaaaaaaaaaaaagaaggttcaaaactctgccagaaattgtgataaatgggtcattaatatgaatactgaaattttctaagattatggcagaaattgtgaatttctgccataattgtatgattgtgaatcacacaatcacttggtattgtaatgtaatctttacataattacctactctctaaaccagagacatgcctataaactagagaaagttgagttggagggggcagaggtcagtctccagacacctcagcatttgagagaatcaataacagcacatgtctgaaccattctttatt

SEQ ID NO: 914880 - DNA, 623 bp, Homo sapiens
taactaaaagaatgaaattaaaatgttcctaacacaaataaatgataaatgtttgaagtgacggatctctgaattaccctgatttgatcatcacacattgtatgcttctatcaaaatactacatgtaccccataaatatgtacaactattatgtatccataataactaaaactaaaaaaatgtaaatgcatctcttaatatgtatgtgtttaaaattagaaacttgctacattttaaataaaagagaaacaaatgacttctatgaactattcaatcatttcaagtatacaagtttagtaatctttacacaactttacattaattacacttatttttactaatagtagcattacatgttcaaaatttgaatgttatttagttttctgacattacaatggcacaactttaaaatatgtattactttttcctttatattttaggagtcttcctaggccaaagtataaaatctgtagctctatcttaaactaaataaaatgaaaaaaacaaggtatctgtcacccyacacctcctaatcaatatggcttatttttttgctaatttttttttttttttgagacagaatttcactcttgttgcccaggctagagtgcaatggcacgatc

SEQ ID NO: 914881 - DNA, 500 bp, Homo sapiens
tatggctggattgggagtccacttcctcctctgtaaagatgacagacgagggagatctcgcgttctgggggtgccctatagccctcttttggccagaagcggtggatcacgcctgtaatcccagccytttgggaggccgaggcaggaggattgcttgagcccaggagttcaagaccaatctgggcaacatagggaggctacatctctcaaaaaataaataaataaataaataaataaataaataaataaataaataaataaataaaaataaagccagcgtcgtggcagggcgcctgtggtccctgtggtcccagctactctggaggctgaggcgggacgatcgcttgagcctgggaggcagaagttgtagtgagctgagatcgagccactgcactccagcctgggcgacagagcaagacactggctcaaagaaaaataaataaataaaataaggccctctttttccgggaccaacagactctgagggcagggacaaactg

SEQ ID NO: 914882 - DNA, 804 bp, Homo sapiens
tagtttacatctttcttttcaatttggatgctattttttaaatttacatacttattagaataattgccctagctcatatctctaatacaatgttgaatagaagtggtgagcatggacttcctttccttcttactggtcttagaaggaaagtatccactctttcaccctttgggatgatgtcagttgtggtttttcatagatgttctttattagatttcataaattctcctctatttctagttttatgagtgttttatcatgaaaggatattgattttgtcaaatgttttttctgcatctattgagattaggtggattttatccttcattttattaatgtggtgtattaattagatttattttattatgttaaaccaactttgcattcctgaaataaatttcacttgattgtgatacataatcatttttatatgtttctaggtttagtgtgctagtattttgttgataatttttgtattaatattcatgaaagatattgctgtgttctcttagaatgtcttttgttttggtatcatgagaataatgacatcatagaatgagttgaagtttgtttcttctatttttggaaaagattgtgaagaattaacaataatcttttttaaatgtttgggaaaactaatcagcgaaaccatttggtactgagcttttttgtgcatggtgagtttcttaattaytaatttaatccctttacttactaaggtctattgaaattttctatttgttcttgattcagtttttgtagttcctgtctttctaggatttttccatttcactaagttaaaat

SEQ ID NO: 914883 - DNA, 593 bp, Homo sapiens
aaaacatctacctgcgggtgctgaggaagacagcagggagcatcccagggagkcctcttcctaactgaggccaagtgatgagtatcctactctactttttagaacattagctgaatcagatacaaaacaaaacaaacaaaacatcctctccctcctaaaacaaaacaaaacaaaaacctaagcaaacaacaaaccaacaactagaaaaaagcttagcctgaaagaggataaggctgttgaatcttttggtaaatagtcatatctcaaatggagacatttaagtgcctgtgcttgtgtgagtgatgccagagagaataaaaactcattgttttcaggtcttaggatccttgggtaaaagagcttggcacacacagcccaaacctcttgcctgatatatttgctgctgaggaaactgaagctgagagagagaaaggtcctcacccacagtcgtagacccagtgagtggaagcaaggccagcccctgagtgcaggacagggggatcttacaacccacactgctttttctaggactcccgggtctgacccactatgaggtgaggctgcaaaacaactggatgtttttaatatcctgg

SEQ ID NO: 914884 - DNA, 638 bp, Homo sapiens
tatggaattcagcaatgtttataaacagttaagatttagagggtgagaggaagaaaggatccctaaagaatacataccgtttttaaaaaatgatagaggaaaattaaaggttaacataaatgtgaaagaatgagacccaggggagtgaggagactggcaattaactggtagacctttatcatagacaaagctgatgtttttcattgtctgggtcaacacagcaaccttatatgtgtgtgtgacatgacacttaattggcagccaaaatgaaatctaactttggagtctttcatgaaaatgaatccttagcagctcagatttttcagaattaaaagagtcctgagagattctcactccagcctctcagtatatgggtggagaaattgaggccaggtaggggtgaaacataatccaaaatcacaaagcccttaaatctcaagaagagcaataagcccagctctgatggctggtctcatattttcctctcacttctaaatccaggcgaggcctcctatctccatccaatgtataccatgttaagcactctgttcatgagagtacttctgggaaaacagtcaatctattatgaccagggtttctaaaattctacatataracagtagttcatcaaaatgagt

SEQ ID NO: 914885 - DNA, 627 bp, Homo sapiens
gggttatcccgggtaatcgtatcatatgaatccttcaaagtggagaagcttttccagcttttgtggggatgaagatgtgaacattgaagaatgtagagtggaatgctacctggytggctttgaagatggaggaagggggtcagaaaccaaggaatgctggtgtcctctagtagctggaaaaggcaaagcaatgaattctaccctcaaacctccagggtgactgactaacagacatcttgcttttagcctgatgaaacctatgttgggtttctaaactatcaagaaggtaatacatttatgttgtttaagccagggttccccagtccccggtcacggatgggtactggtccatggcttgttaggaactgggctgcacagcaggaggttagcaggagggtaagtgaagcttcgtctgtatttacagccactccccatcactcacattaccgcctgagctcctccttctggcagatcaatggcagtataagatcctcacaggaacacaaaccctactgtgaactgcacatgtgagggatctaggttgtgttctccttatgagaatctaatgcctgatgatctgtcactgtctcccatctccccaagataggactgtgtagttgcaggaaa

SEQ ID NO: 914886 - DNA, 583 bp, Homo sapiens
tagttttgaaaccttctaaaagcagagcctgggacagggcattacrtgctggtggctttttgggcgaattgaccccaagaaaggacagtcaagatattgggagaataagacaggggaggagatgtcagattctcctggcttcagagaaagctctacagcagtgagtacgaaaatgcaccaagaacttgagatgagaggctgtcagcatgaagttaatttaaagaggtgctgtagctgaaattagagctggattgagaggtagtgactagggcaccagaggcatcttctctagagccctatgggtgtgctttaatgactaagacctaaaattgtgaatatttatacataaacattccagttgtaaggtttttcataagaaagttgactatgttaatagacctttcaggtccatgtttaaaaacagagtgtaccaagatgcaatcatctcatattctggactagttgttatgaactgaatgtgtatccccaaaatttatatattgaaatcttagcccttaatgtgatggtattaagaagttgggggaggggctttaggaggtaattaagtcatgagatcagaatg

SEQ ID NO: 914887 - DNA, 634 bp, Homo sapiens
ttaataggccatctaagccaggttctttgtcagaaagcctttctgtagtgggaacactcaatstctgaccttttcaaggagttggaatgatcagaaattgagggggcaaaatttgcagaaactaaaatttgtagaaactgaaatttgcaggtggcgagaatgtagcaaaaggaaaataaaaaaaaataaattgtttatttaccagtggtataattagaacagggacaaaagccagggcaggatctgtgggtgcacatccacagctaccttatctagctctgaggagtgagggtcatgactgttacacacttccctgagattaagtcagatgttcttgttgcattcttccagagcaccctgcttatccaccctcggagccccacacttttatcacagcagaatgtaaacaagatggcagggcccatgtacatgtcttttgttcacctgtgtattcatgacagcacagagcctgttacagaacagacacttagtacatgtttaagaaattatagaagtttttgaaagtatgtttaacaaaaacagtcaatttgccaagctcctctcccaggtcctcataagaggtgttgggatgtgtacagtacacgatgctgcaggatggagtgccagcttggat

SEQ ID NO: 914888 - DNA, 609 bp, Homo sapiens
ttcacaagcaaaaatccacattaaaaagtaggcgaagtacatgaacacttttcaaaagacatacatgtggcttgtatacataygtaactaacctacacattgtgcacatgtaccctaaaacttaaagtataataataataaaataaaataaaataaaataaaaacaaaagacatacatgtggccaacaaacacatgaaaaaatattcaacatcccctcattagagaaatgcaaatcaaaaccacaatgagataccatctcaaaccagtgagagggctattttttaaaagtaaaaaaaaaatatgctggtgaggctacggagaaaagggaacacttatacactgctgatgggagtgtaaattagttcagccattgtgcaaagcagtttggcaattactcaattaactctaagcagaattaccattcaaccccagcaatcccattattgggcatatactcaaaggaatataaattgctctaccatgaaaacacagccatgtgcatgttcatcatagcactattcacaatagcaaatacatgaaatcaccttaacgcccattcaacagtagatttgatatagaaaatatggtacatatacagcgtggaatac

SEQ ID NO: 914889 - DNA, 638 bp, Homo sapiens
ggcaacagttttttgggggtggtgctcaaggcattttgcttgttgactttctggaggaccaaataaagataacattttcttattataaaagtgttttgagagagcttgtcgaaacataggcagaaaaacactcagaaaaccaccagagagtccttctccactacagcaatgcccctgttcattcctttcatccaacaaaggcaattttgcaagagttttgatgggacactattagacatccacattaacagtttgatttgggtctctctgattatgtttgtttttcaattaaaaaacaaatctctaaagggtatgcatttttcttcaggcgatagtgtaaaaaagactacattgacatgactaaattcccaggacactcagttcttgaataaacttaatggctggtatcatcatttacaagacaatgttgaactttatgtatatagcttatgttaaaaaataaagtttatattttttatttttagattttaattccattttccagaaactttttgttgtcctcttgtttgtgtatatatgtctgtgtgtagatatgcttatgtataaatatacrttaaatatattcaattttttgagccgaaatttgttgccaaagtcatatgcatatgaatatgtta

SEQ ID NO: 914890 - DNA, 638 bp, Homo sapiens
ggcaacagttttttgggggtggtgctcaaggcattttgcttgttgactttctggaggaccaaataaagataacattttcttattataaaagtgttttgagagagcttgtcgaaacataggcagaaaaacactcagaaaaccaccagagagtccttctccactacagcaatgcccctgttcattcctttcatccaacaaaggcaattttgcaagagttttgatgggacactattagacatccacattaacagtttgatttgggtctctctgattatgtttgtttttcaattaaaaaacaaatctctaaagggtatgcatttttcttcaggcgatagtgtaaaaaagactacattgacatgactaaattcccaggacactcagttcttgaataaacttaatggctggtatcatcatttacaagacaatgttgaactttatgtatatagcttatgttaaaaaataaagtttatattttttatttttagattttaattccattttccagaaactttttgttgtcctcttgtttgtgtatatatgtctgtgtgtagatatgcttatgtataaatatacgttaaatatattcaattttttgagccraaatttgttgccaaagtcatatgcatatgaatatgtta

SEQ ID NO: 914891 - DNA, 629 bp, Homo sapiens
gttacgcaaacattgaaaccaactttcaacatcagtttcctataaaatttccctctcattattcttccttttgtatcttggcattactgtgaatttcacctgtatcaattttcttccaaattcctgagatcacctgcctaccttccttcccttccttccttccttctttccttcttccttcctccctccttccctccttctctcctttccttccttcttccctgcttcatttttttcttattctttccttcctctttcccttcctttcttatttctttccttcttccctaattctaaggatatttgtcatttctaagaaaaccttctttttcacacatctaatttttgttttaagtatgtcagcatatatttctgatattattcatttatttatgttaaatatttatactaacattcttctagtttggagaggggttctagtttttctgttaattttggtgctctgtcttgaggatgttgagttgtacttgtctattggtttttgttacaagcgatggtgttgaattgccaaatagaagaatacmtttccaaaacttaaatgttatttactactgaagttcaggttaatgaactttctgattctgagaacttgtcttagcagatgaggg

SEQ ID NO: 914892 - DNA, 680 bp, Homo sapiens
tattttagtgtgtgtgtgtgtgcrtgtgtgtgcatgaagtactgttctaatttggaatgtatagttcaacgcatcatagagtgaccatatattgtccaaactgcgacacttttgagagtgaaaagtgcatagggaataattataccagaaaaatagtcataaattgagatggttctgagaaaaccaggatgtctggtcaccctcaaagaagtgactggggctcattttaacagaactgacagactcctgaaggtaacctgcctgggaacctgcaacagagaaactggtcagcaggtgccccatatgtagccagattgtgagtcatcagtctgggagaaattgagttttcagtttggactttggtggtgtgttgtaatctgttccctagagatctgccaaactctaggttgaacacatggatccttagaaattatccatcttgaatcgtttggtataaaaatagatttcagaagtcccagggcagatattacaagatttctatgaaaaagaaataaagaatagaagtataaacgtacaggaatggtgaagcaaggaggataatggatgttagaaatactggcaaagagggcaaaaatgtgcagttagataatgattacatgaatataaatatggaatatttattaaataggaaaattaggccctaaaagaagtcttctgtc

SEQ ID NO: 914893 - DNA, 680 bp, Homo sapiens
tattttagtgtgtgtgtgtgtgcatgtgtrtgcatgaagtactgttctaatttggaatgtatagttcaacgcatcatagagtgaccatatattgtccaaactgcgacacttttgagagtgaaaagtgcatagggaataattataccagaaaaatagtcataaattgagatggttctgagaaaaccaggatgtctggtcaccctcaaagaagtgactggggctcattttaacagaactgacagactcctgaaggtaacctgcctgggaacctgcaacagagaaactggtcagcaggtgccccatatgtagccagattgtgagtcatcagtctgggagaaattgagttttcagtttggactttggtggtgtgttgtaatctgttccctagagatctgccaaactctaggttgaacacatggatccttagaaattatccatcttgaatcgtttggtataaaaatagatttcagaagtcccagggcagatattacaagatttctatgaaaaagaaataaagaatagaagtataaacgtacaggaatggtgaagcaaggaggataatggatgttagaaatactggcaaagagggcaaaaatgtgcagttagataatgattacatgaatataaatatggaatatttattaaataggaaaattaggccctaaaagaagtcttctgtc

SEQ ID NO: 914894 - DNA, 643 bp, Homo sapiens
actggcttctggggtagataagtgatagctagactcatgccaactacttrgtaaaatatgaagattccagttaactaatcttttttttttttgaccaccataacaaagagtcaattgagtttttccactagattaaatgactttcagtttttttaaattgaaggagttggccagacattttgatttgaactgtcccttcttcccggactaatcctatatccaattaagcccaagccctgctgattttactttctaaatgtttctcatatctgtctactcctctcaacacccattccatttctctagttcagagctcattatcttttcaacaaatgctacagtagccttttaatctccctgtctccatttttattctgttttaaaatttccctcatcttgcaggcagagtcattttcctaaaagtcagcctgaccatctgtggcttcccatttcctgtgggcaaaatccatgcttcttagtccagctttcaagaatgttcttagactgtgtcccccttctctcttccatttttgctccccctactatccattttgtatggcatgccctagtaatagcaaaccacttgcagttccttgcatttatcagggcattttattcctctgtgtccctctgcctgggacaa

SEQ ID NO: 914895 - DNA, 589 bp, Homo sapiens
tgatagaaaaggggaaggatcagtattatatgttaaatgtttagaactagctggggcggtgggtgggtgaaagttttgatttgtagcatttgttgatttttatgctgtgaatacttccaatctcaagatatctagctgccaatgtgatatgactgaactaggagttaggaatgcatgtgagcagttgactcccacagccccagagagctggctccagcatgccactgggaggagatgaagaaacattcgttggtaatagaaacattctaattcttcttctgggatgtggttatatgggtatataaaattgtcaaaagtcaacctgggtgtggagccaagatggccgaacaggaacagctccggtctacagctcccagcgtgagcgatgcagaagacaggtgatttctgcatttccatctaaggtaccaggttcatctccctagggagtgccagacagtgggcgcaggacagtgggtgcagcrcaccgtgcgtgagccgaagcagggcgaggcattgcctcacttgggaagtgcaaggggtcagggagttccctttcctagtcaaagaaaggggtgacagacgccacctg

SEQ ID NO: 914896 - DNA, 485 bp, Homo sapiens
tggtcttattgccaaaaaatagcccatgcttcttytttttttttttttttttttttgagacaaggtctcactctgttgcccaggctggagtgcagtggcatgaccttggctcactgcaatgtccgcctcccaggtttaagagattctcctacctcagcctccctagtagctgagattacaggcgcctgccaccaggcctggctaatttttgtagttttaatagagatgggtttcagcatgttggccaggctggtcttgaattcctgacctcaggtgatcagcctgcctcgacctcccaaagtgctgggattacagacgtgaaccaccacacccagccccatgcttcctcttttagcagcctattgtccagaactcatctcccagcctgatccagctgtagggaggtcttccatgagctagaagggcagcagtaatatctaccttgcttggataacaaaacttttctcacaggaatgttgtaaaat

SEQ ID NO: 914897 - DNA, 637 bp, Homo sapiens
aacagtggattttcatgaaccgcaaatgctgctgtctgatcattcctctggaagttttgtctcagaggagtccccggctgtgtgaggtgtcagtctgcccctactgggcggtgcctcccagttaggctgctcgggggtcaggggtcagtcacccacctcaggaggcagtctgcctgttctcagatctctagctgtgtgctgggagaaccactgctctcttcaaaactgtcagacagggacatttaagtctgcagaggttactgctgtctttttgtttgtctgtgccttgcccccagaggtggagcctacagaggcaggcaggcctccttgagctgtggtgggctccacccagttcgagcttcccagctgctttgtttacctaagcaagccttggcaatggcgggcgcccctccccctgcctcgctgctgccttgcagtttgatctcagactgctgtgctagcaatcagcaagactccatgggagtaggatcctccaagccatgtgtgggatataatctcctggtgcgccgttttttaagcccgtcrgtaaagcgcagtattagggtgggagtgacccgattttccaggtgctgtctgtcacccctttctttgactaggaaagggaactccctgaccc

SEQ ID NO: 914898 - DNA, 556 bp, Homo sapiens
aagggatgcactagtccctgctcttttgatcttcagactgaaaataatttttcttctaaaccatcactgattgatttttttctttcattgttttatatcattgagataagacaatggtttgagttcaagtcctaactctactatttactaagtacgtgaccttggccaagttatttaacttctcagcaattcagagttgagagttcttgtctttaaaaaggtcataataataccttcttcagaaggattataataaggttcaataagcatctaaatctcttagcacaggtctagtacacctaataagattccctgccttcccctttttctttcacctcacatatacccagatacagaggacaaaagagatagctttcttttccaacatctacccccgcccttgccacccattcttctgaataccacwttattttccacccattctcagggacaacacacataaaattaatttctccaaagcaaatggtgcaatggaatctgaattccaaatgccttcagtctttttctccccacccgctacaagggtgaacaggag

SEQ ID NO: 914899 - DNA, 636 bp, Homo sapiens
aaatagaattgtatatgttcatggacttgatttgctagtactttgttgaggattttatatctatattcayaagggatattggtctgtggttttcttgcaatgtctctgtctggttaaaaaatagatttggtgttaattctcccttaaacatttggtggaattcaccaaaaaagccatctgggtctggactttaccttggtgacagtttttctttgtggtaccaatttaatctctttacttgttatacgtgtattcagattttatatttttttcttgattcggttttggttgttttgtgtctttctagatatttgtctagttcacttagactatttgttggcatgcaactgttcacagtactcattaataatcctttcatttctgtaagatctgtagtaatgtctactctctcattcttgatcattcttgattttagtcatttgagtcttttttgttcttgaaaagcagctatgctcaccactgcaccaccaacaattcattctttcttgtctacttaaaagggttggcaattttgttgatcttttcaaagagccaacttttggtatttttgattttctatatttttctgttctttatttcatttatttctactctaagctttactgttttcttctg

SEQ ID NO: 914900 - DNA, 644 bp, Homo sapiens
ttctgcctaaaataaggaccaagcaggccccagaaatggctatggaggttatttatgtgtaaagtacataatcttggtatgtggactatgtatcatcttttcaaatagtttgcttcttctgaagctttttttctctacttttttttttttaattaaagttctgggatacatgtgccaaacatgtaggtttgttacataggtatacacgtgccatggtggtttgctgcacccatcaacccatcatctatattaggtatttctcctaatgctatccctcccctagctccccatcccttcacaggccccagtgtgtgatgttcccctccctgtgtctatgtgttctcattgttcaactcccatttataagtgagaacatgtggtgtttggttttctgttcctgtgttaatctgctgagaatgatggtttccagcttcatccatgtgcctgcaaaggacatgaattcatgcttttttatggctgcacactattccatggtgtatatgcaccacattttctttatccastctatcactgatgggcatttgggttggttccaagtctttgctactgtgaatagtgctgcaataaacatacatgtgcatggtcctagtacaatgatttataatcctttggctatataccca

SEQ ID NO: 914901 - DNA, 596 bp, Homo sapiens
atagctaggacagcgggcattcaccaccgacccagctaattttttawttttcgtagaaatgggatgtcactatactacccaggctggccttgaactcctgagctcaagtgatcctcctgcctggcttcccgaagtgctaggattacaggcatgagccaccgcacgtggccactggggggcatttaatacactgaaatttcatttgaaattttgtgatttaaaggtttatcttcgctaattcagaacaatataaaaatatacagactaataacatggaaagtaatttgaaatttaacaaattgagaatgtaggacattcattaatagccattaataacatcataagatagcaattcatgaatggaagaaaggaaaatattcatattcattctttataatttgatctatataaaatgccaaaagcactaataatacatggatataaaatattctttttgccctgtgttaagagaatactgctatattcagctgtgttgcttgtcttttctcatgaaaatatgtatatatttttaagaaaaccaaaaagtcttgttgtatttgcttgttatctattgctgcataaaacattattccaaa

SEQ ID NO: 914902 - DNA, 630 bp, Homo sapiens
tgaggctacaattactgcaaaaacgttttatatatttgttattggatattgtattgactctctgtatgtttttataagaaattgtatttgttagaatatgtttgttgtagcaaattgaatttagtcatctaagttgtaatgtacacatcagttctgtgatgattttgttataaatgattgtgctaactttatgttctatgcacacataaatgccttgaagttactccctagtcaaagagcattatgacccttgtctctgctttattcctgcatcccagtttcagaagaataagcttgtagttctaaaagacttatttataaagggaatgaaaagcttctttcatccacagaagaaaacagaagttacttccttctaattataagtagtaaaaagttaggcttatttatacatatagatatacttatgatggcgttacctaaaattggatatcactatttctaaaaactgacatatttttattattctagagacaamagcaaaatgtacctttagggcagatgttttttaaagaggtattctgtttggctctcaggtgaccaaatataaagttcctattccataatggatgataaatataatcctgtaaaaggatcgctttctttgtaagg

SEQ ID NO: 914903 - DNA, 217 bp, Homo sapiens
caaggtatctgcatcccaaaataatggcctctaatcaaaagattgacacaagaatatatatmtatacacacacacacatacatatacacatatatacacaaacacattgaaagaacatgtatgtatgtatcattattataatcatttttatgatatttatgattccttgttttaatcaacttttgcaatttactaattaattatgagattggataag

SEQ ID NO: 914904 - DNA, 618 bp, Homo sapiens; identical to SEQ ID NO: 912411

SEQ ID NO: 914905 - DNA, 625 bp, Homo sapiens
agtctgattcactggcaggtaacctatgaaccgtaacataccaagacagctctttcatcttaccgcctcctcatactaacccagtaaggcactacagagctagaaggcacctaatttcaacttaccttctgcttttcttttcttgggcaatatctaatgttaatgtgttaagtaaacaatacacccttgtaagacacaactagagaagaaagtcatttccaattttatcagttattctatactgagaaatatagtaattccatatgtaagtctaagaagtcaaaagaggcactggttggtaagaaatatttccctttgtcttcaaaatgtgattgtcacaagcactgatccctatagccatgaagacggggcttagaagatcagctttgtcaagggcagagcatttacagaagtttagaactgaactctgtcaaaggtaaatacccacctctatatacgcatgtgtaccttaatgatgtcaacgtactgactccaacacasttagatttccttgctgcaataactgcctagtacccataatatagagagtgcactgtttccaaaataaactaggaaaaattgtacattttttgggatagagaaattcaggttacttgccttgatt

SEQ ID NO: 914906 - DNA, 549 bp, Homo sapiens
attacaaaaatacagtatctagtattgaatgataaggtagtatyttcatgcaccatacacatgtccgaaaagtaacatatcagtcactcaaacagacattttgtgtttattaggttagtttggtattttttaaaacggaattatctggtttggttggaataatgacacaatcctgacaatatgtctttgtataatagtaaccaagaaatggctaagatatttataagggatgtgaagtgtctttctccaatagaaatccaaccaattgttctcctactaatatcatcacttcagaatctgaacacttaactgccaaacatattcatgtctcattaatcttgtcctggatatatgtaatttacatattacatatagctaggacattatcagtacaatattcatattcctatcaaggtttatgtttttgcatgtttgttctcttttttaatcagaagatagtacaacaggactactgcagttccatatagctaatgattgtttcatttctatcacctatgagtagcacacatgaataattttgctataggc

SEQ ID NO: 914907 - DNA, 578 bp, Homo sapiens
tagactgtcttaatttttttaacagtatacttaagttaccaattactatgctctttaagtttagaattattaccacaaaattaatggtggatgagtaccataaaaaaggagtaatgcacagtttgattataatttcttaatcatgtaacattttgtttaaaagattttaacaaatatcttttatctttttcatggatgttgctattctttgtgtgtttttctcattaaacagcacaatgacacataatattcatttactcattaatatgtgtcccaagagagatgaactgggggattttaccttattttctgtgtggaatagttttctgttttataatcttgacacttattttgacatgtcagggtttacattgtagaattactgaatcaaatagtatgttacagtgtaacttttggtgatacatatagttggtagccacagacaaaatatgttcagggaaaaaaagtacttttttgttttataagttgagtatataagccagttcaatttgtcagagamtcttaaatagttgtaatgagtacaactctagttaatctcctcattagacatatctatt

SEQ ID NO: 914908 - DNA, 398 bp, Homo sapiens
aattttttatacttcagtaccaaaactaggtctcagtakgcatgatttataaatagaattctataaggattaagaatcctgtttgtattatattataggtgggcgtttgtttttgtatttcatttctttattggcaaccataaacaaactgttttgccattttatttcccttaaaatacagtctaaaaggctatcaatgagttattcatcaccaaatcggtatttaattaagatataataaatccatttttgtctgtgtgcatttttaggagagcccattgaaaatcgtacatatctacatctttttttctagtaagttaaaaagaacagtaatttattgggacttagtctccaaatggcttttttataaaatggaatatctttattgctctgcttat

SEQ ID NO: 914909 - DNA, 591 bp, Homo sapiens
tccaacaatggctaaagaggaaaaacaggacccagtcactcgtctttaagtagaactcatgttcacaaatacagtcaaagcacttagactccttagagttctaggtttcatatgacaccagaattctttctattccccagcaggatatgggggagggaagacaggtagatgcaaagaagaggaacgtgctgtgtaattaaactggtaaatcgttgtcttttgagaaaaaatatggcttcttgatatttgattttgtaacttcaatatcagcacaaatgccagagtcagtctgtgtatcgggaagggcacggctttcaaggctcaggcggcatattaaccaactcacagggggtggccgttttacatatattctcttcaaagaaatacagcataggccgccaccattttgctgtggtccctttgcagcaataaaatggtggcataaatgaaaactttcagatcaaacacatatgagctgcctgtcatcagctttggtttcttcccaacttgcatgttgatataggatgtcttgagacctcaaataattttaaggggattttgcctccawttgagtcctgtaatatttaaaat

SEQ ID NO: 914910 - DNA, 588 bp, Homo sapiens
agctagaaaataaaaatatatatacattcttggaataatctattgcatacatacagtatgaaaaaaatgaagtaacttcataaaacagtatccatttgtaaaattcactagagaattccagtgtatttccatggaactatgcattgtcaagtttttaattagtcacactaatttccccctttggtgttaactatcaaagcatactcaaatcttcctcattggcattacacattggagttgctcaataaatgtatgttggacttcagtgtggtgttctgctaagtacttaaaattcaatagggaaaaataatcacaagaatttctgttaggagtttgagataatttggtggataattatgtgccttcctattactgctggagggtaacagctgtcatgtatgacccaagtgctgttgtgaagtgtggttttgtgcattcttcaaagataactaagcatctttcatgtgttacracttgtgtagtcctgagtgattaatcactttgatccttgaatcaaatgggctcttaggtgaaagaaatataaacacttatgcaatgggacaagggctataattcagttatctataa

SEQ ID NO: 914911 - DNA, 627 bp, Homo sapiens
tacaggagaagtggaattattgytgagccaagtgaacttctgttttcaccttatgtatgttttaatcgcttcagctttcttacagtgaacatgtattcctttcataaggatacttttacagataaaaaggtcactcctaaaatgaaataaagaaaaaggggaagaaaaagaggcaaaagctactaggatttcaaattcagatgccaagatggtagctctgtcataaaagaaaaagagcttcctagtctgaagtcatttatctggcaccatagctgtctgagcagatcaagtaaaacttcgagaagcaaattttaaatcttcaagtcttggtatctgtatgatttcccaagtagttcaaagaaaacattgggccaaccaacaatatagaaaaagctcaaatccatcatccacaatttttgtagggtctactaaaaaattatactatgcatattccatgggaaaagaaaggacaatcaaaatggcaagatctctggcttctagcatccagtagaaatgttgaggaggagacttcctgaacaagatccatctggataggttatactatcagatatgttgctatttctgcgatgtgaaatgagatgtgacataagtaataataaaagtagt

SEQ ID NO: 914912 - DNA, 566 bp, Homo sapiens
aaactctgtgattgctccgacgaaaatgtgtttaaaaagagagragtcttggccgggcgcagtggctcacgcatataatcccaacactttgggaggcagaggtgggcggttcacaaggtcaggagtttgagaccagcctgaccaacatggtgcaaccccgcctctactaaaatgcaaaaattagccagccatagcggcgcgtgcctgtaatcccagctacttgggaggctgaggcagaagaattgcttgaacccaggaggcagaggttgcagtgagccaagatcacaccactgcactccggcctgggcaacagagtgagactctgtcaccaaaaaaaaaaaaaaaaaaaaaaagtgtttgtaattctagaagttaaaatacacaaggaagagaaaacggttaatatttatgcaccgaaatgctcaacgccactttcataaagtaggacaaatccccatactgaggagagactgccaggcattgaatggaaacagaacagaacagggacaccaaaacttaagaaagaggatagccacaccgagctggaaagggaacacgtctcagaa

SEQ ID NO: 914913 - DNA, 566 bp, Homo sapiens
aaactctgtgattgctccgacgaaaatgtgtttaaaaagagagaagtcttggccgggcgcagtggctcacgcatataatcccaacactttgggaggcagaggtgggmggttcacaaggtcaggagtttgagaccagcctgaccaacatggtgcaaccccgcctctactaaaatgcaaaaattagccagccatagcggcgcgtgcctgtaatcccagctacttgggaggctgaggcagaagaattgcttgaacccaggaggcagaggttgcagtgagccaagatcacaccactgcactccggcctgggcaacagagtgagactctgtcaccaaaaaaaaaaaaaaaaaaaaaaagtgtttgtaattctagaagttaaaatacacaaggaagagaaaacggttaatatttatgcaccgaaatgctcaacgccactttcataaagtaggacaaatccccatactgaggagagactgccaggcattgaatggaaacagaacagaacagggacaccaaaacttaagaaagaggatagccacaccgagctggaaagggaacacgtctcagaa

SEQ ID NO: 914914 - DNA, 586 bp, Homo sapiens
gaataaaagactactgattaataacatgaaacgtatgaaagcagaaaaaggggaaaagctatgtgacaatggcctgagcaatgattttttctggatttgaccctgaaagcacaggcaacaaaagcaaaaataggtaaatgggattataccagactaaaaaatcttctgaacagcaaatgaaatagttaacagtgtgaactaacaacctacagactgggagaaaatatttgcaagccatatatctgatagggaattaatatccaaaatatataagtagtttacacaactcaataacaaaccaaaccaaagaaacaaacaagtaaaagcaattgaaaaatggaaaaaagaccagaatagacagctgtcaaaagatgacatacaaatgaccaacatatatgtgaaaaaatgctcaacattattaatccttatggaagtgcatattaaaaccacaataagatatcatcttacacctgtcagaattattgttatccaaaagacaaaatataaaaatygttagctagaatgtggataaaaggaaaccctgaacactattgttgggaatgtaaactaatacagtcgttataga

SEQ ID NO: 914915 - DNA, 645 bp, Homo sapiens
aggctggagtgcaatggctcaatctcagctcaatgcaacctctgcctccygggttcaagcaattctcctgcctcagcctcccaagtagctgggattacaggcatgtgccaccacacctggctatgtttttgtatttttagtagagatggggtttcaccatgttggtcaggctggtctggaactcctgacctcaagtgatccacctgccttggcctcccaaagtgctgggattacaggcatgagccaccacgcccagctgcaaattctattttacaacccattattttaacctgataacaacctaccactgtttgcataaacaaacaaacaagcaaaaagaaaactagtaaaaactctatgccttaacttcatcaccccagtttttaacgttttgttgtttccatttatatcttattgtactttctatgtcttgaaaagttgtcgtagttattatttttgattggttcatcatttagtctttctacttgagtagtttacacatcacagttacagtgttatagtaattctgtttttctctgtatttgctattaccagtgagttttgtaccttctttttgctcattaacagccttttcttttggattgaagaactccctttagcatttcttgtagggaaggtctggtg

SEQ ID NO: 914916 - DNA, 557 bp, Homo sapiens
gcagaaataatgaagttctttgaaaccaatgagaacaaagagacaacgtaccagaatctctgggacacagctaaagcagtgtttaaagggaaatttrtagcacaaaaatgccaacatcagaaagtgggaaaaatctaaaattgacaccctaacatcacaattaaaataactagagaaacaagagcaaacaaattcaaaagctagcagaagacaagaaataactaagatcagaatagaactgaaggagatagagacatgaaaaacccttcaaaaaaatcaatgaatccaggaggtgattttttgaaaagattaacaaaatagatagaccgctagccagactgatgaagaaaagagagaagaatcaaatagacactataaaaagtgataaaggggagtcaccactgatcccaccatcagagaatactgtaaacacctctacacaaataaactagaaaatctagaagaaatggataaattcctggacacatacaccctcccaagactaaaccagtaaggatttgaatccctgaatagaccaataacaagttctgaaattg

SEQ ID NO: 914917 - DNA, 646 bp, Homo sapiens
accaataaaattgaaatgaagagcrtaagacacactatatggatcttttggatgctatacatattcctttatcccattgggtcacagaaagtctaccatatcctaataatcagaattctccctgactggatagtgacttctctactgactgctggtcttttgggacaagtagcttaaaatgaatgggcagggagcagtcttaatctgaggattagtgaatctcttaaaaagccacttgttagaataattttccttctaggaactaaaatttctaaacctagagcacaaaaattgcaagtttttgaaagtatgtattcactgggtcactgagggcaaatatcataagttggttttcacagaaataaactcagatttgcatgcatgaaatgtactggaaaatgctcttggcatcagtgactctgggaaactcaagaaaacagaattcagcagagggagaattagattgtgatacagtaactgctgagacttctaaagttgtatgaaataaaggtgcactatagtggactatgtcatgagttgcctatggttggcctgcagaacccaagtcctcagttttctatctaacagagaatactggcagctaacagctctcagttaattcctctccatgacctcagctaaagag

SEQ ID NO: 914918 - DNA, 585 bp, Homo sapiens
atgaggaatacatatatatacatatacatacatacacacacacacacgtgtgtgtgtatgtgtagagagaataaaattgcttagaagaataactagaacaagcataggtagaaggcagaaaatatctcaaagtcattgacattatttgatcaaattccaattattctttcttctaaacacatagtaacattctactttttgattctttgtgatttattggagctttaaactaactcttaccagtcagccataagtgaaagtcacatgtcatttttagcttattgcatctaattcctgatgagaaactattcgtattatcttttctctttcccacaatagtactctttccttctttccaggtctcagagagaggagaacaagattaaaccaagtggccaagctgcccatgtggataggtacaatgagcaagaaataaacctttgttgtttgatgtcagtgagattttttttcttgtgtttgtggtgattagtgttgttactgcagtacaacctatgctatyccagttcacacagttatcactatgtccacaaactgcagcaaatgtgtcccataactaaagcaaaa

SEQ ID NO: 914919 - DNA, 659 bp, Homo sapiens
ggaggcatcatgctacctgactgcaaggctaaagtaaccaaaacatcccagtactggtatcaaagcaggcatatagaccaatagagcagaacagagaactcagaaataacactacacatctacaaccatatgaycttcaacaaacaagcaatggggaaaggatatcctattcagtaaatagtgctgggaaaactggctagccatatgcagaaaactgaaactggaccccttccatatgccttatacaaaaattaactcaagatggattaaagacttaaatgtaaaacccaaaattgtaaaaaccccagaagaaaacctaggcaataccgtttaggacacaggcatgggcaaagacttcatgacaaaaacaccaaaaacaattgcaacaaaagccaaaattgacaaataggatctaattaaactaaagagcttctgcacagcaaaagaaactatcatcagagttaacaggcaacctacagaatggaagaaagtttttgcaatctacccatctgacaaaggtctaatatccagaatttacaaggaggtggaatttcaagccaggattgctgttcctagggtcctggctttgaaacacatgctcacttgtgagttattttgatatctaaaacttcattaaactgcttgaactgccagtgaaa

SEQ ID NO: 914920 - DNA, 542 bp, Homo sapiens
atttgattctcagcttggtgttggttgttgttgaatagaagtggtgaaagtgggcatcttgtctcattccagttctcagagggaatgcttttaactttcccctttcagtatgatgtgggctgtgggtttgtcatacatggcttttattattttgaggtatgtttcatctatgcctagtttgttgaggattttttatcataacaggatgctggattttatctaatgatttttctgcatctattgagatgatcatatggtttttaattccatttatttgataaatgacatttattgatgtgcatatgttgaacctttcatctctggaatgaaactggcatgatcatgatgaattatttttttgataggttgtggaatttagttttctggtattttgcttaggatttctgcatctaacgttcatcagatatattggtctgtagttttggagtgakactggcattgtagtatgagctagggagcattctctctcaatctgatggaataatttcagtagaatttgtatcaattctctgaatgtctga

SEQ ID NO: 914921 - DNA, 525 bp, Homo sapiens
atgtatagctcagtccattgcttcagtgagtgcaagccctaagccttgccggcttacacgtggtgttgggcctgtaggtgcacagaagttaagaaytgaggtttgagaaccttggcctagatttcaaaggatttatggaaacacctggatgtccaggcagaagtttgctgcagggacagaatcctcatggagaaattctgttagagcagtgtggaagggaaatgtgaggttggaacccccacatagagtcccccccactggaacactacctagtggagctgtgagaagagggccaccgtcctccagaccccagaatggtagatctaccaactgcttgcactatgtgcctggaaaaaccacagacactcaatgccagcctgtgaaagcagccaggagtggagctgtaccctgcaaagccacaggagcagagctgcccaaggccatgggagcccaccatttttatcagcatgccctggatgtgagatatggagtcaaaggagatcattttggaactttaaggtttaa

SEQ ID NO: 914922 - DNA, 328 bp, Homo sapiens
ctcaaagcttaagagctcaataggtctgtcattgagtcttaagaaacaaacaaaaaaaaattaagttctaacagcccccaaattgttttaatatgcaccttctctttcccatctctttttgtaaatgatagaagaaaaatatggggaaagggaaatcattattttaatttcccagaattgtgatctctacaaactgattagacaatattgttgtattttatagaatttgtgcccaaaaagtggcatcttcatttgttcaggttaaagtgtacaaaagatactttgtatrtgtccaaacagttcaattccttaaaagatcacagagcat

SEQ ID NO: 914923 - DNA, 626 bp, Homo sapiens
  misc_feature 1, 2, 3, 4: n = A,T,C or G
nnnngttattcttaggcagtggaaaaggcaatgtctgggaatgatcctggaggaaagcgagactgatttttggctttgtaatggaaaacttgtggtttgcttttaagcctactgtacgcactgggttttcatgtggataaagaagattctcatagatcttttctagttttgatggggagaaaattaagttgggtacttcctaatttggttataactcttacagtattttttatttcagtatatcagagtactgtaaaatacacaaatcttgaaagtacagatcaatgaatgtttacatatttatatactcatgtaaaaaataccagctcacaatacaggacatttccacttctttggaaggccctcccaaatctccttgtagttaatctcctctgccaaaggtaaccactattctgagttctaccattacagattagtattgccctttttcaacttcagatgaatggaatcaggtagtatgtactcttctgtgtctggtttcttttgctaaacattatgtctagaagagtcataccttttgctgtgtgtatcaaaagtttattcttgctttgtaacattctcttgcataaatrtgccaccatttgtttattcatttttactgacaa

SEQ ID NO: 914924 - DNA, 595 bp, Homo sapiens
ttctcattgtggtcttcatttacatttctctaataatcagtgatattgagctttttttatttcatatgctggttggccagatgtatgtcttcttttgaaaagtgtctgttcatgccctttgcccastttttaatggggttgttcatttttttcttgtaaatttgtttaatttccttatagatgctagatatatttgtcagatgcatagtttgcaaacattttgtatcattctatatgaaaaactcctctgggtatacccagtaatgggatttctgggtcaaatgtttactctgttgatagtttccgttgctgtgcaaaagctctttagtttaattagttctcatttgtcattttttgctttcattgcaattgcttttggtgtctttgtcatgaagtctttacccatttctatgcccagaatgctatggtatgggttgtctctcagaggttttatagctttgggttttacatttaagtctttaaaccatcctaagttcatttttgtagatggtataaaggaaggatttagtttcaattttctgcatatggctagccagttatctcagcaccattcattaaatagggagtcctttcc

SEQ ID NO: 914925 - DNA, 625 bp, Homo sapiens
ctacaattactgcaaaaacgttttatatatttgttattggatattgtattgactctctgtatgtttttataagaaattgtatttgttagaatatgtttgttgtagcaaattgaatttagtcatctaagttgtaatgtacacatcagttctgtgatgattttgttataaatgattgtgctaactttatgttctatgcacacataaatgccttgaagttactccctagtcaaagagcattatgacccttgtctctgctttattcctgcatcccagtttcagaagaataagcttgtagttctaaaagacttatttataaagggaatgaaaagcttctttcatccacagaagaaaacagaagttacttccttctaattataagtagtaaaaagttaggcttatttatacatatagatatacttatgatggcgttacctaaaattggatatcactatttctaaaaactgacatatttttattattctagagacaamagcaaaatgtacctttagggcagatgttttttaaagaggtattctgtttggctctcaggtgaccaaatataaagttcctattccataatggatgataaatataatcctgtaaaaggatcgctttctttgtaagg

SEQ ID NO: 914926 - DNA, 416 bp, Homo sapiens
gattaagcaaacatttacagctgtagtgtgaaaccccagccttcttcattcactgagctcccagggcttcgtaactccaggtgatcagtgaaagagtgtattttggagaatctgactagctwaaaaacaaacaaacaaacaaacaacaaacaaaaacctaagatactgataacaatgaatggctcagccagatcaccctgcaatgaagttcatagtcaaaaagttctccccatgtgctcagacttttcaatcagctttttagtgcccctactcagataaccaagtcatcagacatctgaccaaagtctctaacatgaaaggcagagataaaaataaatggaaaaacctacttggagaaaactattttatgcagggaaaagagaacttttaaaaatacggcaaaaaccctatcatta

SEQ ID NO: 914927 - DNA, 678 bp, Homo sapiens
gattataggattgaacttgatgctcaraaattaaggacatactgtgagatagataggcctactttcaaagtggggtggccccctgaaggtacaatagacaggaaattaattggctatgtgtttaaggtggtcactggagttggaggacaaccaggatacccaggccagtttccctatgtagactcttggcttaatgtgccacaaactcaccccaagtggctacagccctgcctatgatattgcaaggcattagtggcttggggcagcccaaccaaaggaagcagaggaacctaaagtccctagcatctcccaggaaaaggaatccccaaagcctcagctgaaaccagttcttcaggccccacctgaggaaatgggatgtctgccccccatatgtgccagtctacctgtttttggcaagaatacacaggaggcagagttgggagcatctgaagagtcgggctcggaggaaagtgaggctcagtctccccaccaagtggaacagaagcccccattagaaaaaaacaaagaagatggaaagggtgatgcagctaggcacctctgctctggccaaccatgggctttgcagatgccactttgagagaccaggacacaagtttttgatgaccaggggcagatagaaggtggtcctaggcattatgttcatcagcctttctccac

SEQ ID NO: 914928 - DNA, 603 bp, Homo sapiens
gtctgtccataaatatttttctaccatgtggctgtgctggagtctcactgagcctactgtggatccacagtctgcctgatttgcaaattattcattgctcacttaaactctgttaaatttaattttatttctctaaagttttttttcttttaaaagttttccaattttttctatgatgaaaaatatataatgtgttgttcggctttttttttttttttttttttgagacggagtttcactcttgttgcccaagctggagtgcaatagtaggatcttggttcactgcaacctcagcctcccgggttcaagtaattctcctgcctcagcctcccgagtagctgagttacaggcacttgccactaagcctggctgattttttgtatttttagtagaaacgagctttcaccatgttagccaggctggtctcaaactcctaacctcaggtgatccacccacctcagccacccaaagtgccgggattayaggtgtgagccactgtgcccagcccaaattttttctatgatgaaaaatatataatgtgttgctgggctttgatttttttttttttttggaggtggagctttgctcttgccacccatgtta

SEQ ID NO: 914929 - DNA, 597 bp, Homo sapiens
gtaatatctaaaaataattgggccctatcttggcccttaaaactaacttctacatccctagtgagaataggagcagctcaaagtgttcaacagagttctatcctgtctcggaccagatggacagytatatacttttcaaccttatgttacgaatatagctgttaatctatggggtcgagatttacttacagcatgggatatgagacttacaaatgaaactattgataatccaggatttaaatgttaaagaaaatgggatatcagaatggaaaagccttaggaaaatccctacagggaaaccctgatctaatatcaataactggacacacagatagaaaagggttaggacatcaggacttctgatggggaggtcattgatatttctcctccacctactgctttgccgctagagtggctgactgacaaacctgtatgggtggatcagtggcccctatcacaggggaaactgattcaactccatcaattagtaaaagggcaattggaagcaggacatatagaagagtcggttggcccatggaattcaccagtatttgtgattcctaggaagtcaagaaaatggtgattgctgcatgattt

SEQ ID NO: 914930 - DNA, 597 bp, Homo sapiens
gtaatatctaaaaataattgggccctatcttggcccttaaaactaacttctacatccctagtgagaataggagcagctcaaagtgttcaacagagttctatcctgtctcggaccagatggacagctatatacttttcaaccttatgttacgaatatagctgttaatctatggggtcgagatttacttacagcatgggatatgagacttacaaatgaaactattgataatccaggatttaaatgttaaagaaaatgggatatcagaatggaaaagccttaggaaaatccctacagggaaaccctgatctaatatcaataactggacacacagatagaaaagggttaggacatcaggacttctgatggggaggtcattgatatttctcctccacctactgctttgccgctagagtggctgactgacaaacctgtatgggtggatcagtggcccctatcacaggggaaactgattcaactccatcaattagtaaaagggcaaytggaagcaggacatatagaagagtcggttggcccatggaattcaccagtatttgtgattcctaggaagtcaagaaaatggtgattgctgcatgattt

SEQ ID NO: 914931 - DNA, 568 bp, Homo sapiens
tcctaaaggcctctcctcttaatactttgcattagagattatgtttcaacatgaattttgaaggggcataaatgttcccatcatagcagaggtataacgatcagaaggtgtgcaggtgttaargggataataaataacaccatctttataccacatcaagtcagaaaaaaacagacaaagacatgtgagtaaggtagatggaaataaaacattaccttataactgatgaagctgatattgaagaatgggcttggatcagccagtctggtggatttgcagtcattttacctctgaattttagagatttaccctgctgttggcacagacagacaattaggctgacctcactgcatagctgatggtgtgaaggagttcttgggcaggtgagctcccaaatgggatacacagaaaggactgagctacatatgcctagtttcttctaaactcatcagttaaatcatttttacaaaatgaagagtaaataaggatatagaattagaccagaagtgaggaaaagaggaaaactttaaaggtcactaatttttgacttttaaaaaaataatagatg

SEQ ID NO: 914932 - DNA, 631 bp, Homo sapiens
cacatggagtttaaaccattcagaaatagktttttctcacctggttttatgctaaccaaaacaactataatattaatacttttctctttacaacctcccctgcttgttgacctatctaggagtggtcgcaaggtgtgcaagctgctgagtcaccctgactgcatcaaccccaggagcttgaggggtgaacaatagtattgagcaatagtaaaataacaaacagtgcagacaaggcagacgtctcaaaaagtgctcggtgcaattgtcactcatccagagtcaacattggtgacacagttgtttcttcaaacagagttcactctgaaaaaactgagcaaggtggaatttactttaaatttcatgggttgtgaaatttcaactaatgtcataattaaaacttcctacatattgctttaggcatctctgtcttttccccaaaattttctccatggcatcagcagtacctcagcctcctccacagcctcccagctcttcctttttcctcctgcacggcttttggcatcccaccattttccacagcaatgcaggctaactgtgagcttccacagcctctcacagacatgacttcacccacaaacctctgtgaggctcaagtgtacccctttttgtt

SEQ ID NO: 914933 - DNA, 480 bp, Homo sapiens
agcagctgtaactgattgaaatgtattttatgaacaataagacttgaaagttaaaattgctcctttatccatgtactgaagaataaatattgtgaaagcagtcataaaaacagaagtaatcttttggtacctctgcattagaactctttattaaccaggtgtattgccattcaacagtaatattttgaaaggaatctctatttttgagcaggtttcaacttctgctttttattttaaacagtagacttgaaatattcagtaaccatgctataaagagctatgctgtaagacagctttttctatttatagagcatggttttgaaattataacaaagcattggttttatcctgaaatcaycaggaataggagctactaacacaagagtcagcctgtcttttgaatccaggcattgacttccttttaaatatgaaagtcctagatggcaccttttttggtacaaggccctttcatctacattc

SEQ ID NO: 914934 - DNA, 556 bp, Homo sapiens
gtaacaagtgaattctggctttattacttttttcatagctgcttgttaaaaagagcctggcaccttactttcctctcttgctttcctctctcactctgtgaactcggaacatgctggttctcctttcctttctgccatgagtggaagcagcctgaagacctcaccaaaggcctaagagatgccaatgctatgcttcttgtacagccaccagactgtgagccaacaaacctcttctttataaattctcagcttcaggtattcctttatagcaacacaatggactaagacagtttctaatttctctacacacctagaaccagcatgtcctgagtgggtgatcttaatacctgataatcacagacataccatttgtgacaaagttttccaaattggagacaatctggagggtatcaatcctaccccaggtcctggcttgcttcagraatcctcgattgagggtggatatgtttcttcccatatctccatgaaccagtatctcctatagttgaagaccaccctggagccaaatgtacaaataggtcttgttatctgaggg

SEQ ID NO: 914935 - DNA, 594 bp, Homo sapiens
aagctgccaaggcttggggcttgcaccctctaaagccatggtctgagctttacattggcccctttcaaccatggttggagtagctaggatgcagggcaccaagtccctaggctgcacacagcayggggaccctgggcccagcccatgaaaccactttttcctcttaggcctctgggcctgtgatgggagggactgtcgtgaagacctctgacatgccctggagacattttccccattgtcttggggattaacatttggctctttgttacttatgcaaatttccacagctggcttgaatttctcctcagaagatgagattttcttttctattgcattgtcaggctacaaattttctgaacttttatgctctgcttcccttataaaactgaatgcatttaacagaacccaagtcacctcttgaatgctttgctgcttagaaatttcttccgccagataccctaaatcatctctctcaagttcaaagttccacaaatctttagggcaggcacaaaatgtcaccaggctctttgctaaaacataacaagagtcacctttactccagttcccaacaagtccctcacctccatctgagac

SEQ ID NO: 914936 - DNA, 658 bp, Homo sapiens
tttctccaggatcacaataatatttagtcatgtgtttctgagaaataatttaattccctaaacaaaaataggtggaatttatctcagaagtttcctcctttctatcattcaaaactatggaataacactgtttattacttgttaaaatctttataggagactgtgaaatttgtatattttccatatgggattcgttgcggtatgttttttaaaagctttccatttgtaaaagttttgaccaataaatgtgtttttatgcctgaaaaaaaaaaaaaaaacccaacaagccagaaaagagtggaggccaatcatcaacatttttaaataaaatcattttcagcccagaattttgtatctggccaaactaagcctcataagcaaaggagaaataaaatcattttcagacaagcaaatgctgagggaattcatcactaccaggcctaccttgcaagagctactgaaggcagtactaaatatggaaagggaaaactggtaccaccacagcaaaacacacaaaaatataaagaccaatgacrctatgaagaaatggcattaactagtgtgcaaaatcatgatataacatcatgttgacagggtcaaattcacacataataatagtatccttaaatgtaaataggctaaatgtcccaattaaaag

SEQ ID NO: 914937 - DNA, 583 bp, Homo sapiens
acaggagataaaagaaaaaaaatacaatgaatacacttataagaaaaaacctcaaaagagcaaactaagaggaggtagataatgaggtaggggtagatctttttattttgtttgagtmttgctctgtcgcacaggctagagtgtgttggcacaatcttggctcactgcaacctgtgcctcctgggttcgattctcctgcctcagccttctgagtagctgggattacaggcgcccacgaccatgcccagctaatgtttgtatttttagtagacacaaggtttcaccatgttggccaggctggtctcaaactcctgacctcaggtgatccacccgcctcaacatcccaaagtgctgagattacaggtgtgagccactgcacccagcagaagtttttttaaagggcttctcaaatctatagagagatatcaatattcaagtacaaaagggttgtggaacactaagcaaatttaacccgaagtagactacctcaagacatttaataatcaaacttccaaaggctagggacaaagaaaggatcctaaaagcatcaagtgaaaagtaagaaataacatacaatggagct

SEQ ID NO: 914938 - DNA, 662 bp, Homo sapiens
ctgtaaactccaagagtgctaagcccatgtctttytttataaactgctttataggcagtgcctagaaaagaatatgtgtttaataaatagctgttgaatgaaaaattaatgaaaaagtgattagtgaaagcagaggcagtaagtgatgggtagaaacatgttttttaaaaaaagacattggtactgatccagagatatttcaataatgtgaactaatgataagagtttggttcctttgtttgttgagttgcaaaaaagcagaatggtggcattctaagagtcactaaaagacagaaggtgggagatggggaagaaaaatgtcttaacttcccacaaattcttagatttctattaagtttcagttccaactgattgtgttcacagtccttcatttttatatcataacaataaaattaacgtattttatatggcatttataaaacaaaagttctaaggtgccattaaaataaatatatcttatgtagctacacatggaattatttagcagcaattactgttctgcagaagatttttcaatagaaatttttgcttaatgaattaaaaatccacggtaaaatggacaatgttttgataattttgagacatactgtaaacactatgaaaagacctgcctccttatttgaagctacactgatcaatgc

SEQ ID NO: 914939 - DNA, 519 bp, Homo sapiens
aacttaacaatttaatttccacagtactttcagttgactgctttccggggtgcgcctagttatgaggccagtggcagagtattctcttcctcagcttggtgtggacagtagattcccttgatccctgaagatctactgtcataccctggaggcaagatgctgggaaatgtactatgaaaaagacagtttttgacatcttcctgccaaagaccatagagaaatgagtaatcatttattgacagtttaaatgtttgacccattgttcaccatctgcatagcgaaaccccctgaatctcagttggattttaacaagaacctgcagtgtgagttgcactcataaccaacagactgactatgtaggcaaatacctgtattgagatgagacaatatagaaatattggagtgaccaagaacactgggcctggtgcataaaratgggggttcaagtcctacttagaagatgcacaaacctgacaaagttatagagacctctctgtgcctcagttccctgttctgagg

SEQ ID NO: 914940 - DNA, 599 bp, Homo sapiens
gtgactttgggctagtcacttaacctcttgaatctccagttttctcatctgtaatggaaataataaaagcatcttcctctgattggtgtgcaggtcaaatgggataatwcatctcaagggctggcaggatgcaggggcgagcctgtgggcagacaggcagactctcctctctccctatgcttcccccctccctgggaacacccacagtgcagacacttttcctggcctcatcatgtagctagctgcctgaaagacaccctgtgggcacttggggagagaactggaagaatcgtgagaaaagcctggttgggcccaggtcacacagtgacagccaggacttctgagatttttgttgcatccaaagagagttctcactttattacctacctttgacatgtgggaaactgaggtgcagaagtagatgcaagctggtggcagaacggaaacttgctgtcagcagacacagcctacagccaggctggtgggaatccaggatgtccttctgagtcctgagggagaaggggcagcttcacctttctaatgtgcctcgtgcacaaatactaaacctgggattcttccactgaccctggcccggggtg

SEQ ID NO: 914941 - DNA, 591 bp, Homo sapiens
gcaccatcatgcccagctaattttgtatttttagtagagatggagtttctccatgttggtcaggctggtctcaaactcccaacctcaggtgatytgaggtgatctacctgcctcggcctcccaaagtgctgggattacaggtgtgatccactacacccagcaaggtggagtttcactcgtgtagcccaggctggagtgcgatggcacaatctcagctcattgcaacctctggctcctgtgtttaagtgattttcctgcctcagcctcccgagtagctgggattacaggtgcccaccaccatgcccagataatttttgcattttcagaagagatggggtttcaccatgttggccagtgtggtcttgaattcctgacctcaggtgatccacctgccacagcctcccaaagtgctgggattataggcatgagcccccatgcccagcccaaagtgatcttattgatacaggagctatgtagaaagaaattatttaggcagataatgagggataaagagtcctcgacagagcttcccttctaacaaaaagcagcccagaaaagtatttcttttctcttagaaagagcagcctgaaa

SEQ ID NO: 914942 - DNA, 718 bp, Homo sapiens
aagataaatgatgaagacacagtagtaccttttatgatttagtctccaaagttgcataccatcatttctgctttattctgttcattagaagyaaggcattaagtccagctcacattcaagagggaaattaggttttatttattgaaggaaggaatatttttaaaaagttgtgaacatacatattttcttgagacagagtctcactttgtcacccatgctggagtgcagtggcatgatcatggctcactgcagtctcaacctcctgggctcaagtgatcctactgcttcagcctccccagtagctaggactacagtcatgtgccaccatacccagctattttattttatttttttgtagaatcaggatctctctatgttgcccagtctagtcaaacttctggcctgagcaaacccctctcctcggcctcccacagtcctgtgattacaggtatgagccactgtgcctggccaagaacatattttaaaacaaccactgagtggcaactgagtgaagtagagtaactacaacacaaatgcctgcataatgtggtacttactagaaggagccaattggccctgtataacccctgagagatttgtaacttttaagcactgaatccaacaagaagccagggaaatatgcagggctgaaaacaatagccttgactaaaaatccatgtaggaaatagttggactctcagatcccctcactctaaca

SEQ ID NO: 914943 - DNA, 612 bp, Homo sapiens
atgctctgcagctgctcctgaaggcagagacgcaagcaatggagtaacaaaggaagcctgaggagcccctggcacccgaggaccttctctctggccgttcacagccacttatgtttcaatgcagaagatttcaagactggtttgagaaaaataatcctgttttggggattaggttccctgtcaaaggccatcagatggacagctatttatcaggcaattagcctaaggctcttaggtaatgataaaaaaaaaaaacaaaaaaatcaaaaaaaaaaaaaaacagaaaacaaaacaaaaaaatcccttatattttcctattggaatcttttattctgttttattgaggcttaagcaaaacagctttgcccataactcactgtggcctggagttatgacaccaacttgtatttggccaactaagaaagaggccaaactgcattcttcttagaaggtctattcagttgataaatggcactaaactgttggtttttttcatataacctttactcataagttgcattgattatgctctaagagataagggactgatggtaattcaaatgggcacctctgaaaaratttatcagttttctgtcccgttccagccagatt

SEQ ID NO: 914944 - DNA, 430 bp, Homo sapiens
ttatcatcagttgattttttatatgacataaaaaggggtccaatttcagtcttctgcatatggctagccaattatcagagcaccatttattgaatagcgagtcttttccccattgcttgttttggtcaactttgttgaagatgaaatggttttacgtatgtggcactatttctgatatctctgttctgttccattggtctatgtgtctgtttttgtggaagtatcatgctgtttcagtcactgtaggcttgtagtatagtttgaggttgggtaagatgatgcctccagctttgttctttttgcttaggattgccttggctattcggatttatttttggtactatttgaattgtaaaatcrgtttttggaattctgtgaaaaatgtcattggttttttgcagtagtttcagtaggatggtaccagctcttc

SEQ ID NO: 914945 - DNA, 586 bp, Homo sapiens
ttagccagttccaaagtcacttctgcatcttcagttatccttacagcagtgccccactayctggcaccaatttactgtattagtttgttctcatgctgctaataaagacatacccaagactgggtaatttataaagtaaaagaggtttaatgggctcagctccacatgactgggaaggcctcataatcatggtggaaggaaaaggaggagcaaaggcatatcttacatggtggcaagtaagaatatatatgcaggggaactccccttttatgaaaccatcagatctcaaaagacttcatcactcttacaagaatagcataggaatgacctgccaccatgattcaattacctcccaaggggtctctcccatgatacatgggaattatgggagctacaactcaagatgagatttgggtgaggtcagagccaaaccatatcaattgaatgcactgcttattttaccaagattttgactgaaaagacatattttcagatttgatcagactgctttgaggaattgaagtttctttatggagatgataaaaagccccttcgttagcccagcatggtggtggatgcttgtagt

SEQ ID NO: 914946 - DNA, 605 bp, Homo sapiens
ttttggtgttcttaaaatttctaactgagatgtattctctccctcttactccctcaccatgagatgggaccattcagaaattagccttcctaatgacacaaaactaagttcctaaataaaaaaggagccaaaatcatttgagttcatccagtatgctttctttgaaagatcctgataaaaagggatgaaactaaaaaaaaatatcaattagctgggcctggtggcatgcatctgtaaatccagttgcttaggagactgagcagaattgcttggacccaggaggtggaggttgcaatgagctgagatcgcgccactgcacgccagcatgggcaacagagcaagactctgtcttgaaaaaaaaaaaaagaaaagaaaaaagtaatcaccaaaaagaaaaatatctcagagtaatctgagctatcagaggtatgtacaatttatcaggcccaaagacaagagtatggaacttcggtcacaccccctgctctcacgcctgtggagcaaatccttaaaattatttttgtgcttgactagctgcctcactcattatctycatgtttctgggatttgtgatataaagaataatgtatagccaatcaatagct

SEQ ID NO: 914947 - DNA, 686 bp, Homo sapiens
tttccaaaatgttggattggatgatataaattcaggaaggaaaaccagaatttatgataagctagagcctattaaacatgtatttgaaatttcgacttagtrttttcaagatggttgtgtttcagattcatcatgagcatttagttttatctaaaagataatgctcatttggagtatatgtatataccttcaaaaccaggaaaatatggagtaaaacttcttgagtttattatccttaaattcttattaaagtttctcataatgtttattgccatcctattttaaaaaataaattatttaaggtgacttaaatacaaaaaacaagagggctcttatattccagatagtaaatagtcatgactattttttcattgtatacttgaggatttagatagatcgatgggtttaggtggcactggcttactgtctggtgagtcatttaatcctttcactgaagtgatatatctgggtgagtctccactgaagaaattacagtggtctttgatcataaaattccagattagtgcagatataaaactcttggcttggtatcctgagtttgtccttttgaaaagactaacattttctacctttgaaaagccaaccaaaaaataatcaaaccaaaccctattattctactattctactgagagttttagagaggtcagattgtgagctggttcaaa

SEQ ID NO: 914948 - DNA, 576 bp, Homo sapiens
ccggggaccatggggccactgggacagcataactaaccctgatatgggataagcatggatcagcctaagaaggcttccaagaggaggtgtcatttgatctggatcaaaaaagaaaagcagaagctttcctgatgaagaatggagtacaggcacttcagaaagaagcatataataggtgatgccatagttacttgaaagaggatgctattttgggggaagaatagaagttcagaatagctggagggtatgtggcacagagtgatgggagatgacacaagcaaaaatgtgaaggacctttgaaatttttgtattgggggcctgacacggtggcccacacctgtaaccacagcactttgggaggccaaggtgggcggatcacaaggtcaagagatcgagaccatcctggccaacatggtgaaaccccgtctctactaaaaatacaaaaaaattagctgggcgtggtgrcgcatgcctgtagtcccagctattcgagaggtgaggcaggagaatcacttgaaccgggaggggaggttgcagtgagcaagatgggcatggactccagcctggtaacagagt

SEQ ID NO: 914949 - DNA, 579 bp, Homo sapiens
atgaggtcaggagatcgagaccatcctggctaacacggtgaaactctatctctactaaaatacaaaaaaattagccgggcgtggtggcgggcacctgtagtcccagctactcgggaggctgaggcaasagaatggcgtgaacccaggaggtggagcttgcagtgagtcgagatcgcgccactgggctccagcctgggagacagagcgagactccatctcaaaaaaaaaaaaaaaaaaaaaaaaaggaacatttgtaatctcccagagattgccaaggaaaacattctcctggctgaatttatgtagagttcatcatctaagcataaaatattttataaaggaatgggccaatcaaataactgctatgcggttgacaccataaaccaagttagcttagtaccactctaaatagttgctgggaatataatgattttcaaagacatgatctctagaaataaataactaaaagagaagcacggtgtcatgcatttatgcatacacataagcagggactagagatcaagaatagaaataaaagaggtttttacacttggggtgctaaggtcgcaatgatttatt

SEQ ID NO: 914950 - DNA, 625 bp, Homo sapiens
aataatttaaaatccctgtccagtgaagtgtatattcttgtaggctctgtaaaaagatgccctgtgcattgtcatggttrtttctcagtccctgactcttcttccgtgactagatgtttttcttactcatgtgatcagttgctaattcagacgtggctgtcatgcctgtgttattaagtaacgccatgtttcccaatcaaaaccagtctctattaagcaactccaaatattccaaaagcattctttaaggaagaaacaaccggattgcaaaatagttttttctgaaatttcaagaagtgaaaagtttgatcagaatttattatgtcaaatggagagtttgtgtttattattaaaatatgccctatattttaatatggtctagcttgtgtctatctggctatttctctaagtgtttagttaactgttataagaagataacaacattacaaatgtccttgggggtgaaaaaacttgccagaaaatactaaaaagcttaatttacttgcgtttttttttgtagtacttattgtattttagttacaactttactatgtcttttgaaatataaatcctgatagctttaacttcatagtagtctctactatgtggagaatcttagaaatgt

SEQ ID NO: 914951 - DNA, 653 bp, Homo sapiens
aagcaacaacatactcttgaactcattttgaaatagctacaactctatttttttaagatgtaagttgctggactttattgcacattgacttaaactgaaagttgtccaaatgcctttgaataagagatttaaagatgagggccataccactttcagagggagactttccttctcagtggaactaagcggtatttccaaaatatctggctggatcttaaaagtcattcatgacaggtgataattgattacatattgagttttgccagaaactctaatgtcattggcatatagagacatagcattaacacagtgtgtatgtgcagaggactggaacacaaatagaaggcttcataaattaaatttaatgtttcgtagctcttctttaaacaaagtaggtgtggaaattattttaagttaaaatttatttctgtgcaaaacaaaaatcagtctctaagtgtatatggggaataagaaagcagaatttaaggtcaagtgtaacactaattgaacgttaaaagaaagaaaatatgttttaatatttaaaagagtcaaatattgaaatttcaaataatttcaaacatgggctacacataaaataataakaagataattatgacaataacaattacacatgcacataccattcaatagaa

SEQ ID NO: 914952 - DNA, 681 bp, Homo sapiens
tagaagagaaacaaaatatacctatataaatataaacctatagtgtgtcaggttaygattaatgcaatggaacaaaaagcaagacccgagaccaaagtaggccctctttgaaaaaataacattagagaaaagacctgagggaagtaagaaagagtgctttgagggtgtctgtgaaaagttcattcaagatggaggaaacaaagtacaagggtacaaggtggaggaagcaaagtacagagtgaatgactggaccagagaagcaagaagatgagattgaggaagttgagaaaagaaatattaccatacagcctggtaggccatagaaagtactttggatgttaattggagtaaaggtaaaaaggaaagccactggagaatttgagcagagagtaagccttatattttaaataaacagtaagactcacgttttaaatgaatcatactgactttgatgtgaaaaatagaatataatgaggcaagtataggaatagtcagaaactattagaatattgtaaggatttggtggctagatgaagatagtcatagtaaaggcagttgagaagtggtgaaatcctggatatattttgaagataaggggacaggatactccaattgatttgtatggaggataagagagaagaatttaaaagttttggactgaacaatgggctaaacagagct

SEQ ID NO: 914953 - DNA, 646 bp, Homo sapiens
cactgcaagctccgtctcccaggttcacgccattctcctgcctcagcctcccaagtagctgggactacaggcgcccgccaccacaccaggctaattttttgtatttttagtagagacggggtttcaccgtgttagccaggatggtcttgatctcgtgacctcgtgatctgcccacctcgacctcccaaagtgctgggattacaagcgtgagccattaatttacattcttaccaaccgtgtgtaagcattcccttttctccacagtctcgccagcatctgttgttttttgactttttaatcatagccattctgactggtgtaagatggtatctaatggtggttttgatttgcttttctctggtaattagtaatgatgaatatttttcaaatatttattagctgcttgtataaattcttttgagaaatgtcttttgcccattctttaatgaggttgttttttgcttgaagatctgtttaagttctttatagagcctagatatcaggcctttgtcgggygtacagtttgtaaatatttctcccattatttaggctgtctgttcactccgttgatagctttttggcagcacagaagctcttttgtttcatttggttacacttgtcagtgtttgctttggttgtaattgct

SEQ ID NO: 914954 - DNA, 646 bp, Homo sapiens
cactgcaagctccgtctcccaggttcacgccattctcctgcctcagcctcccaagtagctgggactacaggcgcccgccaccacaccaggctaattttttgtatttttagtagagacggggtttcaccgtgttagccaggatggtcttgatctcgtgacctcgtgatctgcccacctcgacctcccaaagtgctgggattacaagcgtgagccattaatttacattcttaccaaccgtgtgtaagcattcccttttctccacagtctcgccagcatctgttgttttttgactttttaatcatagccattctgactggtgtaagatggtatctaatggtggttttgatttgcttttctctggtaattagtaatgatgaatatttttcaaatatttattagctgcttgtataaattcttttgagaaatgtcttttgcccattctttaatgaggttgttttttgcttgaagatctgtttaagttctttatagagcctagatatcaggcctttgtcgggtgtacagtttgtaaatatttctcccattatttaggctgtctgttcactccgttgatagctttttggcagcacagaagctcttttgtttcatttggttacacttgtcartgtttgctttggttgtaattgct

SEQ ID NO: 914955 - DNA, 599 bp, Homo sapiens
acataaaatgttcaggaaagccttctccgataagatggtgtttgcatggagacctacaggaactaaaagaatgaggtcaggcatggtggctcatgcctgtaattccaacacttccttcaatacatgcaggcaagattgtttgagcccaggagttcaataccaacctgggcaatatagcaagacctcatctctatagaaaactttaaaaaatagccaagcgtggtggtgcatgcctgcagtcccagctacttggaaagctgaagtgagcagataatttcagcttgggacgtggaggctgcagtgacctgtgattgcatcatggcactcgagcttgagtgatggagcaagactctgtctcaaaaaaaaaaaaaaaaaaaagaatgagctgtgaagctattctggagaaagaacctcatgtttcatgtgtctgagaatcagttaggaggtctgtgtggcccagaaggatgggtgaagaggayaagtggtaaagatgagatcaagaggtgttaagaccaatgcagataggacctcagaggacaggtgaccatacagcctggtttacctgcctcagaaccttcccacttactgggttctccacc

SEQ ID NO: 914956 - DNA, 679 bp, Homo sapiens
cagttcaagatgagatttaggtgggcacatagagckaaaccatatcaagctccttcttatcactgaggtatcaactcaagtgtcatctgcttaggtgcctctcctgactgctaaatctaaagtgcaccctccccttccatagctctctgccgtattattcagttttatttataaaaataagagataccatgataagaggtacctgaaataaaccaacatgtttcttgtctgtctcccctaactacagtgtaaatgccagtaagtagtgatcttatctgtcttgctttcagctgtatgccagcccctagattagtgctcagcacagaaatgatactcaatacatatttggtgaataaaagtatgagttgcatttcttccagcctttgtccatcatcctcagaatagggcatcctcacctcactcctgcattcctttaatatctgccttagctggcttccctaactccagtgccttgttctcctgaggagcttgatcaccacttttaccacatcacaattcagcaattctgtatcagcctataataacaccctatttccaatcacaacaattttttagaatgtttggcatatcccgacttactgttcttgtccaactctacttcttcctattcctacacagaccctttcctctatgtaggtcagcatctttagtctcctcc

SEQ ID NO: 914957 - DNA, 601 bp, Homo sapiens
actgccttacaagagggaaacgtccttcctgggttggaaatgggagcctggagataaagtggagataaagggggaaaaaaaagggagatagagggaagaggatggcaggtrgagtgttcgtgaggatcagggattctgaactgccttttgccccactgttgtaaatgctaagagggggtactatcagagaccactggatagattttgtgtcttagagcacaggggcttgttcttacctcctgtctggagccctgggaagagaacctcaaagtgttttgtgctagcgtgggacagaccagtaaagtgtgaacagcagtatggcaggcctgggaggagagaaggtgtggagactgccatgcatacagcatctcccacacttcccacacctgccacaagccaccctgccccaactccaacacttggggaactagaaagtgaagagaggatcagtggagaaagaagcctaggatctggagaaaggggtagggttgccatgtaaaatacaggctgactagttaaatatgaattttagttaaagaacaatttttaaaatatgagtattatataagacatacttatattaaaatattttttattgttt

SEQ ID NO: 914958 - DNA, 584 bp, Homo sapiens
tgggaataaaaagaaaacatgtgttttgtaggatattatgcctaagctatatcttaaatggtaagaattcaccaggagcaaaatgttaggaatttcttgtcagaagaaataatgtaagcaaaagcatcactattcacagcaaacccaaactggctgatatctgtgataggcaaaattctaagatggcctctaatgtggtttggctgggtccccactcaaatctcatcttgaattgtacctcccataattccaacatgttgtgggaggaacccggtgggagataattaagtcatggaggttgattcccccatagtgttctcacagtagtgggttaagtctcacaaaatctgatgattgtataagggaaaaccccttttgctttcctctcattctgtcttgtctgctgccatgtaagacatgcctttaggcttccactatgattgtgaggactacccagccacgtggaactgtgagtccattaaatctmtttttatttataaattacccagtgatgggtatgtctttatcagcagcatgacaatggactaatacaacctctatttttttaattttaaaataaaatc

SEQ ID NO: 914959 - DNA, 692 bp, Homo sapiens
caccactggggtatgaaaaaaactcctgcagctagctcagtgtctgcccaataggctgcccagttttgtgcttgaaacccagggccctggtggtgtaggcacccaagggaatatcctggtctgggggttgcaaagactgtgggaaaagtgtagtatctgggccagaatgcaccattcctcatggcacagtctagagggcctaattctaatatgctagtatattagcatgcacaatatatttcatattatgaatagatactttctatattctaaattttataaatgttatgctattatttataaggtagtatactgttagatgaagcatattgatagacgaagtagataataatatgtttagcatctactctatgtacttgcatattatatagtttactatatatttcaaaagcagagtgttagttttcagattataaaattattccaccttggaactaatcacatatatggcttctgttctttctttccgtctcttcttctattcctagctcttcactttgactttttttctgctttctagtctcctttttattgtactataaattaaatgagacagaatttagatagataatgcttggaaacaagtagatttatttaatcagaatagcagggatcttaayaatacagccatattgaaagaattcaaaccaaatcagactgatttataatca

SEQ ID NO: 914960 - DNA, 581 bp, Homo sapiens
aggagataaaagaaaaaaaatacaatgaatacacttataagaaaaaacctcaaaagagcaaactaagaggaggtagataatgaggtaggggtagatctttttattttgtttgagtmttgctctgtcgcacaggctagagtgtgttggcacaatcttggctcactgcaacctgtgcctcctgggttcgattctcctgcctcagccttctgagtagctgggattacaggcacccacgaccatgcccagctaatgtttgtatttttagtagacacaaggtttcaccatgttggccaggctggtctcaaactcctgacctcaggtgatccacccgcctcaacatcccaaagtgctgagattacaggtgtgagccactgcacccagcagaagtttttttaaagggcttctcaaatctatagagagatatcaatattcaagtacaaaagggttgtggaacactaagcaaatttaacccgaagtagactacctcaagacatttaataatcaaacttccaaaggctagggacaaagaaaggatcctaaaagcatcaagtgaaaagtaagaaataacatacaatggagct

SEQ ID NO: 914961 - DNA, 661 bp, Homo sapiens
ctgtaaactccaagagtgctaagcccatgtctttytttataaactgctttataggcagtgcctagaaaagaatatgtgtttaataaatagctgttgaatgaaaaattaatgaaaaagtgattagtgaaagcagaggcagtaagtgatgggtagaaacatgttttttaaaaaaagacattggtactgatccagagatatttcaataatgtgaactaatgataagagtttggttcctttgtttgttgagttgcaaaaaagcagaatggtggcattctaagagtcactaaaagacagaaggtgggagatggggaagaaaaatgtcttaacttcccacaaattcttagatttctattaagtttcagttccaactgattgtgttcacagtccttcatttttatatcataacaataaaattaacgtattttatatggcatttataaaacaaaagttctaaggtgccattaaaataaatatatcttacgtagctacacatggaattatttagcagcaattactgttctgcagaagatttttcaatagaaatttttgcttaatgaattaaaaatccacggtaaaatggacaatgttttgataattttgagacatactgtaaacactatgaaaagacctgcctccttatttgaagctacactgatcaatg

SEQ ID NO: 914962 - DNA, 659 bp, Homo sapiens
tcttagacactgtgattagcaaggaaataagagaggtaaaaggaaaggcaaaaactaaagaaaygctttctataccaggtatctccaacttcctgaattatttccctgtagtttcacacacataggaagcaaattaactcactcatgtcccatgagtaccatctagtgcctctaaaagcgatggtgttgaaaagattataatgcttgttactgatagtgtttactttgcaattaggtagctttataaaatgtcctctgtaaatacaaatttttcttttttaaatttgaaaaaatatttattttaatatgcaacattttctccttgcacattttacttttttatcatagtttcaagttcttcatacatctgagcagaattagaccgatcataacttgtcctaatgtgctgaagtggatactagtgtggtggaagaaaatgagagtttcgtgagagacaaatatatcccaatttacttgatatgacatatctctttattcattcatcactttgtttcctgtggatacaatatgaagttctgccaaaacattgcagattcacagtggcttaattgtatatgttgtcattatatggcaattttcattaatttgtgacatatgtgattatgtgaatatagaataacaaaacataaactgaatca

SEQ ID NO: 914963 - DNA, 602 bp, Homo sapiens
atctcttgtgcctttggactcaaatcacttatagactttggatctgggaagtgcagagaatgaagttttacratggtgcttcctcatcgacatcaagaaacacagtctgtgtcaggcaccactgatctaaatagatgagggtgctccctgccagaggcaattggcctggaggctttcaataccaggcactgcccagctgtctgggactcggggcacggacggccaccgtaatggtgtgccacacagcccagtgtttaggaagttcttagtctaaaaaaaccaggctgagtgtgctgattacttttgtggctttcagtaagttgcaagaagaaatagacaggcttcagccgaattggcacatcaggaggccatgcagtcttggataaaagccacggaatcttgcagaaggaggactttccagcctgcaccaacaatcccaaattggaagaggcatgtttcctgcagaatgcaaaagctgtatgaacgctcccaagttggagtaagtgagagttagtcagagaggcgggtaaacacctgggaagtaagcctgagagcaggcttacaggctgggtgtgtgacctgcatggtcacacatcacccca

SEQ ID NO: 914964 - DNA, 602 bp, Homo sapiens
atctcttgtgcctttggactcaaatcacttatagactttggatctgggaagtgcagagaatgaagttttacaatggtgcttcctcatcgacatcaagaaacacagtctgtgtcaggcaccactgatctaartagatgagggtgctccctgccagaggcaattggcctggaggctttcaataccaggcactgcccagctgtctgggactcggggcacggacggccaccgtaatggtgtgccacacagcccagtgtttaggaagttcttagtctaaaaaaaccaggctgagtgtgctgattacttttgtggctttcagtaagttgcaagaagaaatagacaggcttcagccgaattggcacatcaggaggccatgcagtcttggataaaagccacggaatcttgcagaaggaggactttccagcctgcaccaacaatcccaaattggaagaggcatgtttcctgcagaatgcaaaagctgtatgaacgctcccaagttggagtaagtgagagttagtcagagaggcgggtaaacacctgggaagtaagcctgagagcaggcttacaggctgggtgtgtgacctgcatggtcacacatcacccca

SEQ ID NO: 914965 - DNA, 681 bp, Homo sapiens
accagctggtccttatcacagccatttcaaacctgtacgttcacttttggccttggctcctgcctcctttagaatagttttygtaagagtattagaaatgaacagtatggaataggaaactttgttaccatttcaaaattaagctagtccaaaataacatcatttgtgtgatagggaagatgaccaatgtggggtgggctcacagtactctaagacagtgtgtgtacgtgtggcttaaataagcctttcaaacagaagacttcttccagagttttagattcactgctggctgcttagaaaatagcgttcacggccgggcgcggtagctcaagcctgtaatcccagcactttggcaggccgaggtgggcagatcaccaggtcaagagatcgagaccatcctggccaacatggtgaaaccccatctctactaaaaatacaaaaatagctgggcgtggtggtgcatgccgctaatcccagccactcgggaggctgaggcaggagaattacttgaacctgggaggcggaggttgcagtgagctgagatcgtgccattgcactccagcctggacaacaagagcaaaactctgtctcaaaaaaaaaaaaaaaaaaaaaaagaaaagaaaaagaaaaaagaaaatagcattcatggtttagttcccaattctgaagtcttcctcatca

SEQ ID NO: 914966 - DNA, 624 bp, Homo sapiens
tacatatgtcaaatcttaaccaaattttatactataaacatgtgcagtttattgtatggcaattatacatcaagatgttaaaatagggccacaaactcttttctgtttctctcagtaagagatgcattataattctcttcccactgagtctggggtggccttggtgtatcgtttgaccattaggatatagcacatactgggacttctgaacataagtcttaggcattgcatctggccagacgaggtggcttatgcctgtaatcccagcactttgggaggctgaggcgggcggatcatgaggtcaggagatggagaccatcctggttaacatggtgaaaccccgtctctactaaaaatacaaaacaaaaaaaaattagctaggcgtggtggtgggtgcctgtagtcccagctacttgggaggctgaggcaagagaatagtgtgaacctgggaggcagagcttgcagttagcccagattgcaccactgcactccagcctgggtgacagagcaagactccatctcaaaaaaaagaaaaaaaawacaggcattgtgtttttggcacagctgtctgggaacactctctgaaagccctgagctgccacataagaagtctggctaccttga

SEQ ID NO: 914967 - DNA, 644 bp, Homo sapiens
atggtgtatatgtaccacattttctttatccagtccaccattgatgggcacctgggtagattccatgtctctgctattgtgaatagggctgtgacaaacacatgagtgcagttaccttttttggtagaatgatttatttttgtctgggtacaaatataattttaaatgcatctcacagatttcataaatagtatttttgtcatcattcagttttaagcattatatttttatttcttatttgacccacaagatattctgttgtgtttaaaaattcctaaatatatatgtgtatatacacattttaatgttatatttttaataatgaattttatcctaattgtgttccaagcagacagaaaatgcaatctgtatgataccaattctgtggcatttattgagacatcattgtggcttattacagagtcaactttcataaatgtttcatggatgcttgaaaaggatgtatattctttatttattgagtgtacttgtcatgtacatgtacatgagctcaaatttactaattttgttgttatgttgtgttctgtatcttttctgatttttacttgcttgatttatcaagttctrggagggatatcctgaaagttctcatgtgacagaggatttctctacattctgataat

SEQ ID NO: 914968 - DNA, 635 bp, Homo sapiens
tctactggccaaacagagaaatatctgtgtagttgccaacacttctgttgtacatggaggagtaatatatcaggtattatgcagactcagttrtaggaaattaacaaacaagttgcttgattaaaacaagtataggagattaacaaacaagctgcttgattaaaacaagtaaactttttatctggctcattctttgatctatttgactttagttggtttggttcatggagaccctggctaaggagcatactccaaactattgttattatcctcctgatagtcataatggtagtctccctgatatgctgtattctctcaaaagtttgaaatgtatccatgcagccatccatagaataccaaatagtctcttttgactggaacagcaaaaactcaaagaaatacatgatcttgtggatggaccctgtaacctataaatgacatgttgactggaaactcaaaatgatggtaactgagagtagtgctaaagccctaagtctgtcacacccacatctaggtgagaacctgaccaaaaggggggaattgttaaacaaaattatggcaggccatttttttggattgagttcatgcattaggccctaacaaagcagacctaaacaaaatggagtcactcttgc

SEQ ID NO: 914969 - DNA, 629 bp, Homo sapiens
tagagccattctcttacaatccctttattttaaagacaagcagagacccagcaaagttaagtgactgtctcaaatttacacagcttgttaayggcaaagccaggacttaatcccaaagaccttatctcataaagcataaatttcactccactccactgacactctttcataggaaactgatttatttgttttgaatgccactgggtgagggggtagaaaatagttcattaactattttatagcaagaacataaaaaaaaggaaaaaaaaaagttaaaagaaggctagagaaagaaaaaaaaaaataagaaaccaaacaggctcatggaatttggcccaacagcatagggaactctgtagacaatgtagatccacccagttatcacaaatatgagcaaaggagctgaaatatttattcctccacactggctaaaggctagggatggaggtggaggacattaattctacacatttccagctgccctgtgcccaggcaaagcaaatcctgcagctggagctggtactctgagaatatgatgtgggtgctggcaggagggaatgaaagcacgcctggaaccagtgtgcacgaaactggaaaaggactggagggggtatggccaagcactggca

SEQ ID NO: 914970 - DNA, 663 bp, Homo sapiens
ataaaagtttcctttaatatagtcttctgcagtaagtttcctggggggtatatcttatatttctaatattagacatatataagttaataataaatatgccttaaattgatgtttttctgactgcaaaagtaatatataaatgtagaaaataccataggattatatggcttaaaattgataatttcctaaaagttacccttcaccccacaagataagcactgttaacagccaggtaaactatttcttaacttgcatactagcaccctttactttttgactcttgctttcccttcccctttcctggctcacactttgttatcacacttctccctatagtgggtatccaccctttgtgtctgtctagcaccatcattttcctcagataacattcttctctcatgtaaatcatgcattcttgacatggactgccaaccacagaactctatttccctaagcacagcaaacggactgaattagttgtatggctatctctgggcacatcaccatggccatgacaatggaggaccatgactggacagactcatgtcayaatttagaacatccacaagaatgttcctggccaaaagcccagttcttacaaaataggaagtggtctattcatcagacctgcatggatctcagtgaaggtcaaatttaaaccat

SEQ ID NO: 914971 - DNA, 578 bp, Homo sapiens
ttaaattttttttttttttttggctgggcacaggggctcacacctgtaatcccagcacccaaattgggtggatcacctgargtcaggagttcaagaccagcctgaccaacatggcaaaaccccatctctactaaaaatacagaaattagcttggtgtggtggcaggtgcctgtaatcccagctagtggggaggctgaggcaggaaaatcgcttgaacccaggaggcagaggttgcagtgagctgagattgcccattgcactccagcctgggtgacagtgtgaaactctgtctcaaaaaaaaaaaatttttttttctttttttttaactattgatattggggcagataatggaactcataatagtcttcagtacatatcacattatcataatggattcatgcaaagttttatgactttttattttttctatctaatgtgtttgctttatattcttacatatatgtatttatatttatgtattcttaaatatatattcttgtaaaatatatggtattgattttttcttaatttacataattttgcactataaatcacactctgctcacttcttacaatgt

SEQ ID NO: 914972 - DNA, 685 bp, Homo sapiens
ttctgcaagatacctgactagtatttytcaaaactgtcaatgcaattaaaaacaaagtggggaaaattgtcacagccaagagtaaactaatgaggatgacaactaagtctaatgtagtatcctgaatgggatcctggaataggaagggggcattaggtaaaaatgaataaaatctgaataaagttgtaaatgattttagttaataataaggtaccaacatttgttcattaattataataaatacaccacactgttatattaaagtagagttggacaatagttaaagtgctaacccttgcaataggagaaagagccctcagtataaaactggcttactccatgccatacgacatggacaagtggggattcgtagcccaggagcagggtggcttactaagaggagacatcagcagtaaggagatattctcgctaaactgatcttacaggttcttgatgaaagcataccagggtgatcatttgctaaaggtgggggataagaaatttggccagatattaggaatgatcagacatcaaaagtggaggattctttctaaactgacttaacaggattcctgctaaaactggacaatacaggccaaacaaggacagacatttaagttcaaggtcaaagcctagttgagaagaggacttagaggagcctgactggttgaggagcgagtttgcc

SEQ ID NO: 914973 - DNA, 579 bp, Homo sapiens
tccatttcagaacttgttattggtctattcagggatttgacttcttcctataatcttgggagggtatatgtgtcmaggaatttatccatttcttctggattttctagtttatttgtgtataggtgtttatggtattctctgatgatagtttgcatttctgtgggatcagtggtgatatcaactttttcattttttgttgtgtctatttgattcttctctctcttattctttaattgcctggctagtggtctattttaatcttttcaaaaagccagatcctggattcattgattttttgaagggtttttcatgtctctatctccttcagttctgctctgatcttagttatttcttgttttctgctagctttgaatttgtttgctcttgcttctctagttcttttaattgtgatgttagggtgctgattttagttctttcctgctttctcctgtgagcatttagtgctataaatttccctttaagcactgttttagctgtgtcacagtgattctggtacatcgtgtctttgttctcatttgttccaaagaacttatttatttctgccttaattttattatt

SEQ ID NO: 914974 - DNA, 608 bp, Homo sapiens
gcattgcctggcatcgtttgcagtggagaaatatttgaccgaattgcttttctctaatttaaccagtgttatttcagtagagcagattgcaggcaggtcacagaacagctaggagcagggctctgaagacagacttgggtttgaatgctgtctttgcaatgtatataagctgcgtaacttcgggcaatttagtcaatctctctaagtctcagattcttcatctataaaatgagaacaatactaattcctacctcacgttgtttaaatgatcaaatatggcttatgctgtgcatacattaaatgcccagtaactccaaaaggctgttttacttgttattagagaaggtatccattttctttttattcattaaaaaaatcactactttaaaagaacaagtggtcttggtaattagcgttattgctaaatacaaaaaagccacttcaaagaagaacaaaaagcaataacacaactaatggtttcttaagtgggctgtcaagatgtcacactttgattctagtggtcaatataaaaacatttaaattcatgcctaatccttggtatcaaatgagcctctggaaactayaagttattgaaactgtctggactc

SEQ ID NO: 914975 - DNA, 676 bp, Homo sapiens
agttattttttaatgaatattctgtatttggggaatgaaaaagccccgctcagttttaaatgatggtaaatctctgtaatgaactgaatacgtgtatctccccaaaatttgtatactgaaattctaaccccccagtgtgatggtattaggaggtggagcttttgggaggtggttaggtcatgaggatgaagccctcatgagtgggattagtgccttcttaagaggccccagggagagctctagtgcattttctgccatgtgagagtacaacaaaaaagatggcagtctgcaacccagaagaggacctcactagaacccaaccatactggcatcctgatctcagacttccagcctccagaactgtaaaaaatagatgcctgttgtttacaagccacccagctatggtaatttgttatagcagtatgaactaagagaatctcctaaatctgcatgcctgtcttgcagcctcattctccatcattcccccaagtgctcctgacttccaccatgttccattacttgttatttcttgcacataatctgtcacaattctctgtgaaagctctttcctctaactgaaatgttcttccccactttttactcttgggaayccctgactcaaagcttttcagatttaactcaaatgacccttctactatgagaccttctctgtcct

SEQ ID NO: 914976 - DNA, 637 bp, Homo sapiens
tcagcattttcatgtctataaaggattttatttctccttcactaatgaagcgcagtttggctggataagaaattctgcattaaaaattattttctttaagaatgttgaatattggcccactctcttctggcttgyagggtttctgttgagagatctgccgttaatctgatgggcttccctttttgggtagcccgacctttctctctggctgcccttagcatttttccttcatttcaaccttggtgaatctgacaattatgtatcttggggttgctcttctcgaggagtacctttgtggtgttctctgtatttcctgaatttgaatgttcgcctgccttgctaggttggggaagttctcctggataatatcctgaagtgtgttttccagcttggttccattctccctgtcactgtcaggtacaccaatcagacatagatttggtcttttcacatagtcccatatttcttggaggctttgttcatttctttttactcttttttctctaaacttctcttctcacttcatttcattcatttgttcttcaatcactgataccctttcttccacttgatcgaatcagctcatgaagtttgtgcatgcgtcatgtagttctcgtgccatggttttcagctccat

SEQ ID NO: 914977 - DNA, 623 bp, Homo sapiens
ttcaggggacaaagaaactttgtggcactaacagaaaaaagaacagtcagggattttgaagtgagatgtgttcccttttcttcatatccaatgtcctttactaatcgttaaggaggtcaaggaccagggacacagcaaaactagggagtgacaaccctctgagtattgaacatctgctgagaaaggggcggctccaggctattctccagtgcaagaggacaaagagagaagagacgaggtcatcggtgccctgggccatagacacgggagactcacgagggtgatgggaaggcaagggaggaggcagaggggcgtttggagtggcctgcctccaacaacagaggcttccatttgtttcattccattgatgcttagtaagcatattggcctttatatagttcttggtgctagggaggcagcaacaacaaaagacacctgatatctgccctcaaggaactaaaagtctaccaggaaagccagaagttaaatacaccgtcatgtaaaattaattaagcatactctcagaggctatgaaagcatrtggttggcaaagctgacccaatcataatgggcagaacctagtgcaggcctcccataagaaagcatttcagcaaatacccaaa

SEQ ID NO: 914978 - DNA, 634 bp, Homo sapiens
tgtgacatggcataaactgcagaaattaaaattgaatccgtcactgtccattgtaatagctggcaggcaactttccacaatgcagtgttgatgtaattctggcatggagtcattctggatctattttaagtaacaactacttttttccttctcaaggtagttcttaatctttaaccattacattttctctatcacaaaaatctggaataatatttttctaaatcaattaactgatgtaaaatttaagtgaataaaaatatcattggtataatatactcacctttgtaaatataggtgccactgccagcctgctaacagaaagacaaatccaactccactcattttcagatttcagaggttggtggtagtattttcaaatatccatttgataagagaagcagaggcagatctttgcttttttggcatatgtctaccatagccttacagtggatttaaagtacagaaagtaatagttcttttaaccctctacaacttgtgagatcagaaagaaagtaaaaagatacaaaaacaaaacaaaaaagcatagaggtctttaatttaaagaaagtytttctgtaaccaaattttatgagtcagcatttttatatcaataatttacggcaataattatgag

SEQ ID NO: 914979 - DNA, 571 bp, Homo sapiens
aaggaaactgtcactatgtccattttacagattgcaaagattatatctcaagacagtcaaataycttgcctaagttcagcctgagaacagcaaatgtgggagtcagttctagctttcatcttacgttaccaaagcaggtgtgataagtggatgggctctaaattcagagagcagtggggcaatgaatgaatggttggtgaggaagtaagatagactgcccttttcagcaggggagaaggtttagtacattgcctacacacagtagatgctcaataaactttagttcagtgaacaagaaataaatgtcaacgtgtgctagctatcaggtttacaggttaggtgtggaagaggaggtagcagaggtgtcgagtacacacagcccaaggttaaggagccagtagagagaataatgccaaagaagaaaagggaaaatttagcaaaccaggtccttcatagaagaggttgattgagcctggtatcaagtatagaagcaagaattttacctgagtagatggactccttctttgagattgaattaaaaaacagtgaggtatagaaataggtgtatagg

SEQ ID NO: 914980 - DNA, 613 bp, Homo sapiens; identical to SEQ ID NO: 914426

SEQ ID NO: 914981 - DNA, 688 bp, Homo sapiens
tctgggctctctattctgttccattggtctatgtgtgtgttttatgccagtaccatactattttgattacaacaattttataaaatgatttgaaatcaagaagtattatgcttacagctttgtacttttgtactttctcaaaattgctttggctttttagggccttctttggtttcatatgaatgttataattgatttttctattactgtaaaatatgccattggaattttgatagtgattgtgttaaatctatagatttctttgagtagaattgacatttttacaatattaattatttcaatctattagtatgagatgtctatttgttccttctttaatttatttcatgaatagtttgtagttttcactgtataaatgtttctcctctttggctaagattattcctaatagccatacacaattctattctactcaagctatttgagttatttttcacctaattgtaaaatatatcttttttagaataaaaataaaatttattgtaatgtttgttatgattttcctcttgcataatataacaaatatttataataattataaaatacttccatttgctattaaaattttaagcgaggtataatacatacaagaagtcttcagtgtrcaatgcaaataaatttgatacatttgcatatccatgtaaactgaatcaaaccacattagaaa

SEQ ID NO: 914982 - DNA, 568 bp, Homo sapiens
tttcttcccagaaaatgtttttttttcctatcacatagtgaggctgcaaattttccaaacttttatgctctgctttctcttgaatgattttctgcttagaaatatcttctgcaagataccccaaattatctctctcaagttcaaagttccacagaactctagagcagggtcacaatgccaccagtctctttgcatagcaagagtcctttactccagttcccaacaaattcctcatctccatttgagacaagctcagctgggactttattgtccatatcactatcatgattttggtcaaagccattcaacaagcctataagaagttccaaactttcccacattttgctatcttcttctgaccccgccaaattgttccaagttctgcctgttaccctgttccaaagttgcttccacattttcatgtatctttacagtagtgccccattcccagtaccaatttactrtattagtctgttctcacactgataataagacatacccaagattgggtaatttataaaggaaaggtttaattgacttacagtttcacatggctgaggaagcctca

SEQ ID NO: 914983 - DNA, 479 bp, Homo sapiens
gttgtgtccttcctgaattttcatgtcgcattgggtcagcttctcttctgcctttggagtccctgtttaatattacctttaggggcagtctgtcggtagcatatttttccaatttttgcttttggaagaaggctttgcttcaacccagtggtgagcacatgtgaggctgttgtttattaatcgaatatttcccccttttatttttgagacagagttttgctctgtcacccaggctgaattgcagtggcgtgatcttgactcactgcaacctctgccgcctggtttcaagcgattctcctgcctcagcctcccaagtagctgggatcataggcgtctgccaccatggccggctaattttttgggttttttagtagagrcggaatttcaccctgctggccaggctggtctcgatctcctgaccttgtgatccacccgcctcggcctcccaaagttctgcgatgacaggtgtgagcaactgt

SEQ ID NO: 914984 - DNA, 634 bp, Homo sapiens; identical to SEQ ID NO: 913137

SEQ ID NO: 914985 - DNA, 585 bp, Homo sapiens; identical to SEQ ID NO: 913138

SEQ ID NO: 914986 - DNA, 632 bp, Homo sapiens; identical to SEQ ID NO: 913139

SEQ ID NO: 914987 - DNA, 562 bp, Homo sapiens; identical to SEQ ID NO: 913140

SEQ ID NO: 914988 - DNA, 538 bp, Homo sapiens; identical to SEQ ID NO: 913141

SEQ ID NO: 914989 - DNA, 600 bp, Homo sapiens
atgaaatgggctatatcttcaaatactattgttttccattttttaactgtggcaaaacacactcaacaatttgcatcttaaccactgttaagtatacaattcagtgtcattaaatgtattcacaatgttgtgcaagcatcaccaccacccatctccataattctttttgtcttgtaaaattgaaatcctgtacccattaaaaagtgactccccattccccgccctcccagggcaactacagctttactttctgtcttgatgaatcatacaatatcaaatggaatttttaagatatttaaaatcttttgtctggaagcgaagtggaagttaatatcaatggctatgccttcagtgagttctcagaccacattgcaatgtagttaactatttatcttttattacgttctagacctattatttctttctggcacaaaaatatcttctttgtagattatggcatttacctctatctccacacctttctgcgtctgtcatccacagatcatcagcctcttgcttagtctccatttaatgacaatttctatttagtatacaagagtccttcccccygcaatgcaatttcttcactctgaaaagctc

SEQ ID NO: 914990 - DNA, 625 bp, Homo sapiens
ttaaacttttcttctagagacaagttgtagttgtgtatatagagtgtgaatagatagtgtccatattttactgtcattatttaaacagaaacatgcaatttgcacttcaaaaacctactacaaattaactgtgtcatttggaagtgtcaaaattatctcattaatgatcagataggcttttggctcattgtaatgagatgttcctataaacctaatttgaaagacaaagacagagtttggagtctttaattcttggtaaaaatcagtagctctatttagggctatatttgcaaaatactatttcaactcaagcatatttttatttacaaggcacttcacaaatgttgaccacaaagatgtttctacctagcagaaataattatagttacatatagttgtctaggaatatcttaaacatggggtattaaaataactttcaagaacaagaagaaatgttacaccaggcatttttgcaactagtgctctatttcagtgcaatatttgtggcaattaaaamacataaatggcttggatatatagctaagttatcaaaggaaaaatatgcaaaggcatgattattttataaatgtgccacatatgtgacttgaggtacaaatcctctaag

SEQ ID NO: 914991 - DNA, 596 bp, Homo sapiens
ttacaggtcagtggttgttatgtgccatatgttccccactttttaactagcttgtatactgtaattttactattactgttacatcattaaatattgggtgtttggaggtagaactgcatctaaggatcctcatttgcacctaaacctgatttagatgacaaaatgctgagcctgacaccataaagcaatatgatattgggggtttggggagaaatattacgtatttcatatatgagagatctgttaatttttttcttttctttttttttttttttttttttttctttgagatggagtctcgctctgtcgcccaggctgtagtgcagtggcgcaatctcagctcactgcaacctccacctcccaggttcactccattctcctgcctcagcctccccagtagctaggactacaggcacctgcaccaagcccggctaatttttttgtatttttagtagggacagggcttcactgtgttaaccagaatggtctcaatctcctgacctcgtgatcygcccgccttggcctcccaaagtgctgggattacgggtgtgagccaccacgcccggccctgttaattttgttttatattaaaggat

SEQ ID NO: 914992 - DNA, 611 bp, Homo sapiens
atttattacctaaaaaaaatagggcttaattcattaactccaatttgtaatcatctgaaatcttcaggctgctttcaccagaattcccatcaaaactagatcttcacattgactttgtgttggtttctaacagacctttcaacctatttagcaagtctagaagtgattttctgctatttgatgtagctccagctattccaatcagcttgtaaatttcatgaactcatttggtatgctttcctccaagtcaatgttttctaaaaattaaaataggacctatttgaaagatgaccttaactgatattccttgggtatttataaccagtcagctaaaatccacttagcaatactgtcatcctgcccatatttttctaattcattcataatgcaatcatatacaatacctttctgaaatatttggtatatagttttcactagacataacatactttacaaatggtagtctgttataaattgttagtgaatctgttctggctcttagtgactagcaatttctaaaattaataaaaactggcagacaaaagtaaactggcccagagtctacaatttctaaagtatgctttttyctactttttgaaataaagttgccg

SEQ ID NO: 914993 - DNA, 604 bp, Homo sapiens
ctaattttgcatgaacttctcttgccttcgctgggattcatttttaatgcagtgatgatagccttccagtggccgctggcgacatctcaaaatctttggagatgagagagaaggcggtgtttggggagcctgtttactagcaagcttggaggtgattagaacaagtcacgagcatggacagggaggaggagggggccatgatgctgcctctggcttattaagagtgagatcgatgctggaatccctgagggcaaaaaaaaatcaatgacccaggaaaacgacaccagctgacagccccaggaaaaggctcaaggaagagccgcaaagaagagaaaggcttaaggaactttccaaaactctgcactgctaatctcctggggggagaaaggggcctatattgtacagacaatggctgggacccctgacattctggcactttctttcacatggatacaccatcctccctcctccttcacagggcagagggatcccaagtttcctctatcctctgctagtttttgatgttccctttatttagaaaaacaggcaastatctgcattgtcaaacactgctctctagccctggttattgtgatcaggctct

SEQ ID NO: 914994 - DNA, 709 bp, Homo sapiens
caatcaagttgacccaaaaattaaccatcacattcccttctcccagtcagccrctgggaggaattgacagatctcagctcactcttcagaaagtgttatagacccctgctctaagatccaatgttcagaagagactgaactagtgcaaatgtgttattcactacccatcagcaggtcagaggggagtagttcactggataggctcgtagggagaagctccttaagaattaaactctgataacaccatgtgttggcaaggatatggaggaccaggattccaccatatgctgtggttggtagtgcagttggtaaaccactatggtgaggtctttggtgatatctaggaaagtgaacaatgtgcacactctatgatcaaccaacttcactcattggcatttttcctggagaaactgacacatgtgcacaagaacgtgtattgcagctgtgatagtgaaaattagaaacaacaatgcattcacaagatcatggagaagagggctgtgagagagagggactgtggaggtttggtggggaagggaaaaggatggtcaactatagacggaaagcagggtgggttgcagagggaagccttgggaaatgaaagtggcataatggggtctggcagcagagaccttaggagctgggctgctgtcctgttttttggatgaagagagctttggcttcagtagaagcagagttccagcttggg

SEQ ID NO: 914995 - DNA, 589 bp, Homo sapiens
aaaataaacaaaattagcctagtatagtggcrtgctcatgtgatctcagctagctactcaggatgctgaggagggaagctctcttgagccctggaggtcaaggctgtagtgagccatgactgtgccactctactccagcctgggtatctgaacgagatactgtctcaaaaaaaaagaaaagaaaacaaaagaaaaaaaaagccaggatttttattgggattacattgaatctatagatcaatttggagataactgacatctgcataatattgactctttccattcatgaacatcatctctctctttacttactaataattactaattaataatataatattagcaatattagttttgtagtttctgtatagaaaaattttctttgggtttattcccacgattctgattttccgtgctattgtaaatgctgtttttaaaatttcattttctaattgttcattccttatatataaaatacaattgatttttaaattgaccttatatccaatgaccttgctaaaattactcaactgtctgcaagttcttcagagttttatacatacaattatgttgtgattatgttgtgtgg

SEQ ID NO: 914996 - DNA, 589 bp, Homo sapiens
aaaataaacaaaattagcctagtatagtggcatgcwcatgtgatctcagctagctactcaggatgctgaggagggaagctctcttgagccctggaggtcaaggctgtagtgagccatgactgtgccactctactccagcctgggtatctgaacgagatactgtctcaaaaaaaaagaaaagaaaacaaaagaaaaaaaaagccaggatttttattgggattacattgaatctatagatcaatttggagataactgacatctgcataatattgactctttccattcatgaacatcatctctctctttacttactaataattactaattaataatataatattagcaatattagttttgtagtttctgtatagaaaaattttctttgggtttattcccacgattctgattttccgtgctattgtaaatgctgtttttaaaatttcattttctaattgttcattccttatatataaaatacaattgatttttaaattgaccttatatccaatgaccttgctaaaattactcaactgtctgcaagttcttcagagttttatacatacaattatgttgtgattatgttgtgtgg

SEQ ID NO: 914997 - DNA, 578 bp, Homo sapiens
gcatactgacttatgatctgtaacaaaaaaagaaaatgctttaaattgtgagtcaaactgccactttttttttggaatacaattttyccttaaaagaactaatgacagacggtggttattcagatttaggttatgtggcatttttttcaactaagcctgtctctttaagaaaaacaaccaagagcatttgttttcaatggaaaaacttgcgttttcaggcaaaaattagtattctggaaaacttgtatctgctaccatgatccttacagcttcccaacaattattttctgatgcagttaccaatgctggtaattaaccaatatgatgctttgatattatataatgaaatgtgttaaaatttggaagtgctacataacttagggaacccaagtgaccaatacatgatgttacaaaatcacgcaaaggtaaaagatgaattttagataatagagcagaaaaagttcatcaatatggtttcagattccattttgcaactaacctttaggacactaccatttggtatagtgtcttatccacacactacaccaagataatacttctctgttatctatactaca

SEQ ID NO: 914998 - DNA, 674 bp, Homo sapiens
tcaataaataattgttaaatgaatgaatgttcaatacattttgaatcctcaatctctcccgtttttttttttttttggtctacaacccatcttttccctttctaaaccacattctatcctggttaaattctcagcatagaaccttaaaagcacctcaacctaaaaatctgtacttcattggtagctaaccggtaacaggaaaaggacatcaaaactactttcaccttttaccacatgatcttattttattatgatattctcttatgataccaagatatagcagtcttatgaggaaatgagagtgaaaaaggcgagtgatgtcttagtattcttgtaaagataattttgacctgtggaactgctgatttagataagtatatccccattgtttccaggggcagatatgcagatttctcaccacctagctgtttgctttgattgcttgtatagaggtgtctgggtggtaatgaaagcagattacttgtctggcctgttggtatggttaattcaaagctgactgtacctagataaaaataattctctataattatggtttatcattgctcttaaaaattgaagtcactgcttgttaccaatgcgaacatagygtctataatccattctatatcaacacacaagttctataataattacacggcttaaaatattcagca

SEQ ID NO: 914999 - DNA, 575 bp, Homo sapiens
gcatgcacctggtaccgcagccatttgggaggctgaggcactagaatccttgaaccaggagttggaggtggcaatgagctgagatccaccactgaactgcagcctgggcaatagagcaaggctctgtcaaaaaaaacaaaaaacaaaaaacaaaacaaaaaaaacccaccaaaacacaaaaatcaaaatggcagtcactgaaatagtgcagtactgacatgaacagagacagactgtaaccacaggtggcggtgcacacctgtagtctcagctatttgggataatcactggagcccaagagctcgaggccagcctgaacaacacagtgagaccctgtgtctgaaaaatgttgttttgaattgatatataaaagaagaaaatatatattactgaggagattaaggattactcagcaataatttggaatcactggctatgaatttggaggaaaatgcaaatatagattgtcactatatatggaatgaagtctrtatgggattaataaattcttaaaaataaaatcataggaaaatgaggtaaaaattaattgaatagtaaataaacttttaagataa

SEQ ID NO: 915000 - DNA, 621 bp, Homo sapiens
acctgaacatagctgaggctcaattaacaagaatgacagagggagtggattttgggtaacctaacagtaccaactgctatggcccaaatgtttgtgtctccctataaaattgtatgttgaaatgctaatccccaagggatagtattaagaaatggggcctttgggaagtgtttagaccatgagggcagggccctcttgaatgggattagtgcccttataagaagggcctgagggagcttggttgctccttccatcaagtgaggatgcaggaagaaggaactttttgtgaagaatgggccctcaccagatactgaatatgccagcactttgaggttggacttcccatgctccagaactgttagaactaaagtcctgctctgttgcccaggctggagtgcagtggcgcgatctcagttcacggcaacctctgcctcccaggctcaagtgatcctcccacctcagcctcccaagtagctgggattacagacacaccaccaagcccagctaatttttgtatttttagtagagaccgggttccaccatgttggcctggctggtctcgaactcctgacctcaagwgacctcgacctcccaaagtgctgggattacaggtgtgagcca

SEQ ID NO: 915001 - DNA, 610 bp, Homo sapiens
gatctagcctcaatgcggagagatggactgaggaaatgtacgtgaaacaagcatgggagagtttatagagtattagagaaatactaagcctagtagtttaatacaactgaggcctaaagatagccatgttagctcttgcttattaattttttttgttttccaaaaacaatcttgaggcatgtaaaaaaaaaaaatcctgaaatatccatatatagggagcccttagagtgaaattcgttgagcttttactatgtcccaggcactgttctacatgctttccccatattatcaaatttgacactcataataaattgtaaggaagacactgttacagatgaggaaaccgagacatagacgttaagtagctcactcagaatggcattagtttaataagtgaggaaatcagaattctaactcaggcaacctcaatccagagcctgcactcttaaacagaaagctaattttcaattttgtattctccagagtttaaggatcgtatgtcttcgtggaaaactatatatcctaagagaaatgatacagcatagtgcctgatacatagtaatcckgcaagatatgctggcattaatatgataacaaaaatcacattatt

SEQ ID NO: 915002 - DNA, 487 bp, Homo sapiens
gagagtccaagttctgcttggcttatcaaagggaacatcctcctcaaaagaacatgtgggagacggcagaggagcaactagtgtgtgtgttttctcctacgtctaggaggaaaaaactaaatctgtcactttctgcatgtattcacattaaaaaaggattcaaagctgtctatttagaagacagtgccagtaccaatttctgtgccagggagatgatattttgcagttcacagggtagaaagaacaccatttttgtcacatgtttagtattccacaagcagtgaaagttagaataattacctgtgaacgactatgtatgtttctttcatctaattaggtaatctgcccaggtgtttaggaccaaggcctctctaggctttaattagaaaaagtcwaggacagaaactaattagcagcattattccaaaccagaagtctaatgatattaaccacaaatcgctattgcaatcaggagcctttattctaa

SEQ ID NO: 915003 - DNA, 487 bp, Homo sapiens
gagagtccaagttctgcttggcttatcaaagggaacatcctcctcaaaagaacatgtgggagacggcagaggagcaactagtgtgtgtgttttctcctacgtctaggaggaaaaaactaaatctgtcactttctgcatgtattcacattaaaaaaggattcaaagctgtctatttagaagacagtgccagtaccaatttctgtgccagggagatgatattttgcagttcacagggtagaaagaacaccatttttgtcacatgtttagtattccacaagcagtgaaagttagaataattacctgtgaacgactatgtatgtttctttcatctaattaggtaatctgcccaggtgtttaggaccaaggcctctctaggctttaattagaaaaagtctaggacagaaactaattagcagcattawtccaaaccagaagtctaatgatattaaccacaaatcgctattgcaatcaggagcctttattctaa

SEQ ID NO: 915004 - DNA, 487 bp, Homo sapiens
gagagtccaagttctgcttggcttatcaaagggaacatcctcctcaaaagaacatgtgggagacggcagaggagcaactagtgtgtgtgttttctcctacgtctaggaggaaaaaactaaatctgtcactttctgcatgtattcacattaaaaaaggattcaaagctgtctatttagaagacagtgccagtaccaatttctgtgccagggagatgatattttgcagttcacagggtagaaagaacaccatttttgtcacatgtttagtattccacaagcagtgaaagttagaataattacctgtgaacgactatgtatgtttctttcatctaattaggtaatctgcccaggtgtttaggaccaaggcctctctaggctttaattagaaaaagtctaggacagaaactaattagcagcattattccaaaccagaagtctaatgatattaaccacaaatcrctattgcaatcaggagcctttattctaa

SEQ ID NO: 915005 - DNA, 643 bp, Homo sapiens
tttcccaaagaaataatcatgttcaaaactcaatgaaatgttatctcaatgagattgtaatgttgctcagtctttcagaagtcataaaaatagtcatactttttaaactagtaaatgcaattctaggacccaagactaagaaaactgtccaaaatatgggaagacatttttatttatacttttttttttttttttttgagacagcctgttgcccaggctggtgtgcagaggcgtgatctcagctcactgcaacctctgcctcccaggttcaggcgattctcctgcctcagcctcttgagtagctggaattacaggtgcacgccaccacatccggctattttttgtatttctagtagagatggggttttgccatgttggccaggctggtctcgaactcctgacctcaaacaatccacttcagcctcccaaagtgctgggattacaggtgtgagccaccacgcccgatctatttatgttttagactttagttttaggaactagacttaggttgtagacctgaagttacagttggcatccccttgtttatgggagaccagcaaagaattgacttatgaatgatctgtcrgggtagcccttcgcagatggctgagtctttttatccttccttggggatttggctgaa

SEQ ID NO: 915006 - DNA, 676 bp, Homo sapiens
aaacaattcacaatacaaaaaattcaacaaaaaaattaaaacatgatgaaaaacaaccaaacaaatcctacagttgaagaattcaatgaattacatttaaaaaatacaataaagagcttcartaacagacttggtaaagcagaagaaagaatctctgaacttgaagatataccatttgatattacttaattgtagaaaaaacaagtgaaaccctacaagacttatgggacatcattaaaggaacaaacgttcatactatgtaagttacagaaagaggagaaaaggtaagaggcatatacaaactatttaatgaaataatagctgaaaacttcccaagtctggagagagatacagacatccagatccagaaagctcaatgattcccaaatagatttaacccaaaaaggttctctccaaagcacattattatctgttgtcaaaagtcaaagacagagaaagaattctaaaaatagcaagagaaaggcatcaagtcacatttaagaaaatccccattcagctaacagcagatttcttcacagaaaccttacagtgcagaagaggatgggatgatatactcaaacagccaagaatgctatgcccagcaaaactatccttcaggaatgagggagaaatacagtttttcccagacaagcaaaaactgagggaattcatcact

SEQ ID NO: 915007 - DNA, 595 bp, Homo sapiens
ttaggtaattcccagatacaatgggggtacaggcattgggtaaatatacctgtttcaaacgggagaaattggccaaaatgaaaaggctacaggcaccatgcaagtctgaaatccaatagggcagtcattaaacattgaagttccaaaatgatctcctttgacttcttgtctcatatccaggtcatgctgatgcaaaaggtgggctcccgaggccttgggcaactccacccctgtggctttgcagggtacagctcccctcctggctgctttcatggactggtgttgactgtctgtggcttttccagggggacaatgcaagctgtcagtggatctaccattctgaggtctgtaggacagtggccctcttctcacagcttcactagctactgccccagtggggactctgtgtgggggctctgaccccacatttcccttctgcactgccctagcagaggttgtccatgagggccccacccctgcagcaaacttctgcctggacatctaggcacttccatmcatcctctgaaatctaagcaaaggttcccagacctcagttcttgacttctgtgcacccacaggctcaataccatttgga

SEQ ID NO: 915008 - DNA, 604 bp, Homo sapiens
cgtgcataaactgggcaggctgtagacagcaggcttgccaagtaaatactacagccttcctcccaatattgagccctgtcccattgatcctgcaggggagatgtgtagggcatttgttcacggggaggccacaagtttgggcctctcatcactgtgacctcacacccctgttgagtgtgtcgtaaacagaggagccgttcttcaagccccctgccctgagtgcacccctctcattcttttgttattattagcaaattcccccagttcctgatcattctttcttaagcctttagtgactgggtaaggttcttgtggctgactccaagctttcttctaaaaggaatagattctaggggtgagtagaggagacaggaatgtcggagtcagagctcaggaatctgggttccagccccaggtcaatcctagataaactagagggctccttaacttacttccctaggttgactctgggtttttttatcacgctcgacaggactccttatgcatttcttcgaaagagcatccagtcttaacatcatcatttggcctcatttggtttaagaagcagaattagggyaaaagcaatgatggataagcctcattt

SEQ ID NO: 915009 - DNA, 578 bp, Homo sapiens
taaataactctatacaactgagaaacagggtcatttcagtatctcagagttttgcagacagcagcaccagaatatagtccttcctaagtaactttaattttgggggaaaataattagcaagacagaagttacttggaatactaaaaatcaagagatgatttgagaggtcagggacccctcttggccatatggaacactcaaagtgaggcacgcatactcataaaagtggattagatgttgactgggtttggatgataagcacttggtcccaatgaacttcaaaagtaggaaggcaatggccccaataaagtaaacagagtggctggtaagccttctccctgctcatataccccctctttcactcttatttagagattcattattctgagttttcttttctcccaaactttataaacaaatgcacatgtaccaaaggagacagtttattaaggtgcccaccacacagcctggccccaaaattcttcttattatcaacatctaattataatagaacatgttcaatayaagaatgccaagtgagtggatagcccaacactttttccatccctcctttggtg

SEQ ID NO: 915010 - DNA, 486 bp, Homo sapiens
tgacttggcatgaaaacctcaggccttgtggcttctgttttattgatgtcctgggggttataygccgataactccttaaatctgcatttctagtcctaactgacccctggtcaaatcccagagctgtaggtgcctagatcccaactgcctgtttgtcacctgcatttagctatcttatggccatctcagatttaacacggtcaaaacaggactactgatttgttactatatatgttaaacacacctccatgacatatatatatgtataaacacctataagtgcctgttatatacaaatcagcctcatggctgctatctcgtgtatgctttatctgtgtctacattacagctgtatggatctatgtaccacacagcgtgtatgtgtatgtaaagcatagctaccctgattaacccagatatgctttgcctaagatattccaacaatctcaagatttacaagaaagtgctttttagataacagtagcc

SEQ ID NO: 915011 - DNA, 612 bp, Homo sapiens
aatgaaagcattttaaaaccctgatgaaatctctctgcctggatcagaccttcccacttccatgctaagcttctgtgtggggtaktaggacaggcaggtgatgcctccagcccagatggatacatttatggtggggcacaggaaaggctatcaagtttgtttatgttttcccataggaggggccatatttctatggtataaagatgagtgcaaaagtaagatggtttatctgccatgtctgatccatgtggagtttaagtaataaagtttattagtgcccctgatttaatatgacacatttccagtgcaaattactctgagatcatcgtgttcataaaatatgacagaaatcttttaagtgtgagcataagttctgaattaatttaataacccagtctggaaaaaggcatgtggtttaaaacataacattatgcactggactcctgctttctcttccagccactcccatccccgtgccttttttgaaaagcccatctttgtgtccaagtcatctgacctcttctcagagttcagggttttaccttctccaggaggttagtgtggctaaggagggaggatttgtccccgtacctgggggcagaagttggtttt

SEQ ID NO: 915012 - DNA, 621 bp, Homo sapiens
aatgtcatttcttgcatccctgaacttgtatgtgattgcattgaatctaatgatcrtaaccatagcagtgatatgaacaaggtatggcactgagatttattaatagcaaaacattcattctgaaatagaggcacatcctctaggtgtaacttggagtgggaatctcttttgtgctgtaaattccatcaaattccatcagtcggttgaagttaaaatgtgcatttataatcattgcaagactaaagagctgcaataactgtgaaagtgagtgttgttacttttacgtacaggaattatgatgaactttcaaatagttacataaatacgggaagagtcagcacttaattagagtcataggggagtaatgctagctagacaactttagggaaaacatatccttgtatcctatttgggagccaaaactattataaaatcctaaaaaataacttttaataactttttattaaagttgattagctgatgtcattaaatctcatttttacagaattatttgttgtagcaacatgcatgacattaaataaaacaacctttcagagctgttttcatttttaaatatttaattccctcgaggccagaaatctttcaagaaaaagtctcatt

SEQ ID NO: 915013 - DNA, 592 bp, Homo sapiens
aacctaataatgcaccttaaagactagaaaagcaagagcaagccaaactcaaaattagtggaagaaaagaaataatakagactagagaataaataaattgaaaagaagaaaacaatgcaaaagattaatgaaacaaaaagttggtttttcgaaaagttaaacaagattgacaaacctttaggcagactaagaaaaaagagaaaagatccagataaataaaatcagagatgaaaaaggagacattacacctgatactgcagaaattcaaaggctcattagtggctgccatgaacaactgtatgccaataaattggaaaatatagaagaaatggacaaattcctggacacatacaacttaccaagattgaccataaagaaatccaaaacgtgcacagaccaataacaagtaaaaagatgaaagccatgataaaagtctccctggagagaaaagcccaggacttgatggtagatacactgctgcattctaccaaacatttaaagaactaataccaatcctacccaaattattctgaaaaatagaggaagtgggaatattccaaacttattctatgaggccagcattaccttgaaa

SEQ ID NO: 915014 - DNA, 611 bp, Homo sapiens
  misc_feature 65, 112: n = A,T,C or G
tacttatcaataataacattgaatgtaaatagtctaaatactccaatcaaaagatatagagtggntgtatggacattaaccaaatacgtagaccattaacccataatactanacaaaaaaacccaccaccaccwataaaaaacccaagacccattgatctgttgcctgcaagaaacacacttcacctataaagacacacagactgaaaatataagggatggaaaaaaatattccatgccaatggcaatgaaaaagagcatgagttgctatacttacttctatcagacaaaatagctttcaagatggaaactataagaagagacaaagaaggtaattatataatgataaaggggtcaattcagtaagaggatgtaataatttaaaatatatatgcacccaacactggagcacctagacatataaagtaaatattattagagctaaagagagagacagactctaatacaataatagctggagactttcacactccactttcagcattggacagatcttctagacagaaaatctacaaagaaatatgagatttaatctgcattatatacaaagtagacctaatagatattatacagaacatttcattcaacagc

SEQ ID NO: 915015 - DNA, 616 bp, Homo sapiens
  misc_feature 144: n = A,T,C or G
tgtgaattaagggcttgggctggaggacagtggcctaactggtgttcacctgcacataggtatgcaaaggtagagaacattacttyactgtgaatgtatttgtaaagtagaaaaactctctttcatagaaaaaaaatcacaccntaataaaccactttgggaatcagattttctgaaagcctaggcacccaagtttcctttcccccttatcaatttatggacccttttaatgtattgttttggtggggatttatcttataacagctttttgaaatgtacttcacatttcataaaattcacccatttaaagtgtacacagtggtatatagtatattcacagagttttaaaatgatgacagcaatcaaatttagaacatttcatcaccctgcgaaagaaatctacaacccataagcaattgctccctattccattcctactccatcagccctagacagccactaatctgtctcttctctatagatgtgccatttctggacattttctataaatggaaccagagagtaagtggtcttttgtgattggcttctttcacttagcatatttccaagattcatctatgctgtagaatggattattcatttctttttattgttg

SEQ ID NO: 915016 - DNA, 616 bp, Homo sapiens
  misc_feature 144: n = A,T,C or G
tgtgaattaagggcttgggctggaggacagtggcctaactggtgttcacctgcacataggtatgcaaaggtagagaacattacttcactgtgaatgtwtttgtaaagtagaaaaactctctttcatagaaaaaaaatcacaccntaataaaccactttgggaatcagattttctgaaagcctaggcacccaagtttcctttcccccttatcaatttatggacccttttaatgtattgttttggtggggatttatcttataacagctttttgaaatgtacttcacatttcataaaattcacccatttaaagtgtacacagtggtatatagtatattcacagagttttaaaatgatgacagcaatcaaatttagaacatttcatcaccctgcgaaagaaatctacaacccataagcaattgctccctattccattcctactccatcagccctagacagccactaatctgtctcttctctatagatgtgccatttctggacattttctataaatggaaccagagagtaagtggtcttttgtgattggcttctttcacttagcatatttccaagattcatctatgctgtagaatggattattcatttctttttattgttg

SEQ ID NO: 915017 - DNA, 677 bp, Homo sapiens
ggcagccagcagctcctatcagccaattgcccagatcctagctgctgtctggctcctggagatataagctgcccaggaattttcaaactgggtttgcagacccctgatagccacacccctttctcctcttagtcatccagagaggttctgagggaaaatgacagctctggctagcttgaagacaggtggaatgagcatgtaaccaggccccaagacttcaagtatatccagagagctagcaaatgaaagtaccctgggcaaaggtggttatcccaagggaggatgttggtagaagtggggaaaaaagaggaaaagtaagatgtgtgagatgcctaaaacagccaggacattttttaatgctttttccttttcctttttagttccatgacaatcctgctaggtagatgttgctatcatattttataaatgagcaatagaaagttcgagttaagtagcttacctaaattacataatgtgtaagtacgagagttgggtttcagactcttgcttgtcttattctaaagtccatctactttccactctgacatgcgcttttccaggagtaagaggccagagaaaggaacaccctctcagccctgccttycttcttctcgatttctttcagggtcccagagatgaaagggccagaaggcaaagggggcagttatccggggcag

SEQ ID NO: 915018 - DNA, 597 bp, Homo sapiens
ccatatactcctaatgctgaagaatttctgcattggtaaagtataaaaccagtgtaaatctgtacctttctcttttcttcttgaaactgaaaaggkttttttttttttcttgtagggactcacaaaatctatgagagaaaccatgtcagttcttaatactttattattttcagctcttaacaaacatatacaagtcattttaaaaaatgcacaaatgggccaggcatggtgactcacacctgtaatcccagcactttgggatgctgaggcagaccgatcacctgaggtcaggagtttgagaccatccatggccaacatggcgaaaccctgcctctactaaaaatacaaaaatacaaaatacaaaaatacaaaaattagccaggtgtgatggtgggcacctgtaatcccaactacttgggaagctgaggcaggagaatcttttgaaccagggaggtggaggttgcagtgagctgaaatggtgccactgcactccagcctgggcaacaaagcaagactgtctcaaaaaaaaaaaaaaaaattgggaaattgctgaacatttctaatgtatatgttctacagtactcaagcaggtatttc

SEQ ID NO: 915019 - DNA, 542 bp, Homo sapiens
aaacatttaaaaaaagaacaatacatatggagacatgtatttctagactttaaaggatttttataaaaccactataattaagtgtggatgataatagaatagaataaaaagattctgaaatagaccatartttgtaattaatcaaaggataaagatagtactttaaatcaatgaacagagatgattattgaataagttgttctgtaacaattggataactattaaagaaaacagctagatacctgcctcatatcacccaccaaagtaaattctagatgaaagaaaaagataaccataaaatatgaaattactaatgagctataagaaaatgtaggtaggtatccatctgacatcacataaaagcaaaataagaaattatagatgaacacattgaaagattttaaaacataaaaaactcaaaacccatattcatccaaaaactgtaagcaaacttaaaagatttattattgtgtatttggggattatttgcaccaccaagatagagctataaatgtataaatacaaagctatcaatatattgt

SEQ ID NO: 915020 - DNA, 618 bp, Homo sapiens
taatatcaaaaaagagtgaatgcctaatatttctgtgttcccctgatgaaataatgcaacaacagcactataagcttgccaaaaggaccgaacaagagtmtgatcaatccttttggtccaatttaaatttgtattcccaatttatagggaatacaaatttccagaagaaacataacgaactgcatcctgagtttgcaaaattcaaactttaaaaactctacaggtctaataggcccagggtcttcaatagataactatatagaaaacaaaaggatggagaagaagtctgtagactaagtgagatttaatggacataaaaaaaattgttttcattggcaagattaaactttagcatcaaagaatggacacatagtgtttgaatataaagaaaggcaaagagctgattactgtggatttcaagatactggctacttttggaatgagggagggagctgtgattggaatggagctcatagaggggtttttggtgtggctgaccaagttccatttcttgacttgggtacaagactatttgtcttataattctttgagtgttacatttgtttagtatggtttaattttaacatgaaatagttttaaaaaaaaggaaaaaatgta

SEQ ID NO: 915021 - DNA, 632 bp, Homo sapiens
ataaagtatcttgggcctgggggccaagtctaaacacraaatgtatttatgtttcattatatgccttacacacatagcctgaaggtaattttatataatattttaaataattttgtgcataaaacaaaatttgtgttaagtacttctgtgtggaattttccacttggagtgttatgttagtgatcaaaaagtttcaacttttggagcattttagattttagcttttcacattacagacactcaacctgtattggccttgctgtgagatggtaccagtttcgactgttgtccccattatttttagcctttcacctctcagtgtcttatcaataaaataaggataattataattacacctttgaattgtgaagttaaaatatgataacatatgtaagttatattacaaaaatgatggaacatctcatactcaaagcatccacgaatttcaaaggaactcagtttcctttcaggagtttcaacaatgtttttagtttcctatgtctaactgggaaatcattactttgaaagaataccttgagctttcatttatcatgataaaatgtcatatactgtagtattatggactatatctcaattggaaactagaagttcaaggattggaagagcggagg

SEQ ID NO: 915022 - DNA, 626 bp, Homo sapiens
tgtggttttgttagagtcctttataggactgactttggctgagagctttagtggtctagaacatccaagatggcatcatttacatgtgtgctgcctcgactgagctagctggaaagactggcagtgggatrggccttattctccaacatacatacatacgtatgtatatatgtttgatacatatatacatacatagatgtgtgtgtatttattttttatagttatatttcaaggctccaagatactaaagcagatgctgtcaggagtcttaagggctggcataaccggcatactgtcacttgttgatatcttcttggttaaaatgagtcaaaaggctagcccagattcaatagaagggaaaatggactccacttttggtaggaggagcagaatacagacactcctgaacttatgatggggctacatccctataaacccatcataagttgaaaacgtggtaagttgaaaatgctttgaatacagctaacctgtcaaacatcgttgcttagcctggcctacctcaaagatgctcagaacactcacattagcctacatttggtcaaatatctaacacaaagcctatttataatagtgttgagtatctcatattatttactgaatactgc

SEQ ID NO: 915023 - DNA, 584 bp, Homo sapiens
ggatctgtgcatgttttcatttgcccttgacatgtgccccaagtaatgcaacattcactcttaaacctatattgtttcattgattaccattaaccaaatatttctggtttatgtagctatattcaaaatatattaaaaatattcttcaccaaactccccagtgtgaaaaacatgatgaaggtccgtcctaaggatgtcttggctaccacatctccaaatccaacggttgacgttgttgccatgaccaggtaaattgactcaaaatatgatatattctgtgaatttctacctttgagccagggatcaccagaattttccacctgtccaaagaagagaaaactcaggaaacatctgaatagaatccaagagaagatttttaaagaataggcaaaacattagattaattgcacttcattcaatccaaatgaaataccaaatggctttcaggttgctatgaaragtttacataaatggaaaagtttgtaaatcatgggtagtgagtgtaaagtcttggtttccttaatcgtgatcattgccgaaatctgagggggcttgtagctgcagcacagcatttgaaaagctcc

SEQ ID NO: 915024 - DNA, 467 bp, Homo sapiens
tgtccttatcaaccattttctaggctgcatacagtgaccactacatgaaagtaaaagcttgtgtgttgtagctgcatgaaggctcattccctccaccctgactaccatttcttttcacctgtatattacatctctttacattcacggaaggaattacagaagcattccgtttgttgcagttaggatatagctggccagagcacctcttacttcttttgcttttcgttaaatagcaccagggaagaaacagaaaaagatgcaaatatttgtactgaacacagaaaaaagagaacagaggaaagagcgagcaaagagaggtcaagagggaagtcacgtgyatgaaaggcaagcatggactcagaattaaatggaaagtaaggtcattctctgcaagcactttagaaaaggaagaccaggtccagccaagggctagcacaccttgcctggagcatttcatggaaatgata

SEQ ID NO: 915025 - DNA, 596 bp, Homo sapiens
aaaatcttaggtatggacatcctctgaggctgaagacattactcagtaagggggctgtgagcagctggagctgatatttccttgcagatkctgaaaggtgtcctgccaaagacacctgcgtggagacaacggtagctatcccaataactaattcctatagttttattgagaattaggttatgtaagatatataagaaccagaaagcagtcttaaaattttatttatttatttaatttaattttttttgagacagggtttcactttttcacccaggctagagtgcaatagtgcaattgaactcaaataatcttcctgtctcagcttcctgagtagctgggactacatgtgcacactatcatattcagttatttatttatttatttattattattttgtagagatggggtttcactatatttcccaggctgacgttgaactcctggcctcaagcaatcttcccacctctgcctcccaaagtgctgggactgcaggtgtgagctactgcgcccgaccctaagattttaatattattatatttggctactggggtggaaggaactctaaatttattaagtaattttttgaacgttctggt

SEQ ID NO: 915026 - DNA, 612 bp, Homo sapiens
taattacctgatatttataggttggtacaaaggtaattacagtttttgccattaaaagtaattccaaaacccgcaattattttgcatcaacctaaatacaargcacttcctttaagttttgtgatctttcattatagataaaagtaaaatgtgggtggtcacaagaagatgccacagtgcaggattcaagaccttttgtcacctcctggctcactgcatgcttgctctttctctctctctctctgtgtctctctctgtctcttttacattttccttcccctacctgtgttacagccttatccctccctatgtgtcatgcaacacaattacatcaccacttagcttcctcaggattggtctttataatgccaagaatgtcaaaatgtatttttcagcaaattcattgacttttctaacatgcagtattttctttcttccttatatttttccatatcctcaccaggactaattttttttttttttttttttacttaagatggtagagagagaattatttatgttattgactacattatattgaataagtgtgccactttttattttatccctcaacagtaaacacaaacctttctaaaattccttaggatatga

SEQ ID NO: 915027 - DNA, 578 bp, Homo sapiens
cagtcactgctcttatagatctcacagacctccactcagaaagtcacsatgcaagagattaagtgccctcctaaaggcaggcatagtgtactgtgaggggatggagaaggaagggtctgcctcacctaccagagccagggacagcatcacaatcgaggtgactgtttaaggcgagacctcaaagatgggttcagacttttcaacgaaaaagaaggaagctagatggttatgctgagaagataatctaagcagaagaaacagaaactcctaatctaagcagaggagggagagtcatttgaaatagttgagccacgagtgggtgtggggatggggcagagggtgagactacaagggtggactggagcaaggtcacaaagctgctgtgtgccccattcaagaatgtgagcatttctctgcagtgacggggagccatagagcaggcttaggatggggagcaataggaaagatttgtttttcagtaacattgctctgatggcactgggaagagtggtttgaagaggtaaagcctatgtgaaaagaagctagcttggcagatttcatttgtcacagcccagggg

SEQ ID NO: 915028 - DNA, 638 bp, Homo sapiens
ttaataattttcaatcatcatctttaacaacatcatcatcattatcattatcaaaatcatcatcatcgtcatcaacatcaccatttctaaatggttctggctcgatggtagaatggtgaagttattcactaaataaacaaatgcagtaggcagcaccagagagaatcgtcattgaacttttccaacataatgtgaccatcaaccaagtctaagctgaagtgcaggcgctgtctagtttcatgcttgtgtaggtaggaatcaaaaaggtagactaaacttacttcatatgtactttcaactttaatgaattaaattgaacactcatggcagaggaagatagaaagccaagagaaaaaaaaaaggagaaaatgggagagaggggaaaaaaggaaaatttaaatagtagagctaaaagaactcatccaataaacatttgccttgtggctagggacaagaaatgagtgtccacatggagtttgtcaacatggcattcagtgtctagaggtgcacacatcttagataacatattcccaagcataaactgacccctttatctgtgcccaaataaaaacggggctatgtcatccaatgttgatgtattggacmtgtgaaatggtatagtttccaacatgccattt

SEQ ID NO: 915029 - DNA, 638 bp, Homo sapiens
cgagattttactggggtaaatcatgtcactatgtagacatgattgattaaattatgtattgcttgtgtgattgagcttcatttccaagccccctcccctccccagaggtagcgtggctgaaagttccaaccctctaatcatgtgtctggtctttttggtgaccagtccccatccccatcatgaaggtatctaggagctgccatgagtcacttcattattgtataaaagacattcctatcactctggaaatttcaaggatttttgaaactcatgccaatagcaagaggacaagaccaaatatagagtttattgtaccacagttgtgttagtcaggattctctagagggacaagagtttaagtattaactcacatgatcacaacgtcccatacagcgtggcagaaagatgtaggctgggaggctacgcacaatgttaactatcacaagtccaccccttgtcgacttgaacccatacacatcttctgagatcatacataatcttcaaataaagacaataataaagtcataattatgcctaacataatacaactgtccttcatacaactggaaacgcaccaatyctcaacccaatttttatttacatattaatagatatacatattaaatatacatattaaa

SEQ ID NO: 915030 - DNA, 638 bp, Homo sapiens
cgagattttactggggtaaatcatgtcactatgtagacatgattgattaaattatgtattgcttgtgtgattgagcttcatttccaagccccctcccctccccagaggtagcgtggctgaaagttccaaccctctaatcatgtgtctggtctttttggtgaccagtccccatccccatcatgaaggtatctaggagctgccatgagtcacttcattattgtataaaagacattcctatcactctggaaatttcaaggatttttgaaactcatgccaatagcaagaggacaagaccaaatatagagtttattgtaccacagttgtgttagtcaggattctctagagggacaagagtttaagtattaactcacatgatcacaacgtcccatacagcgtggcagaaagatgtaggctgggaggctacgcacaatgttaactatcacaagtccaccccttgtcgacttgaacccatacacatcttctgagatcatacataatcttcaaataaagacaataataaagtcataattatgcctaacataatacaactgtccttcatacaactggaaacgcaccaattcycaacccaatttttatttacatattaatagatatacatattaaatatacatattaaa

SEQ ID NO: 915031 - DNA, 638 bp, Homo sapiens
cgagattttactggggtaaatcatgtcactatgtagacatgattgattaaattatgtattgcttgtgtgattgagcttcatttccaagccccctcccctccccagaggtagcgtggctgaaagttccaaccctctaatcatgtgtctggtctttttggtgaccagtccccatccccatcatgaaggtatctaggagctgccatgagtcacttcattattgtataaaagacattcctatcactctggaaatttcaaggatttttgaaactcatgccaatagcaagaggacaagaccaaatatagagtttattgtaccacagttgtgttagtcaggattctctagagggacaagagtttaagtattaactcacatgatcacaacgtcccatacagcgtggcagaaagatgtaggctgggaggctacgcacaatgttaactatcacaagtccaccccttgtcgacttgaacccatacacatcttctgagatcatacataatcttcaaataaagacaataataaagtcataattatgcctaacataatacaactgtccttcatacaactggaaacgcaccaattctcaacccaawttttatttacatattaatagatatacatattaaatatacatattaaa

SEQ ID NO: 915032 - DNA, 539 bp, Homo sapiens
tgggattattgccacattaagacaaactgtagtagactcttttctgagacgaagagtgagaaaatagcatctacaaaaccactcactgagcacaagtctctttyagctttttgtttttgcagtttttggcactgctgaaaccatgccatgaacctgctgctatacttagtactattttattcaatccttaataatctactcttagactccataagcgatttgccttttttatgggctacacagtgcgagtgtacaaaaaagttgctgttgctaccactacaacttcaaactgccattaattaaagtggtcatctttttttaccaccagttatgcaataatgtttcaaatttacaacctgtatgggatcaggcaattctatagatccacatttagtatttcaaattaataatggccaaagtgttacatgccttttattttgcaatgctagatagtggaggtgtttctcagtcagacataacgtctattcaaataaaacattcaagtaaaggaaatacaatcacttcacataaatttgttc

SEQ ID NO: 915033 - DNA, 539 bp, Homo sapiens
tgggattattgccacattaagacaaactgtagtagactcttttctgagacgaagagtgagaaaatagcatctacaaaaccactcactgagcacaagtctcttttagytttttgtttttgcagtttttggcactgctgaaaccatgccatgaacctgctgctatacttagtactattttattcaatccttaataatctactcttagactccataagcgatttgccttttttatgggctacacagtgcgagtgtacaaaaaagttgctgttgctaccactacaacttcaaactgccattaattaaagtggtcatctttttttaccaccagttatgcaataatgtttcaaatttacaacctgtatgggatcaggcaattctatagatccacatttagtatttcaaattaataatggccaaagtgttacatgccttttattttgcaatgctagatagtggaggtgtttctcagtcagacataacgtctattcaaataaaacattcaagtaaaggaaatacaatcacttcacataaatttgttc

SEQ ID NO: 915034 - DNA, 621 bp, Homo sapiens
cccagataacttttgcatttttagtagagacggggtttcaccatgttgtccaggcttgtcttgatggtcgttatgttttgstgtgtttttgcagtggctggtaccagtttttcctttccatatttagtgcttccttcaggagctcttgtaagtcaggcctggtggtgattaaatcctttagcatttgcttgtctggaaatgattttatttctccttctcttatgaagcttagtttggctggatatgaaattctggtcaaaaattgttttctttaaaaatgttgaatattggcccccactctcttctggtttgtagggtttctctggaaagatccactgttagtctgatgggcttcctttttaggtgacctgacctttctctctggctacctttaacattttttctttcattttgaccttggagaatctgatgattatgtgtcttggggttgatcttcttgtagggtatcttagtggtgttctctgtatctcctgaatgtgaatgttggcctgtcttcctaggttggggaagttctcatggataatatcctgaagtgtgttttccagcttggttccattctccccgtcactttcaggtataacaatcaatcacaggtttggt

SEQ ID NO: 915035 - DNA, 578 bp, Homo sapiens
gtttggctgtgtccccacccaaatcycatctcaaactgtagctcctataatccccaagaatcatgggatggacccagtgggaggtaattgaatcatgggggcaggtcttaccatgttgttattgtgatattaaacaagtctcacaagatctgctggttttatacagggcagttgccctgctcatgcattcttacctcccacaatgtaagatatgcctctgctcctccttcaccttccgctatgattgtgagacctccccagccatgtggaaccatgagtccatttaacctctttttctttataaattatccagtcttgggtgtgtctttattagcagcataagaacagactaatacagtaaatttgtactggtagagtggagtgctactataagaatacctgaaaatgtggaagccactttggaactgggtgacaggcagaggttggaacagtatgaagagttcaggagaagacagaaaaatgtggggaagtttggatgttcctagagattgtgagaactcagaagacagggagatgtgggaaagttggaaattcctagagacttgttgaatagcttt

SEQ ID NO: 915036 - DNA, 650 bp, Homo sapiens
cagacttatctacactattgaccaaatgatctaatagatatttacagaacatctcatccaasagctgtggaatacaccttcttttcctcagcgcatggctcattctcaagtacataccttatgttaggtcacaaaaaaagtcttaaaacattcaaaaaaattaaaataatattaagcatcttctctgaccacaatgggataaaactagaaattaataacgagaaattttggaaactatacaagcacatataaattaaacaatatgttcctgaatgaccagtggtccaatgaagaaattaagaaagaaattgaaaatttttttgaaacaaattatattggaaacaatataccaaaacctatgggatacagcagaagaagtgcccagagggaagtaattcaaatgaacaatctaaggatgcatcttaaagtggaaagtcaagagcaaaccaaaccccaaattagtggaagaaaacaaataataaagagcagagcaaaaatgagtgaaattgaaatgaaaaaacaatacaaaaaatcaatgaaacaaaaagttgttttttgaaaagttaaacaaaattgacaacctttagccagattaagaaaaaagagaagattcaaataaaatcagaaatgaaaaagaagatattaaaaat

SEQ ID NO: 915037 - DNA, 586 bp, Homo sapiens
atatagctggtaccttataaatcataaatcaaagtggcatttgtccctgtgaagatctttgccmattgaaagcctttctcaaagtgttagaatgttcttattccttcattctttagatacatagagtgctcttatatgcaaagtagggtgctaaatgcagaataaaatgaagaatgagatagacagagattctacacacatagtccatagagaataatggataattaaaatcaacaaatagataactacaatgcctattttgatgtctgtgataagacaagtactgggtacctgaaaacacaggagatgaatctaatttagatctgtgacacacacacatgcacacacacacacacactctacatatatatgtatatatatatacatatatatgtgtgtgtatatatatatatatatatatatgtatatatatgtagtaccttgctatgttgcccagggtggtttctaactcctggactcaagtgatcctcccacctcggtctctcaaacaaactacttcttagagggtgtagcaacagctgaatccatatgaatgagaaggaatttgggcaaagggcaagaagga

SEQ ID NO: 915038 - DNA, 639 bp, Homo sapiens
gttggagctgagtgcctgcagctttttcaggctcaagatacaagctgctggtggctctaccaatctcaggtctggagggttgcagccctgttcccacagatccaccaggcagtgccccaatggggactccatgtgcaggctccaatctcacatttcctttggcactgacctagtagaggttccctgtgggggcttcacccctgtagcaggcttctgcctgggcacctagcctttcccatacatcctctgaaatctaggtgaaagttgccaagcctccttcactcttgcattctgtgaacctgtatatttaacaccacattgaagccatcaaggcttatggcctgcactctccaaagcagcattctgagctgtacctgtggccctttgagctgagcctggagccagagttgcctgaaggcagagagtagcatcctgaggctgagcagggcacctataccttgggcctggcccctgaaaccattctttcctcctaaaactctgggtctgcgatgggaggrgctgtcctgaagacttctgaaatggcttcaaagccttttccaattgttttggatattggcacttggctttagtcatgcaagtctctctagcaagtggttgctctacaggatccctcccctg

SEQ ID NO: 915039 - DNA, 639 bp, Homo sapiens
gttggagctgagtgcctgcagctttttcaggctcaagatacaagctgctggtggctctaccaatctcaggtctggagggttgcagccctgttcccacagatccaccaggcagtgccccaatggggactccatgtgcaggctccaatctcacatttcctttggcactgacctagtagaggttccctgtgggggcttcacccctgtagcaggcttctgcctgggcacctagcctttcccatacatcctctgaaatctaggtgaaagttgccaagcctccttcactcttgcattctgtgaacctgtatatttaacaccacattgaagccatcaaggcttatggcctgcactctccaaagcagcattctgagctgtacctgtggccctttgagctgagcctggagccagagttgcctgaaggcagagagtagcatcctgaggctgagcagggcacctataccttgggcctggcccctgaaaccattctttcctcctaaaactctgggtctgcgatgggaggggctgtcctgaagacttctgaaatggcttcaaagccttttccaattgttttggayattggcacttggctttagtcatgcaagtctctctagcaagtggttgctctacaggatccctcccctg

SEQ ID NO: 915040 - DNA, 577 bp, Homo sapiens
tattcctacagaacaatccatttttacctttaaagatgagtttgtgtacttcagaagatgtgacgccagttggccaccatctcaatcagtagtaagtcacaccatcaatcccttgttaatgatggaactcatgtgaagtcaagaggaaacataatactctttacctcattccctggtagcagagaagttgactcatctttaatgtcagttattgagatgtaacacagaatcatattctacagaaaatatgtgataaactttacacaaatgaatacactttagaaaggcagtcatttggattttctttttgtcagagaacattgcaagtcttcctgaagaatttctgagaaattaaacactttatatgacattttacagcatgtagagaggttgaaactcagagaactaaaactcagatgatagtctaaatacttaatttgttgctgctttatgctggacatgaaaagtgtgagcttaaattataaataaaaaactrttgagctatcaaactatttggggtacatccttatctttcctctaaattactctttattcccattaaaatccacctatcccg

SEQ ID NO: 915041 - DNA, 635 bp, Homo sapiens
atcaaaacattttgatcaaaaataaaatatagaagttcttattcccttcatttccacacaaaatcacacatggggcacagttgtctcctttaagatatacataaatacttttaccccaatcacattcaccccatgcacattcccactcacacatttaccacatgtacatctaaatgtcaacaaaaatacaacacagagagagccaagtggaaagcagatgatagattaagttaggctatacaatgaagaggggagaaagaaaaaggcggcaaaaaaaagctgatcatctgaggccatggcaatccctttacaccaaaatcctttcttgagacctgcacggtgactcctcccaccacatcacagccctagctaaaaggagcaagcaaattccagctacttgggaggctgaagcaggaggagagcttgaggtcagaagttcaagaccagcctgggcaccacagccaccctctctctcaaaaataaaaataaattagccaggtgtgatggtgggcacctgtagtcccagctacttsgtaggctgaggctaggagtttcagtgagctatgatagtaccactacactccagcctgggagcagggccagaccctcatctctaaaattaaattaaattaaag

SEQ ID NO: 915042 - DNA, 633 bp, Homo sapiens
taatttcactcccttcttttaataggtagagaagatgaatcacagaaaggctagtatttgtctcaaggtcatataaatgctagtatagcatctggggtcactggaaacgccagagaatgcagaaaatgccaggwctcctgaaattggcatgtggtccttaaaatgctctgaatcggccgggagcggtggcttaacgcctgtaatcccagcactttgggaggccgagacgggcggatcatgaggtcaggagatcgagaccatcctggctaacacggtgaaatcctatctctactaaaaatacaaaaaaaaaaaaatagccgggcgtggtggcgggcgcctgtagtcccagttactccgggaggctgaggcaggagaatggtgtgaacccgggaggcggagcttgcagtgagccgagatcgcgccactgcactccagcctgggcgacagagtgagactctgtctcaaaaaaaaaaaaaaaacaaaaacaaaaaacaaacaaacaaaaaaaaacaaagaaaaaaagaaaaaagaaaagaaaaagaaaaaagaacactctaaatcatcccaccctgcagcagtcacaccaaatccttcatttcatagctttgtgaacactgcaagaattcggctcct

SEQ ID NO: 915043 - DNA, 613 bp, Homo sapiens
tcagtttcctggttttgataatggactatagttacgtaagatgtcactggtgaggcatgtgggtgatggatgcatgagacctctctgtactatttttccaagttcttgtgagagtacaattatttcagaatataagtttaatagcccactatcttttaagtttaaacaatgatgtggttcagagaacactcatggcttccctgctcagccatcaaagagaattgtgacttactgaatataacaataacctcaaagtcacaagtcacagttatgtgttttggctgtgctacttataatgcatgtgacacaggccagtaagttactcaaattttaagtttgagctttttcatttgtaagatggaacaatcgtgacactcaaaagatgaagaatgagtttttttccccattaattgtaaagtaccaaagcatcataatttgagagccataacaagattgggcaaattagaaaaaatgctgccaygtataattcaataacaagtgtccaattattacaaaactataccctaagtcaggcgacattcctccagtcttacaagtatggagaggtaagaactgattcaattgctaaggctagtaagctagttccagcctg

SEQ ID NO: 915044 - DNA, 571 bp, Homo sapiens
tcctgtgagaggtagaaaggggtgggctgagtaaacaacgcacccctgtcttgaattccacaaaggagtcaagaaaatatcctgcttcaataccagrggggctatgcagcgatgttatgaatgaccatcagattagagagaagtggtgctgcagaagtcccgagaggagaaattgtccaggggaaggtgactcaatgccacagagaagacaggtgagatcaggactaaacttgcccttttggtttggtaagcagggaatgtaagccaaaaataaaattctaagcccttccagctgagtgacggacccctccctgccccccatctctgccaagggcattccaaagaattatgaaaaactagtacaggccgtgatgggaaggaagggtctgacacgcctcattataccctcctccctttggaattcaggtatgactaaccagcactaaccttaaaacagcaatcttaggactgacaaaataaactccttgtagcaataagataccaacatgacagataacaggccctgaaagaaatcaaagtattttacctgaaaacatatttctttgacata
